United States Patent Application Publication US 2014/0057251 A1 - sequence listing, part 90

SEQ ID NO: 161407 - DNA, 1843 bp, Cannabis sativa
ttccagtgtgttttgttctcactcatacgcttcctaggaaatcttcccaagagattatccatcctaagattactgcagttcaagtacgcttatctttggagttcttaagcaatgggctcttaaaaacaagatgcaccttgttgatataggcagtacccatcaatctatttaagctctctttaactttgtaggctcatacctccacagtctcaaaattatcacacttgaccttctccagacagtgtgagattgcatagcttacccaatattttcccttacggatcacagaactactgaatgtcataatatggtataaggggttattatgatagacaatagcaaaaatcattgtatcgtaagaaaacattaagtgtgacatctccatgggatccctagtaattttaataccatgtatgccaccatttatttgagcctgatggagtctggatagaatatcattgcacaaaagaaacaaaaaaaggcaagttttggtcaccttagcaaatttccctcttaggagagacttttttcaggggtttcccgtttcaaagaatggaaaaggaagaagttgaaacacgttccatcaccaaggagataaactgaacactaaaactatgggctctaagaattatttccattcaactcgtttgaaagccatatgcatatcaacttttaatcgctataagactacctttgccctttttcctcttaattgtattgatcacttcctgagctaggagggatgcatctaggagtgcgcataaatcaattcaatctaatgataaccgacagccaaatattggatgttcaattgtgatcagattggattggaagttatttttgaatatccaattggatcggatcggatgttggatggggtgtccaaaaatccaatacatctaacatcaaatcgaactaattaatcttttcatttaacttggatgagtaatttgattttatgttgttatacgtaaaaaagatatatgtatatgaaaattaacattaaaattttacttttttttttggattagatggatccaatccaatccaatccaataaatactagatctaaaatattggataaatcgatccaatccgatttaaaaaaaaaaaatactagatctaaaatattggatagatccaaatcaatccaataggtatacataaaatacatccagtgaatagaactggtccaatccaactttcaatggatattgtgtcgattgggtgactaaaataaaatatatcgaatcgtatggtaaaatttaatatccaatatataattagatcgaatttgaataagtataaaaacattaaatgtggtccaataaacaagcctaaatgcatcaacaatccatctccatgagataaaagttgattgaaagggggagataatcttatccataattgggcaaagtctttgagacaaaattcaggtgataattttgtaagcaaagttacaaatgttaatagatatatctacattgctcaactttctttacattgctgcattttggtatcagatagatattgttaaaatttagattggtgtccatcttaccatcatgaaaaaaatattgaatacactttaccaccccatcgcaacaatgttccagcatcttcaaaagaagcaacttttcattgggtccagacacttgtaaggaatgcctatcaaagacatgaatggtaatttcatcaaaagaaggaacataacacagaaaatcattatcctctagtgtaaaaatttaatacgatatatgtattactctaccatactttcacattcttaactacccttatttttatatatatatatatatatatatatatatttattctatat

SEQ ID NO: 161408 - DNA, 14538 bp, Cannabis sativa
  modified_base (2662)..(2672): a, c, t, g, unknown or other
tctctctctctctctctcctttgtcctcttgcttcttctatctttctcttttcccttgttaattctcattcctacgctgtcataactcttttttcttcctattttcagataacagatgcttgctcagcttgttttgagcagcggacagtatttacacagcaagtcttggcaagggccttgagccagatggtatgtgtctatggtctctaatatatttttgtacaagtgccctgttgtaatattttttggctgcaaagtgcttagttattattttattttcaggttgagcagactccactacctcttctctttatgagaacagtaattcagtcaattgatgcttttccttcactggtatcttttttcccctgccaaatataaatctcatctcccattaatttcaagagttgatatacttgttactggaatcctggattgtttttttgatgtcttctgcctgatggtgtcgccacatagtttagtgaatatagttctttctacatatgttttatctttctttatagcatataatgattaaaaactcttcgttcgatacgtatgttagggtatgagattcacttaaatacaagctggttgtacaatgagtgataggcattataccaaatatgaaatctagatactaatctttattgatattaaagtcagaactatagtccaagtttttgagacacttagcgatttcccaaagagtttaactcttccaaaatatacaattaatcagatcccctcaaatgaggctactgagatttaattatactcaaccctctgacctcttctatttgcttccctaggctacatgcaactaacaacaaaacttcttacagttcagctccctaatagccaaacaaaatacttgcataatgacagctaggcatcactaaagtaacaaagtcttattacttatttctatagtatgtggcctaacaatgaaatggtaaacatgagtaaatgatctacaatgatactcatttgtgatttatcccaggttgatttcgttatggagatactatccaaacttgtgagcagacaggtacaaatttcaaattaaatttctcctgtcataacttgtttattatcatgattccgaggcagttatgtgagctattatcaatgtcaacaaacttatcatggtcagtctttcatcttcaggtctggaaattgccaaaactttgggttggcttcttgaaatgtgtatatcagacacagccacattcttttcatgtcttattgcaggtatgagttgttagttatatgatgatcccctgtttgctttgatggatcagtttaaacattttttttcaacaacgtgcttgcttctttcagttaccgccaccacaacttgaaagtgctttaaacaagcatgcaaacctcagaagtccccttgctgctttcgctagtcagccgaacttgataagttcactgcctaggtacacttttatttacttaattattcttcttaaggctcttaactagtggacatatgcagttaattatttatttgctgaaattgcaaaaatttggactcctggtaattgattcagtaattcatttaaagacacagtgaaccttttttgctcacaacttattgctgggagcttgggatcattttcaacacacttgataaatttatgcaatttttttggcagatcaacacttgcagttctgggtcttgcaaatgaaaggcaaatgcaacaacctcaccgttcatcatcctttaactcttcagatgcaagttcatcagttcgtggagcaacaccatcatgaccgctcataacctttgcaattctggaatttgatctctattgtatatagttgaaacgacgacgacaacgacagtgacatgtgattgaatactcgaaatatggtgattgattagttagctattccttccaatttctagcacataaggaggccttcttatgaatcatcgatcgtcctaaaaggatttgtttcactctcataatactcctgaccagcagcagctgttatcagagtgtatcatagtgctctgtctttgtatttgtaatctagtctctcaaattttgatttactagtttccttttggagagctaagttgatgaagccatcaattacatttggtattattgtaataaattctccacgttcctgttgttgatggctttggtttttattgtcatccaaagctgctgcctttggcaaaacatagtttcttaaaagggatccaatgcaagtgagtggacaaagtttagataaacatagtttttttttagcaataattagatttttatttgtagaaataaatagaattttttttttttgacgtagtgattagaatcacccatgaatttacgatgcagatattcacaaaccgcacaggaacctcctcgaactaggataacttatcgtctaattgaatggcatgcttgtcaaaccatgaaactggtaaaataagcgagcaacatgagacaaactgtcctcgaaaatttagacaataaaactataatgtgctcaaacagcacaccaaaatggctagagcttcaacttgtaacatcgaaaactacacgctaactcgtaaacatatcaaacgactccaccaaaaatctacaaaataaaagataaagaaaagtgaattacctctaggggtgaaaatcggtcggtnnnnnnnnnnnttacaattttataaccgaccggtcggttacggtttttattttacgaaaattctaaccgaccatacggtttttggcggtttggcggttttatgcggttttgggcagttttgacagttttttggttaaactatttttttatttcaaaaactgaaaccgaccgccatgtcaaaaaaattgaaaccgaaactgaccgccaaattcggtgatgacgtggaaccgaaaattcagttacggtctggtcggtttgatggtcggtttcgatttttcggtttttatgaacactcctaattacccctaataatgatattaaaaactaataaaaatcttaatagtaaaaagaagacaattctcaaataaattatatttaacaacttatcagcaaagtctctgtaacaggagggcccccacaaaatcgacctacaagataacaataaaactctattatcacacaatttaataaaaaatatgtaatgtgaataaagattgtaaactcaattcatataataatatcaagacttgaaacacttatctgtcaaaactcaaaagttgtttgcggaagccatgaatattgaataggattatggtcttttagtatatcactttaaaatatataggtgtttaatactctaaaatttcttaaaccacaaaatacccccattcaaacacacattctaactctcccgctttctctcggctatccctccctccctccctctccctctctctaactctcaccaaatccacctaaaaaaacccacgaccactacaccatcgttgttcggctgcccatttggatgaaacccactcctctctacccctgacgaaacacaggaggccatcgcgaaacccactccacttttgttgtttgtggttgattataaggaaattgtttggattagattacattttagtgttttggttgattttcattgttttttgtttaagttttagtttttcgctaattatcgacatttatcaactttgtgagcgacgtctttcgacttcgtctaaaatagtgcaagatatggtagttatttgggttttagcaatatttatcgacttattttcaacctttgtcgacattatttggctaggctaggaagctgttataattagcgacactggtcgacgtaattcacgacatctcgcgatattagctaagttattgaaagttaagacacttagcgacatgaagcgatatgttgtcgacatagtttgcaactttgatgtcttttgattgcatcccaaggccttgctgtagttagcgacatgtggcgacatgtttgtcgacatgtcgcggcatattaattggggattatttctaacagaaaatgtgtatgatttagcgattactatcaatttgtggtgatttggttcgcgatatttggcgatttattttgcaattttttacaacactgttttatgtgttttaatagtttatcttttttttttttgtgcagatggttcctgaacttaagtttctgattttcgagcatttcattgttgtctttcctaatgtcgtaaatttcatcacaacatgtcgctacttatcgttaaaagtcatccttaacatccagtgcactctaatgtcgctagatatcaataacgacatcgcaaaaaatcgctgaaattcaaagaaaaccagaaaatgcacaaactgaggagttcgagtttcaagaacaaaacaaccaaaataaaagaatgatatatgtagatttattcatatcaacttaaatgcaactaaatacaacaataattactaaataaattacatgcccatttctttttttaagaattatattggtaaggaagtttggattgctcctacacacttggttgtcaagctaagttggtggactgtaacaaacaatgtgtatatgtgtatgtgactttgtagagagagagagacgagaaggagagaggaaagagagggtaagatttagttttattatttgagggatatatttggtactaaaaaaaagagtagcatattctgtttgatatttaatagggtggtatataattaagcatttatattgagcaccggtggtgcctagcactttttaaacgtgtcgccttgcgattagctagtgatacttcttaaaagttattacattaaattatatgagattcgatacttaattagaccaatagcgacattgacatgtaagatagtaccagtgccatttaacatttttctatataatttagaccatgcacatgcaacacattttaagcatgaattgtcaaatttctctcctttttaaccactaaccgggcttgaattggtaataataatagttgcgggtataatttctaaataacaaaaaaaaaaaaaaaaatgattgcgtgattcaaacacgccaaattgattacaggtcatgactttgcggtgactttgcagaggcgccccaatctctctactgtgtttttcttttgaaagccatagcaaaacccagcatcaatcctcctctcactcactcactcactcactcactcccgcattattatcacccctgtttgtttcccgtgaagaatcggcccagaaaggtagaatcattcttctgttgctttctcggggggaatttctccttccaaatcgacgaattttgctttgaaatgtaacttcattgatagatattacaactcagtccaagttacaatttgatctcctgctgaaactccaattagaattcaaccagagaagtgttcgttactgtattatattttatatggttcttctctggctcagatctcgagcttatttcatctcacagattttttcctgcgaaaccttaactttcttctaaccccaatgcacggctacagccgccttggtaccgcaaggtccagcaactcaccgccttcttcgcctcggtttcgccatggacggagtaagagtagcagcggaagaggatcgaagcagagtattgtacagaaggtcatctttatatttatatctgcagtgtttaggagaagaggcgtgctattgttggcgccgctactttacatttcgggaatgttgttgtatatgggctccgtgagcttcgatgtcgttagcttgaaaaatggtgtcgttgtagttcacaagcgtcctccaccgggttccgtgtacaggagccctcaggtctttcagaagctttggccttttatgaattatgaaagcaatggaaccgaaaatgcggtattttttctggctttattttgggtgaaaagtttgatttctgatttatatttgcaagtggttgtgtgctttagtgcttgaatttaattcaaatgttcctcatctagattggcatctttgctataatggtcattgattgtgattttattgcagtgaattttatgattttgtcttccagtctaatatagctcatttttaaactcttctaggaataaatgatatattacttccagttgtctcattacgtttgaaggatcagagagttaccatttttccacttaattaattaaattctcacctattacacggcctttcataattggcatgcttctgatttgtagatgaagttttcatcagcttctgaatggttagcattttgagaggatttgcaaaattgtgttcatattcattttaagtattctttgactacgatgaaattatacagcaaataaaaagccaatttgataaacttataagttgtgaacgaacaacatgcagttgctatcggtgtggaattctaaagtgcatcaagtttggaagccttgtgttgacaaggatatctcaaaagcaggtttgagatttgtatatgagaatcatactatcttgtattgcgtatgtctttttcgtagtaatatgcccttgccttttctctttttcagtgagagttcaactttctttcgtttatcttttttcttaatttagggacatgacaatgaatgcaacttatcttgtcataattataatcctttgaggaaataagacaattgttgcatttccgttgttaaatacacttagtttacttcttgcatttcttggttattcagaattgccaaggtcgaatgggtatttcataattgaagcaaatggtggattaaaccagcaacgtctgtcggtatgttctgaacaattatagatccatattgcagtttgaatgcatctactcccagcatctccgctaaaacattacaattttgttttgagaaaagaagatagcaaggccatttgatctctaaatgaagccaaaagacaaaaaagtattggaaaaaaaaaagaatctaatctaacctaacttaattaagataactaaaccaagacttgtttttcaagaaatttgacagtatatgatggacaatgattacggatatttgtttgaagttttaaatatatacaagtaattatgttaatgttaccaattctcttatagtttctttttcctttctctacttccaatgttttgtgattatttcactatttcacatgcagatttgtgatgctgttgctgtggctggattagtgaatgcaactcttgtaattccaatttttcatttgaatagtgtttggcgagactcgaggtgattattgcataaatatgacaccagattaccgcatcttagcttttgaagcatgatattgttcaccatgtaatatagaggttttgtgtgttagttgtgctcatgtttcccatattttatctttaaacataataacgaatcaataaaataatacttacatattcaatttttaatgcagaatatgtaatttgttctgcaattttttttaaaaataaaattacgagcattaatttttattgttaacttgcagcaactttaaggatatatttgatgaagaatttttcatcaatactctccgaaatcaagtgaatgtcgtcagagagctcccagacgatgtacttcagcgtttcgacaataatataagcaaaattgtgaatcttagagtgaaagcttggtcaagtccaacttactatcttcataaggtccttccaaagttggtggaattggggtatgcctattcacctttaaatttagatttggcttgaaccttggtgggcccttccttttaggagatcatgggcattgacaaggtcatgatttacgataaactttggtgtttaatttctttagttattgaaaccatgtccatggtggtttttgcaagggttttgatatctttaagaaatttatcctttctagagtggaaaagattatttgcattggtccaatctattggttttcaaaaatggctttagttttgtcaaggtcggtattaataattgtggtgttttaatcacctcgaagaacaatcaagaacagaactaacaattagtacaataatatgaactaactaatcaagagaataaaaaaacataaatgcaaaacaaaaatcaaatcacaccaatttaattaacgaggttcgatcaatcgcttggcagtggcaactgtctactctccggatggaacaacctttggctttaatctttattgattcacacttggtgttacaatggtgataatcactaacagctatgaactcacaagaggatcgagttctgtagttttatttctgtacagagagaatttagaagagggggaagaagaagttcaaaaaaggttatctccgaatgtagaagaggtttgtatttaaaggcaatgtccaagagtgttggagagacagtattgtctccaactaacttaattgccgagattgaagctttaagaaatttactagttgtaactgaatactagctagacttaactttaataaacatcacaaatccaccttagttgaagttagtgaaaccagtaatgaatagtctgttccaagagcccctaagggcattagctgctggtgtcaatacttagcagctttaggcaatgcctaagcttgctaataggaatctctttagtgaacatgtcagatggattatccttagtgtttactttgcttacttgcacttcattttgccaatgatgtctcgaatgaaatgcatattgatgttaatgtattttgacctctcatgaaacatgggatttttcatcaaatttaggacactttgattatcacagtacactgtgatactttctaagttgaagccaagtttcttagttaagcctttcacccatatggcttctttaattgctttagtggctgctatatactctgcttcagtggaagacagagctactactttttgcaggcttgatttccaacttatgcatccaccttgagctgtgaaaacataacatgtaagtgatctcctagtgtctacatagtcactgtccacatacctgcaacttcaccttttggattgctgctcttgttgaatttgatttttgtcatgaattcgtcaaatctgatgttctattgtctaggtgcctgcttcaggtcatagagggacttctgcaatagacaaatttcatttggatcaccactttcaaaaccttcagattgcctcatatagattttctcttcaaggttacaattctcacatccatttgctggatttcatacactttgcaggctcttatagaggcttgtttgaacactgatgaaaaaatgtcattgtaatctactccctctctttgagtaaaccttttggcaactagacttgccttgaatcttttatcctcaatccctggaatacattccttcactttcgttatccacttgcaatctacaagcttctgtctacgtagtctcttgactatgatccaagttttgttcttgatcaatgatgacatttcctccagaaatgttagaagccactttgtattatctttgctgtttatggtctccatataggatgtaggctctacaatgtcagtctcatctgcaacatacaatgcaaaccctgtgaagtctacaagttcaacaaattccagtctgtctggtgggtgtatatctctcctttctctatctctagcaaattggtaagtctcaagtccaccttgagatgtagaagcctcagtagatgtagattcatctaacctctcttttgatgcagctgtatcattggtaagttgaacctgagttcttttgttgttgtctgtaccttgtagtctatttgcttctgctgctttaagggcatttccttctcattgaagatgatatccttgctgatgatgcatcttttgaaacctagttcaagaccctagagtttgtaaccttttaccccatcagggtagccaagagataggcattcaattgcccttagtatgtatgttatgttgttaaaactttaacaagattgtttttttgtattgttaaaattttattagattgatttttaaattttcattataatgtttgataatgatgatagtgtaaaccgctcaaatcacaccgcagtgcagtgtggtttttgcgattttaagatattgcggtgcgattgtggtttgagaaattataaaaaccgcatatgtggtttggtttgaaaaaaatgttacaacccgcaccacctgcaccgcgaacacccatagcagtcagaccagcctcactcttgttgcctttgtcattcttgtctttgctcttgtctctattatttttgttcgtcaaagtataacattcatctttgagatgaccttccttgcagtaattgcagaactttccagtcttgaatttagattttgaatgactagaaccattgttcttgttgctgtgatttctttattgatttccacttgaacggttgcccttatgtcctttgttttttcgcagacctaacttgagccattagatcaccatttggtccattcttatcatcagacttcttctgagtctccttggaatttagtgcagctttgatctcggacattgtcaaagtctcctttccatacaacatggtgtcaacaaaatgttcataagaccttgatagtgaactcaataggacaattccttgatcctcttcttcaatcttgacaccaatgttgtcgagttcgagaatgattttgttaaactcgtcaagatgtttcctgagttcaccagattcatccattcttaaggtgtacaaccttttcttcatttacaacttgttggccaaagtctttttcaaatagattgaggacagtttgtttcacaacccaattacagtggtctcacatgaatcctctcggagaacttcatctccaagactcaagaggatggtgttgtgagccttcttttgaatttctttaatcttcttcttatcctccttgatatcttcaagagcttttgattcaatggcttctgatatgccttggtgcaccagcagagcacacattttgagcctccttagactgaagtcattctccccagtaaatttgtcaatttcgaacttcgttgaattcatcttgatcgagtcttgatcaccaatcaccaaatcttgatccttgcatcccgatgctctgataccacttatggtgttttaatcactttgaaaaacaatgacatgacaattagtgcaataacatgaactaactatcaagagaataaaaaagacataagtgcaaagcagaaattcaatcataccaatttaacgaggttcgatcagttgcttggcagtgacaactgtttactccccagatggaacaacctttgactttaatctttattgattcacatttggtgttacaatggtgataatttatgaacccacaagaggatcgagttttataactttattttgtacagagagaatttagaagaggacgaagaaaaagttcaaaaaaggttatctttgaccgtagaagaggttggtatttaaagataatgtccaaaagtgttgagagacagtattgtctccaactaacttaactgccaaaattgaagttttaagaaatttactggttgtaattgaatactagatagatttgactaacttaactacgtatgtacaacattattagtgcctgtccattttgcttgttatatgtgcactacgtgtttttacctttaactctccctaaagtgatttagttctctgttgtactcaaataaggatgaccgattcaaatatacatgcttttttttcccctctttctcatcttgatgtagacttgtatttgtacggtaacagatatatatagttttccatccatggtgcagggctgtgcggattgcaccattctccaacagattggctcatgcagttccttcaagtgtacaagggcttagatgcttagccaattttgaagcactaagattctcagaacctataaagaggctggcagagaaaatggtggatcgaatgtttaagaaaagctaccaaagtgatggaaaatatgtatctgtacatcttcggtttgaagaggtataaatgaacttaatttgtagatagctacaaatagaacctaattttctctttttctaggatatggttgctttttcatgctgtgaatatgatggtggagaggaagagaaacacgaaatggatattgctcgagaaagaagttggagaggaaaatttaggagaaggggcagagtaataaggcctggtgcaaaccgagtggatggaaaatgtcctttaactcctttggaggtatagacactcccaactgaatatgttgcaacattcaatgattcatgtaaccatccttttgtctgcaggtgggaatgatgctcaggggcatgggtttcgataaaactacttcggtttatgttgcagctggaaacatttataaaacagataagtatatggccccactaaagcaaatgtttccacgtttagaaacgaaagatacacttgcttctgcagaagagcttgctccttttaaggtaatatgtcctgcatgatatgtttcacatttctagtgtcttcaaaatcttattctgttttcaagtcaagagtttggttgttcatatcccttaatgggattttaaaacgtgtcatagggccactcatctaggttggctgctcttgattacacggtttgcctatacagtgaagtgtttgtcaccactcagggtggcaattttccacacttcttgactggccaccggcgctatttgtttgggggacatgctaaaacaatcaaacccgacaagagaaaattagctctgttgtttgataatccaaatatcaggtgaaaatggccgtttaaacacacttgtcttgcgaatataaatccaattatcacaggtaaattaacttaaccacttcatatgtgaatttacttgtgtagatgggaagacttcaaacgacaaatgcgggacatgcttcgccacagtgatcaaaaaggtacagaaacaagaaaacccagtggctctttatatacatttcctatgccagattgcatgtgtaaacaagccgaagccaagaatgaaaacgttcatttattattatagtaatttattttattattattattattattattatttctagttttaggatgtctcgattaattattttttgtacacgtgtaatctataaatatatatatacatcctttttgtacacgtgtaatcggtattattatttagcctcgtatcataaaatatattaaggctactagaattttctcaaaattgtaaaaaaataaattgggctttgcttataaacataaacaagactttaattattttttcttaattaaaattgacaataacataaattcataataattatttagggataggttttaagaaaagttaatatttattaaaattactcaaaattgtttagctctgtttataaattatttagaactaaaataattttccataaaattaatctcttttttacttattgtaatttaatgtaatagtaaaattataattttcgaactatgaatacagacctaattatgtaagtatttccaaactaaattcttaaatcagaaaaataaatctgaaaaataattatcagtatttattcaaaaatcactaaattttaaaaccatctagcttattaaaaggtcctgttaatttttcttaaagtcaaacattataacgactgcaaaatagacgtttccatttttcaaagccggtgtaaaacacaataataaacatttcaataatttttaacagatcaatccaaaataaattacaaccaaaagtgctctatcaaatacaatccctgatacataatttacacgtcaaaatatgaattcctaacccatattttaatttacagtaatatacacatcaaatcgagttaagaatttatacctattgtccgcgttttcgagcatgtgacacatggcgtatgaaggaagggattaacctcataatctcgctaatcaatatcctctattacaattctatcacggaatcgagaacaagtcaagactaatagataagcgaaaattcaccctaccttgtcctagcttacaggacacggaagacataatgtctctcccggatccaacagctgatactcggatggatacttgaagggtctattacggatgtcgaccgcctaagagtgtcccggacatctacctttggtgcaattcggatccccagtgacagttatactttttctgacagaggatcaaatcttgtcccctgtgtccaggcatggtagtgcgcgcgcttcctccatctttttgccagacgaatattccaggcctctacttttgaaggtggaacctttggatgacacgtgccctctgcttttaaaggttaaacctttgaccgacatgtgtccactgagtacaaatggtccccaattgtctagttccagcaccacggacacaattatttctaagggatccagtagtcagctctcatttgcatgtaatttaccccattagtgggctttgagcagaaaccttaagcgggtcatgggcatgtccatacttaccacatagcctattgttgaccgaggttttcggcaactagtaaaatatgaatgtaatgatgagctgtaagaaagcgagatgaagactttttacgtggttgggg

SEQ ID NO: 161409 - DNA, 4875 bp, Cannabis sativa
caaccaaacgccacctaagtgtctgtatgaagtgcctgattcaacttgaaacataagactattgactcatttgtaaagagttaaaaaaccattcattgagagcttgagattgttttgattcaaaggcatagattctggttatggttgcgaggcattcgagttagaagctaaacaaaataagtattttcgacttaaaatttaccaactgaagaatttccatttcatttgcagcatcatagatctttcatacaacaatttttccgagacttctatcccgccaacttgtcgagaaaccttgtaagagcctctctcttttaacattttctatttgatgagatttgattatttagtttctaaaaatttgttgttaatttcatcagaaatctgtttcaaagcttttcagacaagaaaaaccagtaagcttcaaaaaaaactacaatgacatgagtaattctttcaccaacaaaagtttcacatagtctaataataatgcttctttatagattactaagcaaatgcttgagtccatgttcaaaaggtaatcaaatctctctttacattttcatacaatattattcccatctccaaatggagacttgtgttttagtgcagaccaatactcgttgcatataaactgtggtgggaaacaaatggccattggtaacatcaagtatgaacaagatgaagatccaggaggtgctgcaaaattcgtacacagcgcgtctggcgattggggatttagcagcactggtgatttttgggatgtttctagtacaacaaaggattacatagcaaataatgtatcaattcttagaatgaacacttctgagttgtatacaactgcaaggctgtctcctctttcgttaacatattatgctcgttgcttagcaaatggaaactacacagtgaaacttcactttgcagagatagtattcagagactacagatcttattccagtactggaaagcgatttttcgatgtttatatccaggtagctactcagacatagttttcagtgcattatgttgatttagtacaccatttagatcaacttctttgccttaccaagcaaatttcagtatttatttcttagcatcagaagtagggtggtaatctgggtcagacacgataacacgtctcgaaacccgtacaaaataaatggatttgggtttgccttaaatgagtttgggggatttttgggttgacacggctaacctgttttttaaagggatcattttcgggttgacatgcttaacctgaaaagacacaatagtgacctatgtaagtaagagtatgcactcttgaatttattatatttattacatgtaaattatatctttcagttaaataggacataaacatgtcaaattgtcaataaatgtatgataacaagattgtaaacatgttaaaacttgtttatgagttgataagttaactacaattaagcatgattctttatataattgaattaagctaatcgggtcaagtcaacccgtttataaacaagttgagtttggattttagtttttgacacaatttataaattggtcgggtttggatttggcatttgcttgtaatacctaagcctctaaacaatacgaacacgaattgtcactcctaattagaagaaagtttgacattttacatactttttcattgttgctttacatgctaagcataatagtctagtgtttttgttcctacatttttgtttatataaaaatttcattgcagggaacaagggtgttgaaggatttcaatatcgaaaaggaagcgaaaggagttaacaaagaagttattaagatctttaaagcattggttgtgaacaaaattttagaaatccgtttccaatggggtgggaaagggacaacaaatgttccaaagagaggaatttacggttctcttgtttcggctatttcaatgaagtctggttagtactttttattgccatgttatatagttaatcaactgagaaactcacctctatcctttgataatcaccattactatttttatacatgtttggttgatatttgcagatttcaaacctcctgatgaaagcaaaaccaagaaactcattgtcgtcggcattgtttcttcattcttccttgtgttgatgatggccttaggaattctttggtggaaaggttacttaagaggcaagccatcaagagagcaaggtaggtgttgtgtactgttaatacctttttgttttcaatgcacaagagttgttggtgaataagcaatctccattggtgtttgacagttctcaaaggattggacttgaaaactggtatccttacatttgatcaaattaaagcagccactaataactttgatgctgctaacaagattggggaaggaggatttggatcagtatacaaggtatggacctattttcttaacttggatcattatacactcaactcgggggactttgagatcccatagggccacatttcgggccctcgaaaatactcttgcaaaaatgaaaaagaccatggcctcggcgtaaccacctaagcaatctatgaacattcgcttcacggtttctccactccaaccaagctttaattttgtcaagacattaaacttgatataataggcctctagtcttcaaaggtaaaaacatactcaagatgcttaatatgacacaaatgttgtttttattgcagggtgtgttattagatggtactattattgcagttaaacaattatcatcaaaatctaagcaaggaaatcaagaatttgtgaatgaaataggcatgatttcggctttacaacacccgaatcttgttaaattacacggctgttgtgccgaaggaaagcatttgttgttggtatacgaatacatggagaacaacagccttgcacattcattatttggtgagcttaactcattaattaatacttcactagcatttctcaagttatattttgctaaaattttcattgtctttccttgaaaaatatggttaggagaaagtaaactgaaattagactggtcaacaagacacaatatttgtcttggcattgcaaggggtctagctttcctgcaagaggaatcaccactgaaaattgttcatagagacatcaaagcaacaaatattcttcttgataaagatcttaacccgaagatttcagatttcggtcttgctaaactgaatgaagaagagaacacccatataagcactagagttgctggaaccatgtgaggaactcttatgctctccccttattcttgttggactctcatcatataagatagcttaacgaatgcaatcataatagcttaaagggtaaatagcggcataaatacttaatgtttgtaaaactgtaatttcgtcaatacatgcttcgttttgaatttattaaaagaaaatttggaagtaacagatactacatgtttccctccagactcaatgatttagaatctagatcttatatatgcccagtttaaaacaataacagagtctgtaccgaagaaactagaggaaaattacaattttacgaacattgagtacttatgccactatttacccgatagttaaatgagacgattcttttactagacttgatagattaaaccacaagtctcatattattttgcagaggatacatggcaccagagtatgtcttatggggttatttaactcctaaagcagatgtttatagctttggaattgtagcattggaacttgtggctggtattatgaacacgaaattcaactcatatgaagagtatgtttgccttctagattgggtaagttaaaccattatgatcatcctattgttcttaacaaacatcaagctaaaaacttcaaatgtgtttggtgaatatcacaggctcttgtttcacaacaaaagggaaatcttatagggttggtggatccaaagctaggatctgagtttaacaaaaaagaggccataagaatcattgaagtagctcttctatgtactaacccttcaccagcgcttcggcctaccatatcttctgtggtaagcatgcttgaaggccggactcttgttcgtgctttgagcttccatccaagtgttcatggcgatcgctcaagattccaggccttatcagaatacatggaccacttgagagaaccaatttcgggagaacctcgaaattgtttttattcttcttctactactgagattggcccttcctctacatcagaattggttgcaccaaatgaatcttaaatccttaatctagtgattcaataaggcacacttttacatgataaagttgaatatatgtatgtatatgtctttatatcttcttgctaacaatgtcttccttgttatcttccaaatttgcaaaaccaaaattaaactaagctaaaatatttgatattatagcttaatatgaatgcaagatcactataaggcttagttattatattcaggctatcacacatatttcaatataaaagaatcaaaattcatttttatgatcacaattcaattagttttgtgagctttttatggcttttagatgtggcttctcttttcttaaattatgagagggctggtcctaatatttgaaaaaatcaatgtcgaaaaaataactctctgtatttttgtaaaaaataaaaataaaaataagaagtcgtaaaaatataaaaaaaaaaaattaaattatagatatgtaaaaatataattttttcatcatttttaggcatttatgaaataacaactagaatctttatatataaaattgttggtttaatggtgtttattattttaaaggttgttttcttcacttgcctcctcgcatccattgttgcgccatgactttgatccaatctgcaaagtatagatatccgcacttgtgcagattggattgaattgaaaaattcaaa

SEQ ID NO: 161410 - DNA, 6157 bp, Cannabis sativa
  modified_base (206)..(213): a, c, t, g, unknown or other
  modified_base (6108)..(6132): a, c, t, g, unknown or other
cttttttactaatacttataataataaaattaataaagaggtaatattaaaactttttatatgatcgtatggataggaacaactttgatatcatagaagcttcctcgctagattaaactatgtacgtgtaacgtaccaattttaaatatagttaattttatatatccagtttttccgattgtctgtattattattattattattannnnnnnnattattattattattatcaaataagtaatgttgatagccattgtttaattatattgacaacagcgactgtcttaacaaccataattgaccatttttgaacattaatttaaaatgagtaacatatataatattgcaaacgactttaggtcaaaattatataaagacatttctatgtaaaattaagtttttacaaatgtcaataattattatagaaatataataaatatttaactgtaacactttgtagcaacagaatgtaattctatcactgcagaatacaattttactgaaacaaatcagaaccaacagaaataaaaataattgcaaaaaataaaaacacttgacacaagagatttgtacataatattagtattctttcgaacattctcagtccatggggtcacgcctagagaatgaaatcaattaataaagtatcaacaattacaaagacaattgacttaaacaagtttagtctccctctaaatctttgatgcaatcctttgtaatgcacttcatgaatctgatttcagaaccaccttcaaacaacaaactcccttcgtctttgaagtgtgagtgcttacttccttccaaagtaagccttgcacaagtcttctctcgaagacctttctcttgtcaatcaagatgttctaaccaaccctaagaccagtataagaacaagtatataaacgctaaaacctagatgaacaactaggttctcacaaaaagaactctctcttaacaaatgagaatatgtaaataaaatgaaagctacaagagttgaatcgaatggctactctctaggttctatttatagaacataggaaccctagagacagccacaaagttggttatacaactgtacaaaatttccaaaaagaaaatcctgttttgcagcatcagagacagcatctgctgcagcaaaccagaccagaaaaagaaacttcccaaaatggtatccgatcatgtatatggtcttgatacctgccaaaaatagtgtgcttgatctaaacatatcaagacacaatcgaatgcaataaagagaaataacaaaagtcatagtttctataaaaagccaattttccataagagaatttcttctcttacaagaagttttcaaacatagaaaatggatagctgaaagaagattctttcctaagatagaaaagagcattaaaaacaaatataaaggtgagaaaatcggtttattaatgcaaaaaaatctcaccataaataaaaaatattttagcatctaaatcgtcaaaaaggactttacagactatatatattaaccccttattatattgctatcgggtcatgcctttcagtctcaaaattacggatacaacgtaccaaagacttgtcaacaatgttttccaccgaatcggttgcaacatgaagatctacgtcgacgacatgttggtaaagactaagaaagcaggagaatatttaatcaaagatttggatgaaatgttcactactctccataagcattggatgaagttaaatttgttgaagtgtgtatttagcgtgtcctccggaaaatgagagaggcatagaggcgaaccctggaaagattaaagcattaatagacatggaatcgcaaagaataggaaagaggtacattgcctaaccaggagagtagccgcgttgaataggttttgcggtccaccgataaatgtctcccattattcaacaccctcaaaggaaataagaagtttgcttgggatgagaattgcgagaaaactttcacgagcttgaaggaccatcttggaaatcctcctttgttggccaaactagaaaggggagagaagttgtacatgtatttggcggtctcccaacacgccttgagcgccaccctcgtaagaggagaaggaaagcaacagcagcctgtgtactacatcagcaagcgtttcatggacgatgaaactcgttacccaaaaattgagaagttggcctacgcgctcattgtagcgtcacgaaagttgaagtcatacttttgcgcgcatgcaatcgtggtgctgagcaatcatcctttgagacaagttttgcacaagcccaaaacctcagggcacctactcaagtggtcgatagagctgagccaattcaacatcacttataccccaagagtaatcaacgagcaagtgatggtggatttcaggcaaagttcacctattatccagataggaaggatcaagagcaggagaccaatggagagttgggagaaagtggagagagagaggccacttgggagttgcatgtagacggagcctcgaatggcaatggagtaggagctggagtggtgatgacagcccctagagggaccaaaatgtattgtgggataaggtccaaggcttccaacaatgaagatgagtatgaaacaatgttggttgggttgagactcaccaaggaatggaaagttacacggttgtggattttcagtgactcgcaattggtggttttctaggtacgaggagagtaccaagcaaaagggccaaggatagtggcatacttggccaaggttaagagctacctggaataactgcagtacttcacggttaaacaaatcccaaaggaaagtaatgccaacgctaacaacctagctaagcttgcatcgaccgaggttgacattctagagtctgtgtcagtagagttcttagcctagccaaccattgagtgtgatcaaatgtaagtagggagtgaagaaccctcctgatgacaccatacattgaatacatccaagaggggaagtttcccttggacaagaaggaggctcaaagaatccagtgcaaagccgctagatatgtcttgatagatggagttctgtacaagagaggtttctccacatactcttgcgttgtatatgggaaagtgaagcacaacaagtattatcagaaatacacaaaggagaatgtgggaaccacgcaggaggttattcgatgtcgaggaaagtattgaaacaaggatactactagcctagtttggagagagatgcaacgatgtttgcaaaaaagtgtgaaaaatatcaaagacatgccagctatagcaggtgcctctggctaaactcacaagcatgactagcccttggtcgtttgtcatgtggggagtcgatctaattggggctttactagtaggtagagtcggggcgaaatatgttgtggtggcgatagactattataccgaatgggtagaaggggaggccttggtcaacatcaccgctaagcaagtagtatccttcatcaataaattcttgatatgtagatttggggtgccttacaaaatcatcactgacaatggaacccaatttgaaggggattttctaagttcccattacttcgagagaggcatcgagaggggattcccgacagtagtatatccccaggctaatgggcaagtcaaggtagcaaacaaaataatcaagaagaacctaaaaacaaactagaaaagatcaagggaagatgggtggatgaagtgctgaatgtactctgggcgtataggacaacgccccactccaccacaagtgaaactcctttctccctggcttacgggtgcgaggttgtgtacttcctatagagatgaaactcaactcatttcttgtgaagaatttcaatgaagaggtaaatgaaaaggaaatggcagagaatttgaatctcttggagcaaagaagggatgcgacccaaataaaattggcggtatatcagcaaagggcagcacgatactataactcaagagtccgcgtgcttgccttcaagaccggacacttggtgctgaggaaagtcctcccaaatactagggatgtaagggcaggaatgttgggagccaactgggaaggtctctattggaatgccaaagtcatcccgccagggacctacaaattggcccgcatggatgatatagtaatactaagggcatggaacgcaacacatttgaagaagtattattgttgaaaaggtgagtctgaagtatcatttagccattgagttttgaagtcaaggaaggcggctcgtgaggaaactccactagtttaagtttccttgtgtgtttccacctccacactccaatgtaatgaaacaaaaggccacttagatggcattcgaattattctttagaatatatgaatatcacagtggaattagtcaatcgcacctcatctgggagtcaaaccaatacctcccttctttcaaaaaataataacaaaggagaaaagtaaaaaaataataataaataaatatttctaattcggcaaggactagctatccttatttgacaaaagaaatacatttttctcgcaaaagtcgcccatccaaaagaggtctttaagacgttcatggtctaatactaaaacgagagggataccttttaaacataagcaaacattcacaagtcaagacgagacgctgtcaagtacaataagcctcctcacatccgagtaaaaggatgaagaagtaataagaagaagagactactcaaagagtaatactccctcaaatgaatacttgcttaccacaccagggaaagtcgcttggccaaagagtgatcctcagattttctcaaccaacatcagttacgaaagtcgtttggcctaagggtgaccctcagagtcgcttagccaaaattaggtacaaatgtccctcgaccacatggtgactaaggtcactaaaaaaatgggattagacaaggtgaggagaatctgccagtacaccaacatataccgccaatacaaagcgggcacctcctagaagaacattaagaagattagacccacacttcagcgaggcatattccccaactcactcagtcgacaagaacacttgaaagaattcttgtagaccgagagggcaagtgttaatcccaaaacttagcgctgctaacttaaggggttagttagctaatttccaagggactaacgaaagcgcatccaaagagcttatcctacctagcatgtatttcacaaactcatcgtcgatactcgcagtccccgagatgcatcttagcaattcaatgactaaccccatggtgatcattcacgaatgagggaatgacaaaagagaggacgtaagaaggtgaagtcgtgcatgcaagtatgtgcactcgaatgtgtgcatgagagtgtgtacatgcatgtgtgtgcagctgcagggtgcaagacatgcgagcccattggggtctcgcatgcgagcgtgctcgtgtgtgcgtgcagctgcaaggatgcaaaatgagtggcttgcatacgagcatgcacgtgtgtgcgtgcagctgcaaggctgcaagacgaggggctcgcatgcgagcatgtggctgtaaggatgcaagacgaggggctcgcatgcgagtccatggtgtggcgagcatgcgagcatgcgcatgcatggatgtacacatggaagtccattagtgtggagagattgtgcaatgcaaagtgtgttgcttgtgtgaaaataagtgaaggtgaaatttgaatgcacataaaagaggatgtcgttaaaggggaaatcaaaggacaaggtgtgtaaaggagaagcgtacaaccatgccccctacaaactttgaaagcaagaaagtgcgagtagtggagacaatgcacctataaggtctgaggacccgaccaaaagtacactgcagccacacctctgcgaccgaggaccacctaacacccgacaaaggtacgaggtacaaggccaactccagcacctacaacgtgtagcatgaaagtgacactttctctccttcgaaccaccatgtacctcaagtcattagagcttacaaatacccatttctgatgtgagaaggggttggaaaattaattgtgtaactcagacattaaatgcaatagagagaaacattcatccattaatacttgtatttattttctgttagattttgtgtcctaaataaaannnnnnnnnnnnnnnnnnnnnnnnnatataagaaatttgaagtgatttat

SEQ ID NO: 161411 - DNA, 3915 bp, Cannabis sativa
aacgcacccttaagaaaaatcctaagaagtataaaaggtaccagcactctcttatgtattattattactattaatctaattaagtataaggtccgttacatttaatgtaataattttttaagaatattacttgtcaatatttaaaagtactaagtaccactagtgccgaacaacaattctccttaattaaaaggcagccgattaagaaaaaaataaagtatttttttattgatagaaagttagaaacccaagtggcaagacaaaagaaggattgtccgttgtccccctcgaagcccaaaaaggtactccacctcctcatccctcccaagagactcacccaactccaacactcctcttccacttacgtctctctctctctctctctctctctctgtatatatacattacacatatagcatttacagaccccccccaaatcacaagactaagtgccaccaattgactctcatctatggctctcgtcaacaggcttcaatctctctcatcctctttctcttctacccatttcagaagccaccgcacaccctcaaatctccaacccatttgctctctacactacaattcctcttcttcttcttcgccatttacagaaaagcactccgttcagagataccaacgagatcaatgggtttacaatcaccaactccaactgcacgacgaccaaactacttcttcctcttcctcgtcttcgtgctgctcagtcattcctgatttcgattcttcggcgagggaaaacgacatcgctttgcagctaccggagctgaagaagctgcttctagtgcttaaagagaagaggaaaagtgaaagaggcagtggcagtggcaggggcgattttgggcccgggaatgtgttcttggtgggcactggtcctggggatcctgacctcttgaccttgaaggctgtcaaagccattcagaacgctgatttgttgttgtatgatcgattagtgtctaatgatgttttggatttggttggtgctaatgctaaacttctctatgttggaaagactgctggctaccatagccggacacaggtaatgctcatttctctgtttaatccaaaacccagatgtacaaatatgaatgtgtattcgaaattcatttgttgacaatgttttatgtatattataatttttacatagtgtgtattgggtctcttttttaggaggagatacatgaattgctgttgagttttgctgaagcaggtgcaaatgttgtcagacttaaaggaggggatcctctggtatgttatgacaaatatcatgggatatttgattgaattaacttagatgtaattattatataaatatatacatcttataattgtgctgtattactttgttatgacactacattacattttggtggtgcaattaggtttttgggaggggtggagaggaaatggactttctgcaacaacaaggaattcaagtgaaagtaattccaggtacttagtcgtgttcaatttcaataaatttcattgtttagtcgaaactcttacactataaattcttcactattttccgtacaattattggcttttggaatgtagaagtttagagcattgcaaggaatcactatggaccatgttttagcttagatgtttatgaattatattttatatcagttattttttaagcatatatccttgtgtaatacaccatttaagtcagcggaaaagtttcttcctttataagttgcataaaatatagactagtaatctgacaaggattcaaaatgagtaggaactctttggaaattgtatattcatgtagcaagatgcaatgcaaagcttcaaaatgatacgtagatatagaaccttttcagaagttcgtattagatgctaggaaatctccttgcttttgcatgtggcaaaacactacacgttgtgtttttgcagcatttgtcctgtcctccttccttggtttctcttgtataatcttccatgtgtttatagaggtttttttctcttacaatggtgtttgctaattctatagttacaacatttatatttttttaagtgaaattgtattaattgatgatagtgtttcttgttttgtaggtatcactgctgcttcaggaatagcagcggagctgggaattccattgactcaccgaggtgttgcaactagtgtcaggtttctcacagggcactcaagaaagggaggaacggatcctctctttgtagcggagaatgcagctgaccctgatacaaccctggtggtatatatgggattgtcaactctcccatcactcgccgtaaagttgatgcaacatggtctgccatcaacgacaccagctgtagcagttgaaagagggaccacacctcagcagcgtatggtaagcacaattcttgtacaagttaatgtgcctttcgaaaaatattaattgaaaaaattgtcctcctaaatcgtaagcattactacaaggacaagaaatatgagagggagaaaatacaaatgactgaaaacattgcttacttactagttactattgaacaattttcctaatatttacaagggaacccaccttctaatcttctgaacatcataatgaagctgtactttccaaaacttgactaaatggtgtcatttgatttataaaattttgtttaatgggcttccttgaatatgtacataactagtctctcaatgtctcgtggatcgttatattaccactagttacccctgttatggtgaaattcgtttaattgcagtatgaaaattagcatattagcacacacaaaaatatatttgttacactttttcattctctaatcatgggaaaccacttatattggacgaaaattcttccatgacacataactattaagagagttcaatgaggttgtcaaatgtacataatgtagttttaagtactaataagggagacctttgatttttctttattcaaatccaagctcgtttcaaaattctgatgtacgccattatgattctaactatgatgtggaaattcaggtttttgctgagttaaaggatctggctgatgagatttcgtcagtagctttggtatctcccacattgattatcattggaagagtggttgccctttcctcatattggccacattctgtagaagaaacatcctccttggtagaggcgaaataaacattttcttttatgaatttgaggatatatcctgatatctttctagccagaagctgggtttatgcatattcaaactctggtaattcttgccccagatggatttggtttactcccagtgaagaattatagatgttctattagctctgctgcgaagagatggagaggcggcagagagaagaaattgttgggatggtaatggaataaaatttcggagtaaaataaattgtatgttgactgagttaggagttactgagactgggccttgacactaccacatgaatttcagtaagaagaataaatgctttgtactttagaatgaagcataggttcattgctgacaaccaactaaatgcaggcattttttctttcaattcttttttcttcattggaatttctgattgtcagataggaaattttttttgtaatgagcatttttaatttatttgactcaaatttaattcttttagtgttataaaatatattatgatgttcaaatcaatgcattaattactatcataaatatttaattataatttcttttttattttattgatttagttttttattattctaatcatataaatagaatttcacctcattttaataaattaatgaaaatttttcatttactttcttattctctgtcttctctttttttttattattttttttctattctatattaatctaggcttaattagtaatttttccccataaattttgacatgtaccaaatcatgcccctgaacttttttggccgttgaaaa

SEQ ID NO: 161412 - DNA, 4270 bp, Cannabis sativa
tatatatatatatttaagtgtaataaattatataatttgtgtaatttaccttttaaaattaaaattaaggatgtttcgaaaagaaaaaattgagtaataaaaataaataaatttgaaaatttaacagtggattttagtattttgaaatttcaaggtccctttttcaaaaaaaaaaaaaaaaatcgaggtcagaaatcagaatatttttcgttctagagaaaaaaaaaatattcaaaatattttaattacatgttaaccaaaataaactaaactaaaagaggaatagaaatagagaaagtgacccaaaataaatatttgtggagtttctcaccagtttccatcgtcgaaagagactcagactcagttgcctgcttcggcccttccttcctccgcgtctttttccataaccaagtccttcctttccttctttacatacgcaatcctttctttctctatctctctctctctcttcaaagtctccttttttctcgctcaagaaaaaagatcttgaactggttggtgctgctctcagattttactgcaacttcgtgcatttttccggtacatgtttctcttgtcttgtatgtgtttaattaatggattttcgtttccttgaattgggtttcactctttcgaatcgggtttgcttcgaacatttttctatttctcaaatttctgtgtctcatcttcttgtggctttgttattatcgtaaggtcaggtcacctacttcgaattccttttgttctcctcttggccctttgtttggttggtcaggaaattttttttaatagaaagtgaaattcttcagttttgttctatggtcctcgtggtagttaaacaagtttatttatcttattactagagttttctttgatatcaaattttcttccaccacaagggaggctgttaatatttatcgggaaggatcctgtcaatgacaaaaggatcttttctctttttaaatttttttttttttggagaattctctggtttctttttttagcacaacatatgaaacttttgtgaattccttagttttcctttgctttgaattatggttatgcgaataaatgataagcgtctgatattgtcttttcccttgtgaaattcaaataaatgttttttgatgccttagatttacttttcgtgatagtctttggttatattctttcttgtgttaactgttaagaactggggagcctcttattgattctcagttatcactatacgctttctgttcccccttgctctcattatctacctcagcataataaataaattgagcattcaaaaaattttgttgggtcctccagttgtcttttcccttcttttggggctttaaatcatgatacttttgggtatagtataccttttgaaaatttattgtgtactgtgattcttacctgaccttttttgtggtcttcaagacttggtttggttatacctttactatttatttccaatagtaatgatctaatgacgatgtaccagactaacaaattttttgttttcatttttccaggcctgttgattgtaaagcattcatatcagtattccacttttgtatattagattgtgcaattttcctacttcgaaatatgtttggcttaaggaaatctcctttaaagacttctaaatataaaacagttgaccctgtatatcctaagtcttctggttcgaacccttttgactctgatgatgaaatggatgtaaagcacaaacaaacttcctcaaggaggacttcttctgaatcctcattagttttaccagattctagtacaaacccttttgatgatgatcttggaagtgcaacttcatcttcttcatactccaatgcagctgcttcagccacgagaaacaagtatagaagtgatttccgtgacacaggtggattggagaatcagtcagttcaagaactggagggctatgcagtgtacaaggctgaagagactaccaagtcagtcaataactgtttgaagattgctgaggatattagagaggatgctactaaaactttggttctcttgcatcaccagggtgagcaaattaccaggactcacactgttgctgctgatattgagtatgatcttagtcgggtaagtttctatttgagcattaagtagtacatgataatggacaacactaatttttgtccatcaatacccctaaacctgcagtgtgcacaacattcacaggccataccctatccccatcatttgtttcatcattattactatattatatgtctgcctaactcttatatttgatacttttctttaagcatatatgtatttttaattgaacccctctccattttacacacacgcccaaccacttgaggctaaccacttgagctagcctcaagtggcaatcctggatagttattgaacatgttttcatgaactgagaacaatggctatattttaaggccttttccatattttttaaggataaatttacttgcaatttcttttttttttttttgactgggtattatttacaaatcaagaagttgaaagaaatactatgaaatttgtaaataatatggagtatttttctttctcttacttgataagttaggttattcttaaaatgaaaatgtatttgtgtttttctgtggcataaatgtactactaatatgaattctgtatccttctctgaaaatagaaactctcagttcaggtcttgtaatattgctaattgtttttgggcaaaccgcacctaagcagacattggccttgtgcctatggcttacaattgagaaagaatgcttatcttttgcattgttgtaggccccttcaatgttgatttaatttcagtgtaaagtaaaatgaattatttagtgattatgcaaacaattgtttcagggtgagaagcttctgggaagccttgggggcatcttctcaaagacttggaagcctaagaagacccgtcaaataacaggccctgttataatgggaggaggttagatcttttctatatgtctcattttctttattgatgaactgagatcgtaataggatatattgttgcttcacccgaggttaccatttcccttgcaactaagaattcttcttgtggcattcaaaagaaaaaaaaaaagagaattcttcttgtgctgtgttgtttcttatgcgctggaactacttgaatttgtagatgaagttcaaaggagaggcagccatatggaccagagggagaagttggggttagctcctctccctaaggggcggtcaaaagcccaaacactgcaacagactgaaccagctgatgcttatcagaaagttgaggtttgtatttgaggagtgatcattccaagtttatattaaaagaaattattcgtttctgtgtccatgtgcaatttcaagcaattgatgaattttatttgttgatttcttaccaggtagaaaaggtcaagcaggatgatgcattatcagatctgagtaatctcttgggagaattgaaggacatggccgttgacatgggatctgaaattgagaggttggttacattcacatctcaatgagtatcttagtttcaatctttatgcttctctctcttttttggctttcttgtcagcaaagttaatcatggtttgattttgattactttgtgaatgaaatattgcaggcataacaaagctctcgagcctttacatgatgatgttgaagagctctcttaccgtgttagaggtgccactgaacgtggtcgcagattacttggcaagtgatgaacttctggactactaccatctgcttcttgctttgcatcctttatctggcttcagtggttctgtttcttttcattttattatgaatgtaaacatttccctctttactgtttgagtacgttgtatacaacttttagatgttcaagtacagttgctcttgttcactaaataattgatttgagggttaacctttttggattcaaattttgtgaccttattgtcttgttccttctatgtcttatgtctcacaacatattttttgtaaatattttactcgattgcgttaattattatttttattatgttttggtaaaagcgttaattattttttgagaaaataacatagggaaccgaaaaatacaaaaagaaaaaaaaaaaaaaaaaaaacatgccttgcctatgatttaatatttaaaaagccgctcattctttgtatttgtggtatttttagacataagtctaatattcaggacatgtggcactctcggattggacaagttcaaatgttagctttgttagttggtttaggagggaaagtt

SEQ ID NO: 161413 - DNA, 4797 bp, Cannabis sativa
  modified_base (668)..(676): a, c, t, g, unknown or other
aaaattaagaagaagaaaaattactcagtaactaatattgagaagtaaattaaatatagaaaaagaaaaagtagagagtgaaattacattgtaaatctgaaaagccttgccaacactgacggtgacgaaggtttcggtgcctaatcgctgaatagagaaaggaacaccgctggtaatgtatccaatagccctaaagggctcaaatattcccattttacttcactgttcttcttcttcttcgtcttcttctttcctaagctaaaagcttctgtgagtttgttatgcaaagcacagaactttcaattcagaaagacaagggtttagggttttggcattttgatctactaaacggtggcgttttgagatcttaggcaaccaccatatgggcttgggcttgggcttgggctttaaacataacaaattacaatttagataagagcaatttaggggtatattgaaaaataccttttttatttatcaattaactaaatctacctctaattttatatttagttgaaacataccttttctttttatatgtattgaacccaaaatactctgaaataaggaagtcacatggagagtatattgaggtgatatgggtaaaattggtaaagtattttaaaaaagaagtaaaaatgatagactttaaaaaagaaggtaaaaannnnnnnnnacaatataaaaaaggtatagagtctaattttctcagtaaaatttatgttaaatgacacttttagtgcccaacacttacgagtcgtaagtgttagtgtacattaagctcttaaatttattgaaaaaattgtcaggtatatgaacatgacccgtagcacgaaaaattgataaaacacatacatgaacacgaatatgactctgataattttgtgtcgaacctacaaaattatacaccgtgattatgtcgacctacatgtcgtgacccaaattactatttttattttaaagtatcacattattattagtatatttaagtatcgagtttcactttattttaatttaatgttataaaaaatttaggaacaacttataaaatactatcttatagtatcaaaaatgtatgcaagttattataatactcaaaactataataaaattattctacaactttagtctagtcttgaatgcaaaacaaaaattggtatccaatatgaatactttggatgcagattaaatattattttaaatcctatatttttcaaaatagcacaaaatagattctgagtttaaattttgtcaaattaaaatttaataataggctgatttaaaagtattatgacaagaatattatatttctttttatatttgttcgtgctaaaaactagtttcagcctttaggttagttatagtaaaaaaaattaacgaaaattgagttcagaatctattttataccattttgaaaaacacaaggtctaatttattatttaagaaaacagaacgtctaacctataactttttacaacatgatccaaaatagtatttagtttactattaatgtaatttagttttctaatagtcatatgtaaacggcatgtcgttttctaaaccagtagttgtttgtatacgacatgtcgtttcaacccagcagatttagaactgttgaatctgtcgacagaacaaagtataacgacaatgtttcagagctcaaatcataagttgtggaatttgagtccacactcacagaagagaccacttttcatctctaaatcccaaactcaccatcatcaaaataatgagctgaagctcaatcccaatctcatggtctcacccagacaactcattcgcaaatttcagatggaacacaagccacccaagaaggaatatgctcattacgaccacactgacccctgcagatttttgcgatggaatgctaggtttttactctttctcttttcgttttgagctgacccatcaaagctaatgatctaaagtttcaatctttattgtaatttaaacgtgggttttttgtagggaaagccatgagttcatgtacaatcgaccatggaaccaagttcttgatttttattcccaacttgtcaatggaactgtgtctttatcagtattgtttgggacacaggtgggtttttcttttttctgaaattaaatactttgtattgtattgatttttttcttattgctgttgttttattggtttggcagaaatgtgatgttgttgatgatggcattgatgctgagattcctgatttttcgaataaaaccgaattagaacgtgttttgcttgataaaaagtctagtaggtgggcaagagtaacattcaaagttgatgttgcttatcatggtgcttcatttgatgggtggcaaaagcaaccaggattaaacactgttcaggggtaagttgttgctacctgttgattgagttctattgtttgaatttgatcaagccaagagtgattgaaacatgtctcttttactttatgtcatagataatgttatgagatttgggatgattttcattaatagtactaaaggcattgttgcaagttcttgtgtctcttttactttatgtcaaagataatattaagagagctgggattatattggttaatttggattacatggattttcatttgtagtagtaaagggattggtgcttcaaattttgtcatttattattggccttaggatcaagttccttgtaggtgttgatttctaagaagtgatcaataacaagcatcctcatatttcaaaaatttcccccacttatgtgtttgattaatgctaagcaccctcttaattgttatatcgctataggtgcaattaggcatcaggtcccatataatttattttaatgtgataatttttaaggagtatccctaaccaattgcaagacgttaattctaaatggtgctgagtactactggtgcccaataacaatgctcaatatatgttcacttacttgactgaagctatcaactttggtatagttgtgaaacataggcctagttgaattaagcatctcagttgtacttgaacctcttcacttgtctgatttttgcttatattctagttataagaagtaatcattaagcagtccttatgttcatgactcatttgtataactgaagctattaacttattctatttgacagtttggtagaaaaatctattggaaattttatcgatgaggataaagcgcagctgctgagagacaaatctttaccggtagaaggctgtgtcactgttgcaggacgcactgacaaaggagtcacagcccttcaacaagtttgttctttttgtatgttaaattcttgtccaaaagcctaaaattcattgggaatttcgctttgtgccattcattttcttggattaagtttcatgtgttacatttttcttttgtcaataaaacatcaagaaatatttgatctaacctcatcttttttcatgtctctagatacttggagaaaggataataaatgtaaagatattgaagacgcaatcaatagtatggcaccaggaaaactcaaagtcaaatctgtttctgaggtagtgtagatcttctgatgttctttacttgcctttctatccatactttgcttaatcgaactcaatgcaggtatctcgtgccttccatccaaatttctctgcaaaatggaggcggtacctatatattttccccttaagcaatgaggacgagagtcaattaagtaacgggaatggagagatcgtcgaagatcatggaagcaatgaaaattgcagtgacggggtaggtaatgatgagaaggaagagttagaaagtgggaagaaaccacagacatttagtgtgaaccgggtgaaccagcttttacagcaactagaaggaaagttactatcatataggatgtttgcccgtgatacaaaagcttctcgaaatgagtaagaacatacaaagacgtcattttttctatgcgatttcctatgctttgatttgattttgtagatgctaaatctgcctatgtatgtatgccagaggtccaccgacggagtgttttctctaccatgctagagccaccgaaaccagattgccatcttcagttaatattttctctccattgagtgatgttcttcattgcaatttcatgttatataatgcaagaacctaacatgattcatattttataggattgcacagaaggaacaagagttatgtgtatcgaattggtagctaatcggttcttaaggaaggttggtggttctacaatacttttcggttattcagaatttgagtaacttggggtgacatgacaatctaaaatagtgttgtttaacagatggttcgggttcttgtggcaacgtcgataagagaagctgcagcaggcgcagaagaagacgcgttgataaagcttatggatgccacatgcagacgcgccactgctcctccagcaccccctgatggcttgagtcttgtggatgtagggtataccgagttcgattctcgaatttgtcttgttcaggaaagaaaaaaaaatgagtgaattagtttagtgagtgagattgttcccacaaatccattgtttcactttcaggaatgtaaaaatcttgcaattttacacagtacttaacattgttgtatttatttatttattttttttacatttttatttttttttttttgaaaatgaaatgtctacttcattgaaatttagcattcatcatacaaaagagtttgaagatcattagggacaacaccaccataaatgctacgatcagagaaaaactgagcacgcctagcaacgaaatgggcgactcggttagctgatcgtctaacaaaacgaatactaacat

SEQ ID NO: 161414 - DNA, 1197 bp, Cannabis sativa
tgtgtgtgtctttgctattttaagcttgcccaacatgtcctgcgacgtgaactcgagccgtgggaaacgattatagttggggctgtatctggaggactagctgctgttgcaactacaccctttgatgtgatgaaaactagaatgatgactgctcaaggtcagtctgtctcgatgacagtggtagccatctctatactcaggcatgagggaccccttggattatttaaaggagctgtacccaggtttttctggattgctcccctaggcgccatgaattttgcaggctatgaacttgcaaaaaaggccatggtaaaaaatgaggaactagcagtagcaggtgatggactttcgcaaaagaaggtggccagttccgggtaaatttaacttttgtattttcgggttacattactatagactgcaggttcaatctctgtatttttatgatgatagagcatttgaatgctgctggaaagttttgaacattttccggatctagttgcagcatctctgttcaaaattataacttgccgacctctctccacacaccgaagttttgtctgtcacttgtttcgaacttactctgctcttaatggcagtgaaacatgttttgaattttatgttgtatgttcatttttcttgcaaatctgtacagttttgagctcacacatgttctcattcattttccctaaatgggaaataacgaaaaccatttgttaactttcatcttcacgaggatgaattttacaatcattttatcacactaaatcttttcacaactattttagatgtaagaagattctactacgaattagattgcctttgatgctttattttgaataaaatcatttgataatcgtttaccttcaatgtcacgctccaaatgagagataatagatcaagtttagatatttaggcttattgaagtttaaattaaattattaaatgtttatatagtaagataaataagatttaatgtgaatatatatttgcacttgcatttgtttaaagaaacttggcctgaaaagaacaacatttcaactaaaatacgagtaccttacacaatcacgataacatttgccaccaaaatattctagatgaactcttagcttaagaagaggattattgccaacaacagtctcgtgttttttttggctcaaattaggagactcgaacactcgttttttttttttttttttt

SEQ ID NO: 161415 - DNA, 2581 bp, Cannabis sativa
  modified_base (2388)..(2389): a, c, t, g, unknown or other
tctctctctctctctctcatcagtgacttggaggcaaatttaaagcaagctaagcaggacctcaaagacgcggagcgaaagcatactcttttatctcaagaatatgacaagcaaactcgccttctagatgataagattgtttctatcgccactgtagagaaggtgaaacttaattcaaattttgagcagaaggtagaggaagttgagaaggatgctcttaaaatggttaaggaaactacatctaaattaagctctaccaagcaaatattggcttaagaacaacatgctcgtgaagaatccgagaaaaagactttagagttggagggccaaattcagaaaattactcaggagaacaagaccaggaggctaggacgtcgaaagtgttgaagcaggctttcatgtattctttgaacaccatatgggaacttaacaattctgtgatggattttctagatgatgaagatagagaacaactgatacctcaagtccttcaactagttgaagcagaagaagccaagaaagcagcaaggacatcaaaggttgtcgatcttggaacttcccccctggagggtgagaatttggaagacccaactcatccgactgttgacactccttccatggtcgattctttagtcccgaaagtctctactgatattcagccagtcgatactcagccgccaactgatctagctatgccttaactgatttttaaccaactcatactattttttttaatctttgggggataaggatcccttttttgcatatgcggacacaatttatatgcccttgtcatggagcttttaagtatgtgatcgcactttagatatttgcactttttaactcctagagatttaagactatacacatgtttggaaaaatacaataagcaaagcgtgctattcttttagtttaaggtaaaatataaattattttttaggaaggctaattaattaaagagacaacctaaaaatataattaactatttttttaatattttttattatatataaataatattttaatatatattaattgtaattgaaatggattagtttttcattaaattttgaaattatcattcaataaccgatctaattcaactaaacattcaatccaatctaattataatctaatatttaattttttgtaattagattaaattagttcggttcaattggatcagattagatctatccaattctaatgcacaaatacacttataagaacacaaggttaatcaagagtatgaattcttaaaacaataaatgactgaaaatgaaatggacaaaaaaacttaacgaggttcaatcacaaatcttagttaaaatttagatttagtccccaagaaaaagtagctctattggttgtgattttttttattgataatggtaattacaatctcgaatcaaagacacagtttttccaaactacagggattcatagctttacacaaaatctcatctaaggctactcaatcaaacacatgagaaagccttttacaacccttaatttcactcatttaactaatagagagaattcatctcattacaatgtgtgtctaaaccttgattacttccaaaaatgagtcctaagactctattatataggactcgggcaattaggaaacccaattgttctaactacctttacagttgcttgatgattaagaactaagtaagctaaatctcacaataaataacacaagaaaacatatatataatatcagttgcttttggttccatgattcaattatcttttttcattaattaataaactttatcattaatgagttaataggttcatttagagaaatagtaagtagattactggtaacattctccttgctattatactctaattaagtatcaggttccatataacttaaaaacaaataaaaattactaaaatgtactactggcgcctaacatttttcgagtttcatactgctattggtgtaattaagaatcgagtctaagataatttaaaaaaatagcttttaagaaatatctttatgcaatcgtagggtgccacctatagaaggtgttgggcactaccagtgtccaatagcaatactctaaaatatagtttttacgaaatatcgctaactaatggtggggtgccacttataaaaggtgttgggcaccactagtgtctaatagcaatgctctaaaaaataattttaaagaaatatcgctaactaatcataaagtgctacttataaaaagtattggttactattgggtgtctaattgtgtttatttattatacatatataattgtatttaatattggcttgttgagattaattgagccggacagacgaagtttctgcattctttcttgtagataagattaattaattaggtatatatatatatatatatnnatatatataaatatatataaatgtttggttattagctgaaaatcaatacatagaaatatgttaagtcgtcctcatgatagagttctagtagactttgtttgttcttaatggatactgttagggaaatttatttttctatacttagaaaatcaaaaaaaaatttccctaaaccaaaaatttaaaacctaaaaa

SEQ ID NO: 161416 - DNA, 1484 bp, Cannabis sativa
tgcgactcatatatgtgcaagttatttttttaattaaagaaaaataaaataaatttgaattggctaaaactttaaaaattagtcaggtagacccaattgagcaataaaaaatgttattggataattattataaacaccatactaattattatattataagtggataattatttcttatatcttattaaatccaaatatttagtattcaaaataaaattataccaaatagcagaatatggtatatatatcttattatacttgacacaccttaagtataagatgctccttaattataacttctcttttatcattctattctattctcttgtatttctacatgagaaaaaaaattaattaattattacactttgcgtctaaccggtttccttgatctaatttgttgttggaagatgatcaacgtatttattattctatataattaataatcatatggtcctatatatccaatcaacctgacctagcttattataatatttcatgaatgtttatctgttttaataaattaagtaatcaaaatttagagaagtttgtcaattgaataataagttatataaattaattgactaaattaagtctgtcattataatttatatataggtaataattcatttttttttgttaaatattacaatcagattctggctgcagttagagaattggtagatcaatacaaggatgaggaagtgagcattactttcaccggacacagcatgggcgctgcagtcgccactctcgcagccactgatgtcacatacaatagctataacaagccgaccggaaggcctgataaggcctttctggtcaccgccattgttttcgcaagtccatccttgggaaacaaaggtttcaaggccacattctccaatctcaacaaccttcacgtcctgcgcctgagaaataagacagaccaccgccatgatgatcaattatgccttccattgttcgactacgaccacgtcggacaggagctggtcatagacacccttctgtcgccgtacttgaaagaagccgaaaataccgtacaccagcttgaggtttatttgcatggcgttgccggaacccaaggcagtgggggagggttcaagttggaagtggatcgtgatatcaaactggtgaataagagattggatggtttgaaggatgaatatctcgtgacgagcaactggtgggtcgagaaaaataagggtatgattcagttggatgatgggtcttgggtgctcatggatcgtgagatggaggactaggaaagtaacgatggattgaagccctagctattcttgttatggtttacgaaatatatagataataaataaatgtgtatccatggtatatcgggaagatgtcataccgataatattcatgttgtgctccatatatgcatgcctatgtctatgtgttggtgatgtcgcccaattagttacactgcgatcgcggtagtaaacgggctatatgtcgtatccaca

SEQ ID NO: 161417 - DNA, 2200 bp, Cannabis sativa
  modified_base (2155)..(2156): a, c, t, g, unknown or other
caagataatgggccaggacaattaggaaatatgggccccaagactatccaagctgccagatagttatattcggaaccagatatctctggatctggaagggtgcctcgcttaaataagaagtagtgataatgatcttctggatgagcctttttggatacatttggaaggccttccaagagacgtacgaaagccaagctgaagttgatgtgacgatcctctaataccaaatcccaccatattaaggggttatcccctatgtcagaccctacgattgtgcataccaccaaagggaacatccattttgtcttacgaccattattctgacactacagtatgcaaaggcaacaccaaaacatctatcaaccttaagcagtcccttgtcgtacggaaaataatagctccacggcctaggcatctatctgtgggcccaaagccagtgtattttatgtatttacctcattagtgaactaagtttaggtgagaaattcatggtgtaaatactaccttgtactttcatgcaaaatgtgaaaaatttatggtgtaaatactatagcgaaaggctagagttcttaaacttgtcaagaacataggtgttatacttcaaggctattcagtccaatacaactaactggtggactaaagttcactaattctcgaaccatgtaaaaatttctatctctatttttgtctatttgattcattttcttagttcttacttcatggtattgagttttcaaaaatctccataaatatatatatcatttattaaattaaaatgtacgggagtcgatattaaaatacactaatagcaatatattacctcttgtggtacttgacacattaaggtatcacttaacaattctctatgtttttaggacactaaacttatttaccacttttttgtgcaatcaccaagtgtcacgtttatatgcttatatgttatttttttttacaatatagatacttaatgttatgtttttgttgcagttgttactgcgacttccattaatagtttatatgacttataaagatatcatgtgtcactttaattttggtcaacatcattattttaaaaagttatttattttaaaaaatatatttttcactcacattttctccttttttatacgtttggtactctaatttgaaagaataaagaaaatcaatcacaaagttacctttttttataaaccaaaattatttcagaagaattaaaataatgactgaatcattgacaatattgcacatgcttgtgaaataataacatttgtgagtaaatatttcacaaatttggaaattctgttttttattattattattatttttttttgacaagaaatgttttctcctttttaaatgttataagtaattgtatcataagaaaatgttatataagtaaatagatttgtaaacgtaatttgtaagtaaacatttaaaagtatataagagtaagatttgctttaaagtagggacttcggagtcatatttaattgacttgccttgttgctagggagcaatatcttattggagagtgattttttatataaaatataacatgtcattcaaataaagaattttatttttatatttaaaaattacatattttatggatttttatacaatttgtgaaaaaaaggtttattttatgggaaaaactaaaaaaaagggttaaaaaaggtataatataaggtaattgattaccctaatgaggtatcggtttccccttaattgtttttcatatcctatcctgatcgccttttcaacttggacactgttccgattgttttgttacctaatttggtaactgagttagtcgtttaataaaatgatgactttcatttcaaaaaaacaaaagtgatcaaaaataaataaataagagtagaatatattaattaatgatataattattataaaagaaaaaatattcttgtgaaggtaaaatagtcataaaaaatacaattttaagatgtaaaaattaaattgtacaaattttcataaaaaatatttttaaaataaaaatcaaacaaacaaaagtataaaataaaatacaataagaaaagctaagcacgtgcattacacgtgctaatctctcctaatatatctattctatataaagtgtgcctatataactgaattcttgatttatgagaaattnntgggtgactttttatttatatttaataaaataataaaataaaaa

SEQ ID NO: 161418 - DNA, 3313 bp, Cannabis sativa
  modified_base (99)..(106): a, c, t, g, unknown or other
gagagagagagagagagaatctgatgagcaggaggaaaattggatgaattaagaaaagttgtgggacccactttctttaccttattattattattattnnnnnnnntattattattattattatttactcgatttgattgagtcattacaccctttttcaaaaatcttcttcatctacaaaagatttttcatataaatcccaaacccaatcattcttttttttttttttttttgtacttctctctctctctctctacctctcaatctctctctttgatctcaaccttcaaccacgaagacacctctcaaaactcgtctattccctccttttcaaatgataagagtggtggtatttatagatcctcaaagttggtggttgcaaatgccaagatattaagttagttacgcctcaatgaattaacaaataactcctcgtaacaatatctctatgttagcttaagtgaaagtatttctagatgagacgtacgctgaaaggactactttctggataggaatagaaacaactgaagtcaacaatcaggagttcccttctaggagggaacaactagccatccagaattcctttccgaataagactagctttcctaaatactagttttccttaagactccttctcaagtgaacaagatagacttccaagaacactcttccggatgacatctaactttccataacaagaacaactattgaagatttttttatttggaagaactataccatatacattatttaattcaattatgatatatattcatatatgatgtattaatatatatttttttacaaaaaaaaaaatatattattttaatatttagatttaaattttttttcttataattgtttattattaaactaaatttcaaatttaattggtgttaatttatttctgtatacccattctaaaattaaatacataattatattcaccataattcaatccagcatgccaaaccatcaaagaattaatccaattaattaagataaaacatattctatatcccacaatgtatgaaagctattttggtaactataacatatatggaaaatgatcataatccactctttctctctctccctctgtatataaatatacacaccaaactgatcagtagtattattataataataatatacatgcgtgcatgtatgcagtagtactatagtggtggatcgtacggtctctctctaatggctttcaaactccattattatttaccactcactttgttcttggtctcttttatcgctcatgtagctgtagtccagtctgcttcttcttcaccttcaaaatggagctcaaagcaaagagaagcagcagactacgacaagtggttgtcttggaacttagaaaattatcgaacgcaaactacgatggtttccgaattaagaagcagccggaatagatcaggcggttccggcggggcgagggaatcaaccaaggagggagtgagcggagtagtagatgaagctttaaagaaggctgagatgaacaaaatgaatataagcgtgggccaagatggaaccgctgatttcactactatcaccgaagccctcaactccattccccctcccaacaccaggagagtcattttgactatcaaaccaggtgtttataggtacgttgttaaggctcgtcaggaccgtgtaatttctatatttcttacttatcaatattatttctctagttaaaatataggctaattaggattattactctagaattttgacatataccaaaccatgcctttaaacttttaaggtcgttaaaaatgtttcctgaactattgacattgttggatttaaggacttttgttaaattttagtaaaaaaaatctaatatgataaaagttcacgggacatgatttagtacatgtaaaagtttgaggaacatgatttggtaaatatcaaagtctgagagcatgatttagtacataaacagttactaaaataataaaattgaatgaaattagaccaatcactaaaatagtaaaattgaatgaaattagactaaaatccttaaatctaaccatctcatagtttaggagaaatttttaacagccaaaaaaatttagaaaacataatttagtacatgttaaagtttagagagcaaaaatctaattatgctaaaattgtatttatattatttgcgaatgctgtgtgtagggaaaaaataacgattccaaaaagtttgccgtttattacactgttgggcgacggtgatgagcccccactgattactggaaacgacaccgcatctgtcactggaaaagatgggaaacctttgaggacgtttcagagtgcaacggttgccgtcgaagctaactacttcatcgccatcaacctcaaagttgaggtgtgttaaggcttatagtttataacatatagtattgttgtgagtttaatttcacatataatcttggaataactatataattacttacatatatctacagtgctttcgttacacttttttaatttttaattagattagtaaaagtattttcaacatacatattctacaaagcgtttgtgctttttaatttttgtatcactttctaaatttatttaacaaaaatttacatgagactaataaaattttgataaaaattaaaaaaatacatgaacaaaaaaaaaaaaatttatgatatgtatttttttatttacaaaaatatttgtgcaggaaacataataaattgtatttttttagtatatttatatttaaattatagttgttatgaacttatttttcatgttatttttggttttataatttatgtatggttgatttagagttgtcgtgaggttcatttcaggttattttttagttttttctttattttttgctgaacaaaatgtatttttatcattttaaaattttacaaacatatttttgtgactaaaaattttaagccgtaaaattgtaaataaaacatatataaaaatagtattttgaaaattttcctttatttaataaacagatttattatctttttcttaattaagatatatttgtacttccttttattactattttggaccaagtgcccgatctggaccccttactgcctgaggaccaccatctaactagacacgaaccccatcctcagctgaatcgaccctcagacctagacccagatttgcacccagcccacagatatggaccttgaccctgatatagatctattttttatttgtgttttaaagttttattttttataaagaaaatatagttataaaacacttatatttttaaggctaattagcaattttttcctccgaactttgacatgta

SEQ ID NO: 161419 - DNA, 1920 bp, Cannabis sativa
ttaatattttttaatatgtaatttcattttctcacagctacttctcaatatcaactgcattggagttgcacttagtaatacactgtagatccccataaaaatagggtgacaattgcaatccattatagtaaaaaagaaaaactttcacactatatatcaccgtactctacttgtttcaataataattataatatttattcaacaaaactaatcaaaaattcaccattacataagaaaatcaattatcgatcattatggaatggaatttgtaaatataaataaaaataacaaagtcaccaaatcaaattattaacaaaaaaaaaagtggatcaaaaaaatatactaaattagatcaaaattaatcaaaagcaaaaataattaaaaacatgtataagtgaaagttaattaggatatatttgtatctttcatatttttaattataaacttaaaatacattggaaaaagtctaacattttaaatttaaatattgaaataatataatatttgaaacaaatttgaaatgaaatctactacttgaaaatataaattattttaacaaaaatctattatatttagaaaaaaaattcttaaaactatgcttgcctattttgaaattataaatgatttattaaatttattttattccatactacttaatataagaatgtgagtatattaaaaataaactacatgtataagaatatatttgtatattattgtttatataaaattaattatgttcggtaattaacatttaagaaagtggaagatataaattatgaatgagttatctctccagcttgtaaaacctaattttattttatttttgcaattggtatacatgggttggggctttacaccgcagaagtaaagtattgctttcggggtagggatttaaagctttcagattttgaagaagatatatcatcctagctagaagcttgtaagctaaaggtatccgttgaaaatgggatacccttatcctcgcacaaaactccgcgaagtatgtccttagagggagatgtgcaccactcactatgtgggcccagctctaggcgttgaacccatcagtactaacagcatgttccacatcaatctcagaatattacgaagctcgacttcgaaagcataaagctccatcatcccataggacctgaagttgttaggtttttggttcatttcccagatggagtcattatagacaactggtagggtgacaaaactttagctttttccttcaccttggactttattgcctccccaaatggagcagcctccaggacagattcttgttgaagtttctctacgggagtcatagctgaaacttcctccacattcacctccttagtgagggtcgccacttgcgtttcctcaatattaattgtcttagactgaattccaaatggcaattataaatgtctatctatacttgcttaaatttatgattattactttccgaacccagatgcacatcctcctaagttgaaatctcatttctatcgacacactgaaaataaattcataaaaaatattcttcatagcttttatgtacgtgctagtactaactcatctaactgcaaaatacatttcccttcttagaaaatactttctattttgatatagatacaactaaacaaaaaaattataaattttcttcaaaaaaaactaaacaaaaaaattataaattaaaattactttattcacccaataatattataataatataaaatagggtaaatggcggcaaaactcccaatactttcgttttggtttcactaaactcccaaaacctaaatttgtgcgggtaaacccccaaaattaggaaactgttagcaatttcacacttccgtccaaatttacctgttaactgccaggttggattgtccacgtggacacaatatacacgtggcacaattttat

SEQ ID NO: 161420 - DNA, 3302 bp, Cannabis sativa
  modified_base (3238)..(3256): a, c, t, g, unknown or other
taaaattatttaaaattaaatttattgacgtgtaattttcttaatataatttaactatagttcatcaaatttttgcaacaaaaaaaagttaaaagataacacttcaccaagacaataattgtggggaaaaaaaatatttgtctatctgaaaataaaataacttttgatgtcttggaccggagcttgagagaaaagaaatttgaataatcaaaatcagagatatggttcaatcaaaacatgtcttgttgagtaatttccttctcttttttcaaatataaaatatatataacccggaaaacgacagttatggcccgaactttcttcgggtggaatattcttgcgagatactgtcatactgactatagttggccgccgtagcatcactctatttttgttttttttatctgattattattattttatttttctcaaatgctattattttgtagtatataatactatttttgtcaatcatatagcattatatacttatttgagccacaaaagaaaaagaaaaaaaaaagtgatatagatattatatgtttaatattttacatctagttgatttttaatatatgtagatcagtcaccagcagccaacatgcgatagtgcaaacatgtgagcttttcttctagattgaatgacatgtgatcaattaaatcatggcacttctttcctcagaagaacattgtttttttttattatttttgatctcaattaaatattcaatacttaacagttgggtcaatttacacacacccttacttataaaaaatcataagagagatttgaaagcacataagagagcattctctcttttatactgagctcatttgaacaagtgaactataaaatgaagtttgaaattatggacaaatcatcactaaaaagtaattgctcaattatgacattaatttgttttgattaaagtacatttcagaattggataattgtatcaatcaccaacgaccactttttatttatcgttgttattatttttatttgtactgagattctagaagaaacatattttccaaagtggctggcttcacagttcacaattcacaattcacgattccacatgtagtccgtggctgcctcgaggggtaaaaactaaaacgtagcccaaattgtagttggcagaaaagacgcagacgggggacgtttctattaatgggattttttttctttttcttttactgaggtattaatgggactttaatcgacattaatagtcctatttccaccatatcattttcatctactttctagaattttgctccacttcaatcagtacgccacctgtatggtcaccttttcttctgcacaaaatagaaaatacatacacatgcaccaatttttttaaaataaacaataaaaatataactaaatatacttgatacacataacaatagtattttacctaaatttgtgaacaataccaattcaagcagaataatgtctcagaaaccgcacaaaatgttttattccaaatctaaaaaaaattaaaaataaatataaatataaatactactatttttgaaagggatttaaagaggatgaaacaaaataaaataataataaaagagatattagagaataaatggaaactaacctgtcattagtggtttggtggtggttttccggcgttgatggtggtacatagtggttcttcaatgctacctttagaagcgatgacaataaataaataaataaatataaatatatgtgtagaagaaaaatatataaaaaaaattcaacaaaaacttaaccaaattcacttcgctcggcattcccctgggtgggcggtggcggtggcagaggagattgaagaagagaaaagattgaaagattgagtagagagaaaaagaagaagagagaagagagggtagatagacaaaatgagctagctcccatcgaaatttttggttatataaatagaatgaccgacggttcccccgctattagtgtgtgccgccagcaataacaaaactgtaataaatattttgttattagcgttggactccgctgcttcttttttaaactcagaaagcagggactttcttgcactttcgtctctctctattagcagcagcaccctctaccactactaataaaatttccgcttactatacttaaaaaagctaataaattaagggtatttagtagaacttttattttttaatattttaattataaaactaaaaataaaatttgtattttttttttttttgataaatagagacttttattaaagaaaaaaaaaacactaacagccacaacatggggcacatctcttaacaaaccataagcctcaactttagtctccctagccgagcgagctaatctatcaattaagacattctcagaccgaggtacattataagacacaacaattttgttataaaagacttacagaggttcaaacaaaacgtaaacaggagaaaagtacaccaaccaaatggtaaagtcctagctacaaaaacagtagcagctgccatagaattcgtttcaatttagacatttgacacctctttctccaaagctaaatatgcagcgccaattccccttcaagtaccccgtagactttagaaaaccccacagaaacccaagaatccacgattgtttgaccgtgagtgtgaacatcagcaaaaccagccttcccgcacaacagatgcatcaactttacagcaccagagacccttctcttggagcgaaacaggccccttcacctctgcatcatacacgaccctttgatcaaaccacagccgattctgcatgaagtcattagttctcaagaggcaatccttgtacaccaaatccaaatcactcattcggtcattgaaaatcccatcattgcgccatttccacaggatttcacaaacacaggcaatgcagacttgagtttcttcatctttcaaactgctccaccatgattcgaaatccatcagattagcccaattaaaacaatcaatccttatgcaccttctgaaccaaattccacgagagaaaaaacattgacaatacaagtgaaaagtagtttcaatttccatttggcagtagtcacaaatttggtgctccttttggaagaagccaagcttactcttggtgggaaggatatctgagaagagattctagcagaaaagtttcaatcaaggatgaattctcatcttccaaagcttttcccataacctctttgttggaatatgttttactagaatctagatttactaccannnnnnnnnnnnnnnnnnntaaatatgaatttttaaaacaatataatttaaacacatataaagtt

SEQ ID NO: 161421 - DNA, 2882 bp, Cannabis sativa
aattcaaaacaaacaaaattcaattatcacccacccttcctttctaccatacttttacaagttgatttttttttaaaaaaattattagtatgattattattcttaaaataatgtcaaaaaccaaacatggtggccgctaatcctcctaattatttaatggtaagaaggttggtcgtttcaacatgaaaaaggcctaaacttgttattttgtgtggtagtaaagccagcgttcatacatacacatttgcccatatggctcatataggccataatataggcgtagtaggtaaggatattgcagtctttttagaatatgcacccacaaatttcttttttcttttttcttttttcttttttcccatctttgtggttggtgaatacaatatatattatatcattttagaaaactagtccaacccaatgattttgaccccactacttccccacccaaaactaccctcaccaaccccttatatataaaaatctataccattatattatccatctccaacaacaaactacaatatttattttttttttctccattggccagacccgactagactactaatttgatttgactttcaaattttgaaaatatgcatcataattctattaaaatattaagtcaccagcctagcttgtttacagcagtcatttaataaagtatgtttattgcatgtggcagtggcacccttattttttttttttattaagggctcgtttcttgactataaatttcaagagaaaaaaaaaagaagaagaagaagaaaggaatcaaaggattttattatttcctatttagactgaattagtgaattaagaattttatttaaaaataaaaaataaaaattaagtgtagtatgtataattttatgaaaaacattttgctactatttgccgtcttaagaatttttcttggtaaaatccaaattctaaacaaagcttaaaataagttgtctaaatttataaattgaattttgtaaaaaaaaaccccaatttaagtacttacaaaatcttttctaatttatcattataggacacataattaatatccaaatcctatccataatcaatgaaccttacatttttttttctcaaaaaaaaaacatcattagggtaaaatcactagagtgttgattaatcaaaaccaaattaagatttttttctttctaacaaaagaaaaaacaattttaaattattattactttttttctttcccaattctccttttacacacaataatgtttttcccattctacccctttcaccaaccgcactatccaaccaactaaaaaaacttcaactatatcatcacctccccaatccaccatagctccttggggcctcaatccatttcccataacacaaacacaacacaacacttaacatcgatcaattctcttcatctcatcatcatcatcatcatcatcatcaaaaaaatggcactagttaccgaaataacaaagcaagaacaacaacaagacataatatttcgatcaaagttaccagatatttacatcccaaaacacctcccattacacacatattgctttggcaacaaaacacaacacgacctatctcacccctgtctcatctacggccccacaggccaagttttcacctatgccgaagtcgatctcaccgcccgaaaactcgcctccggtctcaacaagcttggagtcaaacaaggcgacgtagtaatggttctcctccctaattcaccagagtacgtcttcaccttcttaggagcttcatatcgcggcgccatgacaacagccgccaaccctttcttcacagctgcagagattcaaaaacaagccaaagcttccaagactaagcttatagtgactcaagcttcttactacgacaaagtgaaggatttggatcaagaaggattggtcaaattcgtttgcgttgactcccctgttcctgaaggttggtttcatttctccgagctttgtaataattcagatgagaacgacatggctgaggttgaaataagcccagacgacgtcgttgcgttgccttactcgtctggaacgactggtcttcctaaaggggttatgttaacgcataagggtcttgtgactagcgtggctcaacaagtggatggtgagaatccaaatttgtattacagcaaaaacgacgtcgttttgtgcgtgcttcctctgtttcatatctattctttgaactcggtcatgctttgtagtcttcgtgctggggctacgattttgattatgccgaaatttgagattggttctttgcttggactgattgagaggtataaggtgagcgtggcacctattgtgccacccattgttttggccattgctaagtatcctgatctacacaaatacgacttgtcgtcgttgaaggtgctcaagagtggtggagcaccattggggaaggagcttgaagacacggtcagagctaagtttcccaacgtcacgttaggccaggtatatactcttttcattaattaatgatttagagtcaaatgtttaaattgaactcttaaaagatactattagtacctaatatattcttccatgttataccaatattagttattgggcgttctataactttaaaaaataagcattacaatcagggaccaatagtgtctaacatctttaaatttgttgttttacgattggttaacgatactctttaaaagttattacaataaattatatgagaaacgatacttaattggatcaatagcgataatgatacataaaaaaattctaaagacccgtagtacttttctctaaaaaaaaataatttaaaagaatattgctaataaattataaggcgccatgtgctaggcaccacgaattgagtattcaatttgtattttaataatgaattacattaat

SEQ ID NO: 161422 - DNA, 4643 bp, Cannabis sativa
tggttgaatcaccatatagaactcttaatatatcaataattaaattaaaataacattatggcactccaatatataataaattaaatgaggctacttctttataaaatcccagtaataaaatgaagttccctacagttgttacattaaacaatctatattcatgacaaaattcccaatatatatgcctaggagacatttaatcaaacaccataactacaaaattatattcttcagtaacagtaacagccattatataaagtcatattttatataaaaaagtaaaggcatcaatatatttaatcgaaaagataagaaggaatactaaccaataataatatataaaattgtataaataatattaataatattttgtaaaataggatagaattatatatacctacttgaatgtggagttgttcgagtggaagtgaagagaagttggtccgttgctgcgtgggggctgaggaagtgagagaagctgccgatatacgatgatagagctgatattggaactcatattaacttcaatgttcaaaaattgaaccaatatcacaccaccacactactacaacccaacaacaacaacaatagctaattaccagcaacacatgttcttacaataaggaagtaccatgtcatctatatagtgatgacatggggccaaagttacatgatgcatattggtgtgcccaatcatctaatattatcaatagctaaatgataaccttatataagtagaaagaaactaatgcaattgtagcccatattacatatatacatgtatgaaagttgcctccaataaaaggtcaaccaacaattgtattaaaagggagtacacaaagcaacaaagttcaaacatcagtacaacataaaacaaacgaaactagcaaggaactaactaaagcacaacactaataaaaaaccaaacaacactagaaaagaatgattgaacatcaattttaaacaaaaagctgaaatagatattgacttgaatagcttacaatgaatatatatatacacatatacacagaagatgtaataaagaatatccaaaagtttgacattgtagtactcaaatatatctacaatgcatctattatgtatataaaaactagagatgattagagcatatttataaataccactcaaaaataccataaatataaaataaacagtctcttggcctaaaataaaataaataaaagaattaaattgaactgagaccaaaacaaattttcgtctattcaatttctggtatctttttttatatatataaacacaatgaagcttaaattaatgataagctaatgtatatgaaccattaaattataaaataaattaactaaaccataacagaatatcgtacctataaaataagtgcctatctaacaaatatgattgtgcctaacataatttttaagaaaaaaattgttagctttaacaaaaagtgtttcttagtcatcaaattattataaacaaaacatatttgttcacataaaactatttgtactcaacagctgcatctttttgcaaaaaaatacaacccaatcaaaaagaagatggctgatcacatagaataccacaatatatattctaagaaaattatgtcaaacaatctaattagttattaagctttaaagaaaaatttcagtggttagattaatttattttgctgtagtcataggatatttcattttaaagggaataagaatggactaaacaaatcattcattcataagtaatttttttttattcgatgcttaatgttagagaaatacatatgaatattggtctcctattattttcttctccaaaaaagcaacacaccaactgataatctcttatcattggagtcagataaaaagcttaatttatttgactgtcatttattggcttgttatatttttactacacgaattttcaaaacacgtgtaagatatatcctcttacaaataaagaacgaataaaatttgaaagtttaggcaagggagtaaatataatattatcctatgtatttatctatccacacacgcatcaatcaaaatacgatattatgaggaatttttttacatatatttatttggtggaacatattctagaaagtatcattatgaaaacaaaaattcactcaaaaaacaaaaagaaatttgccaaaaaagaaaactgtacttagaatcatgaaaaaatacataaattaccacttaatgatatttcaaaccagttaataaagttgtaatgttggcaacttacacacaagaaaaagaaacaacaccaacaagagcagttaaagaaacaacaccaataatattgttgtaatatattatactcaaaccagttcaagttatgatataaaattttctattatggctatcattttagatttgatcaaaataaactagtagataaaaactaataaaaactgtaagaaaaaaaataaaaagatgaaagttgatgatctttttggtaaaaatgacattcatactttaatatatgacatgcttttagagaaaacttttctttttcccttttttatttgtttttttgtattatcctctactaaagaaacctaataatgattgaacactaaacattcagtcaaaatgttattgcttgctatatggtagttaattttctcttctaagttaataactttatgttcgtttttcactttggttatatgaaggcaactttttccaaaaaaaataaagcaaagaaaaaaaaacacccaaagaaaagaaataaaaaacaatatgggcataacaataaatcagaggtctaacactttcctagaaaaatttattgaatcatattgaacaaattcttcaaacatcttaaaagaaaattgtcatgttgaaaggtggagctagcactccaaaaaataggaaagaaagcaagagaaagagctatatcaccaactatcgtggagcaataatagagctagcatatgatttataatatatgtatagattatagataattaaaattttacatatacatgttttgaaatcaaaatcagagtgtagaggcacctaaattacatacatacccactttaaaataaacgatttatttcaaatggtgaccttaaaatagagcataatggaaaattgactattctagtgtcttcttcctcaactaagagccccaatttattaaaccagaaaaacagaggtacaacatgtaacacaaaatgacaaagaggaaggaaacaaaatactaaaccactatctggccacaaaatcagaggaaaaagaagagatcaaataatgccagcacgcatgaaaccaattaacaaaatagaacataacgaaattgtccaatatataaaaatattacaaaacacccactaaatcagccatcattctgtcttctaattagagagaatgaaatcattaaaagcagaacttaaaaagaaaaaccaattagaaaaaaagagtacttcgaaagatactaagacattgggaaaaaacaaatgaaattatcctccaaattgttcaaagttcttataaagaaagtatgaaattcaatcaaccaaaagttaagcctaaactccatctctaaattatgaaggtccaaaatgttacctgtagttgtccatttggagagagagagagcgtgggtgagagacttgttgtgtcattgagagaggccctgactgattatatagacattcaaacacacaaaaaatacccaaaaaaatcgacaactaaagccctaaataggggtgtcaataatggacacccaaaattctcaatagaagaacagaaacaaaaacaaaatatatatatataaaatactaaaaaacccaaaacatatcaagaactcagaggccttaccttgtctactctagtggcatgagacgatgatcccacgatgatgcaacagagaaggcagtggaaaatgcaacagtgagggacgatgggcgaccagcaatttttcgaaacgaggaagaaggggataacttctggcgcgcgcggctatctgctagggttttgaaatgggggctgtgatctgctaggtttcgaaatgggggaggagacaaaataaaatggtatttgtgagaaatgagttttacaaaacttaaatctttttacttcgattaataactgtagcaaattgattaacctctattttgcactaaagcaaaaacaattcgcgtctcttttctgaagtaaaatgtaaaagataattttaaattttttttttttcggttcttcttttagcgtgggcatatcaactgacgctaattggtatttcttagattcagttattctgtgaaacactgaaacataaaatttctacttttttttggtctcggttaactattttagtaaaacgtgttgatcaacgcaaattaaacctttttttagtagtgctcccgttgactacttcagccaaatttgacttgatttatttagttatttatttattttcagtttacataagttaaggtcatcaggagactaacgagatgtaattctcaagttcccaatggcttttttcccacattagtccccattcttttaactttttggcatattagtacctatgttttttttttttttttttgagaaacctgatgctttataaaggaccaaagaagagtaaagtcaacaggtgtaactggaaggcaaacaaccattc

SEQ ID NO: 161423 - DNA, 1832 bp, Cannabis sativa
  modified_base (1387)..(1387): a, c, t, g, unknown or other
atccaccacgagttgtcgcatgctcaacgaccacccacaaccgtcgtccccttcccaactgcacaaaacatccctccagccaccactcgcccacaaccccgttcagtttgtcctctccttattcttcccactctcactgccgaccaccacccgcaacccaacccgtcttctccttaggtggcattttcaaattttgaaataaagatgaaaccaagtgagttgttctttgatttttattttaataatttttttctattttttaaaagtgaataaaattttaaaaaaatgataatttttataaaaaatatgagtttttatttgaatattataggttcaaaattattttagtgacctttttaccacttgagaattattgaggagcttcatttaggtatgattttttttatagattttttttttttttgaattttggctgaaattgatagtttaattcaattaatttttatgtcaattagttttttggtgaatagttatttagaaagtgaaatgtgttgttttgatgtaatttgaattgaaaaatttgcttttgtgaaatgaaaaagtaggaaaagtatgtgtaatactacaagaaatgtcagttttaccagcatagtttgctactacgctggtaaaaataacttttaccagcgcatttcgcaaactacactggcaaataagtcaaagttttactatcacacatttgtagtggttaaaatctgacttttaccagtgcatttatgaaatgcactgctgggaaaaatcatttttgccagcgtttttcattttatgctggcaaaagttctaataccaacgttgatttgccaaaccctttcgccaatacatcagaagtaaatttcattttaacagcgcaataccaaacttttaccagcacaaaaatgtgctggcaaaagtgacatttcttatagtaaatttcttttccttcaaatagatatgttatttaaaaaaaattagaatatatattgagtgtttgtctaaacttttagtttaatcttaatataatattttgtttaattttaaattaaaaaatttggttatagaaatttaaaataatggtttattttttatttttcttataccttattttgcttcaattgaatgggtggttgagatcattagtaaaaaaaaaagaaaagtatggttgagatatgtattatttttaaataatttgaattcaaaactcaagtttgtaatctgaggagaaattatttttatattttatttaatttgtatatgagttttagttagattttgtgtcttaaataaaactctattttaatataatcttttattcatttatcaataaagaaatatacttatttaatgagttatttagttcatgtgattatttatttatttatttgatttntaaattcatccaaatccttataacattaatattcttatttcttgtgctgtcaatagagtggaaagtaatcaagattgtgtgattaaatgtattcttatgatttaccagtacacaggatttaactgatgggataatttacaatgtagtttacttgcaccttggataaatgttatgtcctttccagggcattggttaaagtaagcttaggttggatgtatggagtatgcatcagaagggatcgatattgaacttggataagatataataaacttaccataatagctattcaaatcaatatcgcctagttgatcttagatcaaatgatctcaatcctaagatggttaggtgcaagttcaattgtactatttgtgttcttcaatctgctcgttaaagtcgaccaatggttcttctcgtgacatataaattaaggacatggtagttcaat

SEQ ID NO: 161424 - DNA, 11118 bp, Cannabis sativa
ggaagtatctttttcgatgaagcattgaggttctatatcagatttggccgacgacgaacacttatcttcaagaacgtcaactttgtccatgtccgattctttgcagttcccgccttgactactttcctcttttgttccaatgtttccctcaactttgttaaaatgtaccttatcttcgatattcaatgttttgatcttgacctcaggtgactcttgagtatctttgccagtagattcctcttgttcttcatgctgagaaatcggagtgctttctgatgtaacttccacatcagattcggtactttccttctgcgatatactgagaacctcagcttgcttagatccactacaaaccgatgtttcagaatcagttggtgcatctttagatccatcggtagcattagatacttcaatagtgcagctggtaggatcaaccctctttgtttcaagcttctcttcagctttagccgagattacaggtttatcttcctcctcctccggtgtacacctagctatcacaccgctattgctctccgctacttgatttactggtgcaggctctttctctcggctggctttgccattgggggatttaaccggtgtttttcttgttttgtcctttgcgttatttactactggcttcactggaagaaaaacagaagatgcatttcgacattgaagaagataaggttgtaaatgcgggtgtctcaacagctctgcagcctatattttatcaaattctaaagaagtcagcataaaaattggtaaaagtcaaattaccgtgatgcaaatgcaagtctcgggctacttgaacttactgttggtctatgttcggggctctttctgagcatgcttttaataatttgtttcctgcaatgtcgaggatgcaaaagttaaaactaacgcaacacatattataaaccgttaccataaaaacagatagatacaatgattttaaagtaataactcacagtgtggaagaatacacaataggaagcggcgaaatagaagatctgttaattttgtttattagtccagccatatcctgtaattgatggatttgtttactcgttagcgtatactgaagagaggttcatgcacagttcacatgcatcattttagttgtaatatcaatacaatacaaacagttgttgattgaacttaccggggctctaaatgccggttgatgagctgcaatttcaaacatacagcagcctggaagccacaaggggagaaacagagtaaatacttaatcctttcaaggacatgaattcataatcagaacatgaaattttaaatctcaccgagtgaccaaatatcggatttgtagccataaggtatatcagcaaggagctcgggacacatgtagttgggagttccaaccacctacattgaacacaaaatgcattcagaagacataaaaccttgactccaaagactaagagattgatacactacacactgctactctttttcccattcgaacaacagaaaaatgaggtaatttattctaaagttgaagcactagacaaataaaaataagataaaatatgagaaactcgtatagttcataccgatgaagcaaggtcttctgtgttgagtagctttgcaagtccaaagtctcctgtaaattgcatgcatgataaagcggtttagaagacatcaagccaaaacagccaaaatcataatgaagcaaagagaaattcttcatagaaatcttagaatcttcataccaagccgaatgtcattgtcttttgtaaggaatatgttggagcactggaatcaaatgatttcaaatgagtacacaatcatttacagaacctattcaatgaactataaggtatatttccataccttaagatctctgtgaaggacccgatttgaatgcaagtagtctacagctagcaacaactgagccagccatttgcaaagtttctagaagcaaaacacaacatagcttcagaaacttactgcaacatacagaagaacatgaaagaaattaatgaaacctttctgcttacctcttccggaaaatatgttcctctggccttttttatcatatcagccctgtaagtcaaattagtttttccttgacaaagttatattcatgggcaccgctgtgattattctaaaaatcttttagtaactcaaatgcatgttacttacatgtctcctccttcacaatggctagtcacaatacagatacagtccccctaaataaacaaaaaaataaagaacgctttagaaaacatgcgtgtatggcatcaaaattggttcttcatttgtactgttgtagaattgtgcaggcataaaaaccccgagcaaaacgaattcacaaataaaaatcatgtctttaccttgtctacccaagcatctttataccccacaatataggggttatttaactttgcaattaagtccatctgtggcaattaagatgacttgtcagtaaatacattttcatatcagaaaagttcaaaacttaagtttctttcttcaataggtactattagtgtatcattttcaagattgtttcaaatccaacacaacatgacattaagtccatttgttcaattagggaaagacaggaaagtgggatctattttttgctacattaaaaaaggtagggggaaaatgatatttaatgaagaggaccaattttgatataaatataataccaacacaacccttaattacaattttctctaatctagtatgcattgaaatagatttaatttgggggaaatttaccaattgggaaacaaagaaaaagaaaagctaaaagatcaatttttttttagtaattttatggagctgacagtgaaatctgctacaataaatccaataggaaagttacctcttggtgagccgtacgtttgaacttctctgtttgcttagccaaacgaatcttcttcagcacatacctataaaacatgggaaagtaacaattaaacaatattcctaaaaactgtcctatatgagttccttctcgtgaattttattctctgacatgtgaaattttctgcaataataaagctgaatattgctcacaagtgataaatatcaactgggcatttgatgtttacaaacaaaattgcctcaaaaacttgataaactgaaaacaaagaaaaaaagattttacatttgatgtctacttttttttttcttacttctttttttcagccttatggagcacaagaaaagcagccccaaatgcccctcttccaatctgctctataacttcataattctccattttggacatcacatcaccattatcattctccataagaagctaaaaccttcaagacccagaattatatacagtgaaataggtccacccagctttattagtagtgggatccaagttttcataccaactgattagactcatattcagaattataatccaaaaccaaattgaaaaaagaggaaattagtgggtacataccaaaattttcacttttaacctcagaagaggaaatttgaggaccaaccaagaaaagtagctgttgatcaataattcccacctcacccaccaacaaccaccaagttttaatcttcaaaaaggttgaatctttaagacagttgaagctagaaaaacaaaagggatcttatagaaaaatgttaaaaagagtaaaagtccaatttcacaacggttgctatcacacctgcaaattgtaagagaaagaaattaagaagaaaaaaaagaaaaaagttggaaggacaaactcaagtgaagcaaacattgcacttaatatcataatcaatgaattcatgacttaccaaaacgaaatagctgatgagttctagagagagaaaatggtgagaaaggacacactcaagtagtatttattattcagcaaaataaaaaaaaaaaatagtatttattccaagtataatacttgattaaaaacttgatatataataaaaaatacttagtagaaaattccacaaaaagaaagtaaggtgacaggtatggaagactaaagggcaaggcaaagctttgcttgcattttcagattcatgggtgagatcaactctctctcacctcttcaccagagaatgtttttcttttttctaaaatattttttcagcttgtagttgtgatgtcaaagtcatagcattagcaacttaaaataataatgaataaaaatttagtctttaataagtttattatcttaagatgattttttgtttgttggttttttggatggtaggggacaaaggagggccataaaacaattttcttttttctttttttgggtcagagtcagactttgagattggccattttgtggtggaattttcctctgaaaagagtaattttaacatagtttatggattgccaaaattaataatataactatttggttttattcaagataaattattatgcaaaaggaaataaaacctataacaatgtaagagaaaccttaaaactttagttttatgactatggtgataattgggtaaacatttattttgggctgatggctactcctactcctagtgtcttcaattgggggtagttatgtttttgcaacatctcattcattatatctggttttttcatatgactataatgagggtttgttttatgtacaatttgcatgtttgatagtcactcttcttaatttttgtaaaagtgtatatatttctaagatttttaagttcagtgtttatcaatattctacaatttgggtaaaacaatactcaattgctaataaaatgcctcctctctttatgagttttgttttctgctaggttttagaatggaaagtacaagtacttttgtgtaatcctaaccctacatttcagtgttgttagaatttactttaatacaaaggatagatagacaaatatgttgtacttaactttaatgttaatattattattggaagtcaaatatctcccttgttttatttttttttttagggtaaaaaccttcattcaaataaatcataagtaaaggttacaaatttaggtaaaagttggaccgaacatttttaccaggttcgactcggacttggccaacccgccaaaccggtagaccttttggacggtcgggttcaacctagtggacctctcaggtgggtttcaggtttaattttttaggtgactgggtttcgatacccggacctacatgtaaacccaatgtttttttacttttacctaaactttaataataatacaagtttacacttaacatacattggacctcaaatataataatattaattattcctaaaaataattacataatacaatacatattatatgactatttttacataatacaatatatattatatgaacatacacttttctttatgttgaaagtttgtgtatatgtatttcattaaatttaatggtttagttatatgattatatataattaggttagtgtttaggtttagttatatattaaaatataagtatgtttataaataattaggtgaatgttagggaaaaaaaaagttgatcgggtcaatcccaaccctaacccgccaacctgggacacatgaacgggcgggttcgagttcacttttttttaaccgaaacttgccaaccaaaactcggtcaaccacccgatagttagtcttagataaaattacaataaatacacactcaaattctacacattttttatattctaatacaataataagaatttattttttcttaatgaaaaattcatcttaattaactaataatctctgttaccaaacaaggtaagaatttagtcggaacagactcaaaactaaaataacgatcaaaatacaaaacaacaaatttagcacatctatgagccactacattagctcactgcttaacaaaaacaattgaaacattctttaaaacagcaagcaaagttttgcaatcatgaatgaaatgaccaaacaaagagatcatacaaataaagcttgcacgacacaaagacaatttgtctccaaggttacttcctgccattgtctctctttgatccagcttaaggtctcacgaatcccaatggcctcagctaacactacttcaagcgagccatgagagaaacaaatgcgaccctcaataagcatacaatatcctctcgcatcaccaatcccaaaccataagaactaccccatcaaacaaagttgcatccacattaaccttaatactatttgcatgtggtaaagttcaatgctctgcaccatcactcgcctaaaaactagaccacgatgagcccattttatatttttgagcattattctattgattaaggtagccttgtgcaaacacaataatatcttatgcatgcatcgtcttacccttccaaactaaatcatttcgagccccccaaatggcccaacacacagcagccattgaacagttctctttattcacttactaaaaaactgtattgcaccagtctataaaagaaacacttgatgttatcaaagtaccaatcctaactctattacaacaagtttgaatcactttacaagtgactaggctatggagaactgtttcatcatgagaccagcaaacaggacaaagagaacttacattgacatgtttagtctgaagttgaactatcattagaagacaacccataccagcacgctaaataaagtatttaatttgggggcagctttaaaccacataacttgtgccgaaaccccgagccattatcctcataccgtctgccattcaacttctgtaacaaattatacgcactcttaatagtatagatacctgaagtctcctttgaccacacatagttgtccttgacattagcaacttgcaacaagatatcaaggataaaaccttggtctcgatgaataaacaaatcttcaactaattccacatcctagcccatgccatcaactttgaacaagttaaatacagtcgcctcacttaaagcaaggtggttggagatcataggattcatgtcatctgggagccaaggttaacccaatacagaaatattcctcccattaccaacacaccatcgaacacctttccaaacaacctcttatgatcccatatgttacgccaaacaaagctttgattagagcctaattgagtcaaaaggaagtcaccccttgggaaatatcttgctttgaacactctagtagccaaagagttaagcctagtcagaagtctctaaccttgcttacctagaagggcaagactaaagccacaaagttttcaaaaacccattccacccactcatttatgcttacacaatctatcccaagacatccagtgtattccttttccacctcaattcgaggattgccaccgaaaattttccatcaaactttcgatatcacgagtaatctccaaggaaagcaaaaaaaaaaacacatagcataacttggtgattcttgggccacatttttcaccaatatttccttaattgctcttgaaaggatcttactctcccagccttgcgatcttttttgaactctttcctttagataacccaacaccacaaatttattacaagacataatgctagggagaccaaaataaaagtttccttccaccaaaatgttcatttgtaagagttgacaaaacgacttctatctaatttgacaatattagtactaaataaaatggaagatttagccaagtttacctcctggccagaacaaatcttaaacttacgaagtaattctttgactcctaatgcctccacttttgtggctttacaatagagacaactatcatctgcgaagagcatgtgagagactttaggtgcactattatccaccttacaaccatgaatccaaccattatattcatatttttgaagtagagtagaaaggccttcagtataaagaataaataaataaagtgagagaggatcgccttgtctgatgcccctcgttggaacaattggacccatcttatggcccccatgaataactttatactttgctgaagaaacacacctcataatcagtcttacccaaccttctacaaagcccaacttacgaagcataccttctaaaaaatttatattcagcacgatcatagactttgctcatatcaagcttcaaagccatgaagctagtcttcccatgccttttcctttctaagtatggatcaccttaattgaaatatgtgtctatttcactttaaaataaccaatatacttcgcaaatttcatattgatatcataaacaattaattgatggttagaaaactaaaagaaattaagtacaaataaaataaatacacaaaaaaaattgggaaagaattgaatcacataaaactaaaataaagtgtcaaacaatcttcattaataactcaaattaaaagtttagctactcatattcattgtaaataattgatagcaattaattaagaacataagaaacagagaagaagaaagaactcttcaaaaaataattgatgaaagtctccagaacccgctttctgcttccgattttcgtcccttaaaatgatgttctcaaaaagtgtcaaaggtcctttttaaatctcaaaattagggttttaaatcctaatttttacattctgaccataacgggccgcgacatggaccccctatgtcgcggcccctgaaggctatcttcgacaacaagctttctggtgcgacagcccaagtgacatttttaatccacccttactaagcctaactttaaaaatccataagtccttttaatttcaaagcacattttcattagtggataaggctaaatagtgcaagcttactgatattcggtcagtggatatgttggattgactttgagcatgtacattaatttttaatagtttttgacatttatgaagtttgagagctaaagttagtattatgagcaattggattaaaaatctgattttataacagttgaatcttgtgagtagcggtggtgtggtgtaaattgaagtaatgcttgctttgtgtttgttttagattagtgtcactctttacttgagggcgagtagaggttaagtttggaataattttataggctaattttaagtgcattttatgaagtgttttagaagtgtgtttcagttacttatttttattttttccaaaattacgcttgttttctacttattttatatctaaatggtaaaactcgaatttgaaatgaaaagaaatatattaaatgagatgaacataattaatttatcatgaaatttagagttctaaaatatagggtaaaagattctaagttttgaatgctcaacatgcttcatttgtgatagaaaatcaagtctaaaacttcaagtcaatttttaactatgatgttattttaaggaaaatattgtgaataaaaattttagatctctctttcatctttccaagcatcttgaatcgtccgattccaatcaatattgaaaaaattatagctaaatgcttctccaatcaaatcaccctacaatttacacacatatgatcctgatatctcctttttctcatgtcaaaaatatgcaaaagtaaagaaagatggtacagctaaagaaaaagcttgagagattaatcatatgccagattattatattatactcattttgcaaaaattataaacattctgaaaaaaaaaagtaaacttttttaagaactcattaacacacgaaaagcttcatttgttccaacatatatattcctttccgaatcgattttgcagcagcatcagcagcagcatacacttgatgataaatacatgatcatattcacaacttttaagtaaaaagagaaagaaacaaggaataaaaataaagctcggtttccagaccggagtagcgcaacctgaacacaggacttgtttgacttgtatccaatgaacttgttaaagagaatcaccccggttgtagcagaggtagacgaacaaatacaagaccctcaaaattagatgttcgaaccgctcaaggccatcaccttacactgttcattcattgccagaagttgggcctctttcttgtcaagaagagctgttagtctatcgttctcttccataagcttctgaacttctacctctttctgtactttctcaccctctaactgtgttgttttcacaactaatctgttgaaagcaacatcaaacaatcccaaaaaacaaatgaagataaatctcgggtttgctaacaaagaatgtaaactagcaagatttgctaagttgatattcagaaacactatgcaagaaaatagatctatgtaaatcatatatgcagcattgaaaacatggaagtacaaatagtataaattataaccaattcaaacaaatggaaaaatggttgatcatcaagaataagtacaccagaaaattttcaaagcataccaacccaatcatgtgaatacatggatgattctcaaatatcaagatagagtgtatcaggtcattcaatcaatggactttacaagcaaacatacttaccgttcaaatagcttctcaattgtttgaaactgcttctctgatgaaacgagtgtttctcgtacagtaatgagagtgctaacatatgattttagagattcgaattctcgcttcacacgacaaagttcctgttcgttttctgaagctcgttgcctctgtctagaggtttcttcaaccaaatcatctatactctgcctcatttcatttagaatactatttgtaccaagagcaaacattttcatctcctctaactttaaggacatttcctcaatttgaacagactttctctcaatttcttcctgacccgaggttaccttatccttctcaattgcagtttcagattctgccaatagcactctttcaacaaggtattccatcacctttgcgaccatcttcactgatttaagcatatcactaatataagcttcatcttggacatccagagaaccatgaagctgacctatttcagtgcaagtttcgtcatctagacaattgaaggaagaagcatcaacgtctttagaccaatctgacaagggcgtaccatttttgtcaactagccctaccccttctaattgttcaataccacaatacgtttgggctaaatgaggaacagccataatccttgctttatatttcaagtacgttaacaatgttgtagttgttttaactctatgccaaagaacatccaactctttttttgactcttcttcagactctttcacat

SEQ ID NO: 161425 - DNA, 1351 bp, Cannabis sativa
aattaagcacaatatctttaaataaatattggttaattaagatggatcattaaggacaattaccgaactactgataaagttgaaggtggtggtttttaaagtttaaaaatctaatacgctcgttgttgttaactttatataggatggatcactctctcaaaatatcttatttcaaaagaaaaagtgagaaaatatcttgaaagagtttgataattataataggtggagaaagcctgtctgtcatgttgtagctgacctggaatcatattgatttttttggtactcatcatatacataggacctacacaaaaacttgtgtttattaactagaatatcacttattggattacgaatgagagtcagtaatcatgacttttattttttaagaaatgagaatgaaatacataagttttacagtacttattgatttaccacttgaggctagttcaagtaactataagagagtacgtgtattgaaaattttgagttcgaatctcaaattatgcatgattataatatataaacacttaaataaaaaaatatagtacttgttgattagtttctctcattcatattttttttaatgtattgtcacttttatttttaatcaaataatccaaatatacatatatttttaatatgtattatgtatattttaaagtaaattattatttgattaaaaaaagtaaattaagtattattattagggtttttttattttagtttttacatttcaatacaattttttttttgtatttttacagaatttcacacaaaaactcgtatagcttttaatagagcaacttaaatcgcaatgggataatattctttattattattattactctttataattaaatattttaatacatttttttagggaaattaccttataaactatttttttttttaatttgcgatttgggtagttctggtggtttctatatgttttgctatatgaattttggttgcgatttaaattgttctattagttgctagatagatttctatatggagttctgtaaaaatacaaaaaacaaaaactattttaaagtgagaatttttttttatttttattttgattcaataaaaaataaatatataagttaaaagtattttttattttattttatgtattatatgcttttagggtagatttagatattatttggaagattatatcatttctagtcatatacatatgctctacaaaaaatcttacatttagtgacaacaaaacttgtgactaagtgaaaaaattgtgactaattataaatcatgattcctatggtgtgactaaaaggtccgtgactaaagatattaatcgcaaaaattactatttgttgtgact

SEQ ID NO: 161426 - DNA, 3108 bp, Cannabis sativa
ttttttttttttttcttttcccttctttttagtagttacctgtgtcataattagtttataatgtttagttctaagatttagaaattgtgtatgtgtagaccttattccgttctcttaaacgttaataagaatatgaaagtgtggtaataattataagagattttgttctaatccggatggttccaagattttgctctcaataagggccagggccaaaggaactttcataattttctgattttggttcaatgggattacaacctacagaaaaaaaaatcatgtttccttcacgtgaatcaaaataagcaatacttaattgaataattactaactaataacctgtttggagaagttttgaaccaaaatggacaatacacctttcaatagctaccaactaataacatgtttagagaagttgttaacgataatggttttttcatttgcttctcttcagcattgttattagtatttgacaggtttctgttaaagctaacagagttttctaaaagtaccttgtcaagccacaagaaattctgatagataggcatttattatgtaggtaagatatgtgtcattgtgagagctttgctttgtgcatcaaaaatggctgtgagcaagatgattttttttttgatggaataactttctttggtattaattcatttggtttaatctctagcaacagttcatttaatctttatcttggcctctttgttcctcttgttagaataaaatcagttaattatggttcactcaatcaaagtaaattaagacatggggtcttcacttcacgggttcgtgattcacgtagtcacgttttttttacgttaacaatttgcttgacagttactagttaatacttaatacgtgaacattatgtattaaaatatctatgttttgttttgcaaaaagaaaaagaatctgtcatattctcttgttctgattgtgcttgctgataatgttttacggttttgttaatttatttgtacacttctgattcttattttgcagaaaatgcctaaagtcaaaacaaaccgtgtcaattacccagaagggtgggaattgattgaacctactctcagtgagctacaagccaagatgagagaaggtacattcttaattgtatgtacttaattactttgttttgtttaaactttggtgaataaaaaactttggagtaagctcacattttgtgtattttgcactgggcagctgagaatgatcctcatgacggaaagagaaaatgtgaggctttgtggcctatattcaaaatagcgcaccagaaaagccgctacatttatgacctttaccatcggcgacaggagatatctaaagaattgtttgaattctgccttgaccaaggttttgctgaccgaaacctcatcgcgaagtggaagaaggtttgtctactgtatacattatttgaagattaaactgtttgcacttgctaagatcctaactggtaattatttaaagataactgttaatcatagagtagactacatatatatatatatatgtatattaattagactatatatatgtatattaattattaaaacagtgtagggagagcaatgcagggaaaaagatcaagatacgtaagttgaatacttgattacactaagaatagaggcatggaaaacatatacacacaactctcgaatggatggttgaattgattggaaaattattaatcattaaaactttagaagtctaagtacatcaaattaaacctcgattacattaaatcttagtctaagtacataaaacaaagtttgtagtacataacgagatgtattttattttcttgcaaaaagatgataacttctattgcctatgactgcctctccttacttttgtgtttaaccgtagatgacatccttatctttgcatgagaaagtgtctagaggacaaaatgtagaacactgtaacttctgaattcttattatgagttcacatgagctgtgtcaattttatcagagtagggtagagaaagagacattgcgatgagtttttttttttcttttttttttttgtgtttgtgtgaagattttataacaacgctaatcgaatttcatgggtttttggctataaattagaacttgtttgcctttttcttatttttgatttcaaaacttgatcatctttctctttgtaatgtcaaaactgtctgcatttcctttatttttttttttaaaatgcaggcaggttttgaagccggtttctcttctttggattaactagctcacatattaacttcaatggtttttgttgaattgcagcctggttatgaacgcctctgctgcttaaggtgcatgcagcctcgagatcataactttgcgactacgtgtgtttgtcgagtgccgaaacacctgagagaggagaaagtgatcgaatgcgtgcattgtggttgtaagggatgcgccagtggagattgatttgatcagcttcttcggactgttttatatatgcctcgatttcaatatctcgcaataggaatgaaaatttctaaagggtgaactccccgaaatagagaaggggattcatttgtgtagattgtggctaagatagtaggcactggtggaagaaatataatttttattttctaagcaatcgacatctgaaaaagcatgtagcaaaagacacttagtaaagtttcagggatcagttggtttatgcatatattgagataacatattaataataaatgcaaaatcaggtcttgtagatgaactgaaaatatgaaggttcccaacaatggttccatattctcactacaatatatccattctatataaaatgtagttatataacaaaattctttatttatgagaaattattaggtgattttttttaaataaaaaaataacaaattattagatgttgtcacgtaaaaagtgttgcaattaataataaatttgttcatattgtttatttttttattaaaaattatgagacaggatattgtcccgtgatgtactttcacggaatgtattgcatggtacattagatggtctcaaggtacattagatgggtctcagggtacgttaccattttttaacctaattacccctagatcaatcccagccctcagatcaaataact

SEQ ID NO: 161427 - DNA, 7508 bp, Cannabis sativa
ttttttttttttttttcttgatttgaaatcttgaacaactcgttaattttgaatttgactttttgggtggatagttttttgatagcttatcatttggtatgatttagatcaaagcattataaatcccagattttgaactctcaaaaggtctacattgtaaatgatagttagctttatatcaaactaaggccttctgtggatttttgccccacttttctttcaggtatctcaaattcttaattactgtaattccagatgcttggctgtggttcctcaaggtggaaataccggccttgttggtggaagtgttcctgtttatgatgaagtaatgtactttctatatttctttgctggttaccctttagaatacaggataattactatatttatctttttgtatgtataattaaacattctatacatgtatgcttgtgtataaatttttcaagactgaacctacggtaatcattgctctgcattatgatttttcaggtgattatcaatgttggtttgatgaataaaattatatcttttgacaaggtatatcttttaattattttcaagtttcccctatttttcaccaattaaccatgcatgcaaaatatatttttggaaccatgtctgtgtggtttttcagtaattagagtattgagtggtatgctttaaaaaattctactgttaattcttgtcttatttgatatttctcttcagtaaaggtaaaaatgacaagggttttatgaatatgtctaaaatatatagtgattttactgtatacttttcaggtcagtggtattttggtatgtgaagcagggtgcatactggaaaatttgataactttcctggacgcacaagggtaattttcttattcatcaactttctcctcctcaattctcgtagaataacttggtttcacaatgatgaaaggatcaacttttatgaatgctcatcttgttaaaatgagatactcatttctgcgctatatgtttattgtcagtaatgtggcatgaataaacattttaatcagtcaccactgatttttctttgttgtaagaatttggataaaaatttgtagaaatgagaataattcataaatggtttttggtgatattgaagactataattcctacataagacatgatgcatgcatttaaatgagtctgagcatagtaattgttaaagtacctatgattctattcagatttgttatgccgctggacttaggtgcaaagggtagctgccagattggtggaaatgtttcaactaatgcaggtggtttgcgactcatccgctatggatcacttcatgggaatatacttggtaaggcttgttcttatcccaattgtattgaattctggtagtgcaaaatttgtttactttgttcctgtttattgagttttgcattttcatcaaagagaattacttcattttgttcttctctttcttcaaagaatatctactttgatttcttaaccatttaagaggagccataaaatttactatctcacagcataattggtgtaggctttataaaatcttattttccttagaggcgcaatatatcaattatacttttttgaattctccaacaggtgttgaagccgttttagcaaatggtgatgtgcttgatatgcttggtactttacgcaaagataatactgggtatgatgtaaaacatttatttataggtatttaccaaaccctcttgttgttttgccagcaaaaaataatttgtgtagatattataagttaattatcatttatgtaggaagtgaaggatccttggggattgtgaccaaggtttccatacttacccctccaaagctatcttcagttaatatagcttttctggcttgtgaaaattattttagctgccaggtataattaatttcatactgatgttttcccaacttatttcattcttttttaatctaagtatggaaagtcttaatttactaaatctgtacttttgtttttgctggaattttgagaattcacttacttgtcttgcctttgttgccaaattttatcatatcagaaactgctcatagaagcaaagaggaagcttggggagatcctatctgcatttgagtttttggataatgcagcaatggatatggtaagcttatatctgtttttcttttttcttttttcccatgccgtgatagttctatctctttttctgttttcttggtcatgattttcgtgtaccacttaataatttatgttactggcttagatttgtaataggaagattgttgaataacaatctccaatctatctagttggtaatttggcatcaaagtacttgcttgcaatgtaattttcttctctagaaaaagagctcaagtggcagtttacattattgtttttcacttatttgttttttcgaatgtgagggtcttactaatttttttgacacagtaggccctgaataaattggaaggagttcgaaatccattgcctccttcactgcacaacttctacgtattgattgaaacaacaggcagtagcgagtcctctgacaagtagtgtcctttacacatgcaattttttctcttaaaaaatagatgttattcgccatgaatttcgttacaacagatggtatgttcatactaataggattttcctgctttgtttgggcatttccagagaaaaacttgaagcttttcttcttcatgcaatggaaattggcttggtttctgatggtgctttagcacaagacattaaccaagcattatcattttggcgtttacgtgaggtatcattttgccttcagcttttcaatagtgattattatacgggttgatcattgcattgtttttaacatacagttagccatgattccttctcaattacttagaaatttgtaattacatgttgtcaaaatggttttcgtatgtactttgcattcaaaataaaagagcaactacccctcctgctcctggttacctacatagcaattggtatagtttcttagtccccaaatattgttgggctaggcagggagcctttttttttgtcttttgattttgtttttttaaatacatattaataaatcaaaaaacttttatgctatattgatgcagggtataccagaagcattgcaaaaatcaggggccgtttacaaatatgatttgtcgatacctgttgaacagatgtatgatcttgtagaggagatgcgaacaagacttggtaagcaaactttatggttgttactttcaatagcaaaaataacagtgctatggaaggataggggtcctactgtgcaagtgcaacactgcaggatgttactttgagatagtagttttgttttaatctaatgattacttgcttctaagatttataaccagcttgactagacgttattgtagaaaatacattaaaatctgaactttaattttctttgaaatccttaaggcgccccaactaaagtagtcgcatatggccatcttggagattctaatttgcatctcaatatttcagctcctcagtacgacgaaaaggtaaagtatttttctcaatgttgctgttgtactgaatctgagttttggcaaagtagtgaataaattagtttacagatattagcgcaaatagaaccttttgtctacgaatggacatctaaacatcgggggagtattagcgcagagcacggagtgggtctcatgaaggctaacaagatttactatagcaagtcaaagaatacagtgagtatttcatggattacgaaaaataggacccgagttaatgccttaactttcctttctttctcattcttcttgagttttatagttgctttaacacaactctattcacatgatgtgtctggacaggttcaactaatggcttcaataaagaaattgctggatccccaaggaatacttaacccatataaggttctaccacactccttgagtacctaataagagttaaaagtaagaaatttggttctctcctctaaaccctttactcatctaactgagaaccaatagattatcatgaaaaattgtttctttcccttggaaatgaatgtaataaaaccatgttgtaagtttaaaatggtgtttactagtaaataaaactcttgttgttatattctaattccatatttgatttggtggtagcattagaatatatggtgttattatctttcttaaacaaaatagtttatgagaattgtatgcaattgatattagaatcaattttgtttttttttttttcccttatgacagatatggtttagaaggttttttccttaaataatagggggaccaattttaaggaactaaaaaactagttttctgaagaccacaaatttcttctcctataagattgtaaagatcttttaagtggtccacacaaagatattgaattttctcttctgtttttgatgttgtcagtttagttatttatttatttattctagaaacaaattttgcaataaatggtaattaaaattataagaagacagctccataatacttctgttatgtatttatcaagagggtcacattgtttttatactttataataatttctctaattgaagcctgtatgaaaaggaaataagacaaaagagaaaatggacaaagaatcattataaaaaaaaagacatcaattggacaaattggccgagaacatttccattgattaaggttcgaatatgcttataaaactagtctgctatagctgtagaatttttaagttttaatttttatttgagtaatactttgaagagaagtcaagtcaatttttggagcataatattaataatacctacctaagcaaaaacctctttttcttttgactcaattggggtattggataagaaggaattggaacatttgatagatcatccaactcaaaaaaagcaaagggcatatcacaagttgcctcatatatattaaaaaaattgtaataagagatgataatacagaagaaaaaaaatcaaatggtagggtttggggtttagttttggctttctctttatgttttacttaaacatgccatgccatgcaactataaaatgcaaaaaatataatcttaatagttttttttaaaatatccaaccaatccacctgtgttttgaagatgcatatgctttgttttagtagtagtgcttatataataagttataatggatacattattattttataatgagaaggaaaataaaataaaataatgcaatcccttttcatttttttgcttctattatttatttttagaatattttcaagtataataaagcaaatttcatagctgtactaagtagctatacattgaactctattgcctttttcacccaataaagaaacccaaaaggagagtaatggaaggtgatgttatttcaaggtgaaaagtggtcattttaagtggtgaaaggatatgccaatattaggagaaaagataattggtccaactatgaaaaaaaataaaaataaacatagagaatagataggtttatgacaatggaatccaaacctatatcagttcaatcaagtatgcttctttactttataaaatagtcatttttctatgatggagttgaatgacttcattgacttaattttttttatatcttaaaatctacaggtattactattagatacgataagagacgtattatttaattatactaataatatatatttatgggtacgtaacaaaccttttattaaggctaattaagatttttatcctccaaatttcgacatgtaccaattcatgttctttaacttttaaggtcgttaaaaattcttcatgaactattgaaattgttgaatttaaggacttttatctaattttagtaaaaaaagtctaatatggataaattcagggagcataatttgatacatgtcaaagttcgataggtataatttggtagatgtcagtttggagagcataatttagtacataaataattgccgaattagtaaaattgaatgaaattggacaaaaatatttaaatctaacaatcttaatagttcaaagagaatttttaacgaacagaaaaattcaaggggtatgatttagtacatattaaaatttaagaggcaaaaatcttaattaaccaatatctaatatacctatatattcaagaaagaaaagaggaaaaaaaaaaaaagaaagactagcattcattaggaccttctagtgctggatgactatttctacatataataaatattataatcattttgaatttatacattcatttgttttagggataatttcaataaaatataaaaataataataaaaaatataaaaatacagtctgtgcagaatttttaataattttacggttttttaaattttatttacataaaatacaatcgttttatatatttttatattgtacctttcttatttattgttgattttttgttatttgtatattattttttattactttcatgtgggtttttttattatgttcttgtgtttttataaaatattgtaaaaatataaaaataaataactttaaatgtaaaaatatagttttttacaaaaattaatgttttatataattatacctttatttcatttccattattcataatatcaaatattgctcaatatcttgaatttttttatttccaaacaaacttatgtcttgaatttatttttttatttgctatgtatttacacgtcaaacagaaattaaactacataaatctcaccaaaaaaaaaaaaaaatgatcaaacaaatgaaaaaacatcgaattatagaacaaagttctccttacacttaatttatccaaaatgacacttaatagcttaaggtgtgtacggtgacaaaatagtaaattactttttaccaatttatttgttagggtaatggaaataaaataagaaaaaagtaaaaacaaaataatacaaaaataagtagtttgatagaccaaagaaaaaatttatacaaataaataaaattaaaaatatagatattatacaaataaataaaattagaattttttatacaaataaatagaatttacaattttttaggtaaattttggagtgcacacttgtgttatttttaatgatgtatatattataattatttaaaatattttataattttaaataaaagtagttttttttttaaaattaaatttttatcaacaaaaataagagtttaagacatataaatgagagacaatgaataattctcaattcaagctaattcaatatttccaggatggattctgaactttagtaggctatataaaaaagaaaaaaaatgtgtcctcatttagaaaaaatattgtattttcaaaattaataaataaaatatgcgtttaaaaggaatttttttagcccatctatggtcaaggttgcattcacctatgtaattttatgaaaatttgattaaatatgtatttattagattaaaattaatcacttaaattaaagttaatgtgtaggttttctgtgccaacttttcagtataccccaaactatccctctcatttcaaaaagctaaaaaaaaaataaaatctttttttt

SEQ ID NO: 161428 - DNA, 1186 bp, Cannabis sativa
ccagccattgcttacgtaaacattggctctacatggagaaatctctacctatatacatctattcccacaatagcatactccataattgtttacttctttgttttcgagtctccaagatggctattcatcaaaggcgaaatagaagaaggtattgatatccttaaaaaaatggctaataaagcaaactacgaaagtaccataagcatttcgtacttatcatttgaggaagaaaaatggaatgtaaatctatactcatcaatcaaaatcttgatagagaaaaaatgggctttacaacgattatcaacaattatggcaataggattcggcgtgggattggtttactatggtatgcctttagcacttggaaacttagcatttaataatctctacttaagtgtcactttaaatgccttatcagagttccctgcttcacttatagcattctttttcatagcaaatctaaatcgccgaaccccaattttggtgttttgtatcattagtgggatttgtagtataatgtcagtagtgaaagaagtaaagaggtatacgaagacattacaaattggagttgaattggtgtcgttttttagtgcttgttctgcattcaatattttgctgatttacacaattgagttgttccctacttgtgtccgaaactcggcggtttcgatggttagacaagcgatcgtggtcggcggagtgtttagtccagtgctggcagccgccgggagaggagatgggtttgtgtcgtatggagtgtttggagtagtgataatgtgttttggattgtttgtgatttatcttccggagactaaaggtaggaccatttgtgatacaatggacgaagaagagtataaattgacaaaacttgtaccataagagccaaaaactttagaggattgtttcaaaaaaaactttagaggatggttggtgacgtgcttgtattatgtggtaaaatattgagatgttatattattggagagaaaataataccttttttaaaattagtatggatgctatgttgtagcattgatgttatttatttttttttaataaaaaattaaagctaaaacgttattagagctaaaaattaaggtatatattaaataataatgtgtgagattgtaattataatatttttagggaaatttatatggtatactaacttttgctatttttttataaa

SEQ ID NO: 161429 - DNA, 5457 bp, Cannabis sativa
  modified_base (353)..(353): a, c, t, g, unknown or other
  modified_base (416)..(424): a, c, t, g, unknown or other
  modified_base (575)..(592): a, c, t, g, unknown or other
  modified_base (3394)..(3417): a, c, t, g, unknown or other
tttttaaaaacttaataattcatcgtatcaaaataaagttcatgcaattttttatcaagcatatagaaaaaaaaaatagtcatgcaataaattaaatatttaaaccttatttttagtattataaattattcaaaaaatttaaaaaatttacaagtagctttaaataactacaatttacattattataaaaataaaaatattcctttaagtgagtatactattaaattaccctaaattaagtatatatgctatacatactataatattatacatattataatgattccacactacaaaaaatcttatttttagagagggacaaatttttttactaaaagtaaaaaagttgtgantaattataaattattattcatatgttgtgattaaaaggtacgtggctaaaggtattagtcacnnnnnnnnnaatttgttgtgactaaatgcattttaatcacaatacttgttgtgactaaaattaaattaatgacaacttgtaactaaatattatgttttagtcacaagtaacatttgttgtgactaaaaatcacatttagccacaaaaaaattatattgtnnnnnnnnnnnnnnnnnnaaaagtaacagttttttgtagtgccaatatatacttgatcatttatagttgattatcaagaagagcaagagagtgaggtgactaatactgacataataattaaaatcttcatgaaaagactaatattataattgattatcacctctaactaactcttttctctattattagttgattagtgtggattttattagaaagaattaaatataaaaattaaaataaaaatgagaataagaataggaatcaaattatattaaatttaaaatacataaaaaaaattaataaaatattatttaattttttctcgctgtgcattgtattgatttttcttttcattttaaaatataagaatcattccaccaaaataattgaatattattacaatgacatttcaatactttaaaaatcaagcaaacaaataaatagaaaaaaatatatttttttttcatttcattacctccaaccaaacactcccaaaattcaattcaaaacttcaaataattaatgaaaaagaaaatgcttaataattcatcacctttgtgttgcttttaattattacagtttacatgtgcaagtactgtattaaaaataatctaaaccaaacaattccaacaaatctatacagcttataaagtcctttatatttagttttttggtttagagataatgtgttattatttcatgatgttcaaataatataatgcatgcatattaattacctgcatatgaagtgaaaacaaatttagtaaaaatgtttataaggagccaaaactatggtactagttaatttctatattgaggtctatccattttcttattattcttattgttattatattagaagatagtaaacaccaaagtaaatatcctaaattggttagacacacaacttataatagtataactataagaaataaatattggcccagtacaactgactcccccaaaaacactatatatagttcaattcaccccttcaatgttaattattgttcttcaacatctcagtaaactataataactaaaacaaacaacctaaaaacttacaaagtgaaaaaaataaatcaataaattatccattagacaaagtgaggtgattgaagttacactagtaatatatattctggatacgattttgtcctgtgatgtattttcacggaatgtatttcgtgatgtacggcagccgttagatgagggagttatttgatctgaaggttgagcttgatctactctgagacccatctaatgtatcctgagactcatctaatataccacgaaatacattccgtaaaaatacataatattctagataatattctagggttaaaaaatcgtttccctatatattcttatagtattcacccttgtaagttttcaatacataatattggttattaccccaaatgatcaatatattatcccactgacatttaataaacatctgttttaatctagtcatttcacaaactgaccacagtattggcaatatacacatatatctctacacatttacttataagatcagtcaatgaaggaaaaaagtacttttcattttttttctacttttgtatatgtagcgaaataaattaccgtacaagtagataattactatgagctgtaaatttgatggaatcacaaaaacgagctacagtacgtttattaaacttctggccaaggaaagaatatatatatatataaataaatatagtggttaaaattaaatatatgagatgttgcgacaattctatatttacactacaaacttgcaacttcaattatatacagctaaaattaattatgatttacatctttgaaaaattaaaagcattccattcaataaaatcgtgctaatgaaaaagacaaattaatataaagtaagagagttagatgatgaaaccttgaattctattttttatttctacttcttcttctttatttttcttttccttctgattaataatattgactactacatttgattctttgaattaacggatctaggatttggtttttatattccatgaaacgtaccaaaaaaaatataatagtcaaaataaagaaaagactacttacatgaaatttaattatgaagtcatgcatgaaattaaaatatatatttatatattgtaagagattagagggaaaaaatagctacattaagatcaggatcatgatgatgcaatgtaacaaattaattactatgcatatttaaggataagagaaacatatacatacattcacacaaatatatatatatataaatatatatagctggggtgtggattattgatgtcatcttacctggaactagcaaattcattgagttttcctcttggggagaagattataagagccacctcagcatcacaaagaactgagagctcaaaggccttcttcagaagcccatttctccttttagaaaacgtcacttgacggcttgtggcattctctatgcgcctcatttgagtcttccctctcaccatttttcttgatcgaccagcaattaattttctttaaaaaaatgaaaaaaaaaaaaaatcacaaaacaaatacagaaatgaatgaatataaatatataatgttaaaagagttgaaatttagaggaatgaaatcatacccagatgggcaaaacttataaaaccctgaaaggcttctactttatgtgaaagaagaagaagaagaagaagaagaagtgaatcaggtttgagtaagttaactatagctagttgttatctatataaattatcatctttttttaattcaaagattgctctcgacacaaaagaagaagaagaagaagannnnnnnnnnnnnnnnnnnnnnnnagaagaagaagaagaagcagaagaagaaattatatgaataaataaagtaaaaaccaaaatgtgagataattaagggataagacttaattgggagaaaaaggcatgtcttaccaaattggcaaaaaagaaaagatacccagatagccttttgagaagaaaagcctaaataggaatttgcaaaataaagacatacggaagaaacctattgtttttccttccgaccaccacaatacatatatgtatatatagtataattgtattatatatctgtatatataagagctgtgtgagtttattataaatgaattaaagaaaactgcaaagacaaattcacaaacacaccttgttcagctccaacgattcttagtatgctaaaaatggaaagatctaaacttgaagataatgaaaccagaattttaccaaataggaaaataataacccccaataaaagagcaataaacaaataagagaagtgagaaaccagcaggggaaagtatcatttggattattattattataattttccaaaagagaaacaataataataataaacaaaaatgaacaagagtatagaaagaaaacaaacaattaaattaggaaaaaagattggcaagttgattgacttggtttggatcacaaaacctacctttttttttctttctttctttctttctttctttgttgtgtattggtctcactcacacacacccctttcctctcttcccctctttctttagtaggataaatttctcgaaaccccaccctagaaaagtagcaactaaaatttcaattattataatttattactactgtggctgtgaccaagtatagtgataattaaaataaaaataataataataatatacagagaaacaaacctaataatttgttttgcttgttttggtaaaaaatccagaatctacaccaacaaaaagaagactcgatagaatttagaaaaaaatatatatatttttcttacataaccaaaaaaaaaaaagtaaaaaagaaaaaggtattatatatgtgtggtggcgagggattgttttgggtgccgttcctgttactgtcctttaacttcttttgttacttctattttagtaaaatgtcattatattattgataatggtggtgttgcataatgtcaaaagaaaatggaaagaaagaaactttaaaaaggagcaagtgagataatatgactgagttcaaatcctaaatgaaagagtaaaattgggaagtgacgtacaatagataggaacacatcaacatcgtccgtactatatggtacacgaacgaaccaatggagagctgaaaacacactacacctattatcattaattttcctgtgtctctgaactcagtgagtggtgcttagcctgacacatcttttatgtgaggcgcgttagatacactcacctactttacatcacttcttcttctcctcttttttttctaataaatattcgcataattctatactagtctctccctaaaaactgaagtgataaaatattgaaaatttattaaaatttacagataaccttaaataagtacaatatatgggattataaaaaattattttgtatgataaaataggtggggaaacgtttttggttagttatttggtaaagttgcaatgattttctatgcttttttcttaatgatcggtgtttttagtttgtaagagcttattattagtcttaaaaattttcattctaaattttattgtattaactatgagtatatttcattattactattaaaagtattagttatttgttattaagagcgtttcagctattgattattaaagttctaaagttatttaagttattaatacggctgaacatcggacgggtttactggatttcggattggcagattggcgggtttcgggttcaaaaaattgaaactgaacccggacccgaatagggcacgggttggcaggtcacgggttggtcgggtttggcgggttggcgggttgacccggtcaactctttaaaaaaattaattttttattcaaataattatttttttttattt

SEQ ID NO: 161430 - DNA, 7731 bp, Cannabis sativa
ccggcctccctctctatttttgtcttggcaagtagtaaacaatgagctgaactctcgtctttagaaaaactcattattcataattaaaaagcaaaacaaaattgattttgaaagatagccaacactacatagctaccaatattagtattttttttgatcaaatttagatatttcattatgttattttgtcttaatttattatttttaataatgtaaaaattcgcttcttaatttgagaaatatttttagtttttttcttttttgttaaatgattagttaatatagtaattcattaatttattagagtttctaatttgtaatcctggttaggcgatgtccctactaattttatacctttgtttttcttttttttttttgatattgaaggatgatttaatcttttattaaagtgtgaaatcactaaattatatttgtaattactattaatttttttaccttgtttggtagctaaaattgatagttgatacaatatatactaattttctacccttttaaatttgtgtcctcaaatttatttggtgttaatataaatcaattctacattgtttgaggtaagtagaatataatagatacatattttctaatgtttttattttatggttatgaaatttgataaaattctcatacaagtaaactatcaattccactcgaaaaacacaggtaagattcctcttcaattctaatttaaatagattccttaaaataggcgtgaaggcttaacaccacaccacccatattaattattattattttaaaaaaattaaaaagaaaaaataaagaaaaaataaagacaagaagactatactagataaggttttattttatttttttatttaatgtatactagataagcttttttttttttttttgaaaacagtatactagataagcttttaaagaataattatatatatttttctataatatttattggtgagacacctaataaaaagccaatctttgcttttccatcttaaaaaaaaattaaagcatgggcaagttgaaaaataagtgaagatttaattacttaattaattaaaaataaaataatattaaaaaggtgtcgacaaagaaaagacaaaagcatgtcagccaagtttatccaaaacgccacgtcagcaaatccattgaactggaaatcttacgtgtccaaacacgccaacaccgttacccaatcacacaatactaagtcagctgaaccttcacgaacccttctctccctgggtcccaccccctcttatccactccacctcccacgtgctccctcacgtgacttccccccaccactccaccactacattccaattttgctgacgtcatgcccaatcacaaccctcttcggacaattttaccacccccgccaacaatgcgcgtctcttcaactcttaagggcattttggtcatttacttcgtcaaagcttgtgtggagttgacacgtggcgtgttcgcatggcacgtgtacgtaatgacgtgtcaagtggtgattctttctttttatattaacaaactcagttgtagagacgccattttttgtttttttttgaaagcgagttttcccttcttctctggttttgaataccgactcagcgagttaacgaaactcagcgattggtacgtgttgactcaccctgtttttctttaatttctcatggttcagctgatgagttcggctatggccgagttgagaggtaagggttctagaaaggcgacggtgaagatggagatcgatgttgaagacttatctgattctctcaattctcttcacaagcgacccaaactcgattcgtcttctcaggtttcctattttaatttatttgaaattagtttatgattaatcttgataattatttgtatttcaattcatatgtttgattgatcaattttcatataaatagttcaatcttcagtttcttataagtagtgtttttttttttttttttttggacaagcaggaaaatatggactctgatacattaggagagcaatcttcgatgttcaatcctcttaatgagccaagcccactgggtttgcgtctcaggaaaagtccctctcttttagacttgattcaaatgaagctgtcacaagatcatagtgcagctaaattgtcaactttaggcaagagaaatctaaaggggggaaattctatgttaagtaatacagataaactaaaggcttccaattttccagcttcagttttaaagattggaacttggcaggtatatgccactttttaattattgagtttggaaacattttcaatttgagtttagcttttatattgatttttcttcttttggagttgcagtacaagtcaaggtatgaaggtgatttagttgcaaaatgttactttgcaaaacataagcttgtatgggaagtacttgatggtagccttaagaacaagatagaaattcagtggtcagatattgtggctctcaaggctaactatccagatgatgctccggggactttggatgttgtggtaattcttttatttattaaagataaagcggtactaaatttgatcaatcatggtgattgtgatgtgactagtttccttgtttttggtatagttggctagaccgccccttttctttagggagaccaatccacagccaagaaagcataccttgtggcagacaacgtcagattttactggaggacaagccaccatacacaggtatagatttcatttcatattattctaatcattactgtgaggaatattacttgtggtacgagttctcctagatttttatccatcgtggtcaacattattggtgtgtaaatgattatgagggatagtgatgtgtgtgtatgagacttggtcattatccaatatgtattctacgttgttggtgtgtatttgatcttcaaaagtttgaccttgaacttggcacaaaattatgtttatctaaaatttgaatagtttggtcagaaagagatatattggatttgggtgtgtattcgtatatgtgccgctgttgcttcattctcaagctatttaatatagagtgttcctttacgctacttcttcgtcttgaccaaataatggttagaactggaatctgtgattccccttttatgtttctaacttttcatggtgtagcttctaagctatgttttcaaacgagtgattgtgaccgggtcctttatatattgtcacaggcaacattttctacagtgtccacaaggcttattagggaagcattttgaaaagcttatccaatgtgaccctcgtctgaactgtttaagtcaacagccagagattgtgctagagtctccttattttgaaaccagaataactactactgacgagaagaatgaacttagcaatgggtttgatttaaagacggaagacaggcctgttttctttgggatacacgatacaacatcaacatctggtgctcagtcatcctccataaatgaacaggaattcacaaacagagctcctgaaagttattgctctgaaatctcttcagcttgctcaggtaacaaatgaaaagaaaataaaagaattcaatattcatatgatcatcttcttgtagcactaattttgagtgaatacttgttttagaattcaagggcattggagccgagaactcgaagatgctaagcagttgggatcaaatcaaagttcctggaattcacccatcaatgtcaatgagtgatctagtgaaccacattggaaattgcatatctgagaagatgacttcttcaacaaaccccgcctcgtccggaaagcaaaaaaatgacaagggcattctggaggagattacccagtacttgtttaatgattctcagtttaatttggcctcagatgagcagtctctcatgacaagggtcaattccctctgttgccttctacagaaggattcttcagcaaaccaactcttccaatccataaatgatgacaacagtattgtagatttaaacactgaagcgaaaacaagccaaataaactcaaactctggattggcatctgagtctaaaagggataactccattgatggttctgattgcaagcaacctcaagatatgtccagaaaagactcatttggggagcttcttctctctcttccaagaatagcttctctaccacagtttttgtttaacctgtcccaagattcggataatcaagccagataatcaaaaccaccctcagaaaattcttgtaaaaagtaaaaaatgtaggttgagatgtagtgatgtagacatgtttgtattctaagagctatatacttattgaaagactaatagggtagttttgctttgtagatattttgtattgtctcccactctaatgcctcttcagcttgtaaatcagtaattttcttttgaattataatacaagtttaatgatattatatgagattttctacttctacacaactaaataaaatctcattacaaaaagaaaacatgtttatttcaaagcgctaattgcaccacaacaacactcattaaaaactaaggatgtatatgcaactttcctggttctaactcctttttttttcataacagttctgtaaaaagaaacaaaaaaattgatgaaacatatacatataatatagggaggtatttttaaaactaggaaatgggttttgctaactaggtttcatcatgaggtggttcatcctcatctgggacttcttccccatcttgcaacatgttcataagtatattgatttggtctctaagcgttgcattttctctctcaacatcagcccttttgttcttttcgtcttgaagctgagcttgaaggtgttctatgagccaaccatcctcttcaactaccccatttagatcatcaatttccttatcctgtcctcccaaaaataaatacaagacaacataataaaaacaaaacaaatacatagacattactttaacatcactatgcaaaaatgatccatttcaacgatttttttgaccggggcagggcggacccacataggcgaggaaggaaaaatcgataaaaaaatgtatatatttcgttagttataatatatatttgtaattaaaaatggtatgtaggagtaatgtgttagtttttgtataatatgttaaactatcttatacaattgtcaaggttcaaatcaaactcttatttgtataaattattaaaaaggtccaccccttttacaaaataaaaaagtacaccctctcaatttaaatttaaattctgagtctgctactgacacgaaaattatatcaaattgagtcaaatgttgtttagaatcgaaaatggttactaattagtaactagttacctgtctgttcatttcttgaacagcaatcctcctcatgctttcaacaacatcaacattgactagcttcctcttcttgccaatttgccagccgcggggataagtggcggtttcaaagtccggcatggggagcaaagactcagccgttggccgctgtcggtttattcgagttgtaggctccaatggttcaaacaaagcctttctacgttcagaaagtacaggaggagttgtttctgcatcctccattttcacttcattagagagaaaattttcttcattcatattaacatcattatcttcttctcttgttgtgatcaccttctctatatcccttcctttacctgttttttttggttgtctaaacaatttagaaaactaaccaataaattaagagaaattttaaacgttaaaattccattcattacattgtcttgtgtcacatcactttgaaatttttgtaaaagccttaaaattagaggttggttggtcatagagtctaatcataaacaatcattaatgtattacaaataatgtttctcattccacaatatttgggtgcctatcataagctgccaaaaattgacataaaattattattttccaatagttgaattatattaataataatgtaaatttactttaaaatctgaaaggggcttgattgtaataaattataatcaagtccaaaggggggcaatattgactattacatttttctttaataaaaaatagaaatcaaaattagctaaattaaggtcttccattacatttttattatgtttttcttaagaaaagaccaaccactaaaatatcattaagagttaagacatacacatactccatttataaaaatatacatcaattttcatatattttcacatagccctacttatcattaagatgtggcagaacaagcaagaaaaattaaaaataataataaaataaaaataatttaataataggaaggtaagccaaccaattttaaaccaaacccaagtgaagtaacgtaagagcaaagtcagctaaaatagtcttaaactaatagtcatttcattttgtttatctctctttttctccaaaccagagtaagaaagatctgatttttacataattgactaacaaaaacaacttttatttgtaaagggtcaattccaaatttccaaattaacactcaaaactctcttttttttacccctaattttcccaagatagtatcatcataaaattcaaaagtaaatacggtaattaagtaagtaattaagaaagaaagtttaaaaatcatgatgaagcagcagaatttattaactttgattgatgatcaactcattttaatttcacatgattttttccagatattaattgttgatggggagacatatcctaactcatgcaaaaccccaatttcatgcaagtaaataaaaatccaatttttttttttttgaaactaaaaagaaattgatagtggtacctgttctttttcgagacttccaatcaattctagtggaagaaactggagaaaagccatccaaaactccccctcttcctcttcctccattaacccttgttctattcttgttttgattttccatggaaagagaaagagaaagagaaggagaaggagaaagagagagaagtgttataaattataatatgttgtaaaattgatttgaaattgtggggtttgagcaaaatttgatttttttttccttgttgagttgctttgggttttcgacacatacaatattcaattacattacaatacaagatagatagaagaggatgattactcatatatatatatatatgatatatatcatcatcatcatcatggttaccactaggcatcatcaaagaggaccacatcactgaatttttgaacggttaggatttactttgaattgttggtttggtgggtcctttcctttcttattcttttttttttactttggaacattattaattaattaattaattattttactttatatgtatttttcttctcaattttcaaggcttgggaagatgaaaacaatcaaataaaataagagggaagttaagattttttttttggtgaataattaattaatttatttggctttgtgtggagaaggatcagagttatcagaccaacctttgttaccatgtgatcattcattttcagacaaataagagcatatatgaatatccttttggggagtctcaccaaaatttactcattttttaggtaattaaataattttattcagcaaaaaaaaaaaataataaataaattgttattttattactccaaattgtaacgaagtggatccgggctttgttttgagtatttgggcttgattattagatttgtaaagggaattttacaaaaatactgtttttggaccaaaactttacaaatatactgggacacggcaaaaacaacatttttactgtcccagcccaa

SEQ ID NO: 161431 - DNA, 2635 bp, Cannabis sativa
tgattgtgtcaatgtctggaggacaagagatggatgctggcattgccatgtatcatcatctcatatcccttcaaattttttcctcgaaggctttcgggaagcacagacaacgtatgaaacactgattaaacagagtgaatgtacaatggcacaagcaacaacgacgactactaacctgacaatgatcatctgtcaaaggctgggtggatcgtgtaatttgatgcaaatcggtatccattaactcatacacgatataaacgtcgttaaacttctccctatccggtggtcttatgatgtcctttatcttaacaatctgcaagataacaataccttacttattagcaaatgcaatatccttaacaactaaaccaaaagagaaaaagaaaaaggggttttcattaagaatttcgccaaagtaaccacagagtaaaaatatttaaactttagaaatttcttgatttccaaatcagtacattctcatgttccatatggcaaaggagctttatctccctgagagtcctcttggcatcaatgctgttgtcaaatgcattgccaatcttttttatagccacctcctctttcgtctcagaatttgttgcacaactgttataagtaaaaagaaaaccttaccaaattgggtaaaactcaacacattcataaatacattaaagagataaactttaaaaaaaaaactatcaagataagatcattaaagcctcaaaaatccatattagtaaaacttgcttttaacttttacaaaatcaaatctttgaaaataaattaaaaccagtcaatctaatggaaaaaatcagtctttgtcgtatgaatgagtccaagcaaagcttctttgtttttttgtccaagaatattcaaccaaccagaccccattttctcacctttttctcctaaactttcctcagaaccaaacacaaacagtatgcaatcaaactatgcaaaaaaaaaaaaaaaggaatcacaacacaacaagctgataccatctcttaacacaaactatttctaagccgaaaagggttacttaaaaaaataccaaaaagttcagattccatgaaaatatatatatagagagagagagagagagagagggactgaccaaacgatgccgtatgcaccgcgaccgacgggttgaataggaggaacatacttggaggagacctcgaaaaggttgccgagaacattgtactgaacgtactttcctccgtaagtgagaacccctttgggttcagtcgactccattggagaagctttttctcaccgactgctctgagaatatgcgagggagaaaggaaagggaaaagggcaaagtagtaatttaacaagaaagacagagcatagagctgctatttatatatcaaatttaaaattaaaataaaataaaaggcttaaactttattagtaacggatgaaaacttgtgtggatgatggattggagggaccatatatgccttattttaagctttatatgatttcttttgtttttttgttttaatttttttgaaactttgaactttcaaagtgagtggaaccctcgtggtatgactatagcttatttatgttctcatttagaaataaaatttaaaattatgctaaagtgttagtggttaagggagggtattctccttttggagattttattataattttttagttaatttttgtgtttgaaaatatatgttggaatatattttgtttttaattttttttatggcggtatttgttatacttataatattatttttgtaatttttttgaaattttttgaatagtttatagtgccaaaaatacgtttgaagtttgaatgcacgtggtaaactggaatatcaagaactctgttttcggcattgtaaactattcagaatttttaaaaaatttataggaatgatactgtaactacaacaaataccgctatgaaaaaaaaaataaaaaaaatattctggtatgtgattttgagcgtggaagttgactaaaagattataataggaggttgtaattagtatttctcttgaaaaaaatatataatatttttatatttatttatatattactttaaggtagttaagatagatttagaattgtatgttaggatataacacaatagaaaactactccttttttttctcatttcctgaccttctctcttcttagttagggttttttgtttttctattttctcttcttggctagggaaattgtcactggcagttgttgtgtgcttgatgctccctagccgagggggacttttaggtgttggattttgatgatggagggttctcttttgaatggagtggggagttcggcgagtgtagagttttcggatgcaccttctatggggaggaacgaagctttgggcttcttggtcagcaatgattgtgcctcagcgatggagttgtggagcttgttggggtgtgcgtcaatgggtctttggcagtattcatcggggtgtgcttctcatccactactctttcatttgggttgtagtagttttcgaacccttccggcgaggcttggggctttgttgtggtagatctgtggtctgggttcgtggctcctccggtgccaaaacgctgaggcttgcggcactccactatagatttagaattgcactcctgattacata

SEQ ID NO: 161432 - DNA, 3274 bp, Cannabis sativa
atagatattcttgccttgtctttagcaatatttaatacttatatatatatattgaataatatttcgtagaagctagcatgcatgcattttgattttacttatacaaatatatacatatatatgtttttgtcacataaaaaaaattgtaatttaattttttttatatgacggtgtatacattgtaattagttagaatattttataaatttagtaaaattattaataatttgtttgtggtattaaaaataaattttgaaataattaattttatgcccatttcaaaaagttttaaaataatttaaataatttacagtacctaaaatgtaaaacatcttattacaatttaaaagtttggtaaaacaaattttaaagcatgttttcgctagcgttaatgatttaaaattacataaaaattagcataaatgattaccaaacaaattattttaaggcatgttttagttacaatttttcaaatatcaaaaataaagatgctcaaaagcaaaaaaaaaaaaaaatcatatatattttttaattaatattaattttcaaaacttgggcagaatagctttcaaaataataataataataataaaagaaaaaacttgaacaacatataaaaatttaaatatgcttaaataataaagagcttcatagtttggtaatctcaagggggttccctatacatttaatgttgcattgaaaactttgtagttggtcattaatactcgtgactttccgtagcatagaagaacaataactaaaaaaaaaagaacaataatatatataaagtacttaatcaaaataaaataaacatatataggaaaaaaaaattaggtaaattgagatttttgctcttaatttttcaagttgttaaaaattcttcttgaactattgagattgtttgattcaatgacttttatcaaattccgttcaattttactaacatgacgaatttttcatttttgttcatatatattttatttcttttcaataaaaaatatatttttcattcatagtatacttttcaaaaaaaaaaaaaaaaattgtcccagcccactaacaaatgtggctaacatgtgtcaagcatccattagtaaaatttgactaaagaccttcaatccacgcaatcttaataatttgaagaaaattttgaatgacctaaaaattaggaacaagaattttaatatcattagccaaaaaattatgtagatttattttaatattattaagtgatacaatattaatacacatttagtttaaaccatgtaattaatgatttcctaagtaatataaattacaaatctttaacccaacacaacccattaggagtatcagtatccataattaccactatcacaagaattggtaaccaatagaaattagttaaagattggtttagttacgttgttagcttgtgcaacgaactttctgttatttatatttcttttggttcttgtaatagcatctctttaaataaataatgaagctcacagttgtgagttaagcttttttagactaatctaaagtttctacctgttcattctctttgtttcttccatgctcttcttcttggtttttaccgattcaaagtttagctagttgagcctacatggcatctgtcactttaatggagtcgtcgattcctacttctgatcttgcggcttcaatagacaaagcaattgttgtggaaacatccttttcattttcgattctagcttccttaatctggaacacgttctcaagtgctttatcctcctccctcaagatcaaactagaccgagtaaactttctctcgtggaagtcccaagtagttcccactgttattggacatgaattggatgaaatcttgttcaatggtgtctttcacgttcggaccttagtcacgggtgaggtaaatatgcctacttgtaatggaagaaacgtgatcaacttctcctttcttggctctgatcgtccatgactgaaggagttctagcctcgattgccaatcatcacacctcatttgtcgtttgaagagctcttgaacaaaaattctcaagtcgatcccgcgcgcgattactccaactcaaaggtcaattttctcatgttcaaaaaggcaatctttttatttctgactatcttgacaaattttagtctcttatcaatgctcttgatgttgctggatcatctcttgcattacttctcgctcttgttgttccagctcttgaatggtcttggtcctaactttaatcccattgtctctggcattactgctcgtagtgactccttgtttcttgaagaagttcaagccttgcttatgtcttatgaacgtctcttggagcatcacaacaatatgatagatctttcgttaaagatgcaagaaaatcttgcttttggatcaagattaggcaattctcgctttgcttcaccacctgcttgtggaaataccaatgattccacttcaagactctctggcaaaggtgattctagaagttacataccaccaaagctcgtttaatatgtaagctatgccttaaatttggtcaccttgaaactgtttgtcactacaagtttgacaaaaattgaagccagtcactgcaccccctcgagcccatctcattgaattggatatggactttgatcctcaagtatatgcctctactattttacttaattttggtgatgataatgcttggtttggttatacaggagctactacttatgtcactaacggccataaaacttggagtccacaacaacttatactagatctaaaactcttgtagttggtgatggtaagcaacttcttataacacatataggatatacatttttaccatcctttaactcatatacattgcaattaaactacttccttcaagttcctactattaaaaagaacttagttagtgtctctaatctaacaaatgataatgatgtgtttcttgaatttcacaaaaattgttattttgtaaaggacaagtcaactaggaaagttctactcaaaggacaagttaaagatgacatttatgtactaggtgaatccaagaactcactgatgattcatcgaacaaatgtaccccatatacaaatgttaatagagaaaatgattctgtctattttccaaattgttctcgtcatgtttttatttcaacactaaatcaagacatcaatatctagcattataaactaggacatccaacccttgatgctttatgttgtaacgtccccgtttcaagtcttcattgggtccttacacccacggaatgaatggttcttatacacgagtacgtca

SEQ ID NO: 161433 - DNA, 6884 bp, Cannabis sativa
aaaaaaaaaaaaaaggaaatacaaaacaaaaatgctttcttccctcacagctcatatttccaaatcccatcatctcatttgatctttttctctcccactttctcagatcccaaacagcccccctctcctccgtcacccttactatgatctccactttatagcgcttcaacgtaaatctaaagtttcttcagatcttctcattcttggaaaatttaatttagaagagaaattcagggaagcaatgaacgattttgaggggcttttggccaccgatttcgggtttaaaccctcaaacaaagcaactccaatggctgcggcctctactactgccgcttctaccaaaggctctgctaatctcgtcaacaatttcgatctcggatctcgtggacctccacgatcctctcacgtttccaattcctttagtgggtctcttgccgatgatcgcgattcgatctttggccagtccaacgctcagaggtctcaggatttttctggcctcggcgatattatgggtggctcggctaggtttactaccaaatctgacagtccaagggccaattcagccttcaattttgattctatgtttcctagctcaactgagaccggttcaaaatcgtcggagccggtttatgacaaaccggtttacgatgatgacgacgacattttcaatggtgtcccggggttgacgagttccacatccaaggttaagttcgaagacgttttttcgtcggtctcttcttcgcctcctaaacgaaacagcccctttgacgaccttcttggtgggtttggtaaagccgaaccccaatggaagagcactggtgctattagaccggagaaaactgataggagtgcgtctaatttcgatgatttgctacccggttttggagctactagtccaccaagtgaaaggtattatttttatttttgtttgtcgctgcttatgctttcttgtagtcatgttgttatgttcagtcgataaattttattgctcaagttcgaaccaatcatgttgagctactataaatgtcatatatgtcgcacccatttcgccattttgtggtagtggaagacttggagcagattcataattctgactgaagaaaatctggaataaggcatttgcatgtatttaccgggatctcaggcgtttgtaatgcttctgtttggcgtgtgggtgggttggttggttgggggaagatgctggggctgtaaaatatgtgcttctttcattacagtgggtgtgtgtgtttgtgacatgtgaggggggattaacaaggtgaagatcttttaaatttgtcaaatttatggtgaggatttgctaatggaaggcaaacaaggtttcaagactgatcgttggtgtatggactgacttgtagccctggcctttttttgattaatgttgaatttgaaagagatgaaccaatagtaattgctcattttattcatggggatgttcattttttagggttttagtctaagaagaagggggggggggacaaatggtatatatgcagtatcgatgtcccttttccatttggatggaagtctaatgttctttaaatagttttaacttgtctatgcatgtgtgttttctttttcaagtggctcaacacgtctctttcaattagaattctagctgtcttacgaacttcaagacaccttacttgcctattgatattctacccttcagtaataaagggtccacaaaagcttagtgatggtgtctaatctggtaggagaggaaaacacttattttttataaaataaagaatgaatttgttttattgttggatctgtatgagatcaatggcaaaaaagttcaaaaagaactccattttcatttgattgttcatggtgggagagcttcttggtaaaagcttacaaagtgttgcattacatacgggaagctaatttttacattagagaatatatttagtttttcaaatattgattttgtcattgtgttgccattttgtttatttatgcattaatatcatatattttctttaacaggtcagcttcagggacaaattggcactctgaaacttctgttaatgcaacaaaaacaagctccaaggtagtggaagatccctttgtagtgccaggacagtttggtgatccattggaagaaattagtaagccttctaattctggaagtatgaaaagcgattcagttggtaatgggaaagtatacgatgatgtggatccatttgacggccttgtaagatctgccacatcttttacctctgagagagataacaggggaaaggaagcaagtactttaagggcagattcaagtagcagcaggaccaaaatgtttcctaataatgaaaagtttgagaagctctctgtgagaagtccagacaacgaaacacagaagaaagtacctattgaaaatgactgggattttgagatgcctacagcttcctccaatcctcatacatctggacaaactatgcccccttcattttatgccagtactagttccaaggaagcaaatactcaagtggatagatctccaacatctgtagaaaatttggattcatctgaagatatttggcttactgtttcagaggttcctctgtttactcaacctactagtgctccaccaccttcaagaccaccacctccaaaaccagtatcaaaggccggagttaattcttctgccactacaaatgcaagaagaaagaataacgagttctcatcttttacaaactcaactcaaaactatcaggtccctaattcatctccaattgatcaacttgaagattttgccagggttaagagtcgagataatgttgatgagaatgtcaatggttcttatggcgaagaattggaaatgaattcagctgctgctgctatgaaggaagctatggatagggcagaggctaaattcaggcaggctaaggaagtgagggagagagagagtacaaaggctgcgagaaataaagaagcacaggtagaaagagatgaaaaatcagcacaggatgacagagcacgcgaaaagcaggagaggtttgagcgtcaacgtttgcagagggaaagggaagaggaagaaatggaacaaaagagacttgagaaagaaaggggaagagtgagggagtttgagagggagcgggaggaaaaagagagagagcaaaggagacttgagagggaaagagagagagcaagggagattgagaaggaaagggtaaaagctagacaagctgtggaaagagctactagggaagcacgtgaaagagcatctgctgatgctcgccaaagagctgagagggctgctgttgacaaggcaactgcagaagctcgagaacgtgctgaaagagctgcagttcagagagctcaagctgaagctcgtgaaagggcagcggctgatgcaaaggaaagagcagagaaggcagctgcagaagcccgggaaagagcaaattcagaagttaaggaaagggaagcacgtgatagggctactacaaccagagctgatgctgaggcacgaaacagagtagcagagcgagctgctgttagtaaggctgctgctgaggctcgggaaagggcagccaatgctgctagggtaaaccaacagaagaatgaaaatgatctcgaatccttcttcaataatactcgacctaatagtgcgccaaggcccaggaattcatcagtgaggccctcttaattttgcaaactgttttgagaaacttagtatttgagttttgaacgtaacttgtgattttgtgttgcaggatcccatgtttgatactcaatttcagaacaggcaagagtctgagacaacaaagtcaaccagtggatttcaatctaacataaagaaggcaaactctactacgaatattgttgaagaccttacatcaatatttaatggtagttccttgccataattcattatttaacagatgacaaatacattagttagttctccatattttacatctgctgaactttcttttcttgtgaagttactacagcatcacctgggcagttccaggatgttgaaggagaaagtgaggaaagacgaagagctcgattagaacgtcaacagaggacccaggagagacaagtatgtattttcttgccaataaaataataaataaaaaaaatataaaaaagaaaaaagtaataattcgttgatttttttttttgagaggagtggaagtgtatgttccacttaatttaccctgtagttaaatatacataatgtgcacccacacatccagttacaaaggtttatcaatttggtgctatgaagatctaataattaaccttatttttccaggcaaaagcactagaagagaagaatcagcgggaccttcaataccagagggagcaagctgagagacatgtaaaatttctgttcttttgcagttcattttttattagtgtttcttttcttggagctgagtacatatgtgatgacatgttgcttgagtcaattgacacccaggtgaagaattagagtattgggccctatcatgggtctgttcgacaacttcttctaaaacagctttcctttttgatttttcagatagaaaagaagaaatcttatattttatagcaattaatagtttattaaaaaaatactaaacaaaacaaccaatcttatattatcatatgaatctgaataaatacctaaagtggggcatcaaaccaccatcatagaaactaaattattacatgaagaattttcaaatgaaagttacataaaaaaattccaataaaggattgtatttgaattccttcacattgtgcagccaagtgccacccactggctgatcttttctcataatctagagtaaaaaattctattgcacaactggaacaaatggtagtttatagttacttaactgagatttgcaattacagtgtttgggtatttatgaagccatatttttaacagtacagtcaattttttcaattgtttttttttaaaccctaaaagacagcttgttgctaatgtcaacattatcttcactgttgtaagaatgtgctgaagttttgtttgttgcaatcaagttacttttacctacttatttgttgcagtcaactttataatgtgcatttatgtgtgtatatatattttctgaacatcgtatatatgtgtatatatatatcttttatggatgtatatatttatggggtccctcctgatacttgaagtactcttttttattttcctactagttcatatatattagtcatcaagtttctttttctttttctgatgccagagaattgctgaaacgctagatgttgaaatcaaacgttgggctgcaggaaaagaggggaatttgcgtgctctattatcaaccatgcaatatgtaagtcatttatactctatcaccttttttctttgattagtagttccagtcggttaatggtattatttcgtactcgtggttaaaatttattaaatgtttctgcttacgtttttccacttgttcttcacattttttttctacttattttatagatcgcacttcaaattatatttaatactttttggctgattcttttatttcagcaaattgttaaaatccatttttcctttattgcttgggattggaaacgtaaaatctatggatgaaactaaaattgaaatgtttataatactggagatgtttaaataaagaccttggtatccaataattgaattgtgactttaacttgtgatgagtagggagtcttagtaaatgtttgattcttgccttcccatgatttattaaatgaccagtaaaaaatatgaaatacagctgttaattacatctgtattccttggaaaagtacagtattatctttgatgaaacttgtaattttaactttttttagtattttttaatagtaaagttttttttttttttttgaaaaagagacggagatcaaatttcttagactgacaccctcccaagttattactgaccctcgcgtatgttaagtctttgggtatcaagtttgttttgtgttttctgtattataagctttgttagtgtatctgatagatcttttaaattctgatcaataaattatccaactagtttttcctaatacatttttatagttttgtttagtttgcttttaatgatgtttgattggcgacaacttttaatttttcctatcttctcacttttctctctaaatttttcgtttcttcctccttttcctctttaccaaacaaagggagcctaggattaatatgtactgctaaataatcttcttaacttggtgtctgtatcaaacatttctattttgttcatttttttactttcaagtctttccatgatgctagcctttgttgagaaacaactattattgtcttaactaataaattttctttctaatacctgttatcccttcatgtcaattttgtttgttataaaattccagtcataatttaagctctacaaccatgtggactacttgactgtcaacgtcttagaaatttaaattttatccaatccttagttcatttagcactcatggtgccttgaatttattttaaagcccattcttttgatgtatatatactctaatgtatgtatgggctagtactattatttttgtttatgcaactaaataggttgaggtgaaatttgattatgtactattttttctgcccttatggtttttgtacggttgaaggcaatgttgttaatggtatgcacctggaaattaactggcacttctacttaaaatgatttacttatttgttagtaattgcttccttttcggtaatgtttagaactaaacttttgttagtgagcctctttttttaaatcttttttttaacgacaaacagataattgtatttagggtaaatatcattttggaccctctgttttacaaaagttaccaattggaccctgtgttttgttaaatgacaa

SEQ ID NO: 161434 - DNA, 2423 bp, Cannabis sativa
gattatttagtttcattttgttttcgactgacaacatggtttgattatttgatcatctcagtattgagatctacaagcacaataaagaagaacggatagcaagaacttggggaactactgcccctggcttgccttacgttgatcaggctattaccaacgttgggaattggttaattggcggtgatcttgaggttttagaacccatcaagtaccatgacggcctcgatcgatttcggttgtctcctgctgaactacgtgaggaattcacaaagcgcaatgctgatgctgtgtttgctttccagcttcgtaatcctgtgcacaatggccatgctttgctgatgactgatacccgtcgccggcttcttgagatgggttacaagaatcctatcctcttgctccatcccttgggagggtatactaaggcagatgatgttccacttagttggcgtatgaagcaacatgaaaaggtttgctttttgtcaactatgttatttctcttgaattagcgcgtcctgagattttaacattcaaatttacctatggtattttcttagtctgcatcaatctgaatgttagtgtagttgatttttgttctgatcaaatatgcattcaggttttggaggatggtgttcttgatccagaaacgactgtggtgtccatattcccctctccaatgcactatgctggcccaacggaagtgcaatggcatgcaaaggccaggatcaatgcaggtgcgaacttttacattgtaggtcgtgatcctgcaggtatgggacatccaattgagaaaagagatctatatgatgctgaccatggaaagaaagtattgagcatggcacctggattggagcggcttaacattcttcccttcaaggtgaacatctgataccaatgccatgatatatttgaaatatttttcacttctcacaatttaaaatcctctacaatcactaatctgctgccattgcaggttgctgcatatgacaaaactcaaggtaaaatggccttcttcgatccatcaagacatcaggactttatctttatatctggcaccaaggtactttgttcttaaaactgttattttagccaattctattgtttactcggttagtcatggaaaaaacattagcagcatattatgcaactatggtgatttttctgtatgaaagttgtattgcttctgaaaatggatttgcgtatctacagatgcggacacttgcgaagaacaaagagaatccaccagaaggtttcatgtgtcccggtggttggcaggtgctggttgaatactacgatagtttggctgctccggcagagaacggcaaagtcatcccgcaagctgttccagcttagatatctttgttgcaacataatatgtaatgccatctgattgggagaaaccttaattgctaatattctccttttgtgtaattcaggttgttgccacaagttttgtgtccagattttcttaataaaataagcatgtgaggctctggtacagaaacaatactttacctcatctgtaattagtgcctaaaaattgcatcttgcactctagtgcatttctgcatgagggcgcattgtatcatatattggggtttgcttttcatggaaaaacgattgattgtgcagcaatttcttttatttcaatatggaatgctcaatcaattgattctgttcataagggtgtgtaatgtggtctacatcaatcaagacttactactaaaatgcaaatgttcccaccaactattttttttaataaattgtttaagctcctttccaaataaaattttggggtttttttgaaggagaaaaagttgacgctgttttttgtcaacgaatttaagaagattgtaatcaagcaagattaacagaagcaatcgttaatcaaagtaaaccggtttgtttaaagaaaatttgacaaagatgaacacgagaattttatcatggttcacctccttttgttggtaataggctagttcacttgggttcttattgatctcaacgctagttcacttgggttgatattgatctcaatgcttaaagagagttctctagagttatgtttttcaagagttagtcctcaagtgagtttttagaatgagagtgagggtttgtgagaatgagttgtccctctttaccatcgatatcacctttatataggttttcatctaggactttcttagagtttaaaatctcttaaccccaaatgcacattcctttaattatggtcggagttaggtttttaaatagaaaatgataacaacaatcatatttcaaaataaatacctagaaaaatgataaaagttgaagatatcttctatccacacgtgtagcttcttttcgtcacgaggaacacatgctgagatcatgttggtaagtcgcgtgaagcacgtgctgaggtgaggcactccccactttgggcc

SEQ ID NO: 161435 - DNA, 4807 bp, Cannabis sativa
  modified_base (2161)..(2161): a, c, t, g, unknown or other
cagccacggcttcagccgcagtggctgcagctacagccattgcatgattactttgttctgaaacttcatcaacttgaggaagaagaattggttttcgaaaaagccaccttcttttatctctcttctgttaaaaaaagagaataaaaattcaaactttgtttttttataataaatatgtaaaatatacattaagaataaaaatgttaccttttcttcttcttcattatgatgattctcttctcttcttctgcaactctttttaccattgtcatctttagttggagatctgaaaacccttttaacaacagtcaaccaagaagtagaagaactggtcttttttgccatgattgagaaaaaagacaactttttttttcttacttattattattattattatgttagtgttgtgttttttcactatggtataatatataactaactagtgtaagactagtaatgaaaaaagaaagaaagaaaagactgtatttttttttaactttttgtaattaatgatctttggaattgattgagagaattgaaagagagaagagtagtagctccaatataagtgcgaaggaaagatgtgtttttgtgggatgaaaataaattacaagtaatgggattgtgtcagttccatcccattgtgaaaaactatgtgaataataatgttgcaataatggacacaacatgaacagagatagagagacttaatgtatatcacaagaatccaaggaaagcagtgaattgaatagggcagagagagagaggggtttttggattaatctgggttatatatatttatatatatatgtatgtatagtttctctttattgattatcactacttactgaccagttttactggtttcacgtgttatataaactgcaaaggacgaggaaagagacagagctttattgtttgagaaatgcatgcctttcttatatgtgtttttgtgtgtgagagaaaaagattaaagtttaagcaaacatttatatatatatatattatttagatcattgtaataagtaattattaacggcattgttattgggtatcagtggcgcctagtattttttataggtggcgtcttatgattattagttagcgatattgcctaaaagttattttcttacgttatatgggaactgatacataattacaccaatagcggtatgacattaaggagggtgctaggcaccagtggtgctttttagcaattctcaattattaattagcggtggctagtactgtttcgagatgttgttttatgattggttaatgatattttataataattattaaattaaaatatgtattatcttttctcaattctatattatttattaaagcattggtattaggtatagcatcaattagagatggtgtcttgtgattggttagcgatattttataaaaattattacatttaattatatgagactcgattcttaattgcactaataacgatatgacactatgaaggttgataggcactttttagcattttctctatttatttggtactttaaggtgccaacattacaccaatgtgacgtgttgtgagtgtttagtgtttttctatattatttattaaagcattgttattgggtacttgtggctagcacttctagacatgtcactttgcgattgactaacgatacttcttaaaaaatattatattaaagtatatgagatctgatacttaattggaccaatattgatatttacacataggagtgtgcaaggtacactggtgacttttaacatttctctatttattaaatcaaaatgtgtgagacccgatattaaattttaccaataatagtatgatacgtcttgtggtgcttgaatttttaaagtgccctttaacatttctctatcatataaaaatgtttatataaatcaacattaatattggtacctattatggacattgtcccacatagaataaatggtagaatatttgactcatatataataacatctacttcactcatcatcaattagttttgagatgaaactctatgattctcaacatgatatcaaatagtgaccatgtccactctgatatggttcaagattggtgagcaaaaaataatcaccatctaagtggtagagtactattgagccacatataacatgggctactccactcatcacnaattagttttgagatgaaactccataattcttaacatttataggtagcgtggtgtaaatagtttacaatattttataatagttattaaattaaattacgagatcttatattaaatcactcaaaaatcgatataatacctttaagtggtgttgagtactagttgtgtgtgtttcatcatttcattatatttatacaaaaatagaattgttaaaagatattattggtgtttagtattatttttagtatcataccgatattaatataattaaacatcgcatcttatataaaaaaaaaaaaaaaaattgaatggtaaagtgtgtccaataggctagtataaatgtatgtagacttgtttataagagagggtatagcctcgaagactacaaattgttatactaagtaatgaggaaagctagttgaaacttgaatagtgtagtggaatcccatttttgggtgtgggattttatacatacatacatatacatatgtatgtatgtgaattaattaagagagttggcttcattttcctagtagattggtcaaacgtacctatttagattctcttttcactttttttaacttttcgatacttgttacaacatgaaacattaaagcttaaatgaaacaaatgtttgtgtgtttttttatgtataattatatttttatatttttatatatattatcacctggacttggactggaccagaaagaggagtgtgttgattgaatagtactgaggtgtgtgttcaagtgtacgtgtgtgctcaaagttcaaagcaaacccatatttgagaattaatggaggggccccttcttttttaaaaaaagaaaataataattgggtgagaatttaacatggctaaagaaactttggagaatcttaatttttgtgtaatatgttatttgtgtgtaatgtggtaacaaaattgtcacaaaatgtgttttcaatcacaacaaattttgtaatatgttgtgacaagtgaaatcttttattggatcctttctattagaaaagaaggcttcaactttggttcttatacaattatatatgttttatcaattagatgagaattactaaaaggtattactctccttaatgtcatattataatggatacaattttgatcttattgattttaatttgataatagttattaaaattactaaattatatatagtattatagtgatgatgtgacatgatgataaactaattaaatgagatcaagatcaggagagtcttattcaaagtcatccaattcaaatatgcatttaagagcacttatgttaaaactctaatatctcagctatttttttataaaatagctatagcgaatagctaagttaaagtgttgctctacatctatctaacaagtttactttgttatttttaacttatttatagtgtgtttcgtaactagtttttttgatcaattacgatttttttgtcaatttaatctataaaaattattaatgtaaaaataaatttttttaaaaaaataaaaataataaacacctaatatttttacatagttttgtaatttaaatctacatattttgtgagtctatttaattttgagttctagtttttttctatgagtgaacccctatttatagaaataggatggtggttactcaactttattttagtaaaaaattacaattgatggatggttaaagcctatgttttatatataactgaatattttgataagtattaaattactgtttatatttgatatacaaaaaaatggtctttcaagtggtcattgacttggtaagaccatgttatttgggagtagatgcattactgtgtgcataatacgaggtgatgcattgctactgagtaatacgaggcaatacattattgactgtgtattactgtgaggcattcttgctatgtaatacaaggtaattcatcattgactatgtattacgaggtgattcatcactgctatctaatataaagtgattcatcactgagtgtgtattacgaggagatgcattgttgatgtgtagtcattgactatgtattacgaggtgattaattcattactactatctaatactaggtgatttatcactgaatgtgtactacgaggagatgcattgttggtgtgtaatatagagtgattcatcactaattgtatattacgaggtgatgttgtctaatacgaagtgatgcccactgactatatattacgagatgatacatcactgttgtgtaattcgaggtgatgcccactggttgtgtattacaagatgatgcatcactataatgtaatacgaggtgattcatgatcattgtattacgatcaactacaagatctttgcactatgagatcgatgttgaatgttttagtgaaatgatatcccaacaacgccgaaatacctttattcataaactttatcatccttatttagatgaggttacctcacagttgagttataagtttattcgacctatcctgcaatgtatttacgagaatcattatttatgtcatgtagcatacaattttatttttttattaatagtctcaaaaaataggtgtaaatataattaaaatagtaaaaattatttcaaaaaaaaatattcagttgaagttttttttaattataattgtaacgtccccgcttcaagcctcca

SEQ ID NO: 161436 - DNA, 1272 bp, Cannabis sativa
ggcataaaacccaacaaaggcttcccaccaaaaggtgagagatatttcagctttggcaagaagggtgaaaccaacatcaacaacatgttgtcttctctcaactcaaccttattgttgatggttgtgaaggcatgagtttcttttgataatacctaggtgttgaaattttttgtatagtggttcaaactcttcgattaaatcagtttgaacactttttattttaagctgaaatttcctttcaatgtaaacattaaattgtacaaaaatatttgttgcttcatatttaagtttcattggaaaaatccacacaaacggagtaaaatcatcaacaaagctcaaatactatttgtaaccatcagtagatgggtagaaagatggaccccaaccattgaaaatatcaatttaaaaggtacaaatagtttattactataattttttttaaattgaaatgatgtagtttgccaattcggcaagcatcaaagaatgtgtcttattacaactggtgttgggggaaactttggacaatactttagctaaagcaacatgggagggatggcctagcctacaatgacaaacaaaagtgaaatatgatttatcatacactggatggattgctagtggttgtaaaatttaggacagtgagactttgatgcatagaaactgacttgagacattgattgaaggacttgaagtttgtataggccatcacaaacttcacctcgaagaagtacttgtttggtgatcttgtcctttataagacaacaattatcatcaaattcaagagtaacatagttatccttagtgaactgagagatactaagaaaacttttagtaacattaggcacatgaaggatgtcttgtagaataagagattcagaattggtatttgactaaaacacattagatcctatatggagaataggtagggagttaccaataccaacaatcactttagcttcacctttgtaacttgtgggacgagtcacattttagggtctagaatgatataatgacttgctccactgtccaagtaccaagctcctccaagatttggtgtagatgtgttggtggtttctgatagaagaatctgcggtgcatttggaaggtggaggtatttgcatcaatattggtttgatttccattgaatgttataccaaacctatgattatgacagccagtagtcccatgatccgcaaggggaaacaccgggtaagctatgcaatcccacatcgcctggggaaggtcaagtgagatgattctgagactgtgtag

SEQ ID NO: 161437 - DNA, 7061 bp, Cannabis sativa
tattaagctcatgattatattagtacacaataataattctaacacttctcacaagagatctttttacaaagtttgctatccatttggaaattactctttgtcctgtgtgtggcctctttaatgaatgccatatgcatctcttttttgactgcttattctcctaaaatgttgctgatttagtgtttcaacgggtgggttttaaagtctggccgttggagattgaaggctggactatttggctttctttgagaaaaacaggcttcattcccactgtttcatatgctctacttgctgtctgtattcacagcatatggatgaaccgaaacatgtgtgtgtttttgaaggtttttcgagaagagaaaattatcttgtcaaagaaattaaaaatgtgattattcaaagattatacattgtaaaaaaatagaaaacattctatacaggttgagagatttattgagaaaatgtgtaactaggttgttggttttggttttggttttggggcaattttgtagtgccctttgttttgttctgtaaaatttggttgtattttacttgtgattaatgaaatcattttcttcttgataaaaaaataaagaaaaacctgaataaaaactaaaagaatattaaaaattataggcatattttgctttaaagtttaaggttggcatgttttgtcaatatgctctataagaaagaatgcataactaaagttttccaaaaggaataatgtacatgttagtgtttttgacgcaacattgttataacacgtggcatgcatttcttttttcgttttgctgttgaaatatatgatcatcttccttttgtatgcatcgaagagaaaaaggaaaaggaaaaatcaattcaattttatggtcaagctaaataaccagaaagaatgatgcaattaaaatggctactaaaaggagcccccacaaactaaaagctacagaaaagcatccaggactgaataaaagctatacatttaaccaaaatgaattaaatggcaagcaaaggtgtgcgtaacatccaagtaaattgctactcaaaagctactgagcagtagcagggctactatacattttttttttctttcaaaagcaaaggaatgaatgacactccttgcaagagtgcatggagcaagaaaaaatttcttctttcataaaatccaatctgatgaactctctcttagttgtaacatttaatgctcaaagatagtttggaaagccatcatcatgcaatgctttgtactggagctgacatttttagctcatgggcagcttgaaagaattccgctgcttgttgcaataatccttcggattttgaaagcaatccaaggttcaaccatgcttcatggtttgtcggttctaatcgtagagcattcatcagaaagcttcttgcaattgggagtgattggccaccgagtttcatcaacactttggcagtcgaaactatacttggaacataatccggttgaattgacaaggagaatgagaatgaaataagagcctccttgtattgtgattgtgtctcaaacaacattcctgaaatttgagatgcacaattattacaattagtgtattactaatagttgaaaggactagataacagggacagaatcctacccattgtatgccaactactaggagaataaaactcgattagcttggctttgtcaacgcatatttttgcatcaggccacaaaccgagatttgtataaattgcagctaaatcctgccaggcttcactttccaactttctttctgctaatacctgaagagatgatgattttaagtttgagaaggtttttcaggtaaaataatgtcacatttccatatggagtatggaaatactctaactttgctcagagcatagtataacgtaattttccaaatattctcactcctacttgaagaaaaaatgactttagcaactcattatctagtaccaaagactattgagtacgagctgcttcttttgaaggaaaagtaaacattgacaaatataagaatggacaggaaagttttactatttacagaaaaatggtttgctgaaaccatgtctatacttcatttatgttacttggctttataaatacataagataaatatgagatacacacctcggaatctaagttctgcacttgctgaaacttcttagtttgaagctccctttgtgcttgaaccagagctagcaaaagtctgtaggtttctattgcttgtttgggttgctcctgagcaacttgaagcacagctttcaacctgagaagttctagttggtccatttttacagcctcgtccaaagcgaaatcaactatgttttcagcatccttgaactgctgctttgcagaaacaatgagagctaatagcttccacccgcgtccagtgctgccaaccactatatcagcataagccattgcattatcgaaagcagcctccagattcctttgcaccgcattttccaggctaaggttaaacaacacttcaggatcattcttctgattaaggactgcaaggtttaaagagttcaaagactccctttgaagaacaagtctttcggaatctgacacacaagctcgggctgcaatgccataacaaacaccgaggaagttatgggcttgacccctgaaatgttcatattgattattgaccgcattgattgctttacgagaaaactcaatcccttcttttgcatgaattggatctcgagaacacagctttgcacctaagaggaaagcaggaaagtggggcatttgctttgcttcagaattgcccgcaacctttttcaaaaggtttatagcagcttcatcttggcctgcggcactataacatagagcaagaaagtaccatctctcggctcggctatagactccaggaagaatctgttcaacatgatctgctaatagttcgaattgtccagaaacagaaagggcatatgtcaggtgatccatgatttcttgatcccaatttatttcaagagatgacacctttctcatgagtatcaataacaaaatgattgcttcctctacactgtttttaggtgtagttggaccccatacttgatactgaagaggaaggtttgtttcaacaccgccatagagtaatgtagatgccaagtttttctgtacagcagctaacctttcaggatccaagttccatggcttgaccagagccctgcgatatgctgtaatagcattgtcaagaaaacccgcctttgtccagagatatggaagcaactctaaagctttatgaaacatctcctgcaatttgcagtcttcaccaataccctcaggcattccaataggcattgccgattcaactgtgtcaagaattattttacactcctttgcagcatctgatgattgagaaaaacaaatcagagccaattttagacacactcattgttataagacatggttttgccttgaaaaattccaagcaacctaaataatctccttaactcagaacatataattttgtgttggaaaggcctaaaagaaaaccatccccagagaaatgttcatacctacatatcttccgagttcctccaacgaccgtgccttaagtaatattgcttcaacaaggaggctaacggagtgcattgacattataccagcaggcacaacatcacctttagaacgtggctttctctgcctagttctttcaacaacagccttggtcatccttggagttaaattttttatgtcaatgccctgaaatacttgaagggcagcatcaaaatttcctctctgatattcaagcctccctaacaaagccctggcttcctgtaatgcgttcacataatgtaagatcaatatttcaagccaacagttcatcaaaaaacaccaaactcaacaaaagctggttagtttcactgcagtaattagaacatcagaatgtttaggacccacctcgtaatttagtgaaagagcttcttttagagttgattcagcttcatccacttggatgtcttcaaattttgattcccagtctccagttcttgaggaaagaccactcgccgagaagtctcttgtggcgagtgactccggtgactgtggtggctcttccaatttaaattgctccccagaacaagcacacaacatcttgtctcaaaaacttggttcttggctataggaatttttatttttattttttccccagaaatgaaatcacttatcagctatgtctttcacatggggcacctggtattcagttgatacaagtcctttaaagaaaaccacatttcttttacagactataatgcaataaaaaagtaatattataagttttcccaatgatgcaaagcaagtaaaagctataattatcccacatgtagttaacttgcagggatggaatactcaaatgtcacacgtgacaataatatcttcttataaaaagatggaaggacccagaaagactttgctcttaaaaaactagtttaaaattagtagaacaaactcttttagaaaatcaattttatagcatgaagcaacaaatgagatccaaaaacgaaagagaccataaaatacaataagaatacaattactatcacgaactttctttttcattaagcatactgaaaagaaaatgagaacaacataaagacaataaactactgcagagttgaaaatgacgaagaaacaagggtaaatgataacggcgagacaaacaaggagaagagagctttggacttacccacctgaaaaggaaagaagaaaaagaacccgaaatccaaaaacgcgatttgtacgaagaagtcgtcgtgaccatgaaagctacctctcgtttatagcctctgttgtctgggttttgggttttttaaattttggaatctttcttctaagctcaacaaatatatgatgccattacaaggaaaagaaaaaaaatatatatatttatatattttatagatagtgaggcatttgatgatgggaacataaatgtaatgtattacaatttttttttttttttttttggataaaattatagtacttaaaaattactcttaaaaaaataaaaacaaaatgacttttgttagggccatttcatctgtaaatttgtttgtttttccttttctttttcttttttgggcttagtggggataggtctggtctagtggtctgtgtaggggtaaagttggggtgtgcactttgcagggtcagattctctgttctttattctgttttctggtttgaaattgaaatttttgttgtatacaattatagtttgtgaaattgatttgggcaccctctggtttgttctataatccacatttaagttccccgtattaacatttttataatattaaattttgttcataagtcatttaatctagaattaatcattattgttatttactttctaacaccctttttttaattgaattgtttatttattattgaacagagtccttcaatcaagctgttaagtgagttaggtgatttgtcacaagtacaacaactctatgtataaccattgaaaaacaaaaaactcctctattggagacgggttagattgggtaaattttgtattatcattatcataaaatatagacgcagcaaaatatgttagacacgataacacgattatacgactcaaaataacttgcataaaataatgagtttggatcttccttaaataggtatgggtcgttttcaattgacacactttattaaacggataattttcggattaaataataacatgtatcttatccaatttttttccacagtgacgtggtagaagaatcaggtgacacatatcctgcatttcttgtgtctgggcggaggagaatgtcctggacagactctatatggtacatcgacatgtataacctttgattactcgagcgggatgaaagatagatcatccggacaggtataagtctggcttgccaaactacttatcaggagctaattacttcagaatgatcttgtgaagctcagacacgaaggcaatccctacgatcgtgggattgaatcagagaaatatggcaacctgttctaatttcctatttcgtgtctcataattatgtaataaatgtaatttcctattttatacattgtaagcaaaagggaaacctttcctcatgcattaaggccctataaatagtgactttccctcactgtgaaggggatcgaaagaattgcttcagaaagagagatctaagagaattactcagagatttattctaagaatctttaagagagaaaaacactttattatttctctcaagttaatacaattcaaggagagtaggctattaccacactcacaagaccgaacctctttaaaatctggtgttccttattattttgttatttttgctctattttaattacattcttaatcgcttattaattactcactgttattagctaaaagcgaggtcaacaatataaattatataatgcatctttacttagtcttacattgcatgttgttattaccattcaaataataataataaaacaatctaattcaattctatcatattttttaaatatattaaatttaaatttagacttatatatatatatatatatatatatgaaaaaaaaaaatatctacctaattttattaacactttcaaataattatataaattatattctagtaatcaataaaataaataataaaatttagacattttatctaagttaattaataaataatgttcaaaaaaaaataattaattaataatttaacgtttaatttaaattttaagtttagacttatataaaaaatatctatctaattttattaacacttttatataattatataagttatttttgataaataataaaataaagaattacatttagatattttaagaaaaataattaattaattgatttaatgatgttagttgtaattattaattttcataaaaaacatagcaaattcttttaaataaaaaggtctttattatatgtaaattatattttgttagttaaatagaataaattgctaactttccttttaaattttatgttatttaataacttaaatattcaataaaatagaaaatagtaaatacataccctttttttattttacaat

SEQ ID NO: 161438 - DNA, 3614 bp, Cannabis sativa
tgcactgttgattataactcctatatatgtcagtgaccttaaagtctcatctcaaaattgggaatactgaaagctcctacctaccaattcactgtgaatttgatgggttgatttattttctctgatttcctttcatatttcgcttacatggtagttcccttttgtttgaatttcctttcggcagttcaattacaacagaggcaagtggagctacgagaacaattacttacggttctaggtccgaaccagaagatgaaatttctttgataagtggaaagttacttccaaatttagaaaggctcgagttactaagtgaggtgtgattcttattgtggacatcattgtcgttattcctgctgttattataattttcatttgtgaatggattttgaatgtggtttcttgtttactttggtttctcaggaaaaagtaggccacaatctgaaggtatttcgaagattagtaacttcactcaaggaaatgtctattcaaaagttagtatcatgagaatgttctgggagacataagagcatgactgtaaatttcaggcttcttgttatttagtattaattcttatagttttgtatattatgataccaagtgtaacagtcattacatataaattatttgttgtataatcaggcgtcaagcatgttttactactgcctgcgttatttcataaaattttggaaaagcaccagtgtttgttttttaacatgtgtctctgaagttccatctgattctaaaattttatggagtaaccttgactaaccgaaaaaattggaatggcctttgaaattttgtaaaaaatgatataaattactcaaaattattcttcaaagcaaagctatcctaccccaacacttgataaactgtagaattacaagtaggccaaatgagtccatgatctattgtgcacatcctttaatgtactcacagaaacacaacaaacaaggctattacaacacttggaaataaatttcatacaagccacaaagagttgaaagataaaaggttagctttgaagacaagaacttggtgcaacccctcccaagctataaccatgagcattggtgcaaatagaggtgaggttatgttcaggtttgacagactttagctgaattttcgacaataaaattccagtacaagcaatggttcgactgcaattgagattgatagccacatcagtgcttgctgtcccataaaagtcactgaatgacacattacttatttgaactcctctttgctgtgtgattcagagagaagaaagaaaaaaggacttgactaagtgtttccacatagataatgatttgttttttggaaatttatatagataatgttttaagaataagagtttcattaaaataatttcttaccagttcttgacaggcacctctgatgaagcaatagttttgatcaataataattgggtttttcacataagtgcagtagaactgctcgaaaatcgcccctcggacataaccgttgccaacctatttgtaaacttagttaaattccaaacatagtttaatgatatgctaaatgaattaagggttttaattttcaggttctttgtggtatattcatcatatacctgccatgtcttgattcgagctccatttgtagttccattgagataaactctactcacataaatgttctctacctgcacagagtttcctcctcttcctaggcttccaatgcttttccccaaaacataagatatcgaaagtttgcattttaaaccatgtcaccatccacttaaaaaacaaaacaataaaaaattatttaccttattccatgacctggtccacattgaatttgggatatttgtacattagaagtatagtccccaatagaaatacaatcatcccctattcatttaataatgtcacttagtttcaaatgaagagaattggagagttgggtttgataaggatttagatgtttatgtaataatcagttaccggttcctattacaatgttgttgataatcagattctgagaggcatgaacatggataccatcagtattgggactgttataaggagcttgaattgtcaaatcactgatttttattccatcacaaagcattatcaacacatgggtttgagagctattgatgaaatgaatatcactgaggctgctgttcttgcatgatacaagctttactgcctgcatatcacatcgaataaaacaaaatatattctttaatcttataataaacacttcatagtgtgtgtggaaagtatatgtacataggaataccacttactgttggggccagttttgtgcatccttcctaaaaatattggacaaatcagaaaacagaagttagtgtaagaaagcaagtaatattaagaaaagtaactgaaatgtaccagggtaggatgatacttgcatgactgatcccaccaaccactaccccggccatcaatccaacccggaccggcgatgttaagcccggttatgccctgaaaagccaaccattgacttgggtttagcccttcccaggctgtagttgaagttggtgccaaaatcctgcctagaatctgcaaaaatcttacttagaagaaacagaactaagtagaaccattatgtaacttatttgacctcattatacacaaaaacacatgggaaaaccatacatatgatcttaaagaatagataagtggaaaacctcaccagaaaattgatgttcttagcttggcatggacctctaaacacaactgggttaagcagaaaattccggtttggaatgaccactgttggattttcagctcttgggttatcacaagctgcagtccatgccttcaaaaatgcctgtaataataatattttcacaatgaaatgtgtttatatgcttggctaaaagaaaatttgactagataagaaaaccaaagttttccaggaaaagaaaaaagtacttttgaatcatctgttatgccattactcagggctccataatccaatacattgaaaatgtgtaggcttttatacgagttggagcaagacattgtagctgaaactaaaccaagaatgagaacaatagtgccagagccaccctgtattaatcaaatcaatacagttaaatcatacagttgaatgaaaatgtatattcaaaaaagctgtccacatataaatataaagttaaaattataaagcttctcacaccatggtaggtagtcctttcagggatagtaccaaagtacctaagtgcccagaaaccgttggttgctcacaggtcacaggtgaaatcgataactgaatctaaacatgggtagagagagagggtaacaatgccaataaactgaacatttaatactaaagggagaaacaaaaaatcatggaagaaagttgtacttgagttgaaacttgagaatcatattaaattttttattatttattcttgtgtgttttgggagtcacgtgagtttaaggtgaaaagcaaccgaaaaaaataaaaataaaaatgaagaattacccaaactttgattgggacccctttgatttcctagtgtaagaaatatgctttcaatgggaaatttcattttacatgcttaaaaaaatattccttaattaaatttagactcttaattaatttatacaattaa

SEQ ID NO: 161439 - DNA, 6238 bp, Cannabis sativa
agggcataaaacccaacacagttagctttcctcacccatttaatcaagttttaaagagaaatagctttgctattccatcccagccaggtcttcaattgtctaaggcaatctgcagcaaaacaacattaaaaaaaatatatatgttttgttgtttctgcatcagtgttgcataaagtgcattcaatagtatcaattaggtcatgtttgagccatctatctctggttttgagtctattcagcatagctaaccacagtagaaaactatgctttggaagattcaatctagaccatacttcattggtccaagaaaccttctccaagttctgatcaaaccaggacatgccctctgctattatgtattcagtagcagaaaatgtattatgctgtacaatggctttaattctgtctttgagttcaaccattttcctccaataccaacttccactcataggagccttgtattcccaccaagcttgttgtttaatgtacacactatggacctatttcacccacaagttattcttctttttttcaattgcccatacatgtttaaccatagcagcaccattccaattggggatatacatcagccctaaacctcttgattttttttggacaacataccttctcctaagcaacagcccctaccccattcacgaggctttttacctgtccacaaaaaacttctacaaatagcttcaagctctttaataatccgtttgagaatgaacatgatttgacaccagtacatgtgaattgaaagcaggacagatttcaccaaaaccaacctaccagcaaaggataagtgcctggtacttcaaaccctgattcgagaagtcatcttctacactaagttgctgcattctgatgcagaaacccctcttgcacagattggcacacccaggtatttgaatggatcctgctgccttataaaacccgacatgtctaacacccttttaatttcatattcacccattccactacagtaaattggtgaattagcattgttaggcaacaatcctaaagttgcggagaacaagttcagagcttgcatcattaagtaaatacttttaaatctcctctacagaacattaacacatcatcaacaaaacttaggtgatttaaacccatttcagcacatctctcatggtagctaaagtcttttttcttccctagcttcttcattattctgctgaaatatttcattccaagcacaaacaacaatggtgacatgggatttttaaaaaaatttaaatggtttgcaatgtgaaaaataagatttatatattttattataagtgttgttattttttttttatatatgcatagtaagtaacaatttaaacattattttcgacattacacattatttaaaattttctctaaatttttaattaaatttaaataactacaacgtaagcgattattaaaaggaataaactaaaaattttagaaaagatatacccaaacgaccatttatggtctactaggtaaatttctaaaagtatatttaaaaataaaaaggttaattacccccgagttttgtactaaatcatgctccctaaattttgaagaccgttaaaaattatccttaaactattgagattgtttaatttaaagacttttgtctaattttaataagaaaagtctagcatagatgaaaatttaggggacataatttgacaaatgtcaaagtttgagggacatgatttagtagatatcaaagtccagggagcatgatttagtacaaaattgaatgaaattaatgaaattggaaattggacaaaagtctttaaatctttatcagccagaaaagttgaggggacatgatttattatatcttaaagtttggagtaaaaatactaattagccaaataaaaatagtagggatagtgcaagaagaaagagaagaagagagagtgagagatgtggtggtttgagagaaatgatttatctgggttttcggcctcttccacagctgaacaagtaactgaagggattgatggctctggcctcactgccattgttacaggttaaccttttttatttatttatttgtaagtaactggttcaatttccttatcagactaataaacaaattaattcatattcactgatacttaaatttaagtttgtatatatttttgggttgaatatatattgcaggagcatcaagtggtattggatttgaaactgcccgagttcttgcattacgtggtgtccatgtggttatggcagttaggaacagagctgctggtaatgaggtccaaggtacaataattaaggaaaacccttgtgcaaaagttaatgccatggagttggatttaagctcaatcgcctcagtgagaaaatttgccacagaattcaattcctctggtcttccattgaacattctcatgtaagataaattgggttcaatttgattgagttgtattgttgtgtctctcatttgggctttgtgtaagcttttttaatatattttctgttagagggtaatgaaatttgccatttgagaaagatttccttatagacactgatttttcttgtttcaagtaataatgctggaatcatggcaacgccattcatgctttccaaagataaaatagaactacaatttgcaaccaaccacataggtagggtacattgtttttactcctattgaaaatgatatccaaaaataatgacagaacaaggtcatctgatgttcttttcattctgcaggccattttcttatgacaaatcttttgttggagaccatgagaagaacagcactagaatgtaagagagaaggaaggatcctgaacgtctcatcccgccgccataaattctcttacaaagaagggattcgttttgacaaaatcaatgatcaatcagggtaccatttagaatagtcatttgagatagagtatggtttacttttgttgtgtttctttgtgtttgaaaagttcttacctttatgataaactaagtgctttaatttgatctgagtcatactttggttgctcaagcaatcgggtatctgaggttcgaatcttcgtaggtacccacatagcagttgttgtagttttgtgcctccttaaatatataggtgtaaggaacctagcttaaaaaaagggatatggagcataaaaaaagcataatccattaaggaactagataagcttgttctttcagaattaaatgattgaatctgttaacttgacaggtataactgtctatctgcatatggccagtcaaaacttgccaatgttttgcacatgaatgagcttgctcgaaggctgaaggtaggactctagttcactgttgaaaaaacaactgagcatacttgatcagtttttatttgataatcaaagtacagttggccttcctctacccattagttttttgtccctctaaacaggaagaaggggcacagctgaccgcaaattcactgcatccaggagcaatttacaccaatcttttccgtcatcacagctttgtcagtggtaacaacttttttatgcctattccctctgttcaatgtttagtgttattatttgcatctcatttatatgtcactagcatctgagtttgtagccttgagtaactaatgttggtttttttcttttaaatttgatgcagctcttgccagcctagttggtaaatattttatgaaaaatattcagcaggtaactaactgatactactgagatgtcaatgcttctcatgacttgccctgtctgtctctttaagtgcattagtcttgtgtgtgtccatccatacatacatctgcaaaatttgattaaatcaccttgatgaaagagaagtaaacaaagatacatgtttcggtattagtataaataagccttatttggaggcttattcagatagagaacatagatatacatgtattatagaatgtgtgtaatttgtgtatatgtaaatcattgcttattatttgttgaaatggtgtgagtagggggcggcaaccacgtgctatgtggcattacattcagaagtgaaagggaagggcggttactattttgcagacagtaacatagcagaagcaagttcacaagctaatgatcccaatttggcaaccaaactttggaacttcagctcagatttgattaacaaacatagtaatgtataaaagttggactattcactgtaaatgcatcaaaaattagtgctcaacattcaattttatatcaacattatggaaccaatgcaatccgaattccaataaggtggtaattataatcatattatattttaaaattcatagtgtgtttgaatatgaagtgataattacaaatgaattcctaatattttgtttggcaaaatatttaatagttacacaagaaaataatattttttttagtagttaataattgaaatggaaattttttaataattacactcaatttttatggagacatcaggattgaaattcctcaattactttctatatacaattatagtgtaattatacgatcaaacaaatatatcaaattatacaattaccgtaactttctaaacaagcctttagtaatatttattgatgtgaatagtattttacaggcttgggttggataatgaatgttaatagaaaaatgaaatttgtaatattcaaaaaagggtggtgttggtgtagtagcacttcataatcaaaataaaataccaaaaaaatgctttacatcccaattgaaacagcctcccctgtgctcgtgttcgggatgaatagaaaggctctcaaaataccatggatgaaaaagattaaaatgtgcattgactttcaaaggtatgtaattttctcctttgataaagtcccaattgtaagacatgaaagggtaaaagccaaaggagaaaatacacaacactaccagattactcggagtttgatattattggccgtccattttcctgggaaaattttcaatctgcatgccacagggtcaaatgctagtcttattcaaggcaacaagcaaatcttaaaaatatgggaccttggaattagaatcttcattccattgaagtgaagaatgatgttacatacaacaaattaggtggtaaagagtagacaaagttacatttgagccgccggctaataaatcaaaaggggcagcctcactcaataatggcttagtgctttttgttccatctccggacccaaattcagttttccatcttctgtacagcagtttcagacccaaaaggggaaaaaaattgtatttcttttttctataccatgatctaaacaaatatacagttctcacagccatgaatcctttttgttatggaggaaagttcctaggcaaaatcaaatcttttagtaccttggttcagtaaaacgtgagatgacactccgaacggcgaacttcgtaagagcaggaaaagcctcatatcacccagcacaagatttcttactagccaggaagccagccttaagataggtgaaataagtcagccttaacagtatttctttttccactttccaactgttagaccttattcacagttcttccatttcaggtccttattgtacaaattagcttctttggcaatttaacatgatgaatgaattgatcctgtagaaccaaaaatagtcttaaagacttggatgtactcactctcatagattgggtccttgaaaaaatgcctcatgttagacacaatttgtgtgactgggcaaaggagagctgcaactcaagtccagtgatgggttaattttagcattatctctcaaaagctgtcgagatacacgatcagccaaaactgactgtccatcgtactctccatgaccatgcctcggaaattgcagtcccagaacctcattttcacagggcaaaagttctgaaaacatgtgtgatcctggttgcatccctcggaagatatcatgactggaatcgtgataagagggaccatttatatagtggctggttaaaggctttggcatgcctccaaaaccctcttgcaaatttaccgactgttttaggtgaccaaatggaatggaaccactgccgccagttaggggtgtggaagagcctgaagtggtccgtggactagagataggagacggagacatccttccacttaggtgctgtggtgatcttgagttcaataaagggcttccaatgggtgagacagggcacgatacatttcgtggaatatggatctcactggatttcaggaaataatcagaccacaaaggtaagtttttatcatcatcatcaattcagagagagagagagagaga

SEQ ID NO: 161440 - DNA, 2165 bp, Cannabis sativa
tttttttttttttgtttttctctcaccctgaaaatcatatcgaactagtttttatttaattcttaatataatcctgtttaattacagtaattacaacttggtttatgtgcatagaatctaatacgctttagttgagtgcctcatcttcatcactaaacttcattcataccaatcctttttggatttagtggcttgtaataatagtgaggtgcaactataacaaaacaaaattagggaagtcagtctcattaattagtttttagttttaagtcgatcatatgtttgtagatattaagaaaagctttaatgggcccttttaaggcccattagatgatgaaatttgtaatacatgattaaattaaaacaaaatgattacaagcactaaaacatcaaagcctgcaataacaaaaaaagagcccatgttatgaatttttgaaatataagtgtatgatagtgtctgtctagaattgtatgatcaaacacgcttgttgttttgtttgtgggttaataattttggtgtgttagagagccccacacctcaccatacccacctctttcttcatcaatttcccacttacatacatacatacccttttctcaaaggaatgcaatacaacattttagcattctattgaagttgagaattaaataaaataaaaacaataataaatgattggttaccaatgctatcccaacataatgtgacagaaaaggactcatcatcaatttttatttttctttacttggtgtgtttttcttatagatgtattgaatcataatagtgatgtattgtcaacttggctatcagattcaccttcatcaccttcaatattaatcattccttctgttttcaaatttttcatgataatctattatgttataaaatatgtaaaaagtaatcttgcatctgtcaaacttaattttttaagtttatttaataaagacatattaactcttatatttattatatatagtaaaattaagactgtgtttggaagttagtaaggaaataaaaattgcattgaaaaaaattgatttccttgtcttttgtttttctcttgtttatttatttgtttatttatttttgatagttttagaggcaaagaaaatatggaaaaaaatacttattaaaaccagatattaaaacataaatttaataaaagtttctgtaaataaaatcatgattagtatggcgtttcgaaacttattatgctatgcatgttcaaaaagttgatgcaattggagaaaacaaagttggtggtccatatgcgtagatgggctgctattttcagtccttaggccctaatccatgacgggaccaaacttatccaacattgcattttaagccatccaagacctaatccactacccaaagtattatggtatttttaaaataacaaaaaaaataaaatatattattatcctcaattaaaattgaatttcgtaaatgaatttaatgtagataatgaaattaaaaaaaatcatcaaatttaattaaattagtatctattattattaccctaataaaaattatactttatatgaattgtatctatttatcacataacacaaacatgggtgtagtttttctttttgctaagatatcattttgtaatataacaatttcttaagtgtcataaatacatcaccgttacattatttatcttttaaacacaataataaataaatatatacttacaaaagataaaaaatagtatatatgatcaaattaatttcataatgaattttggcctaactaattttcctattcattcagtttgtctctttgaaaaggagagttcagaggtaacatataatacgaccaaaaacaaaaccaacaagttagacaacattttttttcttatatatatatatatatataaagtctttctcaatgcttgttttgctaagttcagtattaagttatataaatatatagatgttaatgcataagctagccattttatcctaagctgcggccaatatatgaagttataacatgtataacaaaattttagaacgggcaatttagactaatgtatacattatataattttattataatatatgtccataataatttatttttcatataatcatacattttatctattatgaagaaaattattttcaatttattatacaatatataaatggtaagtatt

SEQ ID NO: 161441 - DNA, 4232 bp, Cannabis sativa
atatatatatatatatattgagcagatattttgactaaattggtatattctgtttgatcggttgatttggaaactgaaacaatgtgtgatgatacaatacatgagcttagcttaggtgtttttgtatttgtggtactgaaattgccaagaaccaccaactttgcacacacacacacaccaatgaactctttactattatagtattattgtcttcttagccaattttctttcttaaaactgcaacaatataaataatgaagatctctttgaaaaggacacatactttatgttttttgtccaatatctaagtgtacgtatttataatgtttagtaacacatgctatacttttttagcaaatacaaactatacattgataatgataatatatggtgtacttataataatttttatatcaaatttatagtttgatacctataaattgtaagtataaagagttgtcttgctagtcaaatttggcctagcatcctttgaggatctttgaatttggcttggtttaaacaaaccaagaagtcttatagcacaagcaggtgtcgtttatgatatttagctgaaccaaaatttatgtattttaagaaaaaatatttgacatcgaattgtttaggtagtagcattaaagaaagcctaaaagttagactaaaacttgtaaaagagaaaaagttgtctaatcttgatagaactatacttaaaaaagtaaaagagttgtagtgtattggcagaattcacgctttacccctttatttgtaattgactcagtttgattaataaaaatttatttcttgaaaaaaaaataataatttgatcatggcattacacttaatactgtaagaaaataagctaggctaccaaggataatttaattaagattttatatatgttattacaaaataaatagtgtcataattaaacttcagttcaataacaaaaagggagagaggcttaagtgttcatcaataaataaaagtgttagatcatcagattaacacaaaacataattcccttgaagatagctctttcccaaaccataacatcacagttgattttaatccaatccgtcaagagagcagtccaataatccgcaacaaaagatgcggggcctcaattgatcttttagaaaatgagaagtaacaaataacataaggcattactctacaattattaaaatttatgctcgatctgctaaacataacataatgtttcttccactaataaaaataaaaagttttgacaataaccccattattagttaattatgttcttaactattaatttttttttactgtacaaagttattccatatacaaattttttatgtaataagagagaacatagataaaatataaacaattgtcttcataaaaagaaaattgttaattttccaaagttacataaattaaaattagtctttgtagtttgtagtttataccaccaaagtgaaaaagttcattagtgtttgaatagaacatactgtgattgagcaataaacagttttcacacattacctgaaatgagtttcatgagagagagacaggaaaagcagatccaatattgttgccaaggcgatagcatttgatattaactgagtatggacccaactgtacgtggttgtcctctccaccaacaaagaaacataagctatacaatgcaatttcaaattctgggcttactccaaccaaagtgcttgacacagctttcaggataccattccactcgaactggattgtcagtaattgggtttcactgtctggctgcaaaaacattaaacaatacaatcatcaataatcattcttctttcttttcttaaaatgataaaagggaaaaaaacaacttacagtttcaccacgtcgtcgagggaagatatagccttgatagtcaacccttcccttagcttcttcaaggtaaaactggcaagaaaagtaacataaatcacaagctcttaagacttattcacttagatgtatgtataatacattttgatgatgatatttttcctttcatattcaccaaataaaaattccaaagcttaaaacaaaacgaaatataaatttaatggaagaaaaatgtatgtactgtatgaggataattttttagaaaaaatctttaagagtagaatgacactaaagttacactgagcgatcattatagtctgacattgtaaattgaatgtgattattatgccaaattttacacttttatgttgttttagtttggcaaatttctcacaacactatgccaacaagttaatgaattgctatagactcagcctagaagcattctgtttttgagtaatttgcaatgaggagttcatgccccttaaattaatacaagttgaaatatgcatacctgaagccaattatgaaagccagaaatctcgtgttcaccacgttgcttaacttctccaacaaaaacatgttcgaaagcagaagaggagccagatgtaccacatcggccatagagatcgaaccaaagacttgtcattaattgtttgaactcttgaaggtttcgagacacaattcctttggatgaaaggtacttgtgtagatatctaatcggggcagttctgctgatttcttctatgaaagcagcttgctcttgtctctcttctgaagtgacaacttctttgattcctgcattaggattgtagttatctagaagagaacaaaatcgagaaaatgtaggcttcctgaatacatcttcactcagccagttgaataagcttcctccagccatatcttccctttggtgaactttctttccctcaccacaatcaatttcgtaatccttgcaaggtaccaaacggtttaagtcaagttcccacagtttgttgcacgcttgagatagatcggccagctcttcttctgttggttcaatgttagaaccgatttcaacttcatcagtgtattcttgctcacttgcaggccttttgtatccttgccaattgtccttctgaatctgttcaagtatcgatttcagtgtttcaatacagtaacagtaacaaaatctctaaagcacaaaaagctctaagaaaacaatacatatgtgaaaatgattacagaaagtggattacaaactacaaaacagtcttagcagatttataacagaacactgccaatgccaatgatatttataattcaagcatcctgaggagcccactgccaatgcctcgaaaaaggctaatatctactctagaaaatctttggtacgaagacagttaatttcataaatgttaatacaactgttaattcttttcagaattacttttgtgtttttagtttgttagctgagttgttaattcttgttagcaacttcggttaggcttttctctctttaattctgcatatattcacttcagctcatctgagctcatcaatgagaattatcttctgttctgaattatttctctgctctttcactttctctttcttcttctttcttagtctctttctgttaatttactctaacaataaaggaagaaggatgactatagtactatggaatgcgagaagaagtgaaagaaagcataccttgtgctgtagtctttggggttttttgccaacagtctcccagccatcattattgctttcatcatcatcatcctatatgaaaaaaaaactgagtgaataaaaaaaatggaagatatttcatgatgtaattattccaccaaactataacacattgcaccatcaagaatgatcaacaatcaattaatgtgtggcctgaatttcagaagaatcaaatgacaattgacaacaatcaattaatgtgtaatgattgagacaatgcaaaggtcaagccaccattcttgtaaaccattcttagaggcagatcaattctgaggtgtctcttatagttgatttcaaagcaaaattatagtttaaattatagctcaaagcatagtatcacatgcagtagttttaattaatttttttttttttttgaagttcacttataatgtaggattcattactacattatcatcattataggtaattaatttattaattaccaaatcattctgataagacaaggataagggtaaatttatatgatgttataaaattaaaattgccacttttactttactggcaagattaagatgtagttcagattataatgcaaaaatgatatagctgttaaatggttagtctcaatactcccacatgggttacaagctgcaatagcagcacattaatgacttataaagctctaggcc

SEQ ID NO: 161442 - DNA, 1123 bp, Cannabis sativa
  modified_base (1085)..(1093): a, c, t, g, unknown or other
tctctctctctctctctcagcacgacccctcctcctccctctccctcgtttgtagtccctttccattgttggggactttcattaattgcatccacgagcacgatgggttggttcatggcattcatttccacaagtcatagccactgtttgtttctggggcaacgaaactatgggagagtagagaagggttgcaaatatgtgtgttcttgctattggtttgcttttttttaattgttattctccattttctcgaattatcatttatttgttgttgaatccattttagatctagatttgtgcttaccatcgttttgtttattttttcttttttttttctccattctatggatattttgatatatttgttattgattccttttcagatttaggtttgtgtttgtcattgcatatttttcttactcattattatgcgtggattatgtatgaatatcgtctaagatgaagttaggtttgaatatttttaaataatcaattgatttagaaatatttagtattaaattcatgctccgcattggattgaattttgtttgtttaaactgaagtactttctttaatttggtgtttctcttgtaacttttgtttctgggtgtgttaagttgttctggcaatcttggtggttgttttgctttgctgctatggctgtagtgttgtaaattcacaaaagtaatatatgtagtcgacagttttgcacagtcagatatactataagcgacaatttttgcactgttgtataggtgagtgtaaaaaattatctgcaattcttcgtattattgccaatggttttctagtgttagtaaaaaattttgttgacgtttttacaccgatgcgtattccacccaattttgcaacggccaaataggcgttgatcttagagaccaacaacaatactatacccgactgtttaaaacagttaggaaatctccattttttagtagcgaaggcatgtttcgtgttttctaattattacagaataagttaagagaagaatgaaggaagagaggaagaaagttttattttaaaaaataaagaacttgtatacagaatttgtaaagcccgcttagttnnnnnnnnnattagcagttgtttatgtttaattatgaaa

SEQ ID NO: 161443 - DNA, 2222 bp, Cannabis sativa
taatgatatttgttgtagtgtattgttatattttcagttttatacatttataatatactgtatgtttttttttctttggattaattaattctatataaatgttacgttttcattagatcttttaatctcaatttcattaaatcttattgtatctgtctagattaacacgtatcaattgattaattatctactgtcaataaaaaatttattaaataatttcacaacttaaaaaagaactaaataattattattaaattataaaaacataatttctattataattttctatatttcaacttctgttattatttattttaaaattatttaattttaaacatatatttagacaactaatatattgacaatatgtgacattttataacttaatcaaatcaacacttaactaaatttgtagttgcaattaaaacgtagtacataatatttattttatcgaaaaaaaatgatgtataaatgtatgaaactaaaaaagacgataaaatacttatatggttattatccttatattttataactattaaattaaagtcatgtatgatctgacatttgattttactaataattacataatatatgctttttagaatttctcacatatatctgtacttaaaatatgctaacaaattaactcaaaaaaaaaaaaaatatgctaacaaattaaatttatctaaataaggtatataatgtttatgcatactacatatatattatatatttgacaaaattaatgtatatgtatatatatattagttgcacatatcattattcttgctataattgggcaagaaaggtagcctcaattactttttgattatatatatttaattaactctaaactccaaaccttggacttgtttatgaattaagaactaaaagtcaaaggtttcctttaaaaaaagaaaaaaaaaagaagtcaaaagtccagtcgtcatgcgcccgcctgttcccacaattaaagacacaaattatatgcttgatgcctctgactctgaggtctgtcttctatgacgtcctcattaaatgtctcatttatttaacatcagagcatgcattattattattattatgatatatggggtattaactgatcgatcgatatgacccaaattaacaaaaatactccaacttttgccgattattagctcgttctgcgatctaaatcttattttatgtataaattaattcgttgaagctgtctgtgcccatatatacattcggttagttgatacttgatttcccagataattttttttctctttatatatatatacgtgtctactatagtactggcagttttcatgcgtatgtacaaacaagcatcattagaaaagaaaaagaaaaagaaattattgtatatgtttgattaattctacacgcttttggtaatttggtctcaaaaattaattacaaactatgtacccagcgagaccaatttgagctttctactactatctatgagtaaggattataatagtttagagtagatatttctacagcatttagttagtgtatgcaatatgattcactaatccgaaaaaaaaaacaaaaaggctttctttaagcatcattaagggggaaaaaatgaaaaaaataactatagtaatattttttctttgggggtttggtttagagtttttaaacatcaaaagttggccttgtttttttttttaaagacatacatgaatatgtaaaacatgaaaaggtcgttacttcgataatgcgcatgcgatatatacagaggtgtaggaccttgaaccaagctcaaacttacaaatacagacccagattttcatggccgaattacaccaaagcatagacccatatgatctcttgggaacacggggtacgctgaaaagagctttgatttcatttaagaacctctctgttcatttacaatgttatgcttaattaaagatttagctaaacagagtggttggcttgtggcctgatgatttcacttacccaattgagcataaatctctgttcatttacaatgttatatatgtaatgtaactccttcattgacatgtatatatgctcaattgggttgaggttcaatttttcacaaaactattcgaggaaatgcctgagggagatgttagacattttatatgtataaactgaaacatatatgattaaatataaagtgcggaattaataaatcatatatgcactataatttaaggattgaaatacctccagcc

SEQ ID NO: 161444 - DNA, 9894 bp, Cannabis sativa
tagatgaattagtatttatttttaaaatattgtataaatttgatgtattttttgtagtgtgcaatattgagcataaaataataaaattataacaaattaaaagtttactgtacatatttgcgcaaagtgccgaaaccaagaagcgaacgagttgagaaacaagcaaaatcacgaaaaaaatgatttttggcgatatagcactgtgaatatggcgttatagcgtggctctaaaaaaatcagcatgttgaggatttcgggaattctcgaaaggtgctatagcgctgtacctatattttttttaatttaaattctaattctagatggattctttctatttttttgggcctatatagataatgatgtaaatcgaatttgagaacgactggagagatacaaacaaataactttgagattagaaaacgcattgaagagtaaaagagaagagacttcaagcaatcatcatcaactatcaccattagcgtctttttctttttcttcttcttctttattcttttgtttagttatttaattaagagcatgaattaaaaattttagattattctcatatttattcatgctattttgtttatgtaattttgtattaattatcatcttgttaatgtttaatcaccattaattagtatagagattttagactttacattaaagagaagtaatttaaaataaggcttaaaattgcatgacatgggaaaagtgtgagattgagatattccactaattctatgagtttcatttaaagagaatcatattactttatcattgcttaattgattaacattaaatagagatatgttattagttagttaaagttaattttataatcactcgagagagtttaattacattaggactcttgaaattacaaattataaaataaattaggatgattggtaaattgagattcatagtttgaaatagagaaatcaatgctttaagtatttactttttaattaaaatcgttgttagtctatttacttttcagttattttattattttatttttaattattatttattttgaattctctaattaaagcataaaataaaaaggtataataattagtgaaatttaataattaaatgggtttaataacgcagtaaaaattgtgtatcactcaccatcatctgtgttgacacaggtgacatcaacctcgcaaaaattttgaatctttctcatatctctatttttttttttaaaaaaaaagaaaaatatatattgtttgattagaaatgaagaaggaaaattaatcattgcaaaaaaaaaaaaaaaaggaaaattaattatttaaaaaaactatattgtctttggcccttatcctaccacaaaaattattgcataagggccagctacatggagataaatttgggtgtataagttaagtctaatttgatgagttctttaaacaaaaaaaaaaaaagtttgacttattgagagggaagacattacaatttcctagtaaacaatctttcttcctaagggagagaggggacattgcacacattttaaagttgtgtaaacagttttttaattttaaaaaaaatgttatactacgtgttacctcacaataacatatgatgtgtcaataattaattagttttaaaatacctctggagtcttttttctatatttctatagtaaaaaataaaaaaaaaagttgaaaaatattttttttttatacattaattaaatttatctttaaataaaatttagttaaaatatacttctttgagtctattttgtcatttaataaaacaaaaggtccatttagtaattttcgtaaagcacaaggtccaaaatgatatttacccaaaaattaaaaaaattaatttaaaagaagtatgtaatgtaatttcgtcttaaaaattccaataattttattacatttttgttattctaattaaattactatactattttactattttaataatttgttcaatttacataagaatagaatgaatattttttaagtggaattatatacatcccaaaaatatataaatatatttggcataaaatacatatatttttaattcatattttttttttcttttcttacgttgtaacgagttccatataattgtgtgcataaattattcaatccaatgataactgaccgattcaattacaattgactgtcaaacattagatatccaattgtgattaatcggattggatgttatttttgaatatccaatttgatcggatcggatgttggatgtggtttccaaaaattcaatacatccaacatccaatcgaactaattagaatttttatttagtttgggtgagtaattagattttatattgttgtatgtaaaatatatatgtatatataaaaattaacaataaaactttacttttttttttcttggattggatggatcaaatccgatccaatacatactggacctataatattggatggatccgatccaatctaaaaaatactaggtttaaaatattgaataaactcaaattaaaccaataaatatatatgaaatatatccaacggatagaaccgatcaaatccaacatccaatgaatgctggatcgattggatgattgaaattaattggatcgaatgatcaaatctaacatccaatatataattagatcgaatttggatattcttaaaaatattgaatgtggtccaatgaacatctctaattccatacatataatttgattattaatacaaaatattaaaatagtagaaattctattagagttcaaataataaaatatatcattttctaaaaaaaatatggaaacaatattaaaaaattattaaaattaacaaaaataaatataaaaaatgtatcaagattaaatattgaaattagtttaagttgattgattacatctaatggatttggatctaaccgatccaattaaattatttattggatatttaattttgtaatcgatccaatctaatcaaattaagtcatccgattcaattcgatccaataaatgtattggattagatcggttccaaccattggatgcattaactaattttttattggacttaattggattcatacaatctattttagctaccatttaagttgatttcatttaaagaaatatatatgtataaatataatttaaaactaataatccaacatacataataaacaatagtttagtctaacttaattatcatgatcacataataaaactgctaaaaaataaaacttattcagtactaatgacaattttattagcgtttagaaagatgaaaatcaatattttaaatttaagatttttttttctttaatctcatgtgttaaatatatattaaatcaattaatatattttttaaataaaatatattaaatatgtaaaattataaatgtattttaaaaatatataaatataattagatgaccattgaataatgattggatcagttcgattcgattatttattgaatcagatatcccatccaacaactaatccaatcggattggattttcaaaatttaacatctgatccgatgtaattatgattggatattcgtttcaatttgatcggtaaggattggatcagtcagttacaattagattatatgactttctacacacccctaatttttataatttctcaaactgcaatcgcaggatcttaaaatagcaaaaaccacaccaccaaaatgcgatgtggtgcagtacagtttgggcggtttacactatcatcatcatcaaacattataataaaatttaaaaatcaaactaataaaactttaagaatacaaaacaaaagaatcttattaaagttttaacatctataataatcatcaagtcattatgttgaattgtctctgaaaaataaagtaatatacatatatattatatatatttgttcttatatgaaaaaagaataaaaatcatattgtaaaaattggtgactttgtaatatataatgcagtgcgatttgaatcgcaattattaaactcaaaattgtaaatcgcactgcatcttaccttgcagtttgacaaaaatacaaatcgcaaccgaatcgtaaaaaatttcaaactgtatttttttgtagtgtggtacaatgcgaacgatttgtgcagtttagatagtttagtaaacacctctatatataaactagaaaacaaaaccacactatataataatttaaaaatatatatattgtttgagaggaaattactcaatgagatattaaataattatttaataaatatagcataattttgtttgtgcatattttatgacatttttattttttttgtggtatttactttctattattttttatggtatttgttttgtcatttattttttttaaataatttaaaaatttatatttaaatttgtaaactttgactaccctacatttttatatttatatttttttctcatcatttttctttttatttttttattcttctttatcatttttacttgattattaatttcttacacattatttcttttttatttttctattttttataatatttagataatatataagagaaaagataatttttttttatgtatgatataatgtaaaatttaaaagtaaaaagataattcattttaaaaaataaaaagataattaattaaataaacaacattgtaactttaaaattaatgattatattttcacttcaaataaacaatttttttaacatatttttttgaaaagataataaactaatatcactgtaaaacttagtttttaacgaagttaaaagatttataactactaaataaataaataaaactatacaataaaataaatatctgttaacacaaagacctggacttttctacaagtatgtggaatcttactaatcctgtgtgtgtaatatatatagtaggagaagtatcgtgatgttttcctcaaatcaaacggttgattatataattgatttcaaacacttttttcagaattagattggaaatagaaatattctagatccttcctatgcttctcggccatccactcgtctagccatctaattcgaagttaatgtgaattgtcaatactgccctcatcaccgctttccaacacaataaatcccagccgttcacttcctctctttataatcgcagatctaccccaatttcttattcctctttctctctagccgtctcgccttgttgctctttctctcgctttctctctctttctcttcgctctccttacacaaaggaagaagggaataatcgagtttgcatactccttagggtttggaataggtactttgatccttagcttctgggtttttgtgattctgaaattattagttcgatttttgaatttttagttctgaatttacttttttgggttttgtttttgcagaatttataagaggatgtttgggagagcaccgaagaaaagtgataataccaagtactatgaggtgttgggcgtttctaagaacgcttcgcaagatgatctgaagaaggcttatcgtaaagctgccattaagaatcaccccgacaagggtggtgatccagaaaaggtataactttatttttttggttgttgattttgatgggtggatcggcctgataattaagtgattgttgttatgatatatgtctcggattagtttgttgatgtgactgggttgatgttcgtgagctctttgagttattggttggtgaaactgtgtagatccgcgttagagggtcattacttgtttgtatatgcggttctttaagatgggttcattgcgaaattttcaggcatggacctaggattgtaatccatccatgactgtttgactgacttttagtttaccttcttcgaggtagtggatgctggcgattatacagttacacaagtgaattttaagcttgacttagaatgctatttactggttttaactcttcttttccggcgatccatgtgttattgttttaaatgatcttttggatattttgttgatgactaacgctggttttcttttgttggctccagtttaaggagttggctcaagcgtacgaggttttgagtgacccagagaagcgtgagatctatgatcagtatggtgaggatgcccttaaggagggaatgggtggtggaggcggtggccacgatccatttgatatattccaatccttctttggtggcagcccatttggtggtaagaagactgacattctatgacgatgagcatattgtattgtcctgtagtgatgcaaaattcattttttgaactggaattcttctgttttcctaggtggtggtgggagtagcagaggccgaagacagagaaggggagaagatgtaattcatcctcttaaggtttctttggaagacctatacaatggcacatcaaagaagctatccctttcccgcaatgtactttgctctaagtgcaaggggttagtacttgtcgtctttctttatgtaaatacatacacccacgcacagtagggggtagtcgggaaacaaaattatatagacgcacacactttttgaattgtttttactttatgtttacttaatttatataatgtatgcagcaagggctcaaagtccggtgcttcaatgaaatgccctgtctgtcaaggctctggaatgaagatttccattagacagcttggtccatctatgattcaacagatgcaacacccttgcaatgactgtaaaggtactggcgagaccattaacgacaaggatcgatgcacgcaatgtaagggtgagaaggttgtccaggagaagaaagtcttggaagttaatgtggataagggtatgcaaaatggacaaagaattactttccctggagaagctgacgaagctgtaagtcctattattttgtactttttattactgagtttcccttaagcttactttgttatcgtactaggtcgtatagtttaggttgttaatctactgtttgggctctttttttcttgcagcctgatactgttactggagatattgtatttatcttacaacagaaagagcaccccaagtataaaagaaagggagatgacatattttatgagcatacccttagccttacagaggcactatgcggctttcaatttattttaacacatttagatggcaggcagctccttattaagtctcaacctggagaagttgtcaagcctggtaagtgaaatatcattgcattacctcctgtcaattgtttgaaacttgtaatttgaaataatattgtcgcagaaggtttttcttctgtttttgccatttcttagtgcaggcatgtcttttttgtctggtggaactagacttggctgaaagtaatgaatatgcgttcgattagttgattgttatttgacttgccttttggctttttttatccagttagacttaacaatttataagggtatttatttagtatatgctacacagttcaaatgtttaatactgtaatgttccaactgagttaaggaagctgtttgattgtgatttaacctacgttttggcctggcctcattcagttaagacttagacagtttataagggtatttatataggataggttacctagtacaaatgtttagtactgttatattctcactgagttaaagagaaggtttgattgttatttaacttaccttttggcctggccttcttggacttgacagttcataagggcatttatttagtatatgttacttagttcaattgtttaataccgtaatgttccaactgagttaaggacgcagtttgttgcttatagataattgttaatggtaatgcaattggtaagccttttactctgttaggcaatagtcattacttactggccacccttctgctgcccttcctcttgtgctctctgggtatttctaagtatgattgagggagcattattgggggctgtatttatgacattgactattcacgacaaggtttgttcatttgttttaaaaggcttcacatgtattctttaagttgttctcttgtaaaaggcttagtctagtggctcttggcagtgccatactagtgtttacgactagttgaaaaaacatgctttttatgtagttaatgcttatacatagtggtgaacttcaaattgtcattttagatacagagactcttccattgagtgtaatttaaaatacaggtcattgctctgttctgcttgatttagttaatgcttcctttttttggggtactctgtttagaatttttaggtttgttaagggtgccaactattgtgactatggttttggcttttcctggcaaatgcatgtactgctatgactctaaacttgtttgtgttctttttgtcgtgacagaccaattcaaggctataaatgacgagggcatgccaatgtaccagaggcccttcatgaagggcaaattgtacattcacttcaccgttgaattcccagactctttgagcccagaacaatgcaaggccctggagactgtgctgccaccaagggcaggagctcagcttaccgacatggagatagatgagtgtgaggagaccacaatgcacgatgtgaacattgaggaggagatgcgccgcaagcaagctcagtctcaagaagcttacgatgaagatgatgacatgcacggtggtggtgctcaaagggtgcaatgtgctcagcaatgatgagagcgaggtagtagtgtgagcggtgttttaacaaattatttgagagaaataaacagttaacattgtttctcctttccttataggttttgtttcttactttattctctcttttttttttcttttttcttttttagtatttaaattcttctttgggaggttttcctccccttaaatgtttgcaaaacctttgtgctggagtctagaaatagtaactctcagacatattaagatatatgcttggtttgttcatctggccgtagaagacacgtgaatatgtttttagggaatgaacctattgcaacttactagtgaaactaagcttaactttggttttcttaagctcaaatacttttaaattgggttaaaaataaaataaataagaattcttaagtttattattatggattaaattattttactgacttctctaacaattcttcaccggagaaaatgttgacttgtgctcgtaaatcttctcttttgtttgggaaaagagaaagaaagcttcttaagtgaaaaggttagtgtagaaagtgaagtcattgataataaaaggagaaaattaggaataaggttacataaaatatatatgtctatgatttgattcttttattttcaatttttaaaaaatatatcgtgttttctaaaatcgaacatgttgattgtggagcatgtacattataataaaatttaaaatgtataaaaaaaattgataaaaaaaattttgttacattgaaatgatcattttttttatttttaaaatagaatgtccattctactaaaatggtggaaagagtattctattggaataccattccaatactttaaaatacaaccaaacaaagaaatagaataaaaattattttcattccattttattacttctaactaaatgccacctaaaaatttgaaacagtatattcactagaataataatacaaaattttgatagggattaggtttatgataaataattccaatttcatatttggtggtaataatgttgactggataaataatcctttcttaagatttataattgggtagctgtttttataatttttattaaattaaaataagtaaattttaatataaaattataccaaaataaatattttaaaataattatataaagcactaatttttataaaaaagattacatatttacgtttataaaatatatatatattttttttatatttttacaattttctatagaaaaacacgaaaacaacaaaaaaactacataaaagtagcatgaaaataacatctaaataaca

SEQ ID NO: 161445 - DNA, 4922 bp, Cannabis sativa
gattgatagaacgatcaatgccaccattgtgctcgaggctggttcttacgccatcacgagattacttaccattgctcaatgttactggcatgtgagtcagtctattttatgctggaattttacacgtttatatgttgacctttgaatccttagactagattccagttgggttttacgcaatttcacacatatacatactcaaaaggaaaatgttgcatgtttgaaatagcttccactcaacatctatctatctattactttgttaatttttatgtttcatgtgtttattcgctttggtcatttttatagtttcgtcatgcctgtagttgtatttagtccataatcttccttggtttaagtcctgcgagtgaaagatctcttatttattagttttggagaacaggaccatatattgtacctgaatgtcaaagttttgtttttatgtataatattgtagagccagtatggctgagagagtagactttgttgggccaagcaagaaaataaaattcctgttttgcggaagaatgaaatccagtaggggaaatgattgtggccttttggctagagatatttggctcatgtagctacttagggtatgaaatagtctcttctcagttcttttcaactactcggtaatcacttgtcaagttaatttgtaattttttgttttacacattttgttttactcggttatcacttgtcaagtaaaatcagaagagtaggtgttgtgttaggtgtttgaagtggtttcatttatttgaaaatttgtgatttttagttttggattagtctcttctactacttgaagttttattgtaatgaatttagcatttagtagggaatattggacattgtaagtagttgaattggaagaatatatcaacttttttggttagtgagatagacgataagctttctaagatgggttttcagtaatgcagaaactggcagaccaatgtaataatgctcccttaaacatggagaagccaagtaatgggcatgaaaggaaacttgagagattaattgctttgatcctaatgcttgttcaaatttctgctccacttccttttcttggtttggagccgtggtcttcgcctcctgcaatggcagtactttattctccagacaccaaggttccaagaacaggagagctagcactaaggaaggcgattcctgcaaacacaaacatgaaggctatacaggtgttttatttatttatggatttaatttttaattttattgttattgtatcagtttttgaaattcttgtttcttctgctaggattctctggaagacatatcatacttattaagaattccacagagaaagccttatggaaccatggaaggcaatgtgaagaaagctttgaaggtatattctatttttaaaatttctttctttaccctatacaattttttcatgttcagaaaaaggaaataactacctaaaagtacttaatttcatttcgtaattattgaacatagtggatttcaatatgtttcaattgctgaatgaaattttgatatagcaggcagccatcagtggttcacacttttcgtcccgtaataggatatcaggtctcttttgatatagcaatttcaaaacattatctatgcatagtcataggataatagtttgaaataaaagagattctgatattcacttgtctgtttatttggaatttcttcagtgtcatttgtgtttacctgtatcatgttttcctctcaattcagatagcaaaagaggaaaaggattcaattttggcaagttttcctgcagatctaaaggaaaggggttcaacattgtacacttctcttattgatggaaaggtataagagggtacattttggcttaaagcttagcacaatatgtgaaaaatgccatttaaactaagcagaaaaatatttttgaacatttatatggttatttcatatttttaaactttaatattctgcatacactatagcttaatgttagggttgaatcggtattttatattcacataggattaaaatcttcaatagagtagtgctagtagacagaattctatcttttgccaattcaatactttaaatacttataaggttgtacacttactgtaattgttcactgcagaaacttttaaaattataaactttatgcagggtggattacaatcacttattgaagccataaaggaaaaggatccagacaaagtgtctatacgccttgcatcttcactggacacaattgctgatttagagttgttgcaggtatctgaaagtagtcaatggaagaatataaattctcttaatccttacactcaataataagaataagaaattaacctatccagtatccatagaggtattgaagtgcataaaatattttgtaatatgataagtaccactatactcacacaaatggacaatggttacatgtatgttattatgtaaatataggtttgtaaaagttacattttgatattgtttctaacaggctccagggttgtcatttctgttgcctgaacaattttcaaaatatccgaggtcagtactaataagttattataattgtaaattataactttcttgaaactaaatatattggccttttgtcaaatgaaaaatctttaaaactgtcctaatttaataggttgtattctgttttttccttcgtaggtatcaaatttttattttccctttttgaaataatttttgtctgtgaactttaaattttacttctagtttattaattctaagtatatcatgtaacgggtcaagtttcactatgtgtgttagccactgaggctagctcagtacttgagacctcgttatttgtttcttaagagcagcaagtgtgctgactaaattaaagtaacaaaaaaggaaaatcacttatcactctgtgtcttgtgggacatgaagtactctgaaaccaaagaaattttaactttgtacaaaaaatgtcaatatacttctttttctaattacttgcaggctaacagggagaggaattgttgaatttaccattgagaaaggagatggttcaacattttcaccagagtctggtggtgaacaaagaaaaactgccaccatacaggtctcttaatctctcttataatgttttttttttaactcaccatttagatactttatttgaatttcatccacaatagtgaattgttgaaagaagtatccaatgggtacaaaggatgtgtttgaaaaaaagttagttggtacttttttaagtcaattgttatctaacattttgcaatgtatgtaggttgtcatagatgggtactcagcaccattaacagcggggaattttgcaaaactggtaaggtagttgaagctcactttcgcttcatgaatttgtggatggaccatatgcattttgtataatctttaatttgtatttgaatttatgcttgttttcattacatttatagttttcatatctgattacatcaaaacaaagaaatcaagaagataaaaaaagttcatggtttaaggagcgcaatcaaagttttgttagactcgtttcttctatgctaccgggaagttgactacacatttgatgatatataatttgatactagtgttaattaaaattttgtgaatcttcttgtatgtcatttaagaagaagaaaaggctaggtcagtttcaaatttatattgtataatattttatttttggtcaatacacaattttttaggtaattgatggtgcctacaatggatcaaagctcaacttgtccaatcaagccattctctcagagaagggacaagataagaacaatggtaatagtgttcctcttgaaataaagccatctgggcagtttgagcctttgtacaaaacaacactaagtgtccaggtatacttacataattttctgtaaattatttataattactgattgttgttacttttttctggtagtaatttggtcatatttgctaataaattacttttctttgtccttcattcaaggatggagaattaccagttctccctctatctgtttacggtgcagttgccatggctcatagtgaagtttcagaggagtattcatcaccctatcaatttttcttctatctgtacgataaacgaaatgtaattctactcttaaccctgaataatccacatcaaagcatctgatttagaccttttttttttctctaaacaagtagtaaaagtaaatcatttgcttcgtgtaggctggcttaggagggttgtcgttcgatgaaggacaattttcagttttggggtatgtaatttaacccactctgttacatttcttgcacatttaactagaaagagatatgcattgagctatatttgatgtctttttctactacattttccacttttacatgtagatatacaactattgggagagacattctgccgcagataaagacaggagatgtaatcctatctgcaaagctggtagaaggacaagaccgtctcataatgccaagtgagagttgattttgattcatttggaccacaatcctcgttctttagcagcctgattttctttggtgcaggttgtgtttcaattttcatttttttttttcacttgctgtattcttctacaaatctctagttaccaagttcctggttttgaccatgtaatatacttttcacaacattattaatagataagtttgctggccatctctcctctccaagagtttaaagtttgttcttatttttttttaagaaaatttagtaacacatgtttggtctcattttgatcatttaccaaagaacataaaaaaatcttaatgtttgtatctcatataacacatcaatgccttcttttaacgataatttaaaggctaattagtaatttttctccttgaattttgacatgtactaaatcgtgctccctaaacttttttggccgttaaaaattctccagaactattga

SEQ ID NO: 161446 - DNA, 4827 bp, Cannabis sativa
  modified_base (4799)..(4800): a, c, t, g, unknown or other
gagggaagtatatttgccaataaatctggtagaacaaaccttatcaaggtgttgagctaggcttcttggagagatacgcataaccctaatgagagtcatgagagatactagatgaactgaagaatcagatgcagtcgaccaaatttgactttctataacacttaagtaagccggtgcatcagccatagccaaactaggaaggagagtcccaaccaaagtctcacggatggcatttggtacagctgacttttgtgcagctaagctagctgatggaccactcacacattctatttggaagaaaatatctccaatcaaccgaggaatttctgaactaatgcagggtttccatgtggtctccataccttcagcaaggagctcagctgctgtgcagctgtatttgtcattcatggccatcaccagcttcataagtggatgaaccaccagcttggcaagacaaggctttacaagagttggataccaaatagccaatgccgctgctacaataatatgagaagtcattgcatcttggctggttcccccaacacaagaaatccaatcctgcatttcatatgattcaagccatgccaatatgttagattgctctacctcacatatcacttgtgtgtccatcacttgttctgtatacaatgtattagcaagtgtttcttctgcttgtacatttaaacttccatcttcactaggatcagagaggcgattcatatttgcacgattggttgccttctgactgcataagggatgtggaattgcccgtgaagcagcacagtggaataaagtacgtgcagccatacgtacatgctcactttcatcttgccagaaactcaccaagagctggagagagtgagaggggataaaaaacacatgagataatcatagtatttaattgacaaactgtagaagttcaaacttccatatctcaagagcttaaataattcactaatactgatttggtagctatttatattatatatataaatcatttttcacaactaggattaactctacacatttatggttacatagtcaatacaagaaagcagcataatgagcaattcagagttagctggctctcattcttggatagtagactacgttatgcaaaactcaaggtaagaatataaaaaagcataagaacatgaagctacctgaagtaagggtggctttatgtctggaaatttgtcagcaaagcttctagtatagaatgctgctaaagaactgcataacatgccaatcaaagttataacatgcacatgcctaaaacagttacagctagtctaaatttttgtcagaaaagtatcatacatgatattttcaattcacatgtatgaaactagcaaccacctgctggcagatgaagtggaatgcgacaagctaatcattcgttgggcgagagataacattgtcaaggacctcattgcacaaaactcagaagatgatttccaaagctgaaatttcattttcagtatgagaaacaataagagaccaaataataaattatgttttgaaaattcaaagtacctcaagaattgcagtcaaatcaggaaaggccaatgttaaagatcctttgtcaccttgcaaaccagaagccacaataaaattatttggtctctcaagcttcatgtcggtaagaagcaaataatcaagcttaggatccacatcccacaagtgcaaaaatgacaagctaaatcgaactaagcattcttctagtgacctaatccaatcaagctcatttgtagcttcatttggtgtactatctgtgtcaaatacatttttcgaactcatttgttgaggacttgatgtctcagctacttgctccctcaccttgtcattcttaggagttcggtttccattttccatggtgtcatgcttttgataattaaacattagtgatgcaaggtcaaaacttagagttgcaattccagggaaagggcaagagcaatttacagcatacttgttactgcgaataataattggtttatctttcccagcatgtcgttgagaaatattccgtgcaactatgcttttaggtgaagtcaccaatttctctaacttattcaaatgagggttggaagagcttccatcttcaataattggaagaagtaaggaggaaactgaggtattttcattaagtatggtgcctgatatagaactcttgcttatacccttacaaaaatgttcaaacgctgactgtgatgttgtcccgtgaatgacccgctcttgagcacccgtctttacatcccagatatataaaatgtcattagcatcactagttccaaaattatttgggatgagacatgcaatataacctctagcgccatcccatacgatttttgcagggtagttgggatgtccaggaaacattctctccactctcaatgtttgaaaagaagcaagagcaacacacaaatcttccccgactgaaagaaaacaattactccatggatgttcagtgctaattgggggaggaattatttggcgcaccggagcgacatgatgatgcattacagaaataacatttccagtgtcaagatcccatatgcgaactgtgcaatccatgcttccagacactaaaaccttattgaaacttgatcctttgacggtaccaaccatatgatgagcagccaaacatagtacagctccagtgtgccctaaaaagttctgtctagacaaatgggaagtaattgcagaatgtggactttcaccatgaaaatctagcccatcaagtaaatcaaaccgcacaacttctattttcccactaagaaatccatatacaatagcataaggaacaaaggaagtctcggaaataaccatggaagaagacacaacttgttgcttactagcaacattatgactacccacgtctagatctatattgtttacctcttttatactttgaacagcatatttaccagaagatatttcggtgtcatttccatcaaaaccctcagtttcacaaattgaattagaaggcctagtccaatcaacaaaagaagaagcttgtccatgaattctgaaactaaaggacaagtttccattctcatcatgttttcgacatggtgaatatattgtaacaaatggtttccaatgtacaggttcttcggcattaacaccaactgattctatccgaagaacataatggttcaattgaataaaggaagttgatagtctcatatcttgggaacgaggattaaatggtatctcatagagaggcttagatgtaaagacatcattcaaatatgtaatcaagtacactaccaaaccacctctattattccaaacagcaaactccatttcatgtattccatagggttcttcaatattcaacataggtttatcatcttcccttttcaaaaacatacaccctgcaacatgcgatgtagaatcaccgtctgcacaaaagaaattgtctacaaaagagatctctccaattgtagtaccactgtctaatagtttgaatatgcaatgactatttagaacaaaagcaataatgttcctactaaatgtcattgacatgatcagtcctccttcacttataccatctgccgaaacaatcatttccagttgagaagagttgtttggcgaaccagtatcacgctctgtctcttcttgaagatccttttctattggcaacatctgcaatcggcctaatgaatcagacaacagcacagagtgcttttcctcttccttgtttaaggaaactacagccatatatttcaatgacccaatggataaattcccacgaaaaaccttttgcactatggtaagagtgtatgtatcaacaataactacagcacacttagcacctttcttattctgagactcctcactatccgccgaaacatcccccaacacagtagaatcatcagcaaaacagcacgaaatacatacatactgcggcttagagtccaatgtcctcaccatggatgggcttcccacccaaggaggcaacttccgtctccgcctgcaatgtccactacctctgctccaaacgcacaatacaccatcagaacatgcactgattaaggcatcaccatcaccacagctagaattggctgttgaatgatcagacaaatatttatctgcggcatttcccgaaactacaacaggattgcaaatgtcaagttctgctattggtgcagcatgaccacacaacatagctgttggtttaaactcctgttcaaacgagttctaaattacacaaatgcaaattccatacataaataaacgaaaactaaccaaaataggcattgttctagcaaattgcttaacggagtcttaacttctatattagcatattcgttcttgttcttgagcattggccatggcataagagtgatatgaagaaactaatttctgctatattcagttcaaactgagttcgagagcgagttagaattacctgactggaatcgtcgttggaggaggagaggctccaccagatgatggagccatcagatccgccggtatagagcgtcggaggatgattaagcacggtggttgccgtgacttggtgagacggaatggtgtccggccatatgcaagctacggatcggcacctcatgactcagtgagtcgtggcgagtcgggatcacatgagagatggtcactgtaaaactggttgagaaaagatcgagttcagttctttcttctggctacgtcgtcaacaaccttccggcctctaaatgggctcactactgcagcccaataaggtaattgggctagaaatcctggaacttgggccgtaaagagctgagatgaaaaagggaaatttacatggtatnntaacttttgctattttttacaaaaata

SEQ ID NO: 161447 - DNA, 3558 bp, Cannabis sativa
atatatatatatatatttgttggtatttacagtatttttatcattctgctgttaaaaggcgccacggacaaacggaataacgatttttagcggggccagtataatcgaaattatctgaaaataaaaaacacaaatatttttattttttcttttgtcaaaatctagcaaggacgaaaaaaaaagcaataacagagtagaagtgacaaatggctggtagtgctggtgcgatgattcaagccatacccatctccaatctctcttcttcttcttcttcttccttaactacactagtttttctcccaaataccaagcttattccaacttgggctcccttcaacggagttcgattaatcagaaagcagagaaccttcccacgtatgcctatgacagtctcattggctctagccgaatcagattccgccaagtccttggaacccgaccccaaatctcttcttcaacaactcgccgtaagcgtatataattaattatataactcataattgtaatctctttaatttggttatgtatcaattgcttaattataattcaatttctttgcagaatagttttgatctttcccaagattatttttcacagcttccacgcgatcttcgtctcgatgtaagcaaaaataaaaattctttctttaaagaaaactcactaacattttgggtggttttgagcttttggcatttcattaactcaaaaaacagccacagaaacaaacgacatgtcgtttagaatacttatttattgcatatttctatttcttatatgttttgttatggtgaagctcaacgatgcagcttttgacctttcaaatggaccagtcattgacgaggtttgtttctctagattttgttcctatcattttccctgcttcaaatttggaaagaaagaaataaaatagaatgcaatcaacaattagtatgtaaatacaatacagtgaagtacagtttaatgtcaaatcctttttatccaaaatttgtgattttcagtgtggtttagagctgggagagacattattaaatctctctagagcatgggaaaaagctgatacatccacttcacatagtttagttagcaagctccctaagttggaagagtctctaacaaacaatgctaaatcaggcaagtacaagaaagatcaaatttcctcttctgaaaaactcactgtctccatttaagtttagcttattctgtcgtttctggttttggttaagcctttggaaagcgtttggtttcggctggaagaaggttccaatccatggggcagtatggccaaggtgagctacaaaaggtatgtaacatatgtcttcatcacactgttctataatttgttgagtttttgttgattgggactgtgctttttttaggacttaactctcaaactaagtgatagcataattcaaccaatgtactatgccagaactaaaaacagttagcattgcacacaataaattgtctatgtttagatttaatatgaatgaagttttgtatctctaagatgaaagtattgttgaaaacttcaacaaatgtagattgcaaaactgatgatcacaactgggaaatgtctatctgatagttcaatgtcaacagttattgtcgaacagccaaagaacgatagcaggatgctaaaggttagttcataatagtcagtaatttgaatttaaagcaacttattagttttaacatgaactttataataacatgagttggttgagaaactgcagtttggagaactccaagtggagttgacagctagtaaagcgaatattggagctgccattagtttagttttcgggtaatagttgtctcatgtttctcctatgtgattcacatcaaagattcattatgatgttctgtacttcaaaacacaaaatgtaggattctttcatgggaaatagctcagggcgtccaaaacataccagagagctcattgcagtatgcgaatgacaatgccttgatgttggctaaggtagcacttttaagtttaggatgagaaaattatgctgtagaatttataaaacaccttgaaaagatctccacccttctgttcacttcgaactgttaccaagaaataatcatgtccttaattcacattctatgtaccaataatcaaaaacctttttatgattactgcagtctcttaggggaactctgcttgcagtgttctattcatcaacggttttgtctggctttacctctgtgggacttgtcttactagcaagacaactcaactcaaaggaggagtaaaaatctgcaactatgttacaccatttttgtttgtagtttctttgtacaaagtatttgtatgcttcactaacaataacatggacgacttattcagtcaacattgttgtcaaaagagtaattacgtttaagtagacaaatttatttattcatatcctcttaagtaatttatgttttcttctagtgttcccgaaatttcagctggcttccattgcattggagttgatcttaaacgcctcaaatttgtatagcccttgatcaaatccaaagcaattgttatattatttataatttaaataatacaatattaagattaaagttgtgacatgtaatatattaataagagattattagtatatattctgtttgaaggtaatattatatgatatataatgtattaaaaacacaacttgtaacataagaaaggataagtttatagttgttaaaaattgatattctactcatttatttcattaaaataggcattggaacgtttgggaataaagtggctcaaagaagagttataaaactcaatacatgagtttgctcgaaacactacaggcgacatgtcacttgaaacctaaacgagaagggctttagggttttacaaaatttcatgcatgtttaatggtattgctccaggtgacatgtcgcttagagcctattttcatgaaaacattgtaaaacgttcacctctttaataggggcgattccatacttcactctaatagatttttctttcattaatcctgcttacacgctttgtaacagtctatggggagtgtggaatttaaacttcaagtttggttctctaaatactatatataaaggactatagggttaacttatttgacacactacatttctatttattgaacactagccaaaaattctaagtaggtttctttattcccaaaaacatttctattaaaaccctatgtgtttggtagtagggtgcattaagatttttggacaaaagtgtagaagccttattcaaattattggtaatcccctttcaacacttggaatgtttcttctcttcatcatcttcttcttctatattttattattattctcttcactataatattatatatattgaaataagaaaagaagataaaattgaataactacattaattcataaaataaactcaatattaacaagttcacaaaaagatttcacctcgtcaacacttgagaatttattggattgcttgagaattttattcagtctcaagatattttaaatgcaatgcatcttgtttcttctactaagactctcattcagaaattgagagaagat

SEQ ID NO: 161448 - DNA, 6372 bp, Cannabis sativa
aaaaaaaaaaaagaaaaagaatacctctactgcacataaacactcacacgtgttttttctatgctttgctgatctttttacactttttagattcgatgcatttcgtgaatgattcaatgtccttgtttaatatgatgtcttttctcatagatatttcattttattctttgcattctgatgtttatgatgttacttctgtcccatttgtttccatgttacatcttgtagattgacctgaggagggcaaacaacactgaaattatgctcacaaaagttaagatgccacttcctgatatgatggtaaactttatctaaaaaatcttatttgttacttgaataatctggagctactgattgttttatctcttcaacgtggatgcagttgtttgatatagaattcttacatgaaatcctgtaataataaataatttgttggttaatttaattttaatttgtctggttttcttttattacttatcggcagacatcagtaattttcagcatgggactgaaaacaatacatatttttgcaagatcaaaacttaatgactaagtagaacatataggataatttttatccaattttgattcacccatttttgaagtctttttttctcttttagctttttttcttcttctcatttttgaaatgttttaggatatatggaaaaaataacatgtttggttactcttttttatttacttaacaccattgacatgcatcttctcaggctgcagtgctagcgatggatgaatcagtattagatgttgatcaagtggaaaatttaataaaattttgtcctactaaagaagagatggaacttctcaaggtaagaatttaatgcaaattacattgtgctccttaccaatttgttagcaagtcagtaattcagcttaatatagaagaatatgatcttaatattcagtgttgtgacttttattctgttactggttatgaccgctgtctgttaattatttagggttacacaggtgataaagagaccctgggaaagtgtgaacaggtaagatacataattcatcttttcattttcttgaatgacttgctatgattaaggtatacagcagtaaaatgttttaactcattgagttattgatttatttttttagttatttgtttataatttcatatgagtttggtaatacataacatttttgttttaccaactcctttattcttttaattttcttctgtatatatacttaaaagaaaaacaatttatgtaaagtaatagaaacttggaatttttactgttgtacatcattcttttcctgttgaaatcgtgcgatttccttgtatatttgagagcatgtagataccttttaaattctatcatggctggagtagttcgaaaaggtcattttttgttttgttacgttttaaatatttcagtattttatggagttgatgaaagttcctagagtggaatcaaaattgcgagtgttctctttcaagattcagttcaactctcaggtttggtgacatatttcatgcttttcattggtggttatgtgattattattattgttgttattgtataattcatatcatcatcttacagatttcagaatttaaaaagagtttgaacactgtgaactctgcatgtgaagaggtaagcagctactgatgatgaatttttttcttgcagaatattagtatctgcattgataactaccttgcacttttgacaattagttttgacttgggtagttttatgctctgcttaataggtccggaattccttcaaattaaaagatattatgaagaaaattctttttctgggtaatactttaaaccaggggactgcgagaggtgaggatcttcaatagttatttttacagatttattatttgctcattgtgcattttggctagttccgctttgttatctgatagttgcaagttcttttaaaggaagacttgggttcttttatggccataaaaccagaagtttattagactatacaaaaatccaaatacaatcaacaaatgaacatgattaagctacaaccttctaattaaagtattgtgtgagtatcatcaacaagggtaagcttatgtgacttctcaattttaggatagaagaaaaggccattacagtgtcatgccaagtactattcagtttcattatgttaagagtataagaattacatggtcatactgcctatttctgattattgtttccatatactcaactgtggatttacagttatagctaacttgtggttgtggacttatgcaaaagaaaggtgctttttcaattttacacaagaaaaaaatgtgatttcttgatttttggttttaataagaaatgaaagccaaaagggttaataatgacgataaggtttcatcttctacattggaagataacaaatcatcttaggttgcaaccaaaggttgcactctctatgaacagtcatctatcacatataggcaattacttgattgctgaatagcgatttaaatgtattgttcagctatcaaccaatgaggaataggaaaacttttttatttttcaagttaaattaatgattatatattcttgtggaatgatatgggtatctaatgcttttttaataatgtacaggttctgcaattggattcaagttggacagtcttttaaaacttagtgatacacgtgcttctaacagcaagatgacactcatgcattatctttgcaaggtatgttctcgattaatgtgaaagaaaaattgatgttattagatggagaacctgaagacctttttataataagaacaattaaatcaactagacttgacctcaatgcaagttcagaactgattaaaagttggatttttgtttacaaacccagataaatacggtctagagagcgttgcattttataatcatcaatctagggtacaccatgagttggcctaagtggccacagttaaattcttattgtcctgtagcaactcttttacaacttggacaaacgactttctttattaatcaatggtaagaaaaaggtttctcaatgaaattcaaaattgattccaagttggattttttggctttaaaacccatatacgcatacagtctagagggctttcggatgcattttaaaatcatcaatctaggttacacaatgagttggcctatgtggtcaaattaaaattcttatttgtcttgtagcaactcgtttactacttggacaatcaacttttttttttaaagaacggtaagagaaggtttctcaaattcctgtctgatgtaatcatgtgttttgactaaggaggcctttaacatacaaaattgtttcttctcagccattgaaccttgttagagaaaaactctctgtatacatattattttcctgttgctaaaaactaattaaaaattcagccgaatgaggaataaactactgacgtgttttaggcctggaacctgtttagagttttgttttttattttcctaattatatttccaccgaaaacgcagaaagtttgttcttcggtgattgagttttattgttggcgtgataaaatgtgacttgctagccgtaattaccggcagaatttgctcataaaagtgtttctttgcttagttttctgtgcaaattaagacattgtttttcgacagtgaatgtctgcaataaaacaagagacattaattgacaaatactgtcagtcttttttttttttccatatctcttaaactctgttttcatgttttagggtctcgcttctaggtctacaggacttcttgattttcacaaagaccttgtcagcctggaacctgcaacaaaggtgtgtatttttaatttgggtgttttgttagtggatctcaattgagaactcttagatttaattgtgtattgcttcattttagatacaattgaagtctttagctgaagaaatgcaagctataataaaggggctagaaaaggtcaagcaggagctgggtgcatcggaaaatgatggtcccgtgtctgaggtttttcgtaaggtcagtacttattttcattgtttattggaattctagattgcattttttttatggtactcttttattttccaaatgttataacattaatattttatggtactcatctttatattccatacgtacttacttgacatatgcttacttcactgctttttacggatgtgggtccttttatttaactttttttttcctcttgaaattctagacactgaaaggattcattactgttgctgagacggaggtggtttctgtgactaacctatactctgtggtggtaatttgctaattatccgacttctctgatttttcctactggtttatgttgagtattacactctcattcactctgactgttaccttacatgattaccctttgatggacagggtaggaatgctgatgcacttgccttgtattttggcgaggatcctgcacgctgtccattcgagcaaggttagttatcttccatttttgactgctgtaactgatatctgatccatggcgagctacattaattgatcattgccgcccccaaatctttcagtctctaggactgcatagatttcacttatttaaaagcatttcttgagactatgataatggaatttctcgaacttagaggctgtgatgtatttttctggagtgaaattattgtggagaatgaataggaaataatctaggaatggtaagcttctacattgggaaatattcctgccttttgttggttgagtgttggggaaaagaaaaggaagaatgagaataaaagacaaaggacacagagtatgagaagaagtgaagtttgcactttctattctctattgtagtactatagtttatacccaggcagtgcaaatgtttcacttgtgaagttgatttctcacattataattctggtttgattaaatgcagtgacagcaactttattaaattttataagattgtttcggaaagcacatgaagaaaattgcaaacaagctgaattggagaaaaagaaagcagagaaggaagccgaaatggaaaaagctaaaggcgttaacctcacgaaaaaagcagctaaataggcggtaattgattttctgtttcctacccctacatgagaaattgagctcttgcctccttaggaggtctgcctgccgttgcgatggttactaggttgatgccaaaggaatcaacaaaacagggttgatggtagagtagacattgcactagggccatattagattgtgtccctttcccctgatgttggtgcaaagttaagctcaacaaaaggtgatttgatttgagccaagcaaaagggagactgtcagagccagtaagcccaatacaagaagtgtagcattgcatgctcgacaaatgattgtacaatcgggtgatcctgttcaacttatcacatttagatatctcaggtggaccgaaactcagaacagatttggcgatgatcaccctacggattggctgagatttgaaaggtttttgacatggggatgattgccatcctgatgttttatctgccccgtcaaagccatcacggtgagagcaagtaggtgatgcagttttctcagctttcaccgttgatttgacataatattttccagctccagatataagattgtaaagcactcctttcaactgtaccatcaaaaccgtgtacaaagctctaaccacttagtatagaagttgattcatatttcttgtaacatatcagttagatcctcttttatcttcacttaaattgaaattttggataggaaaccccgtcaaaatgtagatcttttgtatagatttattcaggttagaagagaaattagaaagaaaaaagaagcgaaaatgaaagagaaaaagtggggttgtaattataagtgtaacataacataactgataagtacatgtttgtgaggtagaaactgcttgtttctttcattttggctcttttttttttttttttcttttttcgttcaacatatattgccaattcattacacttttcaaaatgaataagtggtttcttcgttttcacttcaagttcattattcgtgctgattttttttcttttggctttgtttgaacagaaaagtcgaatgtcctcttcatttcatttacataaaacgtttttgttgactaataagaataactggtagttagtgaaaaatatatatatacatttcttatacttagagcattcccaagagtttttctgctatatacattactcaaattttactttccctattttagagtacacttttacattacacaatatatcaacttttttaaaatatatcattgaaacctcaatttttgtaattttattatattttattcatttcaaaaatataatattaatatatacatatatctctatacaaaaataattattaaaactcaaa

SEQ ID NO: 161449 - DNA, 7058 bp, Cannabis sativa
tccttttctctcttaagacatctatgtcccacagccacaatgattttgaatagcaagacctagaactttaatgggctatggattaactcttcatatatacatgaaaacttttctacaaaccaaaaatctcacacgtaccaaataatgtataataacacgtctatttcctagattttcattttcactagagaaaaataaaagaaaaaaagactaataaaattaaataaccatgagaaatgaaagagcctagttacataatacatactatgactaatgtccctatttacacggacatccactgagggttgactattaatggtcattgcccaaccaaaaaaaaaattcatctaccaattttaatggaaataaattttaaatagatgtgcataaaaatctaaaaaccagactttatcaacaataccaatcccatcacagaaatggtagaacaaacattaaaaaaaaaaatcaagataaaaaaaagccagatcgatgaatacaaatatatatacaatacattaataacagttgcaataacataatccatacaagaggagaattaaattttacaatgaaagacagaattagcatagtgggatagtgataattaaatacaataattaacataagcaaaagggaaagtgggcattgatcactgtctgcttaaactatacaaaaaagaaaaagtaggaattcttaatatttttttcttcttccttcttatcacaatctaatcttgttttcttctcagtaaattccccaaaatagagattctcctcttcacccatgcataccaccaccttaaccgtagtcttcagttgataaaaatatgtacataatttgattttgcttccaaactcaaatttccaagccactctaatctctctttttttcaggtatatccacagtgtttgagagacagagagtgaggaagcaaaataaaatgaacgaaaaaaaccatcaccaaactaaccttctaaataaattttaatcataattggtaagaaatcaaggcaatctttccaaagaaccatgaaagagctctcaacttttagagctctttttttttttttgggttttctttcacttgactagctccgagacccacccaacatcaggagtgccaacagaggaattcggattcgggtcgacccgtttgagagaattctctttgctgagtttctcaaacattttcgcacgaatgtcccttccggactctaccctctccatagctggttcctcttccaggtcacagaaatcaagatagctgggacgggttggagctcgggtaggggttgtgggtaggctacaaaaaccgggtcggagtattgaccctctgggtgacccgaacccgggagaacccttttgattgttggtccaagaagagggcaaagacttaaccttaccaagtcgaaggtccctgagcgaggccaccatttcattgatggagctcgaaccaagagagcgactcaatacatgagccataggcgacataggcggagaatcagcctgaggcgtagccggcggcgaaatggaagccggaggagacagaaacggcagcgttttcacgcatgaagcctcaatggcctgcctgagaggagaaccgtcgtaagactcagcagcgtttgaacctttggggctctgctgtggcaagactctgagttggtccggtgtgtgagcaaagaaacagactctcctcctgcaattggtaccgtccttgcatggctgagtcctgtaccgagcggggtgaagccaacactcgaaaactccatgagcaaactcacacgaatcacctttcttacaatgaccctttctaaaatcaggacaagccgtacctgaataatgatacttccttggatccctccggcgagccttctcgccaggatgagcgtacggacactcagtccagtcgtgtgacctccccctcgcgcaacgtcgaaccttgaattcaaacatcctgaactgatcacaagagtacgcgtcaaccggagcatccgattcccgacccgaaacgtccgaatcagagtcggcgtcaaggtcgttcaccgaaggcaagtacggactcagcgctgataaagcttcgtgaagatagtacggagagtaatcaccgccattacagtcggagttaatagagacgccactcaagggaaatggtgagtacatctcagccgtcggatcatctacggttagatcccatggagggacatggatcgtcggatttgggcggtgggtttcgccaagcatcattttgccaaagcggtggattttttttttttttttttatttgctttgttttggaagtttgtttacagaaaccccggcagggtctcgctcaatataaactgctttagaagtggtctataaccgtggttaggtttaaataaccctggttaggttaaaaaatcctaggaactccatccataatattttgcactgctggtagaaaataaatattaaatattaaattgagttgagggagtttttaaagaatcacaccccgtttggttttgggttatatgacggtctcggtagagtagcctacgagttactttataggggcaaaaatgtaataaagtcataacttaatgacacgtggatgagtattatggaggatttaattcgtactatgacagacggtgaggtgctttgtgcaaataaacggattttgttttttttttggattatttttattttgggactcgcaaggcggtgatccggtggagggtctgatacgcaaagtagaattttgtaaaggggttaaaaaggaaagtataattctggatagtgaaaacataaaataaattttctcttataatagaaataaaattataaaaataaatagaaattcctctcaaacaaatttttactaaaagtcccttaaaaaaaattctaaaagtcgaaacttctagatcattttttttagattgtgtattgtaaattgagtgattgctacacagacaaaattatacattaatgaccaactagttgttttttaagcaatacacccaactaacactttcatttaagataatttttcttatcaataaattgattaaatacatcttaatatttttttttttaatggaaatggatattttattaacaagaagttttaactattataataaattacaaaataatcataggattatttttttattttattttttgcaatgaataaatgagaggattatttttagtgaaagtacgaacggaataaaaacaagagctacaagcgatactatgaacaacattatttacataatgttaaacaaaatgaatctcaagaaattttaaagatatagaaaaccttacactcatgaaccaatacgccaaaggcagtaggcatatgaatcgaactctataagacttggacagcgattaaacaatcaatttcaagttgaaccccaaacctaattctttcttttaatccaacttaaagcctcattgatgccaataatctcagcaatagcagcatcaacacaacccgacttactaacaaagaaagcctcaataaggtgtccatggcagtctcgggccaccccaccagcaccaaaccaaccctctgaagcaaaaataacgccatcaacatttacattaatcttgtttaaatcagatttagaccactgctccaaccccaaatccactcccgacgaaagaaataggggaccattcttctttaattgagcaatcttccattgattaagagttacttgagccgacatcactatttcagaagcagaggagctctttcctctccaaattacagcatgcgcgcattccaaatagcccaacaaaccatgacttcctcctctcgaattgcaacaaaagcaaattgcaatagataactagactagcttcaaaaaatcccctactaaaaaactttatgagctaattgtagatcaaatccaacaagctttagcaaagtagaaagaaactaataaatgaaaaatagttttctcctcttagttacacattggacacaccaaatcaactagtacatatttagaagccaggtcagattttgaagctaaagtacctaaaagtgcacgtcaaatgaactgtaaaactttaagagaaacagaaagtttctaaactatcttccacacagctagctcagcaatattcatttgtaaagactcatcactgttcagaagtttataagcatctttcaccaagtaaatagtagatacattgaaagacaaataccaaaaatcagtattagcagagctaatttggacgttaagaattagctcacgatccttgggattaaaaatgtcatttatgagttccaaatcccagcttctattgcccacagccatcaaactataactttgcaatcatttaaaccaattaaaggagatatcaagccaaaggtcccttagaacactaactgaagaaccagatacaaagttacatctcactcatgtcttaattaaattttgagtttcaaaaatactttttttaaatgaagcttggattattaccaagttcagcagtgagaaaagaatctcgaggatagtaccgagccttgaacacctgatcacaagagaagaatcatttaccaccagatgccaagcttgcttccccaacattgagagattgaagtccctcaaattacgaaaactaagaccaccatggtgtttatgctgacataattgctaccaattcatccaactcaccccccgcgtcttagatgaatctgacctccaccagaaattactcatgatacccttaagctttttacagatatcaactagaagaagaaaaacacatagccaaagtagagggagcttgtgctactatttttaataagattttctttccaactttagataagtgacgcttttcccaactttgaatccgcttcaacatcttatccttaagaaaatccaatatgacattcttattttgcctcatagtataagagagacctaaatataagttgtttaccggagcttcattcatacccagtaggctacacattctgtctttaacagcctgagtagtattcgtgctgaagaaaatggttgacttaaaaaaattaacatgttgcccagaagcttgttcaaacaaatgtagcaattgaataacattaagcttccctctaattagctttacaataaagatagctatcatccacgaataacatatgagaaataactggggtcccattgcaaacacgacaaccatgcgaatttccacgagcttcaaaatgcttaacgagagaagaaaagccttcagtacaaactaaaagtaaataagggaaaagtagatcaccttgatgaatacctcgactaagagtaatagggcccaactcacgacccccgtgagtcacagtataactaactgtggaaatacactaaaaaataagatccaccacacagctgttaaatcccatcttaagcatcatatgacataagaaagaccactcgacacgattataggccttactcatatcaagttttagagccatatgcccatctttcccaacttgctttcttttcaaataatgtataacttcaaaagaaattatgatattgtctgaaattaatctcctgagaataaacacactctaattttctgagttaacaaaaggaagatcaaatttcaagcgattggctaaatccttagaacaaatcttatacagaatattgcacaaagcaaaagtacttaaatctatcatattgagtgagtttttctttttaggaattaggacaatgttcgtgtgtaacaatctagtcggaagagtatcgaacatgaaaaaagagagaaagtgcttgataacatcattggtaaagcagataccagcattgacaacgacggtactctatttgtctctatataaataaattggatatcaactaaaatactacaaatcatggaaatatcataaacaaaaatgctagcagaagaaacattagaagaactatctgtgataaaagaaatagcagaactgcaattaacttctacatttagttactggaaacccaatcaacatattattagaaaattattcttaagaataagtagttacattttttattttattttttacatttctttcacatcactttcttgttttttattattttcacacattattctcttttatattttctctcatatcacatcctctcttttcctactgcatgcatctcaagcatgaactttctttcatgtgagcatggtattcgaacactacaacaataataggcagtagcaacaaagacctcccgctgctaataagagggtaattagcggtggagaatgggattcgccgctaataatgtacaaaatttaaaaatatttttttaattattagcaagaaaattagcgcccattttgatgtaagtcttattagcggcagatcattagcggcagacttcaccgctaataatagtattttactattaaaattataaatgattattaatactattagcataggaacatcagcggcggggccctaacacattttttgaactctcttctctctcactttctcatggcagccccttcccatcttcgcttctgccctcatcgcttccaagtccgtcccggcaccaccccatgcgttctctatcccacatcgtctttgccccaaaacagtcgtcacctcggtctattcctgttcggtccttctccgttccaaaattgttatcatcaatgtcaatatctactttcttcacacatagccgactccctcccagtatggtgtacatttacatttatatatgaatgcaaattgatatatataatctttcattagtatatatttttaatttttgtaaacttttagattttatttagggtatctaatttttaagcacaaataagtagtttatgttttgaaattccgtattttaatatttttagttttattatttaattaaatgcttaattatatgaaaaataatgaaactggtactgaaaacaatttttcagtgcagaaaagtaaatacatacaatgtttttgtacgtggtttcaacaattctttcagatttttactagtccacggggacacgcccagagataagattcattagatagatctcaa

SEQ ID NO: 161450 - DNA, 8825 bp, Cannabis sativa
taaatgtatatatgaaaaatgtttttttaagagaaattaaatgttaattaagttggttgaaaaaataaattataaattccttttctatgattaacaagaataattttgcaagaaaaaaataaagaaagaaaagagaagaaagattaattctgcattgtgatcttttgtgccaaaaaaggaaaaaaatatacattttgttgtgtaattactaattagaattaaatgatgaatttgaaaagaaaaaaaaaaacaagtaaatgattaatctatatatttgggtaccaagtaaataacggtgaaatattccaaagtagatcttgtgggagagtagtaaatgggaattggttaaaagtttagagagagtttcatcctataaatctcaaccatcaacattgagtgctctgctctgccaattcaatcatcaacttatcatatagatcagaatttatatggctgagggaaatacccaatcgaagtacgtgaaactcacaaaggatcaagctcctgtagaggatataactcctggagagctcaatcagcctattgaagttcctcaggtccccttctctctcttatattatttttctttttcaaaatgttatcactgtcattcttttttcgtttatagattatataactacacaagtttttctctccactattggttcatgttgaaattttaaaatcttattatttgtcatattttatcttaatttgtaatctgttcaggattatttgtcatattgtttaagaagaaaaaaaagagaaagctaaacaaaaaagtgaggcaaactcaaagtaaaatttgggtggatttagaattatggtctttggtacaggattcatatgcagttatagaatgatgatatattgacatgttcttatgatcattacttttaaattcctttttttgaactcggatgatgattttatttgtgtagctttgtgttaatggagattttgttttgtttgtcatgacagttggacgttcatagatgtacagaatgcggacaagttttgccagaaagctaccaacctccagccgatgaggattggacaactgggatttgtggttgtgctgatgatactcagagttgtaagactctcatttactttcttaatatttattttcttctgcttagagtaataattttacaagacttatagataatctaatatttatgttagatcacattcttataccaaaggttactcactgcaacagtttcaaaagtcttttggtaatcaaattagatgagcatatgagaaaatattattgtttttatttttattttaaagccaaaggtattcacatatgcaatttgggataagttgttgaaggcttaggactagaatataataattttttgtatatgtaattcttttcacgattactttacatctagaattagagctagaagagaaggaatacaaataaaactattatattcatggtttgtcttttagtgttgagattcttttaacacgatgaaattgatgatgactgagaaaaatgggtttttatttttaatgattaggacgaaaaatatttctatgtaccacattctcttgttcattggtcatcttattaatatgtgttcttgtgttgtaggttggactggactcttctgtccatgtgtcttgtttggtcgtaatgttgaaacattgagagatgacattccttggacgaatgcgtgtgtttgtcatgccatttgcgttgaaggtggaatagcacttgcagcagcaacaaccttccttcatggtatagatccacatacttcatttctcatttgtgagagcctggttttttcatggtggatgtgtggcatctacaccggtctttttcgacaatcgctacagaagaaataccatcttaaggtgaaaaaatttcatacgtaacacgtagaaaaattcttaaaggaaagttaggggatcattgatcattggtgattttaactgcaaacaaaaatctatgagatacaagtgtaaattttgtggtgaaattctatttatatttttgtgtggggccaaaatacttgttgtgtcctatcagttcataacatatattgaatagatacttttcctattggatgcttactcgttgtgctgattacttgtagaattcgccttgtgatccatgccttgtgcattgttgtatgcactggtgttccctttgtcaagagcacagggaaatgaagaaccatctctcagacagtgctgcttcacatatgaccatgattaacccgcctcagcttcaagagatggaatccaatgaaaacaatcactctgcagcttctgccccatcaaaacatggtgatcacaccaacatggagatacagtctttgtaggatttgtgttctgtcgtatagatttttcttctttctgttttccttctttcatatgttgattttattaggcgcgacaacatcaaacttgtatttttcttcaacaatgagagaacactcattccattccagggtaagaaggggtggagatacacataagcagttgggttcacacaaatttgcacagagcattttcagtagatagaatgttatttcaaaaaatctttttctttctacaatatattttttggtctgtaatacttgatcaaattcctataattagtttatacatttctatataactagatctcttcatgatcaacttatatgatacaatgtattatatgatgggagtgttattttacaaagaataaacaaataatcattggatatgcgtgcctaaaaccctacgtccactcatttcagttagattttcttattagttgcttgtatcctgaaccaaactaaagctaatatatgattcaagtaattaccttgtgttacttagtatcaatcaaatttcttcttagatgtttgattcttaatgtcacatacgggtagactaaattgtttggtgattacagtgtctgtcttctcaaaagaacgagattgttgatggaattccatagatagagttattaagcttgttattatttttcctatcctaatacattatgttgaaacaattgagacatagagaatttgagagtgaaaacaattctatttcactatgagagaaattgctctttatatacattgtacaatcaagtaattagcttaacttagctgaagagaatgtaaaatagttagcttacaacacaactggaaataatagaattgacaactcaacataaccaacttaacaaactaactacctaactgtcctaagtcctaacacctcctcatgttgagctaggataatgaaactagactcagtttgtctcgaagaagagtaaattgagtgttaaagaggggtttagtgagaacatttgcaatccaatcttgtgcatgaacatgtttgataagaagttgcttgttgagaatctattctagcacaaactaaaggtgtagctcaatgtgtttggttttggaatacagaactggattagcagacatgaggacagtgctttggttatcacactaaatgttagaaatatgtagctgagtgatgctgatttctcctagaagggattgtatccgaactagctcagttgttgcattggccagactcctatattcagcttctctactagatctagaaatgatcctttgtttctttaagctctaggaaatgatattgcgaccaaggtaaaagaaaaattgtaatgtagagtgcctatcataagagtctgacgcccaatcagcatcataaaatcctgtgggttggaaagtggaccaggcttgaagatgaagtccatggtctaaggtgcctttgagatgtttaagaatcttcttcaccatcttacaatgatgttccaaaggtttctacataaactgagatactttgttgacaacataggaaatttgaggccttataataacaacatattgtaaattgtactaggtaactccatattagagattccatactttaatacattacagtctagttttacttatatgatatgatcttaattctgtactcttaaaagatcatacactctttatatgaataagaaaattcatgatatttattaattattttttaataattaatatagttatttataatacatttgtattttatatattcaataataaattatccattaattacttactttgagggtataaatcccaacattactctctaacgctccaactcttggacaaggcaatagtgagaataattctgattattgtaggcttaactactggactgaaagtctcagtaaaatcaaacacatattgttaaagatagccctttgcaactaactttgctttatacttagcaatagaactatcaggttggtatttgatattgtaaacccatctacagcctatggctttcctctctttaggtaagtgaaaaagtgtccaagtcctatttttaagaagggctgcaatctcagttttcctaacaaagttccacacatgggtttttaagacttctaagacagtaataagttcttaggaagctataagaacctttggcttataagtaccaactttagctcaagtgaccatagggtgattgttgactgagggaggtggaatggtagtgtttgttggtgcaatgctagtgtttgttggtgtagaagactcaggtaaaagattaggcaaattggatgtagatcaaggaggcacaacaaaagtgtggaagaaagataaggaagggggagaaggagaagaagtggtgggatcaaaatgacttgaggactgagatgaagatgatgatatgatccgtagggggatgggagtggtgggagaaattggtataaggatagatggtatactagaggtatcatgacatgaggaacaaagctgagcaaaagaaaaagaatactcataaaaaaaatgacatctcttgataataaattctaccattgtcaggtaagcatttataacccttatgtttaagtctgtagccaagaaaagtgcacttaatatatctgaattcatgtttatttctgctttttggtctagtgttggaataaactagtaggcctaaagatagacaatttgggccaagcccaatttgcataggaccttctaggaatgtacctttactccgtgaacaaatggtcttctgccagtgataattcgtatctagaagcagctctaaaactgtgatgctagaagttaaaacaacgtgttaatggaagaccagcccagtttccttttttattcaagcgcacaaaatagggaaatgaatgctcttcaaatctcgataaaagatcatatcaagctgaaagggaaaactacctaaataaagattaaacaattaattcatgattgattgccaacaattataggacatagtttggactaattcaactgtatctaatttgccttgtcagcagatcatcttcttcgtagcctggacttcattggacaacccaaattatgtaactcaatgtaatctcccaattagagagaaaaagggaaactaagtataattctcttaacactataaatacccaatgaatccttcgaattaacggttgaattctctgatgaaccttgcttaggcaaaatagagaacttatgctcattgtattcctaaaggctttttagcttaagttacataataatatttactcctgaactaaggctcgttaacgccccaaccacataaaaattatttgtgttgttcttactctttctctcttaattatttatttctatagttctaattatttataattggtttttcaaaaatctttgtaaatattttggtactttcattgagagctgtaggaagtagtgataccatctaaagattacgcttagtaatcatggtactcacctataacaaatatggtcttcacttcattgatcctaatgccaaagtaggagatgcagattatcaaaatgaggtgactagctgtcacaaggatcaagtcggcaaagatacagatttagacactcctgtatttggagatgatgacttagaagagaacaattctgatgatgttgatgatgatcctcaagagacctcaaaagatgatcctcaagacacatcaaaggatgatttgtaggataaacttgttgaaggcagtgttggaggaaaggacaatcccgacgagtcagataccgtggtctccatggccgaaaggttccagttaattgaaaataggttatctcgtcaagattagttcaacgagatactgcttgagaagatgacaagaatggaggtcgtgacgacaaccaaagggatccctaataagcaaacacctccaaaaattgatgctcctagaagaattgatcaaaaagatcttggcacctcaaatccttgcaaggataaaggaaaagggatagttggtgaaacatcgaagaagactaattctagaggaagagtcgcatagaaagataagagtgatgataaagtcaagaagttttcttataggaaggaaaatcatcgtcacaacaactctagtagtcaaagcaatgaagttgatgaggtacttcaagttttagacggtaatggtggaagtctctccataaatgatcttcgaagaagattaaatgagaagaaagagaaagctagaccccgtaggaatgatttgagaaatcatatcaatgaccgtgtttacggaagggagtcttcaagtgacataacctaatgtttagaacgcaaagtcgaagagttgatgaaggttgcagagaagatctccagaaagaaaaatggtactgtgttagactctaaagaagaagacacagaaccatgtgtgaaaagaataatagatgcaccactgccagagcgcttcagaatgccacaaatggaattgtacaaaggcaggacggacctcagggaccacctgtccaagtacaaccgtatgatggaagtcgctaacgccagtgatgatgcaaaatgtctttgctttccactgactttaagcatattcgtggaagactggtggaagatgttatcttcgggatcgatccacaactagagagatctacaagcaatgttcaaaaagtagtttttatcaacacatgcctttcatctggaagctagttctctaaccagtgtcaaacaacaacctagagaaagcctaaagaaatacacccaatgtatggtgatgttgctactaaaacaaaggttattgattgtaggaagatggtggttttgacatcaggattaaccacacgatctttgctatggggagatctttagcataaaagagtagatactttgacttatttctttacaagagatcaaggattcatgaacttagaagaagcttacgcttaagtttatggagtacttccagtttcttccatagacatgacatcaacccaaactttgcagatgactactccatcaattttaccttcggcaactgcattcacgaatcctaccatttacggaccaagtgtttctgtacaaccagctacataggctagtttttttggattcagagcgatagaaactgtattcagtgtcactcatggacaaataaacaaaaaaataggagctccagatccaacataagccaatcaaggagcaagaggagttctaagggcccacaacaaatgattctacaaagaaaggaaagattcaagagtcaagatactttaagtatacaattcttgtggatacttgagagaatatttataaggaaacttgtaacatggtccaataaagaagcctcagccaatgtaaaagggcagaagaggaaaaagagatcctaataagaggtgtaaatatcatggtaatatagggcacaccaccaatgatgtgattatctgagggatgagattgaaggatttgtttgaaactggcatctatcaaattgggtaagaattccagtcatttatcctagatagggggttgcacaaggacagctttttattcttggacaacatggagctaataatcctccttagggattaggacattcacaagctcctagaattcaaactctcaatgcacaagccctttagcgggtacaaaatgctccaatagtaaggcttgttgtagctcctagtcctacaaatccatatcctctaggagcagcccatcctatgctagatggtcatgtagcaaccatttcttgtggcccacacattgcccgaagcacccaaaatgcactgaaaaggtacttgaatgagttggatcaagacaaaacttaaaatttggtacaagcacctactcaaagtcctcggatgatgaatttgccaatgaatttcacagaagatgacactaagcatgtgcattttttcctcaatcatcctttgtgatagaagttttgactgcgaataaaagagtttccaagattctcgtagataatgaaagctctatcaatatcattttcaaagatgccttcaaagccatcggtcttgtggaagccaacttgttaccttttccaattcaactgcaaggcttcaatggagacacgctgatcccaatgggaaaaatacaacttccaatgacaataaatggagaagtctttggaagctatgtgatgtcctctttcaagtacaacaccttcgtagtagttgattgcccaaaaacttacatcgttatcctgggatgacaatttttggttgattttggagaagtaacatccatcaaccacttgtgcctgaaattcctaggcgatgccaaaatgctacaatgtttcaaccaagactgttctcatggtccaaggaggaaatgaagtagaagctggaaccacttctcagttagaattgggggtggtccgtgaagaagatgaactagatcaatgggtaggcatggaaagaacaattgagcctatggaagagctagaacaagtatgcattaatgatgaagatcctgttgggttttatgcc

SEQ ID NO: 161451 - DNA, 5861 bp, Cannabis sativa
  modified_base (5798)..(5800): a, c, t, g, unknown or other
aaaaaaaaaaaaaaaaaaacttggcaaaaactataataatgtgaggagaatgtgcgtctaacaaaatggagccaatttgtataacattggtaggggacttaatggtgaaagagacgatgacgtaaacctagtcgaaaggacatgcacatgtggcgtgtttatattattgaatcttccttgcactcatccatgtgtcgcgacattgcaaacgaatacgagtatgtacatgatgttctttacttattattcaaaagatacgtggaggaagacttacgataatactatcaatcttgctggtgacgaggatgattgggttctcccaaaacacatcaagaacatgtaggttggggtacatgtggagaagaaatcagtaggtcgtccaaggaagaacaatgttggaagaagacgagggaagtgtttcccttctggtgatgagtcacgatacctcaaaactgcagcaattgtggcagttcgggctacaatagagcaacatgcaaagcttgtatttgaggcgtagtctactactagttgtaataatatgtattgtgtactgaatttcttattcaaatttgcttatttagtttgggggtctgctttaaaatcaggttttttatggtgggtttctagttttttgctctgtcgacagaataatgacaatgatttaacgatggtaattagttgatggtttgtcaatgtgctgtgaacattgaaatgaaatcattataaatatgtggatataccatctaaaaacaccgtagaaagtttctcaaataactgattgatttgtgagtacgatatttctcttgtgttgaaacactatatagacgaagtagttaaagattttggaggcctcctaatgactttagtcgaaataaatttattctttcactaagttatttttcattatataaatattagtttctaatatgattttttttatatatatataatttttttcgaaagaatcatgtatcacatggttgaatatatattggactagctatttgtatttatatatttggactataaagttggttgtgtactatttgatttgtagtgttatgtttttagtggtattgttggatttggattttattggtgaatttggatttggactctattatcatggttgatttgaactataaattttaaactatgtttgtctcatttttataataattttaagtattaattaaactgaatttggaaataaacaaaattgggattgatttaggtgaagtaactcaaaccgttttatgtaagctatactttacttagggttgatttgaactataaattttaaactatgtttgtttcatttttataataattataagtattatctctaatttgtaacttattttagaggccatatttttataaataattccatctaactctgggcattctttataattttcctttttaaaaaaaaaaatatgtatatacttaatttgtattaaaatatatttatatacatatacatttttaaaagaaaattttacataatttagcaaaattcaaaaacaaaaattacaaaattacttcaaacacgaatttttttttcatttttaagctttgaatttttttatttacaaaaatatctattctgtaaaaatgataaatcggttatttagttggttattttctgagattgatttctcgttgtttttagttatttttacttttttttttagataaagtgtattttataattctaattacaaatatatttttataaataaaaattttaagctataaaattgtaaataaatataaaaaatgatatttatgaaaattctccccttttttaaatttgaaatggcccagtataataaggagccaatgttttacatatataacattaatttcagtagcaataattattattgttattatttttaataaagtacttgtaatataattaaaatttcatatttatctatattattccaaacgatattgaaggagaataaagtacaaattaagtagaaacagttgcaaatatctgaacaaatattacatatatatctctatttacaaaaatatcagaggccacagatgattagaacatattattatatgttgtggaaaatacccaaattagaactataggtcaggctgaatttcagggtgttatcatttctaaccacattcatccacaccctaatttacaataaataatccaaattagctataattttattgaaagaagaaatgaaaagataaaagaaaaaaccaattagtgggtaaaattccccacaaccctaatcaccatatccatttctttaacaaatttttcatgaagagtatatgaaagagactctacccaacttaaaattccaaacccattgatgtgatctcatgcatgatcatgcaaaccctaataactacacttttctctacctcatcatcttctttgttgtaagagatctagttttcttgcaaaacaaggtaactagaaattattcgccatgagcctaaattgtctcagttgccaggtctttcagaggacaaactcggacctggaaaggaaccattatggcgaaggcctcttgcagacaaacgttgagagaagctggtcgggaaatctggtgacacataataataataaagacgtggaaataatgaagggtggcaggatgacgactgtgtcccgaaagaagctgcaggtaaaatctttgttagggcaacataggaggcatcacttttcaagtggctcctttgatggaataaacaaggagccaagattggttaggagttgtgggatgagaagggattggagctttgaggatttgagtggaagaattgagaagaaagggagaactatctagctaatcatgaatgaaataaatcaatctatctagtaggaaattagggtgtaatttttaccctatcagtagaaacattttacttttggtattttgagaaattataatctatttttttatatgacattttacattatatttataatagatatcatacttattttttaagaattctaaataatttacaatactgaaaatagagttcaaaataattaattgcactcatatattaaaaaaaaaatagacgtgcaattgaatatttgaatcttatttttcaatactataaattattttgattttttaaaattaagtgaaatatatgttataattataatatatatagtcatataaaaaaaaaatagttataatttttttaatacaaaaaataaaattgtcccaatgcataaaaaaaaaagccaaaaattatgtctctcctgtttattttccaatatatattgatttgtttatttattgatattagaaaggtttttcttttaaaaacataagcaaataagatgtatatataggttggagatcttatatatatcatgaatttcagttattaatcattgatgataagtatctcttatttgcatgtacatgcctatgtttctctcatacctaaccttgctatatattgtaaaataatgttggttcttacctaaataattcttaattatattgtgattcattcttatcattgggcctttttttatggcacatgcatattatacaagggacgtgaaaattaccaatgcaaaatgtatggctaattataacaaaattatgttcttagttgtgatgttttataagagcatcttcaatagtaacactgaaaaacaaagctaaaagtggtcttaccattggcaagggtgccaaattttggcattaagttaattatgagggtcggcccttaaaaaaagtaggtccaagaccattttgataaaattaaaaaaaaaaatggccctatttatatatattttccttagcttgttaaataaattaagtaggatataagctttttaaatgatattgcaataggatttggagtgagccaattggggtgtggacctgtttagttatattattaatttttttcagtttacattttaaagaatttatataattattgggctctgaatttgggtggatcctaaacataagcttagcccaccttagctcagagtcaggcttgctagctaattataggacaaccttgcgtaatctaatatattgacttatataaggcaccatacatggctattgatttgcttggctatggtgccaatagtttttttttattattatttctaaaaatattagattagctcaatggtataagtagggccacttacgcacttagatgaagtgcttccattaaggatgcttttagggcatctacaatctaattgctctttccattgcttgttagataatgaatcccttacatataaaaatgttgacttttcaacataaatataagattcgtggcttttgtcgggcagtgtcactacaacaaatatgatatttaggagcgacaaaagtcgctcctaaaattacacaaattctcctctaataacaattagaggcaacaaatcgcccctaaaaaagtgagtcaaaaatcaaactttgactagtcgcctctaatattttttattttttaaaaaaataatttttttataatattataaatatctatatttaatttataaaaaaaacaatttgaataatgaaattctacttctttggaggacaatgaaagatctattaacactctttgcaaactaacccaatcgaaaaaactcttgaacgaaattgatgatatcacctcttacgatctcccaatgctctcgatagaacttagttggtatttcatcagggctagacactttaagggaagggaaaagaccatacaacctctttaatttcctctactaaggtagaaaaataattctttaattcatctccttcgagataatagaaggaattaaattaggaaggtcatgagactctggtggaaaagaagattgaaaaatctctttaaaattatcagagatgtacaactcgatacctactctactataaaaccagtgttgatcatcctcgaaaattgcctggatatgattatggttcatgcgaatcagagtagataagtgaaagaatctcgagttttggtcaccttgcttcaaccagaattctcgagataatagaagcctacctttgagaaatctcaagaatttccagctaaataaaagcctcgagctcacggttttgtactaaaaaaggacaatttttcacttccactaagaaaccattcaaaatcttaagttcctcaaaacagtggccaaaaacctccttattccacttctacaaggcctttgtcgtggcaccaattttggacataaggccaaagctagcagagcccctgacaacaatcttccaagcttcctcaatcactctatgacaccctgggtcccgattccaagcatctaagaatcgaaaggggaaataaatccgctcttgatcgatcctcaatcaaatccaaaataaggggagaatgatcaaaatgattaatggttttggcctccacccttgcctttggataagcctccatccatcatgtgctacaaatgactcgatctactctttctctcaccaatgactgaatttgcttcgtatttcaccacgtgaggaacacactcgcacattccaaatccataccaccacactcaattacgaaatctgtcaatccttgatcatcctaatgccatcatgcattggtgatggtctaagcttcccgacagtagacagtgttgagaatcatggggttccatctcaaaagtcaaaactaatttgctcgcttatttttattcggatcttaagcgtctttgcaccatctggataggtgtggatcgaaagcccgctaggtatatggccttgatactatgttgagaatcatggggttcnnnctcaaaaccaattggcaatgagtggagtagcccatgttctttatatatggctcaatacttt

SEQ ID NO: 161452 - DNA, 4115 bp, Cannabis sativa
gacttcctacttatttatcttagctataactaagtagaaacacttaacgaaggagagagccaatatagatgcttccttcttcttcagttttattcttcctactttagattttagaattacccagttgagttaagtctttctttttctggtttaagatgaaaagagtggtagattggcttcacatttcgaaaaagaagagagaaaagtggaagatttcttctgggtcaataagatataaccatttcttctacttttctcttttgctattgatatgggtctttcagccagtttcaagccaagatggggatggtgtaatagttacagcagctgattttcaagcccttcaagcatttaagcaagaactaactgacccaaaagggtttttgaagagctggaatgacagtggctatggagcttgctctggtggttgggtaggaatcaaatgcactcagggacaggttattgttatacatctttcatggaagggattcagtggtcagatcactgagaagattggtcaacttcaggcacttcgtaagctcagcctccatgataatcttattgggggttctatcccttcaacattggggttccttcccaaccttagaggagttcaacttttcaataatcgactttcaggttcaatccctccttcattgggttttagtcctattcttcagactcttgaccttagtaataactcactaagtgggactatcccacctagtattgcaaactctactaagcttttcagaatcaatctcagtctcattttgttttctgggtctatcccttctagcattattagctcaccatcaataatctttctttctcttgatcataactctctctcaagaagtttacctgcttctttaggaaagttaactaagattcaagagctttcacttaatggaaacaaatttaatggagccattccaaatgaaatagggaggctttctaagcttagaaaacttgatctctcaaataatgccataaatggaagcttgcccactagtatttctaatttgtcctcacttgttttgttgaatttggagagaaacaaccttgattttcatatcccataagagcttgggagattgcataacctttctgtcctcaaccttagaggaaacaggttaaagggtcctattctagctacctttggaaacatttctactctcactcaacttgacttatcacacaataatctcagtgaatcaatacatgtgtccctttctgctttatcacatcttattcttttaaatgtttcctacaatatcctctctggttctgttccaactactttggcacaaaagttcaactcaagctcttttgttggaaatattcaactctgtggatacaatggctcaatttcatgcctttctgaagtaccttctcaaggaaccacgtctccatcccctgagagattgaaatctcatcgaaataaactaagtacgaaagacatagttctcatagcagcgggttgtctccttctagttttgctcatactatgttgcatcttactatactgcttgttaagaaggaggagtggatcaaaagccaaagctggtcaaggcaccagaagagctggtgcagttgcaaggactgaaaagggggtcccggctttgggaggtgaagcagaatcaggtggagaggttggaggaaaactagtccactttgatggaccaatggtcttcacagcagatcatcttttgtgtacaacaactgagattatgggaaagagcacttatgggattgtctataaggacacactagaagatgggcatgaagttgcagtcaagagattaagggagaatatcacaaaaggccagatggaattcgagacagaggttaatgttttgggacaaatttgacatccaaatctcttggctatgagagcttattacacaagtcctaagggagagaagctccttgtttttgattacatgtcaaaaggaaatcttggaacttttctccatggtaagcataataatgagaatttccctttaactggttgacatgttttttagcttttcttttgcattaataacagttttttgacttgctttatcatatggttttgcagctcgagatcctgaaactcctattgattttccaacaagaatgaaaatagctcagggagcaaacaaatgcaaaagtagcagattttaggctctctaagctaacaacagctgctgcctcaaatgtaattgctactgctggagcactgggctaccgtgcaccaaagctttcaaaactcaagaaagctaacacgaaaactgatgtgtacagccttggggtcatcatgttggaacttctaacaggaaaaaccccaggtgaggcaatgaatggtcttgatttgccacagtgggtggcttccattgtaaaagaagaatggacaaacgaagttttcgacttggaattgatgagagctgcacctagcattggtgacgagttattgaacaccttaaaattggctttgcattgtgttgatccttcaccatcagccagaccagaagttcagtaggttcttcaacaacttgaaaagattagacttgacaatgtcggtacaagttctggtgacgatggagtgggagctgctttcactagtgagtaaaatagaagaactagtaatggattctagaatactagtatgtattctgatgtcattagagtagaagtagctacattagttgatgaattctttcattcttcattagtaagtttgctttcatagagaaatctttgtaaatacacatttttttttgatccatttgagtgttcattttctactttatgaccttgttttggtgtttcaatccaaggtaagaaaaaagaaaaatcaaacctcaatctcgatctaccattgttcaagcctatttgcagcaacaaacaattctttaaattaatacataacagcagtgggttcttgagataactaaaatattgaatttgaatatcaaatagttttatgaaatttagtttgaatatttcatgtttggccaccaaacaaaaacaaagtattgctctatccttaccaccaaggaaggtaacaaaagaatgttctgtaaatggcatgaaggggggcttcttctacctactctagttcccaaattcttatagtaacgaaatttattagcttaaggcgtatatcaaaatggtgttgtcagcttcaattttttcatgtacatttatgaaaagatgaaactagaaccaaaaaaaatcaccgttgagtaagttcttagctaccatctttaatgtattatgtatccactagtttcctttgctagttcttcccaagcattggcccatcttcttcgcatatctcgcctatgataaataaaatacatgattctagacaattgttagcctaagaactctaagttttacaaagcaaattgtacccagttagtttagttagtgtgaagggttattataacaaaatgtcatgagcacaaaaaaatcatatatgtctttctatgccaagcctttcaagctcagatttgttattttcgtgctaaagaaacatgcagctcatattcatcacttatagacaagcactgttattatgtaacgaatcttgtgtgtttcgttgttgtttgaatgtcttcatgaaatttattataaatactgacacagttcaaatatgatactgcactaaaggagggtattctgccgaaagagttcaacttatagaaataggttgatgcatcataactaattagttagttaattgtttttcttttaattttgttttaacagttaaaagaattagttagtttattaatgctgttactctcacttgtactcgctatcagggtcatcctaagcgattttggtgtcttaggcgaaaaattaaactttagtattttattaaaaaaaaaactaatcaatacttttaaatttaattttttttgtttaaaaaaatacttcacaaattctaaaataggcaaaaaaaaaaaatcatgtatattgggatcacataatttttttttgaagtattaagtgcatatttgctcttatgaacatttattatgtatgctatacattatactaaaaatatttattatattatatatatataaataaatgataaaaaaagagattatttcaca

SEQ ID NO: 161453 - DNA, 2132 bp, Cannabis sativa
taaagcaaagctacattcctttcagctggaattatgggccaaggatggaccttctgaatgccactgttgttcatttttattttaacttgtactactattttgttttgataccagaattgatgggggaaaaggacccagttgctgcagcagcacaaaaatataaaccgatacagtctgctgttcctggaaccacattaggtcccattcagattaatgctttcctaagtggaggggtatgccttttacttatcaattcttttatgataattcctctcttctttacagtggtattagttttaatggtaacttaatatttaaacttgaatggttttatggaaagttatgtgtgtgcacgcgcttatatatctaggaaccaacattggtgtaactttcttcttgatgcagaagttatatgacacgcctggagttcatctccaccataggcaagcggcagtggttcattcagaagatttgccagtccttgctcctcggagtcgaatcaggggtcaaatatttcctgtaagtttaatttctgtactactttgacttcctagtctcttttcagtaaacttcttggttcttatttcacataattatcaggttcaatcagaaaatggtactgcagtgaacaatatggccaatctcttgaacggtcaatcattattttggggaggtcttgtcagaatagacatattaaaggtcttgtcattaaattaacatgctcttttttatattgtaattcacttcaatccaacgtattctaaaatcttgatactttcaggttcttccagaaacacgcttaatattttacggacccaagagtcttcagattcacacagtaccgactgacgaggcagatgaattttaccaggttatttttcatcacaattgtgataaattaatatgaccattacatgaaactatttctcttaaagctaaatagtgcttactatgttacagaaagaagttggaggtctgctgacacctccaacaggagaacgagtagaagaatggcgaggacttgaaatagtgcgtgaattacgattaaattttgaagatgtagaaaggttagattgaattgtccataatgtctcctttccattttgtttgcctcaaacatttatgaaggaagttgaaatggttcatcgttttagttcatttggtcgaaactaactatcaaaattggttttgtctatttggacaggcctgcttgtgatgttgccatatcaggcctaggatggtttaggttggagcctaagagcaaaatggtcagcaattcagactcaagctcagaaaaaaccgaaggcgaacttcatatagtagtccatgttccgagaccagtcgagatatttgtaaggcccccattacctgttgggaagtctggggaagattggtacctgtaccgggaattgacagagaaagaggcagaaacaagaccaaagtggaatttttgatgattggtgagtcgtgtttcacatgtgtgtatatacacatataccctacaattcattctgtgaaaaaagtgatcgaccttgaggtcttttgagttttgaggataattataattgcggaattacagctatggtcttgtcgataacaaagattttttttattgcatctgtatatatgtttagtaattttgtaatttgattgtatatttaaccaagtattttctgtaagtaacacttgttacacatattataataaggataagctaataaaattgctattcaaaatctcaaaacaaaccatgatgcacctttctgaggtcaatctttacgtaaaaaaaattaagcgttgaaaggcaaattagtttacctcacttgcataaatttggtagattatacagaatgtaactttctaaggttgcttttaccattactgatgctgttgtgatattacaattactcaatggatggtcaaaaacagaattcaagaacataaacaatcatctaaaagaaatgaaaaatagagttgaattaaaattaaaaatcagtaaagaaaacttagatgaataagattgcagagaaaaataattcagctttcgatggcacttcttgtgacagtcagtagtcccgtgattcgtaaggggaaattctgggtaagctgtgcaatcccacattgcctgggaa

SEQ ID NO: 161454 - DNA, 2241 bp, Cannabis sativa
agagagagagagagagagtataagtacacttgaggaagaagaagaaaatgtgaagctcagtcccgagaaaaatatagacgacatgaagcgacgcgtgctaccatgagaaccccacagttatattatatttttcagaagattttttttttttaatttttttaggaaaaatacttcttattataaattaaactgctaaatcatttataataacagagtaaatagatagaggaaaatattccatccaataacaagcttcatccaaccttaaagcatatctagctaaactatgagcgaccatattagccgtacgtttgacatgcataattgatacactcggttaaaaggaaagaagacaagaaatatctataataagatcgtaataagaagcaatacaaacagatcagccatataaagcatttgtaatcatagaacatctgtttcaatatgaccaatttggaattccaattgtgaagcccatacctaaatgtggaaaagtgtctttgccttcatttcatgtgaagcaaaattactaattaaaggcatggagagggcagcaaagacctgaccttcgctatttcgtacaacagcacctaccccaattctattgctagttgagtccacggctacatccacattcatttttaattcgccatagttaggtggcagccaaggagtatgtacgataggggttgttgtggaagactgaggtgctgaattttgttgtggctgatacttagattgagcagatcggtaattggacatatagttattaggaaaagatgctaattgtgcagctggtttggctttttgaccatgtacaaaacgattcctttcagaccaaatacaccataaggtgcaactgcaaattataaacttcatttcgctgacgaaatgtaatgttgtaaggtgagttaaataatcacctttgtgcatcattggagcagtgttccagtcgaaatgatggtttgttgcacgccatactgctcgagcatatttgcaaccaaagagtgcgtgaccaattgaatcccaagcttgacgacaaagcgaacaagtggagtcagtaatgatgtttctgcgcaccagcaatgttgcaactggaatagcatcatgaaacactcgccaagcaaaaattttaatcttttggggcagctgtaacttccagaagtatttccaccaggccgtggatggagttgatgtggagaagaggtctatttcttcaagtgatgcagcaaaatgaagattttttttcatttatacatagtattttatttatttattttttttttttttgtatttatatgaaaatacaagaagcagctaccagatttaaattgtaatccaaattcacatacctatttatatagtaactactcaagttaaaaaataatatatgaagtgattttttttttttttgcatttttcttcttctttagtaaatattcacaaattaatttacaattttccttttcatctaaacattactgaacagtgaacatgttgtataattattgaaaaaaataattttctagattgtaattatacaactaaaattgtgagtaatatttagtgacaggagtaggactatgttaattaaaattttattaatggggcagcatgtagtttagactttagagatagagaccatccaaatgactttagatatggagatattcaatctttactgagagtgaaagtgaaaccaattctaaaagagaacacaaaacatcaatgtttcttaagcactgaaagactagtcgcattgcctaaaaccagttcagccatgaaaaacatgccttaattaattcgattgacatttaataaccacattatcttttatgctttgccttcatgttctgtctattgacttttctgttaattctgagccttcattaagtacttgatttcaaatgctgatataatagagtcattagctcatattgaaacaaagcttctctcttcctcaaaataaactccttcacacaataaaggcttcttggctaccaaaatgatttaatgtagaaagagtaagcactgaccactctaatcaccaagccacagtagtttcaaatcattagcaagcaaagcttgattgaagtttcaggttccctaaaactcagcaaactatagattcaccacctttacagacatgccatagtctctaaaaccagtgtaaagtttttttttggcaagttagttgacaaaataatttttccatttatggtaagattggtgtgcattcat

SEQ ID NO: 161455 - DNA, 3241 bp, Cannabis sativa
ccttaattaaattctcagcaaccccattgtcattagacttttcgacactatgtactacattatcttccttaactttttcatcaatctccataatatcttcctctttagcttctgctattacttgaaggagctcgaggggtgtagcagctgggtccagttcacgacaaccttttggagcattgggagcttcatgaccagttagcaggtacgatggaacatgatgagagaaacgaaacatttcgtgtcttggaatcctcctgacctccccaggatccaaatgctgatgaaaaactgtggtgaaaccagcaactttgacaaggggaacaacggtcactcctagttcctcgatatagtcttcaaggacctccaccatgtcgtatttgtgtattacatcatctgctgtcaattcattccaatcaggagaccaatttctataaagggcccaaacttctcccttcctgggatatataatgatgattccacttgcgcttttagaccaacgaagcttgtgagagaatgaattgagtgagtcattagtttcatgtttacctaaacgaaaatcgccacaggtttttgagaaacctgaggcaacccaatttaaaggacccaattcactgttagtttttgagttgagccaactgatgcgcattttgaatggattagaacagatgacgttatgaataaaggcataatatcgaggcatcccatcatcgttatcatatgcagcccaaacctgattttctccaaaagacttttcagttcgttccctgtcaaaatcatgaaaatctggatccggaacacttattgacattatttccgaagcttcagcctttatattgacactagatgatgtcccacgaagctccttatcagttttaccaatattagtactcactggctcctttaaattggtttgatcatgctgttgcatgtcactgtttctcaaagctttgccttctttctcatgtgtctttctgtcctgaatctcctcttcattggtcacaggtttacttatggtggctgaactccattccttcaatttcttgcaaatttccttcctagctttctccattaataaattatgtaattcaagttcgggaacagcccttctgctagtttcagaatcaacctgcttagacccagaagacttcacagctccagttttcccacccatctgatttatagagctccttccagagtttcctaaaccagcatcctcggcacctcttctcctctttgcagcattaggacctgcagaggaagaaccactcattttcttagagtgattcttccttcgcaaagcttcctctctcttggtggctgcttgtgcttcctcacgttctctcttcactttctggtaggcctgttgtaccacagttgctgcttgagtagcagttgaaggaccacctgttcttgagaatggaccccactgaaagttgttttggttatgtgagtcagaatcattgagcccttcggctcctgcttttgaagaagcagcactgctttttcccgaattagaagcatttttatttgatttgtgattctttgaattatgtcgttgctgtgaaaagttccatgcagctgacgacttagagccatttgaaggaggtggaggtgtttcaattgcaaaaaagggctcatggcaattggggcatagaagattatgattaagataaactctgagatactcatattgcatcttgcaccgatggcacactgtccaaaaggtattgggtttttgcttgtgagctgaagtgggatttgaggagtgacctgctcgactggtacttttcggaggcttgctaaattttgtggattttgtgaaattcacccctggtgttgctgttgaacccccacttgtattaggaactttctggctcatgttcaccttcctcttctggtcataggctagtctcctagctttatcagacaataaagtccatgcttgtgaaataagcttaaatgcaccatcagctccgatggacttgttcttatcaggatgaagcataagagcaagcttcctatattgttttctaacagtttcatcatctgcttgttgatccagaccaagtatcccataccaatctgcctccccacctattttgttctcagcagaaatatatatatcaagtgttgatagcatttgagggataccttcaagtccaggaaataaattttgagccttcaaagcaaactttttggaacccaacatgtcctttgccaagaacttcttttcggcaatctcttttgccctagtggcctcatctttattacactccatttaccggtcaatcttcttatatgcttattataaatttattgttatcagccagcaagcagctgcttgatctaaataaatacagctaccccagattgcaacactagaaattccatgttctatcatttttcaattgatttcattggcagcaaaccctaatgaaaaaagtgatacaaaattagttgctactagtcaagaaataaataaaaggaggtgatgactatttccccagatgatcggagctgattatattgagcgcactatttatctcttttgagaaaaaaagaaataaataaataacaaataaagtttaaaaaataaaaaacgaacatttcaaatcaaacttgacaagaaaaggcacaatagaagcacaaacacattatgatttgaaaacagagcagctcattgagattagaatttcctccatacaaccatggcataaacaacaaacttaaggaattcacttaaaacattatgaccaaaaaatttacagtatagtcctgaatgtcatgctcaatcctccaaatgtaaacttgaatgctaagctgaaattaaataatgaaattgcaaataaaaatcaaattgaaacaggtatatcaaccatgggtctgtaataatcaactcaaattgaacctaaaataaaatgttgtggaattcagaagtcgagcagtgaaatcctaaaccctgaaaagtaaatacatttaagtgaaacatagaacagaactgtgctacattaccatagtatatatgttttcttgactaagaaataaaaaccaaaaggagaagaccagtgtcagatctccatacatccattactatttcttttaccatctttttcccaacctttcccacacaaatagaaaaatccccaaaactgaaccatctgtgataacttcttagaacttgagagaagtttcaaattcacaattgagatgaatcacaaatttaaagtaaagttacaca

SEQ ID NO: 161456 - DNA, 2606 bp, Cannabis sativa
ttttttttttttttataaatcaaagctctgtcattgtagtaatagtacaaatatggaaatacaaataagaggattatcatattactacatgtgtcaggtaatctaaagttttttggaaccacgtcactatttctactatgtctctaaactgccttctcttaaacaaggtacccctctcattactttggtacttactctgttcattcttaataattagaatgactcaagatgagacaaataaaaaatatttgttgtactaggttgttgatgtcacaattcagcctcatttcattagttacaccacaacaaatgcatcatgaaattaatgaatgagagtatcaagtacggattgtattgtacctgaaaatgatatatgtaagaagagaacagaatcccaaggacctgaggggatcctcccaatacaccaaggaatgaaggcactttcccaattccatcattggaaagagtaattcctgcaagcatttagaaattttagaagtagacaaaaacaggacaagactcctcatattttgagagacagaaatgagttacactcactaaaatgagaatttaacaaactatttaatactttattctttcacgttactctcacaataaaaagaataaactgaaaacgttataatttatttttattttcagagggatattttgtggtcacttcccatctacatgagaccaatcaagttcctgttgtcagcgcattgtttaaataaaccaaagcctcaaaacaaggaacagggtatggtggggaagaaacatggaaagggcaacaactagttggaagctaaggtgacaaaaaggaaatgagaaacacagcccacagcgccattactgatctgaaattaccttcatcactgctaaatttgtatcaattccctcaacttttactccatcaattgtttgttgtgctactacaaccttttcataatcatttttagattccttgactgctctttccaatgatgtcatctctcccacagttatctccccaacaacaagaccatcttcattgggattgttagagtttgtgttgaaaacaaagcccaagttagaaaccatgtctaaagctgagattgaatacataccacttccagactgagacttataacaatctatttcttttaaacttgacatatttgccagggtttctagtatcaagtctccccctggaagttggtcgcaaagattaaacataagaagcgattcataacgtagagggagcgcagaactaatttcttgaatggcttgtaatctcagaataccaagcacagcttttgaaactgcttcatcctgtttaactcccttgatctcgaacttatttataaatctgtggacatataaaatctctctgatgattgctaaccaataatccctacgcgtatggcctttcagctcaggaaactctattacaacaggttctgatctacataagagaataagagcagaagttcattcccaagaaatcagaggactaatgacagacgaaaagaaaaggaaaatttcagaaagctactaaacaaaatattacatcaagctcaagtgaaaaggcaagcagataacttacaatgaaatagatttatagaatacagccttatcgaaaagtcgagtaccccatggtccagtcaactcaggtttaacaatctgttttaaatcatccgataaatcatatcgctttgctttgtcataggatacaacccggagagcttcaaagtaaagtgcatggtctgtcagagttaaccgccctgattataagcaagaatacgtaagcaaaaaattcagtcaactagtgaaatatacccataaccattatgacactagcaacacctcatgttcaataaaaaaaagttatgcagcacaaaaatggagtcttgatgttgagaattttcttgttggaagctctttgaactgaaattatttgttttcttctcattggaaacatcataaattattgatgaaagcataagcacatacagatgtatgaaaaatgagggttctttagaaaagccagtaaatcaacaaaatacccaatcaaattaaaaaagagagctaataatatccttcaaaaattaatgaagaaaacaacaatagaaattgaagaagatgatgtgtaatcacttaaatatatcttactttaatattcatgctcaattcaaacaaggccgacttaaataaattagaaaacaatctaaacaaagtttaggtacaattgaaaacaatttacagatatcaataacccccatttacctaccaggccatgtagaaattcctacatgctctagaacaggttgagtagtaactgctccttccatttccagaattttctctccttttgatgaccgaattacagaaagaagggatgagtctgactgtgtcctcattttccttattgctctgtaagataaataattcaaattgactagaaccaagttcataactccaagcacaatacatttatcttctaccaccttaagataatatgtgcaatgccattgaaataaaattatagaaaactaacatgctacaaccacaaaagtttccatattcttaatgtcatagtgtgattcaaaatggcaacgagctctctc

SEQ ID NO: 161457 - DNA, 3344 bp, Cannabis sativa
caagggaagattataaaattaatgctaaaaataattccttcatccagagaaatagatagagtaagacatgaagatttggacaaaggcttcaccagttttcttgaagggtcaacttcaaggccagaagtaaaattgaaggtactcaacttattttagtaatttttaaataatctatttgtcactgcactttgaaggtgaaagattcccagcagtacaaatcaaacagagagatggttctaattcaatgacccacccataaatactttctcacctttccctgtattgatgccgccggttagcattgtcttcatgccataacacaggggacggcttaatgtcagtaggatttatcatctgcaaaaaaaataaatcataagtttatcacatctaagcatagttagaaaaacaaaaacagctttaagagcatggaaataagaaaattaaacaaatcacaatagatgattactgtctttggtcatgcacaaggaacctgaccaacttcacttttactgcttaccctgaagtggaacaagtacttttacaaggctacctttgcacaagtttaactagacgcacttcacaattcaactaccaatatcttatttgatgtgtggccgtaagttagtcttgatatggtaaattagatttcaaatccaattttatgtaagttagtgcggtacttggaatagaagtttcttgcaaaatgaccaaaactgttttgttatttaatgtacttgacagaaggaaatacacaactagtacaccaccaggctagaaggtttaacttgtaaccatccagaaacaataatcaaaccaggagcttttcaaagtcacaaaagtttaataccttttcaggaattaccacacccttgggaggttctgggatgtgtctatgtgctacagggttaaggtatgagacacttctgcaagaaaggaatgctgaacatgagattttcaaggctttattttatcaaacaagcatagtagaagtacttacaaaacttggttattctctatgtctggaaacccactgacaggggaaaagactacacttcttgtcccactcctctcgcataaccaaagatatccattcattccaccgctgtgaaagatcaacagagaatagggtagtcagtacgcagtcacgattataaaccaagtctaatggatataaagactatacaacctagcatttgtgtcaatttgataagcaaatcttgcatatggtggcatctgatgataaagttggtagtacatgtacatttgtgaagccaaaggatgagcacgatatacataaagcaaatcgtgcatcacactatttcgaatctgttcttcctcctgcatatacagatattgacagtgttcatgattaagcgtcagatgctgaaaatattgtgtaaatgcagacatgagcttgtttttgcatctaacaacacccctaatagtaaacttcagcaagaaattactgaaggtggatgtcagttcttttatcttaacctattccccttccaccttcagtaatttgtgaaaaacttcataaattacgactagatcgcatcaatataaaagaggacccgcaaacatagactaatcagaatattaagaatcttgcaaacaaacaaaaacaaactgcccggccaaaaggaatttaaatctctaagctgagagcaactttcctcaaccctcatcaagtctacaaggagtgacaataacattatttccaaagtgataagtcttttatcttattttttaatgttcaattttatcttcaattgtctccaaattccagctcaaccaccataaaaacctaggtaaaatctttgattaactggcttactaaagaggaaatttgaaacaaacattcaacaattttcttgtaaaaaattaataactagacttcatttcagaccgttaaagtgctttcaagtttccttgttgcagtgagcaacttcttctcatcaataaatggcaattttgcaattccctgattcacgtaaaaagaatttagtacaatcttccatagatttccaaataacattacaaaaatgacaggaaatacttttaatcacattacctgccatgcaaaccgcttgccattcatatcaatctcaaattctgcaagggaaaaaggaacacattaaaattattatcgaaatgaaagttgaacaacgcccacaaacgtgcgcatacatatatacatacataaatattagctaaaccaaattttaccagatggataaaatgcattaataggtgatgatggatcaatcatcaagtttctgtacttctctggtagagcatttgaactgtaacaggaatttggcaatgatcactacagctagtggatataaccagatggatatttcctaatcattaaatttatattaatttcaaatgagtaaagcatggacaccttgcagctggtaaagttcccataagctgatcaaatggtttgaatggttctcccaagaaaaatgttatttctagttcagggagatccttgagatcagaagcaaatggcgcatagtggtatggataatacctaaaacagtattgaagaataaatgtttgtttagatcattgatgctgattgagaatattcacttaagcagcaaaatgaagagtagaaaaaagggagcttaaaacaatttatcagctgttctcacaataaactaaccattgccaagagcaaacaccttggtagtaataccgacaaacccaacataagccttctacatacttcaatacctgtaagaaaatgaaattcatcaaaataatgagcacaaagcaattaagataacctttcgctctaacagaataatgattaactgccacttctagcttttcaataacatgaaataaatgaattgaacttttcaagtatgtccaggatatgaatgaactatgaaatctcatttacttcaaaacaggaatgaacaccaaaattatgtcatgctaatgacatataaatactaacgtaatgtagcagaattttttgggatgcaagccaaatcaaaggaatatgcgtaaaaggtatccaagcatgataataaattattcacaacaaataaaaggtcatgttaaaaaaacaattacaagaaatgcaagtattgacaaaaagtgctcttatgttattgaataaaattcttgcacatgaactaacagagcttaccgtgtcccttttcactttttcaatctcctcaggtgttgatacattaaacttctcagcataatacctttccttgtatccaggttcacctaattttacctgtaaaatagaatagtgaaaccctaaagcatctctttttatttttcaaaaaaacaaaacaaagtataataataat

SEQ ID NO: 161458 - DNA, 1446 bp, Cannabis sativa
tttacccatataagtctgttctttctcaaggagctatcaaacatcgataataatatatctcaaactaacttctacacaatcaaaactaagaacgactcataatgtacaaacctgattgtgtaacatctcactcaaatatacatgaagaaagaactttcagattgaattagatgatatctaagcagccttggatggatctcctcccactgctctggcctcaaactgtttggtatatacgcgatgctttctttcccttgcatagataacccagaaaatcagtgaaagcataaccgctgcagacactgtcaccaacccaatgtagatccactgactatgtcgtcgcaggctaggacagtgctggtggcttatgtctgtgaacgtatttctcacaaaagtacagtcctgtagatcaaccaagaatggaccataacggtacaaaccataactcacattcactgcagctgccatttggtcatagatggtaggagttaatcgaccagttgtggcacaaatcccatctgagttgaccttacatacataattctgccaaacctgctccaaaccaaaatgaaaacattagaaaagcgacaatcagaaaatgatgtagtagacattgataagaactttagaaaagcggaaaccaattggttttttttttttcctagaaaatgggtgaataaatatgataacattggcatgagtccaagggtttttgcctctgagaaaactacatgttacaggagtttacaggaccatgcattctacaactttcctatcccacctaatctgtcaaaatgtttaatgtgtattacctctgtagcattattcagatgcacttcaccagctgcacattgccgagtagtgagatcggggttgaatgggttgcagagagagggcaacaatggaccagactggttgaaataaatcggtattcccttaggtggattgttaagattagtaatattgctgacgacagtgtccactactttgacaagttggtaggtgacatccctgctccgtaacaatgtttcttgggctgtggcattgtccacacatggaagaatatcatctaaagctgtgtgggctgtagggttctggacccactcatccattgaaacacatgcatctgcaaccacactagtgaaaataggaagaggaaatgagaaattcggagaaaaccaagctcaacatatatctttcaaacacagaattgtggacacctatatgcttcagtcaggtattttgtgcagtgcagagacaggaagatgagatcaaactaaaagtttccatacagttcacagttataatttaatgcaagtaaggttaaggaccaatagaaaccaaatgctattatttagggtgtgtttggaagtaactgtgcaattactaggtagggtaattactagggtagtaattacacagtttaataattacactatattttaa

SEQ ID NO: 161459 - DNA, 7323 bp, Cannabis sativa
  modified_base (4846)..(4851): a, c, t, g, unknown or other
tgatatacatgaaagttaaaataaatgaaagaaagaaagaattaatggaaatggggcccaacaagagcaacagtgtagattcgacgacagaagtagttagctataattacaccgtggatgatttctttcttttgccaaaattaataataataaaaaataataatgatggcatattgcaacaatattattatatatagaaataggtccacactcatatctgtcaacacgtgtaattctacttgagacaacctaggctccacatttgacaaaatatcttcaaaaataatattttttcatccttaaaataaaaatatatattaaaaaagttgtacaagtacaacgtgggaggaattgaaaatgaaatcacaactttatgtttattttccttgaatgtgtgtttttcactcttgtcccatattttgtgtggattttagaagtatttatattataatttgctcactttttaaaacaagatctagatgtaggataataatacaaattattcttgcactaaataaattaaaaaataatatatatatatatatatatgtttattgtttagtatatgaacttaagcaaaattcaacattgcagaatgcatttgatatgtaaattgttgtaattttgttatttattattattatttgaagagaaaatgcaataagttcaatcttttttttcaaaacaaaaaaatccacttacattgaagtaatctaatataatcaaattacaaaaaaaatagatgagaatagtaaaattttaattgaactacatcgattatatattgaataccacttttaaaatttaattaaaaatcgatacattttaattacatataatatatatgaaaaaatattatttttatttatatataacaaaaaataattaaattttaattatcatttattactttctcaatgactctattttctttatttaattttataaatcaagtgtcgaatttaaatttaattaaaaaattgatctaaaataattattaattagatgagattaaattgaattagattttgaattgtaattaatttgaattaggtgatgattttttaaattcaattattaattggattggatcatattacaattaaaatattaaattgtatcggatgcttaggtatcatttagtatatatataatataaatacatattattaattgtgttctaatataataaatagaatattttagttaattaaaaataatataatttttaatgaatatttttgacgttacaatagcatgaaaagaattacaattgatatatatatatatatatatatgatattgtgtgatagttgatcctctaaatcaaattaatactaactcacctacacttataacaacttaactaactttcagttatgttgtaagttagttggtgctgttattgcacctagtttcaaactgtgaattgtgtctatttatagctcattcttttcacctttaaggtagagattacatagagagattttgagattaagtgcttaggtttctaagctgtgaagtcatgttcttgaaagggtcaagaactgagggtgtattcgggtagtggttgagaaactgtgactgtttctctggtgtgtttctcgagtgcagaagagcattgttgctctgctattagtgcttgtatctactctcttattctctatattaatgaaagcaagatggtgtttctctgttggagtatggccagggatcaatcttaatctctaagaccggaaccaggataaaatttgttgtcttctcccttgttcaattctattatattgcattgtgtttgttttgttattgttgttcttgttaacaatttagtgcaggttttggagttacaatcttagtgttattgttgccaattttacaacaaaatcagagctttggttcaagatccataagaaggaagtaaagaatcaagattcaatcaagaactcatatgcaactagtcatgacaggaacaacaaggtttaaacgtgagaagttcaatgggacaagggattttggcttgtgaagagaaagtttaaagggaatacttgttcatcaaaaggtttctaaggccttaaaacccaacgaagaactgactgacaagttgaagaaggaagagcttgaagacatggaagaattgacatactacactatcataatgtaactgtcatatactgtaaggagaaaggttcagagcatgaacacagctcgagaattatggagcaagcttgaagagatttacatgaaaccctctctaactaataagatcaatctgttagaatctttatatggttttaaaatgtcttctcatttgtctctagatgataatcctgatacttttaatcaaattattataggattggctaacttgaaatatactgttgatgaagaaagtcaagctgtcattctcctcacatcattaccagctgcataccaggaattgaaggctgtgatcagatatggaaaggacactctcacccttgatgatgttcttggagccttgaaatccaaagaacaagagatggccaaagaaaaagacaagattaaggatgaagcttacttggccagaggaagaaacaacaccaggggtagtgatcattacaagaaagatcacttcaaaggccaacatagatctcaatcaagatcaaaacccaggggaaaatatcacaaggacagaaaatgttatttccgtggaaaagtaggcctcatcaagaggttttgtattgagtttaagaataaactcaaagaagatagggaaaagaaatatgattttgcttcaaatgtagtagactcagctcagaccattgcccctctgatggtgacttgtacatggtttcagatcaaagaatcacaaatgaatggattcttgattctggatgcacataccatatgtgtcctactcttaaaaattaattaattataggaaagtaaattctggtactgtactaatggggaatggcaattcttacatggtttttggcattggaaaggtggccataaaacactatgatggcactattcgaatgctgcatgaagtgagacatataccagagttgagaagaaacctgatctcactaggaactgttgaagatgaaggatacaattataaatgtagcaatggccagatgagaattgcaaagggatctctcaccatcatgaaaggtgaaaagaagaatggcttgtacattttacaaggagaaacagtaattgcttctgaagccagtgttgtgcaaatcaagaaactgagatgaaaatatggcacaaaaggatgggtcatatgagtgagcaaaggattaaagaattgaccaagcaaggcctcctaggcaatttcaaacctaattcactaccattctgtgaggcatgtgtgttgggaaagcaccacaggttgaagttcatggcaagcaatcatagttcaaagaggccattagaatatgtccatgctgatctatgggggtctcacaaagttggaacacactcaggtaaacgctattttctgtctattgtagatgatttcagtcggcatgtgtgggtttatcttcttaaaactaagaatgaatgtctggaaaaattcagagaatggaaaattgaggtagaaaattagcatgaaaaaaaacttaaagtgcttagggctgataatggcttaaaatttatcaacactgaatttggcttgttgtgttttgagtttggaatttctaggcataggattgttaagcacacacctcagcaaaatggtgttgctaagggaatgagtaggactttgttgaataaagtaaggtgtttgctaattagttctggtctagggaaaatctattgggggaggctctcattagtgcatgctatttgatcaataggagtcccagtagagtcattaatctgaaaactccaaatgaaaaattgcatggcactacacctaaattgaatcacttaaaaatctttggctgcactgcatatgcacactagaaacttgataagttggaacctagggtcattaaatgcttctttcttggatatcctatgggtgttaaaggatataggttgtgtcaaattgaaaatgggaagcctaagattattatatccagggatgtagtctttcatgaacatgagttcatgcacttgacagccaagaaaggcaaagattctgatgttgcaggtgcaaatagagatgacctagctgagttggagataaactttgattgaatagaagtctcaaatgaatcaccacacacaccagcagtgaggacaacaattgaggtggaaacacaggttactatggaagaacatgatgcaggcacatttaaggtgaaaactttgggaagtggtcaagataatcaacctgatttgaacaactactaattttcaagggacgtgacaaggagagagataaaatccccaagtaggtatgctgaggctgacttgatagcttatcccttagctgtggttcagtctgaaagtgatccagaaccaactacctatgaagaagccattgctagtaaatcaaggaagaagtggcttgctactatgggagaagagatgcaatccttgaagaaaaacaaaacctggattttggttcccagaccacaagacaagaaagttgtctcctacagatggttgtttaaggagaaagagggaatgacagaggatgagccagttagatacaaagctagattagtcgctaagggattcacacaggttgaaggggtagattacacagacattttctcacctgttgtgaagtacaaaaccatcagaatgatgctagccattgctgcacataatgacttggaggatgagcagttagatgtcaaaactgctctcttaaatggttttctggatgaagagattttcatgnnnnnnccacctggttttcaggtggaaaatggtaaaacaaatctggtttgctcccttaaaagatcactgtatgggttgaagcaatcacctagacagtggagtcaaaggttcaatctgtttgttcaaagtattggattttcaagatccaaatttaactcttgtctctactacaaggagctagggacacctaaggttgtgtacctattactctatgttgatgacatgatgatcattagcaaagacgagactaaaatccaagtcattaaaaacaagataaattttgaatttgaaatgaaagacttgggagctgtcaagaaaaatcttgggattgaagtaataagaagttggcaagaagggaagtgatgctaactcagagaagctacattgagaaagtaatcaagaaattcaacttggattaagaccacagttgtgccacttgctgggcattttaaactgtcaaatgagtattatcctaagactgaaacagagagagaaaacatgaagggggtaccttatgctatggttgttggatgccacatgtatacatgtttactatgcctaatatagctcattctctaagtgtattaagcaggtttatggcaaaccctgggttagaacactggaatgcagtgaaatggctaactagatacttgaaaggtacaatcaagtatggtttgatatatcaaagggacacatctaatgtgaggttagaaggttttgttaatgctgattgtgcatcaaacagggataaaagaagatccattattgcatatgtgttcatggttaataagagttgcatatgttggaaatcacaacaacatgccagtggtggcactctcaactacataatctgaattcatggccaccactgaagctttcaaggaagccatttggttacagggaacactacaagaattacaattgctcaaagacaaagggacagtctattctgatagtctgtcatcaatatttcacctatgtaagaaccatgtgtaccatgagaagagcaagcacattgacattagactatactagattcgagagaagattgaggatagggttttggagctggaaaaggtgcacataagtgacaaccctgcagacatgggaacgaaggttctcaccttcaacaaactaatgcattgtcttaatttgcagaaattggtacttgttgaatatattgagatatcaacatcatcaaggcttatgtgaaaagattgccagcagtttgattcagaaaatcaaggttgaaattttgtggtatttagtcctctaaatcaaactaatactaactcacctacacttaactaacttttagttatgttacttagttagttggtgttgttattgcacctagtttcaagttgtgagttgtgtctatttatagctcgttcttttcacttctaaggtagagattacagagagagtttatgagattaagtgcttaggtttctgagatgtgaaatcatgttcttgaagggtcaagaattgagggtgtactcgggtagtggttgagaaactgtgattgtttctctggtgtgtttctcaagtgtagaagagcattgttgctctgatattagtgcttgtatctactctcttattctccatattaatgaaagcaagatggtgtttctttactggagtatggccagggatcaaccttgatctctaggacaggaaccaggataaaacttgttgtcttctcccttgttcaattctgttatattacattgtgtttgttttgttattgttgttcttgttaacagtttagtgcaagttttgaagttacattcttagtgttattgttgccaattttacaacatatggtataacaccaaatatagtattatgattggagatagtttcaacatttctttttgaagaaaatgcttcattaaaatttaaaatgcaattctaataaattctctccataatttgtaacagacttaataagtgcatgggttacactattaacacgaaattgcaactaataaattaaaaacatcactaataattgaactaaataaataattagaatttggattgttaacccaaagtatcataattgttgaatcacactccactctaattaatgaacctcacgacctactaaagatcccaacctcacttgaagcaacttagtagcagccactgaaaacccacctcgaattcccccggcccacaaagcccacactatcccttccgatcccgaataacacctctcagcctgacactcacgactagcaactaccgaggcaacgaaccaccgatggcggccttcatcgctccccaccttatactccaagaattaatacttttgctgacactattttgtgtcagcaaaagtcttctgtttgcactgggaaagctttgtcaacacaatttggtgctggtaatacctctttggctataattaatggtgttacttgatgtaattcttttgtttaatttaatgagaatacttctcctttcaaaaaa

SEQ ID NO: 161460 - DNA, 4107 bp, Cannabis sativa
  modified_base (1871)..(1871): a, c, t, g, unknown or other
  modified_base (2079)..(2088): a, c, t, g, unknown or other
aaaaaaaaaaaaaaaaaagcagggctagctgtttattataccatctggttccaaacctcagctaatttacaccaataatttaagactaaaccaaataaatttggtgtcaatctggatgtcctttataattctctggtttagtcacagttttaaaattaccaccattcaaaccaaatcaaaccgtctaattgttctatatatacatattttttatggaatagtgatatttggaaataatcttacgcatattattgatattcacttaatattattttaagaatattcttttattgttatttaatatattagatgcattacaacctttgaaaaaaaattacttaaagaatttagatgaattactaaatacaaatcataggtttgaaccaaaccaattggttcttaagtggaatgatttggattgaacatttaattagtttggttagtttttgaatttttaaaaaatcttatatttattatatacatcgtatatgcatgcagtgcagtgcagtagtaaattaaattctgattatatttattatacatatgcgataggtacccagatgatgtttacgatcggcattggcttcctgcaaatggtgtggggtcaattaaagtttcaaaggaagcaacgtcaccaattgatgttagcagtgcagaagataagccaccagaagctgtgtttagaactgctgccactttcaaccaaattactagtatgagaatattcaccaatcgtttgcctgccaccaaagttgggatctacatggcactctacttctctgaagtcacattgttggattccagtatacaaaagaggtcgtttcaagtgtttatagatggaaatgcttattctaaacccataatcccaccttttgggagtggtatgcaagtttatatcatcaacatcactgcttcttatgctactttgatcgagttgcgtcccactcctgactccacacttcctccacttttaaatgccaatgaaatttacactctctcccaagtttaaacactccaaccccacccacacgctgctacctaaaatcaaccttatacttatccaattaaaatgacttgttatatatagctgcatgtgtctcaaatttgtgtgtaatttatgtctgcacttatcattattattatatatataacatacatattgtacttattccaaatattttataaattttaaaaaacttctgaataatttattgtgaaaattgttattagttattgtagatttttattgtcttaatatatatttgatttgcttatgatccttcaagaaattttaagctttgtaatttttgttgaagttaagtttacttgtaacgtcctgactttgacttgtagggatgtcacgtgtgtgcttttataatttattaatttataataataaactaacgatttaaaaaaaattgtgacttaattaaaactttatttaattactttaaaatataaaaatcacctttttggcattatacaaaaattagggttaaggatcccttttaaaaatatttacgaagactattaaaattttacagccaaacacttatactttacagagtttccatagaccaaaaaccccgactactcagcaccaccgatcggataagctgatatttacatttgctggggaagacctctaactcatagttgtcctaatccagaaattttcttacctgcaccacaaagcacccgtgagtcacagagactcatcaagaaaaacataaatataacaacctacattttagttcaaatataaccaaacatgatcatacaattaaattcagatatcaatcattcagatacatccacactacaaaaaactgctacttttagtgacaaccttttagtcacaacataaattntttgtgactaaatgtgatttttaaccacaataaaaattacgtgtgactaaaacatagtatttagttacaagttgtcactaatttaattttagtcacacaacaaatattatgactaaaaaaacacatttagtcacaataaattgtaatttttgtgactaatacttttagtcacgggccttttagtcacaacacaataataataataatnnnnnnnnnntataattagccacaactttttttatctttagtcacaaattttgttgtggctaagtaaatttttttgtagtgccagataatagcaaacaactagcataaataatcttaagtatacaaacatctagtattacacatgtattttgtctaataagacaagctattatcattactttataaagtaaatattcccattgttgtgtaataaagcaaccctaataagcctaaccaggcatccaatgtcaccgtcgttacctataatgaggtaaccgacaagtaataaatctaataatggtttcaaattatagtcatgacttacagttgtccgataaaacacttttcccacagttgctcgataaaacaacctttctaacattgtctataagactaccatttcattacataacgataattactgtatcttataatcgattagggcaggtagataacacataatataacggtttgtcaagatcttatgagattatatggaaggaaaaattgtaaacctagttgtatgataataatttatttgaggaaggcttatgacacaatagagtgggactttatcaaggagatgctcaatgcctttggatcataatgatatgtatcaaaacacctaaattctctatgtttcttaatggttcaatgtatggattctttgtggctaaaagaagacttaggcaagggaatcctatgtacctgctcctatttattctaggcatggaatatttgtctagaattatgatcaaagtaggagtttggcccaattttgaatatcatgataggtgctcagttttaaagctcaatcatatgtattttgcagatgacttcttcttattttgcaatggagattatatttccatattactcatgttgtgagggttaaaggtgctctcatctactttggaattaatgtcgagtgaagcaaaactaataatgtgctgtgaaggtatggccgatgaagaagttaaatgagtgcttaaagtctcttttttctctcgaagtcaactcccctccaaaaaaatcaactaatgattgtaatagtatattggagaaaatgactcatagagttaaaatctggagctcgagaaacatatatggggagagtataacattaattaattcagttctaatctcaatacactcttattggccgcaaattatcattttcccaaaaaatttcttagagaggttgaagtaatttgtagagcttttttatatagggggttttatattatttagctcctgacttagttgcttggaaattggaataatatatgtcttcctaaaaaaataggtagcttgggatttagaaaaattcaagattggaatctagctgcaatgagaaaatatgtctaggtaattccaagaaaaaaaaacaagttgtttattaaatggataaatagtgtttatttggtgggagtatagtactcatccacactgcaactggtattggaaacgcttagtagctgtgaaaaatgcttttagagagaagatgagtcaagattgttttatctcccaacaatatacaacattcgagttgggtattagaagttattagaataggaagaaaaagtaccttcggacaaaattgtttgggatagattaatcattcccaaacacagatttatcatgtggttggttatatgacagagacttcacactatagagttgtgaagtttgaactcactatagctcaaaattgcttgttgtgtggagaacaaaaggggggtattgatcatgccattatagcaatagatgcctagaatgtattaaagagtggctcatttagaaaaatgaaggctatgaacctgtcaaagctggatctctaaggcaaaacatgtaagcaatatctgttaggatttataaaacactcaagaaatatatacatcatagatctaaatatatttctaaaagtgctttaatatagaaaaccttaaatcataaatctatatagcttttgccaaattaaagaagaagattatgataaaagataagcggaagcactaacctaaagcca

SEQ ID NO: 161461 - DNA, 5458 bp, Cannabis sativa
  modified_base (5417)..(5432): a, c, t, g, unknown or other
ctggtctcgacgccgacagtttccgattctccaataaggaaaactcaaacccgaacccgacccggttaaaccgggtaaacggatccgttactctgaaagcgcgattcgaagaaactgccgcggcggagaagaagaggaatcttctcgatcggtacgggaaggtttgtccgccgaacggcgagggcaaagtggtcatttacacgacaacgctgcgtggagttaggaaaaccttcgaggcttgtaatgcggtgagggctgcgattgaggccaccggagttataatctcggagcgagatgtttcgatggatcgtgggtttagagatgagcttagggatttgatgaaagaagaagaaagtagggttgttgttcttccccaaatttttgtgaaagggaggtatgtgggtggagttgaagagattttgagaattgctgaagagggtttgttgttggaactttttgaagggttaccgaagagaagaggtggggaggtttgtgaaggttgtggaaatgtgagatttttgccatgttttcactgtaatgggagttgtaaagtggttatggaggttaaagaagaaatgggtggtcaaaaacaggggttttcttcttcttcttcttcttcttcttctagctctgtagttgtgaaatgcccagattgtaatgagaatggtttggtgctttgtccaatttgtagctgagaatactctctgatcaatcgaaacggttctggtttaataagctaagtatatttcttcttcttcttcttctttgtctttttttgtttaggttaatggtagtaaggtatatgatgaaattcctcaatgagagttttttttttttgttgctaaaatggaaaatgggaaatggaaaagattctctcttgcttttttgttttttgttttgtgtttatataatatgggaatcttgtaattttgttcaataatgtaatggttaaaaggaagtagagcatagttgttggtgataatgatgatgatgatgatgatctttttgttgtttacaactttgaataatgagttaacattttcattaaaaacaaatacttgtttagttttgaaattgcatgatttgggatttaatctttaacttattagcagctagcaattgattttgaaatacatctaagttgactaccaatttgttgaattttctttaggaaattttcattaaaaaaactacttgtccccttatgaaaaatgcttgattttgaattgtcttagaggcactttaagaatcttaagttgtgtttggttagaggtaatggaaaggaaaataatcaaattttgttactagcaattgattttgaatgcatctaagctgactaccaatgtgttgaatttcttaaggtagtgttttatgaattagtgagggaaattttcatcaaaaaactacatgcctttttgaattgtgttgaacttgtttaggagtgtacttgttttaggactcttaacaatggtgttggcatgatcaaagataaaatcttcagatagatatttattattgattcctttatgtaaagtctattggtgttattgtaatgtagttatcagtaagtatatcatgatttttgttcttttctttttcatcttttggtgaatactgaatagtgtggtgtggtggggttaaagcctgtagtgtagtgtagtgtagagtagtacaaattgagatggtgatagctgctaactgcaaagcaaagcatgcaaagctggatcagcaacatttcagggcctttttcttttcttgtttttgacactaaacgacaattgaatgtgaaattactcaccattgtttataatgttgcaacttatatgcaatcattcaccctcaattgggtttgcatttctagtgaaagtgatgataattatgacatgacacgattaaggtaagtataagtacacgcagttaagtaatacgtacacatgattattaaacttgttaagcgtgttgtaaacctaaatcaaagctcgactcaatatgattttggtaggtttaaggtttaacaaccatatgattatacatttcagcattatgtaacaaaattccatcacccatcaaattaggtttgcattttgtgtgaaagtggtgataattatgatatagtacacacggttaagtaaatatgtaaacgattattgaacttgttaagcgtgttgtaaacctaaatctaagctcaactcaatattattttgataggtttaaagcaaatttaagattgtcgtacataattaaataacaaattatagaattacttggttcaagcaaataacagatttaatatatgcaagttaacaaaactgtcacaatgtgatttttcaattgtatcattgtgttgtgttgaaattgctgacattatctccaaccaacctttcactttgttttactttttttaatttttaattccatttttatattctttaagatatattcacttttataaattatgtctccattagactccttaggttgatgtaaattatatgctacacttaagtagagagtaatggtatattaaacaatccactcaaaaaagtgagtatattttaataaaatataatattagagtatttttaattaatagatacaaaaatggtatttttcaacttgtcccaattttgagttcataatatacttcaaattcgaatccaacctagccttaggttggattagattggattagacatgaccaatgtgagaagcgtaacatgtttttcgagttgagggccaaagtggtggctcaaatataattctcactagaatataatgagaatggtaaggttttttctccgatttattggaaaggatgtcgcccttgttagcaaccttcttgtccaagagacaaccatcaataagctaaagctaatggcggcctcttgggcgcaagtaagtgaagaaaacatgcacaaagattgacctcgacaatgagagaatttttagaaaaaatcctacttgatcctttttttaaccctcaactatcttgacgtattattcaagcataccaaatacatttatatatatttatacgagcattgttattagacaccaatagtatctagtatctctagacatgccaccttgtgattgattgactagtgatattctccaaaagttattacattaaactatatgggacatgatacttaattagagcaatagtgatattgacacataaaaatgcgttgagcaccactaatgtcttttagcatttttcagcatttaaaacacgtccaaaactcaaagttgaatctttattgtatgttaaattgtttaaaggcatgggatgcatgtgttggtactagactaagccttggtaaataaaacctttaaatacggccatggtaggggctttgtcattgtttggacacgtgtcaatcaaatggtacatatataccagtaactaaatggtacaagttacagcacaaaacatttattgaataaagaaatctataaaatgtgtatgatattaatatatagttttaagtgtaatgatatgcacatctaaaatatatagtgtttagttacatatcttttatacacacttcatttttcataatattttagaagtctgaacatcagtttggtgacgttgattataaacaaattagaggtctagaatatgatgttaatattactcaaattaaagatcagtttgcctctatatataagagtacactatttggcttgtcctgaacaagaaggtacataactacagttgttatcataactcttatgatcatattattatattaactttgttttgtagtgctatatatgcagaataagcttattacttccttctatctaattctaattctaaaccacataatgttgctgttgggatggttgccccggccccggccccggcccctctggattcattcaagcttaattgcgatgcggtggccgtcggcaacaattgcatgacggcggcctgtgttgtggcaatgatccacaatgagaatgttctttgttcatcctctcttaattaagagaaacagaagcttttttggccttgaaagttggaagttgtcgctgagaagaactaatattttatcatcattgtgagtgactcttaagttattgttaaagctctaaaggagaaatttttagatgggaaatatcatcacaatatatttacctcttaagcaaatcttttattcttgtaatttttctagatagagattttataatgccactcataattatatgactaaattctataatatttttagttttgttgagtgaagttcgctctaaaatatttgtatttttggtagagattgtttagtctaactttttaatgtatatacattaacgtttgtttttttaaataaaaataataataaaataagaaatattgtacttatttagtgcattttagttgaatgtcacaatatatagttctccacaatataaacttggttggattggattaacctataatagattagattcacactagcaaataactatttaattgacttcattagctaagtgaatatacttgaatgaatttgactttttacaataataaattgtttggtcctagctagtttagggtaaactaggtccactcgagttttcacgtgtacatagttatgcataagcatatataatggctccaataaatccaaaatacacagcaaaaaacaatgcctctattatattaactataatataatacaagtactattattggtccccatgcacacaataggttgtttattatttaaccattcttatctttcaaatatctactataattaattttaatttcgatcattattatacctcaaactatagtctataccattacattacacatagaaaacactaataataacaacaacaacaacaataattaagggttttgaaacacttttatttttgaattttttaaattacaaaaacaaattaagtagaattaatatttttataaaacaaaaaatgtatttcatactatttttcttttgaataaaaaatatttttttttccgtaaatttcaattctatatttgttttttgttttatttaagtgaggtttaggaaagtgggttgtgggtcagggtcagggttcgggttgggggccatggtatatgttcaggttagggttggggacaaggtttggggtccatgttaggatttgagttacagctggggtcggggtctgagttagagatgagcttgggggctagggtccaagcctgaggtatggggaccaagtttgagtgccaaggatagagggtcggggttgggggctgagttcaggccaatgttccagttgggttcgaggttgagatgagatttaggctgaggcctagggctgttcgggtttagggttggaatcgagatccaaatattgattgaagagaatacaaatggattattgtgacagtcagtagtccnnnnnnnnnnnnnnnnaaataccgggtaagctgtgcaatccc

SEQ ID NO: 161462 - DNA, 9663 bp, Cannabis sativa
tatatatatatgtttttatactcaattttgacacatataatatatattaattataggtatgtatgtggttttatctatataaaattgtggcataaataattaaaattttgagtttgttagtgaaataaatttaattaatttgtagcgatatgagtacttaattaatgttggtaaaattataatttttatcccgttttatcaatataatatagattttattttgaattaattattaaaagaaaatttgaaaataattaatattacatatttttgtccaaactcaataatttaaaatacaaaccttatatatatatgatctgtttaagattttaagaaaattgaagaaaaattataattttaaatatttaatacctatattactaaaaattttcattaaatttatgttgttaacaaatttaaattttttaatatttaagacacaatttacctttatagaaataaagaatgtatgtggtttttcagctgataagtctccacaaaatttatgtttttgttcattaataaattaaatattacaggaggatagttgttgctcgtttcatttaaattagtcttataagtttacttgaaagattcgacgacttagtgtgaaatataccaaatctcgattcttcttgacacacatgtttgactggaaaatgagctatatctttgagtcttttctacgagcttatggcattgacttgagacaaaattccattgcacacgtatatacttcaacgtacacacaaattgatgttgttcatattaaattacgtactatgaagttgttaaaatgttatattatatttgataagagttgttttttcttagataacataatcattctaataatatacaaacacaaaaacaaataccacacactagtagtcttggcccttaataactaacaaattaaaggtactattgagaaatgctaaaagccacatagtagatcctaataatttcatataataaattttgtagaatattgttaactattttcaatgagtcatctcataatagtattataaaggcatgattggtatctaataataattttcaattttttttttataatatcttttaatttagaattcatcttttgttggatctcctttcttcgtgtttataatttagtcctcattgttcataaagctgtttcttcgtaattaagtactttgtggtgtgtgaagcatttttcattcaattttaatgtaataataatgtctttactatatacatataaatataggagttactataggtgtactcaccagaagttgtaccaatgtccagcaaagaagcaagtgcagagaatggacgatgatcctttgatgttcgaggtgatgtaccggggtagccacacgtgtcacatgtcagccacagctcccacctctatcttaccacttgtgccaatgtcacaaacccaaagcattctaataaataataataatgatcaacaattgcaaccacttataacatcaattaatactactactactactactgccagtactactagtacttttccagaagttcctctaggaagatcatggctttctatggaatgctcaggaggaggaggaagtagcagcagtggcggtggtagtggtagtatagttcatgatcattttcatccggtattagatttggctgacgtaatgtttggcagcagtagtagtaatagtatggactttttgttccctactacttcaatcgaggaagatcataacaataagctcctacaacctgatgactctgagaaccacaaaaattaatgccaactacctaattaattaattaattataatttcataattttaattattctagctaactgatttcatcaattagtggtttgatatttttatatttttttaattcttctatctcttccctaatatccttaatttaaccccatgtaataaaaataaagtgttttatgaaagacattataatggaagagcaaatatttaaacaatttaatttggatacataattatttatttatttattttttttatataggggaacatcatactattctcttctctaatataatggtgattattcaccaccttattagattaatgtggtttattattgtctggtgagtgatgaaaatgttgtttctattttattagtgtatcattttgctttggcaaggacatctttgtctctctctctctctttctttcggtgtctgatctagggaatcaccaaatttttattggccctttgttatgtgatctaatcttttttgattgagcagtactacatgattggtcgtgttattattttcctaatttatgattgaaataataggattgttatgtttcaatttttattggaagatcattggttgatagtcattagtaggtggactctgtcacattttcatttagtttggaagcctagtatactttacactcttttgatgcttattcacgggtagcttgttggattcttagttgaggttgctgttagagttttttttcatattattgtaaatagcttgctaagcctattttttcatgattgtgtatgttgtagttatttaaaactacttataaattttaaaaaattttaaataatttacaatgtcaaaaataaaatttaaagacatgtctatatgaaaaaaatagtcacaagtgaaataagatctttgaactttattttcaaaatgtaacctatttcgatttttttcaaaatttacaaatcttcttaaataattacaacgtatatggtatgatttgtttattttcacaactttccattttttttttttaaaaaaaatataccacatgttccctttatatgtatgtatatagtggatacatcaataatatttggtttgataacttaggtgggtcagtccaatattaatgagaaatgttaaaaaatatttgtcaaatttttaaagtgttccctctatacagggatacatcaataatacttagataatacttagatagggttagaccaatattattggtagcaagcaaaaaactttcacaatcaatatatatatttcatacatataatatgtacatgtacatatatttacatattaatcacttactgttagaaaatttatgaaatatcaggaaactaaattatatataatttagaacactataagtaaattatattaaaaatttataaaatatctagataagcatataatttagaacacattgagaaaatataattgagaaataataaaatttagtagtacaaattgtactatactaatctctaaaataatataaatcaatagatcaacaaaaatataaaattgtagtagtttctatgaaaaagagccaatttctaaatttatcaaatttcaaaatggctttctctctcctgtttctagagcactctagtggcatgcatacctcatttcctccaccaaaaatggtagttatggtccacccaaattggttttgtggtggtttacttcctcgatttacaaccttttcccctaagttttctgtctttcttctctcagttcattaactctcgcattaattgttctgtgtcttatgctgagtgtctatcccatcctaaaatctctcttcagagcattaaatgtcggtatcttttctgctttctccttaatccttccatatggcctttctctctatctctctcatcctcccaacccccaaatttcattattacttccgtctatctcttcgattttggaaaaatagaggtggagctatggcacaataatgaatcgaaacacaaaatcatcatttttcctacctggcctatgatattggatatgactcctctaggagatctcaaagggcgttttggttttacctatataaaggaaggtccaggtatcatcttcctcacttccctccactttttcagtctgtagtcaaatatttgtctttgtgttttgtgtctttcaacatggatgatttctttgctaatgtctcgaattctctagttctaaattgtgaagaaaatactgttttttttacttatgaggtgggttctgttgagtctccggctaccataagtcttgtcgtttctgaacatgctgatggtttattccttgttacttttgggtgtgagggtgataaaggtaggatcttagagggacaaccatggcactttgctcaaagtgtcacggttttttctgctcctgatagtgctttccctattcttcctgagaaactccattatgttcctttctgggttcaagtttatgggattccttttatgtgtaagtcccatgaacttgctaagttcattgcttctgagattggtgatctggttgcggttgatcaatccactgtcagggagggtactgggccatatcttaggattcgtgttttgcttgatgttaactttccaattacgagaggtttgaatgttagatttatcaagatggggagagagatcatcaagtggattgattttaaatatgaaagattacctgacttttgctacttttgtggaaaacttgaccatactaggaagtattgtcatgctttcctccagaagtgtgatgaaagtcctacccctccttcttgtccttttactattctccttcgtggcaaagaaaaaccaactgataaatctcaaccattccagtatccacacccaccttctatctctgtggttcaactgcctcaggggggcttatcccttccatctgttccaaactttcctactattcagttctcctctctatttcaaaattatttaactgctgaaaatcaatttgctaatgcttttgcgactgctggaattatgattcccacccctattaatcctaacaacttggctttgaacactggttcgtctgatcctaccctgtatgttccatcacttgtttatggagcatactccacggactctatccttgttgctgatagggccaatagtggtacctctgggggcatgcaagctgttcagtcttcaatgggcagtgcttctgtttcagcctttaaggttgtctcgggtgattccaatattcctgttggcaatgttgatcacaatgatggtcaacctgatcccactgtgcaagggaggagtcttgcctctgcttcaggagtgaagcgagcttcttttcaatcgcaacagattatggttggtggttctcttcgggaaacccttaagagagccagggccaatgatagtgatgatactactactcttgctactttatctttggaacaggcgggtgatgctgaccacacctgcctagaaaaatgacgattatcagttggaatgcacgagggttggggagaactcgtgcgttccgaaggctctccctgatggtgaaggatcataagccttctgttctctttttgatggaaaccaaactttcccctagagctgtggataggttcaagctttctctagggtttgactcgggttttgaagttcctaaaaaatattttggagggggacttatgcttttgtggaaagctgatgcttttgttaatattttaacttattcctataatcatattgactgtaatattactttaagtgataagcctatgtttcattttattggttttcatggttctcctgtttctagtcaacgttattttacttggaatctttgcataaagttttttataatgctcctaatcttccatgggtgttattggtgattttaattcttaccttttatatagtgataaaactggtagtaactatcattctattgttgatatgtaagcttttgctcattttcttgaaaattttaaactttctcctatgtcttttattggtaataaatatactttgaaacatgggtccacttatgaaaggttatattgggttgtttgtttggattcttggtttgatcttttccctgatgctatgttacatcacttagctttttttggttcggatcacagagtcttaaaggttgtcactagcttagataatgtttctgctcctgtaatttctaagaaacagtttcagtttgagaatatctggttagaaaatgaggagttctttcgaactgttcagaattcttggcttaattcttttactcataatgactctgctttctctagtttccttgccaaacaagagtcctgtatatcttctcttaaatcttggaatgtatctacccataacttgtttaagaataaaattacagcccttaataaaactattactgatcttcagaatacccttcctttagaagaaagtaatgtggctaagattaaggtcttacaatctcagttggatgctttcttatataaagaagaagtgtattggagacagcgagctcgtgttagttggcttaatgttggtgataaaaaaactaagttttttcactgctttgcttcttataggaaaaagactaacactattcattttcttaaaactgagaatggtgaggttgtcaatagtttggagggtatttgtaatattgtctcttcttactttgccaacctttttcattcgcaggattgtgattctgtttctgtagatcaaattctttttgttttaggtccccctctgaatgattttgagtttgagtgtttaggggaaccttttagggctgctggggggtcaaaaaggctctttttcaactctctggggataaggctccaggtctggatggccttaatgctttcttttatcaataaaattggtccaatatgggtaaggatcttgttgaggctgtgcttgattgtcttaataatagtcaagatttttcttccattaatcatactttgattactcttattcccaagaagcagcatgctcaatctatataggattttaggcccattagcttgtgcaataccctttataaagtcatttataaggttttagctaatcgcttaaaaattgttttcgataaggttctttccccttcccaaagtgcttttgtttcttggagagtaatctttgataatattctcttgcacaagaggttgtccatgctattaatgctagaaaacatggcaagatggagcgggctgcgcttaaacttgatatggctaaggcttttgacagggttgaatggcattttttgaggagcattatgtctcattttattttttttcaaacttttgtgtctcttataatgaagtgtatctctactacagagatttcttttttgataaatggtactgtccatggtagtatcaagcctactaggggtcttcgtcaaggggaccctctttctccttatttatttattttatgtgctgaagggttatcttctttacttagagcttatcaggataggaatagattaaagggtatctctatctctcgtagagctccttctttaactcatttattttttgcggatgatagtctcattttttgtgctgctagtagagattcttgtgttgctcttagggacatctttgatatatatactaaagcttcaggacaagctattaatttccataaatcttctattttgttctctcctaatgtctcagttcagattaaggatctttttcttactaatctaaatcttcaagacataccttttattagtaagtatttaggtttgcctcaatgcctatctaggtctaagcaccactctttctcttttctcaaggatattgtttcctctgttcttcattcctggcattctaaatgtttttctaaggctgggaaggaaatccttcttaaagttattattcaagctattcctgcttatgcgatggcttgctttcagttgcctgttaagctttgtaaggaaattgagggtgtgatagccagattttggtggggctcttcaagggactctaggaaaatacattggaaaaattggcaatctctttgtcgttcaaaatttgttggtggtttgggttttaggtctcttatccattttaatcaagctatgcttgctaaacaggcttggcgtattttcactcagcctgattctttgttgagtctaactcttaaagctaggtactttccccactcttctatcttagctgctaaggttggtcataatccttctttttcatggcgtagtattctttgggggagggacttattagtgtttggtcttgtgtggaaagtgggtgatggggagactattaatacctttacggatcactggatccctaattctaaatttaggcagcccctttgtgatttggactaccagcaattgaagctctcttattttattgaccaatcaggttcttggaaccttgataggctcaattcatgttttgatgcttcttctgttaatgatattttgagagttcctttctcaggacttgatggtaaggatgagcaaatttgggggagggataattctgggctttttactgtaaaatctgcatatcatttagctcttgaaactcaagacatcccttcaacttcttcttttcaagatatgaaacctttctgggctaaaatttggcatgcaaatgttcctcctaaagttaaacattttgtgtggagaattgttactaattctgtacctgtggctgtattgcttttccaaagacatattattccttctcacttatgtcccttgtgtaagaattaccctgaaattgttatgcatggtttgctagagtgtcctagagccagaaaagcttggaaggcttcagactttgctcatttttacttgcacaataaacacttggatattatgcattttattactaacgttttttcaagtttagataaaggttctacagatcttgtgttatgtttcttatggacaatttggaatcaaaggaataatgctttctttaatcatttaattcttgatccaaaagaaatgtttgcctggtgtcaaaactttcttctccagtatctggatgctcaacagaagagaatcacttctcgtaatcagtgtgatcgggatccttctgaagttgagagatgttctttgggctggtaggttttcacggatgcagcaatcgatggtgagaagcaggtttatagtctaagtgctgtggtgaagaatgattcagatcaggtggttgcaaggttaattaagccggttactggtttagttgcccctgtagtagctgaagccaaggctgtttctcttgtggtcacgtggtctaaattaattaagctacctgtccaatcctttcatactgattgtaagagtattgtagataagcttaataattgtaattagaacaatagtgtttgtgatgatttgttggtagatgttaaaaactctttgtccttcagtcctagccctaaagttgtatttgttagcagggattttaatactcatgctcacaatttagcaaagttgggtttatgatttgataaagagttgttgtagaatggttctttgccttccttgtttgcttagttagataggagactatatatcaacaaaagtttaattatatataaatctatataaagtgtacgactaatattcctaattatctccttgaatataatatacatgaaaaaaaaagattttgtcttgtctatattgacatggtggtatagtggtggttgttgtttcgtttatattgtttatttgttgtttgctgagagtttgtgtcgttgtttcgtgagcatggaggaacaatatgcgacttttaccatagaagatgaggatgaggaacaattgttgtttgaggcaaggacagttgatgtgacagtcagtaatcctgtgatccataagggaaaataccgggtaagctgtgcaatccc

SEQ ID NO: 161463 - DNA, 1231 bp, Cannabis sativa
gaatccaaaatatatcaaatacttagtacggatcgaatatattgtgaacaaagtagtgcaaattaaattagataaacacccttaaactacagaactacagtagaagagtctaatcaaattctaaaagctatgtctatgtcatctaaaattctttaaaaacaaattttaaatgatccataactaaaacataccatcatttgagtatcttttcagaacaaaaaccttaactactgattgcatttgtttcatttcgaccacaattgagaatattacgaagaaacagtaataaagttgtttttgttttttttttttctacaaaaactaaacaagacaacattggtggtattgcggtcatcctaattaccttccacaataacctagtaagtaggtactacagtttgatcatcaacattaggaatacagcttctcactttgagaaaagcaagaagcatgacaaatatcacagattaattaacacacagaccatatcgctaccattaaaaggttagtgattacagacaaacaccattttaaaagcagatgagattggggtcatatcatattatatattatatatcatatatatcagtggttaccatcttctttaagagtagtcatgtctatcggtagtaagcctgctgataagctggtgccatgccattgccataaccgccataagcgggataggtcatgggagctcctggatatgatccagccatggaggctgcctcgggtgagtacacataggggtttgttggtgggcttctgcttccatacatggttggtggtgagtggtatggggcaactggagcagggtaatgagcatgtgaaggagacctcacaaatgttggagcagcagggaatgaagaaacgtatgcgtttgtcaatcggccagccttggctggaggcataggacctccattgttggctcgtgttcgcttgttggcgggaacctggactgtctttctcttctctggcttgcccttctctagctgttcaaggcgcttcttgagactttctggaggaaactcagactcaagtttgtagtcttctatgcacttgatgacagatctgagtgcagactgctctttacggccagctaggtgctgtggaaaattgaagtaaaagtacattggtcagctgaaaatgtaaaccttttccactaattccttcccaattagtgaaatagataaaaaataaagacttgttttttcaataagttatcttccca

SEQ ID NO: 161464 - DNA, 3892 bp, Cannabis sativa
ttagcttaggtactattttatactattctaaaaaaatataaagtcaaacttagaagttcaattgataaattttataaagtacataatttaaaatggtttaaaataatactctaaactcaattatttaatgcaactaataatttataacacgaatagatataaaaattgtatcaaattttgctatagtatctctaaattgtattattattaaggtttaattgtaaaaaaaaaaaactcaaattactattttatattattttctaaaaatatagggttcaatgtatcacttaataaaattgagggtctaaaacggtaattatattcttcttaagatcactttctgtttggtatatatattacctttcttcgatcctatcttcttcaccaccatcgccaaaaagctcactctctctctcactctcaatctctctttgtttctatcgatttctcttctcgatccttagctatggcctccaaggaaccaattcgcgttctcgttaccggagctgcaggtatatataattatatggctttagatctaatctatcactgctgtttttggatttttgtcgctagatttagcagattatggcttcgtttttcttgtttaagcattgttttgatgtagtatgttatgataaatggtaggactaaaatcattttcgtgaaattgtttaaagatctgttttttaatttttttttttttaaatgttgattattttggtgaagaatcaagatcgtgctttgtattgaatatgattgtttatatctttgattaatttttttttcattttcatgatctattttattgaagtttgtatatgagaagatctgtgcatatatacactattagtgaatgagaaatgagaatgagatcaaagatatttgagttcgtatttttatgtggttcttcactgggaaaatagtttgtgttcatttaaacaaagttgattattttttataataaaagtatgcactatttgatttgtttgcttttgtttcgtttaaaaattaagcatttttactgtgtttggttttgtaggacaaattggatatgctcttgttcctatgattgctaggggagtcatgcttggagctgaccagcctgtgattctccacatgcttgatatcccacctgcagctgaggccttgaacggtgtaaagatggaattggtggatgctgccttccctctgcttaaaggtatatataactccattatttgatcttgatttgagttttgtcatacttagttgtgtgattaagatttgatgtgtgtgatatttgtttgtatcaggtgttgttgcaacgactgatgttgttgaggggtgcactggagtgaatgttgctgtcatggttggtggattcccaaggaaagaaggtatggaaagaaaggatgtgatgtcaaagaatgtctcaatttacaaggctcaagcctcagcccttgagaagcatgctgctgcaaactgcaaggtcacttcttttctctaatcaattttttattttgttttataatgtatgggagtgagagcttttgtattatttggattgatctaacgttttatgaatgtttcttttgcaggttttggttgttgctaaccctgcaaacaccaatgcattgattttgaaggaattcgcaccatcaattcccgagaaaaacatctcttgtttgacaagattggaccacaacagggcattgggacagatttcagagagattgaatgttcaagttagtgatgttaaaaatgtcatcatctggggaaatcactcatcaactcagtatcctgatgttaaccacgcaactgtcaaaacacccgctggggagaagcctgtccgtgagcttgtcgctgatgatgcatggtatgatagttaatgcaatacttgatccacagtgtcattttgtcctcataaaatataataagtctgatgattgtcttgctctataggttgaatggagaattcatctccactgttcaacaacgtggcgctgcaattatcaaagctcgtaagctatcaagtgctttatctgctgccagctctgcttgtgatcacatccgtgactgggttcttggaactcctgaggtcagtacttgttttttcttttcaattaatctgtttccttatcgatatctatgctgctgtgttgtgctaaagtttttcactgtttgatatcagggaacttttgtttccatgggtgtgtactccgatggctcatacaatgtacctgctggtcttatctattctttccctgtcacttgcaaaaatggtgaatggacaattgttcaaggtaagggttttacatcattctccaaaaagtgtaccctaaaaattctcgtagaatcgttttcattctgtgcatgacaaatcatgaattagtaactcgatccaatctccaaaaaatcccaattgtttcagatccaaccgaataagcaattttaactggtgtctagttgggtgcattgtgatatttggtgtatttatacctcaaaacatacattttcctttctgggattgtaattttcgggtcttgatatcatatttatcgtcgttcttttatcttctcaggacttgcaattgacgagtactcaaggaagaagttggacttgacagcagatgaactgtccgaggagaaggcgttggcttactcttgcctttcgtaaatgctctctttctaaccgacacgctactcttcggtgggcagtgtgtttgtgagttggagtagtctatggaagtagctaaagttttgaataatggccattgttaaaagattcaatagagaaccatattaatgatgggagaggctgcctctatggttggttttactgtttagttaaaaaccccaatcaatttattctgcgaagaaatttgaatctttgttattaaaactttcaacatgtggtgagacacaaattgtcagtttgatccataaatatgcatgttgtttatattctcatcatttacaatctttcttgttaaaactattatgcatttgtgtttactttagatataatttggattctgcaaatcattaatgtctctttcttctattccttaataataagggttattttcagctttttttttttttttttgggaaaattcacatatgtttactttagacccttaaattcgaaagtgtaaatagtagtcattcagttgttatttagcggaatatttaactgatgtttcaaatttgtaaagaaaaataaatttaaaaagattttgtcggattaaaaatataggaataagaatgagaattgaaatataaaaggaaatttgattaaatatgcttacattatcttccctaaacttatatttaccaatatttataggatatgataactttagtattattctcaaaatactcttcccatttacatcaattccctctctctttctattctttcttctttttctcagactgtatcgaacagaccatcgggctgcattggacgaaccattggacccgatgtcttcaacctctagccaaaaaaatcatgggaccatcggacgggcatcggacccgttaaaaaacccaaattttcctaaaatacagatccgattaatcccaacttaaatctaaccctaactagcagatttcacaccacattgcaacaaaacaatcgatttctaccataaattcataaatccatcaatttaagaccaaaaacttcatgaaaaaattgaagaaaaaaaaaactcacctttgacattctcgtcggtgatggagtaaaaaactcaccttgaagttaaaaagaaactttgtacaccattcaattgcagctacatgtctccaccaattttgaatattccaaatgtgacaagagaatttgtgacagtcagtagtcccgtgatccgtaaagggaaataccgggtaagctgtacaatctcaca

SEQ ID NO: 161465 - DNA, 8716 bp, Cannabis sativa
  modified_base (773)..(775): a, c, t, g, unknown or other
  modified_base (7014)..(7020): a, c, t, g, unknown or other
  modified_base (7068)..(7083): a, c, t, g, unknown or other
ttttttttttttttttaagtctcttgtagagtttttattttcattagcatgataacgttaatcttaattggttttttcaaaaagaaatggtaaatttagacttggcctttattttaagagaaaagccaaagggtattcattgtgtctagtagtgtaataaatattataaaaaattactaactaatagtagtagagcgatattttgtcgtggtgttaggtattatgagtgtcttatagtaatataatttttatttctgttaaggattttaatagagaattagcagggagtgttttccattaggcactatgttgttttgatattgttttaatgttatttttatgtatttttttattgttttttttaaaatatcttaaaaatatatacattttttttttttttacaaaaattgatattttatgtaacagaaatactagagggtactattggtgctaggcactatgattgtctcgtagcaatggtctttatgtaattatccattttttataggcttattagtaattttttcctcactttgacatgtaccaaatcgtgtccctgaacttttttggccgttaaaaattttcctgaactattgagattgttaaatttaaagacttttgttcaatttcattcaattttactgtttcagtgattctttatgtattaaaccatgctcctcagactttgatatctactaaatcatatccctcaaactttgatatgtactaaatcatgtcacttaattcgatgttagaatttttttactaaaatnnnacaaaagtccttaaatctaacaacctcaataattaaagggaaatttttaacagtcaaaaaagttcaagaaacatgattaggtacatatcagagttcggaggaaaaattactaatcagctatttttataattggattggattaaatatttggttcaattgaattgcattgaatttcttgtccacctctacttcggccttagttcagttcggtccgacccgtcacgttttattctgaatcggaccaagcccgacccggtttaagagattgagaatagaaattcaaaaaattcaaactcccacctaatttcattactatccactttcaaatattcaaaatcccataaaccttagatcaagggcgggagcttcatctttctgagattcgacgccattttcgatcctctactcaggttcgtttcttcttcttcttcagttcttgttttttcagcattttatattatgtaaaatcgtctgtttcttcaacgacttctatcaaatttctcatcgaattttgccttatatgatgtacttacattatagttataatcataaggacagaaatggcggttgaagagagccaattgacgaagaaaatcgccaaaatcctcgacgaagcctctgtctccaatgcaaaccataaccgtaaactcaaggacctatcttccctccgttctaagacaacaacttcatcatcatccttctttgtttcattctccgaagccctaattcctctcttcgccttccagaggcgatcgccctcagccgagcgtgttgtccgcttcgtctctgccttcgcaacctacagagatcccaatcacaatctagactgcgataccttcttggaggactttcttaggttcctcctcgttgccagtgctgctgccaacaagacgcccaggttccgtgcttgtcagattttttctgagattatcatgaggttacctgatgatgcagaagtagctagcgaactttgggatgaggtaatagaatgcttgaaggtccgggtggtggacaaggttcctttgattcgtacttacgcagttagggctctttctcgatttgcaattgattgtgagaacagtgatgttcttgatttatttctagaggttcttcctctcgaacaaagtgcggtgagtttccctacttactttaatgctgtataatcaatcacatgtaatctgcacaatacatttactttaataattgaattagaatacattggaatgagaataactaataacatagaagaaaaggacttcggtagttaaatttttctcagagagagatttatattaggtgttcaaaataacttgattaataaaacagcaaatatgcatgtgtagaaactataactgtgtttagttatgcataggaatttctagttagattaatgctgtataaaatctttagaactatgcaaatcgttgcaaatattctcctgttattttttataacaatttgcttatatggctataaattacaattataattatactgcaagagcttatttgaatgcacatacatacttataataagtggcttaccacgtaagtgtgtgttttatgtgtgcacatatcattactcttactttagtattttatttttgagatatttctttgttattatagaaaaggcaggtcctttgataaaacacatcactctttcttttagtttgatttttgtgggatacctttcagaaatggcagtttatttacttccctcatttacaaatatctttttgataatatgcaaatggtgctttttcataggaggtgcgtaagactattctgctatctctacctccttctaatgctacttcacaagcaattattgaatgtacaatggatgttagtgaatcagtacgcaaagctgcatactatgttctagctgataaatttcctcttcaaagcctcaggtatattttcaagttctgatgtgatttggtttttcgtattactaacactgcacatactgttcgcttggctgtatataactaaatttgaattggaggtggtttaatggttattgttcattttggcagcatcaagctcagaacagttattcttcagagaggacttgcagatcgttctactgttgttgtaaaggagtgtattagaatgatgacagatgagtggcttaacaaatgctgcaatggaaaccctgtacagtttctcaagtatcttgacgttgaaacatatgaaacggttggtgagtctgtgatgcaggtgttgttagaagctggcttaattcaattacatgatacagaaagtatccaacaatacatatcatcacacaatgaaactactgaagatgccgagaattccacctcaaacattgaattgatggaagctgaagatgctctttattggaagatggtatgtaggcacttgcagagagaagcgcaggccaagggttcggatgctgctgctactatgggaactgaagctgcagtgtatgctgaggaggcttcaaagaacaatgaccttctggagaggattttacctgcaactgtttctgactacataaaactagtcaaagctcatatgaatgctggacccatttatcggtttacatctagacagcttgtattgcttggtgctatgcttgatttttccgattctgcaaacagaaaggtggctagtgaatttttgatggagctcttgcacaagccttttgacaatgaacaagatgatgatgggaacattgttgtcctcggagatggattaaatcttggaggagacagagattgggctgatgcagtgtttgaattggcaaggaaggtgcattcagcaagtggtgaatttgaagaagttgtccttggtgttatagaagagctagctcagccttgcagggagcgaacagcgaattttatgcagtggatgcactctcttgcggtgattggctttctcttagagaatacacaatccttgcgtttgattcaagggaaagctattgaacctactgaaatactgcaatctatattgcttcctggggcaaaacatgtgcatctagacgtccagaggatttccatcaggtgtattgcacttttcggcttgttagagaagaagccgagtaaagaagttgtaaggcagttaagactttcacttgttaagggcccaactccaattagcataatggctagtaaggcattgattgatcttgggatgtggcataatcctaaggaagttgatagtgttttcggactggatctcttaccaaattgtcaagagaatgaagtttcatcaagtccgacgacaattttcgatgatgaagaaggtagcttgaatattaaattactcgatctcttgtatgccggacttgttaaagatgattggggcgattttctagcaagtgatgagaatgagtcagttcagggtgttcttgcagagggatttgcaaagattcttcttttgagtgaaagctatccaagcattcctacttctttacatcccttgctattaaccaagcttattagcttgtatttcagcagtgaaaccaaagatttgcaacggttgaaacaatgtctatcagtgtttttcgagcattacccttcgctctcagctaatcacaagaagtatttatccaaagcgtttgttccagtcatgcgctctatgtggccaggcattgatggaaacactgcagcttctcccgttgcagtgtctaaaatgcgcaagcgcgctgtccaagcatcgagattcatgttgcagatgatgcaggctcctctttacgaagatagtgtggaacctccactcgagtgtggcgaggaagggctcgcaatacgcatagcaatagaggtggcaaatttccccaataaaaagacctctgcagaaagggcatatatatcagctatttctaaaatacttgttctgcttcatttccgcccatctgaacaagacgcaattaagttaatgaggaggattttagtttctgttacgacatctgtatcaacaacagagagagaccttattaaggagttaaaaagaatggctgatcatcttagtgaagttgatagaaatgtggatgatgagcaactcctggcacaaaaccaagctaatcttatactggggaggttagaagtagacttcaatttggatcccacagtttcagataaaactattcagtcaccaattcctcgttcgactaaaccgaaacgaggcaagagacaagtgaggcagcaagagacatcttcttcatcagaagaagaagaagaagaaagttcacctacctcaattgttccagtaaacaggcactctgagagggcaagtaagaccgcggcactatcgaagattactgcctctagagcccccaggattgctgaagatgagattgcagaggaagaagaatctgatgtgacatctgatgaatccgatcaggttagtgaataagccattggtatatctgtaattgtggttctgatgttgttttcagagacagtcttcttctattatggttcattcaagcaaggaatagtgttgttttcagaggtaaattccttgagtttgtatgtttttactttgaaagcttttcaattagctcctttttttaacatggtgatttatgaaatctgcaggggacaaatgttttgttgcatgaagctcgaaatgaactcaagtatgtatttcgttctgatgtagtatttgcttaaacacttatttgatggtaatgttacaattaatcttgcaatgaagttcaatttcattatatatatatatatatatattttgtgtgtcacttcatctcaactttgttatctttgtatgtataaattcatattgatattttgtgtaccaaagtattttgataaatgattgtgggaataacttgtctgattactcttccaaatgtcttttttgtctttctattcatggaaaataagtaaaatctaaaagtgtttattttattttgttttgatatagaagaaaatgagaatatacatttttataggctatttatgatgttttttaaaaagtaaatggttccttcaaaaaaaaaaaaaaaaagtaaatgaaaattttattaataggtaaattgaatatagtttattacatgtagatagaatcaacaaaataggacaaaaattctaacaacatctttaactaaaaaatttatatttgatttttatttcgaatgaaaatgtgattgattgcacctattactaacaattagtgaaagatttgtcaattaaaattgagtaaaaatacttcaattatttaaactagagtataacatgacaaactatatttaatatttccaatattaaatattgatgaaccataaaacaagatttgaaaataatatcccaaactaacccactattgtaaataggagagtataatgtgaatgatactgattcttcaaagtgactactacatccaaagtccaatgtatattttacattatgttttttcttcctccaaaatttcaactgaaaaaagatggaaagcatccacttttactatggtttttttttttacttggttgaaatagttgagaagacaattaagtttgcgtacatttaggcttgatatgggctgttttgttaatcaatcttgaaaaataaaggctacaaaaacatggtcatcctatactgtattgtgacatttttctaattctctattgacttaattatctaacttttacatgtgatttggcctcttctattgacccaacaaacataaccatgaaatcaaaatactacatggtattatgtatacatcaaattgtcatgcactatttgttggtgtaatatataatgagtgataatatatagtaaaaataatttttaattttgtttttttagattgtaatgataagtgtacttaaaatatatttcaaattattacaccttatgaagtactatcagtactttttataaatgtcgtttcacgattagttatcaatattccctaaaaattaatttcttaagatatgagatctgatatttaattatactaataacagtatgacattcagaaaagtgctaggcaccattatgattgatacacattaatgtatgtaaattttttgtgcatgttttaacttttaagggcacatcattactcttaatgaaaggtagtgattcttttaataactcttttcaaagaagctttcacaacacaatggacatttaaaaaaaaggctaattagtagtttttcctcccgaactttgacatctacttaatcgtgtcttctgaatttttttggccgttagaaatttctcccgaactattgagattgtnnnnnnnaaggacttttgtctaatttcatgtttcattgattgtttatgtactaannnnnnnnnnnnnnnntttgatatctactaaatcatgctcctcaaactttgatatgtactaaatcatgccccttaaattttcatccatgttagaggttttagacaaaagtccttaaatttaacaatctcaatagttcgagaggaatttttaacggccaaaaaagttcaaggggcacgattttgtacatgtcaaagttcgggggaaaaaattactaattagcctaaaaaaatgtccacttttactaaatactctaatataaacaagtcatattttgtcatgtggagagtactcgattgatagtacaaataagcaatatggtgtataacaacatgacaaagaagtagcttctcgaaaatggctctgaagtttaattgtagcaaaattttagaatgtagagggatttcaataaggaattataatttggtaagagaaggagaaggcattgttgaagcttcttgccataattttggattgactgaaaaaggattggttcataatcatactatagaccttttcatttataatatatactttttttttagaatttgatttttatccagttccagcgatttaaacatcgtattttataagagcaaactagcataataaaatttggctattagagctacattctggctcaaatctaaaatatttatttttgactaattatgatttttacctccataaactttgacgtgtaccaatttatgccataaacttttcaagttgttaaaaatttctctgaaatattgtaattattgaatttaaagactttttgtccagttttactaacagaagtctaacatgatcatgaatgaaacttcaaaaagcataatttggtacaatttaaagttcatgagacacgatttgatagatattaaagttcgaggggcacaatttagtacatggataattattgtattagtaaaattgatcggaattggattgaattcattgaatccaacaatctcaataatttaaagagaatatttgacagcctaaaaaatttataaaacataattgaatacataacaaaatttagtagcaaaaattctaaatagactttattttatcaagcatatgctttgtaaatttagtagtgattttattattttgttagagaaatctttcgttggagcttttagttgatgattgactattagtgtggaaacacttaacctacccacctacctaatgtcctcaattctcttttagagattacactattgtctacactttgactaaaaaaacaaaatacaatttgctttagataagagactaacggtctgattaattgtgttttcaaaaaagtgtaactatgaaataaaaatctcaattagtgtgtgaaaatgtatttggatcagtgcaaaaatatttctacatgcaaattaattacacataaatttgatacatatttatgagataaaaaaaaataaattaattattcttatttgagatgagtcccacttaataaaaatagtttgtttgtggaattttatgtaatttatatctacatgtgtcatttttttttgggaaatttgattttctatacttaaaaaacttaatttttttttttaaaccaatacattttacactacaaaaaatatgacactttttttaaaatccaaaaaatacccccctcataact

SEQ ID NO: 161466 - DNA, 6166 bp, Cannabis sativa
atattgaattttctgctttgtttctaacgaaaattgactaaagttgaaaaaaaaatgaatttttgatatcaaaacatcaaaaatttatataataaatcaaattcagtctctcatatcaatggtcatgaggatgagaaatcttaacccttcatcaaagacttgacatcatttaatgttctcatattggctcataagaattattctccatatatattcttaattttatattattatttatagtctaaatattaggacatcatttcttataattaagaggcttatttcctcacttcattaattctgatttttagagcttctctttttagaatttaagttctaaggctctctttagactttatactttactcttggctcacaacactggtcttagtgttgtttgattaataaagctataaaaaaacactatcgttggccatttttaagtgccaacatgcatgtagtatgtagtgttatattagtaattattttattagttaatttttaaattaatcacaactgatgaataacaattcaagactacaacaaatgttactatcatagttacatattaaatattattttatgtataatttcaaaaaaaataaaaaaaatatcattttatataaaaaaaaaaatagaaaaattaacaaattttgcatgtataacttcatccatctcaaaccgaccctcactaaaactttgaaataaaaaaggaataaaattgtaaagtgaattttggtgatacatttgagaggataggataatttagtttgatttctctaactctaagagaaaaaagtgaagaaattcttttaattatatataatgaacttgcgaaaatgttacaaaagaaaacagagtgtgaacatcactaaataaaccactcctacaaagcctaaaatttcagtaatatatgtatatcacgtgtgacaacaaatattaatgctacgataggtagaagacatttatggctaaaccataatttcttttcctgtaatcataatagtagtacaactatcccaatataaatgcaaatccaatggtaataaataacgatgaataaatttggagcttttttttcacataaattatatataaaaactataaagagcaaggtccaatccacgaccacagattcattgttataccgtacgaaatctatttttaattagtgtgacagcctacgagaatgactgactctgagttcaggttttgggcgtgaacttaaaccattcaagtgaccacttctactaccgattgaggttgaacccgctggaaccactacatctcctccttctagcactctcagaacctatatatatatatatataattcaattaattaatagtaacagtaatggcatgcatatgcaggataaaaaagagagtaccttggacatttggggtctggagtctggatctcgacgaagacacaaggaagcagctcgccccatggcatctaactgacgaaggaaatcagtagtagtagaagtagtagaagtagtactggattggtcagaagtactaataacagccaaggtgggatcaagtaactgataatatgatgattccatagtagctaatggagtgagccaatcagccaaaaaaagctcttcatttgcatgttgcaactccctgattctgcgcccagtcatcagctccaaaagaaccaacccaaacgcatacacatcaactttatgcgtaatttctccaccctctacatattccggtgcaagatacctgatcagatacatacatacccaatttaatccaatcatgaaattattaaataattaatgggtaaatttagaaataatattagtgtaccctgctgaaccaaacacttgaacctccgtactgacgtcccactcagagtgccacctagcaagcccaaaatctgcaacctatatatatgtatagacaaataacacaacatgtacaataatgattattacttatgttgtactggactggattaacaagatggagtaaatttggtttgaatttagtaggtagtaccataggttcaaaatcatgcgttaggaggatattattgggtcgtagatctctgtggactatacaccccactctacaatcttcatgaagataccgtaagccacgggctgtgcctgttgctatctttaacctcgcatgccattctaaaggggctctgtttcctgccaatgcccattaattagttagcagagatcaaagttcagttcagtagtagaataagtagtgggacaatgcatgaagcattaacatgcaattggattaagaggttagttataccatgtaaatgaaagtctaaggagccgttgcatatgtactcataaaccaacatcctcatattgccctcaatgcaaaacccatttagcaacacaacgttcctgtgttgtgcgcagctcaaaacccgaacttcgcgacagaagtcagcatcggcctgagacccacaaaacttcaaatgcttcactgcgacaacctgtccatctctcagtgttcccctgtgaaccacaccaaacccgctttcagcaacaaagtttttttgtgagaacccttctgtagcttcctctagctctctgtacgagaattgttttggaggctttccaaacatcggtgtcttgtgttgacatgttgagcaaagtggaggaggtactgaggaagttcttcctagagaaacggcatccctaatgcttgaattgatagtatattcccttttctttattgatctacctgcagctggtgtcacatgatcttgataaaacagagtactactactactattactgctagtagtggcagaggaaaacacatgatttttgttgccattattacgaggaggaggcttaataggcagctgtcctacatcaagctcaagggcgtggctttgtggaatccaagccacagatgttggaattttagaaagagttataacactttcatgtttatttgagtccatagctgataatgattcttccagttccaaatcatcattttgctcctcatcaattagtctataagtcccattgtgcggaccttcgaaaagaggattctgttcgtagacaaggaaaatagaggcggcgctgttgaaactcgatatggagccttctcttgttcttgcgcaggatgtagttgtttcttcttcagggctgctcaccggagtggaatgcttcatcttatggcccaatttcaactttcgaatgtccataactggcgaagaagcagctgaaaagaatggggtttccagcccactcccaccaccatggtctgagcatcctaaattgagtctcaacacttttggttgcgaccctttcatcactacaatgttgcagcggagttcctctacacagtgctttagctcttgcttcaattttctgtttttccaagacaatattcaatagtaattaatataattacattattaacagattccccagaaacagaacaattaatttatgatctatcagtactatgagtatggcatgtaaaatacagaacaagtaatatataattaagggcctctatattttggtgaaacttcctctgccctcaccacaacctcaaaatggaaaataggtaccagtagtacatacaaatacaatacaataatgcaaataacaggtaataaattaagaatgtagaggtggccaatcaatcaattaattaattaattaggtctgatcagaaacaagaaataatactttttttctatgttaattacttgtccagtatgacccagttggcctcattgccctttgcttcagccgccacagcacccgctagtgtatctaacaccaccttcacccgcaccgtcacctgcaagaatgcaattccatttctttatcaagacataatttattacctttattaatcaattatcaaataatgtttggacaatgacaatgagccagcttaaaagcaatattagagctcgggcatatctttaattattatagtctccattaaaaaaaaaaaaaaaaaaaaagagcgcgtaaaatatatatatatacatcacattcacatggttcttttctgttaacccaaatatttaaaaaataactataattaaaccacaatttgaaaaaatatttatttttaaaaatgagattgtaatctaattaccagcttaattttgttgtttaattattaaaaaaacatctttctttttttacattagtaaaattaaacataaattatggggatcaaagtcaaagaaaggatgaggaggagtgacctcgatttggttgtgatactgaagcaccatttgggaacatgactccgagatctcactaatccgatcgcatagcttctcccggtgagggtggctgctcccacagtctcccgccagtatcggaaatgatctccagaatctactcctccctagtgatatatataaggaacatgatttttatttattcgaaattaaaatccaataaattgattaattggtagtagtttaattacgtacttgtagtggttgtgtgggagggtaaaactgcgagcaaagttatggaatcgccgggatgaacaacgtgagtaagagcccaggcaagtgcggccttggagatgactctctcagctttcacggccaccaccactttgtccaccatcgacatccacgtggccggccttcgtttcctaaagctcccttcaccaaacattatatcatagtcttcaattcattcatatgtttattattattattattattatcaaatatgtatatatagagatacagatacatagtctctcactcaactcacaattgcttaacgtgggttcctgaaaccatggttaattagctgacctgaccacggttaactacttttctctttttctcacgtcttttattaatttcgtttcaaattccatttaatttagtttgctttttgtatgtaaagaaaaagattgtgtttattcgaaaattgaatttcaaactagagtagagggaattaattagaagagcattctacattggaggtgtgaataagtggtgaaaaagttaaaatatagttcatttaataaaaaatgtactttaatagtatgataaaaaataatgtaaatttaatacataataaaatttatgtcaaatttgacacaacatttactataatgtaaaatttacactataataaatacactatatttttatttacattttattaatatatttaactatcacattaaattataaaatatttatattgtatttttattgtcttacatattaaaataattaattataaaattattaaatttttttcaataaaatattaattaaatattaaattttacattaaaattttaaaattttgtaattataccttgaagtacaaaattaaaatttaaaatttaatgtaaatttattatatttttacatctcccattaaaatttagaaatggtctaaaggtacgtcatacgtggaagggggattacttaaaaatgacggaaagatatatctacctagctattgttattattattttattttacgagttaagtatttatttatatatttttctttttctttatttttctcaattattgaatggatcattggattcagggaatcagattatttaatattaatatatatggaatgatttgcggaataaggtaagacaactatatatatatacatcattatagtagttcattattattggatattagtgtgttgaatattttttttataggtggcttttaatattctgtaaaaatgtaagttatatgtagatcgatacttttttcttttaattatatataatactaaaaaaaaatactacacattattaatgttttctaatatttctcttgatactatgctaataataattaatcgaaaagataaattaattatgatatttaaaagtttatactagatgatgacgtgaaccacgtgcacctcactttcatgaaactaatagtgagaagttttcctcttttgacttaggatataaattatttggttaaaagttaatataaatatttattatttaaaatagtatatgttatctttgcactcttatgtggcattacgagaatggtgactcgtggagtccacttagatgatctgttcgagaagataggccgagcaggatgtctcgctggcatgtcatgagtaagatattcagcgatccgtacagagcaatcaacacttagcgaa

SEQ ID NO: 161467 - DNA, 4039 bp, Cannabis sativa
  modified_base (1686)..(1705): a, c, t, g, unknown or other
  modified_base (1917)..(1921): a, c, t, g, unknown or other
  modified_base (3986)..(3989): a, c, t, g, unknown or other
catgcttcttctccattaagaaaaaaaggtctaatatagagttgctattttttctgtttttcataattaattcctcttaatagaggcaacacagttctattaaaagaaaacaaaaaggcaacaactccatgataagaagccaaccaaacagttaggtgtggcaaacaaataaaaataggacagttgcagaagatacatcagagaaaacaaatagttagttaattaccagatacacaaggcatgttgaggagaatcaataatgggagagagactaaaaaaaagaagatcgtggagagaaatattaaggacataaaaagaaaaatgcatgagatatttatctagggacaaaaggtttataactgagattttggaactgatcgagcatcaagcaccaatggttaagaaaaaaaattcttttagaagaaagagaggaagagtagataattgaggatgataaaattatatctaaatatatgtaatttttataatattattaatagatatataaattatataataagtaattaaaaaagttttcctatcggtacgtaacttttgttaactcttatcataatcatatcatatatatatacaatatctatattaattaaataatagtacgtacgtggttgaatgtgtttcttcacttatctcttggttttggtaaacaatatgtaactatatatgtgtattgtatatgaagcaagagttgaagttgaaggatgtcatttaaatagcaatattatttatttatcttctacgaattcaattatatattatctctctaagagggtctcagagttcaagttatattttctctatcatcatatatgctttattatctgcttctatgtaattgcttgcagtatgaacaacaagcgcttcttcacagcttgagacatcagttattttcacttcacaaatgtaaagttttttaattactttttattatgatttatttattaataatttgtcttctttgttgcaatttaaaaagaacagatgataatagcagcaggcaaatgattaataatgcaaagtatgacaactggtagtttatttagttagaattggtagttattcttagctagactgcttttggaattttttgagttatatagtttactacttgatgactgtttaaatttttttacatatatcttcataaaagtattgttactattgttatgttttttcatcgttgcatactggaaatttgaattctgacattgcacggagagaattgcattaacatttgcagtttctcccttacctcaaattgtttgttgattataaaccatcatttaaagtagtgtttcccatcgattatagtctgatggaagcctttcccgtcggttacagtctgatggaagcctttcccgttgattttaaactgtcagttaaagtatttttcccgtcagttataaattgtcatttaaattagctttctcatcggttacagttcgacagaagcctttcccgtcagttttaaaccgtcatttaatgtgattttcctaattcattcactatacaaaaactccctttcatgtccatcaaagttggacattgttaaccaaaaaactttctatggtgacgtggacatcaatgtttaacacgtgacaacactacaaaaaactgctatttttggtgaaaactatttagtcacaacataattttttgtgactnnnnnnnnnnnnnnnnnnnnacaaaatgttacttgtgactaaagcatagtatttaaatacaagttgtcagtaatttagttttagtcacaacaagtattgtcactaaaattacatttagtcacaacaaattgtaatttttgagactaatacttttagccacggaccttctagtcacaagatagaaatgatgatttataattagtcacaactttttcacttttagtcacaagtnnnnntgtgactaaaagtaagattttttgcagtgcaagaaagataacatctcagagttgagtagtctcgagtcatagcagtcgacctaagaggggtccctagccctgcgcccagattgactctgggaactccaaaatgaaaattcggattctgataagttatgtctaactcactatctttcagtattctgttcaatgaagacatggagcaaccaagtccaggtcctgagagctaaaaatacacgaaccagcacctcgaaagtcaacttaggcacctagggtttcacccagcgcccaagttgacatccttaactagggttttggtttttgggaccgtcttactgcaaatgggccaaaatttgcattggaacatgaactagacatgccacgaacatatttgaggcatcaaaattagattcgaagaatgttcgtttttgagcacccgaacacgcggtgctcgagcaccccagcgcccaagttgacatctgtcaatttgggccactttcaagtgtcagatcaaaaatataactcgtgcatcctctttgtcttcatcaaaattggggaaacaagtgattttagggaagaaacaacacaccttgggtgctagaacaaggtcccagcgcccaggttgacattttgttaatctaggccaattctaaggagtttttctgagaagtcttttgagcatattctctattttcaacaaagattaagattcaactatttttggggaccaaatggaacttcaaggtggcctaaagctggacccagcgcccaggtagacacctggcactagactcaggaagatgcaagcaaactcaggaagaaaaccacaatcacagggcatgaaaactgagcctggtgcccaagttgacctagtgctgggcttagcgcccaagttgacaatcaacctggtgcactggtttcagtcattcaaatgtcaattatgttccgagaattctctccaaaatggtcaaaaatagggcagaagacctcgtcctcaagttctaagaccttggaaatattcaaacgacatcctataagctccatagtgagcaccgagcacccaggttgacatcctcgtcctcgtccacaaagtatgttttgatggtgtttgtagatagaaggtgaagtatgtaccttggtaaaactttaaaccaatacccattggagctaaaaccacatagttcgacccttcctctcgggtgtgtggcccaacaccactcggccatggttaagtacctcactaggatgagagtggactggcactaatcggttaaggctaagtgtttttacatagtacactatctcgttgtcacgcagccttggacgacccttacagcactgacccaatgctaccgggctaggtctgtgtacatcattatggtgtggttaaaaattccacttggcttgggtcataggtggctctttcccactcgactttggccgaagccataaagaccgagtcatattaagccgacccttaggggttactcaacctagtccgacccctaggagggtgactgggacctttcccatttttgactaggggcgagtaaaatggattttaaggttttgtcttcacttttatgcttctccctttcttaaatccttgaggatagacaattgttggttaacgcgactacgtggccatgtccacccatattatacggctagggctgcatactttgggaggtgagagtatgtgacccattttacttggttaatgtagggcacacttcacttgttttggttggggagtgtacttaaagacttgcatggaaataaggaaaaaaccacgagagtcgagatgacccgtgtctaggccagataacgtgggtaggagcgcatgtcattactcctgtaaagaagaaaataggaagtccacgtacaaccaagcaatcctacgcaaacttaggagacaaatgttatcccaaagtttactcgagtgacgtggtattaggcaaagtgacacgtggctttcaattgaaaggttgtctagactatgataattcaggggttggacggacaacataggagacagaggagtcactacaagaaatgtcacttnnnncagcacatttttgtgctggcaaaatttggtattgcgctggtaaaatagaa

SEQ ID NO: 161468 - DNA, 2798 bp, Cannabis sativa
aaagaactttcgcataaagaataaaactaaaccaaaagcttacgttggagtaagcagctgatctgaatttcttgattccaccggcagggcgaaggtcttcaatgctgtatccgaggggtgcttcgtagatcaatgatttactactactactactagacttctttttcccacctttagactccattagctcattcagatatctgaaaaaccaagcaataaacaagagttagcaaaagaaaataattacagtaacatctaacaagacaagataaataaaaattaagactccgagcaaattgttacaaaattatgtgtaactcacaatcataccaaattaaagtttaatattaaaacaaagaccagaagtcacaacaatcattaacctatgacaagacacgataaaagaaaattaagaaacctggtaaaatggttacaatattatagtatgtctaacaatcataacaaaataaagttaaaacattttatcaaaagaccaaaagtttatccttcccatacaaaaagacataacaatcattaaaaaagaccagtagcttgtccttccaaaacaaaaagacataatctttaaaagttacaaaattataatcattatacacaagatccgaaaaaaccaaactatgaacctcaaattcttcgccctttagttttatttgattcatcattcaataaaaaaaaaagcttcagaaaacaagataaaccctagattcgataaaatattaaaaatctaataggcatccaaaatcacctcgtttatcaattaaaatatttcaaagcaataatatcgatgaaaaagtttggcatagagagaaatcataaaacctagaataaaatagcgaacagtgatagtacttacaaattaatatgatatcgtgaaacagagaacgaactccttcaagaacccccttttgtaacttttaatcgaaaagcctgagcaatatattgcaaaacaaaaaacaagaattaaaatctaaagaaaggaaataaagaaacgaaacagaaatttagaatacgagcatacaaaagaacaagatcgtgagagacttacgatttggagaaatataaggaagaaaatttgagaacaattctgaggaaaccctagaaacttgagagtaaaggactaaagggaaaaggatgcgaaataagctggaagcaaagaatagaaaaacctaatgggagactgggcttatataggggagggagagagaacgtgagtttacgaaattgccaagcagtttctaatgtaattactaaaatacccctttccaggctggcctagagctttatcctcagccacgagttctctacggttactcattcacgcttttcggtcccaataagttaggagcgtgtaaaccactctcgactaagagacagatgtcctaattttcagtaatattcaccgtgtcattcggaaaaagggtaatttcgatattttacataaatttccacgtggcaaaaatttgttggttgaatttaaaggacaaaaaaatcgaaaaaagagcaccagatccctgtacgttgaattatgagaatctttttttctgggccaagagttttaaaaggaacgacgcagatatattgtacggtcgagattgctcagatacacgtattgaaattaatttggtctgagctgtctttttttgttttttcctaatgtgctttgattttagatttttttttttggggattttttttgggaatagcttcaaattttcttatatcttctatacacgtaacacctgctattaatggataaatgggcccagttggaccaagcccagtccatatccattaacttctttcatatttatagtaaatttattttggagtgaaattaatacatgcaggatggagggtagttgatagtcgtaaataatgttaatttacattttataattatattatttaaaaaactagaaaaaattaaaatatcacatgtagaagaagattaattaataattaaacaatataaatttttgtattggcagcccattagcttgtcacgtgaatatgggacgcgactatttggatgagagaaaaaagaaaaagatgccatccgaatatattctcattatgactttttctttttgatggaagacaaaattaggttagctaagcctacctattactagtatattaaattgacatctataattatactaaaaatatataaaactctctaatctcttttcttttgtatttatttattttaaaaaatatttgttaataagtaaatcaggatcttgtttaatataatcttaatgagaaatattaaaacacatagtgtctcattggatttttagtcaacctatccggagtcgtcataaatgagacttaaatcaaaatcacagtaagaaatgcagttaatgacattgggatttacaataaatgtaaaaaaaagataccaaaagttaaagaggttcggtcccgaatgtcggtaatagcctactccccttgtgttttattgattttagttgcaagactcaagaacaggctcttaattgcaaagaatgatataatgtttattttctaagtgctcaaaattgcggatccccctcccaggtcatggatgaccccttatataggggagaggatcggtgcttcttgcttcatgagacgcgaccaacgcggagctacctcaactgtttctttgatttttggaggtagttgaagtctgttttttatgataatatcctgctattttttgtgggttgacaactatctttaagtctttcgtgggatttgaacatttgaaagagttactgaagacgagggtctct

SEQ ID NO: 161469 - DNA, 4466 bp, Cannabis sativa
aaaaaaaaaaaaaaaaaccgaattaattcttaataaattaatagactacactttttaaatcatcatgttgttgtctatatattttgttcctatatttatataaaattgtataattaagcggcggatcataatttaaaattgtagatagctatagctagccatttaatattacataaacacatgtatggtatatacatcggacaaagatcaacatgatcttcaaataattatattagcttgctaaaagattgttctaaatctaagaaatatattaagatatatgtgtgtgtgaaatttgatgatatataattggtacagttttaacttatatgaaaggggattagaaaaatccaaagtatagaatttattttaattaatgacttaattaagatggcattattgttatctctttgtacttaattggatttccatgttgcttgcttattttgtaggaggaaaatgtgaaacctagatcttgatgatagacatgaaaatatacattaatattgaagttaacaatatataaaacgataattatttttaattccatgtgatatgaatcacattataaggataatcttaacacacacatatgtaaatgtttttaatataaagagcgtgtgatatattgaatataatatctcgaatcggagaaaacgaggaatcgaacaaatcagaggtcaattgttgtatatattttatatatatatatttgaaatggaaatatatatatatatatatttttatatataatttggtcaacccacaattatttaacatatgaccatctaacagtactgcattgaaagaggttgttaattttctaatttttaagtgttcaagcattcacacgaacttttttttaatttttattttacattgcatataataaaaaatgacccccaattgttgagcatcgtcaatggtgctagttttctttattacattatttaaataatactttacctaattaaatttataaatataattgtactgttgtgttttaaatattaattttttttacgtacaggaaaaggagatttagttacttgctccagaatcaaagaaccagaactattttattcagttcttggaggtttaggccaatttgggattattacccgggcaagaattcccctaaccaaagcaccaaataaggtactaaaaaagttataattgattaattaaagaaataaacttatattaagttattaattttgcatattgattaacttaattattgttcaggttaagtggttaagactgttttacacagacttctcagtgttttcaagagaccaagagcgtttaatctcattgaatggaaaaatgagggaaaagggtggagtggaatatgtagaaggttttcttctaatgaagcagggtcctttagatctttccttttattcagtgcctgaccagttgagaataacaactcttgttgctcaaagcgacgtcgtttacgtacttgaattagccaaatattacgttgaaacgccccctgttgacgaggtatatattatgtcatataatatattgtttttttacatataattattatactaattaattgaactttattattattgcaggatttggaagttttattgaaaggattagggtttattgccgggtttgccttctcgaaagatgttacatacttagaatttcttaatagagtagcagctgacgaggaaaagcttagaaagctagggctttgggaagttcctcatccatggctaaacctttttatcccaaaatcaagaatgtcagaattcaactctggcgttttcgtaaacattcttcttcaaaagaaagttcctgttggagtctttattgtttacccattaaaccgaaacaagtaagtttattaatattaatattattaattttgtaggtgatgtaacatttttttatgattatattaatgtaataattaattaatgtgtgtacgtatatataggtgggatgataaaatgtcgggtgtgataccaaatgatgaagaagttttttacaccgtagctttacttcattcaagtacggctgaggaggttgaggcttttgatggtgtgaataaccaaatattggagttttgtcgtgttgctcgaattcctgttaagcaatatcttccccattatgaaacacaacctgattggatcaaccattttggatcaaaatggccaagttttcaacgtagcaaactcaccttcgaccccaacaaaatattggcccctggacagaaaatttttaattaattaaatctgttgtatcaaaataatttaatctaatatataattttataggctacaacttaattttgaatatatataataaaatataaggaaatagaaaatgtttcttagctttgtgttcaaattattaatttttgtaaagcaattaaatgagttgattgtgatatatatatatataaaaatcgtcgttgctatagattgaataattcaactaggatgagcttattataactaacaattgggaatttggcattgacaaatggatttaatttgtatttgtaatattgttttttatggaagtttagagcagctagcatcttttgtgtgtttatacaattataatacaaagtgcattttaaataattaaggaccactatattacgttgtaataaaatataatgaagaaaaaagaataattttcattttattatattgtttagttacattttaaaatattaaaatattactctaataaaaataactttaaaataaaatgactatttccattttaaaatatataaaaaataaaaagatcattttagtgtaagattagaatcaatctttttattcattttaaattttattctatttcatttctactactaattctattcccatttaaatttctcgttgtttattaataatgtgttgctacctaaataattaggaatttttcatatatattaatttatttataaaattaaaattttcggtactcggatataaaaaatgaactaatagtaatatctcaattcttgctgttatggtatttaattaacactctataatgttcctggtgagctacatatgttgggatatatcatcaccttattaataatgttgtagcgcacgagaaagttttcattggcatttttaagtcttgtaataactgaacacgcacgtcagatacatataaatttaatattattactaaagggaccaaaaattagatatgtgcacgtgtcagctgtacaaccatttgtgaaaatgttatattacaaaaatagaaaacgcacatcattattatgagcttttgtgcttatttgaaggttgtgcatgccactgccacaccaaagtgatgagctgccaatcccaccaccacattttcaattaacccatatgtacttcatgcttctcatataaaatccttttcatctattctaccatctgtcttcgattactattattatttttactatacatattgaattaaaagcctttttttacatctactcatcctctatcacatttggccaggaaagaacaacaatactatgtgtaatgtatattagtaaatagagttaagagagatatttgtaatagatgacattgattggtttgagagatttagctcaacattaaagttgaactctttcttatatagttgtaaattgttccttaatttgtttgcaataaaattcatcttaattacctaaacaaaataaccttttttattcttaattaaattattgcaaaaaggtgagcataagtaatgacattgtcattaaaaaagaaagaaaaagaaaagaaagttaggcgctaattaataattaatatttcgagaggttaatttttatttgattgttttggtccatagtaattagtttcgactaaaccctaataaacatataagttttcttataaagcaagatattgaaagcaataagctagcttatatgtaaatatgatcttatctgcatgccatttatttatatataatatatatatactttaacttattattattaattttttatattattagcattgtaaattagtaaaggtactagacactataataattaccatatatacggcatggcgaacacttggaccccatggattgaaatgatatgctttattattatatatataataagattcctataacatatataatatcagatctatatatatatatggtccaatattttacctgaatcgatacaaagatttcatttggggtagagagagtaacgatcttcttaagattctctttgcattttttctcatcatataatggctgccaactgcaggccagtctgtataattatatgctcatgagtactgcaccaattaaaatgagatagacttaaataatttaagatccttcgaaatatagtactgttgtttcggtaaatttttgggtcagttaaaaaataatcccatgtatacactattttttctaatgatcatgtatacactattttttct

SEQ ID NO: 161470 - DNA, 1395 bp, Cannabis sativa
aaaaaaaaaaacaaagcaataaatcattctcaaatcatgttccacacactgaattaggtattggccattcgggtccatccacattgacattactcatgcaacgtagacagtctcaagagtaagggtgcccttaggaccccataaataatgtatattttgtttctatacatgtttggagaaagcgaagcttccataaatcagtttcaactagctagaggggttgaagaaaatacaaaacatggtcatctacatttgtcttttttcatcaacctctacaatcttgtctctgcttaaaatatgataagacctcaaaaattgggccaatggtattcctccacgatcccactctgaattcaattctcttaaatgaaccaaaattggtgatgtggtatacttattgtgacatattgtctacagaatagtctgtaatgtggtttgtgattagtctatttagtattcatttagtctctcttttatcgaaaactaaatccagcttccttttttccttttccgtttttgtagcatatttgacttttgatgttttatgtattctttttcttctggaagaatattaaccttataaggcaaaaggtccattcattttatcatcactgcttttttttttccagtatggttcactgtatagcagcatatttaggttaatgaaccacgtgtgtggttattattgtgataaaccaaataaatcctaaaaggactatgaaattagaagcatatgcatgtttatttctattagtaaataccagaaaacaaggcgtacctttctatatagtgacagttcataaggacaaacgacactatatgaagtcccaatctagtgcaaaatagtcctggaacttaagtgggttcggcacgtgtattcaggacccaccatttttctctctttatctccctctctctcttttctttctttttttttctggggggtagtgccttaacctgataagcttcacctgttacctttgctaaatgccataatcataatagattggtcttttcttatattgttacatctgtagctatttgttgcttttatttactcaccccaaaaaggaagaaattattatgtgatgcgttctctcattgacaattcctccatttttggatacagacaaaggttacacaatatgtgggtccctttgagactttcattagaagtctagcccctcctaatcatataataatagtacatagtcatagatacatattaatatgcaatcttgtacttgtgtatcgcaaaattgaggtggaactaagaccatatgagctcatcaattaatgaatcaccaccaccaccaccaagttagcttttcctccctaccactttttttttttttttttctgaaaaaaaaaatagaaaacggaaattgtggaact

SEQ ID NO: 161471 - DNA, 7953 bp, Cannabis sativa
taatatttttttttgatagaaagttatttttaattattaaaaatatataattcggaccttaaatactacaatattaaatggtaccatctgaaaaaaaaaaaactttagtcaaggattattgcaatatattcacgatcactattctcatgttcagttactagtctcaccaatctccacttttctcaccacccaaacatatttccagaaggttaagaatggcccaggctgcacaaaacacaggtaacaaaaactctccatttccttgcaacaaccattatgaataaactggcttttgagtatctccgcttgattcaggtctcttttacgcgaatctgatatgggttttccgaataacactcaaaatgcttaattttagtttcaattcagatacataaacggtgttgactttataatagtcctgagcctcatatgtgtgcaattatttttaatcgagtgttttgttactctgtgttagcttatccaaaataatggttttaaatttgttactgctttgtgaattgttctatgtagtggttcaacaacacaaagtgatagtaccaaacaagtatggggaaaaactggtgggcttattgcatgaaactggatctttggagattgtaatcatttgccatggttttcgatgcactaaggttagtttttttttttttttaattattattattcttgctttataatgcttgtcctcttttcctgttttttcaaagctatttagttcttgaaaagtttattatattggagacattcatctattgaaaatttaccaattaccactcatgataaaactaattgactgtttgattgttaagcttaaaagaatctgtttatcctacaggaaggtagaatacaggtgaacttggctgctgcattggaaaatgaaggaatcagtgcttttcgttttgacttttctggaaatgggtaaagattttgtaatgcaattgcaatttgacgagtgccatatatttcttgttttgaatgaacaatatcgttccagcaaaaaaaaataattattcattggatgtatatgtattttcttcgggtctatactctatataaccaatcagttgttttataatttgtaaatagaactattacagatttaaaaggacttcactgaatgagattatttaacaacattctttttgttctttcacgaaaataaaactatagatgaaactccaaacttgaaagattcacaatcacaggtttgatatattttcctagtcaaagcagggtggtgagctatatagtacatatcaaaaactaagttgggccttatcaaactaccttttcattagattgggtttgtgttgtagcccgattgtggatgttggaaaagggttccatatatttgtatttgactatggattgcgtaattgcttatgctgtgtatgccttgcagggaaagtgaaggtacatttgagtttgcatactatgggagagaagctgatgatttgcattctgtaattgagcacttttctgcagctaatcgcgtaatagctggaattgttggacatagtaaaggtgcacgttttagtcctgtgaaacctttcggtattgtggaaagaggaagtaatttgcaacatcttagtcttacactagcttctaaatgaaaaacttttaagtggtggatgaatagcagctgtagattactagattacaatctagatgatgtaaaactgtgtactttcttatttttcatttctgtttcaatgtgtttgctcagattggataaacatgaaggcaatcactaatacatataattcaatgtgttatgtaacttgtccacccccatgatacagtatgtttaccaaagtctgtcattgcaggaggtgatgcggttctcatgtatgcatcaaaatatcatgatatccgcacggttgtcaatctttctgggcgttatgatctaaagagtggcattgcagaacgctttggagcagatatcatgcaaaaacttggggagagtggatatattgacgtcaaagatgagaaaagtaatttgctcactttttcaagagtgtactaagaattgtattagaaagaaatgggaaatctgtggtgggtacttgttttcctggacattctgattagagctttctttctttctttttttgtgtgtaggtggtggcagttatcgtgtgaccaaggaaagtgtgatggatcgtctgaatactgatatgcacgcagcatgtcttcaaatcgacaaagattgcaggttattaaagtagtcttgaatttcctgaatcatcaagctcattatcataatctagtttgacacaatttggcaaccttgattagctatcatcatattatgttactatatatctgtttttctcatcaaatttgttatatgtattttcagggtcttgacagtccacggaacaggggacgagatcattccagttcaagatgcatatgagttcgccaagataataccaaaccacaaattacgcattgtggaaggagctgaccatggttactcgaaccaccaagctgaattagcttcaatagttttagagttcataaaggcatccttggagcaggacaaggctgcttctagctaggttcttctttctatcaaacattgtcagatagaacggtgaacattaaaattttaccaatatattctatgctaaagagcatgtttgcttttcatggtatgatatcattgtatcaaatggacatgaatagtaacttaataatgtaaagctctctttagaagtgtttatgaactgtgagattttggtcccgtttggcttaacttctataaactcttttttagcttttagaattaaaaaaattcttagtgtttggataaaaaaaaaaagtcgttttttaaattagaagctcttttagaaaaatttaatatttgtagcttctttcaaaagaactttcgagaagctatttttaaaattaaaatagtttacgaaattcctacaaagacccatatgtcttccttgtaaaaaagtgcataatgtaacgaaaagttacttataagctattgatttaaaactgattcttgggatccaaaatgtttttcaaattttttactgaagaaaaattacactacccttacttcacgacttatgtcaaaattggagtaaaaactatgaacctaattatttgcacaaacttgtgatttttctttttaaataataataaataaaaatttagtatgtgaataatatgtagcatcttttcttggacagtggtacattcatcagtacttggtgtcaatatggaggcaacccttctcacgcttatagaatgtgtagaattttaattgacacaaaatggggatggtgtattgcaagttcttgtagtggctttcaagaaaaaaataaatgaagaacaagaaaaaaaaaataaaaaaaggctgatggtatagcttaatatataatgtactgtgttttaaattacaatctgttctatcaaaaaaaataaataaataaaattacaatctacacagtttctaatcacagctcagattgaaagctataaatggaaatcacctcactgtatctgtaaccttttctcctgaaagatttacaagtaccatagctccggagataatcttatcctgaatatccatctcccttatcctgaatatccatctcccctttaaatggagcctgcctgctttttaggctttagctttcttctccactataccacgttcatgccaagaacccgagtcagataagtgataactactgatcattgatgatctgatttgaaagctccagtaatgagagcgagctttctttatcttgtaagattcaccattgctattttgtgagatcaaatgcaattcctcaatctccaaatgagtcgtcagttggcaaaaccatgaaattacttaactttcctcatgttcattgtagtaatcctcatcatcatcagcagcacagtcatatggctcaagatatggctcatccccctcatcatcctggttcacaaattcaaattaagaagaaaaactaagccacttaatacgtgatttaaaggtaaaatataacataaaaaagatcatagaacctctgtttcttcttcttcggatgacagagaaaattcctctgttttctgcaacgagtcttcagcatcagtcatgttcccatttcttgtttcttccacctggatttcaaataaaaattactgtaaggaaggttctatcaaaccaaacctaggttcttgtgagccagtaaattatctttaccatttcagacttcactaactcaatcctctccatcaagtctgagatgtaatgccgcaatgcctggtatgataaattacaatcagattagaatattttgaattgaactaaagttaagacctaaacaccatggttgaaatatatgttgtcacctctcgtctttgcagttcaactgactgagctaatgcctgccttcttgtcaataaattcttaggtctaaaagtaagaggggactgatagttcttcccacgatagacaataattgcgatccctttcgtagttttatctatagatactagtacccctttgctctcagcttccaatgaaatagcaatgtgttttacttgtgctacactctttcctctcacaaagattttcaccaactcacgatatttccaatgcaagtgcatgttctctacggtaccaccataaactcctcgccttcctgagaaaacgcaacccagatgtttgcatatttttcaagagaaccattatgttcagaatcatagcaattaatcttacctagaaccaggaaaggtttcatgctcagacccatcttgcggaacaaaaatctctcttcatcagttaaggtttccaggtcatcaggaagctccgatggatccaaatttttctgcacctttgctaaagctttatcagctatttttagcttcccttttgcctaagaccatcaacgattataaatatgttaaaagttagaaatcgatagaaaattatgggttctcatagagttttgcaaaacaattgtcagcaagtcacttacaagagatagtctcttctcaagatgtctgagtatggatgcacgtcttgccaaagttgattcttttatcatttctttaatatccgcattgtttggctgtttaccccagcgggcaattgctgcctttgattctgcaagggttccagcaaccaattggtcagataaaactttgcttttcaactcaatgaaggctggggccatctttcgggcctgttcttccttgtcttgctcaagatctcttagctttctcctctctttcaaggcatgcgttacaacaggcggcaagaagtcatttcccctgtaaaagacgataaaatctttgtttctagaaagtactgttccgcctgttaacgtctgcaatcaaaacaagaagagtcataagcaagaagaacaaccagacaggagtgttcagaacccaatttatcatagggttagacagctttaggataaaagattaacaccccctttttttttaattatttttatttgggtaagtcatggtcaatctgttatgagtataaaaactgaaaaggcttcacattcagcagtgatgtgttagtcagtagcagcagcttccggggaatataaattggtttcattaaaagtgctcaaaaaattaaaacatgaaaaccagcttagactaaattttcttggagaaaatgtttagattttatagcagttatgatggtatacatacacctacacctcaccttgagttcttccgccatcctctcattacatgtattttgtacacctcgtttgatggctatcttagcaatggcactcctttcccacagcttcaccacagcccgagccaaaccctgtagttctcggtttctccctatgacaatttataacatacaaaatacataaggagaattgatcaaatctgtaaatacaattacatgatgcaagtatttagtacctaaagcaaaatgtggaggaattgttcttgcaatcctacgaaatgctgtcatctccctgtttcgcagaccaagttttactccatgagggagaagtctgaatggaggcttatagtttggaaccactgcaggtagcaaatcggcatcaacagggagcggctcacgacctaaccaatcgataaaacgtggtcctagctcatctaagaactggttaagatcattcaagtctgtgatatctccttcaggcagaccctttgctgaatccttagttttaactgaatccttctcttgtatatcgtgtatgggatcacttgtgacaccttcttctaagtatggcaacgtgtgtgaatacatctttatttgtttggtatatgattgtacacaacgtaagttgtagttcattcccctatacaagactactgaactgcctgatctccatataaccaaacctccagttttagtctgacaatgaacaatggatagcctacataagttactatagactccatttttgtaaaatgcaaaactccattggattcgtaatttgaagtacaaaatgattactatgactttctaagtaacataagaatcaatctacaagaatttaatgccaaaagtaccaaaaggaactaacctctaaaattttatgtgtccttctcatgttactggaaagaggctcttcaaacttcaacttcaccacttcatctaacttccacttttcatgaatggcgtccaccaaagcttgtgttatacctgcagctcccacctttgtcctctccagcattctcaaagaaacgtttctgagcctcttaagttcgtgttcgggaagcattttctccgccattaccgtgctactccttctcctattcaccttgtctccttccctcagttccaataccgaatcatcagaatcataatcagagtcaatcaaattcacattctctccattcccataaagagttttatcaacatccattgaaaccgtcttttcctcctttgaaattccatcacttgttgcttgaaattctctctgaattatgctactgggtctttcaacaccattattgccgtattgaaattctctttcaaatatgccactgggtttcttaacatcatcatctttaagttcattgaacccttcaccattttccgggatttcagtctcaggcttagcctcgcgtttaaagggtttctttccatgatcccagggagccgaaataacactactcggccgagcaaaatttactgagtcactcaacgatggttgattttccggctcaatttcataggcatcatcagtaaactgctcactcacattctccttatcctcttccttagcttcttcatcttctttttccttctgttcttgccaaggaaatttctgtctcagagacccaggtttcgcagaccatttatactgaatttgctctaaaaagcttggcctgggcttcctctttttcctctgcttcgcggtctcaaacgctacttcaactcgttcgggttgttgcaaggtatcaacttggacagcccgctgagcacaacaagttctgaactttaaagctctgtaagcaatggaggtgtgagtttgggaatggagaagtagaagatgcagtgactgagttttaatgaaattgcatgataataatgatgaggacgacgaggaagaaaaagaagttgatggattcagtgaaaacggggagagcgccatggcaatggtgatagatacctcctttgcctaccttaaagctaacaatcttattgggtcaagcccaataacaaagtcaggcccatattatttgttgtttttagtagatctaaaagtttacaatttggaagaaacatccaaattccaaacaaacataccgattaggagaaaacacttgtctcgttatgggccaaaaaattacatgtccaaacaatactagaaaataaaaacagaaaaaattacactctatactttttttttatattgtcctcttttatttttactttcttttttaaagtctatcatttttacctct

SEQ ID NO: 161472 - DNA, 4532 bp, Cannabis sativa
agagagaaaaagcctccgtctggtgcgagccgctgtgatcactgagttacgacgactcgctccctcatccatctctgagtccggagcctccacactcggaagcttttcctcctctcccacttcaaccgtaacaccttttgatccctaattttggtttagctccggctccggccagtctgtacatctctgttgctcgtggacaacaacgctgttttcaccgctgccctttattgttacgagatagtataaccctcatttccctgtgttgtcccgaggttttattattttattttggtgattaattgatttggtgggggtgtttcagattggtgggaaaggccatgggtgagccttcgtcgttgcacggtggtttcaaagatagcaaattatggaaagggatttttgctgtttccggcattatgaccaccttggtcgcttatggttttttacaggtaacatgaatattcattcacacacacacacacacacatttgccatccattttcacatcgccttttattttcttttagtaaagtgatgaaatttgtggatattttggattgctctcttcttctctctttttttttttcttttattattattttaattacttaaactgaataaattgtgggattgttgagaaaagttatgctatcttagctttagtttggtagtgtatgcaattatgtttgcatttattatttgtggatttcagtgttcataatactcaattagtatttaaatcaagatcatggtagtatgcaatcatttattacattcataattgaatagtctcataaaacctcagcttaaagattgtcttattatgtctctctagagctgatgggactttgtttcttacaggagaagattatgagagttccatatggtctgaacaaggaatttttcaagtactcgttatttcttgttttctgtaatcgaatcacaacatccgctgtctctgcttgttttttactggtacgtagtgttgttttttctttttgtatatgaaaattaggtaatctttacttttctggttgaattttcatctcatttttcgggccatgtatatttggtgtagctttgtgacatgtttcaaactatttttaacttgaatattcattttcttcattcttatttctcaggcgagtaaaaaagccttggatccggttgctccagtttataaatactgccttgtatcagtatctaacattttaactacaacatgtcaatacgaggttagctgtctccgtagtgttcttagtgttgtagatatgagaaacttggttgcaaagtttttcagttgttagcttattatttagctatactgttgatgcatttaagtgactagacattttttgttccaggcccttaaatatgtcagtttccctgttcagacactagcaaaatgtgctaaaatgatacctgttatggtaagatatattatgtagtttattattataatcaccttttatagtgtatttcgttgcttaaatacttttcagttgctaaccttgtatctggttgtgtggctatgaagtgctattctgggttaggattacggtgatcttattctttaatatgttcactttctaaatgtcaacttttacttctctataaatttaaagctactatggttgttgctaaatctaattgctttgtatagtctgagccaaaggcttctaaagtagtggatgtatgttatatacacaaggagtatgcaagcatatgcttataagttggctactcttccattctcttttatgcaggtatggggcactataattatgcagaagaagtacaagggacaagactacttttttgcttttctagttacagtgggctgttcaatatttattttatatccggtaatgattacatcttttgtctcagatcaaggtctgattccattacttgaacccaagcacatgcatatagattatttttttatgttgaaattatgttagtttgcagctattatgaggaatgagttgtacgtgtaatacccgcttctcaaatttacatgtataagaacatagaacagcaaatctcaaacaaaccagttagtctcctaacacatctatcctatcaatggaatctgcttgggccgttaaatgatactttagtattggaattgcttgtctagagttcaagacttttgtacatactgtaaggttcaggttgcttagcttaaccaatggagtaactagtttgtatgtgatgttatgtgaaatatgaccatagtttgatggacttgaaggcttcaaattcaacaatagtttcagtttcactatattgtatctacttcaatttgacaacctatagcatttgccaaaaaaatttggaggaaaaagaaaaaaccatctctgtagtgcagtgcaataagaacattgtctttttctgatctatgtaggaacataaactctatacttttcgaaggagatgcatgttttgacgattattttgttgatgatgctgaagaatctgtaaatcatatttttttgttgatgtgcgctgaaatagttttgttgtactttgattgtaggcaggacctgacattagtccatatggtagaggaagggagaatactgtttggggtgtttcattgatgatgggttatctcgggtattattttgaaacttacggttataattttcattcttaattatccatttatatttgagctttaatagtttgagagggtgttgtactgactgcatttgaattctatttccacgagtccatgaccatgtgtgtatctcttttctttgaatagatataacttctcatttgcatttagagcttgaccttttaaatgtttaaaagagtcattttagaagaagaccatccatttagtcttatactcataagtgtctgcaggtttgatggctttacaagcacatttcaagataaactctttaaaggctatgacatggagattcataatcaaattttctacacaacaatgtgttcctgtgttctcagcttgagtggtaagatccttattgccatttcaattattataaggcattttatcgacatagactagtaattaaatctcgaagtcaagagggcacacatatatgttataattgaagtactgaaattggttataaattctcctcctgtatggttgtctattttattgaccattgactgcctttatgataaaggttgtagatcactggactgagttttatggttggggatttgggagttgagaagtttctttgaaatctttctcaacttgcttacaaatatactttacatgtacatacgtgcactccttttacgtctttgtttttgccttcaggtctaattttacagggccatttactgccggcaatagaatttgtttctcgccataatgattgttttattgacattgtcttgctgtcaactgtgagtgatcatttttcatttagctcattggctaacacacccttaaaatatatattcaccgatgattttgggtgcaggtagcaacagctagtcaattttttatttcttacacaatccgaacattcggtgctctcacatttgccacaataatgaccacaagacaggtacttttgaactattcagaacataattattccctttttcatcattagttaattggctatttcacaaatcatggtttttgacttaactggtttttgacttaactttttggtgataaagttggtgagcattttgctgtcatgtttgtggttttcccaccctcttagctgggaacaatttatcggagcagtaagtctcaagtctcaaatcttagtagtactttttatctttcctgattagcagtaacattactttggtgggatttattaggtcatcgtctttggttccctatatgccaaaagcttcttgagaaaagctccacagaaacctccaccttcagatgaaacgagtaatgaagtttctattcctgtgaaggagaacccttgacaagctacaggcttcatttgatgttgagatcttggacttggtaccgctctctctaacttttatttggcaagcagctttagtttttaaaagtgcgaagctgcatggtagaacgtgttaacgacctcagatcgaaggtcttagaacttaatctaatttacatagcattgaaatggactcttcttggtcgctggtgtcttcagtggagaccaagagatattctttgattctctagtttcaaaggaagtctaaattatagattgcctaaggtttcttcttttttcttcttttttttggaatttaattgttttacaaaatatacaattcgttgctataggaaaatattttgttttttcgctttatttttatgtaattacttttagcattctaccttgctcaatattcacagtaaattatttagtgcattaatttatttagtcttcttcttaattttttgaggctagaatggacactacatttatatggtgatgtttgaaatagtaaatgtgcaacatttacactatgttgagtgataggaaaagtagaggggaattacttcctatactgttttttttaattttttt

SEQ ID NO: 161473 - DNA, 3228 bp, Cannabis sativa
  modified_base (1955)..(1970): a, c, t, g, unknown or other
  modified_base (3161)..(3164): a, c, t, g, unknown or other
ctaaattcaattccaataaatgttagaattaatgacaatgacttaaagggttgttttggtagtataatactatcaagctataatcaccaacattaatttgtcattgttcagccatttatataaaaagtacagtagaacccatcaataatgaaatgcgtaatgaaagtcaaattagtttgagtgaagaattaactacaaagtgtaagaccaatatcaattttctttcattttctttttttagatgattctttctttaaattgtttcctctctaattcttttgaatttctaatataataaaattattaagtgccatacgtggtcggtagtcccctagtaatttccccataagatatatatatatatatattggacgaaaaataattaaggaaaaatgtactttatttcaacaataaaactcttcatttaattttatttttcactcattttccgttcctctatttgaagggataatatcaaacatttgaattcacctttatggcttgtgtattgaatttgtctgttatacttataatagtaatatttaaaaaatagacagataccttcctcaaaataaagtaattgtaacaaaaacaccttacttacaattcaacaaaaccgtatttttttttttccattcctttaaaacagttatacaagtaatattcaacataattatcagaaaaactccatcatagttattatttaatgtaaagttatttacaagcactggaaaatgacagaattggtaaaataatcaagctgtgagataatgtaggggattttatttccatatacagcatatggtaactttgcaatgcccatcttcccaactgtttttactaaaatcacatcccatcctcactcgcccttctaagcgagtacttcacaaagttccttacttttctcacattaatttattacacatgcaatgtctttcctttttagacaaactttgacagtgttgtatcacaaaataattagtctttttttttttttttttaaagtagttaatttatttttatcaaaatgacaataatagcgcttgatttctttatttgtttttttacttatagttttacatgtattttagtttttttgtcggtctttataaatttattatttaaccaaaggctaagtatgttattaactctttttttcttatgttttaattagttagttttgaattaattttaagttattttttctaagtttaatcaattttattatttaggttaatttggtgtacattttgggtaaacatattagtagggagaatcactctatatattattttttaatattctttttttatttttttttatttttacagtttaaattgtttcagaatttgaattgctatttaggttgcttcgtatatttttgtttaaatacaaaaaaaaaaaaaaagcttttaaatgtaaaaataaaaaaatcttattattactcatatgaattgttgcttaaaaaaataaacatatattctttttacaaaaaaaaaaaaaatatgcatattgtaagaaatttatgacatgtttggttttaggtttcgtaatgaaatgcatgtatccattatcatgtttactttttataatctttttccattataatcattattacattgaatattgtaatatttaggagtgtttatgggaccacatctaatatttttaggtatattcagatcagatccaattatatattggatgatagatttttttatccgatccaattaatttcaatcatccaatcaatcaaacatttattggatgttcgattagatcaattttatctattggatatattttaaatatatttattagttaatttggatttattcaatattttggacctagtatttttttggatcggatcggatctatccaatattttaagtccagtatgtattggattggactcgattcatctaaactaagaaaaaaagagtaaaattttnnnnnnnnnnnnnnnntatacatatatatatatgtattttacatataacattataaaaatataattacttatccaaactaaatgaaaatactaattaattcgattggatgttggatgtattaaatttttaaacaccccatctaatattcgatccgatccaattggatattcaaaaataatatctaatttgatccaatcacaattgaatatctaatatttagcgatcgttgtaattaaatcggtcaactattattaaattggatcgatttatgcacacatttacaaagctatgtaatgatcattacattactaatttatatataaaataaattaatttaaaataattaaataaaataactttaatatccttatatattaactttaccaaattaaattagagatatttttattaatataccatttattttattatattttcactcgagaaaataattttgattccaatactcttttaaacaacaaaccaacatctaatttaatcatattactattgttattgttattccattatttactattactattctcttacgaaaccaaagactatagctagatcaacatagaagagatgtataaggtaaaggtcaaattcacattgacaaaattacaattattgtatcttaagctagtgtcatttattttgtcattgattattttgaaatgtcaattaattatgggaagacttgtgtgctctcatttaattcatttgtataattgaggtgaatggaattagaatatattttacgggcaactcattccttcgtcagtaacatcatgatctagtttcattcatcgtctgactccatctctataatcaaattttgttccttaagtcttattcaattaagtcatataattaatatacatctttatgtcaagactcaaataaaagaaaaagactaatttagatttttacaccctgaattgacatgtactaaatcatgtttcttgaatttttcaggtcgttaaaaattcttctcgaactattgagattgttaaatttaaatatttttgtccaattttaccgaacaaaatctgatgtgggtaaaaatttaaatgacacaattttatacttttgaaagatcaagagtcatgatttagtaaatatcaaaattcgaggagtagcaagatttagtatatacatatatgggtaatcgtcatattaataaaattgaataaaattagnnnnaagtccttaaatctaacaatttcaataattcaagggaaatttttaactaggggtgttcataaaa

SEQ ID NO: 161474 - DNA, 9337 bp, Cannabis sativa
  modified_base (9268)..(9299): a, c, t, g, unknown or other
tcagtttctgttaagttgagagcaacagagagagaggaggttagatcatccattgagcagacaaaaagagtgtgaagtaagacacaaaacagagaaaaaccaagctgtgattgcaaagaaattgtctttagagaggtgtggaaaaagtttggaaagcaaatagaccaatagatgcacgggtaagtgaggatggacgaatgagggattttgagaatggtaacagacgctggggataacaaaactaaaactaatttactggcagagagagtataaagataagtaatatataagacacacttatatatttatatgaactcttataatataatataatataaaatttgaactcattattttaggcttctggttaagctttaagaataaggtcccggccccagcaaaataaagaataatgaatgcaatttaatttatgataccaaatatatgcccaaacgaatattgcattggagtgaataagagaatctaatttaagaaccaggaaacatcctctttttaatcttacgaatgaagaaaaacaaaatcaaaccttttccatattctagtattttcttttttttttttgaacaatttatttttggtattttttagcatcatcttcacaaacataaaaataaattacgtaaattggtgaattaatattcaaagggtatctactgttattaattataataaaacagataattatagaacaagaaagaaagaaaatggtaaagagttaagaacaatgttcatgacaagcgacaacatacgattaacaagcaaaatggacattgttttggagacattaaatattaatttaaaaaggaaaaaacattttcatagccaaatttcgatggaagaaaaagctacgccatcatcatcatcatcagcagcactgataaaatccattagtgtctatacaaaggttccgtttttctttttttcttttttttttcaagacgatttttcatgactatacaccaagaaaactcgaaattaattaggaaatattcacaagagttagaaagatcaaaggccactgattttttaaaccccaaaattttttagtcaaaataaacactcagcttcacttcactagctccgaaatccaaccaacgtcaggtgctgcagctgctgagtcgtctcggccgagggagttctccctactgagtttagcgtacattatggctcggatattcttcccagactccaccctctccattttcggttcctcctcgaaggtctggtcccaaagatccatggcacccagctggagcgtgatggggtttggggtcggcgtcgaaggagcgctgcagaatccgggtcggagcatcgaaccacctcgtggagagataaacccagatcccatttggaaaccccaaggagctgaagaactcattttgatcttaccaaggtgaagattcctcatcgaggcaagtagttcattcgggctatttggtgaagccggtggcgagtctgacggtggtgacacaggcggagacgaaagaaaagagtgacgaatcggcgatccatcataagactcgcaaggcccatttgccctcggactctgctgtggcaaaaccctaagttgctccgctgtatgagcaaaaaagcagaccctccggccacaactcagtccatccttgcatggctgagtacggtaacgagcagggtggagccagcactcaaaaaccccatgagcaaactcacatgagtcgccattcctgcagttccctttacgaaactcagggcatgctatgccagaatagtggtgtttccgggggtccctccggcgagccttttctccgggatgtgcaaacggacattcagtccagtcatgtgacctcgcccgtccgcacctcctaaccttgaactcaaacatacggaaatggtcacaagagaaagagtcggcatgaacatccaactcatcacccagcgaatcagactcaccatgcaagaactcgttcgagggaaggtaacggtagagagacgaaaacttctccaataaatgatagaaatctccggtaccggcattactgttgacggaaataggtgatgagaccccaccggccattggatcttcatatgggtcccattgaggaattcggacggtgggatttgaggggtttggttctcccatcatcatattggacaagcaataataagaaactggtttgggaaagacgggttgctctgttatatatataggtatatatcctggttctaaataataagggtttatagttaaactctggtgtggttaaaatttaactgtgatgcggttaaaatttatagcaagcgagtaatgtatcgccccctttacaaccgcgagagtcgctctagtctctacgatgaaagcgcccatcatcatcgtcatggtgcttatttatttatttattgcaataatttaattttatcttacaattgtgataataataacttttacttttttttttaattattatttgtttttaaaaatgagaaatttcaattatctcatcctgggtcattaggtttcaccctcttacattcaaatatacgtctccattataaaaataatgatcaaatctaagccaataatgacagtatatcctaacaaaataaacatttataacattcaagccaacagaaaattaaggttgaccgtaaaattgttattgacataataataattgttattttaaattattaaaaaagattgctttcaatgattgaccattttatggttaattgaaacgaaagatatagaagaactttatgggattttttaagaataaaataaaataaaaacaaattgacagcaaaaattacacattcatgaaaatatgcgcttcctttaatgaatttatttatttaattttttttttttttaaaaagaagcattattgtataaatgtaaataaatcagatctcatgaccataaccaaattgtaaacaataaaaattaaaagatttagaaaccttaattacagcccaaaaaagtattcataaggctcctacattaagctatatatttatcaatttcacactttgagtttaatccttagacaactttattaactatgtcaaaatcgcattcacaataacaaattacaatcctttctctgttgcaacctccaaagccaacagacaaactctagccaccccactaagagcattagcaaaatgcatttgtttgatactaatccaaagcaccttctttacatgatctcgagcaaccactaccaacatcatagccctctccctaaccatagccctctccctaaccgccacatgacagttaagtttgatctaatccacaggtgaaggagtcaactcggcgacctcatgagaaggttgtaattgagataaaagagtgaccatattctgtataacaataaataataaaatcaatattataaggtatgctatacaaatggttattatgtacattgttatttgtccctcttcatatagtgttaactacgatagacgcatataaaaatacatatcaacattcaccgctctcctattcaaaatgcaaatgaatttgatataaacccacagtctagtcttcgattctgaacaggaatgagacctcaaggagaaactctccatagatgagaagccatattacaatgaagaaagagatgttccatagttttttcctcttttccacaaatcaggaaagaggagtcttcaatgatcatccattctctcagggtagatcgaataggaagtgcattggatagaatgctccaccaaaacactttatgtcgttaatgcatcttgttattccatagtttattccacaaagaaggattgacatgacagtgttagtttctctcaagagcctgcaaaaggtaagtaaaattggtggagaattcaccatttggttcctttgtccaaacccaatgatccctcccttaccctgatggcttttctctttccaatatgattcctactgtatcatgatcatacaacctatttagttaaagatcccactatccattttcaaacaataaatcctctacagtcgtaaagcctggagtaggaacaccagttagagttaggcaaaaaacattaccatgggcaacccatagatctttctaaatattgatattttttccatcaactaccacaaagcaagccccttttctctaaacatcttttgcctaaaccatattcttctaaaaccacgaatcaaagctcttgtaattgcattgaagaaaaggggtactgttaaggtatttgatagctagcactttgcaacataaggattgatctttgttaatgagttaccattcccattttgctaaaaaggctcgattcatctccatagttttttgaaagcctaaagccccatgagacttaggtaggcaaattttatcccatggtttcctttctcatttccccactagaaatcctagaccgttccatcaattattgatgccgactgttgagaaagttttgtagtttgcatagtataaatcaggatggacagaccaactgatttaataagtggggcacgacccgctttagaaaggattttcctttccaaccttggagctgggaagataggttttccaagataaagatgaaattagcatccttatgacaggttctaaatataggaaactctaagtatatgatgctttcgtttaggttttttatgcctagaatatctttaatacccatttttcattccttcaatcgtgttcttattgaaaaatattgatgttttaagcatgttaactttctatcgtgactaagaacaaaatttttccaaacaattccaaaagtgacgggcttcctcaatattagctcttgccacatggataaggccgcccgcaaagaaaaggttagataatcttggcccatgcctactcaattggattcccttgattctaccactatccaatctctcctccaacattgtagcaaggatttcgaccgctgagatgaaaatatacgggggaagaggaccccctggtgaatactgcatttggaataatctttccaatcggccccctgataagacaaatattgagcgaagatgttgtaataaattgatcgggagatccaattacagagtttctccaagatcctataactttccataacctattctacaaatgaccaactcaagttgtcataagccttaaccagatcaattgtgaccgtaagaaaaccttccttacccttttaaagcttgaaagaatggatagtttctttcgataagacattattgtcctgaatatttcatttatggacgaacacaacttgagtggggaaaataaatctaggaagcaaaggcatcattcgattagaaataatcttatatataaatttatatatgacattgcacatggatattcatttgaactgggacaccttctgagggtgtgggaccttcagatgagcaccacattagtcaagttaattcccttgtgcatcgtaccccaactaaagaaaacacctaagcataaaagtcctcaccaaccatctcccaatagtgtttaaagaagagcacatatattccatccagaccaggaactttaagactacttattgatctcgtttttagccaacgatgctgcgtctttaaagcgataagataatatgtaataattaatacaattaagcaataagaatacaaaaatttatagaagttctataatgaccactattaacatcgcttttggccaacaacactgagtcttgaaagcaatggaatcaattagattcaatgagagtatagttaatattaagcgtaaactaagaacacgagatgttatagaggttaaaccctattatttggtaatagattacttccctttttgttttatttaacttgtgagtagagaagcaagaacaacttgatctctcacgaaagctttacaggaatttgagcagcgtaatagctctctcagaaatattatttcagatcccttcataatagaattgttccactatttataggggataattacaataaaaattagttttccgaaagttgtaaaaccatgaaaataggaaatgactctcctaaactgcgcaaaatatataagtaaatcctcttaaattgggatatgattacatataaaataggaaagtgtgtttaaaaaatctgtctcacgcattttcgcctagccgggtcatgcgaggtgctgattggatctctccgaccaggtcagtttcgtccatcctgtacggtgagactttccttgcttgtttattattacatctgacatggtgtatgccttaggtggacacttcaaaagactatttcctcccccaggtctcgatgccatgatacgtgtcacctaaagaaacatgccatatcacctgaacaaaattcgagataatatttgcccctcaagttcacattggaacttttttattggtgcgtggacttgcttggcttaggtattacgtgaatgcagtgacacgtgttgaatagataatcatggaaaactaggttgtcgcttcaaatcttttggagcatctttttacatatttgatgcatttaatgttctgatacgtattaccgtgccctaggggcatgcactgacagttatactcatatagggtagtcattgtaacttttggggaaacaaaaatttaatttgggtgccaaaattacagttgtatcccctaaaattcttgtaaaaacgaaaaaagctcatttggcatttttactctttttaaacctctcgataaccagagaacactcttattttctctgattctcaagaacgtatttggggatttcaagcacttaacctcgtttttagtctcagcttcatatatttcaaccaacaatttcactagtgagtaactatccattttatatgtatttttaccctattttattacattcaatcttatatgggaaaatttgaatatatgctattgatgtttttcactgtttgaatttaaattaaaatttattctaattgttgttggagaatatatttgtacatgatttaataactgaattatcgaacaaatatatattcttcttgaaaaaattcatcaaattgaggcttgtacaatactttagcgatttctgaggttaacttgttcttgaacatcttcacaaataagaaaaacaaaataaatatttttgtatttaattttgcgtggtaaggaaagattttttttttttttttatatatataagaaggaaagatttaattgagtagtattatcccatggagattaggttaggtgttataggagtagaataggcagaggatggagtagtagtaggtaggtagggttggtccaaaactgtaggagaaaatagacaaagtaattatagataaattagacaaaaaagaaaaagagaaaaggtaaatgggtgtgtgtgtgtgtgtgtgtggagtacaaaaggaggagaggagggacaaggtataaaagaaaatctgtacggagtgcaccacctgtaagaaggtcacgtgatgcggtgggaacccatcacgtgatgaaaaaggcacacgtgtttgattttgttttgaccctcttcacctaacatcccacgatttctaacacgcggtaacacatacaacctccgcttacccatacccttctcaagatcctcctcctcacattcattcattctcacaaacaaatccaattttctctctcttcaatattaaaattgagaagaggtaatttatttaatttatgtatattagcttatattacattatttgtatatgagaaatgttgaaagtattagtagtgtctaacatctttaagaagtatcactagctgattgcaagacgatatatctagaggtgctaatcatcactggtgtccaataacaatactctttttatttttgtatacttttttagagtatttgtcatataggagttcgaattttttgattagtgcacaaaaactagcgacgatactaaacaaaaaaaagagtgttggtgctaaaaaatttgatgattgtaggtataaaaatcaaataagtatctctaactattcatttaatttgaaaatatttttattaagaattttattaatgaaaacctattatttagtgtaggactattgtcagggctgtctcaaattttttggaggtcatgttctaattttaaaaagtaggcccctaagaaaaaaaaattataatttataaataatattttataatataattatattacaaaaatatattttacacaattaaacacctaaaaactcaaacaattttattaaaattgttattatttccaatacaacttcaacatatcaacattctattcactatgtagttattaaatattatggaaaaaacaatttaaaagggcattaaataaagaaataaatttattgttttttttttaaatttggcatgatagaatgctggattgaaaaaaaaaattgaaaagtaacatgggcctttttaagttttgggctctgttgttatcaaaaaaagtttggggccctgtgcatcagcacttcttgcacgggtacatggccgaccctgactattgtgtgtctaaagttagcaaataatatttcgaatttagttacaatattatttagtatagtattaaaattgaatgtttaatattataagttgcaaatttaattagctaggatcgttattgcgatgaatggcgaatatgtttgttaaaaaagtttgaatatcttaaatattcatccgtagtgaattaagttataaaattaaatgtgtacaacttttgaaaatatggtaaattatgtattgttacgtgatacttataattattttatattgttatggactgtttttaataattatttgtagattcaaattttgtttgcatgtataattttgtttataataaattataaactatacactaaatatttacttgttaatttcactgtttagatcgaagtagtcagatggtcaaagacttattgtttactcaaaaagttggcttgatgaaatctatattatttttgacgtgttgcatgaaaaaaaccaatcctgggttctgcatcccaggataggacagtgttacctgcacactgggaggcaactaggtaagcaccaagatccaacgaagtcgtttctgagagtcattcaacaagtaggtcgcaatgaccgcaaaacgatgaaatgttaagatgaggatgacacctggacatcccggagctcaaactagccacaatacaagtacttggcccccaagttgacaatctgtgccctaacttgcatcagtttcggttctcaataactttctacgtgcaatctgattatgttggaaattattttactagnnnnnnnnnnnnnnnnnnnnnnnnnnnnnnnnacaccctaatatgaattctaaaaacaatgaaaataaac

SEQ ID NO: 161475 - DNA, 7344 bp, Cannabis sativa
tgagagaaccttgtatagctgcttaggctgttaattacttccaaaaatgacacatatggattctccattggtccaactcatttttttttttaatttaattatgaattttaaaatagtcaaaaactaagcaacaataaattttaaaaaataaaaacttaatctaattaataaaaaagttataaaagcagatttttatattcaaatcactttaaaaacaaaacacaaaacctcaactacttatcaatgaaataaaaaaaagcaagaaaaattcaaaaatttataaacacaaattcaagatttaatttgtatatatacatagatggagagattataccaagaatttatagtcgaaaagaacatctagtgagccatatacagtaatattgaatatgttaagctcaattcatgactaaatgattgtaatattgtatatcttaatccataactagcaagcatgctaatgtgattcattaagtaagcccatacaaaaaaagtttcaagtttctaatttagaagaagacattaataagattatattgcttaataaataaaagttacttccaatttgtgagttatattgagattccactaatatacacaactttatacatattgaaatctttgattgtaagattatggtctaaacaattttgacagagtaacaacatgttacacacatttatcaattaatgaaagaatgataatttgacaattaagaggataatttgtgacctacattatgaattagcataagcaccatgaaagctatttgagttgttcaacttcaatcatattctaaatgaattttctatgctaaatttttatccaaaatttatgatttttagatcaataccttccattacaaccctggaatcataaaatgtcaagaaacatgaaaatttcccaaaggattatcttaaaatgaacaaaacactcaataaactcatatcaaaccctagttttgaccactcttatcttgacattgaatttctctcaaacccctcaaccaaatttcccaaaaaaatattcattagaaagcttaagtcctaatctaaaacatatccgaaccccataaaaatatttaaacaaaatctcatgttataccaattagaaatcaagttaaaaacacaccccaaaagcttatccccatctctaacattacttcaaacccttatccacaccttcccacaagatacccttatggaccgttgataagcaaaagatccaaaggcccacatttaaactctcggtgtatagctgatccgtgtcacattaatttcaaccaatcagagctcaccatttcagtgacctttttattatataaatcatcctccttaactgtcgctttacgtaccaaaatataactctcaactctctattttcaatctaaagtctcttctctttcttttctaaagatttcccattcgagtttccgacttgactcgctgagttgaatcatgacttccgaagctgttgttgatgtcgccgtgtcggtgccggagaaggcaaccaaggcctcgaagcccaagaaagctgtggcggcgaagaaagccaaatcgaccgcttctcatcctccattcgccgaggtattgaatccgtattaatcgccttttatacggttatcattttttttttgttatttgttttagatctaatatgatttttcttattcagatgattaccgaagcgattgtgtctcttaaggaaagatctggttcaagccaatatgctattacgaaattcatcgaggagaaacataaccaattacctcagagtttcaagaagttggttctttcaaacctgaagaagcttgttgctgctgaaaagctcgtgaaggtcaagggctccttcaaggtttcatctgccaaatccgccacgcctaaagcttctgcaccggcgaagaagcccgctgctccgaagtcaaaggctgccaagcctaagtctaaagcagctgcggccaagccaaaggccaaaaccgccgccaagccaaaagcagccaaggttgtcgcaaaaccaaaggctgttgcaaagccaaaagccgctacgaaacccaaaccaaaggccaaagccaagccagcggctaagcctgttaaagccggagcccgatcatcgactagaacggcaccgtcaaaggcagccaagccagtagctaaggcaaagaaggccgtccctgtgaagaagccaaagagcgttaagaagtctccggcgaagaaagctaagaagtgagaagcgtcattaatggtggacgatagaatttgaattatgtaggggattttattgtggttgtctttgtaaattagttgcttattcgtgtttagtaatataatatttagttttttaattttagatacacgagatgtatgtctctttttctttgttttttttttgttttttaattgttttcgtttagatttaggtgtgtaatttgaaacagtattttgaagtataaactaatccggtttaacgcttcaccagtcacctttattggctattattatctgttcaatttccgttattgagctttttaagaaattaatgtcaaaactattgcataccaaaaagcttaaaacaaaaatctggtgttattcttcgtagattaagctttaattttagtttttcaatcagaaatttattttagtttgttttgtcggtgaaaccgcccattaatatcatattgtttatctgaaaaaatatttgaattaagactttatgttattgaaatttttcaccatggcgggctagtttgttctttgtagattacattaaattggttttattaattgatttcaatcacactaaaacacattgtttttttttgttatattatgtttttgaagaggatagaagatatttctaataatttatatttaaaaaacttaatgaaagctatttttttataagttatataactaatacaaagttaatttggaagggaaaaaaagaaaggtgaacaactaatctgacatcgtgtacgtagatggtgtatgtactttcggtcataaacagtgccgtactaaattcttgacgtgtatgattttttttttaataattcagtttataaaaatttatttatttatttatttatttattgttgttaaagtaaatcacatttatctcattgttaagaaatacaaatgctaaaagatttcaggtatcatatcatttttattccaaaaaaaaaaaaagattgcaggtatcatactactgattttggtataattcaatgttatttgtaagacatctcttgttgtgttgggaaaccaataatgcttaattgtaaagtagttcaacatgtgcaatatttcagtgtaatttgtaaatacacatcattaaagaaaatttagattgcttgtattttattcttttcaaaattaattatttacaatatggcagtcgtgtttgaagtgagatacaagaatgttacttttgattaaacatatatggaactcgggtcactttgcaaaaaagaaaaaaatatggaacttgggtttcttcaaaaagtaagttttgactggaaattttcaaaaggctttatatgccctattgtaaatctgttaaaagtagagacattctcattctcatttgaaaattaaatagccaatgcttttcaaattgtctactttagaacatttcagcataatgtaatttcttttttgttatttttttttaaaaaatatataatttaaaaaaaaaaaattaattttcctactgtatatacaaaacaacaaaagaaagaaacaaaaaaaatcttctttgtaatgctttggtgggacacttttatgtggtaagttgatactccttgacttgattgctttgctttctagactccatccctggaaattgtccgatatcatgtccttccagtggttgaaactcggtgtgtaacccaagagcaaattcatcggggactccagggttctgaaaatagtctgcaatctgcaatttatttaagaattgaattggacaccaatggttaatcatccatgtttgtggtctcaagtcgcaactactagataaacaccataaataatcatatatcttcttggctcacggtcagactattatgttactgttctaatcaagcttaaatacaaggaaagaaagcctttgttaggccttaggataataaataaaaagggtaaacgggtaactgtaagggggtaggctatacgaattgagccgtagatataggagatgagattgaatgggaggtgtatggaaattgtgtagaattgagctttggctcttgggagagttgaggtctctcaaacaccagtccattgttcttatccctattctatcaactaatagcaatatcaaatctgtccaccattttctaactcaattatcttccatgttttggcctattttctagttctttattctattaatatgttctaagtaatttgggcagcagtaagttcttatcagaattgtgcttacatgattggctagagccattccgcttaaggctgctgactccatacttgagccaagaagccagtcaccacatatgccggctcttccgtaaggatcgaagatgcagggtataccaggtgtattagttgggagagctgcacccctgcagacagacagacatcaaaatataaggattcctatttttagaaaaccaaaagggaggggtacatagaagaaagacaagcactgtttttttatcgtgatcataatttgcatatcaataatcaaaatgcttacgattaatagttggatgtttgtaagaagatcgtatcaggaatacagataagattaccgggaagaaatgaaaataacttgatctttgagagttcatgtattatgtctgtgtctattctatggatattgggcaaaatgtagccactttaattgagtctgaattttacataaacgcaattaccaatagcctcatccaattcattatagtttgaaaatatgcagaagccaaagtcccaataaagtcatagtgatagcaatgcaaattataatgaattatccaactgtacttttagctgttatgttccttaccataattgcagtcgtgtatacgaaggtttctgaagtgagcctctggttaatcctagagcatcttcaacaccctcaagcattcctgcctttaccctctctgcagtagcatttggtatattttcctgatatcaaaacaatctctgtattattatcatatgaacttgattgtgtttggactatgtcatatcatctatttgagtttcatatatttaatgagttttaaatctagagttgaagttgctatatatgttgtaaccaacaggagaatgtatttgagtaaattaaaacctgcggaactttattgtgctttccataagctgcagtacttaagaaggtccaacagtcagggccatcactattagagcctagaagtttctttgtattatttgccatccatgagacagaatccacgccctttacaaatgcaccttcaaaagataatccatccctttcagggacaagaagaggatcatcgaatgctgcaaggagcgcccatatagagctcaattccaacctctgccaacattttgaacaacccaacaacaaagaagtgtaaaagaagggttattttatttaaccatggagaaaagagggggaaaaaaaagagaataacatgaacatattttgcaccagatgaactcaattttaaggcctaccttcatctgctttgcaattagtggtaaaccagataatgcaagcaagcgatttgcacatttgcctgtgaatgaaacaaaagtgatgattccaaaagaaacataaatggtaagtgtgagataatgaaatgaatccacaatgaggaacagtttaccctaccattatgagcaataacaattgcatcaaacttccccttaggctttccattctcactcaagtaccacatcccattataaggttcgagtttacttatccagcagggtctcattacatcaaccatgctggtctgcaccaatagttgacatcagaatgagctacaaaattatgggttctgaacaataacaagacaaaactagatttaaatccacttcacctgggacaatattgagtcagcaaggaaacgcatgccattggtggctacatattttggaggagaagaagtaagtggaagaaattgacctccatgttcaagctctcccactgtaccctgccattgttgaacaagacctccatctgaccaaccctgaaccagctcagcaaaccggggatcgctcacagagaagaattgagccgcatggtcaaaaattagtggctgaggatcaataactctggttcccattcttcctcctagaccatgaaccccctagataccaaaccaatatgtgaaattctgatgaaaacccgatcaccaagcccagaaactgacagcaatagagttttagacactaagtcaagaatatatatatataactaatactatgcctccttaataaaaaatttagtcacacgagcgaaaaatcatgcaaaaaatgaaaccaagataaaggctttcaaatttcaacaacattggctgcaaactctgcatttgaagttgtaaatttctaatacagtacattctatagtgttgcataaacataagtcgacattcacaaaagacccaaatactccaaaagctagaatcatcctaaaactaaaaatcagaactagacaatccccaaaatgaggaaattcatagaaaacacatataagacactagaattaaagaaagtcccgaaccgtgtcgaatacagtagagcgtacaccgcgtttctccaaatttagagcacaaaggagaccggccatgcctccaccgatgattccaacaactgggtcatcaggaacgggagtactaaaggtgacctgctcttgtctgagtgtcttcttgagaatagaccttctggaggtaccgtaggctgatttttttcggaatttggaggtgggttttttgccatccatgggtggtggctttctgggtttgggttcggatggggaactgcatgttgtagttggagaggttctgcgaagcgtgtgaatgaaggtgggttttgatgagagtgttgcagggtttaagggttggagaaagagagaggcagtaagattgaagtgagcggagcagagcataactttttcttttttgaattctgagttgagagagaacaaagattgcttgggctcagcttcagaaatttggagattaaagctcagaagcttagaagtctttgtcgatgttcttactacttgctgcaagtttacgtactatgaatggatagaacatgctctttcttggttttaaatgggaaattatatgagactttcaaataacactaatttttctctctctctctctct

SEQ ID NO: 161476 - DNA, 1043 bp, Cannabis sativa
gggtcagcttaaaaaatagctgctgcctccaaaaaccccactgcattattatgcattaggatcatcagcctttctcaagtctcaatcccaaaaaacatatggactgtgtacagaagtgtagctacatacatacactttccaagaggcttttactttagctccaaattgtaaactaatttagtgaaaaagcttttaggcaagacctgggaattaagtattcccaattcccatttaataaaaaaaaacaaagaaaagccataatttaaacactaaataataagagaacaacatagaaaatagtctacatgccttgactaaatactataataacttgatatattgtactaattagtaattaattcactttcaaaacaacacaaaagaataagaaatcaaataaaaattgtcatttcccactagtagtacatgtacacagagatattaggggaaagaaaacaagcaaaacaattctcaagtttcttcctttcaagattttttctgaaacctaaaattgaactatcaccagaaccctaattactcaaaaattctttaaaagtgttgcaacaccaggaattggggggtagaaaacgacgactaaacccgtgtacgcgggggactcccgacgaccgaaagcaacccaccctcggcagcttcttgctcctctgaatacaaatactctatgcctctgatgacggaatgtaatccaacgagcgcggcaccaatcaagaccgagatcagcacattgagccacacaccggtgaagaccagggccactattgtcacaacgccgagaaggagcaaaaagatgcggtcatcgattgtgtagttaaaaacgacaattggggtatctcggaagaagtagagggcgaaccaagcgacgaaaacgagcaaaaaaacgatgagggaaagcgggtgccagaggagactgaggaagaggattaccagtacaaccatggcgtaattgacgcggaagtagttgaggttgcggttgattcgggttgtggcttctccgaagggttgagggcggggaaaggcggaaatgg

SEQ ID NO: 161477 - DNA, 1534 bp, Cannabis sativa
aaatttggcaacactgaagtattctagggcctataatgagagatcaagctagagactatcatagaagggtcaagtcacaagaatcatagttgcttaaaatttgaaataccaggaagtcgaccatcagatgcacaaaatatattttcccatgtgtcaactttccatctaatgcatttctttagtagttgacctccccataagatacctttcaatgtcattgaaggatgagatccaagttcaacttttaagaagccagtatttgagtaatactgatgtctaagtaatgtactcaacaaaaagtttgagtttaagtgaattctgtaagcttgtttatccaataaaacctaattaaaatgaacaaagtctcgaaaattcaaactacttcatattttgatcgacatattttttttttatattttccaatgtgtaccagtatatgtagcatttgattcctaccaaaactgattcattattttttcaatttgatcaatcaaaccttcaggtgattagaagcaactataaattttagaagaactttcttcccaccaataaagaaaaacttttcttgccatgaattaagtaattttcaaattctatatgtgatactttgaaaccaaatcattttatgtctaccaaaataggatggtaattcgagatatttttcatgaagtggttggatacatgcatccttaaaatttgatggaacatctctttgtcctctcttcttgtgttaagagagaaagataatgatgatttatcgtgattaataagttgctcagaggctctgtagtaaaggtccaatgagcatttgagagcaatggccgaagaaagattaacctttcatatagcataagtctatcatttgcaaaaacaaaagagtgactgatggagcattcctaatgattcgtaagccatgaaggttgccttgagtttcatcgtattgaagtaaccaggataaggtttctgagcaaatgatgaaaagataagaagatattagatccctttagtgtaatcctctctcagtattaatattaccttgaatttcttaacttacctaaaaagaataagaaactgaggtaatgcaccttatgataagttgcaccagaattggagaaaaacccattgctagcatattttttccaaggaaattctatttaacatgatcgaaagctttcctcatatcaagcttcattgctgcatatcccactcattctcttcttatgtttttttaaagagtgcaagagttcaaaggcaacaaacacattttctgttattagtcgccgagaaaggaaagcactttgggtaaatgaaatcgcattagatagcaatggctttaatctaaaaacaattgtctttgaaaccagtttgtacaagacattacaaaggctaattagtttgaactgagatatatttttttggatttttgacctttgggatgagtgtaatgagtattctgaaaaaccgtatttttgcaaatgtcaattatatatacaaaaatataaaactgtatacgtctgcagaagcagaatgtaat

SEQ ID NO: 161478 - DNA, 2055 bp, Cannabis sativa
tttagagcaacttttttgtgtggtggtgttttcaatctaacccttcaaattacatttaccaatctcataactaagtctctgtccctactcattattagtatgagaattttggggtttccaaatgaatggtttgtgattagagttggctatgaaaatgaaccgttcgattcgattctctttattgagatgggtacaaatacaatacaagacatgtgaaagaggttttattaaggtttgatattatcttttattttattaaaattttaagaaggatttaattttgtattgaaagaaaataatatccaacagtttctaggaaagttctgttgtaggaaataggagattttatgagtagacgtaatcttctttagcttaaattgtccggagagttggcttctttgaagtttcctcttattttttttttatttaatttccaaattcctttagatattattgtacttgctcccatgttgtgtccagactccacaatatcagccgtccgattatttttcaattatttatatgttttttaaaaaaaaatataatattgctatgtaatgcaatgtgacaatgactatcttatgctatatagtgatatatagtcatagaccattattgaaaatagcattttatttcaaaaacatttactccaaaccaaagcatattagtaagtctttaaccatggatggccattgatttaatttggtaggccatatattaaattatgttaataaaatgcttcttatccttgtataataaatgttaattgattcatttttgaaagtaggtatactattaattagagatttgaagtctacagtaaacaagggcctgcgctgtatgaagaagtaagtatttacttataaaattcaaagaaaaataaaataaaataaaatattagatcatgtaataatgtaaagaaaaatgtatgtacaaatatatccaacttttttggagtttattgataattgataaacatatcacttcatttgtcatagcactactagcaactactctggggccacatatgatataatataatatttttgtttaaagactataacaaagagaaatgagacaataaatttccatcaatctgttatataaaataaataaataattaatttaattacttgaggtaatgagaaggtttcgtggaaaaaaataaaaaaaaatggagcaatgattcttataacatttcaagccaacttttacacatttctgaatttctagggaactttaaagtggtgactttttgataatcagctgaaaaaagtgtcatttcaacttatttactattttttttttcccactaatttgacatttggtatggagaaaacaaatcaagaggggataaataatgtaaggggaataaattaaaataaaatatttatcttctatcttatttggtgaacaataatgaaagaaaactttcatacattaaaatactttttttttttttatcaaaaataaaacttcattaatcaaacaaaggaatttacaactcaaacaacaccaaacatcaaaaatttcttctcatttacaaagttcaatcttgccttaatattttattttacaattacatctatacactgtggagcaagacactttcattcaaaaatacacaaattcataagccatgctaaagtttcctagtccacctctatcgtaagccttttcggcctcttgatattcacccatggaatcagttcatcaaaatgtacaagaccaaagataactacctagctatttcccaattttacacatcactctccatgatagggacatgaaaataataagcatgatcttctatggccatctcacaatctggacacatagtagaatttacaaaaacttactttttgttgagattatttcgaataagaaagttagtatgaattacttactacaaaatgaagcgatgttttaaaactgaaagtgaataccaaacaatcttctcaaatgctatcgaaaagcactctgccagtagtgtatcatcagtggcggagccagtcgtaaatgttggggggggggttatttttttttttttttttt

SEQ ID NO: 161479 - DNA, 3517 bp, Cannabis sativa
caccttctcctcatctttcgctactctcctttcaagttcaatcccctacccactcacccgccacgcctgcaactttcccaccatccaaagaattgtcaaattccccaattcaacttcaacctttcttcctctgaaacttaatcctcttcacctcactcaattttcttttcttacttcttccgctggattccgcctcgccggcagctccgttggaaacgccgaacctgatggtgaagatccaccgcttgtcggtgaggactctgccgtcttcgaattggccaagcagaaattatcttcgtgggtttacttcgctgggattctgggaacagttttattcgtgctcgacgttgcctggctcgataactctactggttatggaaaagccttcattgatgccgtttccggactctccgatagccacgaggttagttgaattttgttattcgagtaagaatttcgatatcaaatgtgcagaacaaactcgtccctgattataagtagtttaatttattctgtggagcttaaagagaaagaagaactttttattagaatttctcctaaagaattgtaacagttactttatgcggcattagctgtgcattgttctgataaaaggagttgaatcaataatatctgcagtgaaggaattgctggcagaaatctaatattttctgttaagtttgcattacattatgattctggtgaagtgaaattatacatgttgctgatattgggtctaattaaggaagagattacttgatgatctacaataccttctctttaatcaagtgaacaaagttcttggatttttagatataaccatatcgtgtactatttacagtgtcatgcagctcatgcttattataatgtgttaatgtcaagcttaagtcacgctggtctcacttgacccaatttacagtgacaatatgttcataagatagagggtgatttgtgctggtcaaatttgataataagtagtgtggaaaacagtacttagagttagaagagcattatttaagagttagaaaatggatttctatttatgaaaaacattttattctcgttcccttctggctttttgaacattagagggaaagagaatgggattaagttccaattgctagtctcattttttctttcaatttttgcttcatgctctctatatttgtaaattatatatgtagacccataattctatttctagggaccttgtttttcaatatatgaaaagggctaccacttacgtgtgatatttgcttaatttctcatctcttttcttttaatttttcatgactttatattcttagatttcatgtgttaaggttttgataaaatctgatgtaaacatgaatctgcaggtagtaatgctgcttctcattgtaatttttgcaactgtgcacagtggcttggctagtttaagagacatgggtgagaaaatcattggagaacgggctttccgtgttttgtttgctggaacttccttaccattggctgtcagtactgttgtgagtacatgctgctctatcatgaaaccccaatatttttaattttttccttttataggttttctttgctcaagctagcttggtttctttttgtctttctttttttttgaattactgtccaatttaaggtgcaaacaaagtttatttgaactgacttgttgactttaagtgtttgtaattcaggtgtactttattaaccacagatatgatgggcaacaactatggcagcttcaggatgttcctggactccatcagtttctatggttttcttcttttgtttccttcttcttcctctacccttccacttttaatctactagaggtagcagcagttgacaagcccaaaatgcatctttgggaaactggggtaatgagaattacaaggcatcctcaggtacataatttattttctttggaatttctgtatagtgctggcactcatagtgaagtcattgaagaactgctcgaagaatttctggatatttaaaatgagacgaatgcatgtgctgactttggcaagtcatcatcgtccccactgatccattttgtttccccatgcagtcttgggatccttgatctcgacacaaaactttattgtatgtagatgatgagatcttttaagatttagggaattgttagttattgagcaaaaatggtaaggaacttttgtaaaactgatggaagtttcccttgttgaaaagacatgtcctcaaactttataaagaaaccctaacgtaatcaagttactcctgtaaattatcttcctctccttccttgtcctctaaatccattcagctaatctggttttgtatttcttgttagatggttggacaggttatttggtgcattgctcacacgatctggatagggaactctgtggcagtggcagcctcagttggcttaattggacaccatctttttggtgtttggaatggtgacagaagattagccataagatatggggacaattttgaggctgtgaagagaagaacttctgtcgtaccctttgcagcaattcttgacgggcgacaaaagttgccgaaagattattataaggaattccttcggttaccttatgtagccatcactgcagtaactataggtgcatatcttgcacaccctctgatgcaggcaggcagttttggacttcattggtagggcgacagatttttattttgattggaactaaaagatgaacaagagatgaattacaacaaaattaagcatatacttcggataagttactattgatcccatagttatattgccttctttacttagttcgagtctctattttacttcaataaatagtttttactttacttcaagaagtaatttttacttttggggccacagtataaaaggcaaggtgggcatacctgtgttgataaattcgacattcacataatttcatcttcagcatagaatgtgatatgacagtaactcagctgagtatatgatatatgtgctgatcatttgcagtcaaaaatggaaaaggtattttttctaatatataattttatacaaacaaatcaaaaaataaagaggattatagaataaagaggaaagtgatatctttcctaaacaactatatatttacagctacacatattcattcctataaatactgattttcctacactccccattaagctggtctgaaaatacaagcttgctattaagaaaaacaatttatattgggaaatttagccatgtaaagtatggaaccaaattaatctactcattaaatacatatcataaatatactttttttttttttttttgaatttatcataaatatactttagttccacccaaaccaaaatatattcctcacattttaactttttccattctctctcgtcctctcattcgctatattctttctcttataaaagaccacataaactcatcactgcgaactgctcaccactatattgttgggctttgtgccctaaataaaactttatttcaatgtaatcttttctattcaattatcaataaagaaacaga

SEQ ID NO: 161480 - DNA, 1026 bp, Cannabis sativa
ctgaagtatgttgttgagttaagttggcttttcagtttaggtgcccacttgagttggtaggattttgtaggtaacaaaatccaaaccattaaccacccactaaacatcataagaaaaatcatatttaagaccgtgaattttcccatctttgatcaaatctacttttcagattaaattggtagatgtctttgaaatctctctggttatacttatatatatactactttatctactctgaataaataaaacaaaaatcctaccatatataatatatcatagtataacagctacaattttttggctaactttttatgtaaccgtacatataaatatgaacattttccaagcaaaattaaaaataagtaaattagcgccgtatgtctttgggtttatgaaattaatattttgacttgtattttgacaagtgaatagtgatcacacaaaataatgttactaaatttaaggaaataccacatgcatgcgttaaataaatatgtttatatatgcttctaaaaatatttaatgtatattgcatatgtatacatgtaaatattttgtttttattgacccaatttttttccaagagacaaaattataactaataatcttctgtacagattctctgtcttttcccactcattttgttatacatcaaaattattttcaagcataaagttacgtttaatgcacggattgtgcaagatccattttggggaataataaaaaaatagctgcatgagcaagtctttctatacgtctgcatcttttgaaacacaccaaatcatcattgaatatacaaacaataataattccttatcataatatatttttaaattagattaataattatttatgtactttgatatagtcaaatatttgcttgaagaatattttattgcccggaggaaagaagttgattaatagtgatatacactggcggagctaatgaaggaccagtgtgagcttaagcccatgctgaaaatatttcttttactttttaactaaaaaaaatcttttaattatttt

SEQ ID NO: 161481 - DNA, 6985 bp, Cannabis sativa
aattcattcaattcaaacaattacgaagtaaaaggttcatcgagccgcagagcttgatgaatacaaggggtgaaaccccaatccacatagcactaggtttagataacaaacttgattggctaaagtgtgagccacttgattggcttctctagaaacaaataataaatcagatacattaggatgttgcattaaacttctaatctggtgtagcagccctgcaatgtcgctacaactatcctctttctcttgaagtagttggatcgctcttaaacagtccgattccacggtaaagtttcgaaaaccccaccatatcccgaccatgagcccctctttaatggccagcagctcagccatcaaaggtgttagctgctgttgcataactttggcagccgcaaaggccactgcaccatcgttttcccgcacaactcagcttatagcagcacagccctctttgattctcagaccagcatccacattaattttaaaacagcccactgttggcctgctccatctcccctcttcccttttctgacacagcttgcttcttgccaccattcgcatcctgatattctttcaaaaacttcccacaccattcgcatccatatatatttatatatatatttttataattttagtggcaatctaagttggggcaaaatgaattctgtttaattacaatagataaggcatatatatttaattgccgccaagctctttccggagcgcctcagaattgatttgtgtattggatttacaaaaaaaaaaattctagttaggcgcgagccttaagcttgttgaaattagtgttgatccgaattttgaatctctaaattagtgcgaagatttttattctcactctgttttttaggaatcaaattaatcatgatatctatgtaccgaatgtttggtgcatcttgagacttgccagagtttttcaagttgtggcttgcgtgctcttgcttggagagtgaagttcctttgcttaaattgtttgctttttgctgatattagttacaacttacgataagattagactgaaattcattatagagcatttcttggggtgttctttttgtttgattgtgcacctggtatgatatattactatattctgctcatatgggatatgcagtgaactgattgttatacgatgtatgtgttgttgagttcctactaaaaaaaatgaatctctgaaagaatcttactggtgatgatgattatagaaatgcacatattattcatggattaagggggattttatttctgatggaatttgttactgatgaaagatatatcttcgctgcatttaacattcattttatgagtgccatttatttctacatatcatttatttatcttctgctaccttcccttaaccttaagacatttgatctcatcactgttttaatgctactgattgttttttttttcttttgatgcattaggatattggtggatgtgacattcagaagcaagaaatccgtgaagctgtggaactaccgcttactcaccatgaactatacaaacaaattggtatagaccctccgcgtggtgttttgctctatggtcctcccggcactggtaaaactatgcttgccaaggctgttgctaatcacacaactgctgccttcattagagttgtcggttcagagtttgttcagaagtatttgggtgaggtaaggtgttggatcttgtttttcaacatttcttagatgccttttcttttgtaccagttcaattacaagaaaacatcttattattattatttttattgacaacttgattgttataccaattgtacgagtaattgtggtaatattgaacatggttactatatattgcctctttgaagatactttgaattataaagtactgctacatggttaattttttgtttgctgtgtccatctcaaattacaagtacttacagacaattgttttttgtttagggccctcgtatggttcgtgatgtcttccgtcttgccaaggaaaatgctccagcaattatctttattgatgaagtagatgctatagctactgctaggtttgatgctcaaactggagctgatagagaagttcagcgtatacttatggagcttctcaaccaggtagagctggaagatattaataaattttgaaaataataattttgatcgcaggaaaactgttgacactccctcactcagttatttgaaaaggctttatattcataattgagatctatttctatagccaaaactgcttctctgacctgtatacatacccccccaactctgatcaacttataaattcttttcagatggatggattcgatcaaacagtgaatgtgaaggttatcatggctactaatcgagctgatacattggatcctgcacttttgcgtcctggacggctggacaggaagattgaatttcctttgcctgataggaggcagaagagacttgtttttcaggtaagtttcgttttgtgcatacaagtctatgaaaaagatgaaatattgaattcactctttgagtctacggtgttatttgacccttattattctcaattttaaaattttgcattacaaaccgtgtttgtgaagcctttggcttcctcaaaatttctttgtattgtatgttaattatgtcttcctttatattggcaagtagtttaaatttctaaatttgttgcttcaacttcacctgttctcctatattaccttcagaatttcctttttatttggttaaattggacttggaagtctgttgtatatacttcataacagtatgtccaataagaaaatatgcattctttgtcaagtgtgtttcaccaagctactgcagttttttctgaaataagcttatatgtaaaattataaaccatgcccatttattgtacaggtttgtacggcgaaaatgaacttaagtgacgaagtggatttggaggactatgtatcaaggcctgataaaatcagtgctgctgaggttagttgacgtgtatctttctgaatataagaaagaaaggataaacatcttgaaattttatgtcaattattgctgttattagctttacttttgcaaggtccccaaagatcttaacaccttccattattattttaattctttatttttgaatcgatgcttgcagattacagctatatgtcaagaagcaggaatgcatgctgttaggaagaacaggtatgtcatccttccaaaggatttcgaaaagggataccgaacaaatgtgaagaagcctgacaccgactttgaattctacaagtgaagaagttatgttggacttttccagtgcttgctgtttcgaagatctcgtgtactgaaactcctgaatctacttgtactagcacgctgttgtttgaacatatttttcctatcattttagccaaaaagggaaaaactaaattacatgttctgatttcatttgctgctccaccacactccccttgacatagtatctatttcttatgttctttatgtagtggtagtggagagctcagagctccctttcctgtaggttgctgggcctgttggatgcatttcattattcattgagaagaatttttataatgtgaccttgcctcattggtgtaaataagctgttgtgtgagttgtgacaggccttaattaacatgggccaggattatggtttggcctagaaccctacaaaaaaccacataaagcaaaagagcaccaaaccctaccataattataggcaccaaagtacaagcagaccttgcatgcctacctattgattactttccttttccttcagctaaattacaagctcacatgtgcgctttatgggcccactgtattcttatataaggtttaacaatagtgtgtattgcattattctaatataatgaagacttatttcctattgattagggactcttgtatggttttggggaggtagtagtactggtttcgagtagtgccaatgtagagtggttatcactcaaatgtttggtagcaaaatcaggtcaaaggtcttatcatgttatactatgtgctttggactaaagttatttgatcccaaaaactcttgaaaagccagtttttcttttcctagctagcactttgaagtttcaagaaatgaaataatttgtaatctattcaattcaaagtatctactatgttccaaacattgcaatttgatagtgaaagattgtttccttattcatccgattaacgagagaacccaaaaggaaaataaagaagaaaaacaaaatgaaaattgctcttaaaagcttttagaaaaataaaaataaaattaaaaaactgggttaggaagattccagacgtacaaaaggacagcagagcttagttatacacacacacctaattcaaatagagtgattgactgtatacttagagtcatgcttgtctgttgccttgtgtctttcttggacaccattctctctttctttccattcttgttgttaattaattcttagtaagtgtttgtgttttattttcttatattaacccaaagaaggaaatatatttttactttcataaaatttggaataattaggaaattattttcttcaatttttttctctagcaaaatttttcttctggcaaagggttagcgtctttgacttaatgaatcatgagtttaagatccaaacaacaaatcaataccttaattaccatttaaattttaaaccacattaatattgattaatgtcattgttcatgacattgatattatgccttcagtcaccctaagattattattattttgttgtgttatatattttgcttgtgctttatgctaattattatataggtttgattgaatagaggacctacattacctaatttatttatttattatataaatatgtatatattcattctgactttgaaattgtattgaatctctaataaaaagatgctactacaaatacaacaagcctaattattatttttatatataatattggtttttcctttttcgtttccttttagttacagggaccgaccatgtggtgataattttccattgacctttataaataagctttatatatattcaattatatataaaaattaaaatgattggttattttatttaatatgttttttttctagcaattatttaatgtttttaattcatctaccaaaacattttttattgaaaaagaaaaatccttgttttgttattaattgacaaagtatatatcacaaataaatatatatttttttgaaaaacacaaataaataattatactattgggacagaccacatatatttattagtaggtaataagttatatatatatatatatatatatatatatctgtcatatatttggattttcattcctcttctgccgtcacctcatgcagatggagcttatgcattaattaaatataaatacaccaagataaataaatcaagagctctcataaatcaaatagtaatgaattttcttaattaattatgtcgattatttcatttgcatgtgtgtataatttgtatcaatcttcaacgcagatcagaaacttaaatagagattaagaagaaatatttaattataagataaaagttgaaaatttcgttggacttggactttttattttaaaaaagttgtcaatttttttaaaatatgattcaaaataatacactaatctcaattttatcaattttttctcttaatatataactaatcttaagccgatttctagcattaacaaatgagaaaatgtaattaacatagtcataaaacctcaggttatattattatgttttatttgactaaaatttggctaaggtataattttgttatctttaaaaattacaaggtttatagtattatccaattaataattttaataaaatacaagattcaaatttgcattggctggtttaagtaagaaaaacccccctttgattttagttgaagctaactcaataatatttgatgaggttattatcttggcacctgatccaaggtcctattaaataatgccataaatattttatcaatcaaactgagaagtcttgctagctcttggcagttttgttattgtacgtatattgtataaatatatatatatatatatattaaagtgaaatatttaattaaataaaatttatatcaatgggtttggaaaaagttgactttacaactctcagtttctaatctacatgtatacaagttttcattcaataatatattacatacataaatgtaattaaacttttttaattctttctctttttctttttcaagcaatagaatttcccaacaatatatatatatctacaattatagtaattgatattatggataatattaatattccttattattataagtattagattaatattttaagatataaattgaaaaagacagacaagcttctgagtcgactgctgcacaaactgtacttgtctgccaagctgtgataattattccttgtaattaagatcactactattgtaattgatatttatagaaaaattaagaatatataattaatatacagtttaatgtaattaatatggtattcgcgtgctgtgcttattatatttgctgaaattaatcgatcgatgttgatgttttcttaatttatgcatgtatattaataataataataatttattttattatttatattttacgtacaggttaagaatttactacaattaatgatataacttaattaataaaccacgctagtcttgcaagttaaaagttctgacttttttttttttagaatgtagcatagtgatattgtatatttttaataatggaagatcttggataaaattgaactgtgatgtaagggtgtgttcagaaagtatgtgcttagcggtggtagctagaaatcattttggctcggtggttcggattcacacagatcatttggacttctcggatgctttgtgtggagaagcagcggcttgttgtgcagcggtctcgttggctctagaggaaggcttcaagtttattttggttgagagtgac

SEQ ID NO: 161482 - DNA, 11471 bp, Cannabis sativa
cattttcttattgtgtccattattggtattgttgttagatgttgatgccgagggagtttgggcaagagcaacagaaggattgggttcttggacagatgcaataaggggaatatgaggatttttaagctttctctatctttcttcatgaataatcatggagaacactttggatagagagggaaagggctcaactaacagaatttgagcacggacagggaaaaaagattcattcaaaccagtaagaaactgtaaaacttgttcttggttaagaaaagccaagttatctgcagaagcaccacaagtacagggtattctaggtcagagttcttgaatctcatcccatatgcatttgagtttagtaaagtaagaagagtcttcgccttggcgtaaggtgatcaatgtttctcggagttcaaaaattcaaggtccattttcttgatcgaatcttgaatggagctcagtccacatttcaacagcggtgtctaggaacattatgctgcttttaatctcagaagtcacagaatggaggatccgagacatgaccatctgattgcagcgagtccaatggttgtggagaggatctatttcaggtggagagggaagagtgtctttaagaaaggcagtcttgtttctggcacccacagaaagctcgaaatcacgacatcgtggttgaaagttatgatcggacaggggcggagtgaccaagatcaaaccagggtggtcaccagagctgagataatatggactggagctgtcttcatgcgcaggccgatgaacagggggaagattctgttgatgaggttctatagggggatttatagctggagtaacgatcggcgtgtcaatcgacgaagcacctggaatcgaagaggaagtgtgcggcagaggagttcggccggagtgtcttgaactagtagcccgtgttctaaccatggtgaatcaatgggtgaatcaatggtgcgaaactttgtcgagagagaaaaagagaagaagaaggtgttttaaacgtctgataccatattacaatgtaaacaatatcaaaagcttaattgattttattatgagaaggaaacacggtatatatacagccaactcacaaggagttagttacaatcaagactaggataacagtcccaacaaccaagagtaacaaccttataactaacctaaccaaccgaaaataacagacaactaataacctctaataggtagtgtggattcacaagactcttaactttcctgtccatgctcttgcggcgtgggttgctgctaatttttttttggtttttggaatctcttgtttccacttaccgttttgtcttttggtaatgaatgtttatgttaagaaaaaaaaaaaaagataattgagaattgtccaaacttagcaacacaaattattgacacgaaacattcttgtttgtccatttttttaatagaacttgtttgtccaatagaccgttgatcgttacaatataccaagtgtgcaccaatacaaaaagaacttgttactatttctttttttttcttttttttttggaaatgaacttgttactgtatgtctaatcagaaagtaaaataaaaaaaatggtcgaatgaaaagtcaaaacccgtagacgactaagatccgaatagataatgcaatctcagccgtcaattaaacaaccttgaatgtaattggggtatccgatatattacacacgatcgacacgtgtgcttccaaccagaaccgattagtacggttccttttcttaaattcgtaaccccacgcgctctacacatcgttccttacagacaataaatccaagccgttattttctcccaacatgagatgtaggccgttagattacgtggattgtaagaagacacgcgtgagtggagagctcaacgaagacgaaaggtacggccacatgggggggtgtgtgtgggaataaaaatctaataacaaaaaaagtcagttgtcgttttcgtaatttaagaaaatatcagaccctaatttgcaataaagactgatttattatctttcgtgttaatcgtcgccctttttcaactaaaatctcccacgaaactcactccttttcttgagtctttattataattactgtagtgagaggaaagctcagaaccactctcttacttgatttttctctctcatatcaggtacgctgcaaaccctagaaattgtttatttattttaagtttgaattttatttagggtaatggagaacaatgattgtttgatgatggtatgtatataactttcatttttatttaggtgcttctatttatggtttaggtgaaaaagaaagttgtgtaggacatttttggtggtgtttaatggggaaaggtaaacctagggctgttgagaaaggagtgttggggcagaattcgagcgtttcatcgtctgaatcattgagtataccatctgggcctgtgtattatcccactgaggatgagtttagagaccctttggattttatttataagatcaggccagaggctgagccatatgggatttgtaagattgttccacctaaaaattggaaacccccatttgcattgaatttggattcgtttacgtttcccactaaaacacaggccattcaccagttgcaggctcgccctgctgcatgtgattccaagacttttgacttggagtataataggtttttggaggatcattctggtaagaagttgagaaggagggtagtctttgagggggatgaattggatttatgtaaattgtttaatgctgtgaagcggtatggcggttatgataaggttgtgaaggacaaaaagtggggaaatgtttctcggtttgtgaggtcgtcaagaaagatttcagagtgtgcaaagcatgttttatctcagttgtacagggaacatttgtatgattatgaatgccattataatgagttaaatcgagagccaggtcggaatggtaagagggtaatgcacgaggggaggagtcaatgtaggattgaaaattctagttctaaaaggaggcggatgaatattgatggcgacaaaataaaggtggttaaggcaaaggaggaggaagagcgtgatcagatttgcgagcaatgcaaaagtgggttgcatggagaagtgatgcttttatgtgataggtgtgataaggggtggcatatttattgtctctctccacctctaaagcagataccacttggaaactggtattgcttagattgcttaaattctgagaaagatagctttggttttgtcccgggcaagcattactcaattgaatcttttaggcgcatggctgatagagccaagaagaaatggtttgggtcaggatctgcttcccggatgcaaatagaaaaaaaattctgggaaatagtggaaggatctcttggtgaggttgaggttatgtatggtaatgacttagatacttctgtctatgggagtgggtttccacgtgtagatgaccagagacctgagtctgttgaggctaaggtttgggatgaatattgtagtaacccatggaatctcaataacttgcccaagttaaaagggtctgtgctacgagctgttcatcacaacattgcaggagtaatggtgccttggttgtatattggaatgctattctcatctttttgctggcactttgaagatcattgcttttactccatgaattaccaccactggtatgtatggtgatattcttaattttacacaattttgtgatattttatttgtgtttttatatctgtaaacctgtaacttttgagcaagttgagataaggtaccacatagttatcaagatagtctgaatttggtgaggtatgtgaaagttgggatttttttcttctttttttgggtagaatcccgacacgctggtcataaaatgtgacacctgtaatttttaattagtaaaagtatatcagtcgtgtttgtaactactactgtgtagacatgtcccgcaagctctcgtaagtttgcttaggaggaggcaaatagctgttggtttgtttggccttctagctggatgtcattatgtaaaacattagctccaaaatttgattggctgttgctttatgtatagtgtaatcaaaatgaactgtgggaaaactataaagaatgagaagatttttctgattgttccattttctttaattctattgtcataagttttatttatttttaatctttttcttgagttatgtgttcgtgttttttttgtatttataatattaatgttctgctcactcattctagtatctcttcaggggagagccaaaatgttggtatagtgttccgggtaatgaagccgatgcttttgagaaggtacatataatttatttcaaatgaatatttatgtaaaaatgtgaaaagtacttgagcattatgtttttccccttttgtttattaagattaatttcgatatatgtatacatatgcatatggtcatctggttgcacaggtgcctgtgaaatatgtttggggcgctagtgccacagccaccccctcttctctcctcccctcctcaagtttttgcttaatgaaatatagctaactatgtgtactttcatctaggtaatgcgtaactgtcttccggatctctttgatgcggaaccagatttgctctttcagcttgttaccatgttgaatccatctgttttacaagaaaaaggagtccctgtatacagtgtgttacaggtacggaggatgtggattgataccagctttgtttattttaaggggaaaaaattatgaaagatgcgagctttgtaattttgtgcatgatccttcttcctttgtcaaaatagatatggacgttgattgcctaaggcccctaaggttgtaaataggatatgtaattaaatcttattgcctattttttggagtttagtgttacttgatttgagaaaagtaggaagggggcagggacgaagttttaataatatttgggttaatctcttaagtttacatctctctctctctctctctctctctctctctctcctcatgttgattctgctattttttttcccttaaacccttttatttatcttttgtcttgatattcttcttcttatgcttgttcattactaggagccggggaattttgtgatcacttttcccagatcttaccatggaggatttaaccttggtgagtatgaattttcaaaaatcaataccttcagtctatagaaacaatatctttggaatttttatttatacacgtgcagtagttagacttggaattggtcttttcaggtttaaattgtgccgaggctgtcaatttcgctcctgccgactggttacctcatggcaggtttggatcagagctgtatcagttatatcataaaactgctgttctgtctcatgaggagcttctttgtgtattagctaaggttataccttttgtttaggctacgagtttttacattaaatctgcttttgattgacattatcaatttcctcttaatatgctcttcatattgttggataccagcctagcctatgaatagttattctgtcttcattagcagatgcatgctttttttactccttcctattggatagcttttggcataacagtaatttttattttgtatcgggcctaccttgatagattgtgttaaagatttgaaacctagtgtggtttatactgtgccaagttgcttaatgttctggtagtattgtatgaaatgagtattttggtttatatttacaattgattattaagggattagaacccctcacctctcatacacacacaagtgactattagattaagtttacttccacacttgtgaaggtgtgaaatttcattttatgcaaataacaagctttgttaatgacgaagaagttacaaaaatgggaggatgagttatcctatagaataaaacaatgtaaaaaacataacaaagttagtgaatattgtatgaaatgagtattttggtttatatttacctctcatacacacacaagtgactattagattaagtttacttccacacttctgaaggtatgaaatttcattttgtgcaagtaacaagctttgttaatgactaagaagttacgaaaatgggaggatgagttatcctatagaataaaacaatgtaaaaaacataacaaaattagtatacagctgatcttttgttaagatgtgctttacggtctttcttttgagaattagaagtattataaattttctaatgctcgtctcttttaggatgcatgtgatagcagagtagcgccttacttgaggaaagaattgcttaggatatacacaaaagaaaaggcctgcagagagcggctttggaaaaatggcattgtcaaatcatcccgtatgcctcctaagaaatgcccagaatatgttggtaccgaagaggtatttactgccacccacttgtcacttttgattataatttgatgatttttctaagataacaatcagtttttatgcatatatgcttttgattttcacaggatgcaacatgcataatatgcaagcagtatctttatctttcagctgttgtgtgtcgctgtaggccatctacgtctgtttgtctggaggtttgtactttttgtagtaaaatgttttcaaataaattaattgaatattgcctttgaggtaaactagatattaatacatttgtcatcattattgtgtttggcaaatttttgttcatcatattttttgttgacaccttgacaaatttgttttggaagtagggaagaatgtgcctttacctttatcccgagattgattaccatacaagttaaattccaatatgtatattttttaatcacttctaatgttgatggtccaataggtgttccaatattcgtttgaaaatttaaataatgatgtgttgtgattggttaagttctgccatttggttctgtaacttttgatatgttttcttttcacgcagcattgggagcgcctttgtgaatgcaaatccagtaaacgtcgtcttctctatcgccagtcacttgcagagttgaatgacttggtgattgcggtggataaatattgttcagaggagactacacaaaataggaatgctcgaaggcagatttcttgctctaatgaacctaaaaccttgatcaaaaaggtctcttttttaaatctctgccaagtcatgatagaaacttactctagtactacatgcgttaatgtctcttatcactactatatgttgcttttatattgtctttatctggaaaatcttgtagattgagtttgatacacccaatgaaaaagaaaattgttttgtttggctttctgagttggttaatgcatgtaggtgaaaggtggtcaagttactttgaatcaacttgcagaacaatggcttatgcgctcgggtaagatttttcagcacacattttcaagggatgtttacattgctgcaatgaaggaagctcaacaatttttgtgggcgggctctgagatggatcctgtgagtttcttctgttcctacttaattttcatgtattgtgatcagtgttttgttcagtttgttcattttacttttgtatctaggtaagggacatggcaaaaaatctggtagctgctcggaagtgggcagaaagtgttcgaaaatgtgtgtctaaaggcgaaaagtggtcacgtaatcaacatgatggttttgagaaagttcacttggagtacgttaacgagttgctgagtgctaatcctatgccttgtaatgagcctggacatactaaattgaaggttcttacttttacgtaattgtatattccattatactatttccggcctgttgcctgatagtgaacacttttacaattaattcacatatatgtgtgttggcagggttatgctgaagaggcaatggttttgatacaagaaattaataccgctttattagcaacctcaaaggtgtgcaaaagtaaaattttgctatcttctaactcattgatgattttttattgtgatatagatttcttacaattgtcactgcagatgtcagagttggaatttttgtactctagagttcaaaacttttcacttcacctgaatgagagtgaaaaattattgcagaaaatttcatctgctaaggtatatatttgctttaatcatttatgttttaattttgctgtaaaatcctcacaataaccaccacttgaggcaagccccaagtggttgggttgggtgggtgattgattctggttcaagtcccatgcaaatgtttatattagaaaagaaactctgcaccatatagttttttaaattattttttttctatcccaattggctggtatagaaaattcagttgtttaagcctattgtacatctctttctgggcaaaattgtgagtttctgtatgtaatatcattcccattattatagttcagggttgtggtcggttgtcatgattcgaagttacttgctctattctgcttctgtagtgtccattttattaggggctggtgccattgcagtgtctttctacttgcccatcttgtggagtgaattctgatttgttcatagctaatgaaatttttttgtcgaggcaggtatggctagagaatgtaaggaagtgcatttcagaacaatgtcttgctgctgttgagcttgaatctctatatcagctaaagtcagaggtgatgatagtttcttatttatttttcaaattattgtttacagtctctgaatatttcgtaatacttattttttgatttttaatggttagattttggagctccagattcagtttccagagacagaaatgcttctggaattattaaataaagccgagtcatgtcgtgctcggtgtgatgagattctgaaacatcctattaatttaaaggtaatttttgagctccattcagttctttctttatttgcttgtttctaagttcacaaggtggtgaacaattcacctctgcagaatgttgaagtgcttcttctagagatggataattttactgttaatgtacctgagttgaagcttctaaggcaatatcacgctgatgctagtttgtggatatcacgctttaaaaatattttagtaaacatttccgaacgagaagatcaacataatgttattgctgaattagattgcatcttaaaggacggagcatctttgaaaattcaaggtttgacatttttttgcctgattgtatctgtagttccataccacttttcattattccctctctctcaatttagatatatattttttttttacaattgaaaagaggttcttggttgtggtttctttacagttgacgagttacctcttgttgaggttgagttacagaaggcttgttgcagagataaggcactaaaggtaggttcattgttgttgcttgttaaatatttttcttcacttccccccgtttttttatcatgctatggaattttttctatgtatttttttgcttgagctattaaattagtttcattttagtatgatcaacttcaaatatttaaagtttgtcgaaaactgatgcaggcgtgtgagactaagatgtctatagactttcttaggcaactgatgttggaggctgcacagtaagcactcgtccctttttcttttacaaactaaggatcgtaaatatttcttttgttttgcttcctctagcacctttttgtttagctttaattacttttcttttatttggttctcttttcaggttaaatatagagagtgagaaattatttgttgatatgttaaaaatacttgatgatgccatacaatgggaagcaagggcaacagatattcttgcacgtgaggctgatttgtctgagtttgaagatgctataaggtttttagcatgttattctatggttttgtgaattagttatgatggtttgagattcttccatatgaactgtttgtatttgtttattttttattttgaatattttagggtttcagaagatatatgtgtcattctaccttctctcaatgaggttgaggaggcatttgctctggctacatcttggttgaaaaaagctaatccatattttgagtcttctttcccttcgctacctttaaaatttgaagccctgcaggttctcttcccaacttacatatgcttgccttactctgtcgaagatttaatagtaatcttgctggcttacattatgcctacatgttgcagggcttagtttcccaatcaaagcttttaaaggtctctttgagagaaagaagtatgcttgaaacagttctaagagactctgatgactggaagagtaatgctagttttatattgcgagatacacaatgccttttcgatacaactgaaatttctgatggattattatgtgatcttagttcgaaaattgagagtatagttactagaattgaatcagtcaaaaagaaaggttcatcttttggctttgacttagatgagattccaaaacttgaggatgcttgttctacactgcaatggtgtaaaagagccttttctttctgttccagtgctcctccttttaaggtgactatctcatttggttgtgttacattatttatggtattgtgcgttacttatgactttcatgaccaccttaaagcatttattcttctcatttgtaatatattttttctttttgtcttatggaagatttatcaagttaaatgatatcttctgtacatattttagttgcttttaatgttgggtgtttagttaagaggaaagccattgttggataattacttgtatgataaatggttgattatctgcatcagcgctctgttggatatactttttattgcttacattggtcggcttgcataaatcaagtaggaaagcaacctcattatttttttaggccttgtatcctagcctgacatgtgacttttaattgtcattttcttgaaggatgttgaggagttgatggaagctgctgaacatttacctagcacatttacttctggcagtttctggagctcactgattaatgcagtcaaatggctttggcaagcttccgaagtagtttctttgcaatcaaatttgaaaagatgcaccttgagtgatgctgtaagagttcttgacagttctcaggtgagtttctactttactgccttttgagaactttaattctcttaactttaatttattcattggtagttgtttattggtttgagttgatgtaacaactttagttgttctgtttgcagcatgtcagtagtatctacccagtcatggctgatgaacttgaaaatgcaattcagaaacacaagtgagtcttgtttcccaacttcctttttctccaatttgccagtttaaatatgaataacaatttgacttttgtgagagaacataactttctggccattgtattcaatatctaatagttagtgtgtttaccacgtttggagtattcaactcatactaaaaaagaattctatacatagatatttgtaaatatcttttaatgcagttgcagcttggtataagtgggtgttgcttaaaagggcttacactgcagcatgtaaatgtagttgcaggcatgcagcatgtaa

SEQ ID NO: 161483 - DNA, 8143 bp, Cannabis sativa
  modified_base (8082)..(8088): a, c, t, g, unknown or other
aaaaaatgatcatatgggacacgagaagtactgaattagctggcacatcgatatttcttgaattagaaaagaaaaacacgcattcatattaagtaacatgagtgctgtcataatagatttgatatttttttgcccttttttatatttgtctatttttattctcatggtgtaatctatgtatatcgtatagtgctgagtaatttcagctcctagtaattaatgttgacgatgtaggaaatcaggaagttaaattgtacttgttgtataagccaaagagctaactattgtgtttattctttgaattgtttaaaatttgttgttctgctgtgattctcatggagaaagatgtgaactttgctgcatttttgaaagagatctccttaacattatgacagagaattaattttttttccaaaaattttcgttcgaatttatttgtgtcactattttactagctttttgaagtagttcactggctctgaatttattcttgtttagaacttggattattctgctgttgcctacaaagtaccaaattcgactagagtccaatactagtgatgcaaatctggagttcatgttgatttgttatggcttgcttgactgtgattttgggattctggttgtttcctctgaaaatggcctcccatatagtggcagcttagtatgtaattcttgattgtaatgatctatacctttgttaatattcatgtggttagcttatgtcagatttcatttccttttttcaggtgtcccatggacagaagaggagcaccgattgtttttaattggtctccagaaattggggaaaggggactggcgtggaatagccagaaattatgtagtttctagaactcctacccaagtggcaagtcatgcccagaagtattttattcgacaaaataatgctacccgaagaaagagacgctccagcctttttgacatggttcctgatatggtttgtctttcatattttcacattttcttaactaaagagtaacgacctgatcaagatattccttcctgtttatacattttattaaacagaaatggaagtcaattttttatatatatttttctatgaaaaaccagattactacttatattgatagtacatcgtcactggttgtgaaaaaccctgtggtatcttcatatgttgatagacaaaccctgtgtcattttctgtagtgaatttgagcgttaaatggtttagttgttccctggatggtttaatttatttctgaattggacaggtctcagatcctccaccagttccagaagaagatttgctgccttcttttcaagaaacagaacatgaaaatgctaaatcactgccctcattaaatctctctcttcagtcagaatgtgaaccaatggaagctactgatgatacaaaagttgaagaagataatgaacctatagttggatcaaatgggttcccacctatgattcctggattgagtggatacttcccagcatacatgccagttcctttttcattgtggcctccaggtgcagcccctctggaagaagagagtattgcagaaacaactcagcatcaggttcttaagccaatcccaatcgtcgccaaagaacccgttaatgttgacgaactagtcggcatgtctcaactcagtttaggagaggctgagagaggccacagggagccttcgccactctccttaaaattgcttggagagccttcaaggcagtcagcttttcattccaatgctccggctagtgggtcagacttgagcgagggcaagagtactccaattcaagcagtttaaattggaatgtatgggggccgaatttgggttttcatgtttagtctatttcttttttcttttgtaaaattatattttctctaaagcaatgttgttttatttcttatagtctatgaaatatatgttcaatctttatataataacataggggtagagcaatttcgttaagacattctgttctttattttattatactgtatacagctagcaagctcttgttaagtttaggaacttgtcaactaactctgaccaagcgcatcattagactattcatgttattgtagcgaaatgtaacttagccaggtttgctgttgcagaaatcttgatcaatcttttggtggtgttgatcgagattatctgtatcaaaacattaaacatggttttgtaccatgtctcaggagtggatattagtaaatgcatttgtaagaagaaaacaaagagttgttggatcacagagttgaagcgtttggtagaaggttcggctttctaatcagcaaagccaactaaacagaacagaacaaaactgcttgatgagattataatataccctagcttaattggagaattgtgtagtgtgatccaacagtctatataccaattaatgtccttgtttatattgtgtggaatgttttattcagttacagagttacatctatctgctaagttaggtgggatggtatatatgtattagcctgtaaggaaaacgtgtcaaaggtacaatcttacaagtacaacaacaccataacggactagtactaatatgcgaacatcaacaacactgaacattttcttgaattattttacaaacataccaaaataataaaaaaaattattgtaccaaattttaattatttttaggttttttataattttatttgtagaaaattcgattttttgatatatttttatatttactaatttgttgttgatttttaattatttatatgtaatattttttgttattttaatattgtttggatattatttttttattatttttatttttttcatattgtttttataaaatttgtaaaaatgtaatatatatatatataaattttttacaaaaaataatgttttatataattactttttgttttttcttttcagcctccgtggagaaccatccaaactacaatgctagagtgtcccaccgctaggtcgaaaaacactgtgattattcgtaagccttttgataagggcataaaagaatagtaatgaactctcggccccttttctagcatttccccttctctctaatatctttgtttttctaactcttctttcatctctactctactcatagagtaagccaacactaatgtttttggtcacttgtatagatggtggcaccacgtgtgtgcactttcaattttttggcagaaatttgtgccatatatcgacataaactatgttcaatgctcacacaattctctgcttttgacgtgtatgtcctctgtatctattaatattacaatataagttagtgatcagtgttctacgagtgaatagtgttgatgatgatccttcaaatcaaaccaggtgaatttctcaaaaatgaaagattcatatttcgtaatatcattttagcttgctatgttataatttattaactattggcaaatgataaattcatttttcttatggtcttttatttttcaatctaatcctatttttttaaaacgttttggtgttaatattaatttacaaaatgccgtttctctactaatacgtttaattatcaaggagatatttgggatagaaaaagatgttaggagtattaacctaagtttcacattggaagaatatacaagagttatcatggatataagtgttccactttcttcattagtatgaagttttttgaaaaggtaccctaaagtaaaaccgtgagggtgtaggctcaaaacgaacaatataatactaatctgaaagtcaaggtgaggtagcggccagacaaagtgaaagaatgaggcctaacaagtggcagagccaaaagtttaagagcgctgtgatagtgggatacatttgcgatgtatgggagaagctctcaatgtgatgaccttgcgattatatggtgccttgtatcaaaaatttacctgatattgagatagtcaagtgtcgtgtcccgttgatgattacggcggtacaagtggagatcggtgttgggacctgtatcgaaaatcttcctgtcaaaggtaatggtcaggcggcgaattccgttgataaagtagtttcgctagaggagaggccacgaatatgtggtcctttgtttgaggggacgattgttgggtatcaacccaagtcccacattggaagaatattcaagagttgtcttggatataagtgtttcactttctctattagtatgaggccttttggtaaggtacccaaaaaagaaactgtgaaggtctaggtccaaagcagataatatcatactaacaaaagagaggttagagcctaattttttcatgaattgtggatgaggtgaagtgccatgaattgtattaaatgaatcttacttttgttgtaaacttatacttattgataatctaatcctagtattattcttatatgtacaaataccataccattttgggaggtaacgaggcaaatgaacaaatgaattccgcacattcttgttaactttaccactttaatttaattattaatacaatattttccacctgaaataatatcttctaaaaggtccagcttatatgatttttttaagtttgaaaattaaacaagtgatcaggaatggattcaccagtacctttttaaaatactaaaataaataagcaagatagatatgcttagagataaatcgaacttctctctctcgatatttatttataatatacccaacttgctttaccaattatagctaaaagaaaatttgggacaaacaggaccacaatggtaacatgcaatgcagctcatgttggcatctacagaaattttcatcacaaggggcaaatatatgccaaatatatatatcatgggcttctgttgatgtatcaggacattattatagctttataattatctgctttcctttttggccaatatatataatatataatgttctctgttccatgcatacatatatgcatggtgctccattttccattttcaggacctctacgaggatcgatgtgtgtgtgtgtggattgatgggattatgtgtttatattcattttccttttttgagggataaaacaaatggtggacaaagcaataataggtaccctatagtggggaatgctgcttccagtaatgtctacaaaagattagcagaattgatgctaagagctacaaaagaatatctgtgaaaagttcataatatatgtatattatgtatatatattatatacagaatatacagagaatacagagagagagagagagagagagaaagaggaaagcaaccttaaagttaactcttctgtatgattgcatcaatgcccacaaagtttggattattcgccggagcacattctttgatatggacggaattctatgtataatatctatataattggagagagatagagagagaaagcaactgttattggttgtgaataaattattaataaagattacaaaaataaataaaaaataaaagtatacattctcacatctaaagattctctttgcaactctcgattgtagccgatttttaatcttttttatattgtcataaatatatatattgagtaatgataccgtatataaaatatgcacaaaaatattaccaatatctcccatttaatttgatttaattaaaatgagacttattttttgaaaattatatgtaatatttgatgcatgtatttgtatgtttatagcataatagtactgaccaagagttagaagatttgaaccaaaaagaaaaagttttctgctcatctaattgtctctatagcacgacaaaaaaaaattgtccctataacagtactttagatcatgatggtataaattttgtgttaaatttaactctaaaaataagtcaatgttatatatttagcttaaattttatgtttcaatacactaaggatagaatacttattttaataaaaaagtcaacaaaaatattaaattttcattaaaagtattggacaatattgtcccatatggatcaaatgtaaaaagattgagtcatatttaagaacatgagctacttcactcatcatcaattggttttgagatagaagctcataattttcaatatggtattagagtcatatctctaacgggctttcgatcaacacctatcaaagagttagacaaccacaaacgagcaaatattgtcccacatgggtcaaatataaaagagcattgctattaggcaccactggtgcttaggacctactcgacatgtcgtgttgcgattggctagcgatactccctagaaactactatattaaattatatgggacccaatacttagttggaccaataacgatattgacacataagagagtgttataggcactactggtgccctttagcatttctcaatatataggatcatgataaaataatatcaaaacaacataaaaaccataaaaatattaaaaatttcttacactgtgttttgtaattgttttttttgaaattatcccataaaaaattatatatattaagatataaaatttaattcacactataatttatattaataaatttgatacaatttttaagatattttaaatttagatcatattatgaaccacctgcttaattttatataagcatagattttaaattacatatccacaacactacattactaatagatgctcttacacatttaatttgcatctatccctatcgtacctgaattcgatcgacaactacttttgggatctttaataattttacaaattaatttcactattacagccgagataaaccgatcacttcactacacgtgtacttgtaagcgaacatattgtactggtccatatatgttattatgtaaattatataattaaggccccctaataattaaagaaaacatgactaatattatgtgccaccaattaggcattagtttattaaattttgcaatgaatttaatgtcctatcagttgataaaacaacttgatacgttagtacccaacgcaactaatatacaatattataataattaataactaatacctgcttgaaatataatatatatactacttctacctttcctccttacagatcgcatcaacatatatgcattccatttattgtagatatattaatataataatttttttagagagtatcactatagctaatcgcaaaacgacaatttagaggtgataagtactactaatgcccaataataatgcttttaattttataataagtttaatcatacatttaatacaatctaaaacaataaaagatcagttaaatttaagtagaatgatagtttaacaacatttttttattataatagtcataagtttaaatttaatttaaatcttataatttgttggttttttttttaaaaaaaataaataaaatggaaatacatattaaagaaatggggtataaggagatttaaaacacaacatagtctcacatgtaaatttgaagtatcttaatcaattattttatttaactattatgtatatataaaaacaataattatatattaatatttttaaatatcaaggtggagtttaattagcccccctcaacaaccctagagcaatgacatctacaatacaaaaagttacatacaatgaaatattcatgtttatttaaaatttaacttataaaccagtgttatatcatgtacaatgtgtgtgtatattgttagtgagtatatatcatcttttattctttaaaatatgcataatcttatcattttattttacatccaaattttacattatacaacatcaatttttctatattttttactatatcatttaaatatcagatttgatttcgactataatatatcatatttttactcaattaataaagaaaattttggtggtattccaaaattaaaatggagccataaatcatattgatcgatatgacctgaaccagtatatattttgtattgattttattattttatttctttaataatttgattaagttttagttgatttgattgatctctaaattaattgtaatttttctataatacatatggtggatatttttgggaaaaagtcatctttaattatagaaataattaaaatatacttctttttttaatggtggagggattatataatatggaagaggtttcaatggttacatttttattgtnnnnnnnatggttacatttttttaagccattggattattatttaatggttgtgattaatttg

SEQ ID NO: 161484 - DNA, 1363 bp, Cannabis sativa
gctatatcagattccacctatagtaagatattttgttgtgactaaaagtaaaatattttgtagtgtctatattcttctctctcatcagagatctgccaacttgatccatgttttgtatccttatatagagctatatcagattccacctatagtgatttgaatagtatcattctagatatcaatacaattaaaataagagtaggtcattaactgctaattaagagaaccgaacctctatataaaaatttttctcatttattttatgggttgatcacttttcgaagaagtcaacactatcaattcaatatccttagaaattattggattcaaatgaccgtgagacaatatattatatatattttactaatattcataataaatacaaactaactactagaaaagaagaagaactagaatatctattaagatataattatagtaattattagttgaaaatgtttagtggtgcagaggctataatactaggccaaaaggcttcaatacattaaaggaagccgatttttggccaaatgttgtgatgtgcttagaattgatcagattaagccgtcaggtgcttaaaagtgaaagtcatttgatgaattgactggaccaaattgagagctagctagccctagctaatatatatcatttaaaatatgtatgatcagtctatggaagagacaaattgttgataagaaggccaatgaaattgcaaccctccttagccctagctctatatatatagtcaaatatttaatatgtatagctataactgaagacacactatggcacccacttgtttttgtatttagaaattcagagatgagtttggttattgattagttttgttcaaattcagactgtttgatatatcatgtttaacctgatttggttatacatctgaaaccctagctattacctactacttctagataagaatccattcttgtctctatatttattatatatatatatatatattatgttgttttaattatcaatttcctataataataatattaattcttctatagccacttatgtatgattcacttatgtatatatatctttcattggttgactatagtactatctaaataatatctttcattggttgactatagaacgtttttattttcaaaaaataatattttattattttcagtctccaatttaattctttatttttaaggcgttctgtacgggataattggttaatatatttttttttagctaattataatttttgctctctgaactttgacatgtattaaatcatgcctcctgaacttttatagttgttaaaaatgcccctgaattattgtaattgttggatttaaggacttttttccaattttagtaa

SEQ ID NO: 161485 - DNA, 3471 bp, Cannabis sativa
aaaaaaaaaaaagaattgaaagagcgatcaaatatatgaataatggttaatggcgtaggcaatcagattgccgccattgcaattaaattctgaaactacatacccaacatattttcccatgcaccataaatatagcttgaagtgggtgatatatatagtgcctaaactaatataactaacatttagacatcttccatgactaccaaaattttcggttattttccacccattaatatagttgttaattacttactataaaaagtcaactttcacatatattttcatcctaatgtgaaaagtccaatttcaaactatatttgattatcttcacatgcatattgagccaaatatatatatcttaacaagcgattcaggtcttaattactattatattagattttaaagtttgatatatgccttgagttatattttattttttagataagtgctatcttttgagtttttagatggtttgaactagtcaaagagtaacacctttgactagttttcttacattttctgttccattttatattttggtttgggttttgttgaattaagtcgtgttttaatttagttcttcatgtgtttctaataatatttagttatttgattaagtttactaggtgatttatttttgtctttttcttttcctattttttttgcactttggttactgttttacttggtataaatttcttaatttttactcttttgttttgagttggttatgttttgtataaagtttttcttcattaagtttttgtgttttgttttaagttcttagtttgttgcttctagccaaagaataacatatttagctatagatttcattaggttttagttgagtttttgtagttagtttaatttaattcaattaggtgtttttaagccgaaattttggctctttttgtaggactcaattagtcttattcgtccagaatctcaattagagtggtctattcagattcattttatccggtaacaactatcaacaaagaaatattattttttaacaagctgagagtggtgtttgaggatgttataggtttagtgtctaaattttcgagggcagttttgtctcatgtagcttgcgataagaattttgcagcttatggtttgacaaagcatgcatttcggttagaagatgagctatcctggttcaaaaatattccaccgccaattgtaaataactgtattattaatcatgagtaattctaattaattactacataaaaaactatattttaacaatattgatatcaccattaaaagtaattgtagcaatgtttaatttagtgtaatggtaattacaattaatatttacaatcttattatttagtatggttttgaaaactcaactatatttggtaggggccgagctaaattggaaaaaaaaggggcggctattaagaaagtgatgcacaaatacattagcttatgattctctaatgttatttttttttcaataaatcacactaaatatagcacatcgtttaacttataaaaatggtaatataatttcataatattattcacacggttaaatcctataaaagaaaatcaaagctctaatattgttgtgggtaatgaaataacatttttagaggtaatattaagttttttttgttttcttttaaaattaataaaaaaagatgatgaaatatacataattatgtggccccacagatttataaggactggtggagggaattacattctccttattttgtcaagattttcatgtggccccacaattttatctatgtattttgttgaattattattttccaacaaatgggtatctttcttatttactaataatgtatacatgatattatcttgctatagtttttgtagctttcattgatttggtattatgtcctgtctgtttattattgtaattacgatgaataattagtacttcaaaggcttttaaaaaaaaaataataataagaaaaagaacttggaagataaatactagtaggtacaaataatatttggcactatcttaaaatataattattaatagaattaaatctaaaatcttacacaatttaatttattaattattatagtatattattaattatttgttagatattaagtcatgcctactaatgacaattactttagttagaatgacaataacaatgatcacatgttgatgatgtgtcaggtcaatggctagtgaagagaactttaaagctccaagctagttcaatgccaaaacaaggaaaattaaaaaccccacaaaccagcaaattgatgtgaccagagaagagaacaaaaatggaacctgtaaaattgagaaaatatttgtagaaaaatttatatgtctacactccctaaattgattaggtacatttttttttaattattattttcttttaatataataattaattttattaccgaaagttaaacaatatattagttattaaataagaaaaaatttctttcaaccaagaaattttatttttcatttaggctatgtttggtggaaggagggagagtaggatggatggagaggttagagagaatggggagtaagagggatgaagaggattgttaatctcttttgtattgtttggtattaggtgtgaggtgggaatgatggaaaaaaaattaattagtaaaattacaaaattgtcattttaaaaataaaattttattattttttaagggtagttattgtattttggaaaatgtattttgtctttttctacaatccttccgaatttggagggatttaattttgagggtttggaggaaaaatgtctccctcctctccctcttgccaaacaagtgatttagtctctcattccattactctccctccacccttctccatccacccatctccccctcctaccaaacatagtgttatagtgtatatcttgctaaccggctcatacaccacagtattattatttcgcattacacgttaaaaacatacacttagaaagaccggtaataaaaatctgataaatttaataaaacatccccatctagagacatcctcataaaataaaaggattgaattgatcaacaacttcatcattactctctaccaaaaaaaaaaacccaataataaataactttgggcaagaggagaattttaacagcataaaaatgaaaaatttgtacttatgatgattgactccctaaaagaaaataaaatattttaattacaaataaacaaaatatatattaacactaaaaaggaaaaaataatcataataattaaataaataaacatggttacaaattttataatatattttcactataaataaaaattaatattgataaataataacaataattgttctatataaaaatgagaaaacttgacaaatattaataactagggctgaatattttgagcgggtttgatccgaacccgagcaacccgcccgaacccgaactggtgaatctgcaaaatttttttttaaaaaaagtttcggg

SEQ ID NO: 161486 - DNA, 3642 bp, Cannabis sativa
gagagagagagagagatgattttgatatatagaaaactcattggagtaaagaaagcgttgtgctcgtgagagagggacagggacagagtgagagagagagagaagaatagtctctgcccaaagcaacagacacacccacactccaatccaattcacacacaacacagtttagagtctatagaaaaagagagagaaagattcagaggagcggaagaaggaggtgggttttcatttttgttcatagagaaatgacgggagctgcttcatctgggaggttacctacttggaaggagagagagaacaacaagaggagagagagaaggagaagagccattgctgcaaagatttactctggtcttagagctcagggaaactataaacttcctaaacactgtgataacaacgaggttttgaaagctctttgctctgaagctggttgggttgttgaagacgatggtactacttaccgaaaggttcgttttttatatttttttctgagctttttgttcttcgagacttgaattttttttgggttagtttttgtagatcttcatgcatttttgagggtgaattttggttttccttaatgtttgttttttgtgggttgtcctcatttttctttatctgggttctggtgggacacagtagggttctgggctattatggtttttgctcaattgtttgatttgattggaaatttgggagctttattatctgggttgacatttttgggatttgatctgagtaatcttcatagaccaaagggggcttcagcttcattgggttcaagtttgcagctttacttgcatgtttatcttttccaaattgctatttgaatgtataaatcttcttaatctttttggtgttttgtgaactatcttggttgagggatctggctaactgctatatcttagtttggagataaacaagtagagtaagttgaacttagattgatggagatttgtgatgaacagttaggacttcaacttttaagtctttagctcatagttggagagaccagtgttcaaagaagttgaaattagggacaaatagcattgaacttagtttataatttattaaatttatggtttgctcttcattgttctgtataagatggttgtactgttatcctatttcctatctctgaactatgtctaaatttctcttctcatatagggaacacagccaccagctgtagatattggggttgcttcaacaaacattagtgcatgctcctctgttcaaccaagcccacaatcctcatctttccctagtcctgtaccatcctatcatgccagcccatcttcgtcctctttcccgagcccaactcgttttgatgcaaacccctccaattatcttctcccgttccttcgcaacattgctgctatccctacaaatcttccccatcttagaatctcaaacagcgctcctgtaaccccgcctctttcgtctccaacttctagaggttcgaagccaaaacctgactgggaggctctttctaatggctccctacaggcattgcgccaccctctttttgctgcatctgccccttcaagtcctacacgccgtcaccatctcactcatgctacaataccagagtgtgatgagtctgatgcttcaactgtagattctggtcgttgggtcagtatgcagacagcaggaggggcaccctcctcagtggctcctccttctccaacatttaatctcataaagccagtggctcagcagagtattctacaagatgcagttggtgggcatggcccagttggctggggaatccctgctgagatggcacggggcccagagtttgattttgagaacggcagggttaaaccatgggagggagagagaattcatgatatagctgtggatgatctggagcttacacttggaagcgggaaagctcgttgttgatcttccaaggttcaaaatttagtaggagaatgtgtacaaatagggtgggaatagtttgcaatattcatgtggatttcattgtgcattctcgaaattactgatggcatccctatggaattgctttggggtctactgttattactgcaacaattgggaaatttcaaaatcatgtctggtgcatcttgtctttgttatatgtacagttccttttctcttggagccactacagaaaacccgaaacaatttttttgtttcgtgtgctagagcgaaatttcactcaaacttcatataaggtatcgagaccgtaggatctttcgtgttgtggggaagactctggcatttgagtttagaggttattttcttctttccctagctagattattatatttaaaattagaatgtcttcttgaattgttcattgatcataagatccaattagaattagcatattgggtggtttcacatacctcaaacttaagttatttgtagttatatcagaaaagtaatatcttttcacttgcttaaatttttgatgtggatatatcataacataacccataatatgacataaatgtctttatgtaaaatgcatttgttataatcatagtcagaactttttgggcacttaaggatggttggttaagtagggtattgttaactaggcagagagttgtatcactgagacttagtatcatgaatttatttatagtccagaagaagataaatgaaaaatgaatcaaacatgatgaaagtgatgattttattcagtagtacctatctgtgcagtctgaaggttttgtttcttatctattattattattattcatgaatcatgcaaggacttaacatgtctttctgagttttctcagttttgttgaacttttgtggttagtatagtcaaaaaagcatcttagagtgaaagccccaagagggtccctccccatgtgatgtttttttttttattgttattattttatttatttatttaaatttttgaaggcatgtgacttgtgtcatacttgatgtttgtagtgtaccaactacactccaataactccacaattattaatgcattcacttttactggtttgccccccattgttgtctagttagtatgaacttcttattcattggaatcaatggtcactttgttggaatttgtgttcaaataactcaactatttataaaactaactaactttagcataatgaaagtatgagtttttatatcttgattgatactcatttaccagtttagttaattgtgaaagagattccttttttgttagattctgcttgattatgatgttctgaaatccttgttactctccatgaatataaataaagatgtgatttttccaaagaaccctactattaaattaccggaatgatgatgattatatcacaaaataaaataatgatcgtaaaaggtaattcaaccatccttacccgacattgggaatcccatatgtgcatttttagttgggctagtcaaatcaaaaatcaagtctatattattttcagatgagtggaaatgtatcaagttttttacctaaaaaaagtatcaagttttgtcatgaacagtgatgttttttttgaagcagtttctcatcttcatgtaaatttaattttctatacttacatttaactaatattttatttctaaactaatacatatcatcattgaaaatatatgagcacttttatctaaaacccaaaaatacccctc

SEQ ID NO: 161487 - DNA, 12116 bp, Cannabis sativa
taggttcatttctattggcaaattaactatttcgttcttttaagtctgttaatcttcttacacatctcaccctaattgcctaaggtaataatttaaatagccaggtggaaaatacaatattctaattttaagttttaaaaattaaatcataataaaataaaaccattaaactgaaaagagaaaaaaaattaatttctatgcaatttctatgtactaaggaaactatcatttttcctgtcctcactctctctttctctaactacgggactgagttaaggttagagtgctgagaggagaaaagagggtggtagggaacgtgagggttggataatttagtgttaatatatatatacattaaaaaaaatcttatagatcatttaacttaatagaaagagtaaatatgatttacttatctccttttttaattatttaaacagcctattcaaattaatataccacttatcatattttgatcttcttttacatactcattctacttgataggagaatgggaagaaagaagaagataattgtagattaagaagatattggaaggaaaaattctttttacatacccaaaccttggacctcgaccccgattttagtcttagacccatacttagaactggacactaacttgagccctagatccaaatccagacccggacctagttttgaacctcggccgcagaccaagagtcagaccccaatcccaaacccagactcgggtatgtgagagaaaattttttaaaaaaaaattaaatagaaaataacatttttatttttagtgcatgtttgacatcatatctaaaaaaaatatttttttgttttttaaaacatatttttaaaaaaaaaaaaaaaaaaacaaataggcgtgtttggcctttgttttttaaaaataattttcaaaaaataaaattacaataaacaacaattttgagaacaacaaaatgttattttctgtgttagaaaataatttactttttgtcaatatttttttccactttatctaacgttattatactcatctttttctaaatttctcaaaatattttctctcatcactttctctctcctcattttctctctcatcaaggtccgagtttgggatcagggtcagggtcaggtccgggatccaaggtcaagtccaggtctcggtttggggttggagtcgagtctagatcaaggtcggtgtcaggatcggggtcaagtctggggtccaagtgttgaacccaaaggtgggtgtttaaatatgtatactcacaagtacacgaatcgtctcataatataatattcatataagtacgaggtcgaatccaaaggagttgcctaacatcaaagagaaattatttcaaacgaaacaataatattctaacctggttccaaatatttgatgagattgttttagaaaaataaaagacaagtaataaaatgatttgaaataaaattgaatgaatatagaaatagttttcaaataagatgtataaaataagattattaagatattagaattcacaatatgcaagttcagtagtatttataagtatattgattcccaagttttagttatagttaaaataaatcacactatattttctaaaatatattttctatttaagaacaagttatttttaaaaatctataatttttcttcacttacaaaatatataatttttaagcattcattgtgttacgacctaataaaactacaaaaaattaattatgtttaggcaaaatataatacttatgttctaagaattagatgtacacaatttaatgaaagatatttaattatagagtactatatttttacacattgaagaactaagtgaaatatgctttaacaatcaagaatacatgatactgaagataaaaaaatatatatttttgatagaaaaattcatgaaaaatgtttgcacaaatggaaaatcaacatacaaaaataaatatcatctagttatattttgattcatcgttatcttaataatcttgaaaaaaaaaagattagaagttcataactagataaaaatttcaaaagatagatatactttcttcaagatataaaaatagtagaaagaaaatggtgatagaaagaaattgtaaaagagtgatctatgagatgaaaagtttagaagtgaagagtggaagagtagagtagtaagagagatgttggtgtgaaaatggtcttacaacactctatttataggagaaatgaaggaattaaattaatcaaaataaaatacataaattgattaatttaattacggttgagaagtgataggataattagagtaaatataagagtattggaaaaatgaaatatttgtttggatggaaaagtagtgaaaaagatagggtaaaaataaaatatgattgtttattaaggtgaaataaattgggaggagtaaatgagtttttatgtgtaaaatgttgggagaaaatattgatttttggcttttgttagtgtagttttaggatgagaaattagccaaataacaactcattttttccttctgtttcttctcaacaggtgcaatgtggctaatggctattagtttggagttgatagagattacaggcggcgtgcgctggttagtgcagagctgatgctggtgacctaatgtgcacacgtggtagctagagtataacaccctattccgcaggaacactacatgtgtgcttttataaattagtttatgataataaattaacggaaggagtcattatatttcgctgcaatcaatgtaaggctttcttaaacccttatgtatttattttattgtttagagaattcatatttaggatgttaattcaacatacttttttgtaaatctagatcttagttaaatattcccaacaatttattgtgagcctgagatccctggccggcccccatgtcgctagttgtcgagatctggcagtttttgtcgtttgacctttgaggaaaagtctatcctccctctggaaagggaagatctttcctagttcctaagaactaggttgatccgcatatcgatagaccctccctaatctatcaacaaatcttccttgaagtggatctctgatgagatcctcacctcttctatcggttctctatttgaaccaccttattaaattgctggcctctttgttgcggcgatctaactctgcctggtgagaccgaaggatccgctcttggtcatctatccatctcaagaatttgcatctctgctgagtgagtgcatcgcaatcagtagtgtcaaggaatttgtgtctctgctgagcgaatatatcgcagtcagcagcacatggttcttgaagggattcatgtctctactaagcaaatatattgcggtcagcagtgtgtggttcttcaattaggcctgcatggtctacaactttttaaagtctacccaactcaagatcttctcccaagcctaagtgaagctgaccaatttttatatatattacaatatgtatattataaatagatatgagaatcattaacatattttaaactataattctatcatatactacaatattaaaataaaataataataataataacacaaaggaaagagaaaaaaaaaattctcaccatatataatcagcctccaaatgaacattccctaaccaatattgtcaacttggacaaatctcacacgcaatcagcattccattaaagacttaagactgaagtttttatttttatttttgagggttgttacacatttgatgcaataataaagatattgtatgaacatgttgacatatttatatatgaacaaattttggggtataggatttgctttaaaccgtcattgtagaccagcatttcatttcagatgattttattgatttttttattatttttgttgggaactgatgaatagtgttcaaagattcatatctaacacaaaatcacaatagatcctatagagaatacgcccttcaatccccacatgttaggagatcaagaactagatatcacttcttgatactctaattagcttctcccaattaaatatatactttatataaaatgtgacactaaataattcctcattataaatcattatactttttaatacccacaagtgattcagtagtataagtataaatatgagaatgatggttgtttcaaacctttgaacaatctataatttataatacaataacaggaacatacaaaaaaaaattgcttaaatacacaaccagctaggatactcataatctgtagtcatgactcatgatcaacatgggctaggtagctagctgttgatttgaattgattccatgtatatataatatacaaaaacaaattcaattgtagtgtataattatgcattgaatttaaatggctaattatgtacagatgtacataataacaaattgagccaaaaaagatgtacagatgtgactccactacaactagctaattatagtttattttcttttttttgaaaaaaaaaaacgaaaggaaaatattaattaatcagaaagaatagagtgataaaagagaagacacttggattagattaaattagattagaatagattagattaggcataaagtaattgacaactcgacggagcaaacccacgaaaagcattcggagctggcacaacctgccactctacttttacagtaataccctttttccctaacccttctccaacatcaacgtacaacttccctatgcctacgtacaacccactcgaaacaacgtatatcaatccatctaatccgatcgcactgaaaggtcgtctaagcgcgtcgcacgggaacttctccccttccacgtattgccacgtgtcttcatccggattgtacactttcatcggacagtctccgtgttccgatataaccaacagcctgtccccgaccacaacgctgacccccgtccacccttctctcatacccgccttcatctcccgccacgtgtccgaatctggatcgtacgttgatccccgcggtgaaaacatgaacggccacgtccatccctccgtaacgcacaactttccccccaccaccgccgagctgtaccgcgccaatgccgccggcagtttggcggaggctttccacgtgtcggtcacgtgatcgtacctttctacggaggtgatggcttcaccggttgcatcgctccctccgacggcgaagatctcgccgttgatttccccagcctcgaagtacgatctcggggacagcatcggggttgcctcggaccattgattggtggacgcgtggtagaccacggtactctgcatggggctacatgtatcggatcgcatcccgcctaaaacaaataacttgccgtgacgtggcagcgaggcgcaggcgaaggaggagggtgaaagtgaaacgtcgtcgttcggtaaaggcatagaagggaggacgaaccaacgtcccgatcgagggtcgagggcctgccactgcatcctggccgttgattttttgaaggcgaaaacgaagatgaaaggcagggagagagagagattcttcttggagagaagaaatccaggatgggttatggctttgttccacgaagctgaaacggaacggaccaaagtttgatacggatacggaactcgaagtaggcagagctcagcgacgtcgtttggtaatcctggaatcaaagcctctgtaattccattttcttcttcttcttctgagattttcaaggagctttttttcgatggaattggcatttttatttttagtggtgtgtgtgtggagtggtgaggaggtgatgagctgaaatattggagttatagtaaaacccaaacaaacaaaaaaaacaagggaagagaagaggatctacttataaaaaggcatagtaagatgagtgacgatttatttggacttaaaaaggtgttgtagtagcagtgctactactactttggtaggttgcctttttttatttataaaaataaattataaggaaagaaacaggagaagagattaaatattatattatttatagatatctgattacgtggcttgaattattgggacgtcaatgtataaagactaatttttttttttggttaaattgaaaagataaaagtttttttttcttaaaataaaaaataaataattctagaaggcggattatagggagggagataaaaaaaaaaccggtaaatccgaaagaagaaaagactttggggtttgggagtggagaaagtgaatagaaaattttgataatgatgtcaccgggcgggaatcgagtcgtggtgacgtggcatccgcaacgttacgagcagaaaccgccgacgaccggagtttgatttgatgtttgattctctctgtaattttttattttgggtttgctttgcaaataagttttaattaaaatgtaagtggtgggtagtggtggtggtgggcctttgggattaatgatttggtgagaggtagatagatccaagcatgatgtgggtaattattattattattataaaccaatgctcatactcatcctctatatctattattatagtggtagtacccgtgtactactacatttttatttttattaaataattggaaaataaagataaatataagttgtaaagttaagtatataattgaggatatatgtgtatatatataaaaaaaaaaactatgacagatatactaatagtatgtggttgatgatggttaggccaacagcaatgaggaaccccataatattctgtacatacataacactacttttttaataaaaataaataataaatatgagtcggaccattacgatccgatacaaaaaaaatatgtgtttaggcactacataatacgataagttaaaaaacacgacacgtaaacataaataaattacctcaaaaacataataccttaaattattcaataatttaataataataataacaataataaatatgtctttatcaattaaaatgacattaatatttaaattataataattataattattttttatatagttatgtgtaattattattgaaaacgtataaaactaattaaaattataaaatacacatatatttaagtatttggctcatcaattataataaaaatataaaatatggagtacaacttctagcctgtataagaaaataggttggtctatttaagaaaaacgggtcgatcgaaataaagaaagatacaaatttgaccacgacacaaaattactggacttgcgggtttagccgtgcttatcctatgaaattgttgcacggtacgacacaactcatattttttttatggcacgatacgatatatcatatatatttttatggcacggtacaacatgtcttatatttttttatgatctgtattgcacgacccgtattttgaaaagcaagaaaaaatatagaccgaactagcacgacacgcacatatttaaagttatgtttgtactcataattttgagactcccttcaattttttaaatgttgaattgaattagttttgttttgttagtcatttttgaaggtttttttttttttacaatgaaactaagaaagagtaatttgatttagtatgcttaaatatacataatttttaatataccactcatttttaatatattttctttcaaaaaatatccttacatttctaaaagcctatctctctctcttactttaaaactctctcattctaactaagtcttgtcatctctacctcgaaattttaaaatccatgagctcaaccaccctgaaaccttgaaattctcacccatcatcggaagtaaatattattatttctttgaaattaaaaaaatataaataataacataattgtaaacaataacataaacttatataaaataaaaactataaactctcatatatatagaaaaatttatataaaaacataaaaacacacggaaaacaaaaatattacctataaaacaatgtcaccttcattaacgaagtcaccatctccaacatcttgtaaaccgtcaccctaatgaataaaatggataataaatagaatgtaaataaaaataatgcaacataataaacactaaattatattaactcttttaaataaaaaataagataaatataatattacaaaaaaaaaaaaaaagtaacctaactgtaaacaacataacacataagtaaacataaatagaacctctacaactgtagtgtctccttcattcaccaacacaccaccttcagaaccttttaaaatagggtcatgttacacacaaataattacaaatgagtaaactgaaaacacacaaagaaataaaactactaaaaattgcaataacaataaaagttattaaggaacaaacgtattcacaacatacagttggacaatatttcacattttcattatccggacctacaacatcaacatcgatctttgataaattgaccctgaaaatacaaacaatcacaaaaattaaaaaatttaaaacttgcaattatataaaaaaaaaaaactaaaattaataaaaataaaaatcacattgacatccttctctgccaaatcaacattaacaccatatttcaaaccagatttctacattaaaaaacaaaaaaaaaatgaataataataagactactaaaatatcaaaaaatgattaaacactcacatcatcactattgccaccactatcatcacgaatatccaccacactttgagacgcttttaaatcatcaaacatttctttcaaatcattaaatttcaagtcccagtaaacttgcaaactttcatcgatcttagaatcaatgtgtgaaatcatattcagttccaactctttagatctacacctaatatctgatgtaatatcctcaaaagaaccatcacactgtaattgcttttgaattacttgttttatgtctctccttaactcacttaaaacagaagattgtaaaccaatcgcaccacctcgatcaacatcagtatcagaatcttccttctcaataaactcaaaaccagagagattaagcattgttctcttcatctgtagcaaatatatattcacctttcagctaccaaaaaacaacaaaaattgtaaacacaattagtaatcaataaaataaaaataaataaactaaaatataaacaacaatatataaaaaactaataaaaattgtaccttaggagataaaaaaaaaactttcctctcaacaacactattattgggaagacctacattcaaccatttacaaattctatattcggggtcactatcatattcacaaaaactaactttttgacaaagaggaatagtttcataaatccaaacaagaaatgcataaggaaaacaaagcaacttataagtcctcgaaaaatctttatcgataaccttcgctttccctttacgcttatcgataaccttagaaccaatatatttccctattttctttcttcggtacacccctcaaaccaatcctcatgttgtgtaatgtttttttaaaaactaatttcccctaaggaaaactctcataatcaccaatcccaacaatattgagtatttcattaggaaccttcttggaattagggctgctaaataaacaattagaaacaaaatacaacataaccatcttaacagcataatcatccagcttaatatcactatacctgaatctcttctcaatagcactaagtgttacttgctgatcactaaaatacttgtccacaaatacattctccttctttgcataagcactcatatcagaatcaccaacacataataaaccgatcacaaccgcaaactcagccaaactaaacttaaaattttgagaaccaaatttgaaccacatttcagaaggatttttctagtgcacctccctatgcaaagcaatgtgaatcaactgactttgcattgtaattggattcatgtccaaaaaatatccaaaagatgtctcacaaaacagttttgcttgagaaggagtcaatttactattgatattggcaataacatggtaatcatgattagaaaaaaaaataataattcttccaccaaccctaataagaaatataattgacatacaaaagtaaaatcatattacaaataaacaataatgtaaacaaaccagtttaccatttcaaaaatattgaataaaacagaacattaaaaacaaacataataacattataacaataaagaacacaatacaaacacaaaatcaaaaactaaataaaaactttaacatatacaaaggctagaaacataataacataaacaaaatcgtcaacaaaaatagaattaaaaaaataaacaataatatatagtaatcagattaacaacacacatacataaacaacaataaaaatatacaaacaaataatttcttacaaatttaaacttaaaaatagtaaagtatataataagaaaataacgtcaaaccgaaaaaatagcacgcaataaatacacaaaaaaaaaagttacaacaattaaaaaaaaaataagaaacaaaaaataagtaaactaaatcatatacaagaatatatttaaatagaattaatacctaaaagaaatcaaaccaaaaaaaaatcctaaaatatacaaaaaagtatgatgaaaaaactagatcttaaagaaacaaaccctaatgtaaacaaaaataaaaatataaaagaaactaaccctaatgtaaacaaaattgagatctcagttgagtaaaaaacataaaaaaaaactaacaaaatgaaaaacaacaataaaaaaaataaaaaaaaattagaaaaataacaaacacaaaaaaattaataaaataacaaaatgaaaaattaaaatgtatacctaatcaaaaaaattaccgaaaacaaaattgaaaaactaaaaattaaaaattaaaaataaaccaaaaaaataacacataccttcatcgattcattgttctcaacttcaagatcatcactactgtacaaatctttatcatattccacaacttgttttaactttttcaaaggccgatcgtcagtaatcttcttgtttccacgaatatattgcttcctcttaacctccttaacagaaacatcaccagaaccatcagaaccgccaaaaagttcttcgttgtcatcctcaaaaatcgttttcttcatcttcttcttgtcaacaagaagcttcgaggaaccagagggagaaagcgaagatcgagttttaaccatttacaatttgtttattcttgagaaattttgaaatgaaaaaccttttatgaaactatcactctaaatagagagaaaatttgaatttcaaatctctctctaaaaaactcactctaaaaacttctgaacttgaaaaaaatgaaacccactaaaattactataaaccgcttgctccctctaactctacaataatatattaagaagtctacaaactaaggagcaattataaaaactagcaaaaaacgtgacaagactgacgcacgtgagctatcagacgtgtgaagatggacaatacatgacatgactagggatgacgttatcagcaaacacgtagataaaaaaaaaatcaattatatcaaatacggtatcaaaaaatagtaaacttaacaaaaaataaaaagttacgtaaaaaaaataaattagattaaaaaaggctccaaatgtaaatatgctaaaaaactcttattattattttgtgtttgtcaagtcaacccacgtttaacttttaaacctaacctgcaaaatctcatgttacgtaaaaatttgctttgtcacccctaattgatgtaattgttatattttttttcctattattttgtgtttattatagctctagcagttctcctgtaattttttttttttgagaaattttgattaatttatatttcaacaatattgtaattttttcaaaatttcttaaaaaatttaaaaatgtctacttgagcacaacgaacacctatatatatatatatatacacaaaacataatattatattttaagtatttcaattagatcgtaccctactataaaagtatttttttgtatatcaaattagattaatgactccatatgcatttaataaaatattaattatactatgatagatttagagtatggtgtagaatgtatttacataatgcactatttttttttttttgtaaaaaagttatatttttacgtttaaataattttttttatatttttacagtattctatagaaataacatgaaaaca

SEQ ID NO: 161488 - DNA, 4421 bp, Cannabis sativa
gggcataaaacccaacatgtataactgacgcaaataacttgtgtcatttataaatcaatgcaaaattttctagacaattatttttgtcaatttcgggctttgactgtcgtgttaaccaatgcaataagtctattttgtagtagtgtctttcttttataaaataataatttggactctatatttttgagtgatatatatagaataagattgaccaactcaattttcgtcaaaatagaaaatatataataacaacctaaccttgaggtattatgaccaagcaatactataattaacacatttatcttcgtaatattaatggaaaaaaatgaaaaatcaaagacataggtcataagcttgtttcatagatttttgctcgatcggtgctcaataaaattttagtttaatctttgattttttttaaaagattaaaggtaaaaggaaagagggtaatttcaaaggcttgcacacagagctgaaaagctaatcgaagtcctatatgtcttcgattatttggatggacgcttttatcttcgattattcccaaataatcaaatacataggtattttataatgtcttttgtggccttttcccttatcactttctctcttttctccttcactctcttcactgaaaccttaaaaaccttaaagaaaaccatcgtgaccgaatccattttcatgattattgactgttttttcacaattttttttctaatctttagttcaccaacagataatcacatctagtgtaccaaataatttattttaggattttgatgttaaaactcaaagcactactacaaaacaaccttttagaggtagctcttttagaagattaattaaaaagggaagctaaaaatcctaatactcttgctcattgaaaattgagatttagatgcagttatgtataaaaaccgtaactgtaaagtgtacctaattgctatagttatggtcttttttgtttcaatgtgatttggaaatgagaagaaatatagcgttggttattaggaaataatcgacgacatagggatacgcgttggttgacacatttcccctatgtcgttggttagttcctaataactgaccgtaaaggatttatataaccccatgcacaacttcatcttcctcaaaccatagcccctaccacgaaaaccctcgccaaccaccatcattttagccccatttcttaatttttcattcgtctttacccactttttttttttttttaaaaaaaaaaaagaaaacctttcattttccataccctaaaatatatccacatagtttgatcgtcttttctttttaatgttttagggcaaactgaacttagaagttgtggatgtggtggttgtagctctggccgccaaatattttagagaaattaaatctcaacgtccattaaggtgtaaatatgataatctctaataattttagtaatgtacattgctttattttttgttttgtaaattttttgcccgtttttctagattgttaagattgtgttcttatggttgtgcgtggtggccgaatttcggtattaaggtaaaaatgtaaactttaataatatatatgtatgtattgtgtgttgtattgaatatgtattcactactacaaattatacttttggtgtcgattcgaggaacttttttttttttttgaaaaattgacactaaagaccacccccaacaatttggtctcggtttataactgacatgtaacgccctattccaaagggacaccacgtgtgtgctcttacaaatttatttttcatctaatttattaatttaataaaattgcggtttaattaaaacttttaattaaaataaaaacataaatttaataaaagataaactactattaagtatgggaatcccctgtttaaaaattttacattctgtttcaaaactagtactacaacatagggttacagttcaaaatatatcaaaagggtggatcctatccattggaagctgaggcactgtggttgatatgtacatcactggaagacctctgactcatggttggtccaccttaccctttcctttatctgcaccacgaagcacccgtgagtcacaaagactcatcaagaaaagctataataacaaaaacagtatatatacatattgcaagtaatgacaacatgacataacaaacacattcatcattcaatgcatagtcaaacaatgcataaacaattgtacgtcttataagacgaaccgatctcaatgcctcataaagcatccttaccacttgacatccacgagcttcatatccactatcgttggataaagcaaatgataagtaagaaacctatctgtggcttcaggtgagtagttactcattcacagtaatggtaatgaccgtatcttttcctcaatcatattcgagtgacaacaatagcaatcgttacctcgataataatcaagtcacaaaagataataatcatttctcacttaacatgctcagtagtgcataaatcttttcttacctcaatccagtaatcaggtgtgcacgccgacctgagtggaaataaaattcagtaaataacctaaccaaattcttacacaaaccctaataccaaaatcggacaaaccctaactgtcattagtcccaaaatacgctatgcaacacctaaataccctaaactaggtcttggaaatcaccccaagccaaaaaaccaaccttgaagaaaattgggattctcccttacagaccaaacattcgaccgattctgctataccagaaggaatcggtcgactggatctggtaggtaaggaaatcttgggttttcttccccaaaactcctccacacctactcaactgcttcgaaacagtttcataccataaaaacaatatattcaagccatcaatttacaacaattcattaatttaagcaaattaccatagttgagtagaaattttgctcttaaaaccttaattcttctaacacaaagctaacagccctatttttaaccaaattaagcttaaacaatctctaaatcaagcctaaaaacttgttctaaattccaatttattaatatctcagccccaaaattctaaaatcctaacctaaaactaacttaaaacttgaaaaatcctcaaacaacatagtaaagagcttacgtcaaagcttctaggttgaacttagtagtaaaatttgctagagattgaagaaatttgatgaagaactcctctgatttatctggcctctaggttttcgaaggaaagagaaaggaagagcaaactttaagcatttcttaatttcttaattatcaacccttatcttttagtataataatcaacatatacacttaatattatctaaaatctcaccctaaaaaaacactagaagataaaagaatccaaccttgtaaaataactactctacccctccctttaaaacttagactataatataacctaggggtattttggtcatttttttaacttccatgttcaacctcctcctcaacattttaaccaagtttagtataattctaatacaacacaacttaattcccgtgaaatttttgaccacttcgtcgagtttctaaggccgccgaacccaaaaatattttatttcacaaatggtatctactgtacccacataatctgataaaatcttcgtaattaataaattccactctatttaatcatttattaattcacactaattatcacacatttaacgtaagtaacattataatcttactccaatatcagcataatcacatattcaataaaatatgctcaaaaaatattattatattttctagaatattacaactatcccttccttatagaactttcgtcctcaaaatttacctggatagctcgggatattgctccctcatctgcaactctaactcccaagtcgcctctttaaccttgttgttcctccagagcactttaactagcagaatagtcttgttccgtaacactttttccttcctgtccaagatttgaaccagttgttcttcataagacagatctgtctgaagctcgatatcttcatagcttaggacacttttcgtatcaaacacatacttctaaagcattgagatgtggaacacattatgaactcttgaaaaagcagagggtaaggctacctaatcaacccttaccagaatttcaaatgggcgaataaatttgggacttagcttttccttctttccaaacctccaaattcccttcattggggacacccaaaggaagacaaaatccccaacttagaattacatatctctaaactttggatcagcgtagctcttttgtctattctgtgaggctagcatacgagctcgaatcttctcaatggccgcactcgttctttggactgcatcaggtccaaggtacttccgttcactgccttcatcctaatgaatcggtcaacgacactttctgtaggaaattattttaccagg

SEQ ID NO: 161489 - DNA, 2127 bp, Cannabis sativa
  modified_base (2065)..(2102): a, c, t, g, unknown or other
tatgttcgggtcggggttcgagtccagctttaggttcagggtcagggtacgagtcggggttcaggttaggatctgaggttcttgtcggggttcgggttcgggttcgggtcaagatttggggtccagttttgagtataggtttggggtccgagtttaggtctgggctgggtctgggtttgcgctgagttcgaggtccgggtctggtgtttgggtacgggtttgagtctagttctaggtcttagttcgggttcgggctaaggtctgggtccgggtcaagggttcgggttcaggtgcaggtttgggttcgggccaaggttcggggtcgagggtctagggtctggggttcgggtctggattcagctggggtctggggtctaaggtctgggtccgggtctagtccagggtaggatggtttcatgtcatggtatggtgtagaatattgatgttttcttttttttttttttagtaaaaaaattataaaaataattttcaaaaacctaagccaaacaccattaaatttttaaaataacaaaaaaaaaaatgcttttattttaagttttgaaaacacaaattctaaaaactaaaaatacaaccaaacaacctctaatcttttgggtcggactccttggtcgtccttgtctttctaatgacttttttaagtatatataatgaattaataatataattataagatagttattataaactaataacaaataaaacgagcaaaatgatgcacaatgttatgcagcggtgtgctctatgaaatacataaacaagtgcatcaaattagttagagagtttgttagaaaatcaattaggaactcaactaactaattgtaatgacatagactatgacatctcacattcatcttcagttgtaaaactttgcctataaataaaactttagctcactcaagtattttaaatgagtattctttcaatcaatcctcttcatctacattctttctctgaactttctctctcaagaacaacaattcttgatctttgatatggtatcggagccatggcgtcaaaagaccaataccatccaaatccacgcaatgaaccaatttttccacctactaaagatgaaccagtctgttcacctactcaagctcgagttgaagaaattcctcaaaccgcgttaccaaacaacaatctgctccaactgaatctgagactcagttggtccaattacaacttctagagatccttggttctggttgctactcaagcttacaatctcaatggttacattctcggcaccaaccttcctcttcaacaattcttgaaggtgatgttcctaaccctgattttgtccaatggttgtgatttgatcagttcctaatgcacttgttaatgaattcaatgactgagatgatgactggacatacaattcactgtcaaacctctgctcaaatatggaatactctcaatcaatttgttcaacacaatgtcaagagcccaacttctttaaatctaaggatccctgcagtcaacaaagacatgatctataacaatcgatgagtattttttaaagatgaaacaatttggagatgatcttgctatggctagacaattcttttctgatgaggatctcattttatacattctcgatggtctcagatctgagtatgaagctattttcttcaatctcacctctcaatttgattcttttatccttacaagaagtgtaattcatgcttcatagtcaaaagatgagaataaattaacacaccacggaagattttgtcaatgtgaaagcaaatcttgcaaatctaaatttgaacaatagctcttgaggtgctcctagctactccaacagaggtcatcatggttcttattatggtggaagacactcataaaataatagaggtggaagagataataatctaccaaatgtgtggaagagttggccacaccagtctcaagtgttatcattgtagcgtccccgctttaagcctctattgggcctttacacccacaaaataatagctcttatacacgagtacgccactgtggcaacttcatggacttacgactaaccctacagaccaacacnnnnnnnnnnnnnnnnnnnnnnnnnnnnnnnnnnnnnncctgggaaaacttcccaagaggtca

SEQ ID NO: 161490 - DNA, 8305 bp, Cannabis sativa
  modified_base (3223)..(3223): a, c, t, g, unknown or other
  modified_base (3250)..(3250): a, c, t, g, unknown or other
  modified_base (3313)..(3336): a, c, t, g, unknown or other
aaaaaaaaaaaaaaacctagaattaaggaaccaatttatgtcaggtgattttggtagaatttgagataaggtgaatggagtttcatctcaaaaccaattgagaatggcaagagtagcctattcatcttatatatcacaatttatttctacacattagcaacgtgggactaactcttaataaattttaagttcatgtatgaaaattaaaatatgaagtcatttaggaaaatctaactgaaaacatagtacaaaatgaaatattacaattggttcttaaaaccactacgtggactggtaatataataatgtacacattgtcgaatccagtgtagggaggagcagagtcccctgctttgacatgcagcagtatgttggcttctactgctctatgcgaatttagaacaaaccatatttgggattttgttttaataagaaaaaagataaaccatagtatcaaattggcaattggtacgaagtttatttccttcattcaaagtgaaaggctcacacaccaccaaagtatttttcttcattaccaaaagctgggctcagtcccagattgtggacctataaagttttccacattgggtatttcatccaaccatggactattccctaagctttcttgttctatcccctcaaatagtttgtctaaaggatctgagatagagttacaaaccatgttctcttctccccaactatatggattttgatgaagatgaaaacccacctgcccaccaacaactatgtcactactatttccagttgaattctggttctgggagggtagaacttcctgttgattctgataatactgacagttcatagctccattatgtgaaaagagttgagaactggaatctaaggtattattatgagtattatgatcactattattattagttccttcagaagaactcccagaacttgcaaaaccagctgtgacattatgagctatttggttcccaagaatctctatctcctcctgcaggtaggcaacctgggcacaaaattcaacttattaaacttgtctaaggcttgtttggtttcttttcttttaagcaaataggtgaaatcatcttgacataagttacataagagatttctttttcatcattattcttttttgtgttaaaaacatatactatcaaaggagttataattttctacctgttgttggagagcaaagatatgagcaacacaaccataaatggggtctctcatccgagcaagagcttcatatgagatagaggttgcagcatcactccggttgtgttgtggcaagtgtaataacagctttgaaacattgctagctccgaacaccttgtgcaccgccgcaaaatggcttgcagcctcgtcgtagccgaagtatggagcaaaaatgcattcactgctgcattttcgcctcagaaacttgcatgctccacatgaagatcccaagcctgtcatagtgctcactaattaaggattattattattattctttttaaagtttaattttaatttttttttttttttcactaatatttgtctaaaggttttttctccctaaactaatagtattctaataaataacttagaaatatgcttcttttgtttgttcacaaagtaaaaatagattttgtttttataggcatcttgtggtaagggtgttaggaaattctttttggctttgtccaaaggacattcttcttttactgaaaagcagtgctcattttgggtctcctttatgggctacattgtcattctcaaattgggtaaggtttccttattagtgcctcaaaagggctctttgtataaagattctttaggaatgagactgttttgatggaagacctaatcattattatcattagttgagtttgaataaaagagataatcatctttgtataataattttaagccataaacatctagcagaagaaccgggaaggcaacaactgtcacctatttctctctctctctcgagtatgaaatagagagagcaactttataagaaaatcctattggtgaagagtgtaccatatttattaccttaaaagatggttcattaagtaccacaattttgacttcaaaatcaatcaaataactttcaatctaaaagttttcgaacacttaaaaaaaaaaaaggttttcgaacacttcagtagtgattggttatgctttactcactcaatattcatagtttttaagataacaaacaaaagggttaatttgaaatatttgcttattatgttcagcacattgaaacgacatgtaacttttaatcaattaacatagcaattattattattagccaatatctcttgggaaagacaagagtgcttaacgttcccaatttgcctaaagaaaattccaactcaaaatgatgataatatggcatatttgtatagttgcagtccatcctatatcctttccacactaattaatgaatatttaatttattgattgattagcacataatttatgtgcaatatgtttaatccgtataaataaaaatgaaaaaagtaatatagaagactttcaatactttatattttattaattagtctattttagagaatttctaataaacatacaaataagtgatataaataaaaaacgtagcttattttgttaaaagtctactataatggtgtgctaacttttgatgcaaatatctcacataacaaaaagtgatctaaatttagattacaatatagcatgatgcaaaaggaaaacttacaaaaatactagaatttgagttaatttttacaaaaatactgtcacacataattttttttttttcaaaaatactgtgtttttataaaacaacagtggaacacaaaacaaaacaacataaaacaatagtggaacaactaaaaaacaaccgtaaaacaatagtgaaaacttaacacagtataaaacttaaacagtatttttgaaaaaaattccgccccacagtataaaataaaaaagttaaaaatttcccaaaatataccataaagctatatttggccttttttttttatatatatatatatatatatttacttcaatacacaaagtgcaaataatctataaaagtcaatattactattaatgctcattcaaaatatataatataaataattttatttatattattttaatatcttataaatattttattcaaaataaatgaatagtattaataagtggtaaagatgtaattagaaaaggaattattttacaaatacacaanaataacaaaaaaaaaattacaaaaatnaaaaaattacaaaaatatgattttacgaaattttaaacgtttttacgattttttttattttannnnnnnnnnnnnnnnnnnnnnnntgttatactcttgttaatttgttgctattttttattatttgtatgctattttttgttgttgttttgatgttatttagatattatttttatgttacttttatgtaatttttttattgtattcgtgttgtttctattgaaaaccgtacaaatgtaaaacaaattctttaaacgtaaaaatatatttttttttataaaaaatggtgccttatgtaattatctcattaaaaaaggtactatttattgtgggctaaaatttaacccatgctattttgtgctaaatttggcacaatttttagcttgagccaaatttgccacacattttacatcactattggagttaagttttagtaaaatattctaaaaataataatacaccacatttatagctctccattggagatgctcataaatgctataattttatatttaccattatgtcatttttatattttattattaaagtttagttagcatgatcatttatattaaatgacttgtattattattattttattattaaattttatatttacttttgtatgactattattattttatatttttttttataaattattagatcaatatgatatattaaattttatatcaagatttacaattatgcattagagcataataataaaagttgatgcaaaaatatcacaaaataattatttggaccaaatatatatcaatttatgcatctcctattggagatggtcttacactcttttttatctattaatgacatgtacatattattaaattatttatactgtaaattatttgtgtagattgggatataatacattctttcttagagcatctttaacggagtactaaaaaagtagtatattattatattttagcacacttaaaaaaatacttctataataacgttttaaaaagtgtgtcaaattcggcacatgctgaaaattgtgctaaatttgacacaagatatagcattgtgctaaatttggtccacaataaattttacattttttatttattataataccgctaattattacgatccattgacatttaaataactttatcttctttatttattatattactattagaccatctctaatgagtgatgtaaaagttgagttatatttggcacaaaaagtaattttatgatatttttacagcaacttttactatgtgatccaatacataattataaattttaatgtaaaatttaatgtcatttaatacccacttaataatttattaaaaaaaatataaaataatattaataatacaaagataaatacaaaatttaataataataatgcaagtcatttaatgttaaggagcttgttaacaaaaattaataataaaattttaaaaatgtcataattgtaaatataaaagaacatcatttattatgatgcaaattttgtttcattctacgttgtaatccaaatttggatcactttttgttatatgatgtatttgcatcacaatttggcacactattagagtagaattttaacaaagtgagctatattttacagctgcatcactcatttgcatctccattagatatgctcttatctaagcaataaaataataaaagataatgatgtttgtatatattcaatacaatattgttataatggcatttttttgcctaaaaatacgagtacaatctcgtaaaaagttgacacgtggatccattttcctaaagaaaaaggatgacgtgtcaataacatggctctcgaagagttaaccttgcatgactcaaacttgcaagaggatacaatagcatggtaaaagataagtgggaccaagtgaaatcaatgctgatcgcgcatatcgattataagtgatgagcaagtaattctctcccacagcaagcaaagactatttcattatataagtatggttcgaatgaatatttttcgatgagtcatcaggaacttgcattttctaagtcgtcaacacatggaatgtctgagtatgtgatccaagatgattgaagacattcataaattaaatttaggctcaaaggtctattatgcgagaataacaccgagccccaaagcttttgtgtttggaatatgaatggacaaacatcagctgagtaagtcgcacgtgttgttgcaattaagacaagaacagaagaattgttcttgcatttattctttgaacatttatcctaattaaactgtgtaattattataataacaactatgtaatcctaacaaactcttgctttctatataaaagtgtgatctaaatttaataaactaacctgaaatcaattaccaaaaatagactaagcagatcgaggtttgactgaaccactatatttctctagtcttttttatatttctattcttgctttgtctatttcgtagtccaaactttgagtactcttaactttaagtgagtactcacataactgctagtgagtgttcttaatttcttcgaatactcgcacttttgtgtgttgtctaaattcctccaaaaatatttgatgccgtctgtgggaaacgtttttatttgagatttttggaggagaatcaaaatatctacaaaactgacaaacacgaacaacaacaacaaaactgtcagcattggcactatcagtgttcccattactggaggaagaaccagtcgcgttgatgctgctatggaaggagtagggcatactaacgtgattcccttaacttatttcctttatttttaggccacactagaaaaccctcaacaccggcaactacagttggttagtttccaccaataacacctgcccatgcttctgatagtattattcaactgacaactgcatagtacacaccaatgtaggaggagatgtaggcactacatgcaaaaattgcaagaagaaattgaactctagcacgatgtccacaacaagtcccagcaaattatcacatagataattaggtaactagcaataatagtcataataatgaccgtgctaaaattccccgtaaccacaaggaacattcagatgagaacaacccaaatagactcaacttgaatgagcttactcgtgaccccacgcatggaaaagggcccgctgataataactcaaaccaacgatctcgatatagggagcgaaggacgcgtgaagaagaaaacaatcgatataacccctgcactcgtgcacaaacacaacttgaggtggatgattgtggaacttaatcttcatccttgagatctcacaatcatactcctagtatttatacaaggctaggttcaatttttacaaggctaggggaaagatatcatgtgtacagaggagacctaagagatcacctcaacgaggcatttctcgtacgatcctagactccccaaaattgtgacagaggaggaaccccgcgatccctattttaccgaccaaggtatcccccttggtggacaacctctagcaaatttgaacaatgcatcaaatgtcgttaacccgccacacacacctgctgcaattgataatgcggtggtagctgccaatatagttatagtaacagttccaccttgtaatcaagtagtacctcctagcaattctatttaacaaggggtaattgatcaaggaaatctcttgcgagctctaaaaatgatcgagcagtagagaaagcttgtttacaagttacatgggatgtcgcccttcatgaaggaggtgtggcaagcgtggcttccaaagggtttcataccctttgagttgctaaaatataaaggtacgactaatcctattgattatcttgacatatttaatactattatgaaggttgatcaggtaccacaattggctaaatgctaaatccttaccgcaacttgggaggatacgtgcacgattagtttagtcagttaccaaaagcattactttacacatcagatacgttcatggatttatttctaacacattttcagacaacaatgacctatagaccgtcttatatgactttcattaattaaacaagaataaggagagaccttgcacgactattttaaatgattcaatgccgaagtaactcgatctggggctaaaaatatcataacatgtttaattagtggcttttatagaaatattatgataagttgatagtatgcctattggggtagttagaagtatttgcgatttgacctagtttcctagaagtagagatttcttagtggctaaaaaatagtaaaataacttttattaataaagttattattatatgataagtttaaaacttatcaatttaatatatataacattttaaaacttaataaagaacagaacaaaaaccctcctccttcggtgcaataaaacactcaccatcactatccaattttctttaatttttagcagaaacataataattcaagcccaagtagtagctggcatggatagtaaatcattgaagagggagagcttaaggtaagggttggtttcattttaagttgaaaaagtttggtattatatgttgagttgtgggaattgtgatccatgaatctgtttttgggttgctatgggattagttttgatatttacttgctgaatttgacgtggctttgagtttgaaattaagtttgaattcttaaagctcaaagctcaagctttaatgacgttttttgtttaagggcgagttttgaatttctgttacgttgggactgttgtatggatgatatatatgtgccatatgaagtttagaattatttggataggtttcgatggtatttcagagagtgcgaaactcaaaaattacgttcttgcagaaaatggtcttccgttttggggaaaacagctaccagtttcctaccaggaaacctagagaaaacggtttagcgtttcccaaaacggtaggccatttctaaaggtctttttgaaccatgtttttttgtattttcgtggaatttgaagtaggtatactgtaatatcccgataagcctaatggtaaataattagggtttatatttatattatgtgttaatcaggtaataagtgaga

SEQ ID NO: 161491 - DNA, 5825 bp, Cannabis sativa
cccccccccaaccaaaaaaataagccatgaaatataagcttacaaactttaaatgaattagcctttgtacaataaaattaaaaaataaaccacattggttacaacctgcgataggtgctccttatccccatagagtgcactattctgcacaagaagatcagcttcctttgcctgaaagaagaaaatttcttcagaaaaatagtagacaaaattatttaatgtgagaaccaacacagaaacaagaaagtataaaagcctaatcgaggatcagaagaagaccttcaatgtcctaaaacgatcacctaatggagcaagaccgtctagaatggtgcgggccaaataatcagtagaacgtgcatgcttaaaaaaatggtgctttaaaagcttttctgaggttgggcgtttttttgggtccttcactaagcatgcgccaacaagctctttaaaagactgcaaaacaaattctcttaatataataaataaatacgtaaataaaaagtaaaattaagtgaacaccacagacctttgaaaatctcttgtccctttcatagtcaagacctggtggagcattttgtaaagtcatcaacaaaacctgcaaaaaataatataagaaagatttgaatttaatagatgatagtagcctaatgactcagctttcaatgtaaaaatcagaaaattagaaatttactttcattggtggatacttggaaaagggggcatgaccatgagcaagttcgagtgcagttattccaaaagaccaaatgtctgctctgtgtatgggatagaaacggggaaagatcttataaaatttcaattaaacatatgtatgggcactgaaggacatacaagtacgtaaacatatatcaaatatgcaacaaactcacttaaagtcgtatccatgcaattgctgcataacttcaggagccatcctgagaagaaagaaagaacaaaaaatgagtggtcacacacagaattttgaaatgttgaaacaaccataacaacaggatctagagtattggcaaacccgtatgaagaattaaataaagaaaaagaagaagaaaagaataacaaccagcaaggtgttccaacaaaagtatttctagaacgttgcctatctccagtgtcaaacatacatgctgaaactccaaagtcagctaacttgactgcaccattagaatcgattaaaatgttaccagcctgcagaagaaaactaacaatttcaataaggccaacatttcagtaccaaccccaggataagcagccgtatatatttaatcaggggaaagaacaaacatataactatccagcttaatatgtaattgataattttttttaaaaaaaaaagtaagatacagcagaccatcattgattaattaatgatgagaacccaacccattcctaaactaaggccagcattcatataagacaaaaatattccttaagcatatctttaaaaatactaaagtgttaatagttctaagactcctacaggtaatagaaatctttaaaaatactcccttcaaaagcactaattagatcagctctgtgaccgtgattattattattttaataaattcacctcaaaatacttatttaatgttattcttcaaataacttgtgtgaaagaagccaaccataccatttagacacttaaaaacaatagttattataacatctaacctgcaattactcccctcccgcgacaaaaaaaaaacataataaataataataataagccatggataaataaaagttcagcacatcatgaaatgataccttcacatctctatgaatgtgaccatgagcatgaagataaaccaaagctttgagaacttcacgcaataatgtagcaataacagtctcctcaaaaccctcaggaaatgaagatttcattatatgcaagcatgaccccccagccatatatggcatcacaacccaaaggtggtggccagtggtgaaagagcaatgtgcccgcaaaagatttggatgatcaatcaagttcatcatttgtacctctcgccgaataccgtcctgaatagcaaaataagaatggaacagatacaaattaacattcttgagccaatgatcacaaaatcatggacaagtcatcagagtctaaagacatgtagtagtaaagctaaagacttgaaaaataatgttcaaaaagctgaatataacaaaattcacaaaatcatggacaaatcaacagaaatataacagtaaagctaaagagttgaaaaataatgttcaaaatgttgaatttaacccaagatcacaaaatcatggacaagtctacagacagacaaatagttgtaaagctaaagacttaaaatatgatgctcaaaaagctgaatttaactactatcctcacatttaagattaactcaacatgaagagaataacactacagattgagagcatcactaacatggagtatatttttgactatttttacttttctctaataagaatctgaattacagttttattgaaacatatatttcaacaacataatcatacatcaatatatgacatgtatagatgcataaactaatcaaatataaaaagataaattttaaagactaaatgttgttaaaaatcaaaaagaacaatccaagacatatttgaaaaaacacatgaacatccagagttaaaaggaggcatacataccagatcattgttacacttctccagatcaagaaccttgattgcaacagtttcattaagtggaacgcagagtgctctgtatacagaagcactgacaccttcaccaacttcttcatataatttataatcatttgcatcaagcgggaatttcttctctgaaatatactccatgctttattctatataacaacgttaagacccactttgctactgtgttttccagatagcataaatacaacgttttccaaggaggcaggcttcaatataatgcacaatttgttcaaaatcagtagcattttcttttagttcattacaaagcagatgaacccaatgacttcatcaagacgtttctttatcaattgaaccattctaaagccaaatggatctcaaaacattagataccagctaataacagctcgaatcagatctatcaaccacaaatctgaaatcagttaacttttgatcgaggtaatcgaaccagcagtaaacacaatcagaaaaggtatgaggccataaagagaaatatgatcccaaacactttactagggaggcaataaaattggaattaagtcattaaactctactctagaatcttcacaaaagtgatcatccaactctgaactagtaactctgcccttgtatgataaaatcaaactaaatggccaaacatatgatccaagttcaaaagaagaaaaccaagcctttaaatagcaaatacatataaaacctacaagaaaaaaagcagtgattaggacagtactaaaataaaacggaagccagaattaaatacgatactccgaaataacaagtttaccataaaaagcttaattaattaacaatgaataaggaatgaacattactgtagaaaaaaaaataaaataaaaatacaattttctaaagttagttggttctacagtcaatacataattttcaacttctcctgataattaggttcctctacatactactagttttcatcctcaatcatgtaaagaatctcaattctatagcccttaacatcattcctgcactaatattaatgtgtcgtgtcagctgacagctcttacctttctacaaagttcaaatgaacgcactctctcaaattcatcctacaaattccccttgaaaaactttaaaagaaatctactctagaaactctctgctatgtccataatttcactatatttcaacccaattcatacagcattgtcccgacctcatgtttacattcctcctacaccatgatcagctaactctgaatgtcaacacctcatttttttccccatcggactctagagagagacataatgcagttcctaatttatagcagaaaatggacatcggactgaaaaaaaaaaaatactccaagtagaattcaagattttgttttcctttcacattaacaaaatcacaaccaccttctttcgctgctcttgccataacaatcacaacccacttggagaaccttaacaccttaaattttagactactgatgcgaaaatcgtttttccttaatcatatttttaataacaaatttaaatattaacaataaaattgcattctcttctattgtaccctaacttgaatttattgtccctaccacacaataaattccaatatgaatataattgaaaagagcttaaaaaaaataaaaatcccaagtttcaatttacatcgaaccaaaattctaattcttcaatttccaactatactaaatataatcgtcatgatcatatcaagtccctctgtagttgaagaatgatatttcataaatagatatataaagagagaaatatggacaaaacttgtattcgcttttcatgaacaaagcttcatagtagacaaagtcatgacaaactatggtaaaaatgcgtacaaattcaatcgcagagttgagtcaacaactggaaaattcaagggtcggaagagaacacggacctagggttttttcagcaccggaacagagctcaagagtgaaccaaatccaccagttcagactgaaacgatgacgattcaagtggtactactcagtacttacttgctcatcgcatgttccgacatgaacgatgcccataaaggtatgcctctcctctctctctctctctcctctctctctctctctctccccctctgtatccaactgtcgccgagtctaaggtaccgatcgaatcactttgttttgttttaagttttaaccccaaaattaaataaatcaaaacataaaagcaatttccctttttttctctgctcagtcttttcctgttttatttttttgtggtaaaaagagaaattttcctttttaaaaataaaaattaaagataatgaaacataatactaatttccaggcaaaactcatcaactgcgcaatttggtagtgggacccgccaaaatatttgagttgggttgagtaggtgaatatatcgggagaaaaactcaaattatcgtgttataattttatggaatgggcgagtcgagaggaataatactggcatcacctgttggatacttaattccgtcaacgacgaagcgtgattggctggaattaccaccagcgctgtcatctcatctccctttgatttttagtttacccgccagttatgccttgttttatattttttttttttttttttaattgtttatcatacacaaaatatatatacaaatactaccataacaaaattgtgtaattagtaatgggaaagtataacaaatcaccttaaaatatagtattatgtaagtaaataaataaatattcttattttaaaatttgtaaaaaaaatgactattttatattatttattatttatattatttttgacacataaaaaaagtaataattttttggagaattacctcatatgttattttttttaatttttttaaaaatttacagtttgagttgctccagtagtttttatgtaggttgctataccgatttttgttacgatttaagttgctctgttaggcgctatagaattttctgtatggaattctgtaaaaatataaaaaaaaaattaaattaaaaactattttgagttgtaaaaataaaaaaaataaaaaaaaaaaccccttaatttttttcatattttttctagaattagaagcaaattacttaaaaattatggtataactatattagttttgttaaaatctttttt

SEQ ID NO: 161492 - DNA, 10029 bp, Cannabis sativa
ctctctctctctctctcatattatccatgaactaggtggatggaccaggcagcggtagaggtttgaaccaagcagagttgtaaatatctctcttctcgttcattctcttcgaaccaaataacaatggtagcatctcaaagaagtggattcatcgatattttctccttcattctccttggactagacgacaatagtactgcatccatagttttctcttaagaagaagaagaagaagaagaagtgaacctactatgggtgggtactctttgctttttgtagggttatgaattgattatacatttgtttagtttttatgtagtgataaacatatataaaatttatatatgttcatattataaataaatttctctttcgattggttcgaaaaatcacatttaataaaaataaagtgcattcttgcgaaaatgcccattaaaatttgaatttggctcaccaaaatttaaaacacgattatatttaaaatttgaatattgcgttcggtacattaatttaaaaattccaaatccaaaattatgaactcaaccacccaaaaacccaactcggttcaaccttaatgtcgatacaaacatgacataataacacaaattgaaaaccttactataatttacaactaactctataaaagttgaacaaacaacaaagtttttgcaatttgtagaaatcctcacataggaagttgacatgtagcatgtactaatgagtgtgtgtaggtagaagatgttttcaaaggtggaataggaaaaacctcttatttgctggcgtgagaaaagacatgggacacatgctatgcctattttttgaacttatatcttgatcagtttatcacaaatataatttgtgcactttctttttgaaagaaaaaggtatccattaaaatcatcatcatgagtttaggatacaagctaggtggcagttaaaattctcaatccaaatagcttcttgatctaggcctaaaacatacttagctagttaacgagtggttgcgttgccctctcaagcaacatagctaatactagtagtagcttgaggaagagaagatagcaagctatgaataataaatacaaagccttacaaatggaggttatctgtagaaccactacaacccctaaaaccacacaaatttgtccctaacgataattaaaggcgacaagaaatggaaaacagaacaccgaattgagctctgatagagttttttgactttgattctcatcgaagccatggcaggtcgaggacaacccaggaatggagctattttggggttgagtaacaaagatagagggaattccataactagaggaaatcgatcgagtgctggaaacaaaggtaagaaacatggacctacctccttagatctagttattaagaccaaataaatagcagaggtcctggggtctccaagctggatatttcagactcagaggaagaagaattacaagaacataagattcccataaccattgaaggagttgttaaagtattgtcatcgagagcatccatttcttacctgcagaaggaacagacaaacaagatattaagaacaattttgtgagcttcttgggggcaaaaaaaagatgtgaagctaaggccaaaattggtaattccatttcccctcctatttcgcatttgtgaggagtttaatagtttgaagggtgagagttcaaaacagaattcagtggtcaaattgaaatgtaagatgttgaggaggaaattttgtactagaatttcgcaatggtctataatgtactaggtgataatcccccaattggaccatttgaagtctttgtaagaaagatgtggaaggacaaaggggtagataaggttggaatgcttaaacccggggtttttattattaaatttcgggctctcaacacaagagatgaaatccttgatgggggatacctgttttttgataaaaacctattattatgaatccatgggaaccttatacagattacgataaagaggatgttacttcggttccaatttggattcagcttcatgaattggaattaaggtattgggttaaaagactctccttaagatagcgggacaacttgaaacacctataatgttagatgagattaccaagaataaggagagattaaacttcctaagagttttgattgaggttggaatgtttcaagattttctcgagaaagtatcatatatgaatgaattacaacaagtgattgagatttaggtcaaatataaatggttaccaataatttgtagcaactgctcaagaatcactccttaacgatttgcaagaaaaaaaaaaagagaaaaaagcgatttgggttccaatgaagatgaatgaaggcaaggcaaacaagacaaaaaacgtacaggatgaagatagctttcaaaaagtattgagcaaagggaaataggtcaaaattaaagtatttgaggctgctgtaatgacaacatctaatgcctttcaaattttggaaggaatagaacaatggccgatggtactaatacaagagataaacgattcaaagctggtcaacacaggaggaaggggagtacctcttgggtgtcatggatagaattatgagcttgaatgtacgggcgctaaacaaccacaataagcaatcaaaagtcaagaaaatgatctctaatttttaagtgggtttggttgggctccaaaaaactcaagttaaggctcgaaatttgggagaagtttttatggtgatgttttcgggatggtgtttctcttcgaataatccatggcatcatggaggtagaattattataagctagaatctagcaatatattcagtggatatactgaattgctcgagtcaactcatgcatttgaaagtttagagggtaggtaataaggaattttttgttgttactttcatctatgctttcaatgaggaggcaagaagaacttgtttatgggaagattcaaaattgttaccagtaaatataaaagatttgtggcttatcttagaggatttcaatgatatattgaatcctgaagaaagagtagggagaagttaaattgagcaaatctactaccttcaaggattgtgtggaaagctgcaaaggggaagatgttaagtactcatgttcattttttacattgaataacaaataaggagtatcctctcgaattttctctaaaattgatagagttttggcggatcaagaatggttgggtaagtttgaaaatacagaagtagtttttatggcagaagatctctttgatcactgtcttgtcatgctaaccgtctatcccgagattaaaattgggaatagaccgtttagatttttcaaaatgtggtaacatatggaaggttttttaaaactgattaaaaagagtttaaaaaagaagaataaaggcacttttgtaccaactagtatgtaaactaaaggtcttgaaaagagagcttcgagaatggaataaaaagcgagagggagacatagcaacagacgataatcaaacaatgttagatagtcagctcgcctctcaaacacaatcgttaaatgaaaaaatgtgcagggaagagatggaagacataagaaaatacatgaacactcataaagcctacatttcctttctacatcagaaagcaaaggtccaatggttgaaagaaggagacaataacacgacagtgttccatgctagtttgagagtaataagggtagaaaacataattttctctatttgcacaatggagggggaatgggtggaggatccaaaacaggtcagtggggcttttttaaactactataatgaattgttagggattgcaatgcttgatcgaaggtcgattaagcaggaagttgtaaaataggggtcttgtctttcaaactagaaataggaattccagttaaagaatttcacactagctaaagttaaaaaggcagtatttagcattcccagttgtaaagcattagggaccgatggtttttgtagttatttttttcaagatagttgggagttagttaaggaagatgttactaagacaatcctatcctttcttcactcgggtaagtttctaaaagaattaaactccacgactctaactctcattcctaaaatgaaatgcccaataaatgtcattgactttcaaccaatagcttgttgtaaagttatatataaggtggcaataagatgatctgtatgagattaagtcaggtgctaccagagattgttgctcaaaattaaagtgggttcattcaaggaaggttcattgcctataacataatggtttcccaagacttggttaaacattatggtagaaaaaatacaagactgaattgtatgatcaagttggacctcagcaaggcttatgattctatagaatgggactttgtagaagaaatattggctgctttgaactttccctcagaatgtatgcatttgaactctaaaattttttttgctttttaatggagctatgcatggttgttctgaagcttagaggggtctctgtcaaggagaccctatgccccccttaattttttttctatgcatggattatcaatcttgaattctagctaatgttgggaggaaaataaattttcaatttcatgacaagtgctcaaaaatgaaactctaatcatctatgctttattgataatgtattactcatctgtcatggatattttaaatctatttattatcttttacaaggtcttgaattattttcaaagtcatctggattattaccaaatgaattaaaataaactttgtattgttgtggtaggaaagaaagggaggttcaaagaattgtggaagcttcatggtttgttagaagtgagcttccctttagatacctaggaatctcgatttgtgcaagaagattatcggctctagaatgttaaattgtttaccgagattttaaaaaaaaaataaatatttaggagctaaagaaataataatttatagaaatacagagatgaagattttttacgttgttcaagtgttaataaaccttagttcacgagtgagtctattagcctctaagggcggtattgatttgcttacagtatttttgcagaaaatcctagctctgtactctaagtttcacttgaagaagaagaagaagacctagagcaatatcgacagagtttttgctatgtagaatccgatcctccttcctatgaggagtgtgggatatttataggctaagtggcgggtatggacagacccatgacccgcctggtgtctttgctcaaatttcacttttagggtaaattacatgcaaatgttagaactgactgtttagtttttggaaaaaccacgctcatgcgccttgcagctaggtagtttcggacaatacgcatgaaatggacacgtgtctttcaaaggtttaacctttaaaagtaaaggccacgtgtcgcgtaaagctttcacctttaaaagtggtggtccatgatattttcctggtaaaagggtggtggaggtgtgcaccattctatgctaggatgtcggagacagggtctgatcttgtcataaaagtgtaactgtcacttggtgattcggcatgtacaaaaaggtcaatgttcgcgacacttcatgaggtttgacatccgctttaggtccttttgaatgtctatctagatattaactgtgcgaacctctctgttagacccttctacgtttgggagaggtattctgccattaccatctaggaagttgaggcaagcatgaataggccttcatgtatctttccttcttggatattcctcctttccaagaagtctttttgtggcagagcggtatccaaggatcttaattaaggaaggattaaattagtttccctcattaaatgccacgtgtcatccttcataaagacttagataatatttactcataagctttcaagacgctctacgtttctatcaccaatggatcattgtgtggagagtacacatacttgacatcatcttctatgaatgttactagaagattcatcatccgaggacgttgtgcaaatgattgtacaagattgcatgtgtcatctggttccagctcattcaagtatctttttagtgcatttctagtgcttcttgcaatgtacaggcctccaaatatggttgctacgtagccatctaatgttggtggaacaactccaagtaggtatgggtttctaggttcaggaacaacaagaggtcttcccactagggcatttgtactccgtaagggacctgtatagctggagcttatattccaggggcttgcaggagaactactccctaaggaggatttacggctccaagctgtctaggaataaagagttgtctgggtgctactgcttatccaggatagataactggtatcctcacccaattggataaatggcctttccagacatccttcgatttcattgctcaagtagacacattcatttgttgtatgcccaatatcaccgtggtattcacaccttttatttgggtccctcttttgctttcctcctttgtacataggtggaggtcttttgtaatggaccatattacacgtggccttataaatattctcgcgagtgtcaatcaatctagtatactcaaagtatcttgattcttgagttttttctttctttgtagactcattatggcttggagatttggaacttcttttgcttcgggaatgactcatgttcgactccaaaacttccttttgttggttcgtttattcgagaatagcactgtatccaatttgtgttgttccaaagctggagaaactggtttgtgcagttgatagggcgaatgtacttggtccataaactatgggtgttgtaaacgtggtaaccagaggaaagatagtcggagcagtcatctatgaagtttgagcagtaggtgatagaagtattccataagcctgatcataggcatcttctaggtttatgaatccttaggctctagataaaaagtcaaacagagagtctgtcctcttcctttaaagttctccccatagcaaggatccagtggttattcctgatgttagagtcaccattttcataccatcaataaccttcatttttgcagtaatatcgatcattcactggatgtacttcttgaggctttctctttgttgttgcttaatgttcctcaaagaactaacatcaaggttaaaatcctttactattatgaattgtttcttgaaattttttttataaatccttctagctatgaattgatttgagagataacctttccaccactcttctgcgaattttgacagagttaaagaaaagtagaggcactttatgtcatcactagtttttgctacctgcatcattctattgtacttggatagatggtccctatgattttttcttccttcatacaattccctgtaaggaattttaaagttctccaacaactgcgcatctataatccttttaacacatggttccatgtcctcctcttctgagtcgaacacaattccattttgcttccgagagatcatttctgtgagctttgttaactcttcaattttacgctctagatgttgagttgtggtgtctccagcgactcccttccgtgaataggctcattgatatgatttctcagttctaaccttttatcttttggcgttcagtcttgtgcgaagatcatttgtggaaacacttctacttttgtcatctgatggggatacacctctttgactttgtcacttccactaacataattgccactgtgatttgtgtccttttgggtagtaggcttcttagctttaacattagatttgtctttatgcgcagctctacctctagaattagtctaatttctttgccctgaggcatgtgtttctttctttttcttttgaggttggctggcagatttagacttcttttgctgttcagttggtgcagccttgtttgaacttttacctacttttcctttacctttttccttatgagaattttaggttctaggattttagaaatcaactttccctgtagcattatcttttggagtagtatgatcagttttgctggcagtggtcagtgctttaattataacttccattctcgccatttttccatgcatcaacaagaagaattgttcctgtaacgaaaatttatcttccatttcctttcaactctctagccataatgaccattggatttgactcatctagatcgtcttccttttcagcgtcatcatcaacaggcatgtcttgattattatctccgggttcagtagaattagtctcttctgattcatcgccttctttcataggatcttcaagaatggagtccttgtaagtttgatccttcttgtggcgactggttaccttagtttgatcttctatgtctcctgtcttagcattggaatcaacatcaccctttttaggatcggtgaagtgaagaccagatttggttcagttgagtacttagcataactactgaacattatcttgaatagtatcactactttcttcatctctcaatgaaagcactaaatatttactgagatttttggagaacaaattatttaatattcgagaaaaagaaaatacaattaaaagaatcaattacaaaaaaaagcactcggagtttttacgtggttggggcattaacaagccttagtccatgagttagtattattatcaaataagctagaaaagcctaaggattacaatgagtatgagcattctattatcttcttgaggaagtcagtcaagaattttccaatcatttgcatgaaagatttagtgtgtatttatagagtaatagatgtcatgcttagttactctttctcgctaatggggagtatacaaataatacatagattttggcttatctggtgaagcccagcgtattaagcagtaaatgtatgttgatctggcatgttgatcacggtcatacctgttgttactatgtcctataattgggggtaattaattatgcattaattacttgatctttaattatgtagtttcctattttagcttgatattcttctctgtctgagattcgaggaaagtaatatccttattatgcacgaaacagtaaaagggaaactacaactagcatccaggcacatgctaaagggttcttccagatacacagagttaggatccttccggatacaaaatagccttaacgaaagctcatctagagaggcgtgcagttgttctctcagaaggctagataataattgggctcgacccattttacgttattttgggcccactgatgggctttaaacttctatttcaaatccacgtgtcccttactggaaacacggatagcaatagcagatcatataatctttatattgtaggattaaagtctaattattggtgatcttggacttatttagaaagtttttcgattcagcctgatctgccactacagagtcctattttgttgttgcaaatgagggcttattttaggaaacttttgtacatctgtgaaaacgtatttttgactgtctctagagtttctatatgttataaatagaacctagagagaagccaaaccttatcatcccttctagtcatataattttttatttttatctttgtgatgagagagcttattttgtgaaaacctagagtattctacttggttttagtctttgtttattgttcttacactattcttagaataggttgaagagcttcattgaacaagagaagggtcttcgggagaagacttctccaagccttacttcgggatgaagtaagcacacacatatcaaaagtcgaagggagttcaatgtttggtggtattaagcatggcaaaaagatccattcattcgggtcgggtcagtgatccgatccgacggatcattactgatctgaaacattcggatagttattggatcttggatcaaatccgacccgccccgcttaatttttttacggatcggatctgacccgatccgtttgaaatatatattttttttaaaacaagaaattactttttaatatatttttttttttttaaaaaaaaagattagttaaagcacaaggaaacattcatcacattaaacattcatgatcacatttaggatcaaagtatttttctttgttat

SEQ ID NO: 161493 - DNA, 4685 bp, Cannabis sativa
tatagtacaatcgtccatataatatcactctccccaaaatcgaaaattgaaaccctaaaaatacacccaaacattttctttctctctcctcgaaagccaaggacccagccgcctctggctttcttctccgttgttttctcattcatttccgccttcggctacggcatccacggtgttcggagactcggtgtttggtgatcccgtgttgagtacgatctatttttgtttgactttttgtttttcaattcattgttttgtattttgtgcgtggatgtgtttgtttgttccccatggtttttgtttaatgtggtgaatgatctttgtgttagtataccgatttatgctattcattttgtttatgttttaagacttttttttttcttttaattattgagatgaaaagatagcaatttacatttctatgtctacatacataaatgcagtgtatggaaactttgagatttatataaatatattatgattaatatattcacataatttctaactcttttcaggtaaaatgaggcctattttctgtggaaactttgagtatgatgctcggcagtcggatctggaacgactttttggaagatatgggaaggttgatagggtggatatgaagtctggtgagttctcaaatcgacttctgtcggttcttttgattattgttttcatatattatagctgtggctttgctgacgagactaaatctgcactgcacggtagctttgtcaaaatgttattaaaaatattcgaggtttgaagtgtatttacttgtattagatattttcgaagccaatctacatgcttttcagaaaattggaactttctgcttcatgcataagtaatagatggcttaattggtaccccatccactgcgaattggcatttatttcctcctcagcttaatctactttgtgggcaaggtaaggtaatgcatgtcttgatagtttggaggttgagttgtcgccgtaattacatgtttaccattttaaaataaattaaaattaaaatgactatttgttaaaggtatttttcctgaagaggtaacactattcaattaatattacccgattgtgcgttctagctttagtgataatagagaaaaatattgttaaaaatattaattcgtaaacaaactagttaaaataaagaaataatatattagaccttattacacacttcgcgaggagcagctactgagtcctagcagtgaggcaatttggctctggcagacggcatctgtaaaagaggcagcttccttttcagtggttctacaaccagaaatcattcacagtagctgtccaagatacagccatattctctctgttgagttctgctgggggttcaggatatatataaaaaaaatgtattattgaggcataaaccccccatactcaacattttctttgacgcaggattatcttgggatatccattctcttccaggctaatggatgggctcttcagaattccgttacatgcctgtgacgagcttcctcttctttctttcaagaagagtcactctgatctgcaatggcactaccatcccacattttccacagatactacctatgactttcattcctcacgacttacggcccagcctccaatttcagacatgtttcaagtttgaaacattgccaacctcacagcagaggccacaaaccgatggagaaggcacattcttttcactgacccacaatgagacatccacttttggattattgttccttgacatcacttagttcatgcacaaggtctgttattaatttactggtcacttggtttaagatttcgtagaggttaccaaactttttgttctagatagaatcttaggtggttgatttgtatgtttgctgaagggagaatgcacatcataggtaagatttcacgggagaaatcttacctttctttattcttgtgaatacatgtaaggtgagttaatgtgaatctctttgctttactggttatgtacaggattcgccttcatttacatggaagatgacagagatgcagaggatgctattcggggtcttgataggagagaatttggtcgtaagggacgaaggcttcgcgtagaatggactaaggtaatagccacttctttgaatatttgtcattttaagcttatgttttccattttgaaattcttgtgtgtcatgtctatacgaaatttcctgcattaattagttttgttttattatctttgttgcttttaagtttttataattttctttattgttatcattgtagcttttaaggtttataatttatttaataatttctcgtcgttttttttaagattttcaaagttggcaaaatcgaatttaattataaaagttcttataattaactcaattttactaagttcttcccaagaatcttgtatgtatgtaatgtggtggtgaaagtaagtgatgtgtagaaaaatgaaaacttggtgtcaagagtggttattatattttaaatggatgtcagatattaatttatctccttatacatattcataatggttatatgttaattatttcaatagtgataggatgcagtgtactttgtagaattagataattcctgttctttgagtggcacaaggcagaaaaagtgcgaggatatgcaaatgagaggatgacaaaagtctatatagagtggttattataaattgaaatggatgtaagatatgagaaggttaatttatatccttatacatattcataataactgttgtatgttaattatttcaatagtgataggatgcattgtacttcgtagaattagataattcttgttctttgagtggcacatcgcagcaaaagtctgagggcaattttttaaataattactggaggtagaatttgtttgatactttaacgaggttatagaactaaagtgtaatgtggtgaatgctaaactgcaatactcttttgatatatcattttttgaataatgtgaagagaaactgaagacctttcatttctatatttcagcatgaacgaggaattagaaggcctggtggctctagaagatcatcaactaatacaaggccgtcaaagaccttatttgttataaattttgatccttatcacactagaactaaggatttggagaggcactttgatgcatacgggaagatagttagtgtaaggattagaagaaattttgcatttgttcagtacgaaatacaggaagatgctactaaagcattggaggctacaaacatgaggtggataatcttttattactattagctaaaattatgtgttaaacgtttcttccaatgtaaattggaggaaatatatggcatgaaaaatgtgtttttttctctttcctgaatttcaattgttttgtaacttgatttaaatttatgaattggttttatattatcttgtatttgacatttgttgatgatatttggtatgcagcaagttgatggatagggttatttcagttgaatatgcagtacgggatgatgatgatgaaaggagagatggagtaagccctgatagagcacgtgatagatcaccagaaagaggtggccgggatagaagacgatccccaagtccctatcgaagagagagaggtagccctgattatggtcgtggcaccagccccagtgcatacagaagggacaggggtagtcctgattatggtcggggtcgtagcacaagcccctataggaaagacaggggaagccctgattatggtcgtggtcacagtccaaatccttataggagagacaggggtggccttgagcatggtcgtggtcctagccgtagtcctcatcaccgaagagaaaaggtgagtgttgatcgcggtcacgctcctagtcgtagtccttatgaaagggagagagttagtcctgagaatggtcgtgttgctagtgctagtccttacaaaaggaaaagggcgagtcctgagaacggtcgtggtcttagtcgtagtctcagtcccatggaaagagagaggactaaccttgataatggtcgtgaactaagccccaattctgtacctgaacctaaggacagtcccagttatgttggacccgaaagcccagtgaatgagaggtaccaaaggtttgtgccataaagtaaattctatttgaagttgtgtataaaatttttatgctaaacccagtcttatctttgtatttaatcctgataatattgcagtccctctccgcaagctgaagaatgattttaatctggggacgttggcattgataatatggtgtctcgatggcattgatatgttgtaatatgagatttttatggcaggagtttcgtttatttaagtgttataattatttatgctttagtttttgtattagtagttcatgagaaacaatcatgtagtttctacaaaattttatggatttatcagaacttgtactcgctcgttgattgaacttggattcaaaatcacaacttgattaatcagtcttttaacaattttggattgcaatgtaaaatttgtggattaaaatatgttcattgctctctaagaacttaccagagacctattgttactgtaatgaatacatttgtgtgaaaaagaaccatgactgaaatgttccacagtccacatacacattaaaagaagtatgtatcattggctttgaaataatattttaaaaaagttttggtatattttggaagtaataggttaattaggatttttattggg

SEQ ID NO: 161494 - DNA, 5660 bp, Cannabis sativa
  modified_base (1302)..(1305): a, c, t, g, unknown or other
atatttcatagatattcagaaactatgctcttgtttttaccgttataatgagcaagacatagtatttgttttcttgatatgagagagaatggccggcaatttgcgcagccctgtcgacaacttggccaaacaaagtgggtcctgaaagagaaacgttgcgcaaagcactggcataagcagtcatgatgccttcaattcctccaacctgtaatttaaaacattaaattataaacatatgacagtttaagcagagatgaaacaaacggcaatggtttatttcttattacctcaaactccgtttcatttccactcaagttaaaacagtgagatacggtaccatctggtttcctccctccaaatccccaggcaggaaagcgcttatcagtatcataaaactgaataacttctccgacctctattattgcctgcaatgagtttattcggtactctaatcaataaatgtttattctcacaacttttcatttgttagaaaccataatacacaactacaagaaaggcatactcgctggtaagaatttaaccggccactaggatcaatgtagtgcagagaatcaggctgtcggggattcttatttgaagctggaaaacaaataattgttatcgtctttagaccatactttcctagtcaatatgattagactagaaaagagaagaccggtccttcataatattatctacatatatgaactcctttaagtgcttaaacatttagagaaaatgttaatagaatttataacctgtaaaatcaacagcaaccataaagttgagctcaaatccactagaaatgtaatcaagaaagctgaactgctccttctcatgaaatcggtccacaaacagctgacccttcagtacctatgtaaatagattattgagttcaattactaaaaaaaaaaagaagtaataagaaaacttcaagtataatgatggtatgaaaaatcaccttttcatgaccactgttggatgtcaagacgaagtttacaccagttctttcttggtaaagtttttccaattgtgccactgacttttggagtttcctggagaattgaacttaaacatcaaatctctttctttttctgtttcctttctccatgcattaaaaccataacaattaatcaaattataaactccataagatgggatgataaatataattaattacccaatgagtacatgattcccgttgctattaaaatcaaaacactcgataatcaatgggttatcctgtatcaattcagagcatgtcgtcagtcaataatcacaagaaataataataataataannnnaataataataataataattaacactaaatgttttagctcagaataatgagttgacagcttaccttgcttccaaattgttgcatatttaatgataatggtttccagatggggtttaagttattgtccattacttctgtcttgcaaattggaacggagcctccactctcaacaattctggaaattcttaagaatggatcctaaagtagacataagagaacaaaggtgaacaaaacaactgaaaactaatggagacatcgtaccaacaaaaggaagaaaaacaattctcaatcaagctgttatacagacatacacttttagaaaagaggtctttgttatccaagttggtacaacgaaatacaacatcaacaacacttcgtgaagcaattgattcctctgcatggacagtgagtgatcccaagtttcttgaaccaccaggcccatctttgttatggagatttaaagttaaactccggctttgtttagtcacaatctgaagtcatggaattacaaaacaaaaaaaccacatatttgtatcaacataaagtatgtctcacaattgcattatgctatagctgagggggctacattaacacttcaaatatgttttaaacaaattgtataccatatttctaaaacatgtataatcaattacaaatttgtagaaattaatatgatctgaaaacaagtcacctctgaaagaacacagctggattctccaagaaaatcttgatccttcaaattcaacatctgcaagcaagggcgaagctaatataaatatctaaatgggaggatagtacactagataaagtcctaaaaagtaggagtatcatgagatgacatgaaatagtaatctaaattacaatttcatttaaagttgggttgagtgaactattaaaattttatattcatgttcatcttttttttttttaatcaatgcattcaattattcaaatttataaatttgctaaatctgacttaacattcttttacaaaaatgttcacgatacgaaattatgaagataatcagaaactcatactgaagaaccgtatgtaatgaaagacaatttgaaaaacataattaataaaatttgatgagagagagagagagagagagagatctgcattgaaccaacttgaaatgcgacactaaagcattccgtagtactgagaacttaaaagcaaaaaaacaaaaacaaaaaatacctttacaggtatatggtgatattttgtatcaacatcatacaaatgaaatctgggaaaaacataaaaaggaaaagtaaagttaaattctgcctaagaaaatttacaaacaatatacttccacagaactatatagaaaattgaaataatatttaaaaggacttacattaaaggttgcactatctcgaattggtatgtaactgtaactttgcttatccatgtaggatttaaagtattcagtatcacttctgtacgccctacttcctcaagtctaccatcactttttttaagaaagacaacagccattggatcactctgcaattaatgaaaatgctttcagcctaaatcataaggtcacattctttaaatgaatagcagtttcatgtgacacgatatgacacttcatagggtctgtttggcacaatttttataaaaagttaaaagctgctttgtgaaaaaactataattaaaaaatatttgataaacggttaaaaaatagattattgaaaactttatggagaaactaaattggtacaaaatttatggaaaaactacagctaaaacctaaaaatagtgttaagtttaatatatatttatttatactaaaaatatagttacttatttattatatattataaaaaaaaaaaattaaaataagtacaaataaattataacaaaaataaataatctttaaatctcttatattttattttgtttcaaaaaaataattttatatttcatatttttattacattaacaaaccacatcaacctaaaattcttatatatttgagtttctaatttatatttttatacatgtgataaaaatataatttaaaaatgctataaataatttttattagatacatataaatttatattttggaaaaaaaaaactaaaaatatataaaaaataaaaaatttatataacataagtttgtttaaatttattattataacggactatattataacattatcattattgttataatggtatcttaataattcaaaatactttaaaatttataatttatcaaacttacaactcaatttttttacacaattttgctgcagctgttttttttcacagcacagttacagctgcttttccccacagcacaattgtgctgaactggcccatagtggtgctataagtgcactttagcatttctcaaatcataacttagagttctaacaaaaattaaaaaaatacaaagagcatcaccatcaaataataatcaaacgtccaaagatgccatattagaacagggaattgttactcaatgctaggtgtagcgtgccgacaaagatggcacaatacaagggccaagtggtggcgcatgttgacgtgcatgctggtggcatgctgatgcctagtttgtacgacagtgatattttcgtaaatatcttcaatatttttcgaattgggacgggatttggtatttgccatttattttgttctaggaatacaatagcgcaatcaaatttgaagaactttgacaattggtatatgttgatgaccatatgtctaaagagcaaaatcatatatgttcctaatagaaggctaaaaacttagaatgctccttaaggggagagaacctaatgtcagctctccaccaccacttggcacctcggtgctaagtgggttactactcaacaagactagtagggctggcatatgaggaccatgagaggactcatatgtctctatgagttggagtactcatggacattatcaagccgtttctgtagtacgtttggagatgctgccaaaggttagctagtacgtttccattggcttttcggtatgcagcatgcatgaaacgtgaccccgacatatattgtggtgcgcctgggccatgagtctcaacacgagatgacgcagtagtcattcgtgggcaagttggcgtacgcacatgagacggatgcaccatgctagaaagagtcagaggtctgatgtatgctactacattggtggtttgtctcgagggcctgccaacatgcgtggaggcatggtgccttgagaattagaccatggacgtatgagagtccttgggccatgagagagactattcaaacagtatcatatcaggcatgactaaaggtgtcgacacgtcatcttggtgttggcaaacttggcatctggctacacatgctaccttggtcacgagtgactaggtaagtgacagtgttgggattttgccttagcatagtgagaacttatgaacaatgtgagtatcttggctaaagcgcctaaacccatggacgcactcatagatgcttgtgagcatgacttagggagagttatttgagggacaaaagtgtgcataaggcacacggtcgcgtgaaaaatgagcttgttattactcagatggttggaaggctgctacttgaaaaggcgagcccatgacaattagtatcagaaccatgctcatctcagtggtaggtgaacttggttgggctatcctacagatgatgtaggcgtgaggaaggattgagaggattcgaatgcttaaacaagttgtcgttgagccagttagtttcttagagcagatcagtaggctgagaccgagttgagactgggttgctcttcttcgtgggaatactggacatccaagagggggacagcgatggttaatttgaatcaagttcagggatgctagaaaaacaactaccatgtgcaattgtggagaggtactaccaaatggttaaaatttgttggcgtagtacaaggtttgattatgtggtccacatacagtatgtttggttcactaggccgagtttgcttgagtgacattgtaagccgcaagagtgcttttgttgaaaaggaagcttcttggcatgggtgtggaagtatggcaagagctgtcagacacttgttagtcacgagagaggtcgagagttgataaccatgatgattcaaattgggataggcataaaatgcatcaattgctagttatgcatgcaaagaggggcagcacatggagaccaagtgggcagatgttgcaattgtcagaagacagacgtacttggaggtatttgcatgtgacttttatttgatccagacgagaagcgtcgagacagttgagtgggaagtgttggcttgtagaaaagccagtgggcataagtcacacaaaggcatcgatagagatg

SEQ ID NO: 161495 - DNA, 2577 bp, Cannabis sativa
tttcttgcatcacaatttcattcaccacctctgttcttgttttcgttgctaaaagttgaaatgagaactcaaaggcactagaccagtaaaattggtccaagcatataggctgtgttcaaagagtttgaataatattgtccattagacaaattaactttcattttgtgtattatactaaatatttgaatcaataaaactacttctcctgaaataccaagaaaatagtttgacaaagaaattacaaaactaaagcaattctgctatggtaacgtctaggggtcaaactcacacattctaacatgtaaacacttcaagcaaggcgcgatcacctcaataagattgacccccaagagcaagctacaatacatacctatactctagaaaataacttcctagttttcttctctgaatcatcacagtgtactactacgataatcatcaatggtttgtttcatttgatccaactgcaacaccacataatccagcttcttgcaacaaatctcattggctattctcgaactgtaatcacacttctcaaatggacgataatcacatgcactcttgatttcttctctcaatgccacttggatatcctgatttaaaaaccaacaaaaatgtcataattttcgttctcgattttgaagcaatcagcctacaccagagctcaaagcatatatgaaatactataaactcaactggtttatactcactttcttcttctacgttaaaaactaaatcacagagaccaaatgatcgaaacaaaacatagtctatcaacattacaaacaggtataggtcatgttatctgacatggtagctacaatgggagattcagaattcaggtgtttcacttcttctacagctaatctataatgagatgtacaatgaataaagataagaaaagagtctccacgattcatgtgtctacttatacagtttgattcctactctgtagtacttcaaccaatactcctcacttaaaaatagtgatacaaattatgaggcaaaatgtcaaacagtttgcagactcatcaaacattccataaaaacatctacttgttttgcaaaatctcaaaattatgattttttttttcaaattataatgcaacccgtttttcaccccctcaaatcccaatccccaacctcaatttcagaaaaaatcccaaatcattacgatttcaaaaaaaaaaaaaagaaagatgaaatatggacaaaccttgatcatttgcatgaactcgcggcaatggttgttgacgaactcctttctgggaccggtagggttggaaagctcgtccatgactccggcagcaagttccaaaaccctaacgattctctgtacaaatagtgtcaaattaataaaaatcaattgttaaaattctgtgccctaaaaaaacaatttaagcttgattttgatattagaaggatcatggaattatttgaataccttctccacattttgaagtctctgcaacgacgtgttctgtgtctgggaatccatgtgtgaagttgattgggtttgatactgattccaaattgaaaccaaaacgagatagcaaagagaaacactgacagacgagacgagattagtaaattccggtcactacaagaacgacaactatttgttaaaaacgacatccatttgctaaacggcctaaaatatgttttagagatttttttcatttatacattttaaattatttgaagtagtttatagtgtccaaaatctaatgccggcatcatctgcatttgataagataagttttatcttttcatataaaatgaatattattaatttatcttttctcagtttgttgggaattgatgttattttgttagtatttttttgcaggttgtttttcagttgttcagacagaatgtttgatattacttgtagcattggattggactcttactgtgagactttctttacattttgatgattatgattgtttagtgattgtaaatgcgttttctaaacgctcttctttcctcaatgaacttggtttcttatttgaggatttaactagtttgatgtccaattttcctagagtatccctaatctatgttcgttgaacagccaatagggttgcccatagattagttcggcatgctctttggatggatagagaactagtatggttttttgagattcctttttttattgggatttcttaaaacttaaagtttgtatgacattatgattttttttttcaatgaagttattcattgctacaaaaaaatagaacaattcaactcaaatcgtaaatatatatatatatatatagagtgattctctaaatattaaaacgataacaaatgatatcaaccaacaatctgtcacttaatgtaattagttataatgatagttaagtgaggtgtcttgttagttatttttctgttatattagtttgtatcgtttttgtataactaaaacttagtataaataaaggtctctagctaaccatattggttaagtttttcttagcatttttcttattaggctttgtctcttgactctgcttttgtctctgttttttttttattctgtttttgccattgataagcttctaccaatga

SEQ ID NO: 161496 - DNA, 1835 bp, Cannabis sativa
tcttcttgaattatattgttgcggatattcttttgtagttgcattatgctaatgtatttaaataaattttaatataacactaatataaagttaatctagtctaattatagaattttgataaaaaataaatacataaataataatcgaataataaattataagagtatatttatattatttttgaaggagtatatttatattattagagctactttttattaaataagtttttgtactaactcactcactcataatcacataaataaattattttaaaaaataaacagaatgtaaatattttacaacaatttgcataatttgagaaaattttttagaaaaaatttatggggaatgggcaataatccagtttactcattaaaatataaagcctttaacaatgctgaaaacagccgcggcacggcggcggtcaacaaagtcaacgttatggaatcccacatcgtcaaaatgcgcgtccacttgtacaccgcacttgaccaacaacgtcaccaattggttttgccgatcgaccatggggtccccaccgaacccaatcacgagacacctccccagccgtttgatcaactccttttgaccatcgtcagccattggattacaataccagtggtcccggtcaacgcctttaggcaaaaccaagtcccacatcagatctaaaacaggcaaaggcaatagctgatccgtcgcgaaattcaattccgactccgttctctcaacacccccgaacattggctggttcattacaacccccgccattttcaacctctgcaactccatctccttcactcttaaacccacaaaaaagacgatattacccccgcacccacacccataaaggtagcaccgagagaagtcgccgtaatctttgagccacggctctccttccggcccggacgcctggcagtcgacccagtagacggcgtcggacccgtcgtggtattgctccgggagacggctctccggagccaaccggtagttgacggaaaccacgatcgccgggatctcactggcaatttgggaacagtttcggtgggcggcgatgtcggctgcgcttaggagaatccaaccaccgtgatggaagtatatgacgatgggtagccttgcgacggcgttgtcgttagagggaagcctggttgggcggtagaggcggacccaggttcgggtctgggtgttgatggttacgtccttggatactaccgcctgacccggcaagggattcgggtgcgattcgatcgtggggctgtcgagtcgggttagtgtgccgtctgggtttcgagttacgttgaggtgactgtacggattgaatttggacatattaagagtaataatgatgttaattaattaagatttatagaaagaagaaacagatattgatgagaatgtttagtaaatataattttcattcacgatgattgtttttgttttcattaaaaaataattagtacctatctatgcattaaaactaaagcgagtctgattagttaacgaaaacgtaggattcttatgtatattataatataagtaaagtatgcgtgggatttgcgattcagttaattcgtggtcaaagtgttacggtttttgttttctttcttttcctttttcttttttttttatttttatttttacaatacatatcaatttcatataatttttttcatcgacaaataaataatataatgacatgtttactaataagtaatggatggtaaggtaattattggtttacatttgtttacttacattattaaaattaaaaaatggagaacttgattaaataagggagaaaagaaaggaagaacttcccctaccaattttgtaag

SEQ ID NO: 161497 - DNA, 3467 bp, Cannabis sativa
  modified_base (2663)..(2679): a, c, t, g, unknown or other
  modified_base (3389)..(3392): a, c, t, g, unknown or other
tactcacattctgccagtctcctcagtagtagggcagtccttttgacaatgactacaccacattctacataaacagaggaaccccaacttagataatatataaaaacacattcttcacaattaaaacatcaaaattcacacacaacaaaaccaaccaagaatttaatcaaaacattcattcaagaaccacccaaaaatcagctataaagcttcattcactcatatacataagaacaagtctagctgattaaacaagcttaacaagaagctgatcaaggtcaaaatttatacataatgatttattttgacacaacaataaagtaatgacctttatcaaaacagttgtaaattacatattggcatgtataatctagttataatttactcatctttttccccccaaattgacaaaccatgaaaaagcagagattccatttcaacctccaacactgatatacaacccaatatttttacatacatacatgcatatacataaattcagaaaatattttacataaagtctcacaaaagattcaatcttcaaagttgaaaacccaaagcttagttagtgagtgttaccttatagggggttttaagaatgaagagggagatctggagttggaaactaccagggcagttaagaggaggtagctggtcgactgagcttacagcagccacggtgaggatgaccccaccggagagagacggaggccggagacggtggggtggagggctccgagaggagcagagagagagagagatgaagtggatttggttttgaggggtttagggaagaaagtttcacacaacgaatgaagacgtgattttctgctatatatatacctttttgcagcttggtcctctaacttatcattgttttataaattgatcctctgctgttttttttttcaaacaaaatgatgtgaagaaatactcttaatttgcgacgtaaatattaagtttaatttctgtagctacttgaatgttaagtgttaaataaattgtcatgtggtagttcttgattggtccatgttattgaatttatatttttatttttaaaatagtttaaatataccaatgagaaaatgatatgtggataataatttagcatacatacggaagttctagaaatttaacttaagtattattatcgtaaaagtttaaattatatattatatattattatggtaatgtctctcttttgatttttatttctctatataatattagcaataggacacaaaaatcttatgagtatgtttattgaaaattctacaattttctttaatatttacaattaataatttaactatgattagttatattatttcgcttcgcacataaattaaccatgtggttaagatacttaaccgcactttgtgggttagttaagttttcatcaattcatcgcccaacccacaccacacatagcatatttctattggcttcgaagttttagagttacatgtacacaatggcaattttagttagcgtttaatagtaaaatttaactgacgcttcaaatttacaaaaaaatgtgaagttatgggagtattgctacaaaaaaaatatatcaagggattaactgtataaaaattaaagcttaagagaatttcgccgccaatcaccatattatttaatacaataatatgtttagtattgacttgtattaataagtgtgtaaaattagattatctatccataaactcgacactaacctaatcctgatcctggaccttgatcccatcttcgaccccaagccacaaaccttggcccgaaccccatccataaacccccgacatcgaacctggacctctatttgtgtctacgctcgagatttagggtctggggttagagttcggggttgactttaagttcgggtccagagttcgagtttgggtctgaggtctggggtttagggtcgaaatttgggtccgatgtcattcacattatatttataaacataggcttaatatggcaatgcctttaccttggtccaaaaattcttattgaaaaaagtcctaattttatttgaaattatttcataaatacttaaaaatgatttaaaaattaattttttatggaatttttttttaaaaaaaaaatgcagaccataaaaaattgttttcatgttactacaacattatactatgtttttcaaagaaaaaaaagattgaaaaaacaaccatccgaaaaaatgtgaagaaaaaaaaatgcgtacaatagtaaaaatttacaaaaatgatattgtaattaaaataaatattactctgaacaaaaaattagaaaaaaatattttaacacgtgatttcaaaaataaattatattttttgatttttttattattttggtgaaacatgttagaccttaatcatcatataaagcccattaattaagtaggccaattcgagttaaataaaataaatagaatggataaggtttatatatatatatatatataaaaatatggataaatatagtagagtttatttttatatggcataaataaataatgtaagagaataattaaagtttaaaatatgagaaaaaataataaataaatttaataaaacttgtaataataagttttgctggaaaagtcatcggcgccgaaaaagtcgttggtgtcagaaagtcgccagaagtagatgtctcagatatannnnnnnnnnnnnnnnnttctataacataatgaataaaacaaataactcaacccgattataattgaaatattaccagttctgtaacataataaataaaaacaaataacacaaaataattcaaaccaattataattaaaatagaatcggttttataatagtgttataatgaataaaaataaataacacgaaataactcaaaccggttataactaaattagaactgattatataacataatgaatacaaacaagtaacacgcaataactcaaaccgatcacattttaaaaaaccaaaagaaaatcagttcctaaaatactgaaatatataaattaaaaacaaaataagtttcacaacaaaatacctcatgaaaccggttataatttttttttattttttaaaaaaatggggatcaattctaaaaaatattgagacataaataaaaaagaattggttccataacaaaataaataaacacaaataataacacactaactcaaatataatataaaaaaccgattatatttatcaactagttaaaaatttgagacataaaaatcaattctgtaaagtaactaggataaaaactcacacacaaaagctaatgaaataaaataactcaaataaaaatatccatttaacatactccaaccccactaaataattacacgcataccatatttatcccaaaaatacgcattcactatgttatataaccggttctatttnnnntataaccggtttgagttatttcatgttatttatttttattcattgtaacattgttatagaatcggctatatttta

SEQ ID NO: 161498 - DNA, 4046 bp, Cannabis sativa
  modified_base (3978)..(3981): a, c, t, g, unknown or other
gggcataaaacccaacaattggatcatcatctatagtaaaaaaattttaatttatattttctcctatttttgtgggcctcttttgcctataaaaagagtgctcccttagctcatttttcactttcaaaaaactacccacaaggtcagagattttctctctagtttctctctctaaaaattagagcttttgacacttaacctttttttgtaatactgtcttatgagaaataataactcaaagtagacatagctccaatactatcgtgatacagggagtgaactactataaatttgacgtgtctctcttataattacttaacaactatttcattcccaccaatctagcgagcaggtgtggcttagaagtatagttcagatttttgagtcaacatatatatatatatttatttgtaaattttagtccctgatttaatattttaccatacaaatgtcgtaactaaaatatttaaatttgtggtaaaaattttattttttcacaaaaattatacaatgagccggatgggagaactgagttatggaatgacttacaagagatggctataaaagaggaatgggtggtgatgggggattttaataaaataatgcataaagatgaaagaattggtaaaagagtgaaatacaaagaggtaaatgattttttcaattgcattgaggcttgctgattggaggatcttaaatctagtgggagttttttcacatggtgtaataaaagacaaggcattgagagaatctattctaagattgttagggttcttgtcaatgaagcctagctagatggacaagttacctaattctgaagctattttcttggctgagggtatctttgatcataccccagttgttctgactatatattttgaaatttttagtggtaaaaaaccatttaagtattttagaatgtggtcatcacatcctcaattttcagggatagtttccaaattctagcagcagcaaattaaaggtactctgatgtaccaactggtgactcgactgaagatgcttaaagtggaattgaagaagctgaataaagaatccttctcagacattatggcaaaggaaatagaaatgaaaaaattgctcacaacctatcaagaagagttacagaaggatcctttcaaaaattaattgcagctaaaagaaaaggatactagggaagcttacattaaagcacagaaggaattgtattttttcttccaacaaaaggctaagatcaactgggttagagggggtgatgacaacactgctctattccatgccagcatcaaagataggagaaggcataataaaattctatacattgaatccaaagaaggaacgagatgtgaagatctagaacaagtgactgaggcctttcttgcttactacaaagtttgctaggagggaaaatgagcaatagaaaacaagtgaagagaggtattatgagtcaagggccactggtgacaagtcaataagctgaactgctactcagggatattacaaaagaagaggtcagagatgttttatttgggactcctggaattaaagcctcaggtccagatggctactcaagctacttttttcatgacaactaggaaattataggggataatctctttggtgcagtgtcctcctttcttcagtctggtcaacttctcaaagaaataaactccaatgttattacacttattcttaagattaagtgtccaaatatagtgagtgatttcagacccattgcatgctgcaatgtcatctataaagtagcaacaaagctgatatattctaatagctcagaatcaagggagatttgtctcaggtagatttatagcacacaatataataatatgtcaggattaaatcaggcattttgggaagaaaataactaaaccaggatgagcttgacattcagaaggcttatgataccctatattgggactacctggaagaaattttgcaagctttcaagtttcctcgcatgttcataaagcttattatgacttgtgtaagaactcttatatactctttaatgttcaatgggattatgcatggttactttgaggccagtagaggattaagacagggagatcctgtgtctcttctcctctttttccttaatatggaatatctatctcagatcttaaagaaagcaggggctaaagaagagttcaaattctttgaaaggtataaagatctcaatcttaaccacctatgctttgatgatgtgatcttattttgccatggtgactttaggagtatctattgtatgctacaggccttgaagttattctcatgctcatctgggcatcatccgaaccctttgaagttagcaatttattgttgtggtatggaagaaagagaggtacaaagggttgttgacatttctggttttagcagaaaggaaacaccttttaaataccttggaattccaatatgtgctaagagaatttaaagcaaagagtgtgttatcttggtggagaaaatgacagtaagaataagggtatagagttcaaggaacatttcatatgctggcagagttgtgctaatcaactcagttctgttagctattcattcatattggagtcaaataatgatcttaccaaagaagattattaagaacattgaagccttatgcagggcatctctttggaaaggccaacacatgctacaagggacaagccttatagcatgggattcagtaggccagcccaaaactacagggggaattggattcaaaaaagtagaagattggaacttggcagctataacaaagtatatttgggcaataacaaataaagaagacaacttatggatcaagtgggtgcctaatgtgtatatcaaagggaaagattagtggagttaccaagctccacctcaagcaagctggtattagaggaggattgatgcagccaaggaaacagtcaagcaatccatgtattttcaacagttgatgagagaaagtaagtttcaaatttcaaaagcttataaaatgtccagacctaaaggagagaaggtacaatggtgccatatcgaatggagcagatataatatgctcaggtatagcttcttcatttggttggtagtgcaagatcgattaaaaacaagagagaggctgtgcaaaatcaatataataattgcagaagacacttgtttactctacatggtaaggagaacttggagcatctctttttcggctgtaatgttgcaggagaatgattgcaaaaaatcaaagatggctttagtggagggcaatgtcacattcacttcttagagtagtgaggtggctacaaagagaaaaaaccaacagattcaaaactaagatttttgctgctgcattagtagccttagcctacaatatttgggaggcctggaatgaagttctggtgagtgaaaaaatgtacaaaccagtcatatagtagctaaaacaaaaatagatgttttgtatagagtcaaaactgtatggcctaaaagagttagtgctaagaatagaatatggtttgagaatttgtaatagatatatacgatgtaattgttgtacaaccagtagttattccctcaggtctcttattgaagatgctgtttaagatgtaattggtcatttggagtaatgataatcttgctggttcataaaaaaatacttattttatttttagaggcaaaaatactcaatgttacaattctcttacatctgttactagcacttccgttggctcataaatatggacacgtggggggttcaaatttatttttaatttttattttaaaacttaatattcttaataacacaaactaaatgctacttgttttaaaaaaactagttatcataacaattttcacatgatattggcacttcaattcgataatcatgttctatatactgcacttctcacttagctatagtagtttggtattgtatctctcttattttttttttcgaaacaagtagaatttagtttttgatattaagaatattaaattttaaannnnaataaataaatgtaatgcatctgagccctccacgtgtccatatatatatgagttaacggaagtgg

SEQ ID NO: 161499 - DNA, 9318 bp, Cannabis sativa
aatacccaaaattaaaatttggattgaaaatggaagggaaagacgaaggacccaaaacctcactcttccctcttctctctcaaccttcagattcaatttcatctcaatctcgatctcattggctctgcaatcccagcttcaccgccgacctttcactcctcaacgacgccgtttcatctcacgtatcgaaaaacttatctgaagaagatgacgacgaccctgaacctgttacagctcccgcgcgtgtctatcaaacgctggactccgacgaccaagacttggacacagtcggcggcaagatcaagaagaagaagaaaaggaagcatcgaaggtcccctgagttggaccacgatatcgggagtttaaggaggtccaatgcccctcgcccatggagtagctccgattccaaaccctccaattccaaaccctatttcttcgactctaaaggcgatcctgacaattttgtcttcggctctctttacaggtacctacgtttcttcttttttttgttttttgtttttgctgaaacgaacatgaaactttaaactttgataactaaggcgtttgattggaggcaataaaatcgaatagaatggaaatgaaacaatttttattttaatttagttgcatttaaagtatttgaattattcttatgtaataatttttcctatcattttggtcgaaagattactccatttaatatgaaagagtttaataatttttttttatatatatattttttaaaatttattccattcttattcttactggcattctcatttctagttttcattctttctaaccaaacgtcacctaatttttcggttttctatttcgtatacatttatgtatttacgaatgaattcagtattcttacttgtgatgatgtgtagaatggatgttgctcgttacaaaccttatgcatttcaaggattgtctggacttgattttcgaggtttgagacaatggaatccaatgctttatgcattggatatggatagtgatgtggatgcattggacaacaaattaaggtccggtggtcgttattggtctgcaaaatatatggccgtggagtctcagaagagcttaaagcgtcttcgtattgttgctcccaaaaccgaaagttcctcagaaacagttgcgggtggtgatttcattccattgtcagatgttggttttcaaactactgaagaatcgtgggaagatgaactcctacgtaaaactcgggagttcaacaaaactactagggaacgaccccatgatgaaaaagcatggttaggattcgcagagttccaagataaggtggctgctatgcaatcccaaaaaggtgctcgtgtacaaacacttgagaagaagataagcatattggagaaggcagttgagcttaacccagataatgaacaactactgctttctcttcttaaggcgtatcggagcagagataacattgatgtatttattggtcggtttgagaagatacttgtgctgaattcaggaaattataagctttggaaagagttcttggtgttgtttcaaggggatttctctagtttcaaggtttcagagatgagaaagatgtactcaaacgcaatacaagctctctctgctgcatgcagtagacactctaagcaggttctcaagtttatttgaaatttagtaacttttatgtgttttttctactgtgtattcataaagaaaagtagttctcttaattactgcttttgctggttatctacaagggagcctggttttcttgatagtacctacacaaactcgagtatgtctccatacacgaccatgtaattatactgtaacttccaaacagatcctaataaaaaaatcatctaacttacagaaaaactgcataaaactgtaacatattgatatagtacagttctgctgctgctactactactactaggagatataatagaagaacaaaaccccattaaagccatggttgtttgcatttataaaaatttatgtggattcttgaaacagatacaaaataaatatctcttgacatcgaaagaaaatggatggttggatcatacaagtacaagcgaagatgaggatattggcttttaaagaaacaaattgtatgtgtcagatcattttgtttagcttaatatgttgacaacgaaggtattagactcaaaatgatttaagtggtcgtttccacagcattgtcaatctctaagaaaccagatgatattgataatggaataaatgcggttatgtggtagttgcaatatctgggttgtatcgttgcagaataatgtgatattacttgttcagtgtgattaattatcatgtatgtattaacttaaatatttattatgtaaattagtactttcataacatataaatcttcaatagtaataattaattataaacattctgaataatacacttgttgttgaatgctgttccttcctttgatgcaggtccatcatgcagctaaatccttttccctggattctgctcacgttcaattagaacttggtctcgttgatatatttctcagcctttgcaggtttgagtggcaggccggttatcaagagttggccactgctttatttcaggccgaaatcgaatatagcttgttatgtccttctttacttcttacggagcaaagtaaacagagactctttcagcacttttgggatagtgatggtgcaagagtaggagaagatggtgcctttggttggtcaacatggttggagaaagaggaagaaaatagacaaaggattcttaaagaggaagcctcaacttatgtggaggaagaaggtggttggacaggttggtccgaaccatttgccaaaaataagatttctggtggaaatccagataatgtcaccaaagatgatatcaaaggtgaggagcctcaatcagaattagaagatgaagacataaatctggaagatgatactgaagtgttgttaaagaagctaggcattgacgttgatgttgcatctagtgatgaggttaaggatgtctcaacttggaacagatggtcaaaagaagagctttcaagggattgtgatcaatggatgcctctgcgcacgaaatctggaggtttttatcccttccccttttatcttcttgcgttctgcatctgttattttattttgccaattccacccctaaccttttcatacttcttttatttgaaagaaccttttcatactttatctatcctttattaacttccagttttgtacttaatttatgacttcaaattttcaatatacaatacaatacacagacagatatatatatatgtgtgtgtgtgtgtgtgtgtgtgtgtatattggtgcatgacattgaaggacatatgctgactttgattgttacagttgcagctctccgtgctgatgatacacccaatgcagaaacagatgagcaacttgtgagagtaataatgtatgaagatgtcaatgaatttctcttttccttgagctcaagtgaggctcgtttgtcacttttgctccagttgatcaatttctttggtggtaaaatatctcattggtaagaatctgtttcaataattgtacctgctgaattcaactcttgctgcagcatagcgtgttttcgtaatgaaagtgagttacaattgaagtgtgtggactgacagcaaccgggacaatagaaatttaaatagctataggctaggaacaagagattaatcaaatgagagtcaagtaagttttttgattaaaccattctagagaaagtgagagtaaaaagggaagtagctaaatatgaaattaaagctgtaggttataagttcgttattgtctcatgagagtaaacttgcactaacaatttgcactattgacttgtaacttctgcatataaaactcatactgtgcaatactttccagctttttccagatttgctgctcattatgttccagtgtatttgttttgaatgaatcattcatgggacctctttttcttcagaaaatctcagattgagaatttgtgttgttgagtattggaggattttagagaatggagaacatttgttttcatgctctttatttattttaaaagaaaatgtaaatatcttttacattttctggttggtctcattctatttctttttcagtattctttttattttttgttttgaaggcttgcgtttcatatttagttgaaagtgtttggttggttacttggtactgagatgcttagccttcatgattgcctccctctatttttgctctacttcatgtttcctatttctaaactcaaaagtagagtgtctcgacattgtttgggcataagcatgtgtgtttgtcttttgcttttttgttttgtctttgtttgctgttcataatgtgtctctttttgtcctctgtttaaacttgaatgttgttgttgagcaagtttaaaagcaacaggatgcagattcacacatgaacatgtaaaatagtggatttgattctggcaataatgtataacaatgatattcaactttgaaatgtgattttgatattgtgcttggaatttgagagtatttttagatcttttgtgcattctcctaatgcatatttggaataaacaccagaaaagcctttttgattgcaattatgcatttttttttgtgtgtgctaagaatgtgatacattactgtgcttgttttttcaaggattatgcaagtttcattatgttaagccagccctagcattttggggccttaggtgaaaaattaaaattaggccttttataaagaaaatattattctaaacccacacatgctgggaccacatacccacttatttaagtgcacacattccacttattaaacttttattaatgtatataatagtaaataaaaaatttggccttgtcttttaaaaaaaaaaagggtcttgggaaatatggagccttgtgcaatgacccaagctgcgcttcaggctatactgtgtctttatttaggcttgtaattgtggaagtttcaagcattactgtaagagtcattttgttgctataagggacacagtgaaattttacttggtatatgatctaggacaatcaaagatcaatccccgagtgaattctaaaatacaatgaaatgctttttaattataaagagtaaagagtctctagttaataatgtacctatataaaatacaatatattggctctaatggtttaacttcttaggttgttcagtttatttagtgttagcacgtgcaaagttgatgccaatttaccaaatacatgtgtttggagatgactaactgtcccttctttcattaacaggatttgcacaaatgacttgagttggatcgagagcacccttagcctggaagaaatatcagattctttgttacagactttggcaaaggtcgacaatttaaacaaacttgaaaacagtcttagtggttccagtttggaatctcttttggggagcaccaatgatgttactaggaggactggcatgatgaaatttcttcgtaacgttacgctactttgcttaactgcttttccgcgtaattacattgtagaggaagctactttagttactgaagagctatttgttacaaaaatgaactctgatagttgttcagttaccccatgccgagcactggcaaaacgtcttttgaaaaatgataggcaggtagtagctgctacgtctgattttgtaattacttatactattttctaccattaaggatacacacatattttctctctaaaataacggtatgcatcatcacgaacaagaattccaatttttgaatgggaattaataactgcaaatggtagagtgcaggatgcaattcttgtgttagaattataagttgtttgttttctgagttagattgttagaatggttcagtttacaagaggttgtgtagggcacttggtttataaccccaatttcaacttctctgattattgtaattctgtctggctttgtttcttgtcccattccctagattttagtgctacctgtgtctgcttgaagtagaaagttttctgaaaatgttgatttatgtactttgtgtgtgtaggatgtattattatgtggtgtttatgcacgaagagaagctttttatggtaacattgatcatgcaagaagagtatttgatatggcattgtcgtctattgaaggactccctttggtaagatctatattcttccttgaatgtcttgcttatgatattgatttttaattgcttaaatgttgtctagttatgatgtttcccaatctgatgctgatcaatactagaatatttattttgataagatcatgagggtttgttctctggtagattgacatcttgacactgtggtacatactaaatttagtttatattattttaactgatttgtgactgcctaatattgactgacgcatttcatagtacttggtgacaaaacaaagttcaaaacctaaatagatgtttagatggtgttagtacacacttagagagagtttggtccaaaaaaagggcttgcgtggtattcattttattcagtgtctaatgttgtgggacttaaatttggtttcatgtataatttatgatatgggttttcttgaacctactttcaatttggttccttgtgttacagtattcaatattcatagtaaatgttgaggatgtataacaaatgattcttttgctccaatgtttgtacaagttatattaaaaattaatgtcagttgtcatttttccactatatactgttaatacgtgaatggacaccatgtgatacagttaaaagattatactatcttcaaaaatatatttaaagcaattctaattcaaaagtaaaatagttggaatttggtgcgtattcttttcctttgttgttctatgactacaaccactatccacatgtctcccttctatttatagtaaagaaatcaattaccttgaataattaaaagaagttttactttcatacgaatgcattgaaagaaaaattagttttaatgcccgtaattcgcagttcacaatactagcctaggttgcccctcttgagcctcgttattgtgctgaaatatgatttatgcttgttaaattttcagtttattttcttcttttatataaatttaactgtcccataagtttcttatgcgtttcttgaatgtaaccaatctagcaggagtttcagtctaataaacctcttatatacttctggtatgcggagacagagcttgcaaataatagccaggaatcatcatttcgagcaatacatatactttcctgtttaggcagtggtgaaacttatgctccatttaaaggtcaatcgtcaagtatgcaattgctaagagctcaccaaggtttcaaagaaaaaataagaacagtggaatcggcatgggtgcgtggcactatagatgatcaatctgtttctcttttatgttcagcagcgttttttgaagaactaacttctggttggagagtaggtatcgaagttttggatcaggctttcacaatggtgcttccaggtatgcattttttctttgcatttgaaaatacttgttaaaatgccaatacatttcatacggtagtgtgtattacatgcaatgtttccttaattattctatattatataccatgtcttctttattgttctgttctggatcctatatggtatatatgtatttcttttttctccaaaatgttcaaccccacgatgtatgtattctatgtatgtatgtatgtcgtttttttttaatacataaatcatttctagtgtccttaagctcatctttataggattccaaataagtggaaggatccctacaaaaaaaataaaataataatgagtgaaagggcagtggcatttgacaatgtagactagagcttttttaaacccataatagttaggattataacttatttgtcactgcttcactcctacactacagttgcatcaaaaagtcattgattttgatttatgctttgcttaactgaccaattttctgagacttcatcaagttgattaaactggatgattgtgcatctttccatataatattgatcttactcttgtacggagtagagatgtaacaagccaaaactaagcattacatacccatatgctaatactaagagtcgagagcttggttctttcctagtgagcagtagctcaatacaaaaataacaaattctccttctccctatttactctttactaacaatacctctagaccagctcatccacctactacaaaaaccaatatacccttttactaacagctcatctatatgtttgctactctttagtggattcctatcaatgcccacctctccaagtatcgctttgtcctcaacagattcattcctaagtgcccctacagtatgtgaccttcatcatagaaccattctagtgatgatgtgtttccaatcaaattagattgaacaaacaactttagaagtatttgggctaacccacatgcagtgaataagcctattgtcactcatcaccatatctatcttgtatctatgtaggcatgttgccatgacaaaagagttgttcatgcttcttaattgaggttggagaatcgtttttgaagggcccacccctcttcccataaatcacaactctaacgtcaattatcttccacctcgcttgatataaactctagctcactgggtattaacgacctagatgaatggatcagacatacaacaacaagcttatggcttatcaaaatgttcgaaacctatgcctcagaacatattttgaactaatgtgccaaaaataatgttgaggcttatgtttctttggtttagttcaaaacttatgcctcaatggagcctcccactagggaggtttactctctgttggcctcgacacataagccttagcttgttttggagaatataagaatctgcattggacagaatcatccacggtcaatttatcaaagttgatttacaataaaaaaattctgaatcatcacacaagctcttctattttccatgtagtgacatagagctttaatccccgccaagtttcaaagttctttgaattttcggtctattgttagagtttctttcaaaaagaagttccaattagaatccaataaggcccacttgtgcatacaaataaacaaaatctgagatgtggccattcttttcggaggataatttggccaaggccgggaatgctattgaaaggtagctcattttattcaggcattttcctaagagaagaagcacattttttgtggaaccttgaggacattctcaaggccaagatggaaacatagagtctcacttattgctatatgtagaaaatagtgaatcgaattatatgtatatttcatagaatagtacatatttatat

SEQ ID NO: 161500 - DNA, 9849 bp, Cannabis sativa
gagagagagagagagagggaagaagaaaaaaactgtaaatttagtttacattcaaaaagaaaggaagacctgattgtaatgcagcagcatgtcagacaaatggtctactcctctgtacttgataggttggggtttaggttgttgggagtaacagttatgcgacgtgagcctgatttttgagggatcgttcaaccctaggtggtgagcaactttctcaacgacgtcatcataggtatagagctttgacctaaacaaaggaaagagcattgaagaatcaaaaatgtaagaaaatcaaaaggacatatttgcaaatactggtaatggggaacttacagctcgagacagaactcatcctcttttggtttctccagagagcgaaagcgaaccacctaagaaacagattaaaaacaacaatttgattattataaatctatcatcgagcgctaaggatgtcacaaaaccgtattttccccaactcaaatgtaaaatttacactccatctcagtcacagacataataaacactttgcttcacactggaaggttttgttatcctttatactagaattcactaaaaaaaattgaatctaatgcactactacaagattctctcttaaattagtattattagatattttgtttaccgatgatgttatcttatagtagcatttaccaattcaatgcatatctcagtatcctgaaactaaccagagtacaaccatatcctcaaaaacgcaaaacgaaataaaccagagaaaatggaaccttaaattaacatgtacaaatcaaataagcatgtgaatccatgcaattacatcatcgcaacagtgttatcaaaacaatggatcacttgcctgacgatttcggacatactctaagaatgaaggaacatcaggatagcgacactgttcactcactggagcagccttctggaagcaaatgatgtctccatcttcgagctggagaggaagagaaagttattgttgttagaatttaagaacataaagttaatataaaactgagccataaatgaatagtgtgaaattgcgagcacccaagctcaaccacaagtacactgaaagaaacctaaatgaatgaaaccgtaaagtatatgtgtacaaacaaaaaaaaatatgagtaaaaaccgatcactaaggtacctgactagcacgaaaagtggccttcttgtcaatgtgttcacacataacattaggctcaaactttatttcctgagtagaaagaaaagaaatgtaatgtaagcagatgataagctgtaccttatctaaacaatagggaaaggggaaagaacaagaataccttatctaactaaacaagagggaaagaggaaagaacaacaatgaaataaaattttccagaacaacaaactaccaaaattttaaccaacctcgaaaagttcaatttcttcatcagcaccaaagccagccatttcgtttaacttggtcaatatctcagcaggctttccgcttgcctttacaaaaagcctccctaggtacctgattcatagacaacaagtgattatgcatactaatccaattttaaggctagaaagagggagggagggacggagggagggagggagggggtgagagagtaccgcatttcttctttcaaagggtcataaagcttaaagaagatgagaatttcctctttagtcttttctggaggagcaacaggtcgctgatcctgcaaaaaatgtgaaacagagaagagtacagtgagtcatgctgttaataaagagttgaaaagttcatcaaaccactcagatgcagtatgtcagaatcaagtgtacgactgaaagaacatttaccagaccaacctctacttccagaaacagctttagctctgcattatttgccttatttgaaacttctcttagctgtccaacctgcaatagtcagattcttgtcattaacaggacggtacacacatatcacaattagcaagtaaattacacactcacacacatgttggcatcaccatcttgtaactaatgtgtttttaattcaactgcagagcacattaacttgtccttagacctagctcattaacatttataaaaatatcattcaaggatttcttgttcagtcaatgtgtttcagccttttaagcattccaagattgtcaagttgacatttttaatatattgttgatcaaaataaatagggtgggttaaaaatagggctaagaagtgaggcataacaatgccttggaaatgcacagaattcacactaaaaaaaaaaaattatgctggatcaaaatgcgcagaatatgaaggtaggtacacgagctcttacagattgtgcttcctccatatgtgtcagtggtcgatttggccgatatgtatggttttggcgctttgcccacagccagtatcgttgaaattgtactggtacgccaaattctttggcaacctcttcctgaaggtaaccttttgatcaaaatcacaacaaagcatataacataatatctagatatagtttctcaattcaaagttccaaatgaagccaattagatagctaatccatgtatgttaagaatgaaaacaagtggatgcatgtctgggcaaaagcagtacaaaatgtggtgtgttttctttttttatctttatttatatatgttttcttttcttttttttacgtatataagaaactgaaaatttttatgtgtcacgtatacttcatcagtaacaacatatagaaatacatatagatgtatacatgaatacagtttataataatgtatatttgtgcatgaaaacatacatatgcaagacaagtgcaaataagatgggtatgttacatgaaaagtgattttagtaatatactgggtggtacaaaaggaactagaacatttagaagatacaactgaaatttgaaacctgcagaagaaatggggcgaaaaatttctacatgaaatttcttattaatcttattcacaaaacagatgcaacttgtaagaaaataccccccctgagggtcatgcaaataagaataaatagatttctaatcaatttgcaaacttgtaaaaaataaaatgtggggaaacaaacattaccttgaacagattaaagggcatctgtttctgaatacgaaaacttcgaactttgtcatgatccacgaggtcaaagtatatatcttttcctatctgttcaagtagatcctcgtttcgtgcaacctagaaatccccacaaatatacacatacatcatgagtcatcagataattgcccaatagatatccaaacagagaaggaaatgtgaaaacaataacaagttgaggtgacaaaatgatacaacttctgcaaggttacctttatgatagtataaaggtgtgcttcagctttttcctttctctttagttccttttcttcttgttccttcttcaaccttatctgtataaagaataagacagagaagttcattgctatctcaaaaactaggttccacaaaatcacaattcaagcccatagatatatatattttatacttaccctcaggtgttcggcaatgtctttctcatcaacattacaaattattttctccttgtcactttcacgtatataaacaagcatataagcatttgaatattttgtaaatttaaatggagcattgttgaagccaggattcgcttgcggtaactgttgaaagtaaaaggttaaatatcaccataaaataaagggagtaaaataacaaacagaaacagaaaataagactgatccgtagaaaaatttacctcctcctcaccaccatactgctcctctaacgcccgtttaacatcttccttggtcacccgttcatcatcaaatttaaaccttaaagcaaaaatgacaatatatgttgaaaactgatttaaggcatttaatgtaaacggtttgtcctcaaagacagttcattttgaaaacctaagcgatgttggataattgaaactaaaacactatttcctctttaataataagaaacaaaactttatcaaagttggaaaaaaaaaaagatgtgcataagaatataaaatggaggatcaaaaaaccacaacctaaaattaagacatactacaaaaatcaggaccaaatacgacaactgaagattatttcaagataacttgcaagacgaatgactctaattagatttgctttattctttatgtaaatagttcttaatgaaaaaaatttactgcaaattgtatctgaaaaattgacaatgtctcattaaaaaaatacaaacaaataactagacaaaaaagtcccaagtcttatcaatcaaaagtcaatacaccacaacaagaaaagtgcaccatacataccactgatcagatagagttggccttatataagcatagtagtgtccaccatgcaccccaccactgtgcaccaagacactgcagataaacaatgatatgatataagtaagcatgctttttccttttttgttcaaaaaatagaaaggccaatacaagcatcttgcttttaaaattaacaggaaatggtaattttacaatgagtaaaaacaagaggctcaaaatgcattgataaaattgaaatttagtaattaaaattgaatttaaaacccaaatacctaagggcggcagtttgatcatattgatcaaatttgggttcaggataccaaatatgtatgatttcagattacagagaagtgtatataagaaaaaaaaggtagggtacatttgtattttgataaaacacagggtaccaaaagagtatttacccaaataagaaatgcttaacataaataatgcagaagttggagtttcacgacatcaaaatattatctagagaaacatatgacagatagaaactgtaagtagctaaaggtgcttcccaatttggttacaccaattaaaaatagttcaaaaaaaggggttacacctccattttatataaaatatgagaaatgaaatgaccaatgcaactatcaattttttaagcatttgctgtatttcactacaaccttatatacgatccaacacagataaaaattcgtgaacataatatgagagaaaaagaaatgaaaatgtcaatacccatgaagagtgtaaagattgcggatgcttctgtcagcatcaggtgatagatatttcccatcctccctatcaagatcaagttgcaaagggaactcatagcggtcatttatctgttggaagtcagtgcacaatttatttcaggaaaaaatcatccaactaatacaatgacttggtaaataaggcacatatcaggctgcataatatccgcaagaactgaacagcaaagccaattgaaggaattgcttgagactcagccaactctaaaatctaaaccggtaaaagtaacagcagatttttagttgccccaaccccaagtaaggtagcaaagtatttgtcgtaatggcccatctggagttatctttcattgtggtttggaagcttaggagttgggtcactttaggagtctctactaattttataacagtttgttaatgaaattgctaaccactaaagaaaaaaaacatgtatgaacaactaataataataataataataataatagtaaaaataataataatagaaagacagaaaaacaaaatgaaaaataaaacaaaaaaaaatgtaacacaatataggttaagaatttatatctatcagttgctaaccttcaccatggtatctcgtataaaatcatactcaaaccgctttagctgaagttgaaggactggaggaaaatcaatgaatagaacacctttcttagcatcctaaaaaaaagacaggaaagaatgaacatctttaaacaacgaagagcatttctaaatacaaacagcaaatatacatacataaatacatatatatatatatataataaacatccttaaacagttaagaacatatttctatataaaaagagggtctcaacccaagtcaacaaatttcaatgctaatactaaatcaaattagttctctgctagtttgaccaaatctacctgtaaaccatattgttcagcgtgatacttgttgtcaccttcaagacgctcaacttccacgtatttgtcaaaagaagcataaacatccctacagcccttaacatcaagctgaagatctacatttaaataaataagaaaccataaggtccataaacaaatggtaacaataaattaatagagcaaccccaattcatttaccataaaatgattcttttcttgttgatttgtagtccacgttgatgcattctatatagttcatatgatgcccttcaaataactgttgtatggtaccctccacaacagttccctgagcaataaagcaagacaaaacatatattagaacaatgtcagaattttttcagcctagttaactattgttaaaaccttttctataccttcatcttgtcctcaagcttttcgcagagaaccctatttagttcttggacatcatgttgcataaatgaatcatatgtatcccatccaaaagacttggtaagctcttttgttgctacactagtgtcactatactgaagcttgtaaaataaactctgcaaagccagaggaatacttcctgatggattatcattctcagttgttggcatgtgatacacagcctgaaataataatacaaagtatgctttattaaaaagagcatgaatcagacaatttgaaaataaaaattaataagtatatatgcttaacctttctaaagtaagggatatggtacagagtttggaggagagaattcatataacatgtagctccttggttcttaagcccaacataaccagtttcttttttcgagtcatgtgaccaataatcaacaactctacgtacagcaacatcagcttcaactatgcaggtgtcattcacaagataacctctaccaggatcatataattcacccagaggcatgaatgaagtgaaaccccaatcactctcgcgtgcattgaactgatgttgtgtttctgcaaaatacagtacagttatgattgattaaaattttcaactaaaaatatcaaagtcgcattgctatcttagaatggagattgcaataccattgtagaattatgaatagcttaacttcactttgtgaaagaattatatataaaagggtttaattgacttatttcttttatattttcacttcaaaattcaaatactgcaattgacttatttattttaaataaaagaggagaattgtttttttatatatatcaatatgtggaaaatccagaaagatgacataagatatcatagtatacaaagaagagttcaaacttataactaaatttgaaaacaaacaattcttacaaattttattatcctaaatccaataccaacccaatacacaacaggaccttgtcccaaactaaattcaaataacccctcatgtcttcaaagattctcctattaattttcaaccaaatagaccagcagatagtcataatactttcattcattcatcaagttcttccttctcccttctaccactccgtgcctctactaattggttctacagacatacactaacatcaaagctctttttttcaccatatacaaacaagtaagtcacaaaagcagataaaagcgatgcatgcatcataaattttcaaaaatatttacaaagtcgtgagcgaggaagatgcattaatacttttaaaatcttatactcataaagtaatgattaccaaacgaagctcattactaactagcaacatcaatagcagagacaataccttttcttactgaatatttactctgaagttgattgacaacacttaagctgaactgggcatatctactccacccataaggtagagctgtcgaatcagcaacatctaaatacattgacaagtgatctacattgtttcctttggggaatattagtatcctcctgcacatttcaatattgtatacaatgcaaattgtaatttttttaatgatttaatatgtggctttactattactcatatacgaacagtaacaaataagcttgagattaattaaattaccatttgtggccgccaacaaaaaatacgtcagaatatagtttcttggtattaagcctcgtaaagttatcaattgtccacgtaaacctcgctgatggtggatcatccactggctgagcctccactgcgtttgtattttccggttgagctactaaaaaatagttattcataaatcaacagtccgtacttacaataaaatttttagtaaataaaagaattaaattgtattcggaaacggaagaaccaaaatggcactcattaacaaaacaaatccagcatatttaagaaacattattcgaattacatatattccttatcaacctaacgaaaatcaaatgaacttacaaaaacattaactaatgccgttcctcaaaacaaaaatgactaaaaagcctactccaacttatgggccatttgtaaatcaacgctcttggtggagctaaatgcaaaccttctactctacaagcgtaaatacctcaaattacagcacaacttttgcacttttttccaagaacctaacggaatattgattcaaaatgtagaaaagcacacaattcaatacacaataatgagcgattaaaattagctcaaattttcttctccaagaaaaaaaaattaagtgagctgtgaccaaagaaaactatagaagtgagaagaaagagagagaagcaatagtgaccttccattggctgaggaccgtgggcgaagtcggtgtgtgggaccagcatctcgtcgtcctcctgttgctgctgctgctacaaacaaacaatcaaagacaaaacccaaagcttatatgagaagtcggatctgccaacgaaaccctaaaacactaccgatgcaacaaaccaagtcggtttacggatcgcacaattgaattgaaatggaaataaaagaaaagaaagaagagtatgaggttgagtgggaaattggaaattacatcgagcggtggaggagtcatcagagtcatgggtggagattgggtgccgttcgatcgtcgaatctaggagagagaaatagaaagagggaaggagggagagggagagagagagtctgcaactgaggacgtagaaggaaagaagggggttgctgggtttagttcgagaaagggcagaatagtaattttgagaatggatggaggagaagacgagaaaaggagagattgcaaagacccctgaccaagacgactctttctctcttattctctctcaccgttttcccattgcttctgaatgtaccagaacacaggcccaacccaactctcttcagttgggcttccacacatactttagggggacataaaaccttgggactattttacagatatacaaaaaaaggtttacaaaaatacggttataccgaattttaaatatttttatattttttatgattttatttacaaaaaaatatagtcttttaatgtacttttatgttgtacacctgttaatttttattttatttgtatgttattttttgttgttgtttaaatattatttttttattacttctatgtaatttttttattattttcgtattatttttatagaaacccgtaaaattgtaaaaaaaaatctttaaatataaaaatataaaattttacaaaaaaatagtattttatataagtattactaagaccttttaagatttttttagacttttcctttttcattgttcatttttaggatagtttagatcaatttgtgctccaagataaaaaatttagttccatgttgttttttaacaagacggcgaagggcatgagtattgaattacacccggttggtaatatgattaaaatcaatgtcaatgtaatgttaggccttagggtaattaataaagagggtaattaggtaatt

SEQ ID NO: 161501 - DNA, 10357 bp, Cannabis sativa
  modified_base (3083)..(3093): a, c, t, g, unknown or other
cctctcggtgggtgtctcagcttgtccggtttagtgtatctatgtttttctatccaacatttagtgaggtttgctttgaagttcttccaatatctgcgacccatctttaaaatctttttcctcgctttaggatctatctcaaaagtctcctgcaattacaagcaatcaattataataaactcataccatgaaacacattacaaacaacacatgttatgataatagactcatacctcaacgattttccatactttatttttctcggaaataggaacctttgcccaactttcatgcttaatgttaatagttctgcgtacaatggatccaagtgtagatacaaactttgttctcgcaggaccgataacttgtccaaactcattgaacactatcaaagtgcgtataccctcacttcgagcgttaaatatctcacgcatcaatgttggacctctaccagctacataattctctacctcctcatcaccgctcatattctcatcattatcgaacccctcagcatcatccatatcctcaggatcatcatctgtatgatttatgtttgtggacaatattgttcccgtgattcctgaagatagcttaacaacttcttcatgaggatctaacttaactttaccagtttctactggatttgaaaattggtcactggtcattgctatggtcaccgcttcatcttcttggaacgaagaagtcacaacagcatcttcctctccagattctataagaatcgagtgactgctgattcggcaagattcacacacccaatctttagagaccttgtttttcacttttcttcgcatgcaataactgtaaaatcgtaaagataattcaataattaaaattagaacaaggaaaggatgtgcggtactcatgctgagagagggcgagagagagtcttacacatgttcgcgagttgtgttgcatacagaacagtttacacgtaaaatttcatcaatgctggttttattcgaagtttctttggctttccccttctttgacatgggtgttggagtgtcgaaaaattggttgggcatcacaccaactcccatacccctaacagcaccgcttttctcatcattagacccttcgagtggccacttcccctctgtttgcagttgtctgtaatgatcctgtaaaacaaataataaatgttaatctcacaagtattgtgaaacaaaggaaataatacaggtcggtcaataaggctgcacatggattagctcggcatgctcttcgagtagatagagaacttgtatagttagatgagattccttttgttggggattcttggtttttaaagttgtatgacattatgatttctttttcaataaaattattcattgctgcaaaaaaaataggaagtaatacaatataggcttacaatgttagctttcacagatgccgcctcaccagacaactctcccttcttgttcgttcgacctaatgtccacaactcagctctatcaatctcggttatttggccatggcattctttcattagttgttccttctttgacatataacctcctctagacatgttatgattataaggaagctttgctcgtaccgcttgcattttctttcttttctcagcccattctgggcttagtcttactttgacaaacttatcccaatcgatttttcttatcaccgatatatatcctctcggtgggtgtctcagcttgcggggatgagtgtgtctatgtttttctatccatctttttgtgaggtttgctttgaaattcctccaatatctaccgcccatctgtaaaatctttttcctcactttcaaatctatctcgaaattctcctgcaattacaaaacaatacattatagtagaatcataacattaagtacattacaattaacacatgttatgataatagacacatacctcaacgatacgccaaaatttatttttctcggccataggaacctttgcccaactgttatgattaatattaacagttctgcgtacaatggctccaagtgtcgatgcaaacttgtttctagctggaccgataacttgtccaaactcattgaacattatcggtgtgcgtatacccttactctgagctttaattaccccatgcatcaacgcagggcctctaccggctacataatcctctatctcctcatcaccactcatattgtcatcatcatcgaacccctcagcatcatccatttcctcatcaccatcctcatgaaatgcatcatcatcatcgtcatcatctaaaattattatatctacgaaaacgaaaaatgtcattttacacttgataaatcaaaacaacatacaacaattttggaaatgccaacagctcgtgaacataaagatgatttttcgttgaattttagaacggaaataaacatcaatagattgtttcagactctatgtagtgaaccaaatgctttcttagtctttgcccacaagcacaggtacatagcaagcgatatacactatactccctcaagaacgattatcaacagaataagcgaaatgggagaataagctgccttcaagataagagctacaacatcgcaattcaagttttgaaataaaatgaaaagtgggatgataagtaatgtaaagacttagctattatgatgttaattttcgtaatgtatgtatccaaacattaggaaatcaaattcagatatttctattatttttcgagttagtatgcattcgagtcaaattagtggcgcaatattaagttaacaaagatttctgacattttgactctttaccattttctacgggcttttgctgtgaatttgaaattttctcattgctcattgctcttctcacagcttcatcttcttggaatgaagatgtcacagcagcatcagtctcccgagatttcatcataatcgagtaactgctggttaggcatgattcacatacccaatctttagggactttctttaactttcttcgcatgcagtaactgaaaacagaacgacacaaagatgcaaagatcatttattttaatgtgttactataatcacattcaatgataagagtgatatacttgaacaacatatatgagagagagagagagannnnnnnnnnnagagagagagagagagaatcttacatatgttcacatgttgtgttgcataccgaacaagttacaagtaaatattcagaacgaggattattgctaccacatatttcacaaaccttttcctgaagatttaaaggaaaaaaatcaaattaattatgtttatacaagaaataacaacactcaaacataccacagagtaactaatgaaacctatatattccttatcctgaagaagttctactcattcagccagttgataaggcgaatataggtttcattagtaaagtacactacgaaatttctccaatattttgttttaagctttgattctttgggaatcaccaatttcggaagaaagcaccaactgcaacataggactccaagtctatcaagtaccaaactttatcttcaccaaatctctattagctccttctattcactttgccattaagtcagttaatcttgtttaactaattttttctgttcccaactaacttctatataaacagttctcacttcactgagaatactgaggaaaagtgtttttgggattcttgggattttgtcttgtgaggaaacacttgagagttacagatattcagagatccattctctcaactgtaattgtacttcagagatgattttccaagcttgattaggattaagttcacatagaacttgtctctgaacagggatacttcttcttttttttgtttgatctaagcgtattattattatacagacatttttgagttacacaagctgggattcgatcccagacccccacacacgcaaactccaataaccccctattgctactcgagctagcctcaagtggtaacaaggatacttctctgtgttccttgtttcatttctgcataatctttttattactttcatttgttcaaaattagttctttgaacttgtttctattctgttttcatttgatccttttagaacttgtgttaaagtattgttgcaggaattcacatctgaatttcccacatatgtcctgttatatgatcatagctataaatctatattactagctagaacttccacactaaactattctattgcatacattaattactaacacacaacctaaaacattatattatttttacaaccatgatgaacaccaaacaaaacagtaaaacccagttgattaatagaaaaaaagaaaacaaatctttctggtctaaatccttatctcagattctttatgtttctaaacttcgttactcaccaaactatgccttcaactaaagttttgttactcatgcaaaaacactttctgttaccccaaaagcacaagtcagattttttttttgtaagggaaaaacatagcaaaaatagtactagattgtatattaaaggaaaaagccactatttttacacacatagctctaacactagaaatgggtattccgcaattactgtttttctctaatctgaaaagataaatcagactctgtcacaagcagtttaaataaatataccaaaaaaaatcccccttttcaatttcttgaagaactgggcaagaaaacaaaatattgagagagatttggttaccttggtatggcaatggctacccatttttgttggttttttcttctgtaaaattctcttcactgtagctttgcatatatataattattatttggggaaaagggtgggaaaaatgagaagaaatgcgtgtgttgccggaactgtcccacctgccattccactaaagattcaatcacatcaagctcaaattgatttaaaaattggaaaaaaaaaaaaaatgggcaattgggtatagtgtcttgtttttttttacatgggtatttgaacttggaagatttaatgtaagattgaatccatgttataatattataagtaatgttatatatagaatgatatttgtttttcagaatatgtgtattttttaatttttttttattaagaaaaaaaaaatggtgtaaattattttctcgctctattagtagtttagatcacgtgctagttacaagagttttatagttcatttttctataattgaatcatcggtatgtaattcgagagttcttattctattaaaaatacttttcatgaagagttatagtgaaattcgaatacttgacccaaataaaaaaagatgctcataaaaatatcatacggctacagtacacaacacgtggttaaaattcatgtatttatgttaccaccataaaattcctaataaagaatcaaaatgtaatgctagtttattaagaaagactttcaattaaatatttttctattgctgcaaaaagaaaaaaaaaaggggggaaagtcactttcttttgtatagttatagcatattttagaggcgtacgtatatataatttgtaatttgtggtttcaaattccaattaatctaaactaaatgaatccaatgagaataatttggttaatcggaactgtttaaactctctaatttagtcacaattttaaaaatttcgataacaattcaaaccaaaccaatctgtataatcattttatgtatacttaatatatatttttattaacaaaatattaatacttgagaacaactttaagcaatacaattacatatttttaaaattgtatatacaacattcaaatgttcaaagtcctttattgcactaatacataaagaaaataatgaaacacaaaaaaatgatttcaagatttagctcagttcttgaattgagcttgtttcatcctcctcactatcagcagcagcagcagcttcctcatcagccaaccgtttcttaaagtccgccatgcacttcttgagtttgctcccaagaaagctataatcgccatctcgattgtgcttccaacaagtgtagaacacattcattgacatgtcattcagttgggttttcagcttggtcttttccttcttgaactccacaagattaagcctttgtgtccttcgaagctcttcgacttgttcatcttgtcccttgagatcactccttagtgaagttttggttgcctcagccttggaaagtttctcctggagaatctgaatctcactttttaaaggagaagcaaccgaattcacttcttccttaagttttttgccgaaattgttctttaaagtttgaagttcttgttgaacaaggtcccgctcgtttcttgtctctccaagctctcctttcaattcaatcagctctttctcctgaccatttagtttgttctggcaggatttcataagtttagcttgttggaacgctaccgcagtggtctgatgagaagaaacaaatcgaaaaagttagttgatatggttgcaaaagtattataaagacaaaaggatgatgataatcacttaccaagctcatcaagctctgctgcttgagagcaagatcagttaagtcctcagagtcaatccacaacccgtctttgctcaagttgtctccaacttctttctcgaaaacattcaccataggggtggcaaaggcctgtacactctcgagaacatcagacattgctcgagagcgagcaggtaccaactcagtttgcgcagtttccattagcacttgctcgggagtcctaatcgcggccttggaagagatggtcgcttcaggagttttggctgttgatttccttgaagtgtccctgcaggtccctgctgttatttttctcttcttccttcttttcgagtcaacattaggattggagaaacaagcatatatatccatgttacctgcacagacaagaccccaaatgttaatagcaaaagaactgtacaagtattaaaggaatttgtaaggagttaatacctctttttctcttcttctttcttttcaagttgacaataggtgtggagaaacaatcaaatatatccatgcttcctgcaaagacaagacaaagatgttcgaagcgagtaattgtacaagtagtaaaggaattagtaaggaatcataccctccgagctctcgagctcatggttaattattgatgattctttcgagcaatcgtgtttatgcttcaatccttgttcgggggattcaatgtgagtgtcatcctcacagaccgttgggataatctcaagttcgttgttagcttcctcgcattggggaagatcatccaaagtctcctcagaatcctcaacaatatctatgtttgctggagagcaatgcagctccataggaagattgaatcgagggacaggcccatgatatgccttcttaaagcgagaaccagcttggcgacaagagtcagacaaaccaagagaatgtgacatatcaaagagaccacactcacgaagattatcatcagtaagcaagacttttgaactcttctcctctgaaggcaacttgctgatttgctcaactcgactgattatctcgctatcaaccttggatcgcttgaatggccctataaaaagaatcccaattaagaggaagactcaaatgataaaggaaagagaaaacaaacaagtttcatggaaggaagtttaccaacttgttgaaaattcaggttttcggctttgatggctgtagtgaagaaaaagcttttcttgtatggacctgcatggctagggatgtctgtaaccaagtttccagaagcataaggccaagtgcttagatagtaaaagccatctgtattattgcgattatcgcgaataggattggctttcaaaatatacatgtagtgaatctcctctgggctaggagttggccatcctttctgatggtacaacaccttcagagtggataggattctataactattgggagcgagctgaaatggggcaattccaaaataatcacaaaaatcgataaagtattgtctaaggggaaggactacccctgcactacaatgatattcactccatgcactccatgctccacccggccaacaagcctgtgcatcttccccgtcgcccatccttagctcaagattgccaagaaaattgtatctcttcttaatcctctcaagccccgacgtatcaagctgaacattcaaattatcttgttcagcaacatcctcagtctccttagtttccatcaaaaccgagtcactatcagattggcacgattcacagatccaatcttcgggaaccttgtgctctatttctcttcgcatgcaataactgaaaaccgaaatatggaaagatcattcatattattatcaaagtagttctttccataacattattttccactatgatcacatccaatgcaacaaagccaattatattttatcaatgtaaagatcatttttagtgaagaagagaaagatgtcacttgtcttagactgttctgttccccgttatatatagaaaaatctcacttgtggcggagaaaaaccgtagttataaagataattcaatgataaaaattagtattttcatggtgagaaagatgatcttacacatgttcagaagttatgtaacatttagaacaagttacaagtaaaaaattggcacgatgattattaccaccacatgtatcacaaactttgtcctgaaaaagagaaaagaaagaaaccatattaatttttttttgtttatattaaaggtaaggaatgattccaatcaaaagagaccaactgaggcaaagcaccaacaactaaactcacaaaaacccctcaaagaaaaaactaacagagcattaaagaaaacttcaaacagatgaaattacatcaagcaatcccaattccttaacaagttaaaaataaaaacaaggtgagaactttgacaatctttagctatatagaaacccacaactagtcttggaaaatcttctcacatagtgttttggaaaggtagcttttggttggaggtaataaaatggaatcaagtttcattccagtcctttatttggttgtattttaaaggaatgagttttctactattttggtagaatgactattcaattttaaaatagaagaaaagaccattccaatacaagatgagaaaaaatttaataatcttgttatcaatttttttatgcattttaaatttgattgcattccatttctattctcttttctattcctatattttaattccttccgaccaaacaccacctaacctcataagtcctaacctaacattactcaaactaaagtttgagtttagtatattgaacatgacatcactaaaacaacaagcaaaattttaagtaaatcatagttagccaattaatattgactatttggtagggagaaatgaaaatattagaataggaatgagaatggatagaatcaaatttaaaatgtttaaaaaaaattgataaatttttttttatattggaacgatcattccttcaattttaaaatggaataattattctaccaaaataataaaaaagccattccattagaatgattgaaatgacattccaataaaaatacaacaaaacaaaagaatggaataaaaattgtttcattacctccaaccaaacgccacctaaggaagaatttgagtggaaacaaggtttagccatatagcaaaaatgaaaacaaggctaaagcttgattctttccctaattttgcttgttctttttgtcactagcttgaacttgtttcagggcatacagtaagaacttacactcatataacatagaaattagattaccccaataaaagataaacaaaaaaggatgaaagtaaatttttttttagtaacccaaatgaacaccaaacaaaactgagccccaattgatttccataaaaaacaaatctttttcatcttgatttcatttttcactcattagtgatggaacccagcagtgatttttaaggcttcttttgattttaaggtagttgaaaacattagagcaagtaaaaacttgttactcatcccaaaacacaggtaaaaatcccatctttttatcaggagaaaatcaatcatggcttacataaaaagcttttctttcatgaaatttcggttcttattgaaaaaagatgaaatataaacatgggaattgggaaatgatgagagagattttggtgaaaccttagtgtggcagtggttgtggtgagtacccattagctggattttcttctgtcaattcttcattgccgtgtctgtatgtatcatcatctgggcaaaggagtggaaacgatgaccagagaaaaagctactgaagctattgtttacttatacgaggtaatggcatattctgtattattatattattttaggctaattatgatttttgccctgaactttaacatgtaccaaatgattcctcctgaacttttaaggccattgaaaatgcccctgaattattgagattgtt

SEQ ID NO: 161502 - DNA, 4148 bp, Cannabis sativa
tcttcacaatcaacaacagtaatattccttcctaaaaaaaacagtaaaattccttaaaaaaagttgaagacaaaattcatcttcccaatttttctctactaaatattcatcattgcaggcaaggcatgcttctattttcaaaattactattctacccctgccagtttactaccatgataagggtataaatgtaaaatcaaaccaattttgattcatcttcactgtcactatctactgtacagtacctgagctttgaagcgaaatccgacaacgccacgtgttctccgaccaccggactcatttcctccgagctaagcacagaagaagaagccgacttcgatttcgatttcgccttcgaattcggcctcgacctttccctcgacatacgttctccaccgccgtcatcacgacgatcagatccaaaaacatcgccgtagaatccaagatcgtttccaccgggaatcctgaacgccggaaatccccgtctaccggagttaaaactctcctgcggcctgaaaatctcatcgtaaaatgaattcgaagtggcaccagcgaaatcagctgaaactttcctccagtaaacacttcgaggcggacctccaaatacgtcggagaagtcttcgggatcgagagtatctgtggaatcggcgaagacagcagcttgctctgtggatcgccgccgcgagtggtggctctccgacatcggcattcgccaagattcgtccatatatatgtatatatatatgtttgtatatatatatatatatgaatatatatgaatatgagttcctgagaagagtagtgaagaagaagaaagagaagaagttgtaatgagaaagaagaagaaataaatagagcatgattcttcttttatagtgtttttttttactcaaaaagaaaaggaactttcttgaatgaattatttgaattatttatttattttaagctaatttagatttttgtatattttatatgtatcaaattatttttgtttaattttattaaatttaaagtagataaaaattcaggacacaattaagtaggtattaaagtttaggagatataattttgtaaatattaaagttcaagtacatgataacactcaaaatttttactttgtgagaaattatttataataaaaaatatcatacttatattatgattttttttttactattttagtctatgataatcaaattaaaaaatctacatttaattttttaaaaagtaatatttttgttagtaaaaactatactcacccacattaatataagtgggttcgtcactgtttgagggcatgatttagtatatcgacaattgttatatcaacaataatttttaaatttaataatcacaatagtttaaaaagaatttttaatgatatgaaaaattcaaaagaaatataatttaataaatatcaaaatttaaaaggcaacatctaaattattctttattttatttatgtataaatagaataatgaaaatgaaaaagtaaaataattgattgaaataaatttagagggtaaaggaatgtttatagggaggaatgaaatgatgagaatatatataaatataaggttggtttggttacctggaaagatgtttttggttactattatgcaagtggtgtttgtttgtgctcttcttctcctattatataccctaccaccaccattatattgtagtagtaccatacatatatatatatatatatttatatatataatttatataatatttgttagtgtatgatatcatttttctttcttgcttgctttctggtgcatgcctttgttatgttcctaatgatgctacttattatctgtaaatcaataattaaaaaagaactatacaaaagttttgaacttaatatgtatatatctatatattttattatatataatacatccaaggaaaatgatgtaataattaatatgcatatttattatgtaattttgtttacaataatttaagacttaataataatatttaagtttaaaccttcattatagattaatacttaagtttaatttttgataaagtaataatatttaagttatatttttatagaacttctatacgtatatgaccgttaaatgtcaagtcaatgactatatgacactctctaattaatccaaaatattaaattttttattgtttatttaaaaatttatttaaatatactaataagaaaatatgtagatattgatttgccatttaacgacaaataattataaattaagtattaaactgtcaaaaaataaacttaaatatttatctttaaccgagagttaaatgtacgtatttacaccgtaaattaatctttttttttagataatttcaaatgattaagtccatgccatttctctaagtattctccctaaaaagagaagtatgggtttactatacttaaatttttgataactgaatagttataatttgattttgttatatcatcttgcatattatgtttatagttgacattctatcaattttaaaattttttacttgacattctttcagttttagattcttttaaataatttatcatatcaaaatgagggttcaaatattttgtataatataaatattaaaaataaattcataaatcagatttttactttatttttaaacaatgtaaattatttaatttctttttaaaacttattaatatataattatatatatatttatgtatataagaaacatttttcaataggtaatatcattactaaataaatttaagtataaatattaattttaaaaatattaaattattagattttaatctaatgacaaataataaaagagaattttaaatttctatatttaatttaactacttatttaaaaaaatataaaaatatatattttgtcatattatatcaaaaatatatttatatacaaaatatttaagtcactcaacttttctatatcatttttgttgttgaaaaatatttttaaatttttttttaaccgatggaacaaactgagcccatgtaaaaataaaatattttctaattagataaaaaaattaaacaaaatttaaatgttcctaaaactattcatgagaaattatcaagataatcaagaagaaagatcagtaaattagaaaaagaaaattaccaaatggtattaatttgtatatttgaagaaagtataactagatagattagcaattagtggtatttgatggatgtagttaaagtaaaagattaattaggatgattactctaattaatttcactatccaataatttataaatgagaaaacacaataatgtagcatttttgcatgtgaaacgtttcaagtggggcactctcgattagaattcccatacattcatgcatgcacatatatggatgaatatttcttttatttaaggatctcattttttttaattaaaataaactataattagaaacttatatacttaaattataagtacatctcaatattataaaaaattaaataattttaaaaattcaatcttaataatttttcaaattttcttttttatattgttttgtgttaactttaatatttattataatttatttttatgtattttttaaattatatataattttatttttaaataattttttgaaattattacatgaaaaatacgaattgacactttatttacaaaaatacctctatacggtgtggacaatatttataccttttatgtgcttttaattgctaaaatacctcttacactatcacttacataatcaaacgaaggttgctgggtggttggccaaatgttgcatcagacgaatgttgctgggtgattgactgaaggttgcatcagacgaaggttaataggtggttgaccaaaagttgcatcagacgaaggtttcaatcccaggaagcatatgggtctgttgaaactgtaatgcaatagttatatttgttacgagccaactaacgtgcaatttaattacaactaaaaaatgtaaaatgtgaatgcgtatatataagaaactatttgtcagtatttttttgtcattgatcgcgataattacttgtatctttatagtaatatgtggagaaataactgtaagtaaaatatttatgcaactgtaatgcaacagttatgaaacattaaaaatcataacagtattttcacgtacgtaactcta

SEQ ID NO: 161503 - DNA, 4724 bp, Cannabis sativa
cagggccagattgtttaattaacaaaacattatgctgcatagaaattactttattttttcattgaggatttcttctttcctatgcatgtgtacttttgaatggctattttaaatctttacacatacctctcaccttaactatagtatagatctgtagcagtgtgcaattcctttcatggagaccctgggaaggtattcaataagaactttggattactttaatctctgtttgtatgagtttgtgaactgtggggtgctaccaatgtttgatttacgtggtacagctgaggttcatcggtgttcatgttacaaattatatgcaatttgtttagaaaaagaaaatggccctagccttcaatatacattaactgatttgttgtgaaatgaacagtgtgaattgatggagttcaataatataactgattttaagtagattttttaataggcctctttggtgaatttctggtctaaatgatttttggctggatgtgatacactattgttccaagtcagtgcttgaaagaattagaatataggcattttattggtatcaaaaagaaattacaaagttccaaacttttcgacagtttggtatctccccgtgttttcccttactcactttgttaaaagacaatgctttcccctcttacaattgatcagccctctatttatactaagtctcccttatagctgttttaacaccttaggactatggaataattcactcacttaaaaccactaagaatttgacaactcaccctgtaaaatcctaatcaattataataatgagactagtattaagctgtaacaggatgctaaagcaagacttggcttttgcttagaagagtaccatcccctggctttcgcttaggtgttgcagtcctgcttctgaggaagtgcttagaaagtagcatagctaatagttttattgtctatatatttcatgttcttttccactgatctttgttgtcatgttttccatctacttgttaacattgctgtttatatattttgatggactgaagtgagaacccacccacctgtcatggtaatttatgacttgtacaagtttagtgaatagatatttctgttctcatcatgttttccataatctgggaaaattatatataaatatatatcaagacatttaagaaacaattatgttttgtatgttctgccagttattagtggaggtcttgattctaaacttgtgatgtgggacttttccaaagggcgaccctacaaaattgtggattttagtaagcacttgttttttgtctctaccatccgagttacatgctcttcagtgtaaccgtgcaattagctctttcatttgattcaatttggtgttcatgacttttcttggcttaaggtctacatgatggaagcaatggtggtagtggaggccaatgctttaatccggctttcattcatgcaatagcggttccagatattgatatgttaaacataactggaaagatttgtgtggttgcaaggggtgatggagctgtagatgttattaacattgaaacagaacttgctgctatcaagtcaagatcttctaaaatatcccataaaggatctcaatctagatctacgaacagaggcttgaaagatgtggagaacacagaacaaaatggaagaccaaggctacatttggattacaccctgggaggtcatacttctgcagtgtcttgtgtgtaagtaatttatttgaagggaagtttagataatctaattttgaaagtttagtcacttatttgattggcataattatcaggtcattttccctttttggtgagaaaggaaaattccttatttcaggtggaaatgataagtcgattaaagtttgggattggtctagatattttgatactgagcaaactagtagttgcagcagtgatattttacagtccaccattagcctaagcaaaaaagtgagcacatttttcttttcaatgtccaagttctttgattgtatgtatctcaattgtatatttaacttcttaacatggccctaatacattgacaggtaaattggctctgcaccactccaaccgaatcggaaaacgtcatcgtttgtgacacaaccaaggtggtaaaggtctattctgtttcctaggtcactactggccaattgcggacttagcgaacgtaagcccctggtcaaaaactcttatctgactctggaaaagtatctctttatcgtgaagactgttctatgtatacatcaatttttgctcacagaatagtatggtctcagctaagcaggtatttgatcttcatatattcaacaatgcaagatcttcattcggttaatgattttaggtgcagaagtttgagattcttgatttgatttgataaaagataaaactaaaaataatgtaagtagagatgttggcgtgagatgagaggataaagaaacgaaattccagcaacttgggaattttattttgaatctaaagtagtcaaagacccgaaggggaagagttcattttgcgaaacattttgaaatgtaatagtacaatttttgtagtttaaattttgtaataataattctttgttaatgttatatttttattgtaaaagttaaaagattttcagcatttctcttattcattgcctgatcatagaataatatacagcacaaaaaattggattaagatggtagagataaaattagggaagtgcttaccagtgtcaaaaagagcttgagatcgcaagaaagttcgttgaaatcgatgagctatgacagaaatgaatgaaagaaacagagaatttgtaaaatatagatcatatacatctaaagttccttgtcttttactattttgcttcatgaacctaaatgagtgttcttacacactatacctttaccgggcctggataccttcgggtacaatacaatagtatatacattaactatataattaatccaaataattagaaagataaaaaatacacaaggattctcaatttcaacaaatacaagcatctatagttctatacccaggaaaaaaatataaggcagggcaagtaaaaatggtggaatctctaaaaaagaaaaagtaatctaaactttaaaatcaaatattgcacctaaatttaaccaaactcatcgagaatcttccatgcgtcggagaaaaatctaatttccgagaagcgtagtcgatctatagtctgagatcaaaattgtgcctacaattgccattaactttaggaaatgaattgaaattttgagaaattagaatactcgtaagtcgtaacattagatgaagagaaagatggcgatggaagaaaactatattatacctttactactgaaagaatgtggagaattaataacggtggtttgaaggttagggagttggtttctttcttcttccatggaaagatgacaagcaatctctctctaccttgaaatatttgcgggaattggaaggaaggtttcggttgaggagactacatcttcaagacttcaaccaacaaaccttacagacaaagccattgcgggaattgcaaggaatgtttcggttgaggagattacatcttcaaccaacagacagaccaaagatttttcctcctcaaccaatttttgcatgtaacttctataataatatatcctcctccatctccaccaccgccaccaccctctcgtcagggaaaaaagaccaacttgcccctcccttttggtggtgtgttttgggggtttccatataaaaatcaagtgaacaatcaccaatattaagagagagagagagctttgggggagccaaaggaacctgaaataaaaatgatgcaatctgggattcctgtttgtaacacttgtggtgaacagctaggggttgatgcaaatggtgaagtgtttgtggcttgtcatgagtgcaattttcccatgtgcaaggattgtctcagttatgagatcaaagagggccgtaaagcctgcttgcgatgttctactccctatgctggtatgtatttctttcaatatttgtattcttctttttcctatgtttattaaactaaattaatctttaacactttgtgattgttccaaaaacaaaattataagcaagtgtgtgtatgcatttttctttctactaaactcagattagttcgatatttacaagtagtcactggaatgatcttaaccaaaattaatgcattttagctatgtttagtataaaaatttacagtataattttttttttcgtaattacttatttatgcgttacgttgattacgtcagacgattcaccagctgataacgatacacaattatctggaaatcgatccacgataacatctcaccaagaagaaccaaaggtaagacttcttgaccttgtatacatgtgcataatgcatatatatcaaatgcacactgctacaaaaatgataattcaagtgtcatgaatagtttcatgtggacattacaagttttttaatattatatatagagttttttattttttaattttagattaaatataattatatataatatatcaagtaaatgctagttttataattaataatttcatatacaagttttgtttatcctattattcaaactttttttttgtttaaattgtattttactctgaaattgtaaatcggtctagttaaccataaattaataaaacaataaatcaataaaattgattcataatcacaaaactgataaccccagagtacataaattataatgaataatctaaaaagaaatg

SEQ ID NO: 161504 - DNA, 1396 bp, Cannabis sativa
  modified_base (1356)..(1370): a, c, t, g, unknown or other
cctgggctcctccaccattgccgccgttgaagacctcggcaacctcaactccaacatattgccacgttcaccaataacaaagctcgacccaaaaaagatctcccaaatcaataggtgagaagtcgatgttctaggcacaacagtgacgcacatacgacgacgacgacagtgataggcctaagagcttggacgcacgaacatcatcgacttcacctcctatgcgtctcaccctctcccttcttcaatcttatctctgcgcttgttggagcttgaagctttgttatctgatggaccttgaagcttttctcacagcatttggggtggcttggtcattagaacaaaaagccaaaagtgtagtcatgattcaagttccccaaaataaacggaacaaaacccctctctcatatctcatatgatgaagcctttttcctggatggcgacccaaccccacactgtacaatttgtatctaaatgctatgttttagtcacaaatacttttttgttgtaattaaaagtcacgtttagtcaaaaaaatatttatgttgtgactaaaaagttgtcactaaatgtagcagctttttgtagtgagaagaagaagagtaaaaaaaatattttttaaaattactttttctaatttttataatatttaaataaataaaatgatgttgagtaatgaaatcatgctactgtacacagcatgacatatctatatggcacttaataaccaaaaactaatagagtaatagagaccaaacgattctgtaagttgagaagtttagccatagttatttcattaagggaggctgatcatgtcaaactctaaagttcagagaatttgaccgcgaattgcctaaagtgtaaatatattcaaaagaaaatattataaaatatatatatattgtacaactttttctattgtttcaccataaatttttttttccttatatattaaaatctcctaataagtattatccatagataaatactattaaattttttttaattttatgtttaatttttctaattaataaaaaaattattatttttacattatatgtggttgagattatttcattagctaaaaaaaatttaaaaaaaaaattaagcttgagtttttaatatagtgttaaaagatagtactattaaaaaattcattgttattaaacggtatataaatatttttttataatttattgaattatctcaatgtattgacatgtcatattttcaattaattatctcaatttattaaatttgatcagttctcaaattaataattgggtaaataactgaatataagtacttaaagttttgtgtttataagcggcatcaacccaatgtttatttttagcggcnnnnnnnnnnnnnnnttgtaaaactgtaatttttctctaat

SEQ ID NO: 161505 - DNA, 6366 bp, Cannabis sativa
cagaaggatttgttgggaacggcgtcggatctggaagttgtcccatggagttcgctcgcacctcggcaacgaacgacatcagagaagaacaaatcgttggggatagcgcctgaggagaagcatctgctggtggcgttgcttgagatgaacaagaatgttggaggagaagaagacaaatggccaaagatgaaaacgccgatgaagacggagccggagaagaaccaacagcggaagtcgtcgctggcgacgaagaagagggagacgtggtcgctggcagagtcgcttgaggttcaaccgctgaagacatcatctcaaagagaagagctgctaaaaaccacaaaggcagtcgcacatggggatcttctttcgaagaagacggtgatggggaggagcttcagtttactaaaacccaattatttaaggcccaagccctaccacaatcaacccatgccatttaattgggctcccagtccatttaattgggctctatatccggcccaccttctaagaattctaaaaccatctctttaacttttaattcagatctctcccaagtctcttttccttttaattggattacatacgtcactcatataatatcacacgtgggcctaatttttcactcagcaaaggcatttaccatttgggatccaggccttagaccaaaagcaaattgttatgcacttccacttcgcagcatcctcggcatttatggaagcttcgtaggcggtgatcgacagaggatgcttcgtcttctctaccatttctttgtacagaattttacactttttgcatcttttggtcatatgattcaaacacaagaaagggatgcggatttgaagatgctgatgaagtggcctactaaggtataaaattactatacagttgggtgaagactttgggtttgttaaggatcaggatatggtgcagttgaacattttccagaccaagagaagggttgttagttctcttgaggtcatgcttcagtactccatgttgtctactaagattaaccatacaagaatggtaagaggttgcctcaatgcatctgaaaagtactatgtggaacatctaagattagtctggagtgagatttttaatatgtttaggacattttttgacaaagcagaacatcaacataaaataatagaagaatttctacacatgtactggttctgcccttgtagtatagcaacagttgggggtctctatgttggtgtcaatgctactatcactccactactaagttttggcaatggtgctttcgggatattggatcttgttcgtgctgtaatgaagtttggcaagttgtctttgcttgactttcagttgctgaggatgcgtttggtggatgagaagtataactttggtgctttgctagtgccattcaagcattgggtttttgatagagggcgccaaacactactccagccagccaatggtgcatcaagaacatgtcagaataccacattactaacctggttctttgacaaaggtcgcacacagcatagggctctagacttgagtgatttgatcaatcaccttgaggacaaggtgaatttcgggcggccggtaatgttacgcactaggattaatatggtgtgttagcatatattaaataaaagggtaattgagtctttgtattgagggtagtgttttaaagggaatacaataatatatatagaatattgaggggaattggggagagtgcattgtattgagtaaacctctgtttgcatcaaaggggcctaagggctcccatactttgtaattgggtttctcatacattcaatatacatttcctactgttttgctactgttctactcctattattgctactgttttattgtgttcttgagtttggagttctcggggcttatcaagatcatggaagtgtcccaatccattatagacagcccagatttactttaataaccttataccacaacaacatttcttaattagaaatgaatctcttcctttgttaaaaatacagagaatttagaaactacaataaaatgaaacacacatgtgacatgcacccatgctaaagttaggattttcttttcaaacttaccattctttaattattattaatgttggatgcatttaaacctgaaaactaatattggatgtttgctgctaaaaaaagcataatatttgatgcatttaaacctaaaaaaaagttatgagtaaagcaaactgcataaatatccatttcgagaaaaaaaataaaaaaactgcataaataaggaaagaagtaaatacattcagataattgtcaagggataaatgcaattaattacctatcaacagattcaccatgcccaagctgcccatttgtgcctcttccccacgaaaagacattctgtctttcggtgacagcaagagtgtgtctccatccacaggaaattttaactactttctgccaaaaaaataaaaacatttaagacaggttaagaagaagcaagaacgactgagatggttatgtgtataatcagaaatgacatatcacctgctcattgggaaatttaacttgcacgggtgaacagtgatcctcattatcaccagcacccacctgtccaaactgtacacggaaggtaagtaactaaccgaaaatttcaaatactatcatgaattgtgatggaaagaaagaaagtggactggatagtgtcttatagaattagttgtttatcatccacaatatttatttaaagaattttttacataacacaccaaaaattcaaaaaaaaaattacaaaaatacattaacacgaagaaattttcatttttacggtttgtacttttttatttacaaaaatacgttcttctagtaaaaacaatgaactatttgatattcccttttggttgttttatagtttatttattgttatcatgatgttgattttctcgttgttttatgttgttttatagttgttgtgaggttgattttttattgtcttgtagttgttttcttaccttttctattttttgccgagaaaaacacacttttgtaattttgaaagtttaaaatcgtatttttgaaaaattaaatttatataattgcaaaaaaaaaaacgtatttatgaaaatattcctattttatatctcatgtttcatcaagaaaaatcattgatgaactagaaaactacaataatgattaagttacagatttgttagagatgtttgtcgacaaagaaaaaaaaaatgaagattaataataatataataataataataataaaataataagaatatgataaatgcaccttattccatccccaaccataaagttttccatcagatgttagcgccattgtatgtctccaaccacctgatatctacgaacctcaagagaatatacacgcataattagaatgataaacaaacttcagcctgtctaaggcaaaagaaacttcactctaatcattttagatatttaattaattacaatttaccaatatatctgacatgggagataaaagataaaaaataagatcagagaattgaaataatatttcagcaaaccttttgtttccttatactcttgggtgttggtaagaaggtaataagaaacaaagatgtattggaaaagatgaataaaatcatcttagttacatcctaaaagccagtatataaaactgcaacctaagaaacatatagtaacattgtacaagactcgtatatacactacttgccttaggctttaaagacacatcagcaagtcacaaaatagcatggaggatgataacttccaattagctatccagtatttaatcttgtcctgaattacttccatgtctacttatattgaagattctacatttctttccaaccagataaccaaagaacaagagcgatgacattccacaacatcttcttcctttgatcctttgctccccgatagccctctaggcataggcctaccacatgttgcaagacattgcagcattagtaaggccaaacccgataagttcccgtatgctgaataattttgacctaaatggccttataaaggagcaatgaagaacattggatcaccattctcatatttttgtttgcacatatgcaccaatatgaagagacctaataaaatgggcttctctatagattctcccatgtatctaatttgttcggagctcccaacaatccaaaaacattaatatttgaaagagcaaaatattttattcctcaccacaaaactcaggccttcttctatccatctatgctcttggtaaacttgattactttgggtcctaaaattctgattgaataacccccagaagtcccaaatatttaatacgccagactcttacctcacaactcagagttctctaaaaaggccatgagctgttcctctgttcattcccaacattacactttccctatactaactttaagcctcaacaccaaggaaaaggtatagagaagaaaaactaagtttttcaaagaaacctacgtaggatccagaaaatcatccgtaaactggagatgcaaagcatcgatattcttttctcatatcacaaatccccttatcaatccatactgaataattttatacccatcccatcagccatcaaagtaaagaggaaaagagatgaagggatgttcatgtctcaaacttcttgattctttcaattataccaagtctcacaaggatcattatggaaatgaacaccaaggataagaatacaccaatccaagatcaccaaatccatttttctcaatatcattaacttttttaaaatcaattttgaggactgcaacctttctacctgatgcgcgatagtctctagctagctaaaacgctaccaaaaccacgcaaaggatctgtttaggctaaatgaaaatctatagtgcttttgagatcattaacagtatgccattaagtcttgatgccaacatttgcctataatcttgcagagcatcgtaatcaaacttatgggcttgtagtctccatcttgaaagagtacaccctttcggggatgaagtagaagtttcaacttgtaatcttaataatccatccgaccaactctgattcttaaagtgaaaaatgaaagacatttcaatttatagacaatttgtatttctaaaatacttaaaaaagacacaagcaacaaaaatgaaaatttgtcaatagatatgaagatcttgcttgaaagttataattctacaagaaacttataaactcattattacaaatcagagacgcaactaaaggataaggtgcctaaactaatggcttgaattcaaatactaatgaaagagctatcctaattctatgtattgaaaggttttttggagtgaaaatgtgaactaaaggaaagaaaagagattacgctgctaagtttatccatccaagaacaaaaaccacctcataggcatacaaatccaaactttggcaaaatagaaacgcataaagacttgacatactaaactggtactcaacagaggtccacagaaaagataaggatctcacctgagaaacaacactgccactcaatgcttctagcttgtgaggagcaaggtgatcctcaaaatcaccatgacctagttgaccatatttgctccatccataagtatataaagtacctaaagaggaaacagatattgtatgccgccaaccacaagcaaccataatcatcttctcatcctgtgttattaatatcataagtatctattttaagcaaacaagactataagttggtgcaacgagcaaattgaaattataatcaccgaatatatgcaattgttgacgtgtgacatcagtttctaacaagataaacagcaataaaggttacactttgagtcttataaataagctaggagtattaaaaacaaaaaagtaaaacaataatgaaaagaaatattcagaagagaatggtttaaacgataaaagtgaatccaatcctatgaaattgtagcaatatgatattgtcagaaaaatatgcgctataatgagtttagaatagtggacatatttagatagagagtatcattcttcattttagatctttatggtacattaccaagggcagagaaagggggatgttaccgttatgttctttaatgataataataattaaataattgagaacattcattgtactaaataaatatcttggttagtaacgtcaccaatctctaatgttaaggagagaaactaaaacccaaccccatccaagtactcaagggaattttccaatgtcagaaaaaaacatgaagattaattggtgtttttgttgagttgttgttagagtattagctgtatattaggtgtaaaagaattagggtaacttgtatttagtagtttcctattttgttggtagtttcctatttcctagtctcctagctttgtatataaa

SEQ ID NO: 161506 - DNA, 3777 bp, Cannabis sativa
  modified_base (3722)..(3724): a, c, t, g, unknown or other
atagtaataaactgatgcaaaatggcatagtttcaaattatcaacaccctatcattaaacagatgttcggtagtgaagataatgacaattattttcataaattaatttattattctcagaatttcctggacaaccccaataacaaatgctataatttcttccaaatattgttagattaggctgggagtctagtttcaaaaaaaacaaaaaaagatttgacttgtgttcaataatgcatatgttttttttggtgaatgaacatatttcaaattcaacatgaaaaaaaagggtttgatgggaaaatatcagggaattggtttgtcaacaataataaggctgttaaaaatcagtttgttcccatggagttgtatggtagttatttagcataaagtcattccaagaatttgctactttgtaacatcgtggcatgttggtactgtctaaaaatacgatatatctttgtttttttttttcttttcattaaaccaaagtttgtgattcactaaaatggattttttataggccaattgggtaggggaacaatatttctatagtaattaaacaggagtggtaaggaaaatgacactcctcttgggatttattatatgttggtagaatactttgtttatcatgggtgagtttcactttttgttatttgtttttgcttatctagaagataccttaccttcttcgttcttctaatttttttttcttttggtcattagaaatgatttattttatactatgaaaaagtaaattagaaagaaataaatagaaagaatgatcacttgtttctttacttcttacactgtgcagtgttggagctatctgaaaaatatcaaaagcgttttggtcctttacgttattttgtggctgggtttctcaaatttttatgcctacccaagtacagttatgaactggaatttcttccagcaacaacagaggatcaagaaggaaaaatgtcagctgaacgggaagtagttgacatgtcagacctgtacacagacattatgagaaggccaaacactgatggtattccccgagcctctagtctatcaagtattgactctataatgactcctagtcgaatatctggagacttggatacaacctgtagcagcactcatgctagtgcagaaccatctgagtatgttcgtggcctagatccaaaatcaaaacggctatcaactggaaggagcaatataaattctgagccagaagttattcatcctcagaatcctctgtctacaacccctaactggccaagaaccaggtccaagtccaagactgataaatcctggactggactgactgctacccatgatacatcgaggtgttcttggggcaatgttgcaacccatgataaagaagatatatcatcaacactgtctgaccctggtccaatttgggatgctgaaccaaagtgggacagtgaagctacttgggatgtggaaaatccaattgaattgccagggccaccggaagatgtagaagcaggaacaaagaaggaagttagtatttccaggtatgacgataagtgggttgtgaaaaagggccagtttcttggcattttagtgtgcaaccatgcatgcagaacagttcagagttctcaagttgtagcaccaaaagcggaatatgatgacaacactctggatatgatcttagttcacgggagtgggcgttggaggctgataagattttttgttctactacagatgggcaaacacctttcacttccatatgttgaatatgtaaaggtataggagcttttccagaaaggtcttaaaattgtcttgattgatgaggcctaaaagtgtaattaagttcatgaaatagcactgtactgcaaaatattattcttccattgcagttgaagctggctgagagtgacaaagtagttactactttgatcctctggtatggtgttggaagggttatttgacgtattcacttgtccttttttgaagctgtatggtatatgggggataacctaacataagtttctgttactgcaggtaaagtcagtaaagattaaggcatctggaaagacccacaacagttgcggaattgatggtgagctttttccactcaatggacaagttgtatccttgcttcctgaacaatgccggcttattggccgttccttcaaccatcatgtatgacaacctcgaacttcccttttattttgtggttctttattgggtgctggggacagctaatgcttcttttctttccatattatggaatggaagcatcatcatcaccatccatataccaaatatagattaccttctgctttactgtttcctcagccctctgccattacaacctttgaacaactgagatccctgtaaatttttgttcggtatgtctatgtgttgcttgttgtttattggtttccctctttcctattgtttctggggactgagtgtttgttatccagttcgagtgcgagctgttttgtgtaattggaattctggtactctttgttgtgatgatcttcatattgctacaaacagagatttgttttgtaaagtaattggttatcaatcagtcccggtttatttcttcagatctgtcattcctattactactactactactatagagatagagaccttcattcaatcaaacccacctcattttatggcctcctttccttccagaaatttgaaattgtgggattatataagatgtcagatgaaatgatatttctttgtgtggtccgatccaaccaagactaagtaccaagtaccaagcagagcctgagctgggacttgagccttaatatggagtttggctatgccttttggttaatggtttggagctatgtacttaaaattggcagttgccacatagtataactacttgtattgtattgcattatgatagttccaatttctctctctctcttgttcatttatcattgcaggggtatgcataatggaagcatcattgtcattttggttattgtttatataatagttggtgtaaaaagaagactgctaattggtgtgttgataactactaaagacagacttccaaaaaaaaaaaaaactggagtgagaataaaactttgagtgcaagcagaggaaggattagagtgagagaagaggtgtaagaaacgagaagatttgggggtgagacgtgtatcagtatggttggatgtcgtgtagatgttatccaataaaaataaaatgctcatttatttatttattttaaatggatatacaaatgaccattgagatttaaacaagggacaaggacgagacttgcaatctatacccacctctccttcctcatcctaatccattttcactgtcctctttttccctctctttctctctcaatctctcttgacgctaacattttagacaacaatgaaaatatataaatatatatttgggatatatggctatgagcacatacaataaaaagtatgaaactttgcttatatgatatataatctttacttatgtctcaatcgacgttagattaatttggttatagtaaatataaattgaataagcacggttgaggaaaataaataaggtaagtaataggagcaagaagacaaaacataaactgtacgtaagaaaattattaggtcttctaagttcaactttgatgtaattttcgtccgtagatgatgatatagtgtattcaaatcaaagtacgtcgttgggagtataagagcgtgtttggtattgttttctgttttnnnttttcaaaaaattgtttttagaaatgaaaacaaaaaatagtttttaaagtttt

SEQ ID NO: 161507 - DNA, 11242 bp, Cannabis sativa
  modified_base (9751)..(9761): a, c, t, g, unknown or other
  modified_base (10351)..(10366): a, c, t, g, unknown or other
gagagagagagagagagagcactattttcataatattagagaagttagtgcctcaacctcaagtgaatatctactttacttcacaccactaaaaatggcctaagtgctcttagcaccacagcacctcgtataggctctaaatgtctacatccatttgaaatattgtcatatgtgacttttatgacagaaaaggtgctaaagctcgtgtataggattgaggttgcttacatatgagatgtaatggagaaggaaggtaagaaaaaggagctttcctgtagctttgaaatctctactttaagtggtatgtgactttatttttggggagagagatggttaaagaaaagaataatcaaagaataatttaacatgttatactttgtaatggcatctatgctacactcttgaattgtggtcctcgtttattatcactagggaattaatagcttatacagtgaattttggattatatggtactttttgtaaagatgaaaattagatgttacatggtatttatttagcttaataacgttacatttctttttcaatattgattactttacatgtgtttataaaatattcaatctaatataatttgcacaatttaattcaatttaatacgcaaagtacgtctacaatttgtgagttgaaaattttaaattcaatttttaaatgtggattgaatgttgtttgacgtgtaaaaataaaagtaatttgcggcataaatacccaagtttaatttccagttgtaaataaatacataagtttaatttttggcggtaataatacttaaattatatttttggaactctgtaaatacataaccattaaatattaagtcattatctacgtgtcattttcttattgatatatttaaattaattttttttacaaaaataaaaatttaataacttagaccaatcaggaatttccacgtggcaatttactttcttggttttgtaagcctcctccttgaacctcttgatgaattttttcaaggtttccattggtagttttttaatgttagttaagacactaacttcaaggtttatcttcctggctaccacattatgccttctaaaattagtttgtaatttattccaacaatttgcaaatctcggttctaactttctaaactattcctctatagatcctcctaatgttaatgggaaacactggcatttagtgttattactgaccctcatgactgtcatgactctgttgaatttggacaagtgatcacttggatctatgtcgtcggtatacacagttattttaaaaaatttgaagttctttaggagaaatgaaagaaatgtaaggaacacttacaaaacatcataaagataaagacatgcagaaagaactaatcctaccaagacagcttaactcttccttagaaaattcataaataatgttactggtgttgtcatctcctaaaaaactatctgatgggagaaaccaacttgaagtaaggtagcaagaatggtccaagagagttagcattgaagaatcagaacccgtctgagacctccccaagaaattactgatattggaaaagtatcgctctttttccccataaccccatcgagagtgaggcattcgtattctaagtaatgtcctatcaaagccaattggtcgtgtgcgtgcataattcttgagagaagggacatagtgaaaggatagaggagacttagggatgcccgaggtactagctctgggagtactagagttaggaaccaagaaagggaatgacaattttgaagctactaatttcttgtcagccttctactgcattttgatctgttgcactttgggcacgagctaatagatcctcctgctctttcctccttcggtagtttttgatacttggtctttgcctcttagataaactccatttggagcctcttctcaacctccctacttcgagcatttggacatgtcacttttgcaaaattagttccttaattggttggtggccttgaataagtctggtccttcggcagttggtagtcgtaaccaagttccccatgttaagctcctcctggtaagagttgcaaaaagggcagtgtggtttaggaagagctaggtaagagtctagagcaatgaaaggatccgagtccacttggttaagaggttaggacgcttaaaagctttgaaatcggaggagaagaagaactgatgacgatagtccttaacgttctttggggagctgagcagaacaagagtctcattgacagggtgagcttggagggaataaataccatcattccacttgtcccctttctttgggacagaaagtagttcgtaaaagaataaaatttcagaaggactgggagcaggccaaccccttaaagcataaaaaataaacaagcatgacaacaggcgatatctctgaggtatcaactaatatggagcaagtcctacaaaaactagaaattttataaagtaatcttgaagcaagagcatcgtgcgggccataagatgtgcttggctgcatgccgcataccctctgtagttatgataggggatttcagcctcccgagccaaaggatagaaaactccctagtcccagggcttgatcccattttcagttacgatagttcccaagtggtggacacaacccatggatgagtctaattctccagcttcccaactggtggcacggtgtacatagttcgtgatcaggactggaccctgcatgaccacaaaaaggggcaccactaggtaccgtggagccacgacctaagaagtagagggagttggagcttcaggattcgacattctagttgttaagtggagttctaagatttctctatcaaaagtgcgaaaaccgtatttatgaagatccctcaagatgtcgctcatctgaaaagacaagagttagcccagtagttggcccccatatcgaaccccaaataaaaaagggaatgggggtcccctcaccactgagaagaggccccctccagatgcaagcatatccagaattaaagaaactttacatgctatgcatcaggtgcaaactgcaccatgatgaacaaaaaaggtgtagatgatgggaaaaaaggaaaagggcaaaatctactagccctaacatggaaacgtcttgcctaaaaataacaactgaagacaatttgggaaaattcccccaaaattatacacagtaccaataacacagccatgccagcatatcaccaaatgaagttacaaatataaaacaagggaaagaaaaagctcttaaagctagtaacttacaatagaagaaaatcgaacagttgcaaatgcttgtgcgaaatgctggtaaaatcaagcttggcaacatcggggagagagtagaaggaagtctgggatccctagaatttttactggtttggagaatatgaaaaatgtgagagtagaagttttaaagaagaagaatgacgggctttatagaccagccaaatcgacatgaatcgtcaatcatccaacaattctcagtcaaaaattaaaaacctcatgatccaatggctatgggcaattggcatgtggacaaaaaaggacggttacactactcgaatgtttctctaacatcctacaattaatggcatcataattgattacaaaattaaatctttttcatcaaaaacgagagaataatgagcagcatttaaaatagtcacgtgcagcatgatgttactactccatgaggcacatcacaagtcccaccttgcaaaattgtacgaaaggatttggggggtaaatattgcctagaatttctcccaaaatacatggtagtttaggaggaagtcaggtggcactgggactcacgttacaggacacgtcgccctaattactcctggagtcctttatttcaaagggttgtgacaaattagtcatctccgggagtatctagttggatcgcgagcatccttcgtttgttcttctctgtgagtaaagtacattcggaggacagtatgaaagaagtgatgaaagatgacgtgatattaaggaccaagactctgtatatgcattcaatgcagcatgggaaagaacgtcaggcgtcttactctgacaagcatgtttaagggtttaagcccattattcctagatttcacgagcccccatgcatcaatcaacgactgcataaatgagtcgtcaaatcataaataggtataaatcacatcccaccaaactcctacaaatagcctaaaacccatcataaaataggaaattatgccttaaatcaaatttgagaaattgtgcaaagtatggtgcaaaaaacacgataatagtgcccttttaccgccattatgagcctataaataactcaatgataaatagaaatgggaatcggccaagaaaaaactctgtaaaaaatattctcataaatacaataactcgtggactaagactcattaatgccccaaccacgtaaaaatcttctctgctagctttcattaaatattttatacaactttaattattggttgccgaaaaccttgatcaacaatttttaattataattatgatttagagtaataaatatcaacacgtgatatttttggaaacaacaaagagagttgttaaattaagtacatatagactaatgagaatttcgagcttgtgaactattatcgcaattcgtcaagattagggacctatcttcatctaaaataaattttttgaagacctatgccgcaatttaatattaaaatgtggtatttttagaagaaactagcaaatttattgaaatgaataccaatggacttacaaaaatctcgagattggagacttatctgcatcaaaatgaattttttgaggagttttgctacaatttttccaaaaattaacaataatatgttttattttattgttagttatatgaattttattttgcgaattggacttgattgaatttgagttattatgcaaatttgattggatccaaaatatgaaatccgcaattaatgtaaatcgaatgcactatgagcaaaatagtgtaaattgaattagatgaacaccagacaaaaattattgctgaataacgtttcaaaaacaaaattttaggataatgaaataatgcactgaataaagaactaagagcttaaacagctgaagttaaattgctttgcgaaaggaagaattcaatttttacagacagaagttttcttcctttatagccttttttttgtaaggagaaacctttatagatgtcttcaaaacaaaacataaagctgtctataatgtcatctgatatacaaacacttgagtgtctgaacataattgtgttcagtgcaagaaagaaattcactgaaccctgtttatagcttttttattgtaaatagcagctgtaactgatcccttttgttacaaacatggagaaatgatgtactctaattgcaaagcaatgtgtcacgtgttgcatttccagtttttgaatttacactggttgggaaaagaaaacaaaaaaaaaaaaagaaaaagagaaaaggttgaccaattaatgtatataaataatgtttaatggactgaagaagagaattatacaaaagaaattatattacccatcagcaattttacagaggtattcccgttgatcatctcttaaaggcacatcagtgaaatctgaccacaaacaagaatatcgaccaaaacgtaaactagctaaatagatgagtaggtttggcaaaaaaaatatgttgagaaacagagaggatgtacttggttccaattccaacaacaacaccaacaatattttctacggaatgtttaggcttaaaatcacatgattgaagagtgatatacataccagcacctgttatgatggagcctttgaatgatgtattgcctgtagcaagggcaccttccaagttggcgttgcttaagttcacctgcagaaaatggcctatatatgaatattggtatgaagcttggttttctgtctagttctagttttttgctaggcagttgaacacaagaatttcatattccaatttccccgacacaattccatgccccaacaaagaatgcaaaccacaatatacaaactaaaaatcaactaatcaattattttgtattaggatttcgaaatgatgtgtcagttatccgtatgtaaggttggacaataaaaatgaggaaaattggaaaaagtgaatcccttctaaaccaaactatgaaaaatcaggaactccctctccaacaactcagcacctaagcaatgccagatcactgtctattggtataaactagttggtcataatccttcaaagagtacatcactacactaatttagcggttggttatttttgtgttgtttgatgaatgtcttgtgttaactcacagttactataatgtgtattttgtgtgtgtatttttttttaaagggaattcattaatcaacaacactaaacagaattaggcaaatcaagcaaaatagcttgattagcacaagagggattaaccccaatctatacgacactaattttgtgaactaaagcataattggctaatacatgaacgattttattggcctcacgaaatacaaataagataccaataagttaaatagtaattatatacggattcttatttttatgttccacaaataagttagtaatcaaataatttaataacattaattctaaaaataataatattttataattatacaatgtaattacacctaattttcataaggttactgtgatattatatggtaaataactcacccataaaaataattgtacagtaaccatataatactcttattatttaattaaataaatatgtcaaaccttataattagtctgaattacattcaattttagttacaattgaattacatagtgactttccatgtaaaaactgaaaagtgattggattcagtgccaattaggttatgaaatcatataccaaatagtctggtttcaaaagattcctatttaagcgagcaaattataaaataatgaaacgtatcaacaggcctactaaaaacactaaaaatattaaaaattccttcttaattaaaaattgataaatcagttaatatataagtcaaacattattacttatttggagttaagtaatttattgcaattgaaactcgattcatgatcagaatcactggatgcaaaagcaaataccaaactcactcgtttgaaaactttctattgggtttagctttatacaattagcattgtatccaaacgagaaaaccagggaaactaatacaagaacaagaaactttcctttaagaaattatctaaagaagaaagcttccgaggaaactgaaaaagaaaaaatcacctttgccacatttgccaacgaaaagtctgcccctctcagatcagcatccgaaagatcagctcctataaaagttcatgattattattttagataaagcactgactgagttcaagttcaacaattaaaaaaaatcaagaaattaagaggtaaaagaatgtaaaacacctgttagatcagcgtcaaagaagctggcaccaagtaagttggcacctttgaacttggcttgtcgcaaaatggactgtttcaaaagtaacaaaaccaagtctacattttcattaactaaaccaattgcaaatattgagtatagatagaacgaactcttcaatcgaattcatttcagaccgttttgaagtcttgcttgatcaaagttttgccactaaagtccttgccagtaagatcctggccccttgttacttcagaaccgtacggacctccaccctttcaagtacagattacacattgcccaaaaatggaaaaagaaaatatcaaattgaaagttactttccttttcgcaatccatttctgggcacccaaacagagcacccctcgagaaaagggaaaagggaaaaagaaaaagaatgtttaccttgaaggcgagtgcgggatcgaccaccaagagggaagcagagagaagagcaagcaaacttgcgttagagactgattggagcacagaagaaaagagagaagttcgagaaatttccaagagaggatgaggaggccgaggagtgcgtagtgtagctagatgaggtgcaggatatgaggggagggagaagtggttgtggtgaggaggatgaggatgaggatgaagatgaggaagttttgttgggagttttgaggacatggagacgttgagaagagccattgaaagaatttttgattttgttgagatattggataatgaggactaatccgaaatggatataattcttaggcgggtaacttttgtgtctgtatgcgcttactagcagaataatttttcaaaactatcactaaaatactttcccttttttccaattctcaaattttacttcaaatttctacattacattggagacttattatttttcttttaaggctatgaaggatttttattttccgaattatgctatgtattattgtgcccttgaattttgtattttcattccattataaataatatctgaactattcacagtgttaaattagcctttctgtcaaattttctcacacgtggcaaataaaattgttagttggaaaaattgttaactgactcggagtctaataaatgcgaagtaatcgccaataaagagttatgaataacaaataaatagaatgaacacacagaattatagaggttcagcccccttagatttgggtaatgactcacttccattttagttgtattgagtatgagataatgtcgtgcagattactaagaaagacaaagtgaattctgctacaactctcaagatgtttacaaagaatattcagcaaagtgctcttaagtgcgagattatgatctcaggtcctttccctgtgaattcattcattattcataggggaaaaattgttacaattagcaccataaaaggagtaacgagaaagtaaatatccctatattttaatgtcctgttacgatctattgaagctcatataatctcaggtagatcagtcgattccacatctgtgggatacaattagagatatttatgggagttgtttgaggaagaaatcaaggtttatgtagccttgcccaacattcctggtatcgttcaccctggctcacgtgttaactacccggtaagtgttgaaacttattttatcagaatctagatatactaacatgtatgtttattatagaactataatccaacatcctaaaaataaatttcttaaaacaataaaataaacatataagagattaagaaactcttacatgggtggcagcggaatataatatctctttttgtttagatctctaacccttgatcctttctgttgcaaagtatgatcaatatctaaatctgaatcttcttctattgttggaattcttcacaatcttccacaaagacctaagtattaacttgaattgtgtgggaaatttctcaactcactataggattcaaaaataagaagaagaaaggaggagaatttcgaattcaagaggctctctttattttctaagttgtttgacaaagtagtctgataataggttacgaaaataagagaatctctttctatttataggattttatctagggttaggatttgaattatatggaataaaaaaaaaaaagataaaataatggctcttaattgaaccttatgaccaaaccactataatgggtcctgtaggtttcaattttaccattttatttaacaacttatcttttctttcacaaatatcataatttagttctaactctataaatgtcaaatttgtctatataataattatcaaataaaattgtcatttaacttatttattaattannnnnnnnnnngtctcttaattaacaaataaatcataaattctctctttcttttcaaataagcccttgtttagtgaaattcataaacaagacatagtcttatttagaattctaattggttaattaaaatcaattaattgagtctacaagacaatattatcccaaacaatgtagggaccatgtgcctatgtaatcaagctctcaataagtagatctaaaagttaccaagtaaatttcctaacttattaattcctcttgactccactatagattcagaattgtactcctgattatatagaacgctttatatgttccaaatattgatacactatgaattatccactgttttaattcaaataatcaaggatcctctatagatgatagacatcaagaatggataaatttaccgttctacctctcaatgtattttatcattaaaacacttagcttcctataaatgatctttcaataaactaatataattactgaaataagagctcttccatttatctctattaagtcaagctcaaagaaaattatcattttacttctatataattatagaagctatagattttatatatatgattagcgctcccacnnnnnnnnnnnnnnnngttcccaagatgtaagtattgagaagatccattaggtcaattttaacaaacaagtcaaagaagacagataatacagttagactccaagaatagtatgcttcctggaacaaggaaaaaccacactcaaacctcctccataagaactggaaagggatacaagttagactccaagcaaatgactgagaatttgagaccaaaattcccagctcatttgaggggtacattacgcccgattgctaatagctgcaacttcttgcgtccgtttgccaaagttattagttcacatgcaaccaacagcaggaaacgttttcaacttagtcttcccgagggaaacacacttgaattcttttctcaagagctaaacttaagaactaatccagagataagatgcgtattcggtcaaagttcttggtaaaaaaaatacgcctgaattcctttttacacatcttcgtggacttcacataagtttatcctatcaggttgcataattggctaaaatgttaggctgaaaagtaccaaagtaagaaaaatacctaagtctaaggcagtcgcggacatcactcacagaactttacctcgtgatagaactaaagcctgaagaagaagatgggctttgtgccctaaataaaactattttaatgtaatcttttctattcaattatcaataaagaaacatatttattttcattacttatttaatgtattatttagttcatgtgatcatttatttatttatttggtttataaattcatccaaattcttatcacgttaatattcttgttcattgtgttgtaaacacagtagaaagtaatcaagattgtgtgattaaatatattcttatgatttatcagtatacatgatttaactgataggat

SEQ ID NO: 161508 - DNA, 1608 bp, Cannabis sativa
ctttttggcggcttattaaaaatgttcttaatattatttgtggtataaaagaaggaagaaaatggctatgaatttctaattttttgggcctacaaaaaataattcctccatatatataggtggatatggattgactacaaaatattatcaattcattttttaaataattaacattttttttttttaaaataataaagaaaagtaatcaatctatcacctcctctcatattttcacaccttatatacaattcatccctaatctatttcatctttcataccaaacgaaaaggtaaccctatactaaagtttaattattataaatattatgtctgtgattgaaatttatagaaaaatagaatatttattatgtatgtattttgtctaccatgatagaatattagtaaatagttaggagtttgaatcctttactggtttaaaattaatattatatatgcaatagtttatattgctaaaagtatatatatagaaaaatgtaaattaagttacaaaatacttttttagttcttttttattgattatttacattattagttatttagacccttttcaacaatttttctattatattttttaaaatacaccataaaaatcagaattcctttattttccaacatatttttatattacactattcatcaatttctttaaaatacattacaaaaattctattttattagagcgtctactgtaagtggttgtttaatatttttaaaatttttctattttacaaaaactattgtgagtgttcttaaggccatttgtaaatttttaattttttttgaataatttagaataccaaaaataagatttatatatattattacacacatgattatttttttatatacataataataaatcgttcaaatttgattttttggcaaattatttgatctttttttaaaacttacaaagtgatgcttataaaaagaaaattaaataatttttttaatgcataaataaataaaaaatctatccgaaccatactttagagggactagtactataaaaatttaaaaaaatatattgataaagtttttataagattaatattattgggaattttcctgattacagaataatgtcgccgtattacgtactatagatacttctctgactataaaataaaagaagaaaaccccacaattattattattattattttttatattaattatatattatattaaattaataataatagcttcctccatattcatttatgataaccccaacctcaacctcaaccttcaatcaattaaattattgccttttttttttaaaattattatttcaaacatattcaatttctcgcgataaaatgttttccacgttgcgatatctcctctaccatatatatcgtaatcatgagctgtaccactatatcacgtgatatataataataataagttctctctattcagacagaaaaactagactggcttattagccatttttccacaatctaaaataactctttttttttttttgaaaaaaagaaaaatataattggaaaattctacaatgcacacccttaaaatggatatattgatacacccttatctgttttagcatccgaaataattt

SEQ ID NO: 161509 - DNA, 3132 bp, Cannabis sativa
tatatatatgtgtgtctgtgttttattctacagattggaacatgggagcatgcttgtacagtttccagcttcttcaaagtcgtgttgtagcactatttgttgctggcacttctcgggtttttctcatttgctttggagtccattactggtttgtaattgcctcctagttttttccgaacaaaatgctttcggttttggtttactttttgtaagctgttttcaattttcactcttgttaggtacttggggcattgcattagctacgctattgtagctacggttctattgggggctgctgtttctcgtcatttttcagtttcaaacccattagctgcaaggagagatgccttacagagcactgttattcgccttcgagagggatttcgtagtaaggaacagaacagctcatcaaactcatcagaaggttgtggctcaagcatgaaacgcagtagtagtgtcgaagccggtcctctaggtagtgttactgaagctagcaacaggactacaacacaagatgctaacaattggaatgctctgtgtcgaactgcaagttcgcaagaaggcattaatagtgataaaagcatagatagtggaagaccgagtttagcattgcgtagcagttcttgtcgttcggtaattcaagaagcagaagttggaacatcttttgccgataaaacccttgatcacaataactccttggctgtctgttccagcagtggttgtgaatctagcacttctaactccgcaaaccaacagactttggatttaaatttagctatggcattgcaagaaaggttgaatgaccctaggattacatcgatgttgaagcaaagagctagacaaggtcatcatgaattggctaacttattagaggataaaggtttggatcctaactttgttatgatgttaaaggagaagagcttggatccaactattcttgctttacttcaaagaagtagtttggacgctgatagagatcatcgtgacaacactgacatcacaatcgttgactccaatagtgttgagaatgcattaccgaatcagatttctctgtcagaagagctgaggcttcacgggcttgaaaaatggcttcagttatccaggcttgttctgcaccatgtagcaggaactccagagcgagcatgggtactgtttagtttcgtgtttgtcctagaaacagtatttgtgggaatttcgcggccaaagatcatcgaaataataagtgcccaccaacaggtaagtaatgtctatttttcgttaatggctggttatgtggtggcaatggctttagtggatttttgttttgttgtgtgtagtttgaatttgggattgctgtgctgctgctgcctcttgttgtttgttcgataatggcttttctgcggtcacttcaagcagaagaaatggctatgaactcgaaatcccgcaaggtatgtttctcatctaggcttacgatttgaaaatgaaaatccattttgggcattcaattgcaacaaacataagccaacacaaatattgactttattgactttattgtcatttggagaattctgtacaacacctggggcaattgagtcttctcattgtttattctgtctagaaaaatattgactttcattatcaaatagttaactgtgctgtttgtttatgtttttcgaaaattctatgtttctgcagtatggctttcttgcttggctggttagcaccggtgttggattgctgctttcgtttttgaggtatctacctatcgcttatcattaaattgtactcgatatcaagatcacctgtattttgtttttggggcttaatttctcgaggtcaattaaattggtaaattatgcagactattattttatttaaacaacaaaatagaatgttcatttgtgattgctcatttttattcgaaattcaaaatttgctccttcaagtttctaaataccaaattgcttgggatgacgcttcagatattttgtaattgttgtattttgtttaaatatagtttggtagattacttacttggtattgaacaagcatctttgtgattgtttgacagcaaatcatcagttcttcttggattatctctgaccgttcctctcatggtggcatgcctttctgttgcttttcctctatgggtccgtaatggctaccatttttggtttccccgattacaaagtgccaatcctgaaggaaatcctcagtcactaggaacaaaagaggtgagcatttcatattccccacatccaatcaactttaagcatgtgtaacatatgcaaagccaatcaacttttcttgtaatgttatctgtcagggtttcgttcttttcgtctgtatgttgttgttcaccggatctgtgttagccctcggtggaattgtctctgcaaagcctttagatgatttgtcatataagttattgagcggtgagcagaaaggctttagttctccgtatgcatcatctatttacattggctggggtatggcttctgcaattgctttggtggttaccggtgtactgccaattgtttcgtggtttgcaacatacagattttccttgtcttctgctgtgtgtattggaatattcacaggtaaatatataatttgacgtcatatcgattcatttcccttaatacataatgttattaacttctggttttgttgtagctgtacttttggcattttcgggtgtatcttatttggaggttgtgaactctagatatgatgatgttccaacaaatgttgattttcttgctgctttgcttcctttgatctgcattccagctctgctctctctttcttgtggattttacaaatggttagtaaacttgttctgcttttcgtatctaaatctttcgttgaattgtactgctttagacattcgatgttacaagaaataatttatcttttcgtttccatgggatcgttttaatatgctttcaggaaagatgataattggagactctctcgagtggtatatatatttgttacactcggtcttcttcttctgcttggtgcaatagcagctgttacagttgtaattaaaccttggacggtgagaaataacttgacacgcccttcttacttttctcggtttctcttgtccttacccttcttaaagatttcttttgaatttgcaacaga

SEQ ID NO: 161510 - DNA, 3499 bp, Cannabis sativa
atcgaagtggctaccctgcaacgaatcggttccagtttcatctgtcaacgaggtagacaaaggtggaacttgttgtaatgctgctgctgctggggttatggctactcagagtgacttggttggaaagtccttggagaaaactggctgggtaacgcgtttgatgaattcttgttctgaggacgctaaagctgtttttactgctgttactgttagtttattgttccggtcgagcctggccgagcccagatcaattccttctacatctatgtaccctactcttgaagtgggtgaccgaattttagctgagaaggtaagtcttatgttcatctttgctgataatatttagtgaaagatattattatcattgtgatatatgatactgctctttatgaggaatattttagacatgaatgaattggttcaagaattgcttgtaagaccaaaaaagcattgatcttttttctttgatatatcaggtttcatatctcttcagaaagcctgaagtttcagatattgtcattttcaaggcaccttcaatcttacaggtaggcatttgaacttactcagttgtttcttgtaagagatttcgtgactcatgtatggtgttttgtctccattttgtagaaatttggatttagttcagccgatgtgttcataaagagaattgtggccaaggctggagactatgttgaggtaagatttgtagtccattacactgtggagattggcttcttcagtttcttttgatctagttatttgtctcctctgtcagttatcattgcaatcaacctaatataaacttttgttatgttagtctaatttgtttaatcgatcatttgaataggttcgtgatgggaaattactgattaacggggttgctcgtgatgaagaatttattttagagcctcttgaatatgaaatgcctccatgggtatgcactgtgcattctcgttcttctattttactagtgttaatgtattacaatatctaacgccttgtcctggttatttgtttctcagtttgtgccagaaggttatgtcttcgtaatgggagacaataggaataacagttttgactctcacaactggtaatcatcgaactctttaatcttgttgaaaattgtttttgtataatgcttattctcctttttgtaagattctaatcaaatcggaactgtgaaattattgaaacttgacattacttaaaaatgttatatctgtcctcttgatgcgattaacttgttttcaggggtccactgcctgtagaaaacattgttggcagatccgtcttccgctattggcctccatccaaagctggaaagaatactaccacggcaatctcctgatgcattgccccttaccctgcaggggaagaatcttagatgacaattcttttcttcattttgataattgactacatagatttttcatttctcacccttgtttgctcatctttgagcagtttgtgaatacttttttttttttttttgtattttcatcttaattatgccttgtttcttgtaacattgttttggtgggtatcttgcccatcagcatgtttttatcttcttgtttatggcccaatccttgggtgttgatgccattctttctgtaatgactattaaaactttgttgaacaaatgggtgggaaagacaaatgaagaaagatttagcaatgttttttttacccttttgtatatttgtcagtagtactgcatctcattctggtgcagtgttgaaattttggatgcacttcaggcatgtttaaaagatggtagttcttggtctcgatttaacttttgcttgaactggttaataatgataattcttcctcgtgaaatttacatggtacatttccttgtgaatttgaagaatatttacctttaactttttgtcctgctagatattgttctaatggattttaatctcgtggaacaactatttgaagagtggtgatttgaagcactaccagctactaatacatatataattatatatatatgggatatataatctttatgtatatatcatacgcaatttgcccaacacgtacaagaacaaaaggcaattagagcattttgaaggttgcaattagctaaaacaaaggtcattagagcattttaaggttttttaatttttaaaaatattttagttaatcacttttgcaagaacatttctaattttcattacacgaatagcgtcaacagaaattgtggttatagagctagaagttactataggcctgcaacgatatgttgcaacgacatgtcgttgaaaagttatcacaataagttgttgttgcttcttactatgataacatttgcgtgttatcgctacaagtcaacatacgcaaatgttatcatagtaagaaaactaaatttcacttttacaatgatgacgttgtcattgccaaatttcttttctagaattaatgaattttaaaaataaatttccttacttttttagctatgtttatgaatgagcataaattatgaaacttatatgaattgcattcctcaactccaacaataagaacttgcagtactcaattatcatgctaaaataagattgcatctaaattgggctccacacatattgaacaaccactaaggatggctaaacaaaacgtgtcatcgtgtcgtatttctgtcatattttatttggtctgcttctatattttgtgccagttgtgtcaacctatttttgactcgtgtctaattttctcaatcttaacccgtaaaaaatcatgttgtgttcgtgttgactcactttgacccattttgctattactaaacctggagttgtagaaaaaaaataataaacgtaagttccattagaaaatttttataaatctatgtatattatatagtattttttatatattatataataaaaattaaaattttataatattttcaatttcattttaaagaaattaaatttaaaattgtttaactcaacattaaattactaaatatatatttttacatagttatattattattaatctgtttttattttaaaaaaatcttatcaaacgtgtcaattcgtgtttagcgggtcattttgtgtttaacatgtttttatttcctgtcaagtcgcgtcgacctgttttcgacatgcgtctaattttctcgacccaaattcataaaattcatatcgtgttcgtgtgtcgtgtcaaagtctgttttgccacccctactaagcagtctgtttcgatatcaacatcatcctttgtccgacttccttcacatctaaggcctcaacaaactcaacttctacatgtcccataccgcaactagtaatagccgaaagcaacctcccatcaaagttacgagccacacaactaaagctataacaactcaatggataaattagaaggtaaatattattttggaccttgtgtgttgtagaagttaccaattggaccttctgttttgttaaataacaaaatggaccctgtattttctaaaatgatacaaataggaccctgaattgat

SEQ ID NO: 161511 - DNA, 5532 bp, Cannabis sativa
ttttttttttttttttttcaggagtgactgtctcgtctcgtttctacgtaggtccatccctactcaatgggagttggctattttaagctgttagatttggtttcttattttaattgtaatgttgtttggatttcgagagaccttaatgattcagttcatactttgattaagtggaggctggatgacttttgtaagttgtaatggtcctcttaattcttgggaggtgagtcccatgtgctcaccagacttctatcttttgcttaatgtaattttccatgtttctcagctaaaaaaaggagtcatgccttaaatctacaacaaagagcagcaaaacgtttgtgcatgttctatctgcgccccagcaaaatttggtgggcgggtgggggttcatttgtggcccatttaactttacgaagaagaagcacccaatcacacttcacaaacaaaacaaaaacacattatcataatcatataactaaacatatttaattgtacaatatctatatttctttttttgaaaaagacgttgttccaaactaaagaatcaaatttcaaaaatattcaaattaaagtaaaagtccctttggaccccattttttctactctactcgtgatttcttaccaatcaacgtgctccaatgagtgcattttatcccatctttttcagttattttaaatatttcatatcacaacaaaataattaatatatatttttaaactttggacgatatttgctcaaatcggcttctagagaagggtattttagatatttggtttaagaaacttaagtcggtcacacacactagtagaggagaaaacaaagaagggatgggcagaggattttacgtgggacccaccgaaacccatgtgattactgattagaggcaaactagaataatagcgtctccactctccactacaaacgttcgacctatttattttattcaaaaagaatattattaatttagtatttcaaatttaaaaagtaattaatgaaaacaattataaagcttagcccttgtttgccacgtagacttcccgttactcttttctatctctgggtcagctacgtgtgctttattctcggactttcttttattatgttacattaataaacaataatttaataaatagcattgggttttgcagatttcgatttacagcgatacgatgtcgtattcagttatttcttctctttcttgacccacgacgtcgtttcgtgtgggattattatttgttgacccgattatgtcataatatttctcattagttgagaaatattgagaaacaaaggaagcttaaatatctgtttcaaaaaaataaaaagcttaaatatacataaatttcgtattcgtataactcaaaaaaaaaaaaaaaaaagcatagtagagcgagctgaccaaaccagtcctttcacctaaagaaaccccacagatttgtacagggagatttaaataaataaaaaaaaagctttgtctgattttttctcagagctgaaacaaacatacttttgagagaagcaatccttagttatttaacttttattttttctttttcattttggttctaaagtttgaggtcttgttgaatgttatatagtaagtacgtatatttactttacaaatttctcggcttccgggattgctgttcttgagctcctttttggtactgaaactcagaacttgatttcatatgtaagttgctgcttttttacactatttgggttaaaacatatgagtgtgtttcctgggtttacgttttatgttttttttcccactttgtttccttttctgggtgattttccatttttgcttggagggttgctgaaattgttttctgggtataggtaaaagtaaaagtaaaattgtcgagaataatatgttcactgaaggacttgatagaagtgctcttcgttgggttagagaggttagctattctccaatctgtttctatgttttatttcttgtctatattttctttttctctaaagaaaagaggtattttaaagttttagtcatttttcctctgaaatcagaaggaggaggttcctttatccagttcaaatctgagaacccgagttgatcccatgtctaatattcgaagtggcggaagagcctttggattacctccaccctcgaaattcagaagtgggcatttgcccgctagtgccattccggtgtctagaaccattcctggtgatttggatgctagtgggtcaggctctgaaaatgatatgagtactgattcagaggaggatgtatatggaggaaactcagttgattcgtctccccagatgaataatggtggtgctgttcgtagatatggcaaccatttgaaaaaggattcccactatagcagtgactatacttattccgatgttggttcttccatggagacagtggttggacttggaaagcataggtttatggcggaaagagtagtaggagttggaggagctggtaggtaccaatctaggaatgggtttacggaagatgagtctgacgactccgctgcaagctcggagttttctactacacaagtgggaggaagcattaatggtggtatgaaacaacatagattctcggaaggatatgcttccagtgttccatcaacagttcaagtggaaagttctgctgtaaaggttcgttcttatactttagaatttatttcaattgctcttgctagctcgattgattctgattgtgtaggctttctttaatttacatgtgccacataagatggtggtgttactagtataggcaatgcagtgattctattagtgctgttcatgtcttataaatagctgttcttactatcaaccagaattatggagctgttactaagtctaccgactttttcagggattgcattcaagaaagatggaaaatggtaagttctctgatgatgatgatgttcccagtgcaccgccaattggtggcagctctgctattcaagaaatcaaacaagctgccgacagaaatccaactcctggggtgcacagtactccaaatgcagcagcttcacctgaaaataaaaccacacccaatcttaagccagaaagcaaaagtggaaatgaaaaatctgacaattttgtaaggtgtgtgcttattgctccctttacaaaataataatatgctgaagttttctgctcaaatttttatattattttacacttggttttactttactgaacacagtaacctgagaggcacaatatatatgtttatatctatttatatattttgcccatgatgtcaatgtatttcacattttctaatctttctgtttgtagaactactactggtttagaaactactacatcatctagcctggctcgactcccaacgtttcatgcaaggtattcaaaccaaacccatggttgtatatgatgtagatgatgtaaaagatctttgtttcagttcttcaatttattgatttactgtgtttgtgtaaattataaaccagtgcactagggccatggcatgcttttgttgcttatgatgcatgtgtgcgcctttgccttcatgcttgggcaatggaatgcatggaagcaccaatgtttttggagaatgaatgtgcactactaagggaggcattttggtgagttcattgtctttctcttgttctcaatcatgcctaatttcaagattttgttttatgtttttgataaattgcacgaacgtgttatggaaggggacatcctgtgcactctaggaacaaaaataaattgtacttctaacagggtaatatattaaaaacacctatgcctcttggatttagcttaatatattgtagtttagtacttagaaaaacaattgaaaaataaaatcaagtctttttcttaattctttcgaattcgcacacacatttatacatataatatcattttttttaaatatgtattattttttaatataaatacatgtagtttggtttgtaatatttttgctgactatttgtccttgataacttgtcaatgaaacttttatgtaataattcttactggtttttgtaagatggaatcagacatagataatgtaatttgagtggtatttatacatcataagttcaggggatgaaataagcattgagataaaattaggaataggtgtggttaagaaaatttaaatgtgaagtcattatttgtctcccccacccccacctcgttttctcttggaatgtctatttgtttgtagtgttttctttttcgcttctacttaagagatttaaaatcgtcttctttgaactctagtttacggcaagtgcttttacaatcagaggaagaactgatgggaaagcaaacctcagaactagccagtgagacaactgcacccaaacctaagaaagttgttggcaagatgaaggtccaaggtagtattaaatgtcacctttactttctaacacttcaagcatttggttattaagtgtcacctttaacttcaaaaacctcaagtgttttgttattaaatgccaccttcaacttcaaacacctcaagtgttttgttattgaagattactgagtgagttttcattgcgcagtgcgtaaagtgaaaatggccctggacccacctactggctgtagtataattacttacaggccatcaataaaactggattccatcaaatatcgcttctccaacttgcagtcaacgctaacttcaggatgtcatgctcttcgaaacattcgtgttgctcctcgcatgcctgcaaatggttctttttcacgccaaagcttggcatacgtgcaagccggcacacattatataaaacaagtgtctggactcttaaaaactggtgttgtaactactctacgcaacagttcgtcatcatatgaagttgcgcaaggtatgaactatgaaccattaaaggatttgatcttcctattttatgctgttgtgtgtgcaagtaaagtatattaatattgatttgacatttgatgctgaaaaggtagtccatcttgtttttgttatagatgtcatgtgaatacatatgtgaatcttgtgatgtatgcttgatagacttgaaaaaaagatatccacacaattgtgatagtgttatgtatgagaactagagacatacactttgttttgaaaggtgaattagagacgtacatttatcttatattattatttggaacttctctgttttgatattctgttttgtttttgtttgtattttttgtgtcattcatctgtagtatatcttcctgtcctcaaagctcctcaaagcttctctacttttttgtagatgctttgaagaagatataaaaaaaggagcactttaattttatgtgttagaatattagctgtaaaaaattaggctaatttctatttagtagtttcctatttgtatttagtagcttttatttatcttctagctttgtatgtactattatatggaatacaatacacaattcaatcaccatattttgcatggtatgagagcagattgggattgggaatttaaaattagggtttatcacaaattggggttttcaattagggttcttttttcggaaaccatatttagagg

SEQ ID NO: 161512 - DNA, 4375 bp, Cannabis sativa
agagacgttgattagaattaacctagatgtactaaggtttttttgtcaataacttattgttgataaacccatcctatgccaacctcttaaaaacaatttcagaacaaatttataaactcaatcaattaaaacaaataacaactccagatttacttaacaaacattatttctagctcaaaaaagttagttggaaagttgttacctttcctttcttgattctttcagtatttaagaaaacctctcattcaaatccaggtggtttgagaagttgatcacttcagagagagagagagagagagagaagattcaccattattgagaaaaaagaaacttgagagagagagtgaaagatcgattgcctgctagattgtggctggaattgatgaacattgatgtaatcttggcttgaagtaataagattgactaagcaatccttgtggaaagctcgacagaggacgtaccccaaataattcgggcaaacatatataaatctagttgcttctctttgaattttctctttaatttctgttgttgataatcactcctgcatgaattgtgttagattgttttgctaatcttgaatgtggtaaaattgattcttttctaagcctgttctagaatcaagaaaggaaacttgattagtaaagtaggtttgtgcatgtgtggtgatattgtcacaaatatggttgtgtattttagtagcatgtgtgataactaaggtcaacaagttgacctttgtatatctaatgtcatttttgtgagttggtgtaagtgtgtgtattaaacttcctatagtgatatcagagccaaggttcttggcatcaaaattcaactcatagattgatggagaaaataagaagttctagaagaaggaggagatcaagaacaagaattcaatcttgaagaattctttgacatccctttggatgagaacactcgaactcaatctgtatttgatttaaattttgatatcatgagtaatatcaaagctgacattgataaatttgatggtttagaagactataggatacggaggaggaagatttgatccctgttagctcaacaaaaattactaagagtgctggaggaccctatagaatagcttgaagtgataaccaagattcaacaaggagagctgcttgaaacaacaataagattcatcatatataacctatctgatggaattatcagattagttgacaaggaagaaacccctgcaaaaatatggaagaagctagaagaccagttctaacaaaactccttgacaaataagatctttttcaaggaaagaatctttggatacaaaatcagtcactccaaaacttcaaatcagaatcttgatgaatttcttagattgcacattgagctggctaactcaagggagaatgaagccttgagtgatgtaaaccaagccaccatcattctaaattccctaccagaatcctatagggaggttaaaagagcgatcaagtatgggagaacatccataacaaaggaagaggtcattttagcattaaagtcaaaagacttggaaatgaactaatgaagaatgaaagattaggaaattccaattgggaattgaacctaagtagaggcagacctaatcaaaggaagccatggcagaatagagataggagtaacaaccagggacataataaatgacatcacaataacaccaaaggaaaaccaaacaacaaaggccctttagaccctaatggttgctatcattgtggaaaaccatgacactacaagagagtcagttatttttggaaaaagagtagcaagaacagaaaagggtcaagggaaatattagacaataagaaaaaaaacaagactatcaaaatgccaatcaaaatgatggctatgatagtggagaggtttatgcggcaacaaccacattcaatgattattggataatggattctagttgtacatttcacatgaccaacaataaattttttgtgattttagggaaacctagggaggcaaagtcattctaggtaaaaatcagacatgtgaaatcaaaggggttggtactgtaagcttcaagatgtttgatggagtcactatatcactaactagagtcaggtatgtccttaaactggcaagaaatttgatttcactaagtatgcttgatgacatgaatatgaaaggcaagattaaggttggtcagatcaagctatgcaagggccttattgtcatcatgaaaggcttgaaaaattatgggttgtactatctttatggtgaaccaattctaaatgcaaaaacgcagtagcatagacaccaaaggacgagaatgctaccccatggcacaagaggttaggccacatatgtgagaagggacttcagataatgagaaactgcttggaaaagataaggtaacaaaggtagatttctatgaattttgcattcctcgaaaacaccatagattgaagttcaaaaatggcacacataagtttaagcacatactagaatatgtaaactctgacctttggggcctaagaaggtcagtttacatggggattgtgtctatttcttattcgtagtagatgattaatctaggaaggtttagatatatctactaaaacataaaaataacgctcttcaaaggtttgttccttagaatttccttatgaaaaatcaaactaataggaggattaaggtgcttaaaattgacaatgagttggagtcttgtaatgatttgtttgattattactacagagaaaatgggatattaaggcataggacaattggattgataccccaatagaatgggttgctgaaaggatgaataagactttacttgacaagtctagatgtataatgtttaataatggattagctatggggttttggggtgaagctgttacaattgcttatttagtgaatcgatatccctttagtgccacagaacttaagacaccagaagaaaaatggccaggcaaaccacctaactatctaaccctaatctattttggctgtgcagcttatgcacactaaagtgggtacaggttgtgggtgagagaacaaggtggatataaaatcatagacaacagagaggtgatatttagagaggattgtttctcttgtattactaatgaaagtttaagtgtaggtactttagactctaacaatgcatgaacacaataattataccaccataaactatttaggtggaacaaccaagaacaagacctgatattggtcaggtggaactagcacaagctgaagctgatcagagaatgacacaacctgacagaggttaggtaaaaaataaaagtgaatcaacctggaaacaacccagaagacatcattgaataccagctcattggagagagtaaagagggttcccaaacctactcaaatgttcagttttaatctctggaatgaagtgatggcttatgcttttctgactgttatggaactgaacaacacagagccttactgttatgaaggagccaccaagtccaaagatgtagcaaaatggaacagtattatgggtgaagatatgactttacttaaaaagagcagaacttggatactggtgagaagacaagagggcaagaatattgttgtatgaaagtggttattcaagcataaagaaggggtcaaatatggagatccaattagatataaggcaaggcttgtagctaaaggattcacacagaaagagagtatatactatattcatcagattttctcacatgttgctcaatataaaactattagaattatgcttgccctagctacaaagtacaacctagaaggggagcagatggatgtaaccaatgctttcctcaatgatgaattagaggaagagatatacatggaccaatccaagggttttgtagaaaaaggcaaagaacacctagtatgcaaactagaatagttcatgtatgggttaaagcagtctcctagacagtggaataaaaggtttgactccttcatggtcaaacatggattcactaagagttattaggatacatgtttgtatctaaaaggaaaaaatatcatgatgaccatatatctaattttatatgatgatgacatgttgttaattagtaaagagaaggccaggattgagaacttgaagaatttgttgaaaatagaatttgaattgaaagacttgagggctactaataagattatagaattgcaactttttcctgagagtataaaagttagagtattgtaagtcaactgtaatgaaattataatgcaatagttatatctattgcgagccaactaacataaaacctcacaaaacctaataataccccatatgtaatacaaacgaaacttaccacaatcgtgttttgtgttaggctatttttagcctaagttttaggttattttttatagttatttttcttct

SEQ ID NO: 161513 - DNA, 4270 bp, Cannabis sativa
tactagttgattttaatttttctcatggcacttttctctcctgcttagttgttatgtctatgatatattttaataattggtgatagattaactgaaggttcatttcttggttgtgtttgcattctttgatgctcaattattcttagtactagtgtgatctttacaagacattttttcttttaaattaacagtgtgcaccgaagaactggtgatgaacttgataatgaggcacttgcattcaagcctgtcttaggtcccatgcttgcaaggatcttccataatcctcaaattcaagaggaaaaccagtcaaagttacaacagcttttacagttatgggcgtccaataacatttatgatccagatactattaatgccttacgaaatgagatgattggtggagagtcggccaattcttttgctggatcctcaagtgctgcagatttagcttctggtaggctactgattgttcttttgctagtgtttgtgtggaattatgcatgtccttattatatcaaggtgcaagtatttgcattattcaggccggtatttgtctgactgctctggatagggttactgtgggtttgggtttttctatagcataatgtgttatcatatttttttcgaggcttttttagaatcgtaacatctagttattaaatgctgattagtctcttacttctgatacaggattaccacagcagatggcaaatcataacttgtctcaatggcagcctgaacggccaggttccgttactggtttaggagaccaagagcacgataaacatgcagcccctggtcaaaacatgccatcattggttgcatcccagcaatttcttccaaattcagtccctcctggtgcttttgcaggctccatccccataccaacctctattcaagcagcaagtcaacatgctgcaggccctttattgccatgccaagctgctaacagcggtgaaaaggtaccaccatatcctttgttcccgcctggtctaattccaggaatggtcagaaagatgcagattggcagtggagtgccttactcttcgatgagtcctttggacatcccaactgtcatacctccatccagtattacacaatcagaagttcttgaaagagtgtccaaattctttaaagagattggagaagttaacccttctgaagggccccttaaatctgatgctggtgattttgatgaggagtatgagagagagtacgaaagagaagcttcttcacggaagggaggggcttgcattcccccaccaccaaacctgcaattggaccctgagacagggacatatgctgatggaagtgtagatcgtaaacctggatttggtagctcgggaaggttagggctaggtgctgcagctaatcctaatgaagtaagtcagtacgatgatgtttatacttcttacaggaaacaaagaagcaccaattaccattcatccatgagcgctagaaccgcggcaaagtaaaaccagctttgagtggagggtggtggcactggcaggtttacttatttgattgtaatttttttttattgggtacctggaattcagcttgctacgtacatgtgtaggaatacatcaagattggttcctttggggttgtagttgtacccttttggagttttgatttagattcatattttattgaccccaatttagattcatgtattgattggcatacaacatcaatagtttataaacatgcgaagtttctttcaccatggtttaaacattttagattctacttcattcattacctacattttattagttgtattattaataaaaaaaagtcgaaatttaattatggtttctgtcttgctccatgaatttggatcatgggtttttcttgaaacctgcaattatggtgaggcagatgcagttcatacacattaaaaagttaaattatacaatttacatgcatatctatccaacatacctcatttagtgatcgaaccaaaatagttatttttctgttacaaaatttaattaatgttggcatctaacatccaagtcataaaaaaaatggaaaatgggtaggaaagtaggtgaattagtcaaatttagtggtaaaagaaacataattccttttacccttcgttttcttcttttgagaaccacaataactaccttgatattattaccaggattgcaaaagtagttttgatctaagaaaaaaaaaatcgaatatccaagccaagatattgattacactaatttccaattgatctagaaaaagtggtgtaacgtgaaataataaaaagaaaagataaatgggtacttgttaaattaattattttttagggtcacaattacaaaaagaagttgttcttttatagtaattgtaaagaagaaaacctagaaatgaagctttgcataaatttatcatcctccatttcttatgttatgtaatgtgataataaggaggaattaggtgataattatttgtgcatagaaaagaataaaagagatacagagaaattaaggtttcaaagtaaaaagtaaaaagtaaaagaatacaactaataaaaaattcttatataaacaactaatataaaagactaaaaaaaaagactaaataaccctaaataactatataatacattctctcaaactcacaatgatgctgtaagaagcatcgagaatttgtctaaaagaaaacaaaaatgagaaatcgtatacgacttagtaaaaaagtcagcaagctacaacgaaaaaggaacaaaaggcaaagtaatagtgcccaacttcagatggtgacgagtaaaatagcaatcaatctcatatgcttggtgcgttcataaaaaccgagttatgggcaatctgaattgcactttgattgtcacaatacataagagtaggacaagagtgagtaaaacccatatctgcaagtcaccatctcaaccaaacaatctctttagtagtagacgctatgacacaatactcagctttcgtcgaagatttagaaacaataaactacttcttgctcttctaagaaataaggattcttcaaaaaagatacagaaaccagtgacagatttttgatttgtgggatcatgaccatgatctgcattacagtaagctcgcaactccagagaggaggtggaaggcagcagtaggctctgaaagatgataccccgaagataccgttaaatgcaaagaacaacagcccagtgaacagtattagaagaagcaacaaattgactaacaatatgaacaacatatgcaatgtctggtgcatatgttggagaatattgaacattcaactcagataaactagattaccaataatggtgcaatacaaagtaggatcctccaaaggagagccatcagaaggagaatattgaacattcaactcagagagagtgttaactactctagtattagtaaggcgagcacgctcaataatgtcggtagcgtactttgactgagaaagaagataaccttttagagaaaaggcaacttcaatacccagaaaatagcacaaagaacccaaatccttcatctcaaactgagaagctaattttgactttaacattttaatttcctgtaaatcaacccctgtaataatcatatcatcaacatataaggaaagcagattacgacttgaagatgtgtacttgacaaataaagccgaattatgatcacttgaaacaaaactaagagacaaaataacattagagaacttttgaaaccatgctcggggagcttatttaagaccatacaaggtttttttagcttgcaaatctcgccttgcttatgaggaataccatgaggaggaaccatgtagacttcctcatgtaagtcattgttaggctatttttagcctaagttccgggtcacattaataagcattttctcagcattgtagcctttttggagcggttttatgcttgattttccttgtttcaggttcccggtgcattggagttcaaattcagtcaattggcgaaaagacgggacaatttggtgaaaaatcggctggagctgccgaaacttgatcagtggtcgcgaccaaggcaaggcctagtcgcgacccttttatctgctcgcgactatggtcgcgacttaaggaatttggcagaatgcctattttttgagttttgcctgtggtcgcgaccagccattaagtgggtcgtgactaggtacggaaaactggatttttgacctaattctgatatttttccaatttgaggcacaatcctaattcctatataagggactcgactcagattgccaagggcatcagaaatcggccccgaaaa

SEQ ID NO: 161514 - DNA, 5697 bp, Cannabis sativa
cctctcatttctcttccttcacaataagctctctctccaaactcctcctacggcccctacatgggcaaattgtaccaaaagaaaagatgataccatacccccccacccccacaccccatttgtgtcaattagagtttatgcgcttaggcatgccttttagatataaactgacatgaaaccaacaagaattgcatatatctatatctatctatccatccatcacacaatatagtatacagagattttatgtggtataggtttacctcttcgtgtttagcataaataatttattgtaattgtttgatacatcctgcaaaatttcaaaaaaaatcgaatcaaataaaataaataaagaaataacaattcgggaactaaacacacacaagagggtgtaccgatacacaaggtgtggattgaactatgtgtattcggttcacaatattaaaacaaataattataaaaaaaaaaaaaaaaatcaaaataactattcaggaactaaaaacacacaagagggtgtatctatacacaaggtatgcattgcaaagatctctagtatatacctttttttatttgaaaaaaaaaaatcaaaatcaaaataaacagagaaattggaattttcagcttaagttaatggaaaatagtggggtatctgtataagatgatatgaaactctagcagtaggactcttgactattcaaatgtaccttaaaggaattttcattagaaaacaaccacccttctttcaagtgcaaaaatatatatacatatataagaatctatatgactaatcaatctcacatgttactatcagaccccaaagagtattttttttttctttttctcgtgatatataatgcatatgaggttgctggtagttataccaaaaaccaagatcatgacaggcatattttttcccacaagggggtcacgtgcaagaggctccacatgactcctttcctagccatgctctagtagcctttaacttactactattacatcaaatcttgtcaacttaacaatgactatgactacacaatatatataataaggccctaatattaaacatgctctaaaaatcagctctttcaaaatcagtataacatattctcttttttgctattatttctttcaacaaccataggaccactaaccatttctgaaactaaacaaataatacataaaagtccagaaaaaatcaccagaaatgcttaaaacttcaccgtcgaggggtcggccggaagttcttataccaagtattccatagtcaaaatcatagtgattcttcaaatattaatgataagcaaaaaagaaaaacagaataagaatataaaatttaagctaaattaagaaacacataccttgcagttgattaaaatgtttgagtggggacctcattttctgactcaaattcactaaactgaaatagcatgcattgtagtaagtaggggccaatcaagcccatttgcttagcaactggaaagtttgtgctctgttttgaaaacctgacaacagtcacgtagaagaggcatgcactgtgttccatgaaaagattgtcaaaaactcagatggtctcttggcagtgaatcaaagtaagactgtttttgggtcttgaaatagttattagaatcggctatacagtgaagaaaaagacatttgagtgtgtgtgagggggggttagtcctttttaactcaaagagtgattttttatcctgaaaaaactgtagaacccaaaagggaaatctaaaaggtattttattcttttctttttccccttaaaataaaaagagataaaaaatataaaaagaaagagaagaaaaaactcaaggaagtatatacttagatagtcttttcaatggaaatagtactttttctgatcaatatattatatgtgagcactattagtcagaaaaatataagacaacgtattaatatattcagctatctacagaaatttaactattccgcctccctctttaaattctcttctctagcccccaaactcttctacaccacacttgctttttctcacaaaccacagcaaagtaaagctctctctctctctctctctctctctggttcttcatctctctctctatctatctatctagccatatttacattcttatatatattatcagtaaatggtgccactcgtttacagattcctgaaacagagagacataatccacctcaaacttctcatgattatactcatgagctgcatacctgatagaatcgagctatgctcaaaccatttcaaagcagctccaaaagtaccatctcatttcagctcctctaacgtacctttctctttggaaacactgagtctagatggacacttcagcttcgagaacaatcagtatgcagcaaatgactttggcaatatgcaccatttcctaccgtcggcagtcctgcatccaaaatcggtatatgatatttccaccacagtaaagcatatatttcatatgggttctggttcagaattcactgttgctgctagaggccatggccactccctccaaggtcaagcacaagctcaccgaggtgtggttatcaacatggagtcacttaaggaacaggaaataaaggtcttcactggagagcggccttatgcagaagtttcaggtggccacttgtggataaatattctgcatgagacgcttcggtatgggctgacgccaaaatcttggactgactacctatatctcactgtcggcgggactttatcatatgctggcatcagtggacaggcattcaagcatggacctcagatcaacaacgtctaccagcttgaggttgtaacaggtactatactatgttcgatgaaacttactactttttttttccctcaaccacaatcccagaatacaagcatatgtccaaactagttgacagagaagtaacagagtctagagctttctatttcaggtaaaggagaggtggttacctgttcagaagaacaaaatgctgacctcttttacgctgtcctgggagggcttggacagtttggcatcattactcgagcaagaatttcccttgaagttgcacccaagatggtaataatcacagcccacattacaccccccgaagaaaaaaagtatgcaggctgactatagcagtatctaaccaaattgtcctaattatgacaggtgaaatggattagagttctgtactcagacttctcaacattttctcaggaccaagaacaccttatagcatcccgaaactcattcgactatattgagggtttcgtgatcataaacagaacaggtcttctaaataactggagatcctccttcaatcctaaggacccaagtcgagcaagccaattcagctcagatggaagaactctctattgcttagaaatggccttatattttaacccaaatgatgagaacaatatgacccaggttagcatttcaaacaaatattccaaacatataactttgtcctaattaaaatgttattcataataaaatcctcattgaaaaactttttgaatatgaatgcagaagacagaacgcctcttgtcagagttgaattttattccatccactctcttcctatctgaggtttcttatcttgacttcctaaacagagtccacatttcagagataaaacttagagaaaaaggactgtgggaggttcctcatccatggctgaatcttctgatcccaaaaagcaagataaacagtttcgctaaagaggtctttggcaacatgcttaaccactcaaccagtggtcccatcctcatatacccagtgaacaaatccaagtatgtactcactcaataaactactaagttttcaacatctttgaaacctaacaggtttctaattcatactattacatgatacaggtggaacaatagaacgtccttagttacacctgatgaagatataatgtacctggtagcattcctatcctcagcaattccatcttccacaggaaaagatggcttaaaccacatattgactcaaaacaagagaattctacaatactgtgccacagctcatcttgggactaagcagtatctacctcattacagcacccaagaagaatggcgagctcactttggttctaaatggcgagtttttttaaacaggaaatcagcctacgaccctttgaccatcctagcgcctggtcaaaaaatatttcaaaaggcaatacctcttagagacacctagcaaaccaggaagaaaataattaccctgcagacctctatgacattcccaagacctataaattagtgccagtcgagtctgaatgttcatggtctcaaccaaaaacagcaaagtgaaacaagaagcctgtgggttatctgacaattttgttgggaacttagaaacaaatatataatcaaacatcacaatgtaaaacgactaaagcatttacctggctaaggttgttagtaatgtatttataaataaatatgtctatcactaatcaaattagttccatatgatggaaaagccaaatttcaaatgaaaataccaatgagtgcaacaacaacgtgaactatttaatgatatagtccatttcatatagcaatataatatgagtatactgttaaagtaaagcccacaacaacaaagaaataactttaagggttgcgtcacacttaaaaacactaaaaaccaacagccaataagtagcagaaaagttgagttaacactaaatacatacatggcagtaactggcaactacttttgtgtagtagtttctttccagccaagacctggtctgcatacttcaccctgaggttcttcatattcacgggcatcacgtatcatggcttcaaagtcagtagaatcacttgcaactggaagaaaactgctaagatcatctctagcaccaaaacctcctgctcgtataacatcatcttctaatatggaggcatccattacttccccgggagcatcgatctctaaaggggatgcatcttgattaacattttgaccatctttccctttgacaatgttaacttgaacattagtttcagaatttggaactggttttaaaaactctttcttcttgatctcaatatgagtggattcagcttcttcaccttttggcttatcttcattctcatctagttaaacaaaagttcaaacaattacatatttcagtaagaaatatgatatatgtgaaacccaggaaaaaaaagaagagaaacaaccatctataaacaacataaccaaatatgaaattacaatccaaattgattttaagttttcaagcatagaaccatgcacgcttcgttctcaaactttggaccatttgtttctgcacacagattgctgtttaaagcagattttgcataagttctacctgaaagatgtgagaggatatcgattgagaagccttttggctctagtagaggtaagatagaagttgttaattagttatagagatagaagatgaaatcttcaagagaaggaactgtatttgttatctttgtggttaaaaaatgtagtttctagctgctctctaagcattggcaaaaacacttaactaacgggtttagtttttgcttttcagttattttgttggttgtgtttactctgccatgtcaatatcttaccctcgatcatgtgtgtgcatgtttcttccccgttgacagaggtagttttacaccacaacacccaacccaccccttccccccccccccccccacgaataatttatttcaaaaaa

SEQ ID NO: 161515 - DNA, 5994 bp, Cannabis sativa
aaatgttgtatgtttaattgagctttttttaagtttatttgaattttcttgggcttcttattgtgttttattgggcctttctaattaaatgttttgggctattttttagttgctgaatgaatttgggttaaacaaaaccctagaattcaggttttttaaatgaggcgtgcgcctcactgtttgtaccgcctcaggcaatatctaacggcctcacatggctgagatgcacgcaataaagcgattttcttctgcctcaatctattgcgcgcaacgagacgcgcctcaaaaacgcaagtttaaacattggtttttgcaaagctcccatcaggttttcatgggagcatcactagagcataattttcacctcaaagatggtgaaaaatgagagcattgctagtgcatcattttttacctcaaaaatcatgaaaaatgggagcattgcgcgggcatttcaagaccattgcacaagcatcgttttgttcaaaattctacaggttttcaaagcttcaaatctgaaaaaaaaaaatactaataatgccaacaacaccaataaaggagatgtgttcgaaacctttaaaatggtgttttaagtgaatatttttcttaaggtttaagttttggatttgattttgattgattaaaaaacaaaaacaaacatattggtgttttgatagggtgcttcaacggtgatgggaggtggtggcatcaaaggccaggacaatgttaatgagggtgatagcgatgaagtggtgctctgccatcgtgggaaggtggtgtagagaaaaagagtttgagaaagtcgtgaggctattaatgggtgaggcacttttgtctaatgtttaaaacaaaaacatattttttcaaaaattattaaggttggcatgtttattcagcaggcaaaggcatattagaaaagcatagaagctcaaatttaccaatagcatcgtctaaaccagacccaggggtttacaagttagtgcaatattttctcttaagttacttgatgccacgtatggtaatagctatgatatgcattatatgacaatgtaaagaaagttatcatttcttctttatcatgaaaaaaaaagaacattatcttttctatgagcataaaaccacttgggggaaaggaaccaataatgagaagtgtggaaataaaaggtaagcgaaagtattaatagttcaagctttgtaaaagtcctaatggaaagtagtacggtattaaaactacctgcaacgacggagatgcgtttgtctttgtacctttcaacaaacaaatcaatggtgtctttgaaagccttggtatccagaagcaacgtagtgatgtcttggaacaaaatccctgaaaacaacaagtcaggctacaactcatactagtacgaaacaaaactactcacacagactattaaacaccaaaacaagaactacccaatgcccccagattacaaatcgacaatccccccaacacacatccacccgagaaacaaaataagcctaaatacggatttgcgaaggcaggcaagaacaaataaataaaaaggagtacgagaacgataacagtggagtaggaaaatacctggcttaggaaagttggggattactcgaatggcagaggaaattctagctatgcgatcgtcctgaccatctttcaaagccatttcttgttcttccttcacagactcgctcgctgcgcaaatcaaaatcccctcactagctcagattgacttttagaagctatggatggaaaacaaaaacaaaacaaaaaagaggcgggggtgtgtgctttctctttgctagttcagacatatatattatatatggactgttatgaccagattgcccatgccctaaaaaaacgtcaccttattgttattgacaataatagccctggtctgtacattagtttagtctctcaaatctggttcgtgatttgtagggcaaaagaatacagaaataggtataagttatttcaacggttaaaatcgaaattttaccggtgcagcacaaaggggagagtggggatcgggagtgatgcaagcgaatggaggggaattcgaccctagaagaagctagaaccgttgttgtgcgcggagctccgattcgaatacagtcagcggcaggagtggttttggtgggtgacagagacaatgaatttggtgaagacgagaggaagagtgagctgttttccatcttattcaattgattgctgctggatctgactctgttacaagtaaacgacgtagtttcgattaattagtgtgtctgtctttttggttcattttgcttttataaaagagattttttcaaataaatcttttcaacaattattctactatcatttaactcaactcaaattttcgtggaaaaacctccaaattattaacttataacaaatttaaggtgtatttatttttcacaattaattgtcgacatggtctaattatgtgtatacttttgtacacgtgacacgtgttttttgatacacttaatattattatttaaaaattgttatatctgaaattcggttatattccaaaaactgatacgtgtacaacagaaggaatatgaatcaactctaataatataataatattatattatattaataaatgcatattaaataactcattattattacatagaggtttaatagataaatattcaaaactagttgactatataggcaaaagcaagataagaataataattattaagttgagattaacgagacatatgcctgcttcggaatatacagacaagaagagaatgtttatccactcgagcagaataaaagtaataatataaccgcctcgcattacatatatcgagaagatcacctcactctatatcaagcgagatacaacattccaagtgagcaataatcatctaaagaataagagtaaaaagtggttgagtagttattaaatattaatccacatgtgattaaatgaaacgtggggattgtccacgtttgattaaccattatatttgaatcaaccctaaaaaaggtaactgtcaatctatactccaataaataggggcagattctattagaaaatagacgacaaaattgagagaaaaaatactattatttaaattctgatattgtattctatactcaataaatatccctaataataaggactcgtggagtatgtaaattttaactacaaaaccacgtaaaaatatctggtgttatctgatcatttattacttatgtatatatttctgtagagaatttattacgtaaaggctattttattttggttaacgaaaatttgcattaacagtttggtactttcattgagagccttggtgataaaactcagaaaaatccttccttataaacttgatctaatcacattcaatggctaatgacaatcaaaacgatagaaatccccctgaagatacaactcgtcgccctggaagagcccatgggatcccaaagaccccataccactgaaacatcacgttcgaggaggaacgatggtggtggtgatcaaattcttgaaagaaggaatgaagataccaataattatgccagatatgtgcctaggagtgaggatgcttatgacccaactagatatttaccattggtggagttggggaataggcaacttcgacaatatttagtcgaatctaatcgacaaaacgttgagttggagagagaggctgcagtggccagggcggcacagggaataattcctcaaaatcaacctgatcttgtggtgagaagaccacgaggatgacttcgaggctctagaaccaggagacaagaaacaaactaggggaatccttaaaacatccaagaagaacaaccttgggatacaagggatgtcccaatggacaatcaaacaaataatcaagaacaacggcgagatgttcctcaaagttcccagggatttacaaactaagggaatgaccgaactgatgtgccagaggcatctcgtaagaatgaagaagtgagatagccacgactagggaaccagagaatcccttgtggtagtgagagaaaccctaggaatcaaccaagatcaagtgagctacctccgagacacccccaacgttcttctcgagtagaaagagaggatgtatatacgtacttgaatagaggacgtgtatctaacctctttcgtaggagaaggccgatacaagatgaagcgagttcaagttcggggcgttcaaggtctcgaggacatagtcgatcaagtaggcagacgcgagaaggatgtagatctcggcgttattatgttgatcaagaaagcatgagcaatacgcaaagttatcaatctgaaagttattcgaagacaaaatctgtgagtaattattagcgaaggcagcctgatcttcgcgaatacttaaattgaagacagccagatttttgtgagcgtctgaatcaaaatgcacctgatttgcaccatcaacttaatcaaatgcaaatcaataacaagtggaccccatccaactgcgaataattgaactagaggataaatttaggaaatatcaagatgcagaacacgataaatttccaggctacgactcaaataaggaaactgagccattccatccagatatcctaaattctaaatttccctagggatttaagaacccacatgtttcgcagtacgatgggaccacagacccagtcgctcacttaaataactttaacactattatgcaagccagcaatgtcatgaataatttgcattgcattttattcccgacctctttaataggagctgcgaccaactggttcgacaaatctactcatcattccataacgtcctgggaacaattgtccaaggactttaaaaagcaattttaagtcgcaagagaccgacgacctgaagcattgtccttaaccaatataaaacaacaaccaaacaagtcacttaaggcttatttaagtcgctttagcacagccactgcaaaggtcagaaatctgaatgacattatacaactcacgacacttcaggcaggcataacaactgacttatccatggttggaggcaaattatgggatgatctccaaggtcgccttgtgagaaacaataatgagtttaatgaaagagcacaagtatttgtgcataaagaggaaacaagaaacaagatgaagatgttgaaaactgactcgggaagtaaacccagcacaagtatggcaacagcgagtacagtctcgactaaagtagacaatcctagtggctcaaacacgaaaagaaaggatgactcaaaagaatcatccaagaataaaaagaaacagaagaagcatgacaagtatgtatcgatttattcggtatatactgagttgaatgaaactcacgagaacatattcctcgcaaaagaaaatagggttacattttgcaaaattgagcccatgaggcatgcgagacataagcgagattcaacaaaatattgacgatttcacaaagatatagggcatactactgaagaatgtcgacaattgaaggatgagatagaaagcctaatctcgcgaggatacttcagacagtatgtaagacatcaaggaaacgagcctaacaagccaaacaaccctaataacccaaataaccagagaatacaacctcctcctgttgagggcgaggatatcctggtcattttgggagggccgcaccttgttggaaacaataataatgcccaaaagagatacataaatgaaataaagaatgggcaatcaacatttgctcagaaaaatcaaacaaacctctgattatcttctcggaggaagatacaaaacatgtacaataccccacatgttgatcccctcatcgtgacagtccaactcgccaaataaagggtgaaaagggtattggtagacaacgggagttcagttaacatcctttacaagggcacattcaaaaaatgggattagaggatgcaaagttgaagccgtgcatggtgagcctatgtggattcataagaaacattgtcgccaacctaggtatcattgtgttggaagttattttaccaggaact

SEQ ID NO: 161516 - DNA, 5223 bp, Cannabis sativa
  modified_base (5141)..(5149): a, c, t, g, unknown or other
aacacactgtttgaacatgattttttctatgttaaatttttctaaatttcttaaaattttgcaagatgccttaaataactataacgtacataagctgagaaaaaatttgacaaataaggatgcatcaatatattcattttaaaagggtgtattgtagaatttatattttattacacaatattattatggcttcacaaaattataacaagtcagggaccacgtgccggtcaacactttcgtatcttacgtggcaagagcttaaaagaatctaatttgaagaggggtccgacaagttcacggatcctcaagttttctcgtcactttttccaataaccgaagcttcagtccactcacaggctcatattaacggctactttcttagaaatagccacgtggcttcacccgattcaacggtttgcttttggcgggaataaaactttttctctgaaatatctaatttgacacacagaataatatagtggtgatgttggtggtcccagtcggaccctccgaaccggcgaggtcgggtcaagtcaagttattatatatttcagcaaaaggtggggaactgaactaaactcatgaaatataaaatatatattgaaagacacctacgaaaccaatagcgaaaagaatatggaattaatttaacaaaagtagagattatacaaagaagataatgcatgcaattaaataattgaaaatactgaaaagaatgacttcttttgagaagtaaatcctttttttttttaataaagaaaaaagaatcatgccggggaggggagtgacgtgggatcggccgaagatgggatttctgctccgacacggcaaccttcgagcatgaacacaatgtccgccatggatggtctgtcaagtggatcaggagcagtgcaaagaagaccaactttgactcccaacaagaactcttcccactccgttgactcagggtcaatttcgagcaaacccggttcaagtagctccgagatttgacctctctgtaattgtttcttcacccatttgactatatcctcgtcttgagtaaacatcaccggtttcctccctgtcaaaatctccaacagaacgattccaaaactgtatacgtcggcttctttggttgcccgacctgttaatgcagcttcgggggaaacatagcccaatgaaccaactggggtcgatgaagatgatgctccttcagccggtgtcgaaattgtcagcctgtccagcccgaattcggatatatgggcttcaaaatcagcatcgaatagaacgttttgcggcttgatatcgccgtgtaccatcgagagagagtggaggaaagccaggccgcgtgcaatgccgagtgcaattaggtgtcgcattggccaattgagtacatggccgtcctgatgagacgcctcttggagaagagttgcgaggtttccattaggcatgtaatcatatacaagaagcctcacgtcaggaggaccagcgtaatatcctcttagaactgtgagattccggtgcttaacctttccgagcaactcggcttcttttcggtatcctccttcgtctaggaaaccgtctgcaaggcggcgtattgagagcaccattccatcctggaatgaggccttgaatacgagcccgtattttcctctgctcaaaacgttttcctcatcgaattgtcttgtggcctccaatgtctctgccaacgtgattttggtattgaacataactagtttaggccctccattttctccacttcctcgacctctttcccctcccgagcttgctcgagcagggctcctcttctttcctcctgcaagtattccttctctaagctttttacgccaacgcagtaggctaaagatgtagccacaacagcagaatcccactaggcaagctcccactacagagacaccaattaaaacaatcagttttctcctttttcttctcctaacactttcacattctttatccagtggcttcccacatagtcccgggttcatggcgtatacagtttgatcattgaatcgagagcttagtggttttggaatctcgccttggagattgttatgggagagatttaaatgtttcaagccaggaatgagagtgatattctctggtatgattccagtcaatcggttggaggacaggtctaagtctgtgaggctggataatttggacaatgagctcggtatggggcctgaaagttgattctcatctaacaatagagaagttagataggaacacttagagatctcatctgggatttcaccaaccaatctattttgacccaaatcaagcttcttcagatgggagagtttagagacatcaccaggaatattgcccacaaagccattcgaacgaagctcgaggacttgtagttcagaacaattagtaatctcttctgggataacacctgaaattttgttaattgctaaggataagacgttcaatgaccgcagaaatccataggtggtgggaatatcaccagtaaagaaattggatgagaggtttagatgtttcagactgaccaaactgctaaaaccttcgggtacatcaccagagagatgattttcttggagagcaactacctgtaggcctggcaacccaaagatctcaattggcaactgcccagagagtttttgtttactcaaatctagtgtagaaagcttcattaagtttccaatactcgcaggaaatcttcctgtaaaaccacagttgctcaaattcaaaacctgcaaattgctcaagctcccaatatcagtcaaaacttgtgcacccaacttgttgttgctgaggttcaatgtagtcaaattacccatctgcatgacctcctccgggacatttccagtcagattgttgttgctcagattcaacgtttcaagctccaaaagctttccaagactgacaggaatggtaccagaaaatgagtttccacccattgacaacattttcaagttcctcagtcctcccaaaactgaagggatctgacccgaaaacatgttatcttcaaggtcaagaacttttaacaaactacattgtacaatctcaacaggaacttctccaactaatgagttgtttgataaacgtagctcttccagccggacaaggtttccaatctgcaccgataatgggccagaaaaagagtttccagaaagatccattgaccttaaagtcgtcaaattagtcaaccaagatgggaacacgcctcttatgtgattctctttaaggtctaaaatctccaaaagactcgaagaacaccatccatttggcggcttgaccatccccgtgaaagcattaaatcctagcttaatgatctccagagaagacccattgacagcgacgcgacagagcagggaaataggaaccaaacctgagaggttgtttctcgacaaggagagaactttaaggttaggaatcgttcccatggtcgccggaatcaaacctcggagaccgttgtcttcggcgcttagatgaacaagcgaggtacagttggatatggctgaaggaagtgttccgtacaactggttagagtccaaaaacagatattcgagctcctgaagctctccaatggtggccggaacctctccggtgaaccggttgaacgacaagttgagaagctgaagctgagagatagatgaaaagttcattggaatgtcgccagagaacccattagatgataggtcgatgtatcgaaggctcggcgaaatgccgtagccggatattttgccggagaaaaaattccgggcaaggttgaggacttgaaggttggtgagattgagaagaaatggaggtaaatcgccggacagtgagttgtcctgaagataaacagctcgtaagagtgcacactgggaaagagaaggtgggattgtgccattgaagttgttggaatgtagactcagcttccgaagctggcgtaaatcagagagtctgtgactgattcggccaccgaggtggagacgaggcaatctgagctcacgaactcggtgaccataacagaggaccccacgccagtcacagggagcggatggcgtagacgaaatccaaccatccaaagctccagccgggtcatgaagggcaagtttgaaagaggttaaagctcttgtttctaacaatgtatctgaacttagtttagtttgagcccaagtaaaggccatgaagtaagccactaaaaaaaaccaaaaagtagccgttgacgccatggaaatggagtgaaagaaggtggtgagagtgagagtgtagtgggttttcttttgtatttgatgttggtgggatttaggaggagcgtaaaggagtggaaagagggtttgagttaaacgaagccatatatgatgttggtttgcgcccagtttctgcgtttctgtcccccggtagtattttctctctctctctctctgtttttccgttctctctttcccaaaaagctcttaaaatgggctttttagtatatttgctcttatctttggctctttttatgttttttggtactaaacgtctaaatggagagtcttttatgcactttttaaactttttccttcggcttttagaatcattaactcccataatagagactacttatcaatcagaatgagggctttgatattgactgcatattttgttttcttatcttttttattttttacttttgtttattggctttttagatttttttttttactgaatttttagatgtaacaaactatgtacctcaactatagaagatattagattcaatctttttttttttttgtctatttttatttaattttactaatacaataattgtctatgtactaaatcttacctccctaattttgatatctactgagtcatgcctcaaaatctttacatgtaccaaattgtattttctaaactttcattcatgtcaaattttcgttaataaaattaaacaaaaataattagaagaacttttaacagcttaacaagttgaaaaaatgagacaaaaattataattatccttactaaatactaaagaaacattgttaacaaaataaatctctatattttatggagtttttacaaaaatattgaattttggataaaagtttataaatttactatcacacgattttttttcttcaaaaatattatctttttataaaacgatcgtaagacaacaaaacagaacaattaaaacnnnnnnnnnacaactaaaaaacaaccgtggaacaaccgtgaaaacttaacacaatacataatataaaacttacacaatatttt

SEQ ID NO: 161517 - DNA, 1319 bp, Cannabis sativa
taaaataaaggtaatttcactgggcacatacaatttagaattaacttaggaattaagacagttttacaggaaaattaatcttaaaatgcgaatagattcaaaaggtccacctctataaattgcaatctaaaaggcagaaataagtgaataatatccccacatttagtcaatataacacaaagaatttataagaaatatgtgctccattctcaattcttcctccatgtattttcatatatcatacatcaagtacttgcttaagaaaaactctactccaaatttcttttaacagttttcatcaagccagagaaaaggtgaagcaagcaataccacaatttaaagcctttattttataatttaagctctaacagtttatggttcctagctgcccccaagagcttacatgaaaataagtatcctttttataggctctcaagaacagcaaaccgtaatatatcaaatgacaagccttatatgatcatgaagagaaacctttttcttttaatatacagcagatcattgtaattgtaattgaaaaggtttccaatcaactccaaataagcaaaatggtcttaatattgtttacatccacttgagaacaattccggttaccgtgtaataacacgagaactaattatgaaaaataaagctgaatataagcaatttaaacttcaatggaaatcaagcagatgacagcagtccaatgtactgtttaccgtatttatcatgacgaaatcaaacaacggatcgtttggaagaacccataatgtagaatcataattacttattatacatgtatatatatatatttatagacacacacttttacatataattaatgggacgggagagagtgaaagaagaaaactttgacctcggagagagttgaagcgagagatctgatcgggagggaagtgggagggattggagaagaactccttgagacgaatggcctgatcgtctcggccatcatcaaggagctcgtgcagaagctcgaatgctgtcaacaagtagttctcctccagtaggaaattcaccacgcaattgcacaatgacgacctctccacgtccatcgagcttctgatacaagaatacctaattccagtttctccaagacgccattgatgagcgaagaaggaagaagtatgaacttgtcttacagtgctggatctctcttgttttgaattttctttagatcgagtctgtcatttgaacggaaactcaaacaggtgtgggtgatgatttcctttgcacccgtacctcattattcattctgaaatttttcggggtattattagtagggtgattctacaatacac

SEQ ID NO: 161518 - DNA, 1667 bp, Cannabis sativa
tatattaatcaaattatttaaaacttctcataccaaactcattctaagattctcatttgaacaatccaatgttcaatttcaacttcagtttaaattattaactcacttttataacattttcaactataaataacatgaagtaattgtgctctctctattataataggtaaacaacataaccaattaccatttctatttcctttaagaaagaattaaataaataaattaccatttctattcttcttttcattgaattattcatgactttgtcaactgtcgtttatatgaatgttgttcaaaaaaaaaaaaagtttaaatagtacaaaacgacatgtcatttgtccggtatgaacagtaaggagcttttgggcctttctacacatatgtagagggcccatatcagtagagcccatcagctgcctctatttcacacatctttacattatatctaactttcatttacttttcttacttaagttgtataatatttatgttagttataaaagtttggtattgatatattattattatgggttccatcattgctaaaggtttgacaatcaaacaagtgagctaatatttttttcttcttgaaatttcaaggtggttctgtagttttactcaatttggtctcttgagactaaatttgtgtgtaagtgactttgtggtcatcacttttccttttgaatattttgaactatcatatactattttcaagcataaagttgggctaaagcctcaagttatggaagtaatcaattgcttctaaaattacctttcgtttagcttgaaaggtcaacaaacaaagatgagggtatttcatttcatttatctatccaaccttagagttgaccatttttttatttatttttctatatttttaaatgttaggatggattccataaaggatttcaatccaaaagtctcaaatgatcctatacttaaatagactagtagtccatttggtgcactaaacattgtttaatagtgtagtactactaaaatattttggccactagtatgtcttctctaaacatttctatctatgttaaatcaagagataaaaactccccaaacctttgtctaaccaataattatttttgtcttaactcttaatatttcctctcaaggccaagcaatatatatattatatatatgtaaataaattggagttcaatttttttttgaacatgtgtaataaattaaaatattaggaacttgatttttgctacaataaattatacataatttttcaaaaatttatatgaattatattataactataacaaatatcgctataaattttttattttttttataaaaatattctaacatataatttcaggcgtaaatattaaataaaaaattataatagaagattgtaaatattatttatcttttcttaataagcaaaaggtagtgtcgatcccttttatactttttctatcttaaacaattttaggaacctatgttccaatatgggactcataattcaatttttcttttaaatcattcaaaagctccgaaaaaaccctatttgttgttacagtctaaaatttatgtcatagtattctatcatgagaatttatagaaaaatttacatggtatactaatttttttttttttttttttcacaaaaatactgttttttataagtttcatattgc

SEQ ID NO: 161519 - DNA, 3458 bp, Cannabis sativa
aatataataataaaaaataaaaaaactaaaaactaaaaactgtttcaaactcaaactatagagctctgaagccacccgcacaaccctttcttcatccccaaattaccatcagaatatgaaaccctaatttgatcaatcaattcgaaatcttccactagtcatctccatctgatcgatctcagccgtaagttcatatattcgtccaaattatcatcgaattctcaatcgataaatccaacgttttctttttaaattagaaagtaatttatttttgtttgcgatttattggatcaaaatcttgatttagttttactgttgaattacagtggtttttcatctctctttaccctgcatcgctagggtttttcggtttttaggggggagatggatgggaacaaagaagacgctttgaaatgcttaagaattggtaaagaagccatggaagccggcgatcggaatcgtgccaggaaattctttacgaaagctcagcgtctcgatccaactttatctgttgatgatctcttatcggcggttgagaaggaatccggtggcgaacgatctccgtctgatgcggatgcatcgtctaatggtccgtctgattcaacttcttctaaaccgtccgatcaaccctctcttcgtcaaagggttccatccactggttcatcttcgtctccctcatcggctacgggggcccatacactggagcagatagcgattgtgagagagattaagaagaagaaggattactatgagattttgggggtagagaagagttgcagtgttgaggacgtacgaaaggcttatagaaagctctctttgaaagttcatcctgataagaataaagcaccaggtgctgaagaagctttcaagtctgtatctaaagcttttcaatgtcttagcagtgaagagagtaggagaaagtacgaccttgttgggtctgatgagcccgtttacgagagacgcaccacaagacacgctgctcatggattcaatggcttctatgatgctgatgttgacgcagaggagattttcaggaactttttctttggtggaatggctccggcgacccagtttcgtgggtttagtttcggaactggaatggggcataggcaacaacaacctgatcacaatggttccggtgggttcaatgttcgtgcactgattcagattctgccagttctgcttatacttgttctgaactttttgccatcttctgagccaatctattcactctctcgatcttatccttacgagtacaagttcaccacccaaaaaggtgtcaattattatgttaagtcgacaaaattcgagcaggattatccgctggacagccgggaacgatcttcttttgaagaccaggttgagagagaatactttggtattcttaatcagaattgtcggcttgagattcagcgtcgtcagtggggctttattcgtgaaacaccgcattgtgacatgctgcagcggtttcagacacaggctaactgacttcaatgaaggtcatattattactgtttttaattcatttttaaatgattggtgtaaatttctgcttgcaataggagaattttagttaagcaattaataagtgattttggagataatatgaacacggcaatactgattgtaaaaaattactagttacttgctattaccttttgttctttgcttccttttcccagactgaaagggctgttaaatatcttttccggtgttaaatttgttgtgtgatttggttaacttgattgctgactgatactagttcaagattgtaggtttggatagaaaagctcacttagcattgctgcctttagggtgcggttttgttttcaagcaatgtttgttttttccaatcttagtttgccttccgtgaattttgttttaagtacacttataggtggaataattttttttcttttttcttttcctttttccgtcttaagtctgttacaactttcaagtccctttatgtagccagccacactcagcaaaagtttcactttaagagtcatatgcatccatcctcacattgcaatttgtttaccttgttagcttttagtcttacattgtgacattctcattatcgtttgagttatctttaaatgattgaatgttgtgttcagagtggggttttgttgtctcttgcagattttgcctgtttggtcaagactgaatgtccttcagtatttcttttcctattccgaagagtacacaagtaaattatatgggttcccgtaagagaagaaatgtaatactagtggcctttttcctttcttttctttatcccagctaaggaacgtataggagctagatttgtcgaaactatagaccttatcttctgtctcattctatattcttacctcttacgtacgtatggcacctcaatttttgtgtaaaattctgatttagcattttaacaaatgctatgctgcaatacatgcattcccaatattcatgattttaagtacttaaaaatctgtaaagaagtacaggttctgttggataaactttgtagttttagccacaatcttttttgtagtttcattaaatttacttcatttgttcaaagtatgtaatatgtggattgagaacttcagttgttttagtggttaactagttacagcttggcagatgccatgggaatggaatgttcttaagtcaacctgttgtaaaactatgattacaagtttttacaaaattcattgagatactttttttttattaccaagatctgcttaaataagaacatatttgttacttcttaataaaagattagcctgtgagcttaacatatctattccgaagccattggttaggtgggttcttaaagccattggaaagctattgtgtgtaattaaaggtaattatataatttagtatgtttgtcggacatgtagttacattataacggtgtaattggagataattgaggagttacaattacactcttcaattctcatggccctcatgagtgtaattacactttgtaattacttgaaaatttccattttaaatatcaaccactaaaaatattattttcttttgtaattactaactatttgtcaaacaagatattaaaaattcatgtaattaccaactcatatctaaacatactatatatatattttgacgtaacacacttatgtttgtcgggtgaagtattttttttgtaggctaattacaattttttactcttgaattttgaaacgtaccaaatcatgttctttaaactttttttggccgttgaaaattttcctaaactattgagattgttggatttaaggatttttgttcaatttcattcaattatactaatctgatgattgttcatgtattaaatcatattatttaaattttaacttctactaaatcacgtccctcgaactttgatatgtgctgaatgatggtcctaaactttcatccatgttatacttccttcactaaaattggacaaaaat

SEQ ID NO: 161520 - DNA, 1331 bp, Cannabis sativa
agaatatatactcatatacatacatagctttgactccaatcatcaaggaaccaattaatatatcacatctcttaattttgttggtttaagcataattaaagctttgttaatttattctcttattcacttattattaccaattttgcattaactggctcccactctcactcccactacataaagataaataaattaaattaaaacttcttaataacaataattaagaacatttataaatatatttctttctaatataaaaatttacaagtgggaaagagtaaactacccatattgatcgatttacacattacacaatacaataattaagaaaaatcatgatgatattaaacccctaataatctcaattcctaaaaatgtgtacacaaaaatccatagcaaaattaaaattaattattacaattctattataagagaagataagaaattactattattattcaattaaatattctagtgaccagtgcctttgccactaggaccagaagccagcttattataatagactcgatcacgatgactactactgctactgctaaccaaaacgcggtcgttttgtcttcttcttcttcttatatttccaacatgggtttttgatgatggccttagaggtcttgactcagcaatttgaaccataatatttaggtctataaagagtaataaaatggtcaagaaaaacaagagataataattgtgttgttgttttctcatgttgttgagagagtttatttggggtttttggtaatgaataattaataaggaagaagggttattgtatatataaatgattctgttttttggtatgggaatttgtaaataaatatatattatgtatagttatattctgtaaaccaaaaaggatggagtagaagaagaagattggtttagcatctgtgtaatattattataagcaaaattatgtgcctttttataggctttgggtttgagttgatgagtgaatggtagtaaaggacggtgttgggctttttagtttgtggggtcatctaatgtaattgatataggaatatattgtgtttgtgtttgtttgactaaatttcttgtgtatattcattaaatttttctttattttcacattattattattatagtatatggtcggtctctctcttcaataataatattattttattttgagagtaatgatatctgcatgtaaaattagtggcagaattatgtatgggaaatttgaattttcatacctacataactttataatttttttcttaaatgcatacttattaaaatttgtaatgtatgaccattttacaaattttccaaaactacccctccca

SEQ ID NO: 161521 - DNA, 11566 bp, Cannabis sativa
  modified_base (5291)..(5291): a, c, t, g, unknown or other
  modified_base (10814)..(10815): a, c, t, g, unknown or other
aaaaaaaaaaacacacacacacagaaatcaaaccacacagaatcaagaacaccaacacacataaaggagagattgtagatagagattaagagaaacaaatagagattagagagattctgaacaccacgatatgatctcagatttcaccccaaatcagtgggctacgtctttgtcaagctacctcaaagtgcttgcttttcactacgaacaataggtaattacaactttgcctttagattttaaaccacgatctttggtttataatctatttgattttatctgtgttttttttctttcctctctactaactctctttctttctctttctttttgatccaattacaactaagctcgatgagctgcttctctctctactctctctctctacaacagtactgcttgaagaaaataatgagacttcaggtaaaatctccacttgtagaagggtttatatagatgtagaagtagttaggtctgatctttatccgaagctttgatatgttaggccttttctgttgtaatttgttttttgggtttgttgtaattgattttctgttagagtcttggtctatattgaaccttagcccaagggcatatttgtaatttgctattttgtaaataactggacttataaaggaatttacttaacgttaatgaaagtcatggcaaggttaccaatgttataaaggttttgtggtaggttctatcacatattatttcattgacaaatctaatgaagaattggatgaagaggatggaaaagaggatagagatgatgagtgcaattccaagttaagtgattatttgaactgtaataagactgacattctttacataccctaaagagcctgaaagaagaatgactgctgtaagtcttttttttttagtgtagtctaatgttattttataattaattaatagcttagtagtttaaaggtcctgtgttcgaacccatgatctctctcttttcccatttctctctcaccattaaactagccttagtggcttagtgactgttgcaagtctagcaaattaaaatgatccctgaattcattttctaatgtaacagggtagaattttttgggaactctaatatttatgaatgaagtaaagtattattattataaaaaaaaaaaccaaaaataatttttctaaaatagaaatctaacctaaaatagttaccataattattcataaacaaagcaaaacaaaaatgttaatattttcctaaatgtgtagtagtgaagtaaggtaattaatgtaaattagtatagtaattcttaggtcatctctagtgggcggggtcttttaatgttgccaaaaaaattgtagggcacgtgtataatgtggcttatgagagatcatagaaagtttccgaaattagcactagtgctctttaaaatttttgagtagaaaaaaaaaagcaaaacaaagtgtaattgactaaatgtattaagtgttcgtttggtatgccatattacatattgtattgtattttttttaaaacatgaaatatcaacttcattgaaataaagcattcaaattacaagttggcataatcagagtaaaaacaagagcgcgtagccacgaagtgggcaactttgtttgttgatcgtttaacaaaacgaagactaacattagatagagaggataaaagagttttacaatcatgagtaatcaaaccaaagacagaagactgcttggacagtgagtaggctatcagttttcacctttaccgtatttcaacttttgtctttgagccaactaagtgcttccttaactcctaaagcctcaacaacctcggccgagaaggacccatgagagtacttagccacaaaatcaatgatcctgccttccgaatcgcaagctacaataccaaaccaatatgcattgtcattctcaaaagtggcccccatcaacattgatcttaatcttattataagtaggtttagtccaatgctcaaagttgttaccatcacctaacatagaagatgataacaaacttgttttatcttgtgcttttaaccagtgatcaagagtagtccaagcagaagtgacaacctgagaagggaaagaagcttttttatcccaaactaaagtatttcttgccttccaaagtgaccaacacagcatcataacacgacaagagatgtcttcatcaaaaccattgaagacatggtggagaaagtgtcctatggttccaacaaagttagcctagaggaccaaatcagccttttgccaacatcttattgcaaagggacagctaagtaagatatgcgaagcagattcagcaatatgatggcaaacagggcacatggaagaaacacttacacccctagaaactagttgaaaacaggttgggagcacatcagaaactgcacgccacatgaagttcttcactttaggtggtatcttgagatgccaaagtttacaccaaaacccagagttgttttccccatgtcggttattcttctgattttgtagcaatttgtaggctgatttgacaaataatggcctattttttcaccaatccaagcccaatgatcatcagtagcagagaagctgagaggaattcccaaaatcagatttgcatccttggcgttaaacatgtctcgtacaagagagtcatcccaacttttatcttgaacatggaaaagtgagttgaccatatgatgggtgaggccggaagtagtggtggatacaaaaggattgtcatcatcaggaagccaaggatgagcaagaatgcttgtagctgtacctgtgccaatgattcgcctggcaccagagcgaatcaagtgttaggggttccaaatgttatgtcaaacaaagctaggattactcccgagttcagcattaaggaaatctgaacgggggtaatacttagctttaaagacttgactaacaggagaagaatctgaacataacaaccaccacccttccttagctagcattgcaagattaaagtcatgaagatgacgaaaacccatgcctcccaaatctttatgaacaaccaaccgatcctaagacatccatataataccttggccactagtactttttgttttccaccataagcttgccataagcttctcaatgtcattgcagattttcagaggaatcagaaacacactcatggcataagttggaagagattgaatgacagtctttaatagaatctttttgccaacacgagaaagaaacttaccatcccaactatttatgcgattgatgatcttattcttaagaaagccaagaataatagtcttctttctaccaattatattcggcagtcccaagtagaaggagccttcagtagcttcaggcgttccaagagttgagcaaatttgatttttaaccacgccatcagagttaggactgaagaatatcgaagacttggttgcattgactcgctgaccagaagcaagctcaaaggagtgaaggagtctattcatactatcagcagcacttggagttgcttggcaaaacaaataactgtcgtcagtaaaaaacatatgagttatagagggggccccgttagccacacgacacccatggatgatcctgtctgcttcatacttcttgataagacctgaaaacccctcagcacaaatgataaaacagatatgttgacaatgggtcgccctggcgaatgcctcgagaaggagtaataggacccatgatatggccactgtggataacagagtatctaactgaagtgacacatttcagaataagattaatccattttctggcaaaacccatacgacacataacaactttcaaataacctcattcaactctgtcataagccttactcatatcaagcttcaaggccatatagccttttttacatcttcttttttgcatgaggtaatgcatgatttcaaacgccaccataatgttatcagagatgagcctaccaggaataaaagcactttgagttggagaaataatctgaacaatcatgcttctcattctgttcgtaaggactttagccacaatcttataagatacattacatagagcaataggacgcagatcacccattgtggaaaagtttttcttcttcataatcaacacaagattggtgtcattgatatcaagaggcaagtcttcggattcaaagaaatttgtaacaagctgcaaaatgtcagggccgacaacatcccaatggtgttgataaaagccaggcctcaagtcaagttcgccaagctggcagtcatggagtgcaagattgaaaccgttgagcaaagagtcggggtagggtcggcctcccttcatatcttcctgagttgtgatattattgaagtctccaagaatgcaccagggaagagtcgattcattagcaattgaacggagcaaattccatgttgtatgtcgaagagagcgttgtggttcaccatagaaaccggtcatacaccatgaagttttgcctggaagggagatttccaaattaatgtggttattggagaagctcaataattgggcttcatcataaaatttccaaaagaaagctaggtcaccttttcttccttgggcttcaacagtaacagaactttaaaagcccaacttactcttcactcggtccaccacttcctttttacacaaagtttcacaaagaaataaaaaactgggcttcttttcaacacaaatatcttgtaggaattgaatggcccgtgggttcccaagcccacggtaattccaactaatggtactcatatcaattggtgagcctgggaaccaggacccaccgagctgcctttttttggaggccaacaacatcttggttaagaaaatcattgggctcatcttcaagattcacttccttagaattacgaatatttatgactgattgagaattattttcaattctctttctttttaggtcaactaattctatttgcatatctgacataaaggtggcctcattgtcatgcaaaattatagtagggtcattaatagaagattccatgcgagtagcaactctcctaaaatcaagggatgtattcggctgtaaaacaaccctcatttgttgcaaattttgttgtgtgtaggatccccccagaccagcagtgactggtgtagcagcattgaaggcggatggagctgattgtggatcgcattgggaaacatcagttggtgtggtgccgtatggtttttgtgttcgcagccatggagaagcagtcagaatactctgcctccttgttggtgctttcatctccaaaccgtaaggtttctctatttcttcaatcggggtgtcatatagacatattgtattgtatagtattatnttaaattgtattttatgtaatatttttatgtaaaactatatgtggtattgacttttatgggcagctaaatatataatattttaatataaattaaagttttaacatagtattatataaaaatatgattataatctaattcaatataacacaatacaatataatacgacttaatacaacgtaccaaacgaacccagtattttcgagacctaatacactcatatatgcataattctattgagactatttttgtggtgaatgtacatcctcaaaataggttattacagcagtaacaatattcaaaaatgcacaaacaaaactaaatcaattacaaaattaaagttagaacttagatgaaattagacaagaaatactttgctcgagaatgaatgaatcatggatctttatcgcttgaattgtgagtagtacacaattaaatgagctcaagattgcaactcaacacagtgaataattataaagaaatgtctcacattgaaaaaaattattcaagagtgatactcccattatatccctccatatacacactgacactcactatgatcttgggctctctctctcaatttaattctgaatatgaagtatgagcttagagattcaacattagaacttagaatgagaatagaagaacacctatttatagttgttagtaggtctcatttaagttggtattatagccaactattataactaacagtagcttacctattaatttgataggttaaatgagtttaatcccaacaatttttatagagcatgaattatgatcaaaatctttatttcaaaattctaatgcttacttatttatgttgacccattatagatgcttttattaggttgtttttttatttaaattgaggtaaaaatgaataattaggaaaatgacgtctgtatacataaaagtgacgtatatggtgaatatggatttgggagagatgtagagttgagtgaacatcaatcttgtattttcctttaattacagtacatgtccattttttcatttcttatttgtgtctatgttcataatggccatatacaaatcaattattataaataagggttggattttgagattgagactttaattactaataatggttataattaagaatagatatagataataatacgttctcattctccactactatttagatatatcccatattattcttggtctaagtacgacataagaaaagatgaagcgaccaaacttggtcacttccctattacagtcaactttcctcttctttttgttatccgtttcgattgtatatgctcaacccttaccgcctccaaaatttgatgggtttgtctatggaaaacaccgagtcgattgggatgcgattcaaattgaagcgtttctcgaccctgtttgccccgatagcagagatgcttggccacccctcaaacaagttctagccctctatggagaccgtgtttggcttctcgtacacctattgcctttgccgtcagtaaattttatctctttccttctaatttgggcttctctatctggggtttttatgaaccttaattctaatttttattattagtcttttatttatgctttacccattttattgtttgtttgtttgttatggtttatgatgaaatccctttgttttattgaaaattaattaatttctttgtttgttgaaattgcagttaccatgataatgcttttgtggcttcacgtgctttacacatagttaatggtataagtaatcatcattatacattcaagttgttggagtggttcttcaagtaccaggtttgtgtagttctgatcctctttacataatttaggcccatgttttgaaaatatattctaggcagtgaagctagttttggtttcaattcgttttagcttattgaaaatcaacttgattctttattaccatcatcatcacatgaaaataaaacactttcatatgttctatacatactactgttgaacaggaaaaattttataatgctcaaactcgcaacttgacaagaacagaggttgtgaatgagattgttaaatctgcaacacaagtagttggaagctcctatcttggtactcttgaatctggattcaatgataggaaaacagaccttaaaacaagggtttccttcaaggtactgcagttaaggttactaaagtttaatttggaggaactaatcaaccaaagataaatttgattttgttatggctaatattaaacattgaataattttggtcttgcagtatagtgccgcaagaggggtgtatggaacacctactttctttatcaatggatttcaattacctgatgctggctccccattagattttaatggatggaaaactattattgatccactcattgggaataagaccacgaagaacagtgataatatgcactatttcttatgaaaaacttggccatgaagccttgggaagaataaactctatgctggaaaactgtggctcaatgtttatgttttgtatttgatactgtgattgtgactcctgtagttgaagatttacaagaagaagaatgggctcttagttgtttgcattagaatgtgttgcttattgagcttgatttgctctgctatcctcgatggtaatttctaaacttataataagacatgatctaaagttcagatgacaaattttaatatatagaaatgttacatttgaaagttcacttggttcttttctggttttatcttgtgcttttacaacatggtttcttgtcaatttcaacatagtttgttttgtgatgtggtgttctttgcatcaagctttgaaaacttttattctcaaatcaataatctttggttttggctattattacagtccacagtggggtcaatttcaataataataaaaaggcttagttgagtttttagagattaaagcctcactaccaagatgtaattttcatatttcataggacacagaaaatgggctatattttgactattggtagttttggtctagatttgcaaattttaaggaagttgacaattataagaggtgcttccggacaagtagctgttgcttcatttaagtcataacaacgcttatatatacatatgaatgcagtgcttttttcccttttttgggctttgggttcctcaatgattatttctcttctccaaacttaatcggcaatggtattttagtgtttcattctctatcaaaatagatgacaagccaattcatttgctgagtaagtccatctctattggaaatgcaaatataaaatgtagtctactttataaaaaaaatctactttaatcttgtgtcaatataatatgatacaaattataatacaaatttatcacaatataatatgatacaaaatttgtattgcaataaattttgtggatatcttacacaaatggagaatagacatcaatttggaataactgttgatatagtgtatatgtatattgtcttctagttctaatatgtagtttgatgttaggttcttcaagcaaaattgctatacattgagatggagaagaaaaaatttacatttgatttgaaaagtgttgaaatgagtaaaatggcatgctttagttgtacaaaggcaaaagaatgatacaaaaaataataatttatccactgtaatgaattctcaaactccagatactcctaattctcaagactcctaccagcgacaatatagaaatgatatcaatgacccaagtatcaaaagatctcttgggaaaaaaatcttcgaaggataggaatcacgaaagaagaacaaggcatttgaaatggcaagtgctcgtttatgtgatttgatgtctgaatttaataagcaatctattgaggctcaagaaagaaaattacaaataatggaagagtcaaatcacatgcgttttctcaaaagataatgatgcaaaagaatgaaggagagcaaacagagaaagatgacaaaattagggcatggatacatccaacatggattcacctttgttatccaagttttcagatgagtgacacgcagcgtgttaagggtgtaaccgatccacatcatgagcgacttaagccttccagcatgcaaaggcccagtccaaaccagaggtaggccccagcccttcatacttccagaagcctcgcctccagaaatgagatcctcctgatctcggaggccctttcaaccttctaggagatggagtgaacaacaccctctagagggttaaggaggcgtattcgaaaggagaagcccaaaaggtgcacccaaaagccttcatatgatgacgtggctactatctgacagctgggcctgccaagtcagatgttgtcccctctgccaagacatggtggtgcgtgtactgcaaggagaaaaatgctcatttttgtccaacgacatccctttgacgttcttgtctactgtagttgaacccatgcgtgaaacctgtccaaatcacatgggttttccattgtacggacgcctctgcccaaaagatagcatcttgtcatgggccttaaggtcgtgtattatgtattaccccaataatagccctattttaatactgaaaccctagctagtcacgggtatgcccgaacctgaatctaagcctatataaacccctttagtccttcatgtaagaataaaaaaaggaaaggacacttctgagaaaaacctctctaagatttcttcttcactaagaaaaacctagaaaggaaaatactatagcaagaactagggttcttagctgtaaaacctcacttataatacattcaaagcctctaaaggccaatatactgactcgtggactaaggatttttaatgtccgaatcacgtaaaaatctctatctcctttatttaaccgctcatttaatttcttaagctcttacttaatctcattttcgagaatctcggtaactattttgctactttcattgagagttgtagaaaaaatccaagctacctaacatctacaacaacggtggctacaaggaaaactgctgtcgagaaacctcttccttctggccaggatgttgtcatggacgatgttaatccacctcctccaaagcacgctcaaccgagccatttgagggatggagaagtatctgaaactgatgattagacgcctgaaatgaaccaacgacaagagcgcaccaaacatgtcaaaatttattgccatatagttcgagaaaaaatcaacaattgtagcctcaagatgaaccatgtctcctcacaaaacaacttagttgatatactcacaaaatcactctttccttctcagtttaataacattgtaaccaagatgagaataaaaaatcttcactccaccttaagagggtctagtagagttaccttagttagttaattacggttaagttagttaaagtagttaaggtgtccattctcctctttagcctatataaaggcatgtaacattttaatcaaatcagttaaaattcaatagcagaaaacttttcttttaatgctctgttctaatacactcttatgcttagtcttcttctccaatgtcataatatatatatatatatanntatatatatataaatatatttatgtaagagataattaaaatcatacaaaatacaaattggtgtggtattttcttctgggtttgaaaggaattgagcaagttttagtttgcgttatcattttgtatttgtggaagtatatgaattgttttttctaactgataataagaaaattattattattttatattttcaataaattattaaagaaatattaaataaaatattaaatttttattaagatttataattatgcattgaagtacaataataaaaggtattcaaaaatttcataaaattactttatatgtcaaatataactcaatttttatacaatgatcataatggatcgatagtaacacaaaatcaataataataggtgttacaaaaaaaaaaaatcaataataataggaaaaaaaagggttagaactattataaaataatataaaataaataagaagaaaaaaagaagaagaagagagaaaaaaaaattgaatgagaatttctcagttatttattccaatggggtgaacccctatttatacaaaagtaatgactaaagaaatgtgaaactaaattaatatgtaataaaggaaaatataatcaaatattaatgatgataattaatatggtgataatcaaacattcataaataatatgagaaatttgatattatatgcttaaaattaatttatcaactaaaaatatgctagcatattttgcatcatgcaaaatatacttacactatttttct

SEQ ID NO: 161522 - DNA, 2891 bp, Cannabis sativa
tttttttttttttttgttgcatttcttcctctctaccatttttggctagctagggttcactcctttgccttggatttagatgtaggatctttttcatcatccaattcaagtatattgtatgattttatttaaattttccttgacataaaccttaataaattcaataaatgaacacacaattaaattattaaggcaactgcaatttggctacatacaatacaatatataatgagtttgaacacaatgacatctctaataattgatccatgctcaaattattgtgtccatctttgttccagcttgttgttcttgctcggcaaattgtgttcccaaacccgagtgattcattatcagccatgtgaaactcaagagctctcctcccttactcaattgctttgcatgaaaaaatggtgtacaattaatagcagcatatgacaacatttccacccaaactccactcattatcttccattgtgattcctcattctgtaattgttgtgcaagaatacacgcatcaaacaacacagacttgcttctctcaccctttacagctctcgatctaactttcggtttcatagaaagaatctcccaacatgctttaccatgacacgaaatcttgtgcttgtcgaaaaatctccttgcttcttcacaagtatctgcaaacactatgttccaattccccaaaaccggtgccaacatgtctgatttttcgattagaagatagaacatgtatttcgagatcagctggcaaatgtttttgtaatcaatgccacttgattgttgatcattggcattctgttcttcttcttgatgtccttgacagatacatgtatcgaaaaagcgttgagcaaagagttgagagaatgattgatcttcttctgttgaattggcttgatcattgtagcaaagctcagtagctaagtgccaaagaagaaggctctcagcatattggaactcacctatgctccatttcagtttaatatagcttgaagaattctgcaacagagctgcttctcctctttgtgaacatgcttccattgcatctctcaaactaattgccttcttggatttattcttcgtctcctcgaaaatatgaatctcgagatccttatccactgctttccggtatgaaaaattgtacaacatccttttcatgagcttggacactccatacttgtgaagataacaaactaaattttcgaattttatctcaggttgtaaacaatgaccaattatgtccatttgggaaactgatttggaccatctttttcttcttaatatcatattgggaacatgtttaataaaccaactatctttaaatgccaagagaacccaatccaaaaacataagcttgacagcagagaaagtttcaaggacaatggctccaatgaacaaggcataagtaacaccattttcaaaattaccaaaaccatgttttttctcaatgaaaagaaaaaccaagaaggctaaaacagtggaacaaatagtaatgaagcgaagagagtaaccaagtttcccatgtatgacaagtgccttggtatggagcacttggtacatgaaacagagctcgtattcaaccaatctaaatgcacgagcagcattttcatggaaaaagtaactacgactccactctctatctttagagctgagaagaaaaccaacaataagtcccttaaaggtaccaaaaaaggtatatgcctcttgtaaaagtttcatctcatcaaaatctttcttattagattcttcttcatcggttgagtgttgaccataattgctaacaccaccactcatagctgatgccatcatctctgttatggtaccttgaacctgaacaggcctcactgttgagtagagttgctcagcttctttgtagtcaggaccaggatttggatcaggcaaattggtctctccaaattttttcagacttgccaagcgcaaagcccaagttctctctccaaacttgatgactcctacaatgaaaactaagatattaggccacaacaacctgtttttggatcctctcctgaagagagtaaaaacagctgagagaacttgcaaaatgaggccaaacaagtgtctgatccacagctcgttgtcttctaaagacaatgaagtaatggtatcaggtccgccgagatgcatcaaaagaaaagaagcccacaacgagtaatgatcgtcggttttagtgtcgttgctcttgatgatttgtcctataattgttgcagcaatccagtctgcaaccaagtaaaatccccatacagaccatgcaatgaggttgcttcttgaccattttcgaataggtgccaaaactaacaagaaagattgtactgagaggcttaccaacatggacaccttcagtaactttcccacgctagaaatgatgagtgaagacatgaccaaatctgtttgttggtgttcagctagctctccatcttttttggctataagattcaatttcagaaattcaaaggctcataatagtcatatagtttagataaaatatgacttagccaggtcataaagtagccaatgtatattagaaataataaagcactatattaaatatttctatggctagttaattagtttttatgtaaattaagtgcctaatacattattgtagcatatgtttttagtacacgtttatattatacataaaaatagtactgttttggattggagagtaaccaaaagaaaaaattactaactggaatcttcttcagtggaaagttatgtgtatttatgttttatattcttccatggaaacttgtgtatttatgttcaattttctctcatattttttagagaaatgctaaagggcaccagtggtgtctagcaccttcctatgtgtcaatatcgctattggtacaactaagtatcgggtcccatat

SEQ ID NO: 161523 - DNA, 1911 bp, Cannabis sativa
ctggccttacaaaatcaaaactagtatcagtcatattacccttacaaaactaaaactagttatactggccttacaaaatcaaaactagccacactgattgtacaaaagaaactagccacattgactatacaaaacaaaactagccatattggccttataaaatcaaaaaataagccatttataactagacatattaccttacaagacaaaaaagacacattagcaataaaaccaattgtgctatcttttgaataccttaccatgtgtctttttcctattcaagatcacatctaaaaaataaatcacaatggaattatttttaaaaatgtagttggaaaagaatagataaaagaatttataaaaatcaataaaaggaaaagtaaaagagtaataaaataaagatattaattaaaataagaaataaaaaatgagtatacactgtaatttttttttttattttttttccttataaatttacttttaatagactatagacagttttattttctattggagttaaatattttaacttgttatcaagttcgtgttataatagttttaaattaaatacaatataatatctaccattcaattatagcataatgcctattaaagattattttgtacaagagcttaattagtttttatggctagtgtgtctttttggttttgtaagtcaatatgtctagttttgttaaaaaaagaatttggtattcattaaggttataatcagaattaagtaaaataaaataaaaaagataaaataagcttaataaactctagcttggttgaacattatatggaggcccacgagtttgaatttttatattttattgcttccttaatgaaatttatcttttcttcaaaaatactatttttctattctaattgtttaaatgttaatttatatatttaataattataactaattattaaacaaaattactatatatcttattcgttatttaggccttgtaaggtctcttaattaaaaaataaacattaaattcacattttttctcaaatatgtcattccttagtgaaattcataaataagacatagtcttacttagagtcataattaatcaattaaactaattaattaaaactacaaaataatattatatcaagtagtgtggggaccatgagcttatatattaaatgaaattaaaaaaaaaagataaaataagcttaatgaactctagcttggccaaaccttatatgcccacgggtttgaaatttttaattttattgcttccttaatgagacttatcttttcttcaaaaataccattttcttattctaattgtttaaatactaattttatctatttaataattgtaattaattattaaataaaattaccatttatcttagttattaattaggcccgacaaggtctcttaattaaaaaataaagtaaaaattctcttttcttcttgttgcctcaagtttttcccaaaatatgttgccccgatcacgcattacacgtggaccaaaaggacacctcacctaagaattagtggagacatattcaaatgaacaagcgtagttcaggaagtgagcccccggagaagtgcaatgagcatacccttcctctccgggagcagacatataatacaacatctccgggacaatgaggatatactcgaacaatcacctcgcatttaatgcagcatggggaaaatatcttggaacacctataataggacatgtgagacaacgtaagcctcgtttacggcaattacatggtaattaaagggactagtgacgacttcattatgaagcatcacatcaatcaaagaaaaataaaaattaatctcacctaatccctatgatccctacagcataggttatgcaagtcctattttgtatctcttgggaacttgtgctgtaacaccctaactaact

SEQ ID NO: 161524 - DNA, 1662 bp, Cannabis sativa
tatatatataactaatgttgcagctgtgattcatccatttgtggagttcttgacatatttcattctattttcaatcccactattgacaacaatattaacggacactatctctcaagctacggcatatggttacatcttgtatattgacttcatgaataatttgggtcactgcaacttcgagctcattcccaagtggttcttccatgtcttcccccctctcaagtaccttacatacaccccctcgtacgtattctttctctttctatatattatatattaattgttggcccctttatatatatggtaactaatatttatatatgtaggtttcactcattgcaccacactcaatttcgaacaaattatagcttgttcatgccaatgtatgattacatctatggaacagtagacaaatcttctgaagccttatatgaaatgtcattaaaaagaaaggaggaattgccaaatgtggtgcatctaacacatatgaccacaccagagactatataccatatgcggatagggtttgcagcattggcctctaggcctcaaactgagtactcttcctcaaaatggtacctttggttaatgtggcctttcactctatggtctaccataatgactgggatttatggccatacttttgtggctgagacccaccgttttcataaccacacattgcaaacttgggttgtaccaaagttcaagatacaagtacgtaaacgtgtatatatattaactaattacaataaatgtacacttaaaaagttaaatcatgatcatgataacatcattataataagatatgcaggggccattttattttgggcttaggcttgtgctttggcctctaaatccgacgctagcttagatcaaaaaaaaaaaaatgttaaatatataacattaaatataaattaattaacatatatatgattggcaaacttttattttatattaatattaaatgattagaaaatatttgcataggaccccaaaatgtaattaggttcaaaataattatgtccgtcgatcgaccaaatatattcatgtatatttttattgtttcagtactttctacaacggcaaaaatcatctatcaacagcttgattgagaaagccatacttgacgctgaggataagggtgtgaaagtattgagccttggtctgttgaatcaggtacaaaataaaatacaatttaactaagtttattaatgaatggagtagtgttaatttatatcattttagttaaagctagaactggataattgagattatatataatagatcttgattgccatatatacatttatatatatgtatatataaatgattaattttgatatatgtagaaggaagagttgaatgcatatggtgaggtgtacgtgagaaggtaccctgagttaagggtgaaagttgtagatggaagcagcctagcagtggctataatactaaactccataccaaaagaaacaacccaagtcttgttgaccggaaattttactaaagttgcctatgccattgctttagctctatgccagaagggtatccaggtaataactcttgctgctgaaagttaggtgtgtctcagaatttacattaaaaacaagaccagaagttatgcaaaaaagacaagaaactgcacgtcaaaaaaaaaaaaaaaaa

SEQ ID NO: 161525 - DNA, 6806 bp, Cannabis sativa
  modified_base (5251)..(5256): a, c, t, g, unknown or other
accaaaccacaacaatggtgggagttctgttctgtcttcccatgagacctttaaggaaaggatagagatgaacaatcacccagaaagcgaaaaacaactttccgaacaagggtccccacgattggtaaccgctgttaatagcgtacgagattcccgccacaactcccaccaagttgatgatgaggagcgtggttggcgggatgagcagagttgtccatttgaacaagtaaagctctgcgaaatccccgtcttcgtctgatgcctttgaggtgacagtgaagtttgtgtcgattccagctagtactttgagcaaaccttggaccacggcgaagagatgggctgaaacaccaccgatgacccaaaattgctcgtttctccaccactcgtcgatccctacaccgctccatctcatctcgaggatacccgttgcgaaaatggaaagaaagagggaaataaaccatatacttgcaaggttactaatctgcatttcggaaacaatagggtttgagatttcgagcttttatccaattaccaaaaccctataaaccccccaaattacttgcatacgagcaatgtgggacaaaacacgcacaagtttcaattattacgaattcgtggataagtcgagtgaacgaacctgaggaatgatgaacttgtttgtgagaagacagacggcgggcaatgtacaatacgcgagaagaggaatggaagtgattggataaatggtggtgttgacataggcgaaccgttcgagccatttgagccgaccactgtaaccgtaccaaataggacaatgccgactgagaagaatttcgactgaacctaaagcccatcgaagcacttggttcaaacgatcggaaagattgataggtgcagaccctttaaaggctgcaagcttaggcatacagtaaatcgacctccaaccacgagcgtgcatcttgaatcccgtgagaatatcttctgtgacagaaccgtagatccatccaatctgttcgagcacaagattggttaaaaaaataagaaatttcaaaaatgtctgcaaaagcatttaagatcagaaaatggcacaaacctcatttccccaatctgttttatcttcgtatccacaactgatgacatgaatagcctctttaagaagcgtttcgggagtagcagactgaggtacaccgccgttctccattagtgttgaggctacaaaaacagcagactgaccgaatcgtttctcgaggctcatttgtgacataagcaacgatttctcgtcatcaaatccagcacctgaattgaattgtgaaaaagaaaatgagaccgatttgcaaagatatggttagagaaaaacagtaaatcgaaattaattgtgtaccttccacgccctcttctatatcttcgagattgaaaattggcacggtaggatcagcattcttgctagattttttcttatccgaaccctttttacttgatttcgaacgcttctttctcgaaccacagcatagtgaagccatgacgccagtcttcttatgcttgggcttaacgggtggttcataaccgtacaaggctgttcggttgaaaacacatcccgtacccacataaacgggcccttgaattccatccaaacctcgcaagttaatctgaaataaacaaagtgagaaaataaacacaaaaggcagataaaatgagtgaaaaaaataaactaaaaaccaacttacatcgaagaagacagtgtttcgattggcatatctatcgttcctatcaataccatcgaatctctgtgggaattgaacgtaacaaacgttctttcctaagttgggatccattaagaaacacatggcttctctcaaggctttgctgttgttaatgtaatgatcacaatcgagattcaacaagaagggtccgttggtaagcaccgctgaaactcgaacctgcaaagtgtaataaaatcgaacatttcgtataagaaaacttgcaaaaaagaattaaattgctttagcatttgaatttttcgatacttacaagtgcattcatagcaccggccttcttgtgatgctgaaatccaggacgcttttcacgagaaacatataccaatcgaggtagctcgttgccatcagaatcaagtcctccgctttgtcccaagaaaacctgaaacaaacaaacaaacaaacagaataagcaattttacataacaaggctttcgtagctcccgaggttttccaaatttacgaatggaaatcttacttggatcattcccgggtgatctctggtgttatttccaggccatggggtaccgtcttgcataatccacccttcttcgggaactttctgtgccttagcaacgagtccattgactcggactttgaactcttcatattctctcttcatagctctacgctccttgacaaaagacggttggaccttgtctttcaagtaatcgattttctgagtgaagtaccattctggtgcacgaggctcgatactatatttcttgcagaaaggaacccatctcctagcgaattcagcagtttcggacagagattcaaacgaaagcatagctgcaccatcatcagaaacatagcaggaaaccttgtcaacagggtagtcaacagcgagaatggataacacagtgttggctgtgacaagtggcggctctttcaatgggtcgacagtactgacaaagatgtcaactgcagctaactgtgacgtttcaccttctcggtcatacctgaaatacaaataattagatcttaatttctatagacagatactcttcgaatctaaaatgacaaagttactcgatttaagtcttttaccttaaagcaagcctgtcgagataagtttctcggtttacaggaagccacttgggaaactgatcgagaatccaagagacagcaaaccaaatctcacaaatgacagagattaaccacagagcatatgcatttggcacgggatttgtaagccggtaatgcaagaaaatgcatagaataacaagccgaagaacaatcaccatcctataaggatttatcctcgatgaaggaatagaaaccttcctcgaaagaggctgcctggcttcatcatttctgaaaaaataatataaaaaaccgaatcaacaagtgaaagagaaaaatttagcagttctactaaatcaagtgaagagtataaactcttacagtaaagtatcatcgacgagtacatcagtgctagcatcgatatcaccacctcctctttcggagttagcttggccggtgctcattggaacaacattcttctcttgcttcatcttccaaccatctactctctctttccatgccacattccctataccaggtgaaccgaactccctcacgggatccacaactctaatgtttgctgcaagaatcaatcaaaatctcaataaaatgttttgttatgtttttttcttaaatttcattatttcaaacatacgtgattgattaacatcggatgaataggaatggtgacgcttcccaccagcttgtccaggagatgccatagaaagccgctcaggagaagcagctgacaattcccccgaaacctaaacacaaaacatttcaaaaacattaggcttttcattccaaaaaccgaaactacacattgtagattagatagactcacctcatgaccattggtgagcaatggtatgtggttgtgagaaacctctttatcataattaggagccgtaacatcctctccccgaccatacgtcatttgccagctcaacattcgctctgcaatcttctgttgctcactctggttttcagaagggtaattgaaatcactcccaccatcatcaacatcaacatcctcttctttatccccgagtatagccggactccctaaacaaacattagatcgaaaaacaaagtcagattccaacacattcacttcattaacatcaaattcatatcccaattcaactaaaaatcaaacctttgtgcctcctatatctggttttgcattgaggacaagattgattcccgtcttttcgctcatactcatagcacggtctgcataccgggaaatcgcatacatcacaagcaacaaagggcttaccatccacagtctttccaacaccatcaccacatatcagacagaccaaaccaccaagattcttcatggcatttccctaagttaaaccaaatccaataacaaaaggacaatcatgaatttgcctaaatctaaagcatcatcaaagttttaagtttctagtattttgactatgtaacatcatagtttctaatcaaactaataaaaacatgaaagtacaatgttactacttaccccagtttctccttctgattccattgccaccaagctcaaatgggtcaaattggtagctcaaattgacttaatcagatctatgcatacctccaaatactctcactttcaaaacccagatctgtaactgaaaaagaagatacatataaacatcaaaaatcttatctttacagttggaattaggtacactaaaacactcatatattgtactgaaattaagtatgaataaagattgaaactttaccttaagaaaaacaaaaaactgagctttgtaattagacccaattgagctccaaagccaaattgatcaaaatcacaaccagatctcaaatctgattatctgaaacaaacccagatgctcaaatctcacagatcaacaaaataagtggtcacaaagagagactactgctatgctatgctaagcacagttctttctctctctctctctctctctaaaaacgcttctctctttgtatagctgtagatatatagaaaaggaaaatattataaaatagaaaaaagagaaaaatagcttcaaggggacgaaagagacagagtaactacggtctcaaactctctctctctcttcactactccaccgacagtctgagtttttagagagagaaagtgagaaagaaaacgtacaagaaaatttttgagctttcctttttttttttacttactgtttcttaattcaataataatcaaaacccagaatttactttgctttttttagttgaaaaaatagaaaaagttttgatttttatttaacattaaaatcggtgaagtgtaagataaagacaagggagagttagagtcggagattagatggaaacaactggacaagacagcgtctttggtgcggtcttatagcgtttgtttggtcttttggtgtactttttttatcccttagattttgaccattttatgccacctcatcacaccaaaaaaaattaaaaaaaaaaannnnnnagaaaaaagaaaaaaaaaaagggtctttagacaccaaaataatttgtaaagatttaattttgatttcttagaaatagaggaaataatggtctaaaattgttcaatttgtgtgagaggaaataggaactttatttgacatttattacaaatgtcaacaagaagtaaaaggtaatatttttttttttgaggaagtaaaaaatttgtgtttcttgagcaagaaaaaacttaaaacttttttctttttatatattataaagcaaagaaaaaaaaattataaacacatttttcttttgtcatcctcattcaaacataaataagtaattcatattaaacataaataagacatttttcttttgtcatccaatctaatttttttttttctcatatgattcaattcaatttttttttctttatctcatacaattcaattaataattagatttagaaattcattagttgattcgagccaattaaacttaaaaaattcaatctaatcaattggatttaattaatttttaattagatataaaaaatacacttctgatttttaatattaacttaatatataaaaaatacgtaaaaattaaatatcactatttatttaagtttaatactccataaaaatatcattgttataagtatactgcaattaaaatttcaaaataactaaaataacaacattaataagtaataaaataaaacaaaacatcataaaaacaaatatacaaaacaactaaatattacaaattcaacacaaaaaataaaatctagaaaaatataattaaaatatgtatttttattatacataaataaaaaaaaaattaatatatataaatataattagatcggatcggttattaattagattttgagaatgacatccaataactgatcaaatccaattagaatgaaacttttaacatctaatctaatctaattgcaatcgaatatccaactttttataattagattagattgaattagtttggttcaaatgaattggattggatgttgttcacccttactctcaaatagttattaattaatatttacacaaaaataaataaaattgagccatcgagcatataatgagcctatatgtgtgctcgatagtgtttaatataactcgataactttagtctattttattattttattgtgcgcttgatggttaagagtgcgaatcacaattttttgacttatttcatgacaaaattaagaaaaactatgagaataaacttttatatcatatagacatgattattttacactacaagttagtagtttaccaatttgaccgtccaaataattagccaattattatgtcccaagatttttttatctttgtttgtctttgcaaagatgtcacaaacatgcaatttgaaggtatcagtgaccacaaacatgtattctcacccttttcccccacacccacactgtttaaaagtagggatgagcaacggtcggtttggtcgattttttacacaaaaaattcaaaattcggttttcggtttttatggttctaatccgaaaaccgaccgaccattata

SEQ ID NO: 161526 - DNA, 3611 bp, Cannabis sativa
gaggaccaaagatgtgccatgtttggagttgggccacttaccaattttaccaaacgagtcatcctcacctccccttttatttttatttctcacaagaacccaaaaatcaaaaaggaaggaaagaaattattattatgattataataataataacctataatttgtctagtaggtaagaagagcagctcccaatgcaatgcgccgaacgcaagccctagaagctgtcttgtttccatatgttcacgccaaacacctgcgttcaattctcggcggcttggcctcaacatctcacatgcccttttgcactgaggagctttttctgacttttctagacaacattgagcggtgaaattaaaaaaccgaatgaaattaatcaccactaatatatacacgtggcatagtacaattatttgggaccacctcttctacttctaccacgactttacattttttattttttcctttttttttttaactctcaatctggcttactcatagtttaaagtgtgtactagtactattattatttttcactatactactaatggagttggtttggcatcacatactactataagaaaattaccaaaaacgaaatttgatataggtcacttaactataatgtcggtacaatttgttttaccaaagcagggtgttattgggtgattctgaagggagtagggtagatgcattttggatgaagtacacggattgcttaccttatataactttgcttaaaaagtggtgtgaatacaataacctaaaaaacgccttgtttggtatcttaacctccaacgagaagaaatatatatatatatataaaagaaaataatacaaataggcatctgggaaggttctttatcaacttctttaagtatcttaacgaaaataaattaataattaacttctttaaatagcgtccgctaccggtcaaaatctcaatcgtgggcctcttacttttattttcatcttttggttctatatgtgcttttatctttctcttattacctttcaaaggtgtttttctttgctttcccttgtttttgctttatttatttcttgtttgtatacaaagtccattgcaatttttttttttttttgtgctttaatttaggccacgaaaacgaacttcgatctgtctatatgagggttgcttataccgtataacccctattgcgtagcagcccatttaaaagaaagaaaagagatatatatgattatatgatattatatatatttaacaagataagaatgacgattcccccaccatagagaatatttagaaatattttcctacttttgacaatggacgagttaacttgacaccatcgaagactctagttgcaaaacaagccaaataaatttagctcgtgacttaaaaaccaattacataataaagtataacatataatatgggttttggccatctatcaatattggaagttgaaaccacaaggcacaagggatagtgtctaatcccacatgacgctagcgataataaagaaatacctgttgttagtggaagggcaaagaaataaagtcaccctgaaaacaaggcatggcaaaagagagtggtggaggtggtagtggttggcaagcatggacctaatttgcaaatcaattactcttaaaaaaaaaaaaaattaatctaaaagtggttgatgaagttattgaatcaaatttaattttaagggaataaaccatgacacattttgcatcattgacctatccccgtgtgtgaacaaattagaataagggccatatatcaatgccatataagaaactatagatgtatgtaggaaagaatgatgataatcatgctttgttgttcgaggaatttagacaacaccaaatatctactaaaaatataattatttaataaaaaggcacgagtactcaacttagaaggcgagtattcaaaggatttggcacacagacaaacaggaaaagtaatatagataatgaacacaaggaaattatagtggttcagtcagatcacggtctgtttagtctactgttgcaacgattttttgtccatccttattcatattggatcactcctttatatacaaagcaagtgtcttttttattacacaaaacttaattactgaacagttttgcattgaatatcaacattaaattaagaaaaaacgttaatggaataaatgaagaacagtttcgatctgatttactaaatatagcaacatacatgacctctatggtgcgagttgtctgttcacattcttgcacaagctcacaggcctagggtgcgtgtaggactaatgaacctttgtgttaagatatctgcgtcctagccgagtcgcatatacggataccctgttagtgttgataactcaggacgtgagagtccttaccgggtcatcaagcacgtcaggtcattcggactggctcactaagtgaagaatcgatctttactaattcacaggagaagcctttacggacaacgtatatatcttagtatacgcgagtcttgaacacggtcttcttgataatatgcgccttggttttgttaaggatcacatcatctcgctgagtttagttcaggcaaggttttatccccgagtggtctccttttgacagctcagcaatcctcgaggagagtgagtccacgtgtcatcctttcaggagcctgatctcaagtttctaggtgagatttttcaccctataacacactttgagttggctctgttttcttttgaatataaccacatgaaacatagctgctttgcgcactactagtgaacactgaaaaagaaactgttattattgtaacgtttttgaaataaagagagggcaagattgccctattgctgctatcattattcgtagtgggtaatgatatcacaactttgttaacgctatttgtttgttgaatgaagaaaccacttcattaggcacctgccaaaatagtcaaaaaaaatttacatcagatcaccacactcacgcaacatttaaaagaaaaactaacttagcgagtttatgagtaatgtcattagtactatgattatacaatataaacttaaacaaagaagaaccaccacaaagcttaagaatatcatgcagcacgaaatcgaattccgctaaatagctctcttctttagaaaaatgcaagaccacgcgctggcaatccatcccaatatccacctcgacataccccaatcgaagacacaactgaataccatgcaacacaacaatagtttttgctacagccggagagaaaagaccacttgctgaagttgacgtcgaagccattacatgtccatcatggtctcggatcactgctccaaacccccacccgcctctccaattgcctcaaacctgcatcagtattcaatttaaacctccctacaaaagtaggagaccacgggggaacaccagtagcagtagggagaggatgactcggcttcgaaatcatcaccttctttttgttagcatcctaaaagtcacatgtgaaagtcgaggcccatccaacaacacctttgttgacttcgcttttagccaacgacaatgagtctttttgataagcgataaacgatctgtcgtaataagaatacgtaataaagcaaataattgttagtgtcattattttg

SEQ ID NO: 161527 - DNA, 1090 bp, Cannabis sativa
acacatttgagcaaaacaaatggtgaatatgtgtatttcgtcacacaacccatgatatgatcaccatgaaccactcaaaatctattttgctagtgcgatgtcacatcgtgaatctcattaaaaatggatcaattgtgtgaggagggaaaaaagaataaaattgactcaatttttaaattttcttgatcccggggcaataccacagtgcatggggaacatctttacaaacctttttgtaccaatcatacaccagtggaacctgcatgctcttgtatgctaggttctttttcactgacaaccatttgtgacaaagcttccaccaaaataccctgaccttaggtggcactgccgcaccccaaattaacttccaccaagccacatcagaacactcagatcctttttttcaaaaccagtgggcaagcatataacaaccttaaccatatagtgctcatccttcataaagtcttaacattgacagtctttgttgggtcgttcaccactagtagcttctaacaccaaatctaaatcattaggatgaaatactaccttaaagtaaataccatttcatttaccattctcatcttaaagagccccatcttatcacatttagttatagctgccttcatacatagtgagaaattaagttagaggcctcttaagccatttatttgttgcagttttatgccctaaataaaactcaatttttatataatcttatttactaattaataatgtattattagaagtcattttattaattttgtatatttcttggttcacgtgttacgtactatatgtttaatatataatgtttaccgaagttgaaactaaatattgaacttaagaaataataaaatgcaaaaataaataagatagaaatttttacgtgattcaagtgttaattaacctttgtccatgagtcagtctattagcctctaggggcgaatttgatgagttaacaatatttggcaagaaaccccaaccttgtgttcttagataaataatacaattaagcagaacctagccatatcaggattaagatctattgacctaatatcaactaactcatattgacttagatagacataac

SEQ ID NO: 161528 - DNA, 3060 bp, Cannabis sativa
  modified_base (2900)..(2902): a, c, t, g, unknown or other
cttgacttaatttatttcctgagctaaaggttttaaaccttgaattttcaacatctgaccattgtccacttttgtttgttacagggtctaaaagtataggagtgagtagagctccctttcattttaagaatgcatggattcgtgaacctatgtgtcttcaattagttgagagtttctgagacaattcgagtgaaattgatattccagataagattataaagtgtggtaagatgttagcagtttgggggcataaattatagggttcttcaaggatagaattatgaaaaataaaaaaataatcaaaaaagtaaatgggggataggatactaattgtataagaattcatcaacaaggctaaggatgatatgcttagttctctagcttataagaaagaggtattttgggaacaaagctctaactagttctggctcaatccgggtgacaaaaatagtaagtactttcatacattggaaagctctcaccagaggaataataatttcactcagctcgtggatgtgaatggagattgagtggattggcatactagctggcccatgttatgataaattattttaattcgttgttatatgtccctgatcatgagatggacactattttggatgatattcaagagtctatttctctgctctaaaatgtgtaatttaaaaaatttcaagatatagaagtcaagagagctatgtttcaaatgcatccaaacaagtctttaagctcgaatggtatgaatcgtgagttttattagaagttttggtcaattgtcgggagtgacatgatcaagttagttaaggagtgctttgtttctagtgacttacctccaaggatttctgatactaatatttttcttattccaaaaaagaaaaacccaacttatatgagtgacttatttcctattgtaataatatgtacaagattacctcaaaagttcttggtaatcaagtaaaggtggtgctccatcaggtgatttttaaaagtcaaagtgtgtttatcctaggtagattaatttcagataatataatggtgtcctttgaaatcatatattacctaaagagggaaacaaatggtaaaaaatgttttatggctttgaagttggatatgagtaaatcctataatcaggttgaatgacctatcttgcaagctatgtgttatagaagatggagtttttttttttttttttgcagaaagattggttggcttggtgatgagatgtgtggacttagttaagtaccatattgttcatgggggcatcatgttggccctaccgtgcctactcacgggatttgtcaaggggatcaaatttcaccttacctctttattatttgcgcgaaaggcttctcatcaatgatcaaatggttatatggctctaatatgatttttggggataatagttatatgtattgtcaagccatagaggaggaggctactcgagttttgactttgcttcatcgttttgagattatctctggtcaaaaggtaaacttacaaaaatcgtcaacttttttcagctttaatactcaactggctatgatgacaagattatgttagatcttgaatgttcaggaagcggaagcagataatttgtacttagggttgtctagcattatggaaagaaataagaatgcggtgttggattttttaaaggagcggatgatgaagcatatttagagttgggagagtaaatctctctctctctccctcatgctgccaaggaagttttgctcaaaaccattgttcaagctcgctactatgctcaaggagactttctttcttctgagctgggtgctaatcctagttttatttaaaggagcacttttgcatcaatggagaatctcaaagattgtttgcatcaaagagtggaggcgaaaaagtctattcggattgggcacaacctgcggctgcctttggtaagctcttttattcctaatttcattgtccctggcctcgagaatttttatttgtttggaggttatttgaagtcagaaggagagcttaggatgtagaagtggttaaggatttattctatatcgttgaagactcatggtattggttccatgagaaggtggccgttatttcgtctgtagtgcttatcaaagtgtccaagttcttaaaggtgcgttcctaacagatgcaaattttgatttttgaaaaaactttatggaagcttaaagtcccaccaaaagttaaaaaatttatgtggagggcggtggttggttatcttccatctctagtaagctttagtaataaacatgtaccattacaagtagttttctcagtgtgtgagattttggcgaaatcggatactcattgtcttgtcttatctcttgtgattttgcttgggagtgttggaagatgaaaggcatggaggtggtagggagggatatgggttcggttcgattttggttagaggaggtcatgaagatcacaaattcttttaggttgagtcgtgtgtttatggtctgttggcctttatggaaagctcataatggttgaaagctcaaggaagaggaaatattgctctattgcgtcccaagatggaaaagatcaagttgtgtactaaacaagtttcaggcattaagattaacgtagatgcgtctttgttagatgatgatggaaagcttgggattgattaaattttgtcatgcgtgacgtggttggttattttgtggcagctcaggcaaggtgtttctatggtcgagtgaccctgaaagtggcagaggctttgggtatcaaagaagcatggagctggttgaagacgtatcatattgcaccgatggtgcgaaaaagaggttatctttagtgataaccttttagtcacaacatatttttttgtaactaaatgtgacttttagttacaacaaaatactacttgtgactaaaacatagtnnntagatacaagttgtcactaatatagttttagtcacagtaagtgttatgaccaaaatcacatttggtcacaacaaatggagattgttgtgactaatagttttagccacaaacgttttagtcacaacgtaggaatgataatttgtaattagtcataattt

SEQ ID NO: 161529 - DNA, 7231 bp, Cannabis sativa
  modified_base (7183)..(7195): a, c, t, g, unknown or other
aaaagaaccttcttccttttcaatcattaaaaaaaatacataattatgaagaaaaacatgaaggttgaaagaaaacctctgtataaatgaaaaataccttttgctgaaggaaagggaagagaaggacaaacaaattgccatagttcaactaaaggtccttcggatttttcagaaaaagaaagcgtcttttcagatttatatatgaaacatgactttgtgaaaaatattcatgtatgcaaataccaaagtaaatttggaacggagtcagaaaagcttatttcagggctctcatcctataatcacagtacaacagactcagccggattagtgactacaaactcaacggaagtaaatcgataccaatggtatgtcgatatcgttgtcttcgtcatcctcacacgccacaaccacatccaaatgccgacggtacgaaggtagatcaactttagccacttcccttgcaagatccaccatcttcctgtccatgcggtccttgtgacgcgggaacatactattataaagcaggcaacttccacaggagatgctgtaagcatttaggcctttgttcttcaaccaatcaagaagttcccttagtgttggattgtcatttacaatccacctatcccaaacagtccatttcatgtcacggtgcttaatcaccttcggaggaactggttcggccatagagaacaatggtagtgccaaatttgcaaatgtgtttcggtagtcctctagtttgtggcttccatccaaaaccttgtaaagctccaagcatacgaggcctgttgccatggcagtcgaggttgcaattgcaggaataattcttccagctataaatttcgccttcagcttgtcaacctcaggaatgctgtaatttctggccctcatgttggcaagaccagctatcagatccatgtggtagttagtatcatcatcctgtatgacagtttaaggctcagtaagtaagaattagaaaacaacacagagaacaacctcaattgttaagggttttagaagagcagtcagttctacaagactatttataaagaatcacaattatagaattgcagtctgtatctaagattttaccaagaagaaattaattttatgagggagaagagtattgaggaaaattaaatggaagaaaatattttcctaatttagtgttttgtgtttcttttttattatatttataattgttctaaatctaaaatacaaaggataaaatttttttctttttttttttgcaacggttgtttggttgcagactaaagcattggcttttccaccattttggttgaatagccattccctcctatctaagagggaatttttttcactccatattaaatcgtgttataagactattcccaattttccctgttctgattacttccaacctaacattcccattgtagccaagcattcaagataaataaccaacaacttgagtctagttcaagtggccaatccagattagagcagaaaactagaatttcttttttcaaattaaaacagcttggactgttggacagtatagactctatcttcatcttaaagcccaaattatatgcaatatatcctattgaatgttcatatattaatggtggataaaatgcgatgattggtgtgattttatcaaaaaaaaaatggacaacagtaatataaataaaaaaatactactaaagtgagacagaaacagaccttctcaaactgaattggtttcattttatacccgggtgccaagttggctcggcaatgttccaaccttgaaatcaaatcattaattaccagagtatcatctacagatgcagcagaattaatattggtagccttctcatcggtctcaattttgacaccttcccttggctgaaactcaggaactatcactctatcaacagcttcagccaatttattagggttgctagcccaatcaggaattggaatgccaaatgtctctgctcgtaatattgatgctgccataacataatggaggtgaccaggatcagaggctgagaactgcagtggctgagggaaccgcttaggagctgaccaaaatggagccccagtactagttgcagcattttcaggaaaagtaaaaatcaactgcttcacacggttggagaagtaatcttcaaacctgatggcgaaaatgaacagcatcaggtgatgatatagaaaagacaaaaaatctaaaggtaaattaatagtttcaaaatcggaagaattactttagacgagcccaggtaatgcaatcttggaaattctcgcatttctctttgtcaagacactcaagaacacgatctaatgtatccctggcctgggcatcaccagcattcctcattgcagttgcatattcacttgggttggacagatacgcatttacttcagcaggggtcttctcaaccaaaccctcaaattcagatcgggcccatgtcaagcagtggtcaatgttgtgagggaaggagtgcacggtgcacattggtgcttgcttctctggtggatcccttgaggcaccataattctctgttaagtgagtaatgaccatctgggtgttgcatttggcaccaagagttccagactcaagaagtggcttttggaaatataagcacctctgatccacataaaggcgagcattgacattgtctagcgcattgattacaacattcacattctcccagaaggtgtcattgaaaacattttcagtttcagagcccactcgattctgcaaggcttcaatattgaggcgaggattgattgaagtagccgcagaagcagcaactgtggacttggcctgcccaatattccaatcacgaaaaaggaattgccggctaaggttactcttctcaattacatcatcatctgttattgtcagcttaccttggttcccacatgaaacccccatcaacgcaacattttttaagaactcacaacccagtgcaccagatccaacaatgaacacaatagcatcctccattttcttctggagcttagacccaaaaactgaaatctgtgcatcatagcgactatttaacggtttaaaatcactggagtctagcggctctgttggaagtgactccaccgagtcaaagtagaagaactgtagggggaaaaaaaggttagcttcaaataactggtaatgcaaggaaacattaaaaatctatttttaaagcacaaatataatgatcttgaagcactagatagttttgttagaaacctatttttcaatttactaagatttgcaagtgaactaagatataaagtatcaattaacatttggtgaccaaaactagcaggcaatgctgaaaaaaaatcaaataacactgatttagcggattggagtgggtgagccaagctcatgccaaatccatgccaaaaaacactgatttagcggattggagtgggtgagccaagctcatgcaaatccatgccaaaaaaggggatagccccaaattgggagaagcattctaatatcaatattcaataataatgcatacataattacaaaaatgacccaaagaacaaaatatcaaaataacataataaaatagctactaatatttgattacaatctcctacatcaaatgttcaccctaggtaaactgtcaatctagccatttaatggtgtgaactgtcacaaaattgcaagcccatgtttcacatgggtgaccatggaagtttacgaattgcaaataaatgtactacagtttgcatgcgtattagtttaccatgtatatactgattcctatcaagttccatatcatgttgacagcccaaaatgtaatgagtttatggcatctctatatcaaaaaatataccagcatttttacattataaaacaatgaccgacaagatattagaacatctaaaggctaaaactaatagggagacaagactggatattcacaaacctggtagagtggatgaaactttccagagcaagcttttaccacttcttgtccaacaataccaccaaacatggcagccatagggttcagtactgcccttgcaccaaaggcaaagtgccgtagaatttttggatttatgtcttctaatttactatctcccaaactttcattgatgttaccagcaattgatacaagcttctgagcatcctcctctgagcccgcaacagggaaacgacccaaatcagatacgaacttatctagagcttggaacgccaagtgtagaaggggtggtcgatcaaatttggagaaatcactcaaaagaaaatcaccaggatcactaagtgcttccctcaatggcttaaacttcaactttttgggctgtttcacctgtgtaacaataccacctctctcataggcaccaaaatttgaggtatcctcctcaaggacgaacgaataagcccttgaactcttaatctttcttggttttccatcattcaattgagtcatcccccgaacttctgagaatataacgtaatccccatcctgaaactcgagtctttcatcatcgacacatgatacaagagcagggttgtcattgctaatggatgcaataataccactgtggggctcttctccatcaacatcaaaaacagtaaactcaggtccaaaatcacaaaagatagagccaaaaagacccctgacttcagatttaatgaaggcaataggaggttgatgattatgacagtaatcattgaattcaatagctttttcaagaccaatgtcagtgaagacaacagcctgcaatacagaaaataaatagatgaatacagtccaattagcaatgactgaaaaacaaattggccacccaattccataagtcatatgaacctgtattgttttgaaaattatacaaccttggaaaactatcgaccaatacaaaagactaaaccgcgataatatgtaatattaatagtaacgctgatggaaaatgctgttgtatatatatcaaatgttgtgatagattgatagagtacaaatgggtacctgaaaattagaaagttgttccttggtcaaagttgttgtcaaagtttgcacagcaacagcattgttgagctcttgcaacttttgaacagaagcaagcgctctgttcttaccaacatcattctcagagaaaataaaattactagacaaatcccaaagctccacattcccttcatcgtgcaaagtcacagacttaacaccagcaagaatgaggttcttcgctgcattgcagaaatcatgttagacccatcccagtcgtacataacaatgccaggcacaagttaataaatcaggtctgcaactgcagcattataaagtttacaaaaataatttctttaaaatgataactagtaaaacccgtgtatgtcctatcgaaaggcctcaatcaaaatccttatgaaattgatactaatataacaacacaaaattatcccaaaaaataaaataaaataggtacacaacagaaatgaagtaagataaaagtaagatacgtaccaatctcggcaccgagaccctgcaacccagagataagaacgttcgacgcgaagagcctccgcatcgtgtcacggccgtagacggccaactgccggctgtgcagatcctcatcgatatcggcgggatcacctggggacatgttgagcgagaattggtgttcctccttagctacagtattaccactatttaagttattatttccgaggctgctgttgctgttgttcaccgttgattcggcggcggagacgtcaccgatccgatgcttcttaacaaaagaggtgtcagtactgttgttaatgtcagtctcttctacttctacaaccactccttcaccagctctctttcttggaagcataaagttcagtaagctgctgaaaacaccaggaaaagcacatcaccaataacgatcggcgcccaccgccatttctaaccctaaacccctaaatcgcgcaagatttacaagaacaaggacaaaaataaaagaaacgaaacgaaacaacaactacaaaccagacaaagaaacaaggttaaaaaaacataccgattacacagcgatgagaataagaagaaatgaaaccggagttgcaggtagatatatatatatctagagaaagagagagagtcagaaaagaatttcagcttcagattgtcagattctgctagtggcgaattcgtctacggaagaataatcttagctcgatgaagagtgagggagtagggagagagtgaaggaaaagcctgagcggttcatatagtggggtttggagagagaagcgaggggtatttatggatttgcattttggtctagggttttttggggagctgaggacaggagctgaatgtggattaagggtaccattaacaaagagagaccgaacaaagagtacaccgcaagttcttttgtttgtttgttttttttttattagttgagagagagagaaactgatttatttatcatatatttaaaatttaaatatgcaaagaaaagttttgtaaaaaaaaaaagaaacaaatatgcaaggaaagtgagtagccagcaaagtcaagggagaaagagatatggggcgagtggaaaaatcaaatgccccaatgtgcatcgtggcttgcttaagtggaaggaggcagcaggtgtgtaacgtcgtcgtattatagataatattcgcttctcttctacttttttgtttttagagaataaatcggttatatattaaataatcaaagttaagatacaatagttaataacgcaaggagagtatcctctaactaaatacaatttgtgtccaccaaaagaatatatttagctaatatgtgagcatcagtatcatcaaaattttgaatattagttagaatacaatgaaaattaaaaactacatctttagaagattgtaattcttttgctactataagagaatcagtttcaatataatgtattggaaactgcaattcattcagccaccgaagattgtagaagatcgacatagctttaagtatttttggcttgtaacatcgtttaaaaggcattgaaatcgctaccaaaagttttgttaagaatattttactaggatttagatttactaacaagtatgttgattgacatcctaaatataaattctctaaaacaatgaaataaacacataaaggtttaagaaaaccttacattggttgcatcgaaatataatgactcattctattcaagatctctagcacgtgactcatttctgtagtagagcattatcaannnnnnnnnnnnnatctctttctctccttcgggtttggttaccaccgtc

SEQ ID NO: 161530 - DNA, 6615 bp, Cannabis sativa
aatagacattttatcattttcaggtatttattaaataattccaaatttacaaaatatcctaaatacttacaatttacatcacaattttttttttttaaaaaaaaacaattataactttttaaataccaaaaatatgataggtataccgaaatataataaaaccgaaaaattgtcaaaataaaaaggacatttcagaattagtgggccaatatggtatagacggcccattaagcccattatggtatataggtgagtattgagtaatgcaagagagagaaagtcataacggccacatcaaatcctaactgccaaacgaacagagcagtgaccgcgtccactctctgcaccgcgaaactcgccagctgtcggtccttatgggtccgtctctatataaacccctcaacggtttctcctactttccctcaaaccaaacgctttcaactttcccgccccaccctctctcctcctccttcaaaccagatccttcagagaattcccgagaaattgaacggagacttgtttgttttctcagagaaaagaaaacaatggcgactgttgcattacctcctcctcaacctatcgagcctcagaagaagaacagaatccaggtttccaacaccaagaaaccgctctttttctacgtcaatcttgctaaggtataatgtataagcttttcatccattacgaatttcatttttattcattcgagttttcactgtttggtttttcgaacatgttttgttggaaatggctgtgtgtttatgagaaatctttaagttcgtacctgtattatttgaaatccatgtggtttggatctttaatttgtcaaaattgatgtagatatggctttgaaatcactttttctaatgcctgtattgtttgtcgatggaatctgtaccttacagagataatgatttaaacttttcgcttatcgcatcttggaactggcagaatgttgtgattttcagtatgtgtttacaagccattggttttcttgaattcttatgtgcaagaatttacaagttatatagctaaagaaagattgaaaagatgctattattattccttgatctttttatggatgtgaaccttttgatcgaactgatgttataggtgtaaattctctgcttgctttcacctgttcggctttttgataaattttgaaactgaagaatttaagattaatatcttcgatgtatgttcgcttaatcgagataggattattttcttaattacctttctcctcgatgatcaaattaataactattctcagcctttgtttgaattcttgaaaattttccaagatttgatgcttcatactgcagaaattcagattacggtttgtgattaaaattcttattttttgatgcagaggtacatacagcaacacaatgaggttgagctttctgctctcggaatgggtacattacatttgaaccattttccgtacatactaaatacattcattacaatgtacaaattaaagattttgattttaacttcattgcagcgataacaactgttgtcactattgctgaaattttgaagaacaatggactagctactgaaaagagtaatgaacttgtttttgtgatgccatttatatatatatatttgatacagattaccgatttaatatttattcgttttaatgatgagattgaacagaagtttcaacttccactgttggcatgaaagatgagagtaaaggacgcctggtccagaaagccaaggtgggtcgaagaagaaataaaatctcatattactattatgtatcttttcgttaattaaattcaaactacatgttctttggcttatgatatattctttcatttactgtagattgagattgtgcttggtaagtcagagaattttgattctcttgtggctgctgctactgctgcgattgttgagccagaaccagagtctgagccaaagcctgtgcaggaggtgtctgagccaaagacagagcagactaatgatgaaaataaatagagaacattgtagagagaagccttttcgatcctttttttttttcgttcttttgggtagttttaacattttcatcattctttgttgttactctctgcctaactagagagattgaaatagttaggtaagtagagaataatagcaacttgaaatgaatggcatctccaattgcacattctttgctgtactttactatctgttgtctcattttctgtgagaatgttgtaaaggttttctctggcgtcatacagcatactgtgttccattctggattttgaattaccgaacatgtatgaaatgtattttgttctttttctttcaatattgaattttacggaattgtgacgacttagctttctgctttcaattttatcatcttggctgcttttatgtatataaacccggttataagaagtaaagaacattgttttcaatctattaattggcacgttcgaccttcttcgatcaacaagcaaatgagcaatagcttgaagtaatttccaatttttagtggtttaatttcaattttagtgagttattgaatatgtgtatgtgaaacgagttttcactatttttaggaacaaatatacgtttatttttgcttgaaaaccctccaaagctgaaaatgcaaggggttcacctcccaaaagttaacaaaaccagcacaagaattacaaagaccccatttcgcaatggcataagcaaccaaccctattgaaatttgtaggaatccaaagcacatcacaattagtaccgtgaagagaccagagaagtttggagaagcagccattgaccattatatgcacagccagagtcaacactaacagtctgagaaaaaaggaaaaaactggagaagaaaacaaaatttaacaactcacccaataacaacaacacacatcgaatcttcttcctaggtttgcatttgtccataaagttttgatcattgtaaggtgttgacaagagcagttggggtatggaacccttctcactttcttcttcgattatgcaataatggtacatgacgcagatggggaagatgacttgagcagtagggtgactttttattttgggattttcattatgtttttattttaattttggatttctttttttattatttttttttttttggttttatttatttttatttcgataaattgaaattttatttgttttaggttttcaatccatcgtggcatgactaagctgacttggattgtaccagccaatttggcacttaaacggagccaaagtcatagaatagtaatgagtaaaatgtaaggtaggtttagtaggttttaccataaaaaatttgatttatgtggttaagtattacaaaatataaaattaagataaattaggattctttgttcaaaatgcactcaaagctcaactctcaaccatattcataataagtgtaggtactaggttatttttagaagcaaagtcaaaacttaaaattcaactaccttgtaaatttttccaaaaaataagttgtgcatattagaactttttatcactcataaaatatataatctcactattaaagtccatacaagacttaagattttttaattttctctcttgatgggggaagaagagaatagagttgctcttgttttttggagaccatactacaaatacataccttcatacttagcttattaattttaaatgtttttaatttagttcccaataaattcaaaatattgcttaaaatatctataatgcatgatactttaatattcatgatctacaattattaaaataattattttattcgagtcaaactttaaatagcaatacaccaatagtagtgtaaattaagaatatagtcaaaatagatgcacgagagtcaatagtggaaaaacaagataaattgaaattacaattgcttgaagaaatcaaacaatgtaattcaatgtttcttagcttcctctcttttttaatcagatgaaactaattttttcttaattttgcttcttaggtggaggtaatatggtgaacaagaagaagacctatacgctatagaagaagaacaattgctctaataagaaaaaaaaaatctgacctcgagcagaaaaaaggaaaaaaaaaaaatctgacaacaattgtgagaaaataggaaaagacagagagagaaagaatgaatcatgatttattttgatgagtgaattttgaatagggagatgcccttttttttataggtatcatattatttttatatatatattttttttatgaaaacttgtgctagaaaggaggagagaaacagtacagcacaggagcaacaaactataaggaaggtagaaaaccattttaaatcaactcattatctaatcctagacctatccttgccactttatgagctaacagattacaatccctattaatatgacaaacagttaggcccagactgaaagataataagtttttaatgctacggattacatcatccaaaacactgttattccaattacaagattgaaggttatccactattgatttacaatcagtcatcagcacatccaccggtaaacgaagcaattgagcccactggatagcctgatgaatagccttggcttcagcaacagcatggggaacaagcccaaaaaaaggagtagaaaaacctgtcttaacccgattacaaccatccatgagaaccactcctatactatgtttccttccattagaatcagtggctgcatctgtgaaaattttgaagttacttgaaacagatggttgtgcttgtgatggtgctataagaatagctggataaatccttgccacttgaccctgctgcacatccaaatatttaaaaaaatatgcaagactccaatcataaacttccttaggaggaatagagaactgtttatgacaagtgttattcctttgattccataaagcccacaaaaaacaatataagataccaatagtctccttatccaaaccttggacaagacccataaaaaactcatccatttccaagtgtttattattatcataatatgtaacaaacctggaagatcgccaagcctttctggatctggagcaatctagcatagcatgcttggtattttcaaggacaagtttacataaaggacaaagaggagaatcaatcacttttctagtaaagagagaaaatgcaactggaagagcattagacaacattctccaaacaaacaacttgatcttaggagggataacaaaagaccaaattcgggaccaaaactttttagaagaagatgggagatcctgagaggaaaaagccaagtgataagcagacttaacagagaaaatacccgaactttccctttcctaaatcagattatcattgccataacaccccgaaacaggaacttcatgaatatcagcaatcatggaatcatcaaaataagaacccaatttagtaacatcccaagtaccagagtcagtaataaaataggacaaaaaccatgaaggaggatggacattattagtaaatgatttatacctatgattgggatgatcacttagagttctaattccactaccacttcccactttccaaatgattcccgaagccaacaagtctctaccccataaaatgcttctccaagtaaaagaagggttatgaccagggacagctgtaaggatagaggtcagggaaaagtaacgagctttaaggatcatactaagaagagagttagggtttttaagaatacgcgcaagcttgcttagctaacatagcttggttaaaatgtacaagagaacgaaaacccaaacctccacagaattttgattgacaaaaaaacttccaggatttccaatgaattttcttagattccccagtagaaccccaccagaatttggccatcgcagcttcaattcccttgcaaagcttaacagggagcctaaaacaagccatcgcataagcagggatagcctgaattatagctttcaaaagaacctcttggccagctctagagaaacatttggaggaccagcttcgaagaacagaagcaactttatcactaagaaacgaaaaggaatgatatttaaaccgagagagacattgagggggacctaaatacttacaaacaaaaggcctatcttccaactgaaaagtatcaaaaaatatattacgaatctcctgtacagtattcagagaaaagaggattgaagatttggagaaattaatagcttgacccgaggccctagaatagatatgaaacacctcttgaagcgctaaacaagaacttctatcagcagagcaaaaaagaagactatcatcgacaaaaaaaaaacaaatgagatatggagggagcatgcctaaaaacagagattcctttaaggagttgagcatcttgtcgaactctaaggagggaagacaatccctcagcatagagaataaaaagttaaggggatagaggatccccctgcctgagaccccgagaaggcttaagagagcctttaacatcaccattgacaagaaatgagagagtagtagtagagatgcacttcataattagagtaacaaaactaatggaaaattaaaatggtacatgatactctccacaaaaatgccatttgacacgatcaaaagctttagccatatcaagctttaaagcagcccagcccctc

SEQ ID NO: 161531 - DNA, 1177 bp, Cannabis sativa
aaaaaaaaaaatcaaaatataaaacttaaaaccaactttcttaaaaaagccaatagctaaacatagaaaccagttacctaatacaataaactaaaaaattaaaatataaatataagacatgaaaataatgaaaagataactgaaattaaaaaaccaaatgattgaaataaaatcacagaaattaattacgcatattagctaattaaaaatatgacacaaagaaatttgttatgtaaaataactaaattaaaaatcaacatacaagaactagttatatgaaataactaaatcaaaaaccgattctttgaattaactagattaaatcgattcctaaaataactaaataaaaaaccatcaaaaaaacaactcaaataaaatacacttatattaccaattaaaagaaaaaaattggttactactatacactcataaatatcaagaaatatatagtataaaaactaacatatgggaaataaatctgataaaaatgtaaaaaattaaaagaaacataccatgtaaaattttattaagaaaagctaccatatttttgtaagacacaacaaaaaattccatgttttatatagtttccaaaaataagaaatgatacgacccaatataggccctaataaaatattacgaaattactctaatatttttgaaaagttgaaaaataattacaaaaaattgctcatgagtaatttgtagtgtttatattgcatttggaagctatgaaatcttaatcttatgatagaattttggtaattagataaatgttaaatttggtgtgatttataagaaaaaactacaaaaaatgctatatttgtaacaattgtttacgaaaagatctatatttacaacgagtttgctactctatttgcataagtcgtatttttctaagttatggggtttagtgtaatttaagagaattgaactcaaaaagtgtacattagaaaatgggagaagttaagaatacccacttattttatacattaattagatttatctttaaataaaatttaatttaaatatatatttttttatgactattgtactcaaattatcctcacatacactaagagataatttcacaaatacacaaaacaacaaaaaaattacaaaaatacggtttcacagaattttaaacatttttacgaattttttgattttatttacagaa

SEQ ID NO: 161532 - DNA, 6836 bp, Cannabis sativa
  modified_base (6603)..(6603): a, c, t, g, unknown or other
taataataataataatataataagacaacaaaagatgttgaaatatacctctgtctccatctttaaagatgtctttctagccattactacagcagctgtctcttgatcaaatccttgcaccagttcctaaagaagcagacatatttctttccacatcaatttgaagtttcattttgaacacataaaacaccataaagtacaaataaagaacaatatatcgactctaggctaaaaattgcaggaagaaagtatcatgtaattgcaaatctagctttaaaaagaaaggtcttgctaacactttttatacgtatttatgaaaaatgaaatgaaaactggagatcgtctcaaaaaattgctcaagaaaatttccgactttgttgttcaataaagtatgtaccgaacgagcaaaatatgtgagtcaagaatcaaatatggacaataatttcgtggaagaattattcaactatgatgtgtaataaatagaaatgtgacttcccttgaagctgtcacctaagaaagaatcaaggtagccagattatcaaacatatgagagaggcactactctcttcctttccgttatgattatttgggaatattgcttacttattcattccaaactaagaaatcacatccaaatacaatatgttttacattcttggtaaaattgaaatagcaattaacttctataaagtacaggccctgataattttgaagcagtgacccaactaaccaaaagaaaaagaaaaggctgaagaccgtacactaaattgaaaataaaaagacagttacgaaatgtacacacctctgagcttatggcagtatctatccatgccctagaaacagtggtaactcgaagcatcatttgaccgtctgtgttttgatacctgcagagccaaatgacaataatcaaatcgccatgcaaaaggagtaaaggcagctatgcaaatactttcacctaataaatagatgatgataccctatcatctcttgtaaatctttagtatttgtttcccctttccaatacaatttttgtttcttattaagtaaaatgacaacctcatttttacctggtgagaaattgcaaatacagctgtggatttacagctcccggtgtatttgaccgatcacttgatgacaaatcaaagaacactgtcaagcaagtactcttgtcaagaccgcacatcttccattcggttgtatttccttcaccaattgtggtatcagcaacagaaggccctttctgcaaaccacacaatgaagaaattaagtcgagaatgctagttttggatcaaacatataattaatacacaagctccgaaaattaccatcatcaaaaaaataaaatctaaccttctctaaagaagtgacgggaccaattattccctgaattttgatgtccttcgaacagtttatctggagtgtaccactggaataaaaaagttcagtaataagcctcacgttaatagattaaaccacgcgtaataattggaaaatgtaatagtaaaaaagatgagccccatgtttacagttgcacactctcaattcaaagctcacaaagcgaaaaataatgtagtaaaatcacgttaagccaaacaaagaaataaaagatgtctaatggtaatttcataaaatttctgctatcattggatgaaacaactctctcaaacaaaccaagatctccaactcacaaaactaatataataaaccagattcctctaaagtagagcattggcatcataataatactatgtttctcataatgcttctctcgactcaactccataatgtttctcataatataatgttgtataccaaataaaaacaatcctacaaacataccatcatggatggtgaaaacttactaaggtctagtcagttaataaagaaacaaacaaattaaagaattacaatgtcaaatgagcaattatatgattatgcaggagagttaacaacagagcaaccgacatttaatacctaaaataagagtaaagctttaaaaacatataacagacaattgaagacaagtggcaagcattataatgtttcttaatgactaactcacttgaaacaaaggccaagagattgttctcctccttcaaaaatgcgcttaaatgaatctttaaatacagagtgaccaaaactttcagatagaacaacaagaccaccagttttctcaattgcaaccttcatttctgcaacaccaacctatgacatagcaatgcccaatagttatttgatagtcaatagcatataatataatataaatttatttaataaactaaagttataaactaataatacttcatagtttacataaacaagacaattaaaacaatacaattctcttaaataatcatagatgcagaaatgtagcatctgattatactgctaaattgtcatcacttacattctagttaagcacaagatcaaataaaagctacattcttggttttttggtacataccaggttttcgttacacatacatcacgctacattctttgattgattaagatttcataaatgatactgtaaaacaattcacaatgattgctccaaacatattctttggttggtggaaattccaaaaatacttacaacaaaatgtgaacaaaattgtccaaagttttctactaaagtagttggaaatttatggaagacttcatacaaaaataaataaatctgagtagttaagaaataaaaagagttacaaactagacacaaaagattctactcttttggcaataaaaagacgatataacagaatactactacagcttcagcagagacaaattatatgatcacaaaatagtgaaagaaagtgtgacccaacacatacctgatcaagggcagatgcgaacacatctaaaacatgaccctggctaacaagctgctttccaagaccttcataaaatttgactgctttcttaaaatatggtgcagcatctttgtccagatctttatgggagcgaactggatcagacaaatcctttgatacaatctgcaataatgttgaaattcaaatatatatatatataagatgaaaaagtgatcaaaagtaagttaaaataaagtaattcaaatcatttcaaagataggaagcacaattaataaacaaaggtattgctttaactgaatattactacaaacataaagacacagaaacacattgaggcatgacttgtaatttcttagcacaacataacgttcaaaatattcagcctatacaatcatcaaagctaatcatgctggtttgtagtcttaattcaggtactttcaactacaattgaagcaaactaggcataatggagtaacatttcaaaaaccaaaacaaattgcccagactagttgtatggcaataatgtctcctaacaattagttgcaaataacaatgtctcctaattcctaagcaccccataaagacataaatcataagaagattttaccgatccaggcccttccgtgcatggacctccaaccaaagcaacaatgcgagctccagtaccaggcaaacaagctccaagcaatcccgctgcaacactcaacgccaccccagtgcaccgcgaggccctgctaccaggtggcacaggccactgatccgtttgcaactcgtccaatacctgaatttcaacccaaatttccaatgttcaagactaattactcaaaattcacaattgaatgaaagaaaaaaaactaattaaattaaaaaaagtgcataccgaattgagtgtatattcgcaatcagaagcaggcaacaaaaaccgatcaataccggaaccagggaacccgttttgaacaggtttcggctgatagccaccggcggtggcccctacaggtctcctaccgggaatcccaagacccaattgttccaaaacctgttcttttggaatctccttattacctctaaaaacatagaccttagacatatcactgaaacccaattcatgaacctgaacttgagtaccaaacgatacaaatccaacaagtgcattctccggcaaaagtccaatggcccttaacaatgaagatttaacaaaccccatctcctcctcaatcatacaagtatccaaaacgaataaaaacacaggcggaggtaaattcgattgcgaaacaccaccactaacaacatcattagggttagcagattcaggaagaacatactgaaccgtagtgtattgaggataaagctcaccaggtaaattaatatcagagatcataccataatgaggaggaaaatgattcctctgaaaacaaaaaggacagatccagatcttagcagtgaaatcaacacgagcgtaagggttaagaaccgaagcacaagtcttacaacggagaggagtataaggaagagaaggaatgtcaggatgaggtcggatcggagagatgcaagccgcgagtggaatcacgcacttgcttgcttcaaccttggttcgtggccatgcgttccaggtcatccgtactccgtcgataccctcgggatctgtgttggccatctccgacattttttttttcctgaagagaagaatttggggattgattggatcgttgttgattatataatcaaaattgtgaatttgatttggattttgatttggatttgacctatcaaagactgaatcgatgaagaagaagaagaggatttctttctcgatttgtattcaacgattctgaattaccagaaaatatatatatattttttctttctattatttgtttttaaatttaactttatcatatatatttctacaaattagttttattttatttatatactcaccataataatagaattaaagattttttttttttctttcaaaaaaaaaaagattggattttttttatttatttttataattgaatcaattttttttttacaaaaattcacataccaactcttttttttaaaaaaaaaataataagcgtattcgtacaattaaataaataaaattacacttcacggtcattacataaaaactgaagaaaccggaatagtaccatacaatttctaaataaaagtccaattagtcacatgggcagcaaaattacaagttctactaacatacacgaaattacagtaaataaaagagggtgatgacttaaaacaaaaggagacatagtaactaacaaaacaatttaaatcgtaaacaaaatttacataacaactcagatagaaagggtaactcaaaccataaatttaaagaaaaaaattaaaaagtagcataatataaaaggcaattttttttatataataattaatatttttaattttaattttttaattgttaaagtataaaaggtgaaaagtatataatttgcatcaatttgttaactaccatccaaattaatgtaaaagttatattttgaaaagtattattaatgagccataaaatttaatgggggtcttaggtgcaaattaaaattaggtcttttactaaaatgaaattatcaatcaatacttcaaaaatttaattttcaaaaaaaaaaaaaaaaaaacttcataaattttaaaataggcaaaatttttagaatagtgtgtaatgagaccacaaaattttattatttttttaagtgttaaatatatatttgctcttagtttattattatgtatgttatacattataaaaaaaatatttatatattatatttaaattgatgatacaaaaaaggtcattttaatataggggccatgtataatggcttaactaattatttaatgtatattcaaccattctgaattacaagaaaatattacttttttttagatgaaaatattacttttttctattatatatatttttacatataattttttaaatttatatttctacacattaattttattttaagaaaaaatttattaatatattatacacattaaaattatataaatgttggttcaatgaaattagatcttatatcatatcacatcaatcgttcatacggtggttaaaggaggcatgaacacttataattcttgatagggatgcatgttgggtgagttttttcaagtttcaaatttgtgttttataggtaccgaacatgcctgtgtgaaggactgggttttcgagtgtcgagtccaggtgggtcaggtgcgggttgagacgaatataatgttgaatattttaatgtgtcaaataacaatattttttaaataacctaatctcataaatccaagaagtaaaaatattaattagtttaataataatccgtatgaaggactgagttttcgagtgtcaagtccgggtgcgtcaggtgcaggttgggatggatatagtgttggatatcttgaggtgtcaaataacattgctcttttttattgaactagaataacagtgctttttaaataactcaatctcataaattcaagaagtaaaaatattaattattttaataataataatttacagtgtaaatacttaagtttaactatcagttacaaaaaaatacctaaatttaatttttgacgttaataatacataatcaagttattatccacgtgttattttcttattgatatatttaaattagtttttaaataaaaaataaaaattgaattatcaataaataaaatttacaaaatatacttttattttttgtttttaaanttaaaaaataaaaatagttatagaaagcatttttattttttaaaattaaaattttaaaaacaaaattttactttaatttttataactaaaaaaaataattattacatagaaaatatgaattgacactttatttatatatttataaaaataactccataaggcgtggacaacatttataccttttatgtgattttaattactaaaatacaacttacactatcacttacacaatc

SEQ ID NO: 161533 - DNA, 6703 bp, Cannabis sativa
  modified_base (5632)..(5645): a, c, t, g, unknown or other
ttgtttgtaaaagcccacttagccacatcatcagccataaaattacaagttctgctaacagaataaaaattacaacaataaaaaagccaagagagtcttttacaaaaattagcgtaattctcaatatcccaacgaaattccaaatcattgagtgaattgataaccatcttataatcactctcaataataataaacttacagctttcctctttagccacttccagtaccaagcagcaagcagccgcttcaccacaaaaagcatcagagaactctaatctagctatatgcatctcgcaaaccactccaaggtggtttctagccacaactataatacacatgctattcattcttactttaacatcaaagtttagcttaacccactcaagaagaaggaagccaacttgcaacctgacacgagaatagagtgagggaaatagaagcactgtaatctacataagaatgataaatataatcaatacactaataaatatttaagctctcttgaactttgaaatctcatacttacacattatcatcatcacacttaactttttttaaacgatgtgaaattaacatctttctcgaatttacttttacaaattttattttaattaattattgctcgtgtttatcttactcatttacgatcttcttagatccgacatcaataaaactcttttaacactatttttcacatgttaaattttgttaaaattgcattagactcatttcaaaagagtgtattttataactttcctataatattttatctcaagtagtcttcttcttcttcttcttgagttgaaactgagtttcataaatggaagaacgttctcctttcaaaaaaggttcaacagttgaggtttccagtctcgaagatggcttgcgcaacgcctggttccccgccaccgttctccaaccaccatcactacccaccaagaagaaaaccaatcgccgctcaaactcaaagatgaccgtccaatacaaacacatccttgcccaagacggaacctttcttgttgaacaagtccataccttcttagtcagacccaatcctccttctcttcctgataccaaaaacccttttcacctaaacgacgtcgttgatgcattccacgacgaaatctggtggactggtgtcgtcgttgatgtccgaaatgatgatgattatattgttagattcattttcccacctgatgttctcttctgtaaacgctctcagctccgacctcattgggattgggctggtcggaaatggctacgcccccaaaagcaggtattcttttttcctggtttgcattttagggttttctttaaagttttcatctttgtactaaaattactagttttagctgaaaattaatataatgtcaaaactatctttcctaattatgattttacttttggaaaaatagagattgcttttctgctttgtaagactacttagttgtctgatcattcttagagttgaaacttattagcaaatgattagtattactattaggttaatggatatggattgagaaaatagaattggcactgtctaaaatacctcatttcgaactacaaatggattgatccttcacaagaaacaagaaggtatgtaggtagttcggttaattaaatttacagaatttagctgttttcaaagtttaatatcatcgtgattggaatcaaagtgttttctttaaacaaaagagttgtaattgagggattattcttataatcttgaattttgaatgggtcgaacttaaaattaataaactcttatgtgaaattgtgttttgcatttatttgtaatattgtgaaatttttgcttaacaatgttaattttcttttcttttttggaaaaaaaaaaatgattgttcacaggaactaaagtatttaaaattcagatcaggaacagctgtagaagtgaatctggatcctgacaaaataatccctgcatggatgccagcaattgtgattggggaaattgatggtacaactactgttggggtgaagtgtaagagaaatattaaagatgattgtgagcaagttgtggtagtagaaggggacatgattagatcccaacctccagaaatcattgatgtttttgataaagattttgaggtgggtgataaggtggatgctctttgtgatatgggttggtcagttggagtagtcactcatcaatttcttctacctagaaagtatattgttaaatttgctcatgggatgaagaccaaggagaagatgtttgatcacaatgaactgcgttatcacttcgattggggtgctgaaaattgggttggcaaatcagaggtaatgtatataaaagctcatgttatgttagctattaattttaatcttaggctggactgaaattgaaacctttgtctgtgtttcaggagaagttattatcgaccccggtttcaaaaaaaaggaaaatcttaaatggaagtcgaggttatgctactcgaaaacgaacatcttgttcaactgcaggtatggattaatacttctcggtttgcttgttatgtatggtaaagaacagagaaataaagtagtttcactatgattttgcagctaaagctaaggtgtctagaacacagaaaaatgacaataacattgctaaatcgaaccaagcagaagaaactgagcctcaaggagtatcagtcttcgagaacacgggcagtgtggcttctttgcaggtattatatataatatatgaagccattgtgatatatctcatctgaaaagataatcttgagacttagttttatacttacaatgattttgattttgttcctctttagtgatttatcttagatttttcagtgttccttattatagtttttctcctttgaattaaggatggggatcaaaataatacgaatatacagcacctgtctcctgacgatgatgttgctaagttaaaccatatagaagaacttgacaattcgggtaggttagcagagcgacaagaatcaccaccagcctcaagaagcaccagtctagaagcaccagcctccgagaacacttgcggcttggcatgctcttttaaggtatatttgaagctctattttgatttacatcaatatgtagtgttgcttatcatagtttttcttccgttgatttaaggagggggatcaaaatcatatgaatatgaaggatcaatctcctaacaatgatattgctaaaccaaaccaaatagaagaacttgatgattcaggcaagttagcggaaactcaagaagcaccagtcttcgagaacactggtagtgcggcctcttttcaggtatatccgaaactatttttatacaccataaaagaaaaaatcttgaggctaactttataaggtaatttacatcaatatttagtgttgcttatcatagtttttctccctttgaattaaggaggctgctaacgatgatgttgctaaatcaaaccaaatagaagaacttgatgattcaggcaggttaccagaaactcaagaagcaccagtcttcgagaacaccggtagtgcagcctcttttgaggtatatccgaagctatttttatacaccataaaagataaatcttgaggctaattttatactatgattttggtgttgattttgtttaaggtaatttacatcaatatttagtgttgcttatcatagtttttctccctttcaattaaggaggctgctaacgatgatgttgctaaatcaaaccgaatagaagaacttgatgattcaggcaggttagtagaaactcaaggagcaccagtcttcgagaacaccagtagtgcggcctcttttcaggtatatccgaagctatctttatacaccataaaagataaatctcaaattttagtgttgcttattatgatttttctggtttgaatataggagagggatcaaaatgataatattggagccatttgtgaaatagacagaaatggtgaacaccacgacggtgcagtaatttaaattatcattttctaaacttgaataattctattagaaattcttctgacatggggttgattttttttggtttggacaggtaacaatgtacaacaaagctctcaaaatcttcctatggagaaaagatctgcaatctgggaatttgttgattcattagaagtgttcaaaaaattaccacagaatcctcaagttcagtttatggcagctgccaatgatgttgagcttcaagtcatagctttgactagtaaggtaaagtttgcatacgtaattgacatgatctcgaaattgaatgaagaaactactacaaccgaaactgttgattccttaataaagcaattgaacaaattgcaaaatatgggatttgatgttgagttgttaaagaattatctaagtgagtttaaaagactcaaacttgagttaaaagatgtcaaaacccaactcatggattatattgggtattaacactaccaaatgagaagtcattttgattttgatctgtattttgtttaagtgttaaggatgaatgtaaattatgtgtttatgagaactttctgtagctttatttcatagctagggtgtttgtctttgtagatattgtagttattaggcttcttctaagtataattaacaagttaattttaagttttatgttaaattatattccataataattgatggactaatatgcctgtcatttaaaacttaaaattatacataaagaccatgcttttatttagataaaaaaagtacttgtattttttaaaataaaagaaatatacattaataatattgttaaatctgaacttttttctttcaagcttcgaagttgacataaaaagtgaaattatgaaactaggtaagataaatattgatgatgatctaaatcatactctcaagaacattggactaatgtgtgctttattcattgtagttctaagtcaccacttcaaatctattcaaaataaacaaataaatgtacagctagaaaacatatatatgaatcaaattagtattaaggaggctctaagttggattaaggagttacaatcttagtaaagaaggaacattattgtcgtacttcactcgtgtctctcctgaagtggatgaaataattagtattaaggaggctctaagttggattaagtctcaaggttggcactcgcttacagttgaaacggattgtcttattgcagtccaagcaatacatagtttcgtttgcttaccatcctattttggcttcctggctgctgattgcaagcaattgcttggtgatttatcatttgcttttttgaattttgttaaacgtaatgctaataagattgtgcattttcttgctcataactcttgttattcgacaattcgtatttttgatatattcaactcactttctgagttgataaacattataatggctgattctctttaataaagttaccatatttctattcaaaaaaaaaaagaacattattaatattattgtttttttttgcgggacaaagaatataaaaccactaatatttgagacaccaaaaaatttcaccaactatcagacaaatatacataattatatagagaagatatggaagttttactggaatccctaaccttcaaacgtataaaggtcggttctgagttgaaatgggcccttattataagaataaataatatttttaaaaattnnnnnnnnnnnnnntatatatttataaatatatatttaacctagggtcgtccctgtatacatacaacaaagtaggaggtttatctgcgagtcctatttacaagtgaatagttgtcttgcaatagtaacttagtataacatatttctctatttgctttcactattccaaaataaccttttatgaagttgattggcgcaattgactactactcaaatgaggcgcttgttttgaatcgacggtaatagaaaaactcaatagcatcattttaaaacagatgctaataattactatcgattacaaactaacactatttaaatcaaaatgctacgttttgctaaggaataagcatcgatgggtcctaacaatgcttatagcattagcatcagtttatagcggagacactacatttaagtattttagaatttaattaaattttcaagtatttatttcgagaaaaacttgtattagaaaattattttaccaataacatttatacattttatcaatattcttgtcgttcttttaagttattgttagtctattatcaaagagtaaaagaatcatacatattaatagattaaataaactttattttgtaaccatagctatgttagttaattggtaatttggtattttagtgttttatgtagtacaaatccacttgaaaaataattttgttttatctaagaccaaaatcatttggtcttttctatcttttatgccttctttgggattgatataacataacatgacatattttgttttctatgtatattttagaaagggaatatacctaaaagaaaaaacaaaacaaaataaatcaataattcagaagaatcttttcttcaccatacaaaaattatttaacactcataataatttctaacagaggcacagataattatcacttttaagaatctattgctccctcaaatatcacatgatcatgaattttctcaacttacagtgacacctcatacaaatcaataaacacaacattctcaaacccaatatatatatatatatatatatatatatacatgtgtgactattcaatagttacatttttatt

SEQ ID NO: 161534 - DNA, 2091 bp, Cannabis sativa
gtaaaataattccaacaaaaacaagtttcattaaccccaaaaagcccaaccttgaccctctttctctatctatcggtttcactctcgccagagtcgaagctgtccatgaaacaagttgttgttgatatagtgtggtgtattcaagggggttctcatattcttcggttatcagagtttcctcatattctctatccctaactatttcatctcctttcagttggctatcatattctagcttgatgaaaagatgaggttggagaagtgttggctctgtttccactatatatccagggcacggtattcagtatgtttgtaatgatccaaaggtacttcaatctatttttttcttaatcctttttctttcttgtgtaattatatgtaccttttgctgtttttgttttttcttgatttgttagttaaagtattactgtttttttgcaatgtattgatttggagcacctgcatacttttctaggaagaaaaagatgaaaactaagagtaaaggaaaatgattctatttatttgaatgaatgaatacaatagagagtgagtgagattttatatgtataagcttcactagagtagaaatcagttacaacacaactaattagctactcagcagttcattgaataacaactaactccatctcactatagcaaaactataactaacttcacctaactatagcacacttaatactccccctcaatatgtggaatgaatattttgtgactccatcttgtttatgagtatttgaaattgagtgggaaataatggttttgtcaataaatcagcaacttattctttagttgaaacatgaactgttttgatcactctttcttgaattttttccccttacaatgtaacagtctatttcaatatgtttagtcctttcatgatagactggattggctgcgatatgttatgcgtcataatgaaaaattgctggccctttttaattgacttccagctccttcaagattgaacacatccaaacaatcttgcaagtagtatttgccattgctcggtattcaatttctgcaaaagatcttgacatcgcatgttattttttgcttttccaagagactatggactctccaagaaagattccaataccctgtagtagatctcctagtgtttggacaagctgcccaattcgagtctgtgtaggcttcaagctttatttcaaacttcgatgataggaaaatcccttgtctaggagtacctttaacatactgcaaaattctctctactgttgtcatatggatggccttaggagttacaaggaattgacttaatttgtttactacataagacaagtctgtgttattatgattagatattggagctttccaattatctttctatacattgttggatttgccaatcgatcatctttggtgtcttggctgagtgttaagttagcctccatatgggagtggtgactagttttgatccaaggtgtctaagatcttcaagcaatcgaaaagcataatgcctttgtgaaacaaaaattcatttggctgatcttgctatctccaaaccaaggaaatactttaagtcaccaaggttctttagtttgaaattgttgttcaatctcactttcaaaacttccaactgaggcaaatcattagaagctaggataacgtcatctacatacactagcaatatgatgaaaccatttcaaaaatgctttataaaatgagagtaccagtagttgagtgatgaaagccctcttcaattaaagcattgaattttttttcaaactattgactagaagcttatttcaagccatataaacacttgtttaacttgcaaacaacattagatggcaactcccccttaagactatacccaggagatagagtcataaagacatcctcatgtaaatcaccatgaataaaggcattgtttacatcaagctggtgtaaaaaccaaccattaatggctactaaggctaagacaagcttgacagtagccaattttgtgactggttgttgtgataaatccaacacacaagtatatgttgtcgggttttgtgccctaaataaaacccatttcagtataatcaaatttactaataaagatca

SEQ ID NO: 161535 - DNA, 2022 bp, Cannabis sativa
tgctgagactgtgatgtcgaagatatatgcatgtcaggatgtgtcgctgaatgatgagaatgtgcaagtgaaccttgaaacatgtgagtttgagacggttgaggcgctcgagtggagtacttactcttaagcatattaaacattgctaactttgcaaagtccatatttaatgggtcgatttgtgatgaaaagagattaaacatagcaatgtcatttaccgaatcttatgaaagtgcctgtgattaggtagattgggcttgactagttgaagatgtacccttcaatctacggccaattctattagtgtttagtcttttagatttgttttagtttaaagcagatactgccaattagtgatgtaataaggcattgttgccaatctcattaataaataaaattgcaagttattttcacataatgatgcagcttgtatgattattattgaatcaaattttaagcctaataatggtcaatggtgtatgaggttatagtgggtgaccaagacataaaagtaacacccatgtcataagataagtgaccaagaagtgaacttacgtagtcactttggggcaaccacacccatacatacactagtaagtaaaaatgcactctcgcttaagtagatataaaaaatttaaaattttaaagcattaatgcattactcaacgttttgaacaacttatatgtggtaaatagttgactgtaaataaatgcctatgttatgcttacacatagcgtggtacacaccgaacaaaagtacatgtaaagtcatatataagaataaaggccaaacaaaaagattaaacacatgaatgtctcaaaaatataaagtcatgggaataaagactgccagacagtcataaattctcgtaaagtactccaatgtcaagatacaaccataataaagtaaaagcatcaaaggggatcatcaaataggtcaccagaggagctggggccaataacaaagccctcaaggttgagatatgagtcggcctgggtcagtggcgcctccttcctctggtgcgtttccttctcttcgtagtcacaatagtaggctaacatacccatcataaaactggacatgtagctaaagtcgacctccttgttatgtcgccaaaagttgaagaaaacgtcattaaagaaattatcagactcggccatgtctcaagacaaggcctcacattcatcagtttttgccattagggcatcttccaaagttttagacttggcagtgcgtgactgttgttccttggcacgagcatctttctcaccagtaagctcatcctgaaggcactcgattgaagttttcaattccttattctctgaggcagtctggcggagtgtgtcgagctcaagctcaagagcagctatcctctccttgtcacgctcattctcatgggcggcgaccctagactaaccatagtaaactaccaacattgcctgtaaaaaatcatagcatttaagttagaggaagcataaaaaaaattattgaacaaattcaacacgggcaataaagaaaagttgaccttggtcatttctcggcacccgagagccactacctcgatgggtgagagatcgttaagtctcggcagtgtttggtcacattttcccataaggtcttggacatgtgcacggttgacctacaagctagtagtcaaagccaagcaatgacctgctaatggcaaggccgcaatcgagtctgctacaatcgaagctgcgtccaagtctaaggtaacattgagcatccccgcagtagaagccacctttctagacgggcgtgaccgagaggaagaatacacggttacacgataggcctacgcattggggccaaaaaaagaccatgttctcctaactttgctgggctgagaacttagagaagtggatgaaggagagccccccttcttcgggtaggtcgcctgtctcaatatgctacttatatctactgttgaccgaggttttcggcaaccaataaaataataagagtttaaagagctgtaagaaattgagagagggattttttta

SEQ ID NO: 161536 - DNA, 4679 bp, Cannabis sativa
tgtaaaaataaaaaagtctcaatttaaactatattaatattttctctctattttaaatatgaatgcttgtttaataatttagtgttgatttaattaatgcttgtcatatttttaagcttttaacattaatttagactaaaattttttaatctttgaattacatatatttataatcaaatctaattatttgagcactaaaaattaacaataataaattttctctaatatatatatatattattgatggaataatacaataaattaggacttgagagaaaaaattgatggttgttctgccataccaatactaggacgatagaataaatttcacagtagttgaagctttaacactttaaattattgcttgtgatgtttagtgaccaaagtaccaatagaagaagtaaaggcaaactcaaagagaatagtattttttttatgcagaacaactattcatttaacaaagaaaggcccaaaagcagttacattagtagaaataaagggttctacctctctcataccaaaaacaaccagtaaagtttgatgaagcatcccaagcacctagcttatgagctacttcatgcagaagtctttgtttcttctgaacaaaaaggaattttattcaaagaacaaacaaatacaagctaggtaaaaagccacaaaaacacacagcggcaacatctgcaaacagcagcagccccaacccaaactccctaccaatttttaattacattaattacatacttatttctggtacaatctttgaagggacccttactaaggatcctaagctgaactattttccttatctccatgctcaatctactaggagtagcacaacaaagatcaaagatgcaagtattcctatttttccaaagaaagtacaaagtggcagccaaaacagcattccattatcaaaaaaccagaccttgtttcatgttgcagcagctatgaatcaactcagcagtcgagtttggccaatgaaagtcccctagccaagtattaacagcagcagtaacctgtgacgagaagctgcaattgaaaagtaagtgatcgtgagtttccatttcagcttcacaaactgaacaaagatgacttggaatagccataaaccgttgtaagtaatcccgagtaagaagatgggtattagctatctaccaataaatgaacctgtcttaggcacaacaagtttgtcccaaatagcccctgcaaaatcagccttaatcccttccacaagcagattataacatctttttgcactgaatttatttcccctcatagcttgattgagaatcacaacattaatgctatcccttatgttcaaaatcttcttgaagtaccaacttgtatcaaccttcttcaagcaattccgtatgtcattatccttcaagtaaatggaatttatccatttgacccacagacaatccgccttgctagcaagagcccaaagatacttagccaagagagccatgttccactttttcccatcctgaaagccaacaccttcgaggtttttaggaaggcaaaccttgtcccaagaaacccggtgaagcttacttctattccctaaaactccccataagaagtcccgacaactcttgtctattgctgccgtaatcttggaagggagtatgaagatactcatccaataattccttatcccaagcaagaccgaatgtatcatttgatctcgccctgcaaaagaaagatttctacttgcccagcagtttaggttcttgttcagcttatccaatatgactccacaatcggtagccttccctttggttggtctaagattgactcctaagtacttaagggggaagcttgcctcttctatttgaaccaagtccagaattttagatttatcctcttcactaacccctccaaagtatatgtgagactttgaggtgttagcagacatacctgtgtcattgcagaacttagtgaaagcttcactagtaagcctcactgaattaatattacatttacaaaagataaccaggtcatctgcaaagcacaaattagtcaagcgaaggtgcttacataaatgatgaaatctgaaacccttttgactagaataataacttaacaaccttgtaagatagtccataattagaagaaagagaagaggggacatcagatcaccttgacgaaggcctttttcccctttgaagctaccttgaattctgtgtcgttgagcaacaaatgatagttagtacccttaagacaagtcattatccacctgataaaccgagaaggaaagcaaagtaacttgagcaaatcttccacaaagtcccagtccactgtgtcataggccttactgaggtcaactttcataatacacctagcagaaatattcttccttgtatagccctttaaaaggtcttgaaagatcataatattatgagccaggagtctatttttgataaacgcaccttgattgttgttgacaattgaaggcaaaatttctgagagtcttaaacaaatcattttcgagatacatttatagactgtattgcagcaagtaatcggtctataatcctttgttgaagaggggttctccaccttaggaattaaagaaatggcagtctcatttaaggagtggggcaatcttttggtagaaaaaaaaatccagaaccgctacagaaacatcatcaccaattttattctaaaggtccttgtaaaaacatgaaccaaacccgtctaacccagggcttttagaggaatgaatgctaaagagagctttcttaacatcccctttattgaagggacgaatcaagctaacttgttgctccaaactcagacagttgccctgctttatacaagtctcatcaatagaacttactgctgaactcttgctacccataaaattttcgaagtgcttcacaaagtgattaaccacctcctcgaaatcgtctacaattgtatcccccttcatgaaattggttattttattttctaatcttcttttcctcatagtagcatgaaagtaactagaattttcatcatcaaacttgatccatctgatcttgctttgctgtctaagaaactgagtcattctatcctttgctgtcaaaaaattctgctgagtttcattgactaaagttccagaaaattatcattaggattcgaggcagccgcctcttgaattttgcaaaattactctttcgaatctccatactacaacatcccccactttgttcctatgaaaaacttttaaggcatgtttgatccgaaacaacttcttcattagacttttaagaccaccaccaggtgcctctttgttccaacagtccatcacaagctgagaataacctagataagaaggccaatgattcccaaatctaaaaggcttaatccctacattattctgcacatgaaaatgaacaaggcaataatagtgatccgagatgacctcccatttgaagcaagcattagagttaggaaactcattcaaccagatattgtttataaaaactctatctagcttggaataaattctatctcccacctcgtgtttattagtccaagtgaagaatgaaccccgaacttttgaactcctcaactagacccaatgctagccaagcttgagcgtccacaatgtctttattctgaatagaccttcctccatttctatcttggaaactaaacattgcgttaaagtctccaaaaataatccaaggctcattaagattaccaaaactcgcaagattgtcccacaactctttacgggtctccatagcattactcccatatacaaccgtgataaaagcactctttctctgcccattgaattttattttgcaatgaaccagctggttagattcatgtatgatctctacttgaacaaatttatcttgccaaataagcaagattctcccaacaataatctcactcaaataacagctccaatttggaaagttatcctccatcatgccttcaattttctcatgttttattttttcttcaaacaaagcaccaaacctaatcttattcagcctacacacatcaagaattgcaacttgcttttcttttttattcattccacgcacgttccaccctatcatattactaacttccataagcaattaaatttggattagtaaccaaagtctcatcctctgctgctgctattaacacaacatagccattatttgatttcgccacttctatatcttcctttgtttctctattcccttcctgtcgtgaagcctttctcttaggcgtgatccactcctttccatgttcagtaataaccacatccatcaccctttccatcttctcagcatcatccttcgattgattactaataccagcttctttatcctctgtcatcccaacaattccccctgtttcactttgctcattcaactgatctttcttgttctctttgtcaacagtaggtttctttttccacacaaatttcttctctttgttacagttagcaactgtatgccttaacttagcacaatatgtgcatttagcgggcaaccattcatattctatcccttgttccaccaattgctttttttttttcattcataaaggaaattatttttggagggtcaccgatatctcaatatccactaaaacacgagcaaattcaccatagatctgttaggttttatgccctaaataaaacttcatttcaatgtaatctattttattcaacatcaataaag

SEQ ID NO: 161537 - DNA, 2270 bp, Cannabis sativa
atgtgaaaaaaaataaacattagtcctcggtttggacgggtgaacccgactaaactgacgaattcattgggcgggttgaaatttttttcttaattgggcaggttgcacttaaatttttgtaacccgatctttacattggattaaataaaatataacgtaaattgaccaaaccggccgacgtacacccctaattattcatgtcccattcgagaacaatattgtagaagatgtttttactaaagctttaactttgtttttactgtttcagtgattgtttatgtacttaaccatgctctccagactttgatatctaccaaatcatgcccctcaaactttgatacgtactaaatcatgccccctaaactttcatccatgttagaatttttttactaaaattagaaaaaaagtccttaaatcaaacaatcttaatagttcagggagaatttttaacagctaaaaaagttcaggaaacatgatttagtacatgtcaaaattcgagggggaaaattactaattagccttaaaaataagttaaaataatatacaaaataattcccttaaaaccatattataatattattttttgaaaaaatttatattgaaattaatacaacttcatttctaaaattaatactagataccttgttttttttttcttcgtaatggaagtgtgcatatatagattacattgccataactctagtcaaccgtcattttatattcaatacattagccctatctaatctaatacaccgaagcaatcaatttaaacacgtcaaaacttcaatgaagatcataccttattccctacaacatcattattgttattatacctaacaatatctactgatatagtattttacgattaattaatgatattttttttaaaaattattatattaaattacatatatatatttatatatatgacataatacttaaagataccgcgcacaaataatatcttttaacatgtctattaaaattatcttaacaataaaaatctataaggctagtataaaaatctatacttgttttttttagttttgtaaggctagtatgactagtttttggttttgtaaggtcagtataattagttttaattttataaggttagtataactagttttagttttgcaaggctaacatgactagttttgattttgtaaagttattatatatggctagttttaattttataaggtcaaattattctaataataacacatcaaatgtagtgtagtcaccgtcagcaatggagatgagaataaataagttctagtatcattagagaattctatgtgactatttttataaaattttcatattttattttattttatttataagagaaatttcattttcattaaatatttattatgtattaattttttcctttttattttgtaggtgctttattagtggattggaaatgacaactcttagatttgaggtttttttttccttctgatattatggttttattgtctagttctcttggagtatctctgcaagaaaattctcctctggttgcgtaactttgttacctttattatttttaacctgtatcgattttctttaaaaaaaacaataaaaatctataaattgaaaaatcttctaaaaatggaacgaaaacatttttgaaacgtaatctaactacgaaagagagagagatctacgcctagactagagtatctcacccaacgagagaggaacaaggccgaaagaaattgaaaaatgaatattatatttcttcttttgttaaataaatattaaatatatgattcaaataagctaggaaatgctatatatatatatatattcattatacccttcaaattaatatccgtgaaaaagggtacaataatgaatttttcaatcatatactgtacatggagatgtaaagctaaaatattatagctcatttaaaaaaaatatgtatatactccaataatataccagaaattaatataaatttagcaaataaatattgggctaaattaaagacacgacatttattataatacaaatttacaaaatcataaatacattattttattgtttgcattcatactaatttttaggagtgttcattatattacatccaatgtttttaggcttatctatatccgatccaatcatatattagatgttaaattttaccactcgatctaatccaattaatttcgtcatccaatcgatccccaacatccattggatgttggattggatcggttttatccattagatgtatttcatatatatttatt

SEQ ID NO: 161538 - DNA, 5789 bp, Cannabis sativa
  modified_base (1048)..(1051): a, c, t, g, unknown or other
aggttctactgtatatatatttaacctctctatttgtggtctttcaatctctaaaacttgatcaaagaaaaaatgaaagaaagtaaacgtataaagaagaggggaaaaaaagaattgtgtcgaggagacaaaaggatgaagctaagccaagttttatgttatttttcttgtgctttccgcaatgttgcacagaacatgatagggtccccaacccaccaattatttgatggttaggattcatgcattaagattagtatgagtgtgttataggctaacccaacattaccaacccactttgctacaccaatcaatatcttagcattataatataaacaaatgttacattagttagtttaagcttagtgctaataaagtgtcaattggccgataatttcggcctttttgtgctttgatctaatgagtatattgccttgtcttgtcatctaaatatgaagaagactagtttaattgtcttatgacaactagaccaaccaataatttttaagagctgcaaattagagagaaagagaatccaatactttttaaacaagtactatatactttattattaaccctttatataataataatcttctttaaaatgaaaaagagagatgagacaggatggtcacaaagttttatgagaaatgtttcttttgaatcatacaaacacatattattataagcattgctcttctaggtagcctattttataaatctacagatttagtttaggcctagtttttgtttaactacaaacaaaattgtatggaatccatgtcttaagtaagtgtgaatgttttttagttcatgggaaaaaagactaaggtgacatttggttggtggtaattaaatagaatgaaaaggaaagaaaaagaaataatttttatttcatttctttgttttattacattttaaagtattgaaatgttatttcaataaaataacttttccattttttggtagaatgactatttcattttgaaatgaaaggaatgatcattcaaatacaagatgagaaaaattttaataatttttttatcaattnnnnttatgcattttaaatttgattccatttctattcttattctaattcccattcttatatttttcattccccccaaccaaaccacctaaggttttatttggttggaagtaattaaaacacaagaataaaaatagaaatagacaaaatttaaaatgcataaaaaaaattgatataaaaaaaaatcaccttacattgaaatggttttttttttttttctatttcaaaatggaataatcattctaataaaatgatagaaaaatcattccattagaatgacattcccaatactttaaaatacaaccaacaaaagaataaaataagatgattcatttctattccattccatttcattaacaaaagcaacctaaattatatagctctgtctcaatgttatattagaatgaagtgaaattagcacctttacacaaacaaaattccaagaagaggaaaatgaaagattaaaaaaccaaagcactgagtaatgtttttatatagtgctaattaaatctgtttcttgtggataacatgttccataaaggtgctttaaaaagccactatcttcatctttttttttcgcacataatcaaagtctcttttctatgccaaaaaacacaagaacttaatcacaaacatcctatcctatgacccctaatctacttacttagataaggcatctgtaagcagaagaaggaacaattgggaatctaatcaaataaagttacaagggcattaataaattaatgtaagagatttggagaatcataggggaattagctaaaaaaaatatatgccaagaatgatggagcatctgggatgtatcccattctgcctaatgttaaacaattaaacagtgttatgcaccaatgatatagaaattattcatacacatcttctcatccattaggaagaagcaaaaagaaaaaggtcccttgtatgactttgaagacatggggggccatatatactcattatataagagcaattatgtcacttgtatgccactcacaaccgtcagttttctcattctatttcatgttgttttttctcctttttcttccattgatcatggcatccagtcatgtttgaggagaaaagaacaaaatggtcccgtgggggaccatgacaaaacaagcaaagaatgtgttcactttactaacatttcctaccttctttatcaaaaataaataccatatagggtaaagtaagtttattcaagtggtagagataagagatacacaataacatatggtataaagtagttgccaaacattatatgcaattatgcaccatgaaggagtgtgagtttataggagcaaaataattgcaaaaggaaagaacaacttcaacattttcgacaaacgcattcaaatcagaaaaactaagactcctatagcttcataccgaaagcataatagctatttagttgcataatcaagtaatcagcacactaatatacatttagctaatcaaactaaatttcactccaactgttgaaataaactaatttacctttgtctctgactatgtgctgagtagataaatctgttatcataataatcataatgaaaataaaatgttgttatgatgtaaatgcattagggaaaacatttcaagatctgcagagatatttgacaactagaactgaaatgtcattgggtttaattttgtttacgtcctgaattttataatcaacttataagttggtaatgcctcttgttatcaaccttgtcatgaaaattctcaacaactcaatctatagttctttttaagtataactttctttacttgtacttacaagctaatgagagaaaatttgacagttagcagtagcctcttggtttatgggttatgtttacacatgaagaaaatgaaaccctttgaaaattctcactgtatataatgggccgtgaaagagatggaaaagaactgtaccatctattgaggacagacaatgttgaccaggattgagtgccacaggctcccgtaacatcaaattattaaattcaacatgaattgagggctgcggttaatccactttctccaagtatatagctgcaaatttaatgctctcattggtcacatggacaagggtaataacattttcctctctctactccttctagccagtgtatgcctagatattctcagccttaaaagaagaaagacgcccaagcaaaagatgaatacagaaagccgaaagtgcttgaaatgcagggccagataggacgatacaacaagcatggtgaatactaaggcccaaatgatagccacagcaacgtcatacctgcgtatattagcatgaccaatacacatcatcagtgtttcactcacttaatgtaccgatgatatggtacaaactctcaaatcaaaatttaagacaaacaatttcaaagccattgtttcagaacatgataatgcaaccattcaatcaaattcagccccatcaagtttgtatgttaggagcattatgtaaagatagtcaccctataagccacagaaacagataagcatataatgttactcattgagcccaacagaaattactgctataaactaagagctcaaaataagtgttaccccatcaagagattttcaatattcaattgatggttataatcaaatgaatgatcatacatttttataagattatcaaatgaaccttaaacctcagtaatgtaagtggaacgggcgaggatgatgtgtggataccaatcaaagctgcaaccattcctaaacatttatggcatggtagcacttgattttgtacaactaccaatgttttcaatggttaattttagggaatgaaagtaaatcttcagtctttacaaaatgttataattaactaaccataagccatcatacaataagcctgggggatctttttgtttacttggaaaataccatatagtcaactattgaaactctccatccaataagaaagaaagcgtcaaaccacagttgagtaaagttgaaatcttccaagatggttatagtcaaaacataatcaatagggtttgcaaaaaaccctaaaaccccaaatttgcaaattccaggttatcttaacaagtgctatcatacacgatttaaacaaaaaatcaaaaacgaataaagacaaaaatatgcaaatatagcagccccaatttcttgaaatgggggtcgtaacttaacaataatacttgtacaatagaagcaagaaatgagaaaccgaattaagattaataagttggaacaccaaattgcattactaggaaatagaatttgaatagaaacgaatgaattattaaaaagattaccttgaagtgggattgggtttggaagagaagacagttagaggtgagaatttttgctgggatcggatctggtattctctgagttgctccacgagtttagaacgagttatcatgtcttcagtgggatgggagatggagatggttcttctccaacctcctcccaatcccaaacaccgaattcagcaacccaaacaaagaagaagaagaattgaaaacctgtttcaatactaataactctctgtatatatttttcttatggcggtgaatctgatgcctttagaagtagcagtagaagaagaagaagaagaagaagtagctaagcaatattacccaactgaactgaattgtcctctgaatttaattatttatttatttattttggtgaaacgaaaacgaatttcataattaatttctttcaaaaacagatagaaacaaaacaagacaagacaagacaaccacgacgagtttgctttgctcgcatggtaaaacgacaataaaaggcatctgtaatcatgtcgtttgatcgtaaactagaaacgacaattgttagggtatttttactttctttttttggagtctggtatttttgttggtaatttttagggttatacatccaatctaaattaatattttttttttttcattccattcaatttaattaataattagatttaaaaaaaattatcatttgatctcatctaattagtcaaagtccaattcaattacgcattaagtttcttatataaatttaaaagatatgaagaaaatcataaaaagtaattgatattgaaaaccatttaagagaaaatgaaggagttattaggttttctcttagaaatttaagactatatatgtgtttcgaaaaatacagtaagtgaagcatgttactcttttaattttaggtaaagttaaattattttttaggttgttcagttaaatataagtaacagagatccttgcctcttccattggctggcctccatctctaaaagttggcctccacctctaaggactagcctccatctatagaagctgaccatcgccaaggctagccagcacatgcaaagactaggccaactcttgacaaagctggcaggaacatgatctgccaaatgctggcaagagcatggtcggccagagctcaacctacaaaccttgtatggccagccaacctgcatcttgcaggtgtatgccctgccaacttttcccttgcaagacattgatgtgcaaccttcatccgtggacagtaagccaagctacaaattgggccttggcagcccactaagatgctacgaaaacatctactttaaggggaaattcggtcatttgttcttattaatttaatatataaatatatcttattttatctgctaattagagtttaagctctcctatataaagagccttaactcaaccctaaaactaggagtgttcataaaatagccgatcca

SEQ ID NO: 161539 - DNA, 3506 bp, Cannabis sativa
atatataggttatatatataggagtaaagaaagtatggcctgcatattttgtgtgtgtggggcaagaaagagagagatgaaatagctagaagaagaccccatttctctcttttgactaccactttcaaataatgcggcccacacctatataatatttattattatatccaaattttaatctgcatccaaatatatacttttcttaataacattatgtatatatgcttactgttattaattcagcctatttagaagattagttttgctagctagttatgtgcgcgtaatattacgtacgaaaaatttatttgtggttgaataggaaaattattactacttttatatcaataactagtatttctgaataaatgtcaattctaaaacagctttattacacacaagattacttctcattctgggacacagtacatatagaatatatattctagtaaaatattgagtcatataaatatgagctatactcccttggttactaattggttttaaaataaaccccacattgagagttttggtcttgtaattttcatcatgacaagatatatatatatcttctcatattgtatagttcgataaagattgctgcctcgttttaaatgattcgtatgtgatgcttaccacaattttgtgtactttgcttttgttttagggtaaatattattttagattttatgttttataaaaattatatattagactatttattttgttaaatgataaaatgaattttgtattttttttaaaatattacaaataggatcataagctcaattttcgacaaattttttaatgtaattaacttaaagacaattaatcttaaatcggactactattaaattttattttaacaaaaaatcagttaaagtcatatatttgtactattttaaaaaatacaaactctaattttatttaataaaacagataatttaatataaattttatataatataaaatctaaaataatttttacattttgttttattaaagtggaaattttttatatatttacttttaaattgactttttaaataagtatataaatatacattatcataataattacaggaaaaaaatatgttgaagttaatttttagttcaagtaatttactttgtaaagttacttataaaattttgaaataatttacagtattaaaaccatatattttgttttatgaaaatcaaaaaaatataatttttattataattgattacaaacgtatattagaaataacagtcacggtaagtaatactatagtattgattgcttcttttttctttcagaaagatagtattaattacttttaatcattatttattgatatttttaatattttctataaataattgtaactctattttacatgaaaataaagaatgtagttacactgatttctgcaaattaataatttagaatatactaaaataatattcaaataatttattttacacttataaatattaaaaaaaaaaaaaattaaacatacaattaattagttaaattataattttgacaatataattgaggaaaattatccgatatattattttttaactttttttttaaatttatggtttgggttgttctggtggttactccggatgtttttatgtagctaggttgctatataaatttcaattgcgatttaggttactctattattgctatatgaatttttatataaatttttataaaagtatatatataaaaaaaatacttttaaagtgtaaaaaaaaaaactgctataatttatttgaaaccttctaaaatttataaaaagttctttgtattatgttatacacaatcatataatatatatatatatatggatatgtaatttatttatatatgcactgaaattactataaatacctaaaaaataataatttaaaaagaaatatacaaattagtaattacgtaccatcacacacgtggttataattgttatgttcaacactagagtttttttttgagaaaatacttgagaaaagctataaattttaatattattttaatctagatgagggagggaaaattaaaaatatgtatgcattgacaaattaatcatcactaattatgtacgcttgcttgactatatatgcttaaccattcatttccaaccttacaagagagagaaattaattttcgaatcaaagtgtttaatattaaattataagtattatcttattaatcaccaaaaaaaaaaaaaaaaaagagatttacatgaaaataataataaaaaaaaagtaaatataccattttagatcatgtgttttgtaaaagttactaattagatttttttattttattaaatgattaaattaaccttatattttttaaaatggtaaaaatagataggaccttgagctcaattttttaataatttttttttttttaatataatcaatcttaagataatttttaacacgaacaaatatagaaaatataaccatcggttcaatctcctatttttttatgattttaaaaaatatataatttaatttgtaatttaacaaaataaaaaatttaattaataatttttacaaattaaaatatagtatttactcaaaaaaaaataaaaaaaatacgaattattaattcaatatagcacaaaaaattccaaaaaaatggttggaaaaaaaacaagaaaacacaatcgatctgacatgaagtagtcaacaattaccacaaattgcagaaacgaaatctgcgatcaatcacgttacacgtataataataataataataaatccatcttaattatttgacgtatacttatagctttgctaaaatataggctattattactataacaccagaaaaaaaaaattagttagagttaaacactaacatacatcatgtgtagaaaaagccaaagtccaatgtttggacttttaccgactatgggccacccataatatgacacctggattctattatgaaaattaagaaggagagaatcggatataatagtggtggacggagtcaacccgtcaccctcgatcgaagagaggaaagaaaaggccgcgtggtggtggtggtgtggtcaaagatgtgagatgtgtgtggagcccacaacccaagtcgtcagcagtgtggaccctttgcaagaatgattgtccccacaaagccgttgactcaggctaagccttagttagaggcgccgaaccaatcgggtggtaaaattttagaacgcgtcaatctcaacacttcactccctctccgatcatatagacgaaaaaaaaaatgaaatgctttcctcatgtgaagcctatatacccactgatttccaggccccacttgtcttttttttcttttttttttcttttgtaacaatggaataattaaaagggcaattactgtctatactatttttttaatttacagttttggtttctaaagtaatttttttggtagtcttttcggtaatttctatgtgggttgctatacgattttttgttgcgatttaggttgtagcgctagttgcaat

SEQ ID NO: 161540 - DNA, 3154 bp, Cannabis sativa
tatttcattatataaaatagaggaatgaagaaaattataaatatatcccacaagcattaatataaatagagtgtgacatggaacatggttttcaattctcaagtggggttgaaaacggagtgatacagcacaagaaaacaaacagttaagtggcatttgctggtcatgatatctccactttcataaataaatattgaaaaaattatctgtatatatattggggtcataaaatatattaataattgttcaatttacatttaaattgttgttgctcttctaatgaaaaatgaatgttgtttattttcagagtaggggcttattgtttgtgtatttgtttagagttcaatcatttgaaaaattatgtacataacttgttttgtgtgtctgttttgcagctgaatcatttaaatgttctttgatgatggagtgctcaaaatgaaaatttaaagacaacgaattactattcaccgtggtagaaatcgaagccattgatttcttaaaattgttaaaaactatggagattatatgtatatattttatttttcaatcgaataaatgataaaagtattattttatttaccaaatgtcctattaaaaaagtgtattcttttatttgaatttgcacatgaataataatatatagatattaattaaattagttttataccatttcaatattaaggttcagataaaaaaaatattaattatcaataaaggatcaatatttattagttttcccaaagccaaaattaatattgggtaaatatgtaatgttttttttttttaaaaaaaacaatagaaacagtgacacacgatgtgagtggcttttatatttagagtttgacagtggagaactctaaaaggctaaagtgacttacattgtgggacactaaaatgttttagtgactgaaggtggtgaagggtcactatatattactttttcactcacctagtgacctccaatgaaggatcattaaaaatatttattgaccctcagaataggtcactgaaatctatttttgtagtagtatccattctatactctgacgtcgcacagtagaaccaaaagagataacgggaaagagcgaaaaggagaaagagatagatctccacttttcttttttttctttttttttttttttttgtaaaggagaaacttaaaatatgggaatttaatcttcttttacacatatatggcataaaaaaactcataataatgtaagcaattcaaattatccataagtccaaagaattatttaaatatgccataaaaaagtaaacactaaaaaaatctcataattcatgtaatttttacatattaaaatgacaaaaatattacacaattacattaggtcgatcatataaacttttatacaacctagcaaaaaaattggcaagaatacctcttgctataagctgcacgaaccaccatcttcaacaacggtagctttgaacaactaaaactaacacactcacccagatggagaatacaaaatatcgcagaaaactaatcctcctaatatcaattttcatattcataaaatgtagatctcttatcaatagatttggagttcacaatcaatccaaatcaagtatgatccaaaaaaaaaaatacaaaaatactataacaaatgtatatctcgttgcattgacgttgttttccaaatttccagtgtgaatttgatcatatcaaataacgaatagtataaaaaatttgcatacatctacagacacatacatcaaaatatcgttatggtttgttaaattttcgaaaagttacattgaagttttgctaacgctcttaaacttgatatatcagttattacaaactgataacgatacaatgatatttatcataattgcaggtgattcatattggcagagcaagaaaaaaggaagtgtaaaggcaaggaaggctatatagcgcttaagcttaatcttagcaaagcgtatgatcgtgtggagtggggttttctccgtgcaatgatggagaagatgggttttgacttgcactttattaatcttattcctgctacggtgaagacagtgaggtataaaatcattcatggtggacatgaattggggccgattatcccagagcgaggaattcgccaaggagaccctttgtctccttacttgtttctaatttgtgctgaaggtttctcctctttgataagaaaatttgagcgagatggaaagcttaaaggctgtaaggttgctaatggtgctcaagtcatatcacacatgctttttgcgaatgatagttatgtgtattgtcgtgctaatgagagagaggctttgaacgttttatagttgctatagctgtttgaggttgcctttgggcaacaagttaatcttagtaagtcttctgtctattttagcaccaatgttcctagtgatactcgtaacaagttgtgtggcttgctaagaatgggtttggcagatgaaaatagtacctaccttggtctcccttgtgctatgggtagaaacaaagatgctattttgggcttcttaaaagacaaaatgcagaaacgaatacaaaattgggaaggtcgatttctgtctactgctggtcgagaaattctattaaagacaatggtccaagctttgcctagttttgccatgttcgtgtttttattgcctttgaagacttgttctcaccttgaaagtttaatgttaaaatatgggtggagttcttctactaataactctaaaggtgttagctagtttagttggagaagactgtgcaagaataaaaattctggtggattggggttccaaagtttgcgagactacaatttctctctgctgggaaagcagggatggaaattattactatatcaagactctcttgtgattcagatttataaagctcggtatttcactcgatgttcttttcttgaggcaaagttgggtgccaatccgagtttcatttcgcgaagtatttttgagtctcaatgataactctatggtatagagttattttttatgcttttaaactaaaagtattgtgagaagactagtgaaaatgtgtttatttacttaatttagttagttttagtgttattttctatttagtaagctaacttttaagtcttgtaaatattgacattgttgggtgtgtttttccaattaattgtgcgtgtttgttgtt

SEQ ID NO: 161541 - DNA, 3898 bp, Cannabis sativa
  modified_base (1121)..(1121): a, c, t, g, unknown or other
tttttttttttttatgaaaagaactatttagtgtatgtttagatcataattaaaaatcttttttttttatttttttatttttgaaaaaaatatttaaaaattattaagtgtgtttggttttatcttttggaaacagtttttaaaaataaagtaacaaaaaattaaaaattttaagaacaataaaattttgttttttagttttaaaaaataattaagtacttttggaaatttacacaaatgtttgtagcatgttttgttttcactcgcacgtttttttggtaaaacttctcgaagagattacacataggttaagtacacttaactttaaagttcttaagtgatagattattgaaaagaaaatgtatcttgttgtcatagtcaaatacctatcaatccatttaaatatcctcttcaattatgtagttctatacttacacaattttagaatgtacttgatcttcctaagtcgattgtataactttttccaatttttttcctcacggatcacgagattctgaatatcacaaaatgaaatcatacagatgagtaacatatgatgattgatatgcaaccataccaacagttaaaaatcgaaactaagaacttaggtggtatttgattcgaggtaatgaaatggaatagaatggaaatgaaacaatttttattctattcttttgtttagttgcattttaaagtattagaatatcattctaatggaatgacctttccaccattttggtagaatgactattccattttgaaatggaaaaagaccattccaatgcaacatttgaaaaaaaataatatttttttattaattttaaattttattccattccattcacattcaaattctcattcttattcccattcttatattttcattccgcctaatcaaacgccacattagttactaagcatatttctaccaaacttttgatagtcatttcagaatctaaaatccaaacatatataagcgcagatatataaaatgtaattagacacattatagttctccaaaaacatcaagtcaatgtttactattgctagacaaaagcctctcatgaagttctttttgtcctctctacattcattaattttgaaattaaatatatatatanatatatatatatatatatttcaagcttcaataccctactaattcatcattttctttcatctcataaacaaaatctcccaaagtatattagaaaaagattagaaacaggttaatactgctaactaagattggtattcattattaatattgttcagctcttatattaaattaagcaaagcaataaagttaaaatgaatgagtggagatttttattggatgtattaatgtgtatgcatgtaataatcctcttctactactatcttccaatactagtgtccaaggactcatgcattgacaaaatttgcaccatctatggaagatgatcttactagtgaggatatttgatcttctagtacatttgatcttacaagaagagaaaaagaagtaatgaaattgacaaaatataactgtagagaaaatgttttttttgaacatctatatatatatatacatatagaggaaattttaatgttcatggctgtatttatttttaattattagattatcattaaatgtgttgacttgaaaagtggacaatactagttcgctaaaatattgactagatgaataataaatttaagtaaaaaatatagagagatacacaaaatttataataatttacttctcattgtgatggtaataaaattatgtctaattcaagcttttatttttcacaagaattacaaagaaaaccggctataagtgtggggctcgaatttctagagagagatgttctaaccttatgaggacttcgaagaatgtaaaaaataaataagctagaggagtgcttcttttataggaaaggaagtcctattacataataattattaaaagataataagttctgtggctccacaaagttcaagctggtattggggtcaagtggtgaaggtgaagtatttgataaaggccaaaatggataaggcagagttgattcgagggccttaaatcaagttagagtttggaattctattgtttggactagacttaatattccaaattaaatatcagtttataatttactggataatttctgcatgtcagcttcaaacaaaggagaagttgttcagtttcggaatcactttagatgactcttgctgataaatgttgttgtgtatcaaatttgggcagccaaaaatgaagttttgtggaatcaaaatgtacatatgatttctagagttgtaaataacattaaaagggttgttattgatagattttttcaggaaaaaaagagagaaaactagtgttgttgatagagtttggttccactaagttatggtagagatagttgtttttgtaaaaagacgtttttgaaggctttgttcttgtacaataaatttcatcttacttactaaaaaaatacaaaaaaaaaaatgaaaaaaatagttttggctaatttttgccattgataataattcatgatgatccaatagtaaaaattaactcttggtgaaaatcatcaattttcgaactttgaatcttgtccaccaaattgttttcgagttattttttagaaaaatagcagctttgttactttttattttttatttatggattaaatacttaaagttatattagaaagtacttattagacttgttatgttgctatatgtcatgttctcatcagtatattaattttaaaaaataattaaaagattatttaattatttacaaaataatgaaaattaaaattaaatttaattagtcattttcttaaaaaaaaaaaaaagtagcacgtctaaaattaaaatttaactttacgctataataatttgtaaaagttttttttttaaacaaaaaacaattgctttcttcgccaattttctatcagtattctttaaaaaaattacattcttacaaatatatttcttttccaaaggtcttagatcattaaatttcttttccattaacaacaaaattagcattgttattctttggaaaaaaaaaacaccgaacgcaaatctagattaaaataaacgaagtcctaatattcacaaaccacatttcaaatatatcttagtgattatttaaaaaagaaaaaaatatatatatcttagtgatgatttgggttttagaaaaaagacaagacaaaaaaaaaaatactaaaaaagtccaattaagattcaaacctataatttttctttaatcattaacatgtgaaaaattgtgaatacttttgaaccaacaaatctcaaaaacataaacattaccgagtgagagagggctctctattttagacctcttcgccattaatgcttaggagagaacttcagaaatgtgtgagaaagtagaccgggtaggtgggggcttgatacaactcgtagagactcaatataatgaaaaagagtgctaattacaacatttgcatacgaaatcacttactgatttttttcttcaatttttaaagagatcgaccaacatagcaacacaacctcccctagtttcctcttattcactcgtccgctcaattgtaacaactaatctgagaaatcaacaggatgcactaccaaatgacccatgagtaccaccacaaagttctaacaaaagacaaccacaaatgcatgtaaaattgtttcatcacccttttacaacactatttctcatcaggcattcaagaggagttaaaatattattggaagacatctaatagtcagtcaccaaactaaatctttagtgcatgtttgacatcataactaaaaaattgttttttatttttaaaaacagaaaattattttttgaaaacaatttggcttgtttggccttgttttttaaaaacag

SEQ ID NO: 161542 - DNA, 2384 bp, Cannabis sativa
aaagcggctaggtgacaggctctttgtcaagcagtctgcaacctgatcatgcgaggaaatgtagcggatttcgagtttcttctgcagcaccttgtctctcacgaagtggacatctaattctatgtgttttgtacgcgcgtggtacacaggattagaagccaaagcactcgcgctcatgttgtcacaccaaattatcggtgttgttggcatttcaaacttcatttctttcaagagttcttgcagccaagccaattcagcagcaagatgtgccaatgatctgtattctgactcggtgctagagcgtgcaaccactgtttgcttcttcgacgaccacgagatcagagattcaccaaggaacacacaatatccagcaactgatctccaatcatcagggaaacatgcccaatctgcgtctaaaaaaccttgtaagctcagattgtcactcggtgcaatgtgaatgccaaggcgcatggtgcccttaagtatcttagcactgttttggcagccccccaatggacagaagtaggacacttaaggaattggctcagtttattgacggcgaaggagatgtcgggccgcgccgattatgcttctgtagagagatggattttcaagttgaactccatcattaattgagataactctccctgctgtcataggtgtcgggcttggcttgacattctccattttatatttctgtagtatctctgctatgtatttcctttgggatagataaatcccagtgtcatccctaaacacctctatcccaaggaagtagttcaagtcacccaagtcttttagtgagaacactttgttaaacctgtcaataaactgtctgatttctttggagttgttccctgttattatgatatcatccacataaattaggaccataataataaatttttgagtcttcagcatgaatagagatgagtcggccttcgaattaacaaattcccagtcaagtaaggttctttttagctgatcgtaccaagaccgaggagcttgttgcaacccataaatggacttctttaacttgcagacatggtgaggtttagtagcgtcttcaaagcccggtggttgcatcatgtatacatcttcctcaagtaccccattgagaaatgcattattaacgtcgagttgttgaatttcccagttgtgagagacagcaattgttagaacaacacgaacagtagcgactttgatcacgggactgaaggtttcaccaaagtcaactccaggacgttggtggaaacctttggcaacaagacgtgctttgaagcgttggaagctaccatcaagattaagcttgatcttatggacccatttgtagccaactatatgtgcaacatggatggtatttaggtcaacaagtatccaggttcgattgcgacagagggctgtcatttctttgctcatagcacggttccacccctcatgccgaagtgcatcttcgagagagtatggttcatgaagcgagagatcaaatttggcgtggttgagatacaccttcggcttgtaaatgccgaccttggccctagtaatcataggatgagaaggcatcaatggtgatgcagcagcaggagagtttacttgtgatgagttatgagtggaaattggagagtcttgagcctgtgaagcaacagaagaggactgatagtgtggtgagagaacagagtcagtatgatgtaatggagaagttacctgctgttgtgtgcgatcaggggactgtggaagtggttctgcagtagaagagccgtcatttgtgtgagtcgaaagagtgatatctggtgtggactcagtagaagtgtcacgggtgacagtgggaagaatgaaccatgagttaggagtgtcaagagtgacaatttgttcaggctgatagttgttaaagaatccatgttcacatgggaactcttgttcattaaaaataacatgtctggagatgtagatacgaccctggggactgaggcacttaaaccctttatgtgcttcactataaccaagattgatacacttggtagagtgaaactgaaacttgtgcgtttggtaagaacgcagacacgggaaacatgctgaaccaaaaattttcaaggacttatagtcgggttttggggagaagatgatttcatatggagatttcccattgagtacgccagtaggaagccgattaataagttgtacagcagtatgaaatgcatctgaccagtaccttagaggcatgtgtgcctgagctagaagggtgaggccagtttcgactatatgtcgatgcttacgctcagcccttccgttttgttctgaagtatggggacaagagtgttggaaagaaataccactttgattgacaatgtcagtaaatgcttggaattcacccccccccccccccc

SEQ ID NO: 161543 - DNA, 1545 bp, Cannabis sativa
ggttcaagctattcgaagcactacagtagttatgctttctatgtttggcaaagttataaatgattataaaatcttgttatgtactttgcgtaatgtttctttctattttgtgaaacgatcagcaaatgtagtggctcactcctttgcgagagcctctatatcctaccctgatcgcctcttcaacttgaacactatttcggttgttttgtcacctagtttggtaactgagttactcgtttaataaaacgatatgactttcatttcaacaaaaaaaatatatatataatatacataaaaatatatttccacatttagcagttcacatatattatacaaacattacaatggacaattttattctaattaaatatgtttcactacaaaattaaggattttgtttaccctaattaaatacaaatgtagtgaaaattaaagtacatccatatattatattaagtagcagtactagctaagtagcaaacacagctagtacactctttaattaattaatctctcttcttcctcttgaatcttcacaatgatcctaggagacaaaactcattattatcatcaaactcaaaatcacagcttctaaattcaatagacgtgtctacaaactcatccatgtccaaactatgagaattagttccactagtactacaattagtagtattaatagtacggtctccaaatgagaacattatagaaacaatatcatgatcatcattgttactagcagagacccctaaactcgaagacaacaaacccatcgaaggatctgacaactcaagatccttaagctctgacggccacagattgataatctcatgatcactattattatgatgatgatgatgatccaaggaaagtttgttatgatgatcatctgataaactagatgtgtcattagtagtaatactactactaataattggcttgacttcttcaagaatggtagtactagtgatcacattcatgagattattatcaaggtctgaatctttgattatcatttgagggggtttaagaatgtttttgcatgtgtgttcaccgatgtatgtagtttgatacagtttaggattgtcttgtatttgttggacttgtcttgtggctcggcaaccttgatcatacttgcgtgtgcacctaaagtaagccctgcatgtgttcacaccattcactaaaattaatttgtaagctaattaattatttaacaccaaaagtaaaccacatttttcttaatgatatatatcattaattacacacaaataaagtttattagttacagtgtgtgataattatgattaattctattccttttccattatgttttcttgatcaataatgggtttcttttcagtatccctttgttttttttccaaaagatggggcctgccattttatctttatattacttgggtttttctaaattccattttgcttctacataacgtcaaaaatgatatcttagaattatatggtaacatgattatgcaatactattcttttcttacatatacatatatatacatatttccatctccacac

SEQ ID NO: 161544 - DNA, 4931 bp, Cannabis sativa
  modified_base (471)..(482): a, c, t, g, unknown or other
tgagggaggacttatctaattcaccttcgctaatagagatgacgccatgaacgtgctggcacgtcgtccttggtttgtgtgtggagcactgatagtcattatgccttggcttgccttggcttactccagttgaagttcattttgacaaaacccctatttgggtgaatgtctagagcattcccccattctactggaatctgtccaaccttaaagaacttgcctctaaagctttccttgtccatgaactccccctggtatcgaagacgcggtgggattgagtacattgagattaagatccaccattgacctcaacaaaccaattgtctctggtttctttctccgtcgccagcgactcaaagacctatggttgcaatatagatacgaaaaactccctaaattgtgcttcaaatgtggacttctcactcatgatcaaagcacatgtttcatacgacagtactattgaccataatnnnnnnnnnnnntcggtactctagtcgtaccgatgtaatagtatcaaatatcacttgagcaaacatacatttattggtatccaatacaactctacgtatattgatatcgctatcaatgtaatctaacaggcttaataaacatgcacactaaacatgtaatcacagatgcatatcattatactaattttatctcgttttggaatttaggtgtgccggtcaacttgagtggaacaactgctcgatgatttacaggcccctgagtcacaatattcgcaaaactgatgagtgacatgctaaatcatttttcggggacttaaaatcaaaactgaaaattttcatatcgatggataatatggaaataccctaaatatcgtaaaaacgtgaaaatttagggtgccctaaaataccccaattggcagatcggttcccaaccgaaaaaccagttctatggggtctgcctagggatgaaccaaaattccggttcctacaggtcatactgaacctacaggaatccccaaaaaccttctaaacaactaaattcgaccccaaatcaacccaaactttctggagtacctaataaggccacaataagtaaaaatcatgcaataaaaccaagcaatatactcagaaactataaacaccattaaagagcaaagtttaagagctcaaaccatatcaaacttcacaaccaacctctaactcaacttaatctagcataaacaacctcaaaatcacttctaacaacagaaataacaacaattcaaacttacagtaccttaactccaaaaatcatgcatatttagcttggattgaatcactaagaccttgctagaatacccataattgagctcaagaaacccaacttgctcttgatttcttgagagatcgagagagagagggttgaagaaagagaaagagtgttttttatgtttaatttctaattttggttaaatgaaataaataaatacttatcaaatatcaaacctatagaagaaatcagattaatctaacttaattcattccactaacgggcaaaagaaactatatggtaaaagaccattttgcccttgcttagactgaaaagcattcatgccacctaagggtatttcggtcaaacctaatacgtcaaatattcttgacattcccaatatctatctaatttgccccgctattactaaaatactaaaccataagaaaatttaactctaacagccaaatgtcgcgttctactgttactaggcataaaatatgaaaaacatgaaatttcatatataacataaataacacacctagaatttaaatatatttccataaattcataaatcataattaaaagtataactctaatttaaaccctaattatctgctaattttaatattaaaatttagcgatctttacacgagacctgggatctggacccaaacccagaccctagacccagactcaaactcgggacccaaactcggactcggacctggactcgggcctcgacccaaccggaactcagactcgggactcgaacctgggacccagatcgaggatttggaccccaaaaacggacccagactccagacctggaactttactcgcactttgacctagattcgaacctgggattcaaacccaaactgggacctagactcggacccaaacttggactcgaacccgagatcgagacccgggaaccgcaacccggaccctagactcgaaacccgcaacctggacccgaaacccaaacctaggatctggactcgggacttgagacccagacccggaactagacctgagactcgagacccagaccgaaactcggaccaagatttggacctggatccggaacttggacttggaccaggacccgaatccgagacttggacctggacccgggactcgaactctgacctgacccgtagttggtattggagtcgagtgtactggaaatatattaactatacacaatctattaatacaagtaaataccaaatataatattgtattaaatgatactaatacagtacaatacaataatatataatctaatacaatataatacgatgtactaaacgattttagaatagaagtataacacacaacaaaaatttcaattgtagtaattagactataaagttaagtttagtttccctttggttaattagttttttagtggcatcaaaaataaatatacagctaaagaggattgttagctttttttttttttttttttgagcaacaagaggctgattacaagaaaagccaaagaaccaaacaacctagaaaggaggctagaaagaagcctcttagtcttcatctcgcaacctgagggctaacttcgcaagggagtgagcattgccgttgtgctgacgggaaacatgcaacaaagtagctcacggaacctggagaggaaggttctgatctgttgaacaagagtagatagtgaggagtagtcatgccaattaccattcaccttagaaacaaggttaatacaatcagaaaagataaatctttgtgtcaaattggaagacaaacaccattgcagtccttcataaagagcttgagcctcagcgaaaattggagaggaggcccctggtttgaaaatccttgcagactgttgaatgtgagacagaccctgcataaaaaccatcccaatacctgtggctagagcatcagtactcagggcagcatcaacaaaaagagcagtggtcgatggaagcaaaatgtgatccacaccagcagggtaacgattattagtcatgctggaaacagaggattgaatttgagcgtcctggtaatcctgcagaaaacttgagacaaaatcttgaacaatatcaattacactgggtttttgaaaaagatgggtatttctgatattccagatttgccaaatgataccaaaaaacaagggaaggtcagctctggggattaaggtaaggctatgaaggtaaaaatctctgatatcaagcctacgatagtcagcaaaaaaccgtttaaacttagagtgatgccaaatggttttaactctgggacagtgaagaagagcatgagaaaccgactctgcacttcccccacaatacgaacagcaagagcttgggatagcatacttgtggaaaaggttgagagcacaaggaagaatatggttaaaagccttccaggtgaagtgcttgattttaggaggaattttcaaagtcctgagagttttccaccaatccttaaaagggttaggatcagaagaggatggagaagtagtgagggcagtggactgagcaaggtgataggcagaattgactgtaagaatgacagagtgatgaaaaccccaaatgagagaatcagtgggaccaagatccaaaggaatattgaggacaacatttgcttgatttattttaacgaaaagagaaaaatattaaaggacaccttaagtatcaagcactacaagaggtgttatttatctattgatacaatttaatattaaatctcacacattttaaatcaataaacaatataaaaattattaactaatcataaggtaccacattattacgatgttagacgttgtaaggtacctaataaaaatgccggtgaaaaaattacgtaagttaacatgtgcagtaacaacaaatgaggagtagtacaaatgttttctatagaaaaaactaacatttcttatttatttattaaacaactagcattaaattgttaatgattgaatggttaaaaattttagaaatttaaatacttaaatattgttaaagttggatttaagatttaatgggtgatgacattgtttagtgactataccgaaatgttattaggtggctattgaaagagatgttaagatttggttgacattgaccctttaattttaaaataaaaatggtcaagttttaatccagaacgagtacgttttcctacttctcatcgacaatgaaaacgaaccaaaattgattttctctcgatcatgtagtgtttgtcttttcttgatttatgcaacggaatttttttttctcgaattttgacatgtactaaattatgccttttaaatttttttgtctttaaaaattatccctgaactattaagatagttagatttaaagacttctgtctaatttcattcaaagttcagcggacataatttggtacatatcaaagttagaaaaaaattttaattaacctttatataaatatgggccattggtgttgatctttttttttttcttgatattttttctttaaaagctgagttaaatttcattacacatttagatttaaaatgtatacattttttttttaatgaaaatgtatacatctttttaagaggaattttcaaaagtatttttcttttatattatatttttaatgttaccactaaaaatttggagaattactccatatactatttttttaatttttttttaatttacggtttgggtttttaaagtggttgcagcgttagttgcaataggggt

SEQ ID NO: 161545 - DNA, 5183 bp, Cannabis sativa
  modified_base (5123)..(5152): a, c, t, g, unknown or other
ttcttttttcaattcatgaaaacgcctcatacctacatatatcaaataaatatatatccaaacaaaacaaagcaaaagtatataataatgaaacaaaaacaactaaaatacgtacgtacattggaaagtcaagtaattatcgtgtctatgattatagactaataaagtgaagttaacattaacttcccaaccacttggaagactatcagtataacatattgtcaaatatagagatatataattgttggtagcattgaaccttttatctccattgggataaaataacaatctcctgtatatataaggcaatttataagacataataaagaaatatatatatgtatattaattaataatgggagattattttaagttaccatttgtagtctccaacttggaaagaagaactatggtaattttcatttgagtttgagagcaagctataagactcaaccttaatcaaatagtgaactggtggaatatttcttatacatcttgaagtttctataaagattaattattagcaaaaaaacgaattaattatcaaacaatatcatgaaattaaaatataaaattatatgtatatatatatatatagttaagggaatgtaccagtagtagaatccatatagagtgtgtctgggatgaataactaataagtattctaaagagagagatttgtgagtaaaaggagtagtacttgtgaagattaaatagcctgattatatagagatggccatgcatgcatgaaaacattatcattaatataaacattatatctcaatattaaatattgcatccctcatcatatattttcaagatagcaatttaatttaattatgttttcaaaaaaaaaaatcaatttaattataatgtgtaattataatatttaagctattgtcttggaactagctatagtatccgtggcttgaacaactataattatattatttattttgactgtcagaaaattaccaggagatagaagatgtaattaatcttatttgaattttctcacaatttcaaattcttcaagtggcacgtcaaaaaaataaattcttgaagtggaataggtgactagtatttattgtccgaaattctcaatataatactaattatgaaagtaacgtaattaattattaattacaaatctcaatattttaggtcgatctggtataatttagctcaatatagtcatgactctttaacatataaaaacatatatacagtaacaaaaaaaaaatcaatttttttttaactttatatcagtgagaattttgttttcagttgaaagtaaaagtgttgctaacatcctacaaaagaaaaaactgttcttaattagctgaattttgttcgatttttcaagatatttttatgctatttgtgatcgtgccaaattgtttattgtaatcgctctacgaattctaatactcacaatattattgcaaacttactttatcttttcactacaaaaaatgttacttttgccagtatatttttgtgttggcaaaagtttagtattacactggtaaaataaaatttacttcttatgtgttggcaaaatgtgttggcaaaatgagttggtaacgttggtattagaacttttgcaagcacaaaatgaaaagcgctggcaaaaatgacttttcccagcgcgtaaatgtgctggtaaaagttaaattttagccacttgaaatgtgcggtggtaaaactttgatctttttgccagcgcactttgcaaaatgtgctggttaaagttacttttactatcgcagtagcgaactgtgctggttaaagtaacattttttgtagtgtttgttaaggcttaggcgtaagtgtagcggccgagttcaccaaattttatgcgagtccttgtgacattggtttttggctacttgccttttgccttttaatgataaatttattctattaagaaaataaaaaaaaaatatactctgtcccatttacaattatagtaatgtcttctctattaataaccctatttttttttaatagaatgaatttatcattaaagcaatctgctaacacaagtctaaaaactcaaacaaaattcgatagcctcggccaccatactctcacaatatttaaagaaagagcaaatttagtaagagtataagcaagtttaaaaaaccatattagggatgtcttttttttattattattattttaatggaaaagttaatcttattaaccatcaaaatcagctaccaaactaggtagcaaatccatcggaaaatcctccaggtgaaacttacgatcaaaataaaatagggaagcttttgcaaaagcatgagcaaccttattcgatgatcgtttaataaagaaaatagagacattttttaactcagacaaaagtttgttacaatcattgataacacaaccgaaaagagacaccatgtctaacaaacttctgagtgcttgaacaacacccatacaatccgtctccacaagaacttgctgccaacctcttagtttgatccaactaagaacttccttgactcctattgcttcgaccagaagaggttccactgtctcttgaaaatgtttgcaaacaccttcaattagaaggcctttgtcctcccgtgctactgctctaataccaaagccttgcccttccccaaataaagcggcatccacattaatttttatattattagtaccaggtttagaccagcactcagccctatcaccttccttgaacaaggtccatgatgactctaaaaaagagttttgagcgtttagatttttatttgcaaaagccacaatattgtccaccgtaactgtctctttattccacaccagctcattacgagctccccacattgcccaacacaccataatcacaacgcaccttttctcctccttcagccccttaaaagctgttgtacaccattccaagaagctttgaccggttacataaggtgtcccaatgcccactctattccagcattctttaaccacttgacaagtgattaaagtatgtacaatagtttcttgatcaccatggcaaataggacagatagcacttacctccacccgtttagttctcaacatgattgtggttggaagacaatccatggccgctctccagactgtattctttgctttcggtgggactttgagtttccaaaaactcttccataatgatgatgcttcagtattatgccattgcccttgactttcctatagcaagttgtatgcacttcgagctgtgtagctgcccgttacaactttgtgccaaatgagatggtcttccgtctgggataagtggattggtataacaagaataagtttcctatcacgctccagaaataaatcatttatcagctctatatcccaacctccaccatccacgtgcataagattagccacttttgcattcacaagagtcggatgatcagaaatgacccttggattcgagtgatcttgcaaccaaggctctcccaaaactgaaatattttcacccgtactggtacaccaccgaacccccattgccaccaaagattgggcttcaagcacactcctccacacaaagcttgggttgttgcttgattctgctgaaagataagagccatttggaaagtatcttgccttgaatacccgcgcaaccaacgagtttggatgagttagcaacctccaaccttgtttaccaagcagcgcaagattaaaatttcggaagttgcgaaagcccataccccccaagtcctaatgtttgctcaaccgatcccaagatagccaatggatccctttatttgatttgcccgaagattgccactagaacctcgttatcaacttctcaatatctctagtaatcttaataggaagaaggaagacgctcatagcatagctaggaagagcctgagccactgatttcaccaacacttcgtttccagcttttgataaaagtttcccttccaatccttgtaaacgctttctaactttttccaagagaaaacccattgctgttgttttatttcttcccaaggtactaggaagacccagatacatactagaatctatcgctggttgcatatggagctgattaataattcttcccctcaaatcatccccagtgttgttgctgaaaaatatagaagacttattgaaattaactttttggcctgacgccatttcaaacttttgtaatacctcttggactcggtaggcttcttctagattagctttgcaatacaagtaggaatcatttacaaaaagcatatgggatatcctaggagcaccgttagcaactttgcatccatgtaaccaacctcttcattcataatgacataaaagagccgacaacccctccgcacatagaataaacaaatatggtgaaagaagatctccctgacgaatatctctagtagggacaatcggacccatttctcctcctccatgaacaactttgtattttgccgaggtcacacattgttgtagtaatctcatccagaaaggttcaaaacccaatttcaaaagcatagcctccaagaacttccattcgatacggtcataagctttactcatgtcaagcttaagtgccatgtatcccactttgccttgtcgctttcttttaagataatgaaagatttcaaaagaaaccataacattgtcatgaatcaaatgccctgtgataaaggcgctttgatatcccgaaactattgaatccatataccccttcattctattggtgataacctttgtaatgatcttataaatgacgttgcaaagagcaataggacgaaagtcagacataaatcctggggcctttttcttaggaattaagactacattagcatcaccacatccctctacgagcacacccgaatcaaaaaaacgttgaaccactccaaccacatcttgtgatacaatagaccagcctttttgaaagaaattcggtgtcatcccatcaggtcctgggcttttatccggatgcatctgaaaaacagcaactttaacctcttcaatcgaaacacttttcctcaaaccttcctattagagtaatcttgccacatatacaaagtggttcaacttttaagataaattttgagaatttgagtgttatacaaaagagacaatgaccatgtcattgttggaaattattttannnnnnnnnnnnnnnnnnnnnnnnnnnnnnttattaacatcctaaataagaactttctaaa

SEQ ID NO: 161546 - DNA, 6564 bp, Cannabis sativa
tcttcttctattagctcattcctttagctttggctctccacttgttacaatttgaaacaagagggtccatggctatacaagaagatgtaaacgaaagggatatgacactaaaacattcttcttgtagtttttgctattgctaaaataaataaaatatagattattttggttgaaccacctataattgaagtacacatacccaaatgggctctaaaggttctttgattacaaagaagatatggggtctagccgtcaccgatcgacatatgatcttagaaatatgatctagaaatgattacaattgagaaaaagtaaatataaaagagacacatataaaaaagtatatggacccctctcttcatgtattctttttagggttcattaatgccataaaagtattcaaatcaatatataatcaaactttttaaacacaatgcatcttttctatttaattacagttctgtctcatccaaaattactaaactccacacctcatacttttcatctatagagagagaaagagagagagaagctgtggcttttatcaaaagatagcaagcagacaaagtttccacaggttaagcttttgcagtctttgtggaaagaaggaaacagagagagagagagagagcgagagagagagagagcaggtaacggctgtttaccacaaggacatcatctttttaaagcttttcttttatgttacaaagaaaatagtgcatgaaagtaagggaattctaactcggatccccaaaactctgcattatcattctataattgaaataacaagtatttatcctctctctctctctctctaactttttggttattactgatcatgagcttcatatgtgattctctcacaaagttgaaggatcacaagcattaatacattattggagagagaaagaaagaggaagtactctttgcttggtgggttgttaagtttaaaggcaaaggtagtactgagtaaattatatagtagatgaccagtcaaaaagaagaagatggaaacaaagttaaggagaatatgtgatgaggtcttttatttacatgttatgatgctgctttcaatgatttgtttggtcattttcttttctttaaagcagttttagagggagtgaaagattatgccatgtgcacagtgaagtaagtcattgactaactgactcaaaccaaactcccagaactaaacaagtttatacttcattttcattagttcaaggcaaacacatctaacaaatttatatcatcattgaaatatatttttagcttcaaattcaaaaggggagaaaaaaagactaaagaaaaataaaaagatggtaggaaagtgcaaatagctctttagtttctctaaagacattttattcgagtgtactactttgaattaaagcatcaaaagaagagtaatgatgttgatactatttgtggatgctaatgctatatattactaacatattcgagatcaagataatcctaaataactaattttaattcatgaaacagctgatctagttcccaaaccacaagcacacagccttagcagaaaatgggaacttcaatgcctcaacaataaacaattgcttatgtttattttgaatgagcaaaaggtagagtgtgaatcttatcttaatcaagtgactttacagggttgggatccttcccaaaacccatcattgcatgagttgctaacatggaacctctacgagtagtttccataaatcgaccaacaagtggcagattaactgtttctctgttccaaagaggcttcttgttccacctacagtagaattggatcaaattcaattatgtatctggcagacataattctaagtaaacaatagtattgcaatttgcaaagttcctagaatatatgcttaacaactcagcctagcaatttataatatgacaacactggatataatcattcttgtattatatcatggtccacataggacatgtatcttaaaacaacaaaccaaacaggcacatcgcttaagctcggcaatttgaccatttcaataccataatgcaggtttaacaaagttgtattggaacttggtgcacatagtactttgatactgtatcgctaagtgataagttcaaatccaaaccacaggttatagtacattcacactgatggacataaaataaaattaagaagaagaaaaaaaaaactatggtgtcaaacagagtaggacagaattttcaggcagcacatattgaggtactaaaacaaaaacaatccattatcatgtaagtgatttaaaatgaagctagtggggtttttaaggttcagctagtgttcagtattctgttaaaggaaacaagacatatgatttagcatatctctttttattcagtaaaatcttagtagaatgagagcgtaccagtcttcatggcgaacaacctttccttccacgacatttaatttgatgagggatatcacatctatgtttctccccaaaaatttatactgttgcttgttatcaattaatatctagattcattacacaaattgaattcaaaaggtcaatttcaacccaagaaagaaacatctctagattaatgaaacaaatgtatgttaggaatgtaatacgaacctctccatttcgtggtgaagtcaaattttctgtcacactgtaatccacaattttggactcaccaaagacctgagaagtccaaacaaaaagagaaaggtaaatgaacaaaaatacttaatgacagcaacaattacaaaaattaaataaaagctaaaattgacaaaatattacacgattgctctctgatcaaaacttatattaagggtgatctatatgtctttgtaatgttcaactaatcatctaatctattgatttgatctaagtactggacaatcaagttcaaataaaaggtagctgcaaagacaaatacagctcttctcacctacagttccttgaaatatatagataagtctagataataaaaataataccaaacagctccaatttatttataaatgatgactaatatttagattgaaccttaaaaaattagagattagtttggcaggaccccctctctccaaattctgactaacttgttcaaaaaactaaaaactacctgtctttcccttgtaactagctactaatgtactctcccatctaactcagctacctcagcaaaaaccaataaccgatataacaaataagccgtccatttagtacacaataccacatcatttagattttctttcttctaacattagtgaaaggcttatcgtaactattctggcaccaccaagatttagaagagataaaaacttcatgtccttgaattagtataatttcatcgtcatgttaatgattttgtttcaattatctaaattctatatatcatgttctccaccattcagctttgctttaatgatataaaagccaatagttaggagactcagattcatctaagaattaatttgataatagccattacaccttatgaaactgtgtctatcactaacaagtgtgcacttgctgtgacatttatagttgtaaatggaagttattccatggtaaaattatgggtttctatgggtgctgggacaagtgaacaaaaaaaaaacttgcttgaattagattgacagataaggtaggtgggtttccaattatgatttcactgttaacatcaattcaacacgtgagcaaaaccttggaaagagagtaaaatgctgacttgatttgcttcactctgcaaaaacagcacaagacatcttgtaaggaacactatgacaaatgtcagactcataaaattaatgataccaaaggatataacaagcagaagctacagagagaaacagtctatttctttctaaaatgactaatgtaaatatattttagttaacatgttccaaagaactataaaaatctccgcaacaaggaaaaaacttagaacatctgatatctaagagatattttaattagaaaagataatgttattttattgaatcaagagttttttttatcaaataacacaacattggcaatcagaatttacctagaaagcagtgcatgattattcacaagtctacatttcagaaagaaacaccctattttgtgttgtcaagttaagattcttacagaactactaaaacaaatgggcacagttttatagactgcatttttacaaggcttaaagaactcctctaaattatttgatcagtgtgttctcactttatctcagaacatgcttcttagactagttcaaaatgatgtgagaggaactataatatataggctcatttttcagaaataataggatgaacaaaccatgatttctcattcaaaattgattatatacttctttaaaagtagcacaatttcttttcttttctttttttaaataacatgatataagactagttcaacattcattatgtcgtaataaagtacaagcttgattataacattacatacccatgagcacacataagcggatcctcgaatgaagcatttggggcataaatttcaaagtcttgtggcgtagctttggatgcatatctgaaacaattgaaaacaaataattccttacaactttacagagactactacaattttttacttggtttatatgccatcttatacatgataactaactttcacataatgagctgtgcaatcaatcttcgatctgcttaatcctaaaccattgaaattgacttctattttccaactctggcataagatccataacaagattatgagggctcaagaaataaaccatgtttacttaatcgtaatagaccatgataaaaagaaaaacaatgaattttccttttttacacttttacggtacaagttaatgaaaagtcacatataattattcaaatgaggaagttacaattttgtatcccttcttaatcatctctaaattatttccctctatatatcttttcttcatggattaataacttcaagctagagtatcattagtattaatgataaccatttcttcttcagttttggaaatctctctacaaaattaaatactgattaccaatcacaatatggacatattatcaagtggtctcagttaagttcattgtgcacatgacaacaaatctaacatgattaagattataataaacataaacatatacatgattaagattagacatacagattcaatatgtgggggattatttcatcagataagcgctttcttgagatgtaatcacatgtctccttggtacaaacttccctcatttgatcaatttcagcttctttacctttcaatcaaaatgagaacccatgttgagattaagaattcaaaggagaaaaaacaaaacaaaacagaaaagggaaagggaaaacaaaaaccaacatccaaaatgcagagtagtaggtggatgagagagtaaagaaaagaaaagataggaaaaagagaataatgcagccaaagcatgggaggttgcagtacccattgtggattctgagacttgatcggaaaacaaacggtttgcaatgggatactgaaggttgaaagaaggagacgatgagagcttcagaagatgaagggggagtgtcaacgtacggagatgaagggaaagaatagtcatggcttcatggcgcgctacgtgtacactgctcgtccattcttcgcttcttgttctatacgcaactataaccgaacctcaacccaatcaaattttgacttcttctccttaatattaattttctaaaaaagaaaatatatttaatattaaatttctgttttcataagctaaattccctatatattttttgtatttaattatgtcaaaagaaaatggtaaatatattcatttaatacgatgtattgtattatattttattgtattatgttaaattttattgtattgtaatatattatattagtactatttaatacaatattatgtttggtattatattgtattgtattgtattaatagattgtgtaaagttctaatatattttcaatacactcaaccccaacaccaactgcgggtctaggtccgagcccggggtctaggtctcgggtccggattcgggttccagtccaggtctgggtccgagcctcgagtccgggtcccgagtcctgggtcccagtccgggttcaggtcctgggtctaggtttgagtttgggtccgggtccgggtctaggtctgggtcccgagtccgagtccaagtccgggtctggatctcgggtctgggtgccgggtccgagtccgggtccttaatctcgagtccaagttcgggttcgggtcatgagtctcgagttcgagttcgggttcaagtctcgagtccaggtccgggtctgcgttcgggtctaagttcggggtccaggtcttgggtccggatctaggtctggtccaggtctaggacctgggtccaatctgggtcctgggtttgggttcgggttcgggtcgaaaattgatgttgatctcgaatcctttgtaaatattataatacaaggaccatttgttatgtattaaataatacaacatacattatattaaaaaatttagtcgtaatacattgttttatctaaacatagtgttatttatta

SEQ ID NO: 161547 - DNA, 3875 bp, Cannabis sativa
gtttgcggaaggctcactgtaaatctttcaagctatcaatcgatctaagagccaggcacttccaccagtattctacgaacttggttaatgttagggataaagacaagcacttgacattttcactcacacgtgccacttgtatcatcttgttgtatttttccaagtgtattgcgaatctatccttccctcatacaagtcaatatgtggcatcttaatgttttctggaagcaaggattctatgatcctcctcacgcaaggttctaggtcctcatcctgagaatctgaaagggctctgctctagtttttgattagtttagatagagttgcgatatactcttctaaccttttttatgtcacttttgggaagatcacgtcttcgtattttgttagttatgtagtttctaaggtcgcgtccacgtggccttacttttaaacttttgtacctttcttacttggcatccaatcgccaatgaaggtctacgatggacccgatgtcctcagaatgtctgtcagtcatccttttgtcttggttaatagaatcactgaggtattgtttttgccccttcggcttaggtactttcgtaatctgccctttcgacacaattttgcctccaggagcagaagggcatccaggctcgaaagtaccagtggctttctgcgtctaagagggccagccgaccgaattggtgtccttctgaggaggtttaggagaagacttcaccttaggttcacctaccttgcctttacctttatccttgtgggaatttgatgtttcagcctctatttacctaggagcatgctcttcaaccataacttccactgaggagtcatcatcggactctgccaagtcctcaaacttattttggaaatgctccgtcattctcttcattttctcagtgagttttttctactatactaactccgtttgagtaacttctaattccttagttactcgtagcaagtttggatcatggtcatcataataactatctttataatacccattcttaatgtagccatcgttgtcctcctcctcttccctgtcttcaagattttagtcgtcatctatgccatcatataagtttttagtgtcctctcctcagttctctgcactagcaacaccctcttctcttacaccacctgattgaagaccaggggtgagggagtttgcctcctcaatgacagtatccagaggagctttcttgcctatattcttccaagtgaacaccatggttgaagtggggcgacgactagccaacttttttcagctcccactgaaagcaccaaaatatttaccgaaattttcaaaaactaataattcagaacttaagaaataaataaaatagtaaataatagacgattttttatgtgatttgggtgttaataatacctagtccacgagtagttgtattggcactttgagcaagtatttggacaatacaagtgtttatagaatgaaccctagctctgcgctcctttcgtttctcttgatgaagaagaaaccttataggaatttttgtagaggttcgactagtatacaattattcaccttttgtacatacaaaatgagagtatttataaacatacatgtgggtaagggaattccctttacccaccttgggtttcgtactacacatggtgcaaggccaggcactgcaacatgatgatctgactgttggttggaaggaaatttccccatcatgtggtgtacggctgcagcgaaggatcccatatggacagggactcacgtcactcaaaggtttcaccttgtaaagttattacttagagaagctgttggataaaaaaggggcttcagaggcacgtacgtgcactgccatggtctgacgcagggaagaaaattcgatttgatgtcaaaggatgggtaatcgtcgctttaggtcctggatagggtactttcgaatgagctctaggatcaacaaccaaagccttgtcggatcacactgacccactacctttttggaatacttgaagatctgggtaactctgatcctccccaattgttgatggatagtaagagtcctggagccttatccttacacactaatattgggaaccgttgattggcttccaaaatataatagtctccttagtgttgttaagcagaaagtatatactgatcacagattgtctagagtggaatacttccgtgattaccacgtattagacatccagaaatatggataacacatcatctaatcttaaaatttaataaattgaaatgatgaaataaataattttgaattagatatgattaaattattattttataaataaatgaaataacagaaaaacaataaatttcgaaaattatgtaactaaacaaaaaatatctcgaattccaatctttttcaattttttacaaaaatatctaggttacttaaatatatattttattaaatacaaatttttgataagtaaaatgatatattattataattattattatttttctaacttataattttaaaataatgtgaatataataaaataatcaattattaaatttaaagtattatgattaaaatatctaaattaattagaaattttatcattatttaaatagaaatataagataattatcatattatatttataataaatatatcaatatgatatatcaaatcttataatttaaataataaataaaattaataaattaatctattttaaattcatattataatttaaaaatagttagaaataataaatttttaattttaaaacaacttaaatatctaaaattaataataatctcttaatatattaaatattattaatttaagtttaaaatttaaaaatatgattttctactaattctaggaaatattaggcttttaacaaaaagttatgaaaaaaattccttaaaattcggattgcatgcattcagcatatttatttttgtgggatcggttcaaggttctcgtgttccaatgattttggcatcaaaggctagggattgtattacacagtggatgtgtaggatttctagcgattgtaattgattttggtaaacacgcgatacctggacccgaggaggtcaaagtagtaaagaaattcctagatgtgtttctgaaggaatcacaaggaatactgccacagcaagagataaattttattattgacctggtacctggggcagaacctgtttcaaaggcaccctatcgtatggctccagtagaactgaaagagttgaagatacaacttcaagagatgctggttttagggtttacccaacctcgtgtatcaacctggggagctctgattttatttgttaagaagaaggatgggactttttgaatgtgtattgactatcgagagctgaacaagttaaccataaaaaagaaataccctttacccagaattgatgatctattttatcaactttagggtaagacggtattctccaagattgacttgtggtctggctatcatcaactgaaaattcaagaagaagacattccaaagacagcttttcgaactaagtatggccattatgagttcctagttatgtcgttcgggttaacgaatacgctagcagcttttatggatcgcatgaatagagtattcaaggaattcctccataattttgtaattgtgtttatcgatgatatccttgtgtactcttgatcagaagatgaacatgaacaatatctttgcatgcatctacaatggctcagagatcctaaactctatacgaaatacaaaaagtgagagttttggctgtcacaagtatcttttgtgggacatatcgtcaggaaagacagaattgcggtagaccaaaggaaggttgaagtagtgaaatattggcctaggtcgaaaatgttgggttttgtgccctaaataaaacccattac

SEQ ID NO: 161548 - DNA, 2097 bp, Cannabis sativa
ggtatttcccgagcatattgaatcaaatgaaagagaatggtagcacgaaaatggtgcgtcgtttgggaaaaaaattatcttgggttaatggcacagtgtctctccatagtccacccaatgaacaaagctatcagaatactcctcgagaacattggatctgcgtccataaaccacatctgcttctgcttcagttcgttctctctcctacacataaaatggagatagtaagtaaaactattttgtgtgcgcattccagcacagttccaattataaagatgtaaacacaattaagaaatgaggtctgtacattataacaaatctaatctcgtagaactaccgaaaccttttgacgatgtactagttgtcataaccatacattattgggccaaactaataaataccactctactaaaggaaaactggaagtcctaagaaataataagcaataattcccatatcatggctcctaaaacaatttcaaaaacaaaacaatcaggagttttttatttgaactatacaaaacatgaatcttaacttacagccaccttgagccattaatttcaagagtagcctccaatcaataacacttttgaagaacaggatttcctatggtataaatatcattggctgatcattgtaatttatgagccaactggccctaatttaccatttaaccagttatctcaatacaaaatcacaaaataattactctttttgttcaatacagcagattaagtactgacctttgaggtggatccacattcacttgtggatggggtagattctcccattattccattgatgacattctcagatgatagtccttctattggagagcttgtgagcattgatgacctatacatgttacatatccaattatagcacatttcagaatgacaagaaacaaccctcccaaaattaatccatccacgtgtattttttctgtcctccaaagcaaaattataatcagagaaaaaaaaaaatcgacctaatactcgtgtttgtaattgagctcaaatcttaacatttaggattatttgtttctcctaaatctacacacaccatcaataaatgatttccagaaactgaatagaagattacctctcataaggttcttcttcacatgaattcccagaagaagatagccagtccaggtcaagaaagtttgagaagtttgacatatcatgttcaacaaagtacacttgatcgttttcatggccgcgatctctttgaatatccccaaaaagttgtctgcgaggcattgagggagtatacctacattgatattatcatcagtgtaagttttcaacaagtgaataaatcaatttaggccaatttgacagcaatctgcaataggagtacagtggtagaaaccttgaatagttagtaatatcactctcacaggttgatatttcaggagatgattcacttagaaccttcttgtcttgtgattcctcaggtaaaactgagtcagaaaatttatcctgcttgccatttctagctgatgtgggtgagatgcactgatgaagaatgtttccatccgatagagatctttggaaaatagacctaggacaaaaataaacaggttataagaatttaatgtataaatgtgacaataagacaaaacaatcaagaaaataatctctagtgtccttgcatcatctcttcaagaatcaataatcatgttaaagcttgttttatctgaattctttgcatctcaatgtcaagcatgttaagataccttccatcatctctatccctcccagaatcgtaatgttggtctgaatctaattcccagagtgcaggtttaccctgctgtggttggaaatgcccaaggaatctgctcaagatataaaaaccaaagaattacttctaatagagcagaacatacatatatcaaataataaacccataaaaatgcataacaacatcaatcaacgaacactagaagagaaagccttttggataaaagagtaagtattgtaaatgatagaataacaaacagcatgcagcacactaattttttcacaaccaacaaaggcctttaccgatcatgaaaagaagagtaaaacgaactaattgtttctaatgaggcag

SEQ ID NO: 161549 - DNA, 4981 bp, Cannabis sativa
tattcactatctctaggaaccaggaattagtcatgccatttggtctcttggctggttgtttattggctgatttctttaaagaaacatctattgaagtgtttccaaactcacaagtacgttccatagtcttctcttgactcttcaaataattatggatgcaacaatatgagtaaaatgctagttttgtttcttggcagggcaaaaggttaaactggaatcttatagttattggctgcttctttgttctggtcaagttcatctctgcatttttcgggatcagaggaaaggtgtttattttacatgttgctaatggtgggtttctgcaagttttgtggctttggaccactttgcttaaggggaaaaatgaaggcaaccaagagaactctttgtcgcaagaacatgattcattagccatagaagcaaatgattagttttgaccttaaagcttgtacattgagaagccttactctttcttctctgaatcctataaacaacaaatttgccaggacttgttctgtttttctgggtaaaaattattggttcattcataccaatttagttgtatacaatctaaattaacttttataacttaatgataattaatttcctcatggccttgtgcatttacatttacttgcctgccgaggacccaaagatgcatggacttgatgcttccttacttgatgtcttgattttcgtttttctgttttttgtttgctccctgtcgaaagatttagttcatagagacaacaagaaactacacatttccaaagataattgcagttttagtgaaataaaagatttgtataagtactatataaacggagtatctcacagaaaaaatttgtggactcttcctttgtgtaattttccaactttactgttgtttgttagcacgttgcattatgccagcaaaatgccttacgccatcatatatctctacaaggctatctgacataagaatttctcttccaagcactatatattcactcaatttttttttttttgtaaggatatattcactcaacttgatgactatagtttttacaaaggtgtaactatgcacacaaaaatatcaagaaaaaaaatattaaaaaagctcttttcacttgtggctagctgattctgctggatgattcccctgaaaagtgaaaagcaaagacagccatgaaattgtatctttgattccgaaaagaggaagtcttccaagcattggatgaatcaaacctggcttcacattttctggaacccggacaggaactccatcctcctgatgatttgaacatccacatttgaaaaggtcacgaggatttactgtaaactggcagtaggctgattgcaacatttgatggatttcttccatcgctccagactgctcatctcgctggtccatatcaataagaatctgcattgacaattatcaataatgaaaaggggtgcatgaaggaaacaaaaaataaaataacaaaaaccaagcacgaaactaacctctgcaacatggttcacaaatatgggattaaaccgctgccgacagtattcattaaaaagaatagtgaaaataaccagaggaatggtgaaacctgatgcgactggagactttcttaatccaaaaaccccaagagcaattatttgcatcaaaactaatgaaaagatggtcgtgttgtgaactataggccagtactgtcctccactttcgtattttgaaacatacacgttcagaacctgtagaaaaaaaattaatgtaatgaaaaagaaaaagaattttctttccctaaccctttcagttgctttaatcagcaaatatgtagggaggtaaagggataacaaattgaataagccctaaaggaaatttttttgttatatgtaaaatgaacaaaatcaatacgatggatgattcattttaagcttgtcgtagagccccctccaagatagagagtatagcatagcatacaaacacagactgaatttagtttataccacattgcaaatcagaagaagactagagtgtgcacctgattgcgatagacaaagaatgccattataaaataaaccagcaagaagggcaatattaagggaaccaagatggaacaggtgaagccaatgaatccaaatagcaagagtcttggaatttcagtatgatatggaaaagacagggcatcatttgatgagtctgacttgattctgagtataaacttttttatcaaattgcaaaggagaggataaagttgcatgacttcacatgccaaacttgcccaaccagatgacaaaacatatgtcaagaagaaaccggcctgcaaatttcataatcatgaatgaacgtaggtaagaaaataatataatataccaactgataccttctatcaactaagcacacaaaaccacaggttaaaacagaagtattacaaaaatcagcaatcaattattattattgctttaaatacacacaaaatatagaagggaaaatttgagtttctatattttgtagtatgccttactaataaatatatcagccttaataattattgaaaaaataagtgtatgtttctaaacattggacaaaactgcccctccttaacaggcccccctctctctctctcacaaatcgtctctcaagctctctaccatgatgccgccaccaccaccattgacggagccagaaaatataaaatagggggtaaattgtaaaaatattaatttagtagaggcaaattgttatcactatacattttttttatttttcttacatattttatatataaaaagttatggcccctttcggtgaccattttataattgaatttttgtttttttaactaaaaagttgagaatacaagaaaaaatcatgttcggtaatattttttgttttttaatttaaaataaaaatttcattaaattttaaaaacccaattttttcacttctaaaaatttttaaaatctcttccatggcccactccgataaagcatctctctctccctccctccctctctaagaatagcatgacaataaaataggtttttagggtggaaagttttctacaattaaaagatatgattatattgttaaaatatttgggtatatatataaatataaatatatatatatagtttgggtttacataagagagaaagagaattgacaataaaacaggttttcagagtgtaagattttctaaggtatgtttatattattaaaacatttgggtatatatatggacattcgtttgtgtttacatgattttgaaggcattatctgatttctgttgttaatatctatcttttattgtctatgatctcttttgtcaatcattcaatgattccatgggattttggttatgggctgtgtttaatctcttgtatttatctgattttaggattttcactcgagtttgaatagaaatgggtaagcaattagaggagtgttttgtgtgtcttgttctttaatgtatttcgatccagtgatcttatattcagcttagccattttcaataatctggtttgttaatttggttttgtttcaagaacccatctttctgttttcatcatcaagctcttaattatgtccagttttgtactaaattcattgtcctctcaagctctttacaattagttatgcttggatgaaagttggttaatttttgttgcagctcattgttgtgactattgaatagtcccttgtgatttcgatgatagtaatagtagtacttgtagcgaatggctgagcagttctaggcttttgacaacattgaaaagaaggtgagacacttatgttgctgaagttgaattgagaatgagttctttctccaaacacattttgatacatgttctgctatgtcaagaatgagttcttttagcacttggttgattaactttttgagaagaagtaaaaccagaggtgactcgatctacatgatatgtcgttttggtattttctttttttttttttttttgcactaattttggttattgttttgctatttcaagaaattaggttctgatttgagttattatagcctgaattagggatttgtgatttatgttcatattcttatatttttggttcagattaatttgatgggcttttgttgatactagtgtttagtttagtcttttttaagcttttttaattggtttgaaattgatttttttgggggtttggttttatgatattagttccaagaagtcatatagatgatgagtacgcaaatgcagcagaaaaggatcctaaaattttgttaactacatccaggaacccaagtgctccactaacacagtttgcaaaaggatgattttggaacttcccacttaattatctttcgtttctccatgtttttgttcatttgcattggttggtaccaatctattctgcaatgctttatctgatacttgaattgaatttgtttagcacttggtttaggcaactttttgagaagcaagaccagaagtgagtctacatgatatgttactatgtaacttaacatgttagaatataccacaatatttgttagcttatgattattgctcatttcttatagaacggtttgtttagttttaaaagtaagattagccattccgtttaagtcaaattgactgggaatttcggaatagcatgagagagtgagccaacttgtataaagttgaaaaatatttcagtcacgttgatgtatttgattggtttacacaaatattatgcattttttctatgtttaattgttatctatttttagaaattttaagactgtcatttaattacaggtgacaatagcgaagtgctattatcaataatagcgaagtttttatttggctttacaaagatgaataaatgtaagaactatagatgggacctatatctctattatttttttttttaaaagagaaaagactcatttatctagggtccttcccattatttattaataaacctcacttatggcggaggaaaaccttggttacagatagcatctaggaagcttataaaaatgtt

SEQ ID NO: 161550 - DNA, 946 bp, Cannabis sativa
  modified_base (302)..(305): a, c, t, g, unknown or other
agtagtagtaggtgccactagtgatgatcacaacactttatttggtggtggacataacaactataatttgctcaaatattacaatcaaaatccttataaaatctcacgtcaaaaaaaaaaatccttataaaatctaaggtacaacatttaatcttataatctcttgccttttacatatgcccacaaaactatatataccaaattgagattcctatttgagattgcatttaattgatcattggattcatatgatggcctaattaattttatttgtttgttaactaagagagagagagagagannnngagagagagagagagaggaaagaagaagatatgttggtggtgatgttgtttgttaactaagagagagagaggaaagaagaaaagaaaaaagatatgttggtggtgatggtggtgatggtggtgatctttttgtgttgttatgttaaactacggctatggatgaggaaagtcggtggtgcaaagttaggacaaagcaagacaatacatttctaagttgtacacgtttctacttttctaagctgtgaagtaccaaaggaaggactataaaagtcatacaattctcttgttagatttacatcacattggtttggtctctttggatcattaaaacaccctttgacccaaaaattcaatcaatcaaatcctatcgtattttatcctttcatttaaactttctttcaaattattatgtgtaaatgccccttggatcaaactttcttttaagcaagtccatttccttgaaaacttttataaaagaaataattcgatcataaccaaacatagattacaatttagaaattctattcataaatcaaaatgaaagaatcatcatttaattacgcaagatgattatacaatatttttataaaagtgtaggtactctactattttttattgttagataaattaacaattaaccc

SEQ ID NO: 161551 - DNA, 10624 bp, Cannabis sativa
  modified_base (10585)..(10598): a, c, t, g, unknown or other
aaaaaaaaaaaaactaaaaacatagccaaacagtctcttaaaaattatagtgtttctaacgctctaaaaagtacttttaaaaccggttgggtttccaagttagttcattttattagttttaaagaataaaaagaactttctctggtctcaaagcttcaaaaaatgtcattgccacatcaattatactttcatatggaaaaagtaataaaaagtttataactgaaaaatggaaataaaataaaagaactcaaaacccctttctctctttttcttactccttgctattattcatcaacccagctctatcgaggaactccaccagttctggtggcaagccgcattccctctgatggccctaacctggctacaccatttctcttcgatcgtgcttctccgccatccatgcccactgcacagctctgccaccacttgaatctatgcatcaactccgctacttgtttaagacaaagatttgtgtaagctttggttacacttttggttgttttgttgtttgtacgaattttgtttcaaaataatgagaaaaataaatattaatccaatctcacaagagaattttgtagaaattttacttgaaaaaagaaatgatttacagaaactaggagcatcattatctacatctagacatccagccaagaattcaggagccacaactctgagacttcctttcaagcctcgacttatacaaaccgttgtggctatgccagaagattatacaatttcagaatgctcaaatgaaaagctaacaaggggaacccaccaaaaaagggccattcaagtatcagtgaatgagaactgctaaaagaaatgtccctaacctaattctcatcaacaagaattggaaaagtagaccaaatgatgtgcgaatctagggcctcccagtcacccccagaaaggctggctagttcacataatgtcctgttttccgtctatgccggctgaaatctgatacaaacctgaaagagaggccacatccatcaatcttgcactggtatggtcgctctccggtgtgcacgcgtatatgctcagtccttgcccatgcccacttgaaagacattgaacaaccttcccaggggcacttgaggggcctctggtcatcatgaacacggtggtgaatcatcgcatacttatgagagctaaacctctttccacacccttcatgtgggcagcggttacgtttgtgcaacattagctctgccttagtgtcaaaactcatgcgacagctttctaagtcacatttgtgaggcttccttgaattttctttcttatccttaggaggacctctaacatttgaagttttctttaccttcactgcaggctttctctcgacttctctaagggtatcagtttcacaacttgttgcatccttcaaagtccttggtcttaacccttcacatggactcctcgtaaagccattgcaactgaactggttttctgttagtagttctatctctttcttcctctttcttccttttactgggtttgaacaagtgtctatatctttagactcgctatccaatgctctatcatcctgcgacgaacaaacttcactaccgttgcacaagtcttcattagtatgagtctctcttctaacccttgaacatttttggaaggaaatgctatttggcaaagcagtggtctcacttttcctctttttatcatctaaagtcaagccatcaccgggatgttctttggaaggattccatggagtttcagattctccaacacttatgggtgtaggctgatcaactgtttgtgtaacaggagaaactgatctctgctctccatttttcatcgaggcttccttatgaaatccattatctgaagtcacatccgttcccaagtcgtcttccactgagctttccctgagaacatcagaatgttcctctattgaaacacaatgacggtggtggacttccatttgtgtcacagaactagaagcaagttcctcactactcccatctgaagtcccaactttttgctttagaatctgttccgaagccacagcacagcataatttagctgcagaagaaggatcacttaaaaattcagaagtttcttcaattaagacaggaatggtctcactaaaatcctttgtagaatgagtctcgctccgagctttagaagtttcttcaactgaggcaagagggtatttgtttattctagttttaatttcttcttctgattcaactttaagagctttaccattgctgctggggtcttctacagaacagatctctcctgaacaattaaagcattcttcctttgaagtaccaatattatctattatgactgtagagttgcaagaaactggttccccgtcatcaattctggtagcatgcactactagcgtcacttctttatccacagaaacagaatcacaaacttcaacagtcatggaaacattctccactacagcattttttatttgtcccatcaagttgtcatcctgggattcaatagcatgtgagtttgtcatgttagaaagatcagaattcaaatcagtcaaaacaccctccttgccagccttgacattggagtgcccttcagaatcaacattagccccatcagttttgttagattgtcctactttaagctgatctcctagaagtccggagctttccttagtatcatgggaaaatggacaagcctctagtttttcaacaagcttatcggttatgctgactttttgggttggaacactgctctcatcttgcatcttagaagcatcagaacttgctacaagacaagcttgactatccaaattcatttccttcaaaacttgattctcaacacttccacagctagctttcatgctattgttccaagttgcttcagatgtctggttttcattgtgtgtttccgatatcttaattaaagctgagaatttacagcttgtggaattcccaacatcattaccagtttcagatgctcttttggcaagttcatcaagatctccccctttagcatgttgtccacaaaatttacctgctcctgttaaaccacctggttttctattgaacttccttcttgaatactgaatcagttttttttccttctcaatggtggaagatgtttcacccactactttcttcacttgagcactatcaaatggtttaacataaattttttttgaacgagatcttctcaactgccacttgagaggcgagaaatcttgagaggacggtttatcagagaacaacccacccaatgtaagagcatgtcgaacttgcttagaggaggagtttcttctgaccttgatacagtgctgcaagttgatccccaattttgatgtccagtctttaccacattcatcgtgttcgtcatcaatagcaatatctatcaagttcagatcatctttcgatgcaatatctaaaggaacctctttataattaaaagggctaccaatttcctctgcaatggcagcagcatgtgcctttatcttctgatagtctgcacaaactcatcccaaaataaaaataaaaaaataatcaactacgagttaaaaaaaaattatgaaacatatcatttaccagttaccgattcaattttcaacgatgacattaaattttatgagccatcaggcaccttttataagagaaactgagcaactcaagaaaatggaaaaagcaagtacaaatgacaatgaagtagcaggacaatcttaccagaatgacaaattacaagcacctctgctccacctataccctgtaaaatgtctataatttcaacagcatgttccaggcagaagctacgtggtctcagaaatttattgtaagcattttgaccaccatcaaacttgttaactgaaggtactggaagatccattgaaggaggattggaaaccgtagaaacattctctacagaacaaaagaggaattgcatatagtttggtgtttaaaagatccaatgaaatgtttccaatgcaagcaaacttgtcttgtgtttaaacaaaaacattaaaaaagaaaaaaaaaaaaaaaacagtgattcacttaaactactatatcgacggtaaaacattcacaattaagggtaggtttggttggaaataatgaaaacagaaaaatgaaaatgggaatatgaataggagtaaaatgaaattaaattgaatgagaaaaaaaaggtaataaaaaaataaccaagtatacaatgagaaatataaaaatgactgactcatgttttatgtaacaaccaaacaaaggatgaaatgaaaatggatttattttcactccactaacttttttctttttcctggtgaaacaaaaccccaagcttgtattagattgatgataaaaaaaaaagtgggttagaaaaaacccgcagaaaacaaattcaaacagggctaattttttttacataaaatattgctgttccctatatagatcagagaacggaatcacatagaattccttaacaaagccaaatgggcagccaatgtcttattatattgataactatgtggacacttagacattcaaaattgtagctatccacttgcaactacatcaacactactcatgtaaatctcattattccgtaatatgtctgttgtggttgttatcaatgagccgaaaaaataaacatatatactactaatcttttccatacaaaagaatgctgatagaaaaaaaaaaatcaaggacaatatacaagaccagtgaagtaaccagtacctgtaatagaagcattattagagacatcgaggtccagagaggaaaaacagttcaaatatcctccagggcattcttgaaacagaagatgattatcatgaagaagttctagtgaggccttttcggatggttgtaccacagacataaatggaaaaccaaggataccacaagctacacatgccaatgcccctgagtcaacttgaagatcacatgacaaatcatcgctacccaaatataaatcattcaaattctccatatacaaattcatctcatcaagaagattgttttgctcattgtcatgttttctataatcgaggggagtgttttctgttgctgttgaacttgtactaacaatggcacctgcagtgggtgcaagagtctctttgcttggatatgttagtatatcaggattccataatacagcacgatatcttgaatctttttgaagaacaatagataaggtattgttttcattcaacatgtcttcaataaatgccttctttactaaaaactctcttccttctttcaggcgatccttcagacgagaactccgcacaccaggaagcaaggatctcggcactctggatacaaacaattcaattaaataataaataggtattagatgggcagttgagttcttttctaaagagaatatgcaaatatatcgagtacacaaaaatcaagaagactatgagaatatcctgaaattgatatttatatggccattataaaaacatataagttttgattccaaatttagagcataaactgaccttgacataaatgacattgtcaacaggtatagcaactgctgatgagaaagcatgggaagataattcatagcagctctacgcactgcagcttctttagccactttgagccactgtggtgtcccaaagttagcagcttccccacaattaaaacctaagttcagtgacaaacgctataattagttatgaaatttataaataaggaatgggcggcaagtcctgaccatagtagcttacaaatagtgaagtaaaacaaatatggtaaatacagagacaactagagagcaaacattatattagacataaacagaacaccataataaaactaacaataattacattgattggtggaagtatgcatcttagatcttatttactggtgttctaaatataatgaaaaatcaagtttaaattgtattctcaaaagctttcccagacattatttatctatctacaatgattctgcttcaagaaaactagtagcatagcatcatagtcaaggaataatcttcttataattattctacccaaatatccagtaaataaacattatataagcaattaccatggctaaatcctacatggtaagcccttggaaatgtcacgacaaattcaccaggattctgaatcaacctaaacaagaaaccaagaaagatgtaagcaaaaagtcacaaccatataaccaaaagaacaaaccaaaccatgttttacaaaccaccatatgtttttgttaaaatatcttctttctcttctcttattagatcttttgaacaatagtactaaaatgttaatgaaaccaaaagacaaagcgaaaaaaaaaacacagaatctcacctgcaacaaggtatattagatgcaacaactacctcaggggacactagagtagtcttctcaccaagtagtgttagtgcagctgacaataagagaaactgaacctgagtacaaagacgctataaaaataatgaaatccaacattttaacttcaagtttctcattgtaccagactttaagaaaatttaggcaataaaaacccagattaaaacctcagacggtggatgagatgtgtactcttgttttaagtctgtttaggtctatgaaaatttacacaaaattaccaagcactcaaaccaaaatttaacatacctaagtggtcaatatcaccaccatatgcctcagaacgcacaacttcctcgaaagcaaatgcataatccccagggacagcataccaagtctttgaagatccagtgtgaaggtaattcatgctgtgaagctcgtgatcttcaacatgccacgcaaaccaactaaataacataccaatgtacaccataggagaagtaacacccgggatatcatctggcatgaaacgagtaagtgagccaggtgaccgtgaaattacttgcaagttccaaggactgtttgatagcttccaacctgcactaccctccttctcacaagaagaatattgactcttctttttagatgattgtgaagttccattaagagggttcattggtatggaagttggtgtttcacatacatcagaaccatttatatgagaagcatccgcattggtatttgaaacaactattccatttgtaaccacttcattgtttttgcaattactgccttctctacttctatggtaaaagtttctctttctcctacgcctatggaaatagcggaattgaccctcgggttccccaaaacctgaacctggtacatcattagcatattccacatacataggcttctcagaagcagctttccaaaacattgcttctataaccaatggagaaacttcctttatcatacccaattggctcttagcaaaagccctggacttagtttcaaactgctccaaagtatagatctccccactttgccaaacttgcttatgaacagatgggggtggattttgaactgcccccttcgcttttttcacattctgacctaattcttgctgcctagtggtaaacacagcccgaacctcctctccattactaccatccaatgaagctgtttttgacaaagaatgattgttcaccgaatttccatgagaacccaattcagggctcttcaagagcgacttattcaagttgttgaaaacatatttcttagatggtttaggcaatggcggaataatcttgcaaataccaaaagcaccagcttccttctcaattttcgatatataagcaattgggtcagcgaattcggtgtcggtagggcgaaactctggagccaaaggcaacccttctagccatttgggtatttcaacattacccattcactatttacaattcaaatccacagcataactgataaacggcacaaagatagcgtctttcactcatttaacattgtccaataattcaacccaataccaatagccacccaaatacatcaattttctcaaaaccctagactgtaaattaccggtgaactcccaaaatgaggtttccacttggtattacatccaataaaagtgaaaattgggattggaaaaaagaaaataaaacgcaaaaagggaaaaataaaaaaagaaaaaagaagaaaagagctgttagaacctgtaaatgcacgagactgtggatgatttatgccatcaaaatcaaaagcacccaaaaaggagagagggagagagaaacacagaggagaggcagtgaggtatttgtctaggctttgtgtgacattcttaacctgcgcaaaataaagtttttttcataaaacttatctaaactgaaccggggaaagtatggcgcatattagagtcaatggttgtaaaccgtcggatcactattattcgccttgatccgcaaacttatcaataggttgcatgcgtcaatttacaccgaatgggcgcatgttagtgggaagcggtagaaagcgacaccgacggtgtgtatgatttgtaccatgacatccatcttgaaaaccagtcgtgacgtagaaggacatgtggtttgtagtggatcccacaagattttgctgacacatcttatgagaaatcttaaaaagtcctagctgtgtctagcaccatcttacgtatcaatattcaggttcggtgatgggcataggctcggtactagtggcgacgcgtaaatctggccaactcgctcatatgtatagacgagatgaaagttaaaaatagagagcacgcataagaatttataataattcactccctgtgtcacaatagtaatagagctatatttacttcaagtttttattctcacgagattgattataagaaaaatagctaagtttgaaagctctaatttttagagagatgctctgaccttatgagtgtttttctggatgtaaaaaatgagttagaggagctatcttttaataggagaagaggtcctattaaaataataataaaatatgaaaaaaaatacatttaggctattttcgaccattgatgataatctaatggtgaaaagactctgaaggtaagttatagattaaatttgcaactctcttgaggacgaaagttgaacttgatcacttcagaattgcgattagagtgtgaggcatgacttgatagaatattgaaataactttgaaacgcaagctgaatcgcatcaatcgaatcaatattgagtgagttatgtttgttttattgaaggttgttctgattccaacgtctaagtcgacatataatgtcaacctagacgttgggccaaaaaaaaaaagggtttaggatgtacttttttatgcctaagtgatattacaactacaatgttatcctaggcttcggctctttctatacgttcttcttcttttttttttctcttcattttttttaatccttttgtttttccttttttctctataatctgaaactaaaaattctttgtttttccataaccaattttgaatttttttgttcaccggtgcggaaaaagaaaaaaatctttgtctattctgtccaaaaaaaagggagaaatgactattcgcttgaaaggatttccatataagcattttacgcgtttgggtgagcatcgggcatgtgattatgtctcgataaaaatctgattgttgtgaaaaacgtattaaggaaattacctcaggctcttcataatcgtcgttatttttaatatttttagtaatctcttgtggattattagatgtattaatataaatattggtatttcttaggtcaagattaaaaatcactacacgtttgcattttcttgaacaaatttcaggagttcttgtgaacatttcttcaattgggctgtcagcgatttaagctccaatagtagcgagatagtaaatcattaaagagagaaaggttaaggtaaggattagttttgttttaagttgaaaacggttggttttatatattgactttatttagagtagttgtgaagattttgacttcatgaattttttttgggtagctactgaactagttttgatgtttatttgttgaatttgagatgatttttagttagaaattgagtttggaacttgttagagcttaagcacgagctttaatggcattttatgtttaagggctcgtttttaatttctgttacgttggtactgtagtatatatggtatatgtgtgtcctatgaaatttagaaataatttggataggtttcagtggtgtttcagggagtgtaaaatttgagattttcgtgctaagaaacggttcaccatttttaccgaaacagtttctcgtttctagaaatatcagggagattagaaaatcgtattttggtcataacttttcattcgggtgtccggtttggacgttctatatattgtttcgaattttgtgacgagctctataatatggtatatgttttagagccaaaatataaattttattttagtgtatttataccgcggggtttagtagaaaaccctagattgtcctttgcaaatattaagcaatgttttagaataaacacttattagtttactgttgttatgacatagggccgagaccatcgggaatttttctccactttggttggccaacatgcatgaatttagattaaagataagaaaattataatgtatcacatagcatgataggtttcttgattgctgattgcctaattaggcaatgcggtatatgggtgttagacttgttgggaatattttaccannnnnnnnnnnnnntaccatgtatgtttcattaacatcct

SEQ ID NO: 161552 - DNA, 2176 bp, Cannabis sativa
ctttttaaagtaccagctcatatcttgtttcatagaacaattccaaaaatcttgatccatttaacccaaagaatatcttgcttactagagatggcccataacaacttaaacatcatggttaaattccacttcttcccctctcaaaagccagtctccccaaatattttaggaaggcaaacttgctctcaagacgaaaggtggaacttacttcagttttttttcaaaccccacaaaaaatcacgaaaacttttaataatggcaacagtatttttccaaggaagaataaaaagactcatccagaaattgcgaattcccaataagaccgattgaattagtagagctcttcctgcaaatgagagatttctacttgcccaactattaagcttattattcaacttatccacaatgataccacaatctgaagctttccatttggttggtctgagcttaacccccaaatatttaaggggaaaaaaaccttcattcatttaaataatctctataatattcatttaacaagcctctttaatactcccaaaatagatgagagacttcaatctatttgctgaaaggccagtagattcacataactctttaaaggcactatacatcattttaactgagtttgcctttataaaacatgatcaaatcattaataaagtagagattaaaaagcttaagataattacaaagagggtgacccccgaagccttttttggtagacatttaggccaacaacctagtaaggtaatccatgattaacacaaagagtagaggagagatcgaatcaccctgtctaagccctttctcacccttgaaagacccttgaatcataccattcataagtagattgtactttgttccctgtaagaaaattagaatcgaactattaaattgagagggggagcaaagacccttcaacagatttgctacaaattgacaatccacattgtcataagctttactaagatctatctttataaggcatctatcagaaacactcttcctagtgtagccctttaaaagatcctgaaagattaagatattatgagctaataacatgtttttaatgaaagccccttggcagttgttcacaagccacgacaacaccttagataatttagaacaaatcatctttgaaatacccttataaagaatgttacaacaagttatatgtctatagtcattagcattaattggattcttacttttaggaataagagatataacagtttcattaagatttgagggtaaaatatcatcttggaaaaaattcaacaaagaaatctcatctccaatgtcttcccagagacccttgaaaaaacccaaatcaaatccatccaaactcaaacttttggtgttatggataccaaaaaagactttcttcatattactttgctaaaaggtactctaactaaatgaacatgttgctccaaatttaagcaattaccataagagagagtccacattgatttttcaagaagtagaacttttcctctctattgtatttataaaatgattagaaaatgttctacaactttaaagtaatcatcaataacaacatcattcacagtgtaagtagtgactctattctgtattcttctctttttcatataagcatgaaaataatgagagttttcatcaccacatttaatctaagtaatctcactttgttgttttaaaaaataagtaaaactactcacaaatcataaaaaaattgatgtaatcttctttctttcaactgcaacatcaggttattaggatcactcgcaagatccccttgagctctgtataaagataacttggaatctttgtattttgcagtgatatctcctacttccttcctgctaaatctcttcaaaacatgcttcattctatataatttcttagttatttcgttgaggctgccataactgttagtcttcacccatcaagctaaaacaatattcctatagccattgtgcatcatccagtgattgcaaaatcaaaatggtttattaccaatgttgcctagctcctgatgtttgataatgtagtagctatgattcgaacaaggtttccacttaaaacaagcttcatttttaggaaagaactctaaccaatgtgttgggttttgttccttaaataaaactcattgtaatataatcatatttactaattaataaaagatcagaaa

SEQ ID NO: 161553 - DNA, 3925 bp, Cannabis sativa
  modified_base (3252)..(3255): a, c, t, g, unknown or other
tacctcatttggtttatccaaccatcttgcttccatgtccataaccgtaaagatacggtttggaactttacgatgtcgaatactagcatgaaacatagaagtattttcatccccctctttaatccagtgcagcttagctttttggtggagaaaagaaaaataagttgagtgtacctctttatagttcttcctaagctcaacttcttgttcaataagttcaccacacaagggatctttatgaagcttctcttggcagcccaataaatcttgtaaggctagtgtatcctttgtttatatatcactaaagcacttttcattcaggtctttcaaaaccattttcaacatcttaagttttgaaaccacaccatacatcttgcttcctttgatattcagtctccaaacttcttccactttgtctagaaatctaggtgccttcaaccacatatggaagtatctaaatggagactttccatttttcatttcgggatatacagaaaggatcacgggagtgtgatcaaactctccttcaggaagaaataatgcttcagccaacacatacttgtctagccataattgattaaccatatagctctatcaatctttgaataaattctctcttgaaccccttgcttattattccaagtgcaaaatacccaaaggattttatatcctccatttgacaatgttcaatacattcttaaaaagctgatttttttttgtggccgagctctcatcccaatcctttcatcattatggagaatatcattgaaatctcccatcattaaccaaggactaaggatgctatcagcaagattcatcaaatccatccaaaactctttccttctattttcatcattgaaactataaaccaaggataccaatttttttttactatttatgtggttcacctccaagtgaattagtagtcaaataccaaccatcaaacatgtgtatatacaaggcccctaaattagcagccttcacccttgtctcgaggagaccaaccaaacccattttaaatttagagatcaaattcttaacctctttttgcttcttgagtgtgttgattcctcagacattccaacacataattctatccattgagaataggaggaaccccccctccttgagtattaccctccactatcacttccgaaccttcctcttgggcagctagtatagtgaaattatttgaagtggacattggatgtggcatggctttgatgagttattttcctgctcttttaacctcttgaaatcgttcctcatctactcttttttcctcctttttctatgttggttttttcttcacaatcctcatcttttttacttcctctttcttcctataaacttctgaagtgtgccccatacccgagcaattaccacacacaatcggtagccatttgtatttgataaaaagatcaacttcctggttcatttcattagtgaaagaaatcacttccgggaatgcttgatccatctgaacctcaaccaagatcctcagataattaaacctctctttgttctttgtaaagctatccaacatcaatggcttccccaactgttcaacaattttaaagagagtcgttttgccctaatatttaagatcaaaccgtggagttgaatccaagtggagactgtttgaacgtcttctttcttaaaatcggtatttggatcccacaacttcataacaatcggttttcaatcgaagaacaagaaaccaccattaagaacatcatccttgacattaatactttgaaactagactatgaatacaccttgtttgagcactccaactctatcaatacttgtatccttccaaacacgtttagcaaacccctcaaaaatgttcactggaggattagcacctaagacatagcatactaatgccaactgccaaaatagtatttcatcctctatatctgctaactcaattttaactcctgagcaatttttattcccctgtcccttagatctatcaaaacgattactcaagttcttaacaatattgctagatcgaagaatgggagagaacaagacataccagatttaaattttgcttcgttcttagcagttgcttccaaaaaattagcaaaatctgccctgatttcatcttgttgctgaaggaagtttagagacgattttggggatagaacatcatgttcgttctccactataagagcgtggtcatcctctgaatcttcctccatagagagttgcagagcttcgatccccaaaatttcatccatcgacttggtcttgagcaccatttctgaagatgttggcccctgtttttctttactttcacggtcaatccccctttccatccagcatcaacacttgtccccttcgaagaatctttgtgtggccagccacgaccagccttagtgtgcacactgggtcgtaaccctagcagaggttcctatgcattacttttacttgtgatagaattagagaaatattaaaaattattagtagtgtttagtaccacaccaaaggattatatcgctattggtataattaaacatcgggtttacaataatatcggagaaagctaaagtgtcttagtggtgtctaagtactacccaaggggtattgttattggcacaattaagtattaggtcccacatatatattataattatttttataaaatatcactaattattattaacgctagtaaattattgggtgccatatcgatggagtgttggaagctttaaagtactaaataacaatgctctatataaaaaaaataatattttaagtgtaatatcttacaaaaatgaaaattatatatataactaaaaaatttaggaaaagaaaaaaaatagcataaaatgacaagaagtgatcaaccacattcacaaacatatatatatatatgggacatttcttaatttatttaaaataagtaatggaattcttaatttaaggtaatttttaatttttatgttaactttaatagaatatactgttcaaaatatttttattaatttataatattatttatatattaaaaataaaaattatgtaaatattctttgcaagaaaattttaatttaaatttaaaatacttaaaatattgtagatatttttaattacatttttaactttgttgtctatgttaagtttaaccgaatatattattacttaccataatattctttattaattttataatattattacatatatttaaaaaataaaaattatgtagatatttaatataaagaaatttaaatttaaatnnnnaatacttaaaatattgtagatatttttaatcacatttttaaatttgttggtttaacttcgaattaaaatatgagacattcgctcaattggacacacaacgattcactccgatatcctcctatatctcacttaagttttattgtacatataaatacatacctataatcgcattcaaaggacacactaatgtacccgtaatagctaaacaaatcatcaaatatcaaaatttcaaactctatttcaaaattaaaaaaaaaaacacattatctaattaaaaaaaattaaatatatattttacttaacagtacttaattaagcttaattaaaaagaaaattaatcaacttagtatatatacatccaaccttattcttcttaactcttctctaaatttagaacaaagacgacgccgcaagacattctcttacagcaaaagtaattgtcactttctatttaaataaaggaaagacatacagctaagcttaaggccaactactggctatagtgaccactatttattacgtatcacaatatagcttttcttaaaaggaggaaaaacaaaagctatctttccatatatatacatgtaggactcgtttgaaacgttgtattagatcgtattgtattgtattgtattatattgaattaaattatatatcatatttttatata

SEQ ID NO: 161554 - DNA, 4895 bp, Cannabis sativa
  modified_base (4792)..(4799): a, c, t, g, unknown or other
aaaaaaaaaaaaaactctaaaaaactcgacagcatcctacaaaatttaatttgttaacgagtagtgagtagtgagtactaaaattcaagtatagttaaaatagcgctaaactttcccgccattttatctgaaactctctgtagaagaagatcctgaaaccctaggcgaccgccaaagccaaagaggaagccatgaaagaggaaatcaaacaactattcaacgaaaaccgcttcactctcgtcggtgacgaagaagaagaaattctcgataaatgtaagcttttcttcccccattttgccgctgaatttcattccctaattgcaagaccacaatctaatgatattgttgattcaggccttactttctgcataaattacaagatcaagccctcagatatcgtttcgagttgggaggcttactatctcaacaggtttatcactcttttcactcatttcgacttttgttttttaaatcagtaatttgatactttaacatattctggatttgatttttggacaggcaattcgttgaaccgattgttcagaatgctgaaatggatgggtttttgttgtatctgcaaaatgaacagaaagagtcaattatcaaggaggaacctggtttgcatatctactcgagtaaagatttggacatgtaagtgttataattgaagttcgtttgatttttattatgtttcttttttaattgagtttgagatttcaggttgatttttactgtagcagtctgggttgttttagaaattcgtgtttgatgatctgactttgctgttgattgtttgatcagttagtgtccttgctttgcaaattcagatcaaagtactgtgtgcttaaatttgaatactggtgagacattgtgtacaggattttgaatgatgaagatggagatgagaaagaagttatacccggaacaccaacacgcaattctcaagacccctattcagagtcatttgattctactcctcaaacaaatgggagaactttttctgtggggaaaccatcaaaactaatcacaccctttggacaacgaacccataagttcgtggtgaaatttagcatcaataatgtacccagtacagtgaatgaacaaaaggaacatgaacacgagaactctgatgatgatcttatcaggaaggttcaacctggcaagaggtgttctctcacagttcatggctcaaaaccagaagcaggttgtaggttcatgtatgataggatagaagatagggtatgttatacttgttacaattccatttaagaccctattttttttttctttcttattattacctgacctgtacttacatgaaatttttgtatatagtttaatgctcttgaaaacagaatcaaaaagcatgcgaatgcattttcttcatctaagttgtatcaagaaccagtggatcctacagtttcttcccaggtagattaaagccatacgttaagactaatcgatgaccctagactttgcttctacaagtttgagaatttaaacaattttaatttttcagaaaagcatatttagtgttggcatgatatgttgtgatggggaaggacggttgaatgagaagtctgccctactgcagagcaggtaaagattgtggtgcttccatttttctaaatatatgtatatatattgatgcatttgactagattatcaattcgaaatggtaaggctgattggcattccaagttctaagctctacattgttgctattgacctttgccttttacttctctctttgacttgggggtttgtttacacttctcacagtgttgagcattctggagggcaacgtgttcgtctggagttacaaaacacgaaccaatattcaatctttcctggccaggtgtgaaatatgaagtattaaccattgcggtatggctcacttttcatttataactaaatttaaagctaacaggaaaatcatgcttttgtgcagattgttggtattgaagggcataatcctagtggacattgcttgattgcttcaaaagttgtagactctatccctttatttaatacggctgatttgaatatgaatccaacaaagaagcaagctttggataaggagattcagtcaaatgatttatcctctaaacaagaagagttgtcagtggtacaaaatcttgttgctttagcacttgatgagtcatattataaaatatttaataatgaaggaataaaaatggagatgtttcattcttgttctactttaattttagtatacattacataagtgatcactattcactggcacagttcttaagtcacagtccctaaaatataatgaattatagagaacagggcatggacaagtttggagtctaaattcattgtaattatccacatgataatttttatatgtatatatatatatatttatatacatgtattgtacggtatctacgtgaaaattagactgttaaatttctgcaacagttgaactcaagatttttgtgtatctgtgtattcacttttagcaatacatataacctattgtgcaagtgtctttcttctcaatgtttatattccttctgtactttgaacagattattgcatcaggccctttcacaactactgacaatttattgtttgagcctttggttgagttgctagcatatgcaaagagaaagctgcctcagttgctcattttggtaagtggtttctgacctttagtttaaggaattctagtccattgggaaggagggaagtttcaccttatttgataaattaaaatttcttccagctgggaccctttgttgattctgagcacccagagattgagaaaggaaccaccaacatgagctataatgaaatttttcattttgaaattctcagaagggtaaattctttaatgatatttcaattaacatacagctcagttttcgttttattatcttcttatctcattattttttcagttgcaagattacctagaatacatggggtctcattcacgtgtgattctcattccatccattcgggatgctaatcatgactttgttttcccacaggtagtgatactgatgctttatatttatgtgatgaatttggttagactttaaattttcaaatggtcgctgtaagcttttaatatcattttcttgattatgcagcctgcctttgatattcacccacctgatcttaaaaatcaggtacctgatttagtcaactcaaaacagttaatcttcttaactatcttgcactgtcgattacatggctgatcattcttctgaactgttactcaggtagccagcctcacaaatccaggactttttgaagcaaatcaggtacaaccattgattaatagccattgtgcttttttatgatatacccttgcacgcttactctattttatgagaatctactacgcagtgcgagtgtttacttacatacaatttcgggctcaggtcaagataggctgctgctctgtagatattcttaaacatctcagtggagaggaaatctcacgaaatccagcaggtggaggacctagtgatcgcatgggtagactagtaaaccacatacttggccaacgtaggtatgttgtaataattggctattagtattcaagtgtttcaccaaaacataataatttgcctttcagaatttgtgatcttggtatcggcggtttggactttgagttgagatactttgttgaaaatcatgtgtttttgccttcctcatttcttgtttgatttggtacagcttctatcctttatatccaccagcagaaggtattccattggatttttcactcgctcctgaagcacttgaaatctcttcgattccagatattctcattctaccatccgacatgaagtattttgcaaaggtaagtaactggtataccaagtcaattgcaagaagaaaatgcaaaatcacttctgaaatagaatccatgtttctacctaagccatgcaaatgtcgaatgtctgaaaaattccataaatttctcaccctaggtagctcataatcaggcatatagtatgttccgagaaggtctgaagtttgagtctctcttgtgcactacatgacaactgctatagttttctggttgcaagtaacctaatttaaaaaaataaaagaatcaatgatatcttttcgtcatgtcaaatgcaggtgctgaccttgggcgagggggaggagcaagtgaagagcttatgcatcaatccgggaagactttcgaagggagaaggtggaggtacttttgtagagcttacttactatggtaatcccgaaacaacaaatgcatctatcataggcatatgaaatatgggactttctaattgttctccaaggcatctctttcaccacaattcaccaagagacatagagctgcaaagtctccttagaatatactatgtttgaatagtactgttgttcactgctcagcatagagaaagatttatcttctgttgttgtttgtatagatatttataagaatgtttgtagaagtataaatgtttttgtagtgttggtcttttccattttgattgtctctagttttgctcagataatgtcataacaaaaccataatatgtatgatgtattttaatgtaacaaaaggaatcaattcaaacaattattccttatgaatgatacatatatgatgtatatatatatatatatatatatatttatttacactaatatgaatctataaattaattaatggctaattaagattttttcccccttaaatttttaaggtcgttaaaaatgacccatgaactattgagattgttggatttaagaattttttttcaattttagtaannnnnnnnaacatggatgaaagttcatgggacgtgattttgtacgtatgtcaaagttcgagaggcatgatttagtagatattaaagtctgaggagcatggttta

SEQ ID NO: 161555 - DNA, 943 bp, Cannabis sativa
aaagtaccattataattaaatatatacatgaacaaattaagacaagagacaactttgctatatagcacataattataatattaataatcactatagtttgattatgaaattgaaagtacgtatagttaatttagctagactataattgtttttgtagtgattatacatatattgattaatttatataaatatatatattatatatataattatcatccttggacactcttatattattgctccatttaatttcgatcccattaatttttttttattttattttcttgaatcaaacaaaaataggtgactaatgaggaagattaatttatagttaaatatatatagtagtgacgtcttgatctttctatcgattgaaatttatatatgaaaaaaaaagtaataaattactaacttttattatatatttactttgaattttgtaccaccactatgatccagatcacactatgtaacttaagtttatatttttttttattaaaaattatatctatgaaaagttatcaattatatatattcatgtttatggaaatccattctcataataaattacatataatatttttttcttcaaaataattacatataatattttaaataaatatattaattactcctgactctcaactaaatcatatctcaaatcctaaatgtaaatataaagaaaaaaaagtaacaacaatcacattcacacacacaaataaataataaataattatgttagtattacatgtaatttattattattttaaattaaaaaaataaattaatcgtaatcaatgatctaataaatttagagattattccatatcccatatatttctttttttcatcatattaattaagaagaaaaatatatagtacatatacctacatatttatcttcaattaacttcaccataaatattatattatatatatatat

SEQ ID NO: 161556 - DNA, 1355 bp, Cannabis sativa
attattagacgtttaaatgtgtcatactttcgagctaatctattcgtccttacgtgtcgtgtcgtgtcgtgcctaaactcatatttttccgtgttgtgttgtgcctaaacccatatttttcgtgccgtgtcgtgtttaagtccatattttttcgtgtcgtgtctaagcacatattttttgagcgggattgtgctcgtgcttctcgggctcatgtcaattttgtgttgtgtcaaaatattcggcccatatttacaacactagttggaactagtaatgtaaatacaagttgggcttttcaacatggtacgaaatcggaatgagcccaactagacacaaaaaaatataagtttaggcacaatacaacacaacacgatgttgtaaattgtcgcgacacgagacgagaaaaaataagtttaagcacaacacgacaagaccgaaggcatgataagtaagcacaaatagactagtccaaaagcacgacacattaaaaattcttatattttgatgatgataataataataatcataacaataaagacaaatactattttggaccatgtattttgtaaaaattatcgataagaccatttgttttgttaaatggcaaattgaaccttatattttctaaaataatacaaaatattaccctgaattgattttttgtcaacataaaagttaataataacccgatctagagttgttacgacaaaactggatacattttctgcatttattcgtgctaaaaattatcttcaagttgattatattttaaaaaaattattaaaaattgagttcaggatactattttgtacaattttagaaaatacatggtctgatttgtcatttacaaaacagatggtccaatcgataatttttgcaaaacacataatttaaaatggtattaaccctaataataataatacatatgcatttattaataaatattaaatttctaattattctaattaattttttatgcgattatgtgtaaaatactgttaaaaaatatataaaaacaaaaaaaaattattaaaaaaaatatatatgtaattgtaaatgaaattagtaaaaaaaatagagcttcaaaatagagtatgggtaagaaattggacttacttatttatgaaaaacaagccgacctaagtaaattatgatataaatttgagcatgacacggaaatataagcttatatactgtgataagcctatcttttaaaatattagtatgacacagtatgacccgtattcttttatggacttacacgcagtagggctgaacatcgggcgggtttaccgggtttcggattagcggatttcgggttcacgggtttcgggttcaaaaaattgaaaccgaac

SEQ ID NO: 161557 - DNA, 3012 bp, Cannabis sativa
aaaaaaaaaaaaaaaggaaatactctccctgtttatccaggcgcctcttgctccgtcccacactctcccgtcggactctcccgctgggcttgtgtgtggggcggcttaaacaacaattattcccgtgctttgtattgccttgaaacgacacagttttatatatatatataaagataaaatgagtactgaagccacaaacccgaagacgacacttatgtgcagcagcagcgactcggaggaggagctgcggcacatggcgctgacgccgccgaagcagaagagccgtaagcgtctttcgaagcagctctcgatgtgcgagactccgcgcgacgtggcttgggagaggcggcggcggcagattttggagcaagagcgaaggaagaatatgagcgttgagtcgtcgagcgggggcgatgatttgacggacgaggatcttaatgagctgaaagggtgtatagagcttgggtttggattcaaagaagaagaaggtcagaagctttgtgggactttaccagcacttgatctttactttgctgttaaccggtctctgagtagtcctgtttccacgccccagagtcgggcctctacgtcttcttcttccgttggacaatcgccgtcgtttggaagtcccaggagcgaatcagactcatggaaaatatgcagcccaggtaattaattatattatattatatattactcattcatatccatgcatcataccagtaccaccacactatatatatatatatagagagaaatgctaaacggatccagtatcgctattggtacaactaaatatcgggtcccatataatttaatataatagtttttagaaagtatcgctaaccaatcgcaacgtgacatatcgagaaggtgctaggcaccggtggcttatagcaatgctcctatatattatgcttattatgattataatgtatgtatgcaggtgataatcctcaacaagttaagacgaagttaaggcattgggctcaagctgttgcttgttcggtgatgcaatcgtcatcttgagcaacatattattaattaatgggattattaaagcatagcaaaaggatcaaatatcaaatatcaacattcaaacaagaagagagagagagagggagagatgatagcacaagcaggttgatcaaatatcaaacgtctaaatccatggggttaattattaggagaaattttacacttggtacacctacgtactatatataagttataaccaacacatggtggggcttaataattttctttatgaatgtgataatgttacatgtggggccaaaggatagttaattggggattaatcccagctttggttacagcaaattaattaattaatatgttctcatctatataaattgtttcttcttcttttaattttcccttttcccaaattgttctttagtatccgacttgataataatttggggatatcacatgttcttatatgtaaccaaagtttctgtggagtatatagtattcccctgagtatttagttatgtagtactttgtactcatcaaggtattatatggggaaatattctttattgacccaaaaaattatttataaattatatatactagggagttgcacgtgcgaaaaaaataaattagtaagaaaacatttgaatgtttttttgcctcatcgcacagagaagcataatattagaaggagatatgaaaaatttgtactatatatttctgttctatacaaaaagagttttagaagagaggggtatcaaaagataataaaagtaattatccttgtaggtaggatattatttacatccccaaaaaacagtctctacagcaactactttctcctttttgcttgatacaaaattacataaataaaaaaaaaaaaatactacagagaagcaacttgtttgaaaaaaagatatcaacaaacataataatcgttcttgatgagttgagaaaactacttaaatgtcattaagtagttacaatgtacttatacttgattatttcttgacaaaactatcatatttggaaatcttgatgtgaatgatgtacgtttgtataacatgcaagcttgtgtatctcctgctatcaaattaaaattaattagcgcttggattcctttctgctactattcgaattgctacttatcttaaaacaaataaactttagactgctaaagttaagagaaaatccaattctatagaatataaaaattcgtaggcatatataatgtggaaaatgagatgtcagaattttcagttgtaattaaggatcataatcatggatatatgaatactttctgccacccatatttcaaaataatcaccataaattattgaaattgctacttatcttaaaacaaataagttgcattgtctgacaagaatattagagaatcatttggtaaagttccttaattaaatgtttaatcttttcccatagcttgatcttaaaatcaacacatgcattacatcattaaaccttagcactaaacgaatgatcggtaaggaattattattaaaaagcaaccttaacttttcccagtgcttccttcttagtattcaagtttaagataagtaaattaaggatgttctactcatgaaaactaaacttcacaaatgcactactttgtttttattttattttattttattttttatttattctttctttttttttaaaaaaaaaaaaaaagtagaatctatagaaattataggtgtaagtcaatgagaatttggggaacaatccccaattatatttccttgtcagaatataaaagccttgcctcaggaacaagacaaattacccagaacatgctctattaatttatagcagttttttgagagaaattatacgcagtacaattcaaaaccctaagatttaaaggagaaaacaaagcctaccttacaatacaataaaattgttagtctacaagggtggtgctttgaatcccgtaggctataccgattcagattttcaggcatgtcttgatgacagaaaatctacatctgggat

SEQ ID NO: 161558 - DNA, 5274 bp, Cannabis sativa
gagagagagagagagaaatatgtgatcatattttcattatcataaaccctatatagtgtagaaatcgtcttaggtctcaaccaatagtattaggacacttgaaattaaatttggagcataaacacgtttaaaacacaaatcttaaactccccttataatgctccagccgacatgtcgcttaggcctaggtgacatgtcacttggaacatatgatagagatcaacctatgtatttttcatgcaacatgcattatgttcgaagcgatatgttgcctagacaactattttgtgtttaattgtcctctttgatatctccaaatgatttcaaacttcataggtaaccatatacattctataaggtaattttaaacccaaaaaatcaattataattatgttctgcactatatcaaaattcacacactcttaatgtggaactatcaaaggtataaactaccataattgtgcttacccttttattataattaaccaacctacaacaggaactaccattttatggatggaaccctgagctctaggttgacctttaacctaggtgctcggggttgatgtctggtggtgcttggggctaaactacctcttggataatggatcattctcatcccacgtcccatatgttgttttaggagaaaaataagttatgctctagatggaatcactttctgagcaatggattcacacgaactgtggaatacgtcaacctaggcacccaacatgtgaactggtctttagataacttgatttgttttccgaaagcacttgtatcttcattgttgacaaaaacaaggatattgtctaggagacttcttcgaaaagtgtactagagtgcctcaggttgacatgggcacccatatatatcttgtgagccaccttaggtgcccaagtcaagggaaaagtccctggaatatgttttgttgatgtccaattttcttttcggtgaaaagtacacacaaaatttcaatttcgtctaatctgcacatgcgctacttgatagagttgagttagtgcccagtttccagtgttaacataggcacccatattctgagaagtggacctttaggattttgttaccaaaaactcaagtcctaacattgatccttgttggatttgaggaatcgagaccaaagaagttccataaaaccaaaacatagtcgtcatgtcacccaaggtgactggatatcaacctaggcacccatgcctatctagcgcctccaagtagggcttgtttcgaaattggttttggagtttgaaatgtggttgtggcttatctctcttctatttgagtgcaatggttgagctaatagcacatagatattagcttagaactgaaaccaatgcaaatcaaggtccaagatgtcaacttgggcacccagtactaacatggtcacaagatggcccataaaatgtctaggtgacatccttagctttccattctagtttctcgagtcatttgtgacctaattacttagacagttaaaggatgaagcttaaaaacgattttgcaggatctaagtctctacctagatgccttcaatgtgcaagtaacactgcataattttaagatgcaaggccaagattgttttcttcaaatagtgtccatgtcatcaaactaacttgttgggtaaacactaagtaatctcattatttaattaataaaaaaataaaaaaaaattattttcatgttaattacatggttcgcagattttattttacgtgattatatttttaatatataaattctatcaaatgaaaaacatatagttgtatccaatgtgactacctgatatggttgtttgggcaatgatgtggcattgcataattcaaactaaaaaacataaaaataattttaaaaaatttaagaaaatataatagtaattatcattgttcaaaaagaaaatgtaaattgtaaaattaaaaactatctgagaaggtgctcaaatgtatgaacttagatgaaagcagtccacgtgagttcctcgctctgggcaagcaaaaatatgtagtgaggacatgtgtatacataatactaaacgagtacaaatgagagaataaaagaacaagatattacttcaagtttcgaagtctggcacccccaataaaatcgagttcggatcattggatccatgtagtggcatatattccgaccctctcacatgaacactgaagcaggctacaaaaaataaacaccagacattatatgaaaagagagaagaattacgaatttgctaaacatgtatatctacaattttgggatgcaatcaacgtctgaaatctttcatttttttaatcctttatatgatacatttacgagaaggagaacttgaatcataaagtcactcaaactcaaccacttgacctagcctcaacatgctgaaggcctttgatttccgataactatttcaacggcataataggaccaattcatccaaataagaataatatgtaaatgccatccaattttacagagttatagtctatatataagtgggaatactgattatcaaagaaattctaggtcctatatatattttcctacttattaccttcttttttttgtttattttgttttctttttgttcgcattttgcatttttgcatgttttccctgccagttggacccaaagacctcccagtggcctcaagatttttaagttagtggggattcgaaccttggaacaaatccctaccatcactttacaacactccttacactacatcttggggttatattcctactttttctcattacaggggacctagatgacagatttaagatgcacttcctaagtgtaattcttggcagtaaaatgcattcaacaagagtgccatgtaaatatggtattggttgacaaacaaggatgccttacacatacttgccattaggagttacctacatgattccgacagactattttcataatgtttgcagaagacaaacataacaccttctagagtgtcaatttaataataattcactggtttatacaatcatttctattataatagtatttaaaaatatgactcaaagctaattcatgacaacaaatgcgacattgagaaatggggggaaatgtacacacataccattctcaatctttattacactttgaagcattgtatccatcttcgtattcatatcatgactatcatccattcttggaacaacaagggtcagctccctgtagatatcacgaacaaacttgcatatcttctgcgcatactcaatttcaccatctgatatccgaccaatcgccaaccgcatcagctctccagtcaaatcagcaagctgcacatgaacacccagaaacacttttgaaagttgaaagtccaatcattaattatgtgagtgcattagtggatgattatgtgcataagccagctcacaaacattatagggaatatgcaagttgtatgttaaaaaatttgatatttgagctacattaatcatgttggtgaatgtgtatgtctaatgtgcatatgaacgtattagtatacaattgactaatctatcttcaatcagttcccaactaatttatatgattacttgacaataatatagaagaacaaagctataatatattatataatagcggctctctacctatctaggttcatgtgcaccactaaaactatcaatgtgcttcacagacaacatatattgcaattggagcttaaaatgtaagcaattacccccaaaagatagtcgagaacattaatttgcaaaggctccaaggaggggtcactaagaggcaataaagtagcattgatctcatcaagatgcaaaagagttcccattctacaaaacctacagaatgttgcagcttcaatatattcttgtacctataaaagagcagtaacaaataagtcaatcaagctgattttgatgggtacaacaaataagaattaagaggttaccccaggtgagtatgctcgtcttagcttccaaaagtcgctcccttgcaattcttttatcagccgagaaatatactgatctgccacagctactaaatccttttctgctttttccagaacctcctctttgttgtttttaccaagtcttatttaaatgaaattacaaaacaaagagcttagtactcgccaaaaccatcacaagttaagaatgtaaggatagagtgaatatgtctaaatcaaacaattactaaacaatgacaagataattagaaatgtaaataagatttgatcggttctagatactaggagaaaagactaagaaaaccatcattatgaaaagcttaacaaatatgttgatagacacattaaacttccgtttctatatttctcttcattctcgttacctgtgcacctgaaaaatgacttttttgctgttcatggtgatatcacgacttgcttttaccactctctcccgtttctcattctgcagacataatttaatgcatccgtaactgaaagaacaaacagttgcatggaaaggacacaatcttcaacgacaatgatatattgctgcttatattgctaataagaagcgattagactgcaccactagataaatgtcacattgaaaaattcatcagcaaatagttgcagcccacattattctctataacaattgaaaaagaaaagctgttggatatggctattcctaaaattacagttcaagtttccagttacgcaggttccaagtattatcttggaaacacagtaattaacaaaagcataaaacaaaacaaaattaatcaaattatcataacaactaaactaagtacaaaagtaaaaaaccaagccagcagacccagacgaattcagctcccctaaattgttatttcaacaaagataaaatgtgtgaaaatgaattgcaaaattaccgaacgctactctaccaccactgaatttcatctataataataataacctagtcctttttcagcttgatgccagcccatttggagggggtgacaaacatttcagagactctccattgcagaaagaaaaaaacagagcttgacctttgagttttgagctttgtgatttaaggaaataagaaaaccaaacaagaaaaactcacaaataaagaaacagtaaataaaggtttagagaagtttacaagctgattgaggtagtccgtatatctggtgaatgcatccgccatggttgaagactcggtggtcatggccctcgccctcttgggtgtgctcatcgtccctgcaactttggtagcaaatggtatacgatgtgagaatgagaagcggagaatcattaagagagagagagagagaga

SEQ ID NO: 161559 - DNA, 2218 bp, Cannabis sativa
catatccacctattcaaatataaaccaatataaatttattatcaaaccatcagtaactcactaatcttttaaaaaatttactaatggaaataataataaaaaaaatagactttttgaatttgttaaaaataatctttataaaaaattttgttaccaaaatatatttgtaacagtatgacattgttaatttgaaatttttttcagtttgaaatactttactgcaatctttgagttttgagtatttagttttaacagtttaaacaaattaaatgtatttatacggcatatttttttttaataataataataataataaaaataatgataaaaggttcagttaagttgttaagaagaatcattgtgatctcaaattatagtgaaaatttagggaattatgtttggagagatatttttttagttcttctataactatttctcttaatgaataataataataaaaagagaatcattatgatatagccaaaatttgatgatcacagtccttccgccgcctacaactggtcaccacacaaatcatccaccaccctcaatgtcgaatctttaagtttgtatttggtaagaaagagagtaagatagataaagagattagaggggatggggagtggagtacaaacaaatttgttttaaaattagctttttttatcacaatattatacttattactactcttacttgctcattgaaaagaagctaactatatattattgctatttttcctcctactccaatcacatgcatgaccggtatttgaagttttgttagcttaacgctaaacaaaccagcatttaggtggtcccataaatactcacggcatgtatatgtttgtctaggaatagacaccccatctcatgatcacgccataaggtagagccagtacttaaacgctgttttgtttagcattacgcaacaaagctagtagatttatagtggtacaaatattagaagactacagtaataataataataataataataatgtgatatctatagatgatgatattgaagagccctttcgttataaaatttagagataaaggttagagaagtttgcttagaaatgatagttgtagattatttataggggagtgagagtacgtacatatgccatagactacaatgtaggatgtgcataatatatataaattgttgtatatggcttttatatatgaaaatggaagtttcatatgagcttatagtgatgcatagaatattatctctctatataaaaagaaaattacgaggcgaataaccacgtatatattacgtagaaagtattttattgatattatcagttacagtttttctattttacgttttcttaagtagataattaatttgatattatccacaggtggcgtggagattcaagccgttgcatcgcactctgaccgaggcgtgagtacagctactccaagacaatgcccaataatagaatgccactcataaacgaaacgtggagaccatgcggcccgcttgaacatttgtaatagtactatttttaaaagggtagcttacaaaattctgattaacttattttaattactaaaatactgtgtaacgatttttttttttcaaaaatactatgtttcataaaataacagtaaaatacaaaacagaacaactaaaaaataatcgtaaaataacaataaaaatttaacactacacaatacaaaacttacacaatatttttgaaaaaaaaacagagtaattttgaaaaaaattctgccctacaataaaaaagtaaaaaattaaaaatttcaatacgtggtgtatcttcacatcatccaaatttataatattttattttatctttcttccaaattacttttggtacttttatttttaaaaacactccaatagtatagcatctttcaaaaatactataattataattataatcttacacattatatgagcattaattttaggcacttgtggtgtctagcacctctacacatgtcaccttgcgattggctagcgatattccttaaaaattattatattaaactatatgagacgtgatacttaattgaaccaataacgatattaacatataagacggtgctaggtgttaggtgttagttaggatgttaattacactatttccattctgttatgttagttatataacagcttttgacagttgttctgtatttattttgctttactgatcatcttgtatataaacagagctttt

SEQ ID NO: 161560 - DNA, 5085 bp, Cannabis sativa
ttttttgtgtggtggtgggggggggggggggggtggggaacaaaattggtctactcaactaatcctaaacattgttgaacattctataatcaacttaagcttttaagattagtaggaccttgacagtacttcctgagtgacccattactttgacaccattaaaactttgacattttcttgctgatggctttatgaaatctttgtgtcaaagttccacatcatacttgattaaatttttatttaaattgctgaacatattttgactcacattactggacaatgggaaagggaatgactgctactttactcctttactgtacaggtaactaagattggacgggatgcagtcctttatgttgaatctctcattgaatctataatgggaggactcgagggcttaataaatatccttgattctgaaggtggatttggagcactagagatccaggtaataatttgcatttcatatttgtaactagtaaagcaagaaataattgatgaagtctatatttaaggtttttgtatttcagcttcttccagagcaagcagcttcttacatgaattatgcatcaaggctttcaatgggttcaactaaatctccaagaggagcaggtggctttcctttacctggccatgaaagtcatcctgaaagtaatagttctattaaaatgtaagtcattgatcttcctataacttatgttctatagtaaccctggtttggtgtgttgttgttgggtgggggggggcggtctgtttcagctttataagcactttgaatgattatatgttaatggacctttgttactgctgttttcctccgccataagtgaggatcctcaataaatgagctgtaaaagcagtccaaactggtgatacatcaatgtaaattattagttttttcacaagtgggtcattctatctttttcatctatgattccaggttattttttttgcttaacatctatgatttcaggttagaagctgcaatgcagaggcttaccaatttatgctcgattttgaatgatatggagcccatttgtgttttgaatcatgtctttgtcttgagagaggttaatcttacttctattagtatctttttctttttctaaatttctctacctgaataattgaaaaactgtgcagtcatgttattgtgactagggtataattacattttttctgtataatttttcttttcaccatcctcttattcttgtttttatcaaaggaatcaaaacaaattgtctttgtcataggaagtttgtttgttatggaatgtctctctttcacgctagatttgagtttaatcaagcaataatttacaaagacattgataatacaattgcctttctatttcatgataagctgtgtgttattcttgccttacctgctgaaaagacatttcattatttgataggattgggttggatttttagctggctcttaggacgggtgctagaggttttattggagaggacaggtgcaagcttataggatagtttgttagtatgggactataggcaatggagacagctggatatataaccagtgtaagggctgagtggaaggtaggaattgtgcgagtagaactagagattagctctgtggaggttccatgtcccttgaaatacctgtgtaatctctttctttgcattttgttccacagccagtaatagaaaccttaatttgtttctctgttttgggttataactggttgggtgtataactatgttccgtcataaataatcaaaggtttgactgtgagcgctctgccatgatccaacttattagacagaattggcttaatttaataatacagcaccaagcagtaggaatttggaggtttgataagagacagaccatggatgggtctttccttatgtacttgtactttccccaagtaataatacaagtagttctgttcttttttttcctattggaaggaagaaaaaagcagataagaaacaaaccatggggtcatgtgaaacggtaaagggtaccatatgttcaatggttagttctggcacctccagtaaattttgaatcatctcctaaattttctgcaagtttctaattgcactttcaccttcaattcaaataaaatgttcaacttattccaaaatttttctttgccaattttaaagttatccttccttaaattgtaattttgcaataaaattcctctataattatatgcagtacatgagagaatgcatcattgggaacttcaggaggagaatgcttgcagtcctgaaaactgataatgatctgcagcgaccctctgttttggagtcactgatacgcagacatatcagcatcatccacctagcagaacagcacatcagcatggatctaactcagggtattcgagaagtttttctcacagaggcgttctctggaccagtttcttctctgcatttgtttgaaaaagcagaagagcatcatacaggatcagctacagaagttgtttgtaattggtacatagaaaacataattaaagatatatcaggtgctggaattctttttgctcccatacacaaatgcttcaagagttcaagacctgttggtggatactttgctgactcagtaactgatctcagagagttaaaagccatggctcgtatatttggtggttatggagttgacaggctagacagaatgttgaaagaacacacagcagctcttttaaattgcattgacacttctttgcgatcaaaccgtgaaatgttagaggcggttgctggcagcctgcattctggtgacagaatagaaagagaagcatctatgaagcagattgttgatatggatacagtaattggattctgcgtccaggctgggctagccctagcttttgatagagtattatctgaagctgcaggagctgtgcttgaagaaggtgcacccttgatacactcattactagctggaatagttaagcatatacctgaagaaatacctgaaaaaaaggaaatcagaagaatgaaaggggtggcaaacaatgttggtatagttagtgatcatgattctcaatgggtgagattaatcttggaagaggttgggggtgcaaatgatggctcatggagcttgttaccatatttatttgctagcttcatgacatctagtatctggaacacaaccgcttttaatgtcgatactgggggcttcaacaacaatatttattgcttggcaaggtggaattttgttttattattatttcttttttttctttttcattattattggaatggaaacatttaagtgattcatgatgaacttcaataatgcctgctaagtttttcacttttcagaactagaatttatacttcaaatatctcattttgggtttcttaaataagagaacattctctcctctaccaattagtctaatttgataaaatacctcaattgtgatttcttggcactctcatcaacaagtaattagaagccaaactggattatttgatgcatgtgttcagttattgttttcgcactaaccattacatttttcatcaaatattgcacaggtgcatcagtgctgtcattgccggaagtgagtttgttagattggaacgtgaacatcagcagagacagtctttctcaaatgggcatgtaggtgagacagtggattccgaagtacaaagccgcttgtcagcagagacaaacataaagtccactatgctgctcttcatcaaattctccgcaagtgtcatactagattcttggagtgaacctagtaggtatgtgatgagggatccaatctatgtaacacacctgtggatttcgatatgaaatattcatgtttaactattagaacatacaaattatgagatttcattttctctgcaactgctttattattcttcacgactgcacacagaatatataaccatttcagcttttctgcacagatctcatcttattgcccagcttattttcctagaccaactttgtgagatttctccttatctaccaagaagctctctggagccccatgttccgtacgccattctccgttcaatatacagtcagtactactcaaactctccttccacaccacaagcattattactcggtgcttcaccccggaattcacctgctctatcactatcgcatgggtctcctgtagtacggcagccacgtggtgacttaactcctcaatatgggggtaatgattctgggtttttcagaggatcgtcatcacatggtcctgatcagctcggagatactgacaatggaagcatacggggtgttgaaaataaacaccggaatgttcgccgctctgggcccttggattacagctcaagccgaaagacaaagtttgtggaaggctcagcgtctggtagcagtggtccaagtccattgccaaggtttgcagtgtcaagatctggacctttagcgtacaagtagaaatataaccaagatctgaaaatgagaaattatgagggtgaattaggtatttgtggacgataaatatatcataaagcatgtatattcaaacaaagttttggcaacatgtgtacgtagaaccacttggcctcctccccgtagcaggttatgtatattatttccatttccagttatattttttatttctctggtccttttcccttaaacataggcaggtgtatattctacctatgatgtacaagctatagacaatgtgtgtaacatcaatcactcactctatctatatatatatatatatatataagcagcttcgtaaccaaagagggggagtgtattattgaaaccctaaggaaaaaattacttttgctgagaaatttgtatcgcttagtattttgtacaagactatatttgttcagaaatttatacttaccaatatttttgccaaaaaattacaattataagggttttattattattattattattattatttttcacttatatgatctaggttcatattcttcatggtcaaatcttttttgatgtttttgggtagagtaatccatctgctgaagaaggaaatgcaaagtggtatggttctcttttgtttttgtttttcttcactttcttctcatatattctcttgccccaagggccagtttggcacagttgtactgt

SEQ ID NO: 161561 - DNA, 3243 bp, Cannabis sativa
tttactagtacatatataaatgtttaagaaacaaacaaataaatcaagaacccaagcaaggaaagacagtttgctaagctaacaatggggttatatttccaataaggatagtaattctactaagatccaagctcaaacaatcttaattaacacttaacatggcctaatagttgttgtgacatcaggtttaagaacactgccttggatagaacagttgaaggagccagcaagccatcgataacaccaacatttcacctgaattaatgaagatactttgatagagtttgctctctttcatctacacacaaatcttcatataacaatctatacttgtatcatcatccaggtgtcttggtaagcctcacaagatgtaagagaggaaggcaatctggtctggagtggttaaagagtgaattccgctgatggggtgtttagaatcttgttgtgtttagctgagggattggagttgagaatacaagaaccatatctttcttaaattcaactccttaccacagttgggaatcttcatttattgactgatttttatagccaggttctcctttttacctgaaagtgagaagattaatatgaatgaaccataaaatatacttttcctcacaaattatacagaaaagggttcttagcattaaactcctcttaagccttttggcaatttggcactggtaatatagtccacgagggaagaaaattgacaatcaagtccttgagttttaaaaacaataacaattatttctttcttgttaattccttaacaaaatattaagttttaaggaacaattttgacatttctctatatattatacacctccaatttattttccagtcttgggtattcaactctaaaatttgattgtcaaatttgttttctcagggattaacttgtcagacatttatgctaaaactcctattcaaaacacatgagagattaataagagaatttagagaaaataaaataagctcacattaagacccactaattgtacagtctcattattaaaataaaacttgtacttataaaatcaggatcgaccaattatacggtctcacagtagaatatttggtcttaatttacctcggaattttcatatttggttctcatatcaagcttacatacagggcagaatgttccccacttagtcagccatgagtccacacagcttgaatgaaattctgcaaggtgcattcaagtaattaataaacaactaccttgccaggaaaaaaaaagtagttaataaacaactaataatttaaaatcaaataataatatgactgaaatggtacttctgcatacacagccagagtgtttcatggaaatgagcacaaaatgggcgtcctaccgtgtcggcaatggagaactttgaggatctctccatctttgtaatcttcaaggcagatggcgcaagtttctccagcatgactatcaatcaactgggtggaattgaaagtaaaacagggcagggcttccactaatttagtatctacatttttagggagattatttcttccccttgaagtcaaccactgtctaggagtaaagattgccactagcaagataactaatatgacaagaaaagagatgaacgatatcgccagaacagtccaagctgtttcattattatatgggaagatgcagcattcaccatctttacccccagcatgttcccttaaaatttgaccagcgttcttagatgtaaaaactgcattcactgaaacattctcccgatgtatcatcactgcaaacagataacgataacagatatatgagacctcagaagaaaactgaaccaaaagttaccctattaatgtttccaagaatctgttagctttcactcatccatttcggagtacatggtaatcttcatgaagaagtggggcatcttatttgcagggaatatagttcacaataacataaagaacgaaacactcttgtgatttaccaaacagaaaaaataatacagttttcactaatttcaatcaaatattgaactaaaagctacccaagcaatgtacccataacctataactgccatctatcttgcttggtgttttcagctgatgttcataaaaaactacaatatcttgttatcccaggcagcatgattcaccattagacaagaaaaaatgaaactatgtagcaataaatgctgaaccaaaagcaactcatgtattgtacctataactgccattttggtgtattatgctgattttcatataaatttaagaaattttattcgtcatagttcactattagataataaaaaaatggaaacttgtagcaagaaatgttggcaataaattctgcaataaacataaattttgaatgaatatgagaactcactgtaaactaaatttcccttgtctatgttgtcatacacaattacagcaccaaatccagccttctgggcattgacgactttgtcttcaaaagaacattcaccccttataatgagtgcaaaccttactccatcagttatgttttttgactgatgaagaagatcattttttagtgggctgcaaccgttcgaagggtttgctatgtgtaaagctccacatataccagagctattcacaccagcagctattaaaaaaaattgaattaattaaatttccttgtggatctctactcaatatgaaattttcaatatctttcatctttaattgtttttttttttaaaaaaaatgggtaaggtatgtctcttcacttttctagcaatttctcagtaacccaacaccataagaagaaacgaaaggaagggaaaaaaaaagttaccgaatttggcaggaagatcagcaaatgacatggaaaacgatttgagaagaatggtagcagatgttaattggataacgttcaaaacaattattatgagtaataattcaaccaaaactcccctcatttttctcctttctcttagcttcaattacctgtaacagaaaacacacatatatacaatataaagtaaattacaattaaattgcagaggcaaaatctagctactacctacccaaaaacaagaagaagaaaaatcaggaaggacctcttacatcaagagctgttatcagtcttaaaggctcgaatttcttgtgtggagaacaaaatccctaatgaaaatataaaaagtaacaagagaaaggatcaaagcttctgtgagagctgaatttgtagtttcagttcattcaccttattattataataatttccattggtatttttttttttttttt

SEQ ID NO: 161562 - DNA, 1214 bp, Cannabis sativa
  modified_base (1187)..(1188): a, c, t, g, unknown or other
agcccaactacgagtgccataacctgagcatcttggctaagtatcttagtcttatccgctacctctaagaatcattgaattaggtcaatgaggaatttgtcctcttgttgcttcacctctactataccattgggttccatttggcattaccgagatggagtaaatagatatccaatggcatccacaagctcttttcatgaattaattgacccagggaaaagcttgatataccatcattgagctatgtccgtcagtgtggcaaggaagattctacaacgaacgtcatccctaaccttttgtagatcgatttgcacttcaaagtagtggatatgcaacaatgagtcatctttcccaatgtattgatgccaggtgggactcttaaacttcaaaggaatttctaaacccttgattcagtccaagagcagtgagtgtcgttcttggtctaactcaaactttgatagctttggagttgtgattccctttaccaaagtggctagggtatcaaatttgtccttgttgataccacgggtggtggtctacgtccctgttggaccttcagctaatcaattaatggggtcaccgctaaaagcttccgcttccactagccatctcttgttaaggtatctcacatgtctttttgctttccaagccaataaaaaaaatttcaacttgggtctggctatggcctcttgaccacgaggtcgtgaaagaaatgttagggatttaacctgtatgaggacagagtcctactcataatgatcactttgagggtgatcatccgaaacaccataacgacttatcacttcaatatagtcttccgcaaggtcaggtgctaggggagttgaactaatttctcatgtttagctcttcctcatgcataggagggaagtactcatattgctagccatcaggagtacgagcaaagtaccttcactaaacacccctttcataacaaaagtacttcctagtgtagaatgattcattattcctcacccgccaaatgtcatacccctcagtttcatggtagatcctcctagttcctccccaaggttggctgaaggtctgttcccctttacagggtaacagggcttagagtcattagtcctatgatgagaatattgcaaaggagattgttttcttgcattgtttagatagtgttggacatattttaccaggatctagatttnntaccatgtatgtttcattaacatcct

SEQ ID NO: 161563 - DNA, 2074 bp, Cannabis sativa
  modified_base (2014)..(2038): a, c, t, g, unknown or other
ccttgtgggggagccacagcagccaacaagttaaagatatccaagtgtccgttggttttattgtctcgatctccagggagcagaagtctagagccgacatcatctggttgagttttcctcctacgccggttatgcccagcaagcctccttctacaacttcgcttgccctcgtcaaactctgaaaggggatgaaacctgcacggaccaaggaagaagaagatgaacctcgccgtttcaaaacaaaatcacaacagcagaaactaaaagaacaacccaaaaaagaaaaaacaagacagtcgagataagcaaaaacctgctacactgctggcaaaatctctgcatctggttggcaacaagagctttagtagatttactgtgaagctcacaaaccttatgtcggcgatggtagtcttttgctgcagagagatcttccttgcagttatcgacctggcacatggggtaggtggtgctaccaggagagccagagcggaccctcttattgggtctggatccaggttcgtccccactagtgaaaccacccccaagattgaggcggagggtggcatcagttacctcaggggttttattcttcaaagtgaccggagttgcagaaggttcttccgtcttggccaggtccgcgttgacagtggccgcgccagagccagaatcaaggggcttagcaaggaatctaaccgtgtcccactcccagaccttaggattccagttatcaacaggattggggtttgagaaccgctgctggaaattaggggtctgatatggaagatcgcgtttcttccccataaccgaaagcgttctatgaatgaaaattggaggagcaacttgcgcacccgcctcttccatctctccggttcagtatataaagtttacgatttgtagctagcaaaaatagaaacaggcgttcttcctttatctatatatatatatatatatatacaaaatctctctatgaaagtcaataggagaattgatcgtccttcataacactaacaaagaagcttaattgatctgataataccataccttggatgttcttctcttctctttacttcaattcaattcaattcaacgaaatctggaaaaagccatgccctttctccgatctgacagttattagtaaaaagcttgtgaagtgacagtcaagtctccgataactgaactaaggattggattaccctaaattgaagaagcttagaagatgatctcccatggcgtcaacttaattctctctcttctttctctctctttctttctttctttctccaattcccaaactaataagaaatggctccttctggttgtactatcttgaccttctaacaaaccttgctttcccacaaaggcaaaaatcgtaaattgaagcaactttgtggtttatatataatatctctcctcaccaagaagaatccaaccccctttcctttctttttcttttatttatattaataataataataataatttgtgtactttttttgttttattaaaataaaataagatttagattaaaagaaaattaagtaaagtgaagcagtaaaaatgagtttggcctctgagttgggttggcttcttctgccttgtgctatgtctcgtctcttggtggccctacttttgcttactatactatgtatctagctactatgtactaagtagtttatgggtgttttcagtacgggcggttttaggcgcaatttacactattattattattattattattattatgaaatattataataatatttaaaaaaaaacattcaacttttaagattataacatatagggaaattttataatgcactcccgtaaaaagaatatatcgatatatctctatttattttagcatccaaaataattttttagtcaaattttttctcatagttatgtaaattatagttatttaagacatcttgtaaaattttaagaaattcggaaaatttaacatgctaaaaattgtgttcaagcagtatagtgcacgcgtgactattttattttnnnnnnnnnnnnnnnnnnnnnnnnnaacattattttctatattataaattatttcgaattt

SEQ ID NO: 161564 - DNA, 2373 bp, Cannabis sativa
gagtcatgctattcaacggactcgccaaatcctttgtaatcttctttctaactaatgaactttgatttcaaaaaaaaaaatacaataattttgacaataaaataatatattatacaaaacttgcacattcgagttgatatagcattccaaaataacgctagcaaaatctcttatatttttttttttattttacatcaaacttttaaactttatcacacttctcttattttctctttacattatttaaatattatatttcagaaaacaagatgacaaacaaatgataaaaatgtttcactggtattggaaacctggacaaaataataacgtcaaataaagtaacgaatagggtaaattttgcaaaaacaaaaaatgagattacagtcctgaaagacgtcccacgtataacttgaagcaaattcaaaccaaatatttcatgacagtacataatattaatataggtataaaaattgattaaaatttgaagaacccaatcaatctaagtgatgaaaaaagcaactgccatgtatctacaaactaaaacatgcatgttatttagccttcaacaaggcatcaaaaatgatatgaagtaagttatagagatgcacacaagaaaccaaatcatggtggcaattaagaacaaattaaaattggttcctccgcatttttattgaggataatttgtttaatcttgtgtggctgcaccttggttcagctctgcaaatctcatgccaactctcatcgagtgcttaagaaacttctcagcacatcgccggacacagctttcctcttgcttctgcagggacttgtgcttgaaggtgtcgacacagtcagtaaaacatctctcaacaagtgaattatacatcctcaaactgtaaagtaaaaagggtaacatcatcagaagatttacagtaggtatagatgtgtttcaaatttgttcaataaatagatttgtgtaaagatcattctacagaaacccaaaccaataacaaggttctaaatgcagcacaaattcggcatttatgcaaaaaaaaattctttactgttttacagtaaactatgtcaaaagtgaagctacacgagatggcgttagccactacgattaacttttcaaggcacgatttgaaaatttgtaaagaggaagcagtcttcaatattaatctaaaccccacatataactaaccaattactatgaactaacagccgtatcatatagatgttagtatggtttttaaatgaacagtgctatggtttcacaaattcacatatatattcatcccagaaaaattttaagacgcttaatagaattaagtaaagccatacattcaagtcaattggatgaacattaaagagctaaaaatataaagtcttcacaattgcaattcctacgatatatatcttgatagtatctatacattaactgaagactgagttatgtgttcaactcattgcggcattacatcaaacatcaaaggttcaatcgacaaaaattcctaaatcaatttttcaacaatcaaataaaggatgtacctttgtttcccaataaattaaacgggaaaaaccaatcattctagaaaataaaagcatcataagtaaacagttttgaccatggcaaacgaattcaacatatacaatttcaaacccacagaacaaacggaaaattgtaaaataaaatcaataaaattcatcaaaatctaacctgtcacggatttggagctggtcaatcatggtggacatcctgacattatcttcctcagaaagctgaggcatatcccctccaagcatactcttgtccatgatcgataatactttctttctcaccttctcacaatctcactatcaccgattgaggtattcaactccaaaacccgaaagcttcaagtttatatagcaagggctaaaaatttaaaaccctagagaggctggaccggatccaagagtgtcagcccaattaagttcagtccagcccagcccattaggcccaatacgaaacgatagcggtgggcccatgttgagtcacattcaagattttggcgtttccgtcggcatcatatcagtgagtagccaaagtacagttgagtcccactaagagtacaaaactaacagttacaactgagtacatgtcttcttcctgaagcttcctattacaggctttgctctgggttagtttccaatattggcttgtggcgtccgattccttcttctcaaggttcgtttcttgcaggttctcttatcatcttgtttccatttcctctctgttttgagtttattatttccctcttctgcttctctgttgctagtcctgatttggcctaatttcttctggttttgcatttattattgtttccatctggttgtctcctgtcctccctt

SEQ ID NO: 161565 - DNA, 2977 bp, Cannabis sativa
ttgagtcaagatgataaataggaggtcatccttacccgagatgactttttgatggtttccaagaatgtctttcagaatgtagtttagaggatatggaactattagggaatcccttcacttgggaaaggagtcggagtactgatacatgggtggaaatttgtctgggcagggcattaatcacgaactctaggcctgcaatcttcctgggagcaaaactattgaacctcaaaacttcttggaaccaatggctgactaaaactttatccctgtcatcgtttttgctttgagaacgcttggttaaaagaaccaatgtgttttcaaatagtcaaggactgttgggaaaccaacaacaatatgggaatctcaaattcattgaaattatgtgcctcaactcttttgcaatgggggaaggagattattggaaatttcaaaagtagaattaaaaaatgtaaggaccagttgaagtttctcaaaggtaaacgtggcaatgactctaatcaactgtatgctgatgtgaaaaaaacatttatttgagattttagatcaaaggaaaatattttggaagcaaagagccagataattttggctcaaaggaggagataaaaacaataagtacttccatttatgtgcaagtaaacgtaaaatgccataatcaaatatccaagcttaaggatgatcatgagaattgggtggattgggataatggtttatcctctgttatgggtaactatttttcctctatttttgttgcctcaaacaccacctgtcaagaagttattgatagtataacaagtgtaatcccttatttggcaaacatggagtttttgagacctgttttagaggaggaagtcaagaaagcagtcttccaaatgcatcttgataaaagcctagggccagacggtatgaccccgacattttaccaaaagtgttggaccattgtcaaaaaggatgtggtgtggctgttgcaacatttttttttgagcccggttcctttgggaatgggtgtggggatgcaaatgtggtcctaattccaaagaagaaaaacccacaatatatgaaggatttgagaccaatttctccttgtaatgtcttatacaaagtggtgactaaggtaataataaatagaatgaagcccttcatggatttgatcattttagactcacaaagtgccttcactttgggacgtctaatctctgataacgtgatggtttccttcgaagtactacattatttgaatgtcctttttggaagctatgttgtgcaagatgggtttctctgagcattggatccacctgattatggtttgtgtttctacaaccaagtataaactcgttcatggtaaccatgaggtggggccaatttttccaacccggggaattagacaaggtgatccgctgtcgccatacttaataattatttatgtggagggtctttcagtcttacttcaaaagtatgagcataataggtggattcatgcgtgtgaggtagctaatgaagctctaagagtttctcacatgctcttcacagatgatagttatctctattgcaaagccacaactcaagaaactccatgaattcaagaattattgaggaagtttgaaatggattcaaatcaaaaagttgattttgtaaaattgtcgatcttctttagcactaatactgatgctattttgtaaaatcatatttgttatattcttgaaatggctgatgttgaggaggggagcttttatctgggtcttccaagcactatgactcgaaacaagtctgtagtgctagaatatctttggaaaaaagtcaggaatcgattgaagacttgggaaggaaaattcctctcaaaaggtggtaaagaagttctcattaaatctctggtacaagctcttcctagttacggaatgaacattttttgttacctttagagattagtagagacattgagcaactgataataaagtttcggtggtaatcctctaaaggtgatcgtgaagggattcattggttggcttggaaaagactatgtaagcacaaaagaggaggtggaatgggttttaacatatctcttttaggcaagcaaggttggaggctcttaacaagagcaaattccttatcttcgagagtgtttaaggctcaatattacctaaatggtaactttttgaatgctcaaatcggatctaattctagtttcatttggagaagtattttagaaacccaaagcttagtgcggaaaggtgtttgctggttttctggtgatggctgtaacatcctagttcttggggagtcgtggcttcctgatgtggagaacgcacaggctgtatcatatcatcttggccttgttaatactcgggtctacaatttaatgaaataaaaggagctcggtcgagatgacgatctgctacacgatctctttattgaaagaggttggaagctaattaaaagtataccattgctgttggtttcagcatggaatcattatatttggtcaaaggaaaatgcaggcatttactcagtcaagagtgcctataccttacactagagattaaaaggacaatggtgtggagatgttgattcaaatttctggcccattttatggagtttaaaactgccttctaagattcagaacatgttttgtcatgcctgtacaacttttctttctacaatggttcagttacgaaccaagcatgttttggttagcccttcttgacctctttgccgagaagaagatgaatcaattctacatgttttagtcacctatcaagtgattaaaaaatgttgggaaagggtgggcataggtactgctatatctgcaggaagcttgttctttgaatggtgcacgtgttgggattttatgccctaaataaaacctatttcagtgtaatcttatttgttattaattaaaaattagaagtcatttatgtttacatgtattattcatgtttatggtttaatatacaatttttgttaaatctagaacatatagtta

SEQ ID NO: 161566 - DNA, 5706 bp, Cannabis sativa
  modified_base (5542)..(5555): a, c, t, g, unknown or other
ctgctgctgcaaccaattcagcaggcgccgttccttccactgctgctgccgctgctagttcagggcctgcaaagggtaagagagaaagggagaaagaaaaagagaggacgaagctgcgggagcggcaccggcgagccatcaccagccgtatgctggctgggcttcgtcagtacggaaattttcctctcccagcgcgtgccgacatgaacgacgtccttgctgctcttgcaagggaagctggttgggtggtggagacggatggcaccacttacagacactctcctcctccatctcaattggtccgtacgctttattattttttttttttttttgtcttttacaatttcgtgttcatttttctagcgaattatattatactatacccagtttgttggcttctaaattagactgagcttgattcatatatgttcctataatagaattttgaatttctggtgatacactgacaattgcatttgtatttatttacttttattataagcagttagcgtatcctatgaggtcagttgacagccctctttcgaccacttctttaaaaaattcttctgtgaaaggaacattagattctcaaccaccttcggctcttagaattgatgagagcttgtctccaacatctcttgattctgttgtaatagcagagaaggagaccaagaatgagaaatactctagtaccagcccaataaattcagctgaatgcttagaggctgatcaggtaatgttcactttttatattcattatgcatagtatagtatgagtagtatgacgatgcaagatactagcagtttagtttcacaaacaaagttaatttgtgcaccataagctagtaaagctgccatagccctgttattgaatcttttcccttttaagcttgcaatgatgtctcagttgctttcttttgattgtggaccacattattgaaacaaattatgttacaaatgttctagaatggaatgagagaattaggggcaaaagttttacgactttttttttaccactcttcctaattgtcattattagataccacaacacctgtttggtaattgtgctttatgtcggattatcctataatctactgttactagttaaaatgaagttagaaattatttaaggtttttagtgataccaaataggtccattgactccaaatcaatcagtgcatattcttcttttttactttgtttggatcatctctaagttctctcatacatgggttatgccttgacattaatagattctgatatcaaaatctgtcaggataatagatgtattgacaatagaaaaacaaaatgtagctgtgtcttccaagtagagcctggggctaccaattatctattggaatttatttaatctcctaacagatgttcaataacaatttaacaatggtcaagtcataggcattttattatctttgagatgtatacttttcttttagtttgtgtgtatcactaaatgtccttttcttttttcgcttcaaataaatgttcattttgaaattgttagtctcttgcttccttttttttctctttctttttttgtttcaagaaattatattgcaaacttcttctgattaagcgcttgacttttacagcttatacaagattttcgctctacaaataatgggaacgattttacaggcacgccatatgttcctgtatatgtcatacttgctgtaagtgtttgttatttttacttctttaaaagtttcattaagcaggaatttacctttttttttcttccctctggtagactagcaccgtcaaccaattttgtcagctggttgatcctgaaggtgttagacaagagttaagccatttgcagtctctgaatgttgacggggttgtagttgaatgctggtggggtattattgaaggctggagcccacaaaaatacatttggtctggttatcgagatcttttcaacataattcgagagtttaaactaaagttgcaggtaattttgcagcattattttacacttatgctttgtttatgtgagcattctcatagagttaatcttagtggattgcagttatgtacaagtaatttggctttaaatcattgtgctttaaaattcaaaacccagaaatccctcaaattcacttgatgggcccaagtttgaaaactggggctaccttcctaacccaataatatttgaggagtagaaaattatatcaattgttaagtaggtgtctgatacaaagttacaaacaaggtgagtagaaaagttttcttgaatctttattaataaaagaacaaaaaatacagctccaggaattcgagaacttggaaatctcccactaagttttcactaatttacacaaactaatccgatgcctgagtgaggaattaacatctatatctattgatatgtatctaggagagacttaggcctaactaaaaataaagcacagcccatagcaataggctgagttggacatttgaattaacaaaataccatatcagcaatatatttaattaagcctaaaaataacagaaactaacttagaaacacttgataaaaattactaagctaagcttctgcttcctagaataggttaggcgaatttcaggtctaaaaatgcttaggaaagactcaaacatgagactttgaaagagtaaaccacgggattgatcgtttgagctacccgagctaccctcaaacttactatttgatggggattgttgtgagagtaaacacatgattgaccatttgacctatgatacacaatttttacctcatgcgtacaacgttgttatagcaaagttttaattctaaaaagattgtcgaacccataaggattggttgttaaatttcactaactactatactttttagttttatgctttaattagagaattcaaagtaaataatgatcaagaatgaaataataaaataactgaaaagtaaacaaataaacaacgattttaattagaaagtaaagacctaaaacattgattttcttatttcaaattatgaatttcaatttaccaattatctcaatttaaattatcatttgtagtttcaaaaatcctagtgtaatctattaacctctctcgagtgatgatagaatttacttaattaaccaacaagatatctctattcaatgttaatcaattaagcaatactaaaccaatatgattctctttaaatgaaactcattgaattagtggaatctctcaatctcacattttttttatgtcttgcaattctaagtccaattttagattacctgtcaagtgcaaaatttaaaatctttatactaattaatgatgatcaagcattaacaagatgataattaatacaaaaattgcataaacaaatagtaagaacagatataggaataatctaaaatagttccatcaacacttagttcataattataaacataataaccacaataatcatgttcataattaaataactaaacaaaagaataaagtagaagaagaaaaggacactaatgatgatagttgatgataattgcttcgaatctcttctctcttgctcgttaatgtgttttctaatttcaaagttgcttgtttgtaatttttcaattatcccaaaagtcgaactacattattttttatataggcccaaaaagatgacgttttaaaataagattaatgttgaattgtaaggacggtgctatagcgccatgcaatactccttgaggtttcgttttagtgcaaaattcaattttttcccgattcggtgctatagcgccacaagccatttttttgtcgctattatactgcttcaaccttgctcagtaaatcatgcataactttcgcatccgaactccaaatgagatgatttaacatgttttgaaaagctaggaacgagctctatcattttgggtttcataagctcttcgaaaaaatgaagaaaacattgtcaaaaattagctcaaaaatctcaatgcatcacaaaattatcttttaagtgcaaacctacacacttagagaaaacacatcaaatctatacaaaaataaatgctaatccatttactaattgactaaaaaatgagtttacaaatgtgcactcatcacatccccaaacttaaattattgcttgtcttcaagcaatgaaaaagaataaaactaaaactaaaagctaaaaagaaaactaacaagtcaattattggatgaaaaattaagaaactttgaccaaatgtaatttatctcaaaatacaaacttctctttccattattcaatatgcatttcaaacaaatgactagaattttaacccatttaaacttaaattccaatattgcacttttattaaaaatgtttatatgttagttctactaactttatatacatgtaaacattcaatataaccacagacttgcataaccaattcatctccactaatgtaacctagagtcatgtagatcaaaaggactttataggcatgtaacgttagacttaggtaaatggtggataagaatgtcatttaggttagtttcacattataaacttacaaatctaatcaaaatacaaaacctttattataaatttccttttcccccaacaatattttttttcattcgatacctccttgttcacacaattaaagttatactcctatcaaatttatctcttgctattattttttattccttaatatgaatttttttccttaaagctattttttttaataataacaagagatctttttaacgtaatatacttggattataactctctatgcgcataaatctttttcaaacataattctcagaatttttttccatctcacttacatcatatattcatttagtatacaacaacctatgtttatggtgcaaaatcggatacggataatttattcaagttcatgactcataatcaaaaataaatatgcattttgtttttaacaaaggaaaaaaattggaaaaattaggctcaaaataagacaacaaaggataatgtattaagattagcttttaggctcaaacgattcaaagaaaattgctttaatctcgacacaacaagatttaggatttcgcctcaataaattaatcacacaagttttagttattttaatatcaaccaaatcaaactaagtctacatatgcacataaaattacaatatatatattgaataaatagaatgatacataactcatataataatatcaaaagcaagcataacaggtcaaacacacaatacacaagttttttcaccgatactaaataatatcaaagagttttgcgtaagttcaccatcgaattccataggtcacaagtcaatgttcatacagtaatctaataaaatcttaaatctacccataaaaactaacataataataaataaaaccttaaatctacccataaaaactaatataataattaaaaaaacaaaaaattaaaaacatgaattttgccttcccatctccaaattaaaataaacagtgttctcactgtgcaataaaatcaaaggagagaacaaaccagagcagctaggacaacgggtcaatcgccgaagtgtcacgggctcaccttttcaagcagcgnnnnnnnnnnnnnncacattgacttctctaagccaaggtcagccttccaactatctgagtaacaatgggctcctttttcacacgaccgtgtgcctcgtgcacaaatccgtctctcgaacaactcccgccgagtcatgctcataagcatccatgagtgcatccatg

SEQ ID NO: 161567 - DNA, 4523 bp, Cannabis sativa
cggcagaccttccacaagtcgaagttgaaacttgctgactcggacgcgtcggctcgggagaagacgaatggcgctgagcttttcaggtcgaagcacggcacaaggagaggcttacacgtttctttcagtgttaaatctttcccgtcctctctcctaaacaactccttcagcaccttatccatgcttgcgccggtgtacctctgacgccggctaaacattccggtaaacttgaccttatacaggtcagagttcttctcagcgattgcattgaccgcttccctcgccgtgaacagaggacgacctgcgccgtcgtcggcggtgatcatagctgctagaatagctccaatgcctgtaccagtaaccaggtcaaagaaatcggctatttgagcatgaggatcaccggtcttgaggcggatctgttcctcaaggtgaactaaggcagcaccagcgacaatgccagtggttccgccgccgtcaatgctaagaatccgaaccttcttagtgttttcatagtgagagagccatttctgctccagctttgtgaagatctctagcgttacttgactcaactccatttcaacctctctttccacttgaatataaatatgtataaatatagacagaagactatatatatatatatatagttagcagctaagctaggctctgtttatcgaatctgaacaacttcgtctgaaccttaatagcagtaggtagtgctggggattgtttaggaaatcgatcaaagaggatttcacgctttgttgctgagaagcattaatggaggaaatatgctattgaaaaccactttccctctctctctctctctttctctctcttctctgagagactgtgtttcgctcggagtagtagttgagacttaataaacaacagtaagagtgagtgtatgctcccactcaaatgtagttatatactcgtgtcccctcctatttttcatttttatttatttttattttcagttttgacaagaccttttttttaaaaaaattattatttttgttgaattgctgagtaagaaaaaaataaaaataagtaattatataagtgacggttttacatttttaattcgggactgtctttgcacgtgcaactgcgcgtgttgttatcgggttacgcgaacgaagcgcaaacctcggcttttaagccggctcggctaactcatcttatttaaccattttattttttattattaatttagcaataattaatatttattaacaactgtaattaatttttgtcaggttatgcgatactaaatgccgaatgaggaaggagatgggaaataatggtgtaacaccttccatcttacgcactataccatctagcaacaaaaatgctaataaaatcataattattatatttatttacgttgaccaaaaaaaatgtatgatggattaaaatggttcaatttgtgtctttactagataattaataatactgtagtcacaatatatgcttcttttttcttattataaccaaaaaaaaacattaaaagaatttaacatcttaaaatgtgtcgttaatacaatacaaatatagtactatttctttccaaagaaaaaaaaaccaaccaaataaacaaacatagtactataaagtttatcacgtttttaattacgatggtactatgttaaattgataattgatagtatccaattttagtttttatcttcacatttatttgtgtgtggtgatgaagctaggtagctagctcagctaaacttttggacaacggaaaagaggttaaaaatttaggcctctcacattggagaatggggagtgattaagagagataataatgaagtataatttggtcatatatatttgtcaatttattattacatcctaattaagagaaataatggggttttggagggaatgtgcaaaccaacacctttttccctagctatgttggacatttcttccttatccttttctatgctaatctatatgtcgatgtaacatgttattactacggtataagctattattgctactaccaccagtactatcattatagttgtaattaaaatagaccataatactacccacagcataattctccacagttgacgacaacaaagttagaaaaataggtaaaacggacattgatccaagttaaagattatattagtggtaccactatatctcaaaagtaacctaggtaggctaataggtaattaatcgcaaataggattcattttaattaatcaaacattataccccataatttcccttcctaatagaatcacctccatcaaataatatgggcaaacactcagtgtcttattctaaagtgaatgcaaaactggattgcataacaatgaaaagaaataataataataataataataaaaaaacattgtgtgtttatctctgtcgattgatatttgtttgtcttatctcttttctctctattatattatatatctgcaaaagataaataatagagtggtgaaattgtctccaaaactctatatacatatactctctttgatatatagtatctttctgtaagcatcgaaaagtatgaatgaatgagtatggtcaaaattatatattaaaaaaaattaggatttcattttgttcctataagtaagaattaatatatattttttttatatatttttattttttattttttagaaaaataaatttttcatatttttattagacatatactgttttgaatttttttaaatattttacaattattaaaaatagagtttaaagatttaagtatgctattaactatttaaactttatttttgtatgcttactacaatatatatataattatataagaaaatttaaattataatttctttaatctataatataatttttctatataaatacacaataatgattcagacacactcaaattatataatttcaatgagctaggagcgttgtttgaagatgttatagttttattgtctaaatttccggtggcagttttgtcccatgtggctcgctctgtgaatttagcgacccgcaaaacatactttacggttagacgatgagctatcgtggttcgaggaagttttaacgccggtggcggatgtctgcgtcgtaaattcatgagtgattttaatcattttgttaaaaaaaaaattatatatacttttgaacacttagacataataatgtgtaattaatttttactatataattaaaagtgatatagtctttacttaaaaatataaattgttaatatttaatatataataataagtgtgcgatttgagtgagcattgctatggggcaccagttttgtatccaatactttttataggtaacatctcacgattggttagtaatattctctaaaaactattttcttaaattatataagaatatgatacttaattacactactaataatatgacatcgagaagagtgttacacatcagtagagaccttttgtaaattaaaggtaaatgtcatctcctctaattgggcatatattctgtaattgattgcataatatgaatcaatatctgacaataaatgataaatattatgagcttaattaattgctcaatatacatataaactgaataatttttgccaataaatgctgactataaaatatttatgagctagctaggactggattaagtactccaaattcatcaattaattagcttttgaatacagttgtattaattttagtttgtgttaatttaagagaaatgtagacatttgtatacgtatttttagataggtaaatttatgctactaatgacgggacggttttgtccaggcctccttgtcaaaatctaaactgataaagatgtaaatgtaatgtgtatctaacattggagacatggtatgatggataattagatagttaaaaattgttaaaatctcattttcttctgttaatttatagttttccttttccatttttgccccatatgtcttgaaatagttgcttggttttggttgtgatggccatcatatgactttaatgtgtactaattaagctgggccttcataataagtaaattcatgtcttatcacaaggtatacatgagcgatgtcgttatcgattcatacatatacatataaattgtatatgtaataccatcatagcaaaaattgatggcccttcataacaaactaatacatcaattttactattcgtgcctataagtcttattagcacttataatgtaattttctatctagctaattataactgttgagttttacgacatttcagataatcataaatctatacatatttcacgttcgttgaatgaaaacaacacataaaaggtgccacatatgattccgtctacatcttgggccttcggcccaatgggcttttatcaaaagacgcagattgatagcaaatgtatgtactgacttgatcgttgtccatagtgattttaatttccgaactcaaaaagttaattacgtagaatatgacatttttttcttaaatttcataaatatggaaaaattagagatttacttaacttatggcttt

SEQ ID NO: 161568 - DNA, 3077 bp, Cannabis sativa
  modified_base (454)..(454): a, c, t, g, unknown or other
  modified_base (2669)..(2672): a, c, t, g, unknown or other
  modified_base (2990)..(2997): a, c, t, g, unknown or other
attataaatttataatatatttattttaacattggatggtattggatgactattggattggatcggtcggttggatccattggatttacatgtcatccaagaaccgaccgatcgaatattgaatttttaaaaatatcatccgatccaatccaattatgattggatatccaatttttggcggtcggttgacattggatcggtcggtttgtcattggattggatcatttctgcacagtcctagtgtcatccatcttttacagttaattgtcaatatagattatttatgtgtatactttgtatatgtgtcaaatttatattggtacacctaatattattattttaaaagtataaaaagtatttcaaaatttataatattttttattttttaaaatattttatttttataattttatttaatttaaaaataaattttgaaaataatttttaaataatnatattaggtgtactaatataaatgtgctatgtgtacaagagtgtacacataggcagtccatagtgacagttaaccgaatgacaccttaaatttactactagttcagtagtttggagggtgtttctgccaaactttgaacttggagggtttaatgtaagtaaaacgacagctggaaaggttttgtcgtaaaaaactcaaaaaaaattatgtttttaggtgtattatgcaaatttcacctttttttatagcatatttttctaattcttttaagttatggacttttagcaatcttaaccattttatgagttagcttatgccatatttttgtataaaaaatttgaaataccatattttatagtttttctcttttttatttaccaaaattatttttaaaagcctttgttattttcttcttcttcctcgataggtcaccccgaactcgcctgcaaccaccattgctacccctctccaactagcctcacaaattttttcaacaatcacgatttgcatgattattatcatcttcatcttcaccattgatctcagacaagcaagcaaccatgatgaaatgaaaacttcaagaaagaaataagaagagaaagaagtaagctagttatagagaagaaggaatgaatggatgaaggtgggagacaaaatagagttacagcaaccaacctaaattgcctccattaacggatcaattcgtgggtacgactcacttcaccatcttcttgtcaccaatctcaaatctcatctattttaggtctctcaccattttccattttatcatttttgtaatttcaattttggattgccaattaatgtggtcgatttattcttttttcatgtgttgacctcattttgtagctgacgacgtggagtcacggcaattgtaagtgtttaaatatgaaagtgacaagaactataaacgacacaaaaagattatagaagttcggcccctgaatcggtaatgacttgctccttttttagttgtatttcttcaagaaacagcaggattacatgaacctggtcaagtgagtttgttactatctctgaatattatagatattttggcagcctaatagctcttttaagaatccagaattacgtccttgaataatgaatatgatccactatttataggaaaaaagatgtagaatatttacatttaattatagaataaagtatttaatatttgaatgattcaatcccacaaaatcctctcatttctcttgattcttgcaatctctcaattataggggtgttgattgacctatttgcaaaatactgaatttggacatttcctatcacgaactcgctggtcggacactttctgtgagatgaatccttagttgctgaaactactggttggtataccccgtttaacatatgcctgatgctagatgactccatttggtttatacaaaagaccaatgccttttggagaatctcctataaggtcccttgcccactcaacctcttctatgtttgccacgtatcacatcgttctatgccacgtcattagggtgatttttagaataacatttgccccacaagtctgtgtagggacttttggttgcatggggactctttagcttctctctttacacggtcaaatgatatgtggccttactcggatggtctgtctagcctgggcgccatacctacctgaagaaaatcttctccttgtcttttcaaatcttttatcatgattacttccctcgaaactgcacattggggatcgtgtttgacgattacacgtttttctaggtggtttttaatgcaaaataaagcttttggatttttgagggggaaaaacaatcatttcaaatttaattccctaaaatccttcccacattttcattttttctatatatacttaagacaaaagatcatttggaacttttgcatttttgaaatttcatagtaaaaaggagagttcttcgagttcttgagctacttctctaaattgattgttgtgcgaactaattcttcaagaatccccaaaatctaaattaagttctgtaaaagcttaaatttattagtttttaatctactttctagaaaaaatactttcaaaataaaactaaaaatatttatcatcgtaaaattgcaatttttatacaatcatcaaatatgcacataaaccaacatgaacacatccaaatcaacacaatcattgttttaaattcatattttatgaaagtaaatcatnnnnatggctctgaggccagtttttggggattgttttatcaggatttagatttactatcatgtatttgtttaacatcctaaatatgaatttctaaaataatggaatttaaacacttataaagtttaagaaacttcacattggttgcaacagaattaaatgactccttctactcagatctctaaccattgttcctttgtgtcgcaaagtattatcaagatctgagcccaatactccttcaggtattggattcttcacaatattatacactatgattaagtagtagacttgacaaaaaattaagagggagagagagagagagannnnnnnngagagagagagagaaggtttcaaaaatagagagagaaagagaagctcagatttcactgaaggcttaagttgcatcaactg

SEQ ID NO: 161569 - DNA, 6664 bp, Cannabis sativa
tttttttttttttaaagttagatttctattagtttggatctagtgaaaacctctacaaattgtttgtagatgcttgtggactcagttgtacacttgtacttgcattttttttcttttacttcttatggaaccctgaatttgtggattggataacggcctaactccaaaattaatttatatacgggcttgaaatttacccattcactatggtgactcaatgccactttgaggcttctaggtttttcaaactgaacttcccatgattttttgaattggaagatcttgggcgtattgggctgggaagctacttatagtcatgtgaaggatttaaggtaaaatcccagcaaatgacccaaattgtttactgagctagtgtattgttttactcttaaacatgtgcaacacagcaattcgactttattggttttgttagttttcctcttctcctttcattgtatgggaacaaatattgagattttcttgtcattattttgagattgatttcttagttaatattttgtacccatttatatttcatatataagtgccatgctggtggatggtcaatgatctttcaattttcatactgtttatatattacaatgaacatcttctatgctgctttaccgtgaggtgatatgatctacattctgatttgatggttaaattttgtagtcaaaaccaataattgatgatcactgtaattattgctttgcagcttacttgaggaagacagaaattaaagaaccaaggagtctggaagttaactgacatttgtatttattgtcttttgtcatttccgtattgtattgtgtatgatcaacgggagacattgctgctttgggcttgggagaaatgagtggaagtggaagaaaacgctcttcaaaatgggatttacgggatcagcctaaatttgaagatataaatgcacaagacgataattggcctggaaaaactggtagatcaatttatcaaagagaatcaggacatgggtggcagtctccagagcttgctgggagtaatggttcaaaatggtcagcattagattcaaatgatataagatccaagcatgattcaatatttccaactagggatactttttctggaagccgaggctcacataagaatgagaacattgataaggactgtaatagatatgtgtcagactctatggcatgggatgcagatgaggattatggtacaagaatgtctcctggtcttgatgaatggagacagcaacatcatagtcaatctcctaaaagtggttggagcaggtcaatgaggttggtttgattttgtgatcttgaaaaatgatatttccacatcctgaaggttttaaaaatgtctcaaatgtagcatctgttatcagccatcacgattcagattatataaatatatatatatatatatatatatttatagggtgagataggcatagttcctttcattcagttccaagtagttagatacactccaatgatttgttaaagtgcgattcatcggccacatgtgaatcgatcttgttcccaaactaattaatgatatgattacatagttaatttgtcaagaggggtacagttaatatacatatactgccacattctattatctattggatctacactcaactgatgtgcttgggaatttactttcaggcctttagagttttgttaatatgtggctgttttagactctagcaagcttcctttctttgtacaataaggttatagagctgatttatgtcttgattgtctttctttgttgttgacattctcagggataggagtaggagtagaagcaggagcagaagcaggagtaggggtaggagcaggagccctgttcgcagcctcagacgggaatctgggtttcttgacagaagtagaagcaggtctggtgtatccaatcaattgtgtaaagattttactgctgggagatgcaggagaggtaataattgtccatttcttcacgaggatagtgaagcttatgaggattactgggacggcaggcacaggaaaggtggaggctcaaaatatgccactggtgataccagagactatcccttgagaagtggaagatctttcggactttgtaatgagtttgtaaaaggaaggtgccggagaggtgcatcttgcaagtttgagcacggtgcttctgatggattcagcaaagggcctacgaatgaatttactagagaaaaggaaagtgacagaagaagaagagatacttctgatgagcgaggtgttgaacatgaggcccgcaggaatagtgatattccatgcaggttctttgctgctggaaattgtcgtaatgggaagcactgtcggttctctcatcataatcaggcttatgcaagtcctgacaggaaatcacaagataagtgggccttgggtcgcaaatcagatgatgtcaaccgggtttgggatggtccaaaatggagtgatacaggtattgcattagatgctgctaagtttaaggagaacataagtggaaatattggtgctctcaatgcaagctctactgcttggccaatgagtgagagattgggaaaccgtgtgaacaatgagaatattactagtggtgctgacttaaatgttagttgtgaagctgctaaaaatgataaagaacccattccgtggaagacaaataatgtggcacctgccatgggtctctctgaagtaagatgtactgataaatggcttgttaatatggacatgtctccagattggaactattcagtcccctcagctaatcatgttgtgaaagaagaaaatagtcgtgttactcaacattcagagtccttgaatgatatgcatgtaatgtctggcaagcagagtattattccagaggcttcaggtcgaattaatagtgcttctggtgctgtacaaccaattataatggaaaagtctgtttttcaaccaaatcatgaattgaaagatgacagtgctatcgcattgccatatgataataatgatgtagttagaaaaacaatgaattctcgttctgacctaaatatgtttgatcagaactgccagccttcaagtgtttatcctttttcaagcttgaacacaattggggaaagtcaagcagttatcccaactgaacctcaaggaggaattctgaaaaatctgcaaactaacacaacacatacagagggaacccttgttgcgaagccagatttccgggaagcaaaaacatcactaatgaattctggaattgatccattgcagaggattgtaaatgttactgatctttcagcttctttggtgcagttatttggaaatgggcagcaacttccacaactttatgcagctcttaattccaataattcaactggcaccccttcctttaccagtggttcggttactcctactattttgccagatgctgttagtgggccacataagcattatgatcctatacatgatagtacagaatctagaaggcctgaagtcagcaacaatacctcggcagttttaacaaataacaccgttaaggcaagtgattcagatggtaaacctgaaattcaattgaaaaatgtaacctcatcctctttgcctgttgtatcggatgccaccgattgtaaacaggctggtggttcgataggagaaactaaccttacaagaaaattgttgactccactagagccgaatgcaagttccaaggctaccaagggaaagattgaacaaatatctggggaaaacaagaaaacagaagaagaaagtataaaagtggaagaaactgatcccttggatggtgaagataaagagggggctaatgatggaaagaaaaacaaggatgcaaagggagttcgtgcatttaaatttgcacttgtcgagtttattaaagagcttctaaaaccaacatggaaggatggtcaaattggtaaagatgcttacaaaactattgtaaagaaggtggttgacaaagtaacgggtacaatgcagggagctaatgttcctcaaacacaagagaagattgatcactatctgtctttttcaaaagcaaagcttacaaaacttgtacaggtcagtcctgtaaaaatatttttttctttgtgtttacttgatatcttacccattaaatttatattcgttacttcaaagtaaatttctgtccacatagctgatgacatcagccacacattatcttatatcctagaaaatatagttgtcatagcttttttaatcttattatatttttattgtgagaagaattacattacttattaatgaccaaaattgaagattacaagaaagaggagggcaatgtattgaagtggaaagaaacaaaaatgcatgcttaacaagatcgacatgtaaattttgaattatgctgctaaacaaagtgtttataggactcagtaattaaagaagtcaaaggccataaattcctttgccactgttacccaaagagaagcaaattgttttttttccctcttacaaagattccctgtatggcattttccctttaaaagatatttgccagaaattttactataattcacatcatctattattactgtgctgtttatttatttagtttttcaatctagcacagctacttgtattatttaatgaaagagaaaatatatgagtgaagggtgcaggatacgtgcacctgaaaaagttgaaagaaaacaggaaaaggaaaaactattttactgctaacgaatcagacagaaaacagccactctctactgtgtttatattttcacacattctaatcccctaaattctctccctccgtttttttccagctctcttttctctacctcactgtgtgtacacatggcacaaaaacttcaccagtagcttttagtttgtcctttttggatctaacagctctaccatgttaacctgattttaaatatctatgattgttctttgtttattttcttcatccttagtgtgtatgtgcctcccctttggatggggatggtccggaaagttgtacaaaacaacttaagtttttttttttttttaataagaaatgattaactggaaatatagaattagtcttttgctccaactctttctttctcttgtttattaaggaaacaatgaaatcttgtgggtggcagagtgggacttagatttaggatcttaaaaattgaacccatttcttgggtttaaccctttccttcagccactgtcgttggtcaccttatagctcatactcagattcaagcatttacttctatatgtttggcttcttgtgatatcaatttattgatgctctcattgccagttagaggtgcagtgtgtttttaggcagttagttatgtctacttgtcttcctttttagcttttattttcagttgcctctttttttatataaatttttgttttttgttgcaggcgtatgtggaaaaatctcagaagggatgagctatttatagacataaaacttgcgtttatctatttacatctttgacgttccatatgttacaactttccttgtgtaacacactcatcagccgatgcaaaatgcagaagaagcttcatttccacctagaaatttgaatgtgtcttcaaatgatgaagttctggttggtaacagcgagcactaaaatttttcttagtttcaatgtattttagttgtaactggcttagctaacctcacaactacttttggtagatattagagcttttcatatggatggacttggatagtatttggatttacttgtgggtaatttataattgcttatcagtttgcggggttgtatgtttatatcattttggtaccatattgctgcctctatcttcgtccctatttgtttcattatatgttatttgtatgggataattccttcagtttcttatatcaaactttggaggtaaagtactttaaattagttatcataatgtgttgagacttggctaattgtgcttaacaaataatttttttgttaagttagattggtgaaattatgatattaatttaagaggagtgctaccgttaatttcatgttacaactttttagtcaacctttatgttcgaaaatacatgtctgaatatttttttttaaatttttttttttttcacgggggtgttcgttatgcttacatcttttttgcacatttttgaaaattttcgaatagtttacagtgtcgaaaaatttgtttgaagttttttgaacgcgcgtggtaaattgaaatatcaggaattttattttcggtactgtaaattattcagaattttttaaaaatctacaagaatgatactgtaactataatgaatacctaccgctatgaaaaaaaaaatattttgggatgtcatttcagatgttgaagttgattaaaagattataatagaagtaattagcatttcttttaacttaataattcgtgttaaccacacatactgtctcgtttatgcagtattcttgtcttttaagtgaagatgatgcaaacattccaacataagcagaattgaagggtttattttattttattttttaacacaaatttcttaaaattaatctatgcttctttctagtaatatatgtatataataagtacgtaaatgtatatcgaatttcataaagagctttgtttattgaggagtgctagggaaactctcttttacactctcttcctaattgagtgacatgtgtaactttttaaaatatctttaagtatagttacaattataccctttt

SEQ ID NO: 161570 - DNA, 10712 bp, Cannabis sativa
  modified_base (2773)..(2775): a, c, t, g, unknown or other
tttttttttttttttgtttcttctaaacaatttattggatggtttacaaaagaaagtaatataataaaatgcatgtcatttctatgttttcatctgtatttttaagaatgtgttgttattttgcatgctggcttatgtattggttattccgttaataattaacaaatgtctatatcttttccttaatatttatttctttttattttttttttttgagaaaattccttaatatttattttaggaaacacatttttataatagttcatatattggcatgaattatttgatttttttcccctaaataatgtttactcgatcgatttaaatgtgcagtgggtacactctgctacgtgatccacaccataacaaagggctggccttcaccgaaaatgagagagatgctcactacttgcgtggccttctgccaccagcagtatttaatcaagagcttcaggtaagaaaacttagtacatcttttcaaaactttcatgtttaaattattattatctactaactaatcaagtaatcatttatttgggtacaaatacaaaaggagaagagattgatgcacaatcttcgccaatatgatgtcccattgcatagatacatggccctaatggaccttcaggtaattattcagttttaataagtttgtacttttgagtaaatcaagatcattcaatatttaagaatcagtctcattagaattctgcatttaatttgattctgcaggagaggaatgaaaagctgttttacaaacttttgatcgataacgttgaggagcttcttcctatagtatacactccgacagttggtgaggcttgccaaaagtatggtagcatcttcaagcgtcctcagggcctttacatcagtttgaaagagaagtaagtatgtttaatattttatgggtttttttttttttggctatattatatgagttaacaagatattgaccctttttttttccttttaattttaattaggggtaagatctctgaagtgcttaagaactggcctgagagaaatattcaagttatagttgttaccgatggtgagcgtattttgggacttggggaccttggctgccaggtaaagttggttcaattttttttcttcagtttacaagtccagtgttcttatttttaaaactactatggactccactagacatgagtttatatcatttgaggtaactgttaatctaacaagtcctattctttgaactttgttcagggcatggggattccagtaggaaaactttctttgtatacagcattgggaggactacgtccttctgcagtgagttttgttcctattcttattaggcatttgttgttatcatgagttttactttcattgacaatgtttgttctaatagaatatgatgaaatcttttgtttacagtgcttgcctgtaaccattgacgttggcacgaacaatcagaagctgttgaatgatgaattttacatcggacttaagcataaaagagcaactgggcaggtttatttttctttctctcaaccttaacttatttaatccaagccatttgcagtcttagttatttgtgcaaaatctaaggtggtggtttcatttccttgtttaggaatatgcagagcttctagaagaattcatgactgctgttaagcagaattatggagagaaagtcctagtccaggtatttgatttgatggatctaacatgctaactaattccatgagctcctgattttccaagctcatttcatatagtttgaactgatttttattctggattgttttgtttcccagtttgaagattttgcaaaccacaatgcctttgaattgctatcaaaatacagttcaagccaccttgtcttcaatgatgatatacaggttaacataactgaaatatattttaatttcaagtttaaactcttattttgtgagaatatctccccattaactatgattccttcaatttggttcatcagggtacagcatccgtggttctgtccggagttattgcagctttgaaattagttggggggaagttagctgaccataaattcttattcttgggcgctggagaggtgaggctcaaaatattttacttgcatgaaaattttctataagtgttcttattcttgggccatgaataacttttatctggttatttagttctctgtctgatgatggaaatgttgtatagcacttaagtattaagtacatatactttgctatagtccatgtctcagcctagtgtttctgttctgacatttgtgttttggctgatgaaggctggaactggcatagcagagctcatagctcttgagatgtctaaacaggtaaataatttcttatcaattctatacattattttgtttttcctttttagggtgtggtgggaatggacaatttagtccatacatgtttggtacattttttatacttcatgggaatggacaaaattatcccatactctaatttagccccatttgaagatgggttaaaatagtcccaaagggacttttatttttttgtttttaatttcttttaactaaatttaagagaatatgtatgtatgtattaccttttaattaaatattataataaaagtgttttaatatttaaaatattaaattttatcaattttgaagtttattgggggtattttttttttaggggaattatcccatatactatttttttatttttttttttcaaatttacagtttgggtttctaaaatggttgcaatgctagttgcaatgggggtttctatacgattttttgttnnnatttaagttgcagcgctagttgtaatatgggtttctatgtaagattccgtaaaaatacaaaagaaaattgttttgtagtgtaaaattgaaaaagacccttttttttgttaattttttctaatatgaatttcaaattttagagacagaaattatatatatatcataattttattgttgttttgtgttgtaaaatattacttaatttttagaattattttttttattgaaaattatttagtttatgtttttaaaatatttagtttttttttttttttgcaatgattaaaatatttaatttttttcaatcttatttaacattatttatttttttctattcaaaaccacattatactccattactatttattttttataatgtacatgaattttaataataatttatacatttttatatatattattttattttagtacacatgttattaaatgttaacataatttactttatttatgaatataaatgaatcatctaacattatttaaattactaaaaaaattataattgtattaaaaaattatttatattagatttagtcctatattatactaaacacaatgtagtacaaaaataatccaatctaatcctaattaatagtcctgtccagtccaattcaatctgcgataccaaacgagcccttagtttaacacttgtgactaatagtgtaatcaatatcttgtcagacaaaagcaccgttggaagagacccggaagaagatttggctagtggactcaaaggtagcaaccaatttatttgaaataatactggcctgaatttgtttcgagttagttataacaggactattattatttatgttgtagggattgattgtaagatcccgtattggatcacttcaacattttaagcaaccttgggctcatgagcatgaaccagtaaaggaactaattgatgctgttaaggtatgaagttagctatgtctttgttataatttcaaaaaatctttatgggaattttttttatcctctattctctcaacattcgtcgtattattttgctcttgatgtgtcaggctataaaaccaactgtgttaatcggatcatctggagtgggaaagacatttacaaaggaggtggttgaggccatgacatccttaaacgaggtttcatctcttttcatctctctcttgtcagaataatatagtcttaacacaaataacattgttgttaattggtatgtagaaacctatcattctggctctttccaacccaacatcacaatctgagtgcacagcagaagaggcttacacatggagcaaggtacaactccaaagacctcttatgattatttaaaccattgtctcatttttagtgatccataaatgaccctactttcaatatacagggtagagccatatttgctagtggaagcccatttgacccagttaactatgaaggggaagtgtttgttcctggccaggtttgtcaccctacttctgttccaatctccataattaaattttacaaggcaatcatggctaactcaccttttaattgtctcaacatccagtccaacaatgcttacatattccctggttttggtttgggtttgatcatctctggtgctattcgtgtacatgatgacatgcttttggcagcctgtaagattccactataatttgtattgtttgaatatttagcagtggagatctcttagaatttcagataaacctttactaatcatttcaatttctgtttttctgtgccgacagctgaggctttggctgctcaggtgagcgagaagaactatgagaagggactgatatacccaccatttaccaatatcagaaaaatatcagcaaatattgctgctaaagttgctgctaaggtttatgaccttggtaagtttcttgctcattgattaagatgaaatcagtatctcaaagtactgtccgttgaatgttaacaaggttccatttttcttgctatggttgtcttataggtctggcttctcaccttccccgtcctaaagatctcgttcagtatgcagaaagctgtatgtacagccctctctaccgaaagtatcgctgaagttgcaggacactgattttcccttgaacagctagtgctttcatttatagttcaattttttgctggcattgccatatcagctggcaccatttttattttgctgtattagttttgataagttccataagtaatgaataaaataatcaatgaatttcaatattgatatatttgagatctatgagaaagcctacataaactgcacttctcaagccccttcgaagaatattcactagataaacaaatgaaaaagaattacatgttaaagtgttatttatctgaagttctaacgtcaaaggattagcatggctaaaattctatcccaagtacgtccgcttgatgattactgtttaaaactctattgtatatgagcacaatttcaatgttgaatgctaattgctaaacaagggtgtattcacaaaagtagatatacattcagatatcattcacaaaatggattatcgcatattatcagaaacttgggaacttcgaataccccaaaacagcctaggcttcaaattcttgtttgtcgctgtaaagagccaccccatctgggtttcacaagaagcacagtttgttattgtccatgcatacctgcaagaaaatggaaaaaaccaaaagtagatcacatcagcaactacaaatttctaattcataaactaaggccagaagaaatggagaatcatttttctagtcacaccatatatgatacatcaagtaggggtgcgcataaatcaattcaatctaaatgacaatcgatcgatccaacccaaacgacaatcgatcgatctagtcacaaccaaccaccaaacattagatatccaattataatcagatcagattagatgttatttttgaatatccaaatggattgaatcagacgttggataaagtgtccaaaaattcaatacatccaacatccaatcaaactaattaatattttcatttactttagatgagtaattagattttatgttatacataaaaaaaatatatttatatataaaaattaacattaaaattttatcttgaatctaattcaatccaataaaatactggatcaaaaatattgaatggacccaatctgatccaaaaatattaggctaaaatattgaataaacctaattaaatcaataaatatgcatggaatacctccaatggatagaaccgatccaatcatggattgattggatgactgaaattaatttgatcagatcagatagtaaaatctaatatccaatatataattggatcgaatctgaataggtttaaaaacattgggtgtggtctaatgaacactattaagcagcaaaaggcatttcaaccaataaaatgagtcaatacatacagtaatacttcaaagtaaaattcaagagacttcccagtttccttgtaagatagaattacatacccaggaaaccaactgtattctctcactgccggtcccataagtgccaagtcatttgctctgtagagagtaatgacctcatgcacaaaaccatgtggatttacataagcaccaagaggaccatcactagacatcaccagcatatcacttcgccttgcaattacagtctgcataacattcaaaagacgtaatcataaccgggcatgcagaaattgcacatctgtcatagtgtgtctaagcatgcgcatgcatcatgcatgtattatgcaccattcacgcagtcagaatttagggtatattacctgacagtttctacatctaatgagattaacactctcaagtagctcaatttcccggcgcagcctatatgatatgccatcaatctccaaaagctcttgccttgtagattcagacactggaattttactcccaatgtaaaatgacaaaagatcaggcttcttcacgaggccttccagacttggtgctccaactatttgtttccacatatctgcattatacaaagtttacaaataaatatcattcagagatgaaaagttataatgcatccagcccaatatatgttctgatactaagatcccccacccaccaccacaaaaggtatcactgaaaatatgcatgttttgaaaccaagtgccccacctaaccccacaatatttagggaacagaaaactataataattcctgtgcagttacctgggagagactcggatttcatatcagatcttgtgtatgcaaacgagcattggaactattcctcttgggttaattttaaataaacaactaactttccatttgaatccataaaactcatacacagacaacattcaataagcttaagctacgtggaagtgtcatctaaataactgaattttatccatttaaagtcaacgagattttaagatctaatctttccttgtatctttatctttctgtcaaattcagattatttttttcataaattgtatataaagtatgaatggtataataagtcaaaatattaaagatacatgactaacaaggatcacaaaattaaactcagacaaaaccaacaaaaatatgagtaaaagtaaagtacctgaagccttttgagcaagacaataagaatcatacatgcgataaacccaaaatggccagaatgttcttggaactctccgcaactgattaacgttgctatttctcaaacaactaatgtgttgttcctgtctctgtgaatgtgttcttaacatggaaatttttcccaagccagaatctccattctcaggttctgaatgtaatgactcactagaatcagagttgtgatcagctctttgaagttgaaggtctgacttgtcatcatcgctactggatgattcatccattgagtcatatatagaagaagaaataattgcagactggtggattctcctttctgtcagtgacagggaactttcaaagctttcatcagaattctcctctgaaccctcaccatccatagatctgtccagcttaacatgagaagcatttaatggcagtcgatctcccaaagcatcccgtggggtcctcaatggtaagtcttcctcaatgatttggatttcaccacaaggctaaacaatgggtacttttacatcacatcagacaattgtcaaatgaaagagcaaaaagaagagacaataaataataaattaataattctaaccactccttctgaatctatgaaacggcgtctcaaacggaatctgcgctgcccacgagtgacaacattcaatgaaccatcctctaatctccggtactgtcgaatctgcaaaagtgaatcataggttgattaagagataactggcagaaccaagcgacaattagagtgcaacatgtccaaatcctttagttatttcaacttccatttccaacagcctaaagaaacatgaacatgcatattttacatacgatgcaccaacacaaatatcaaagtaaagcaatatccatgttgtccctagacagtgagaattagccaagaaaaaacacatcatgaattatgacagctcaacaaatcaattttctcaagacttcacatagcatgataatgatcattaatgataatttactttttgtactaatttggttcttaaaatgttattgagcattgaagaacaatagcgcatattgtagcaattagcatttgttttccttttccttttttttttttttttgtttgccaaatttagtactatatatagatcttgcattggagatggctttaatcccatgtttgatacattttagtatttccttagttgattttttcttcttttttatttttcattccaatatgctaaattataatattgcaacaaagatttaacaatgcattgaaaatactctaagaccacacaacatcctccatgaattttggagtattttatggaagggtatgcaagctcattgtcaacatgtctctcaaaatgaaaaaaacttcattatatctcaaaaaagttagagcattccttgtaaaccatgaaattagtgaaggagaaaacagagcaataactgacctctgcagtagtcccaacagttgaaaactttgttcttccagtatcacgatttctgttagctcttacctaattaaattttattcataatatcatttaagtttcatggagtgattgaaagtggaaaaagtggaaaatgaaattgcatagatagaagagctggataaccagctttataaggagtacacctaccacaccaattgtaaagggtacatcaacttgtgttaaagctctctcaatagcagctacaaaattgccttcaataactctgagaggaagggttgcttcagggaacaaaacgactcctgaatataacacagcaaaattaaaatcatgccgttgttttttttttctttttttgttatgcaagggggaagaaaaacttaaaggataatgaacgcagaaagcaattttcaattgaaagctagtactacagttacaaatgcacattatttctaagtcatttaggaaacatacttaatcaccaaagtggtgagatcagagctacttttgatcatgcaagagtaagacacagatacattggccagttttcaataattccaagatccaaggaacagtgtcaacacactctatcacaccttacattttcttcaaaatccttcacctagtgcaaaaggagtagaaacaatataaaaactgaaatctgaaaaggaatgaattagcaccttcaagatagaagattggaaggttaaagatagcaccaccctccaaaaaggcaaccctattgtgtgtgtcttcgacatctgttaatgatacaagtaaaaccgtaagatctcactaaacttaactgtctagtcaaatataaaacaatttaaaatcaaaacctaaacatgtaatcttaccgccaagatatgtgtgtaacgaagccaaacatgtattaaaggtgaacccaccagatgtgacagcgccatcataacctcgaccactttaattaattgacaaaaagttaggaagattaaatcatatttgatctcctagctaaaacaacaataatgcagaagttgccacactccagttattgttcgttactccacggtagtcatcgtagacacttacaaaatagatcttatgtatcagtgcctccaatttgtttgaaatttggacatgaaaggtaagttcactcagattcaaaccaaatgtatgcatgcgtatgaaaatgtatgtacacaaatacacttacatgacctaaaactataaattctatactcggaattacagaccaaaattctatagacgaaagtactccctgcctcccaatttctaagaaccctaatggaactacatttacagtacaaacaaacatccagttcgttcagcctgtaaattttcaaataaagagcagaagcaataatgaagaaaaagaagaacattacatagcgtgacgatcttcgtcggatgaatcgtgaaggtcatcgacctcttcgacgagcaactcctcgagatcgagctccaaaatctgctcgatctggtgtctctctcgctcgcttatgttttcgtccgccattcacgttagggttttacagggaaaggttaccggcatggcaatggggacattacgcctccgccgcaaaattttcagctgagacagtctccgactcccagtcccagtcccaccctaaaatcaaacacgcttattatttacccatataatatttctgttagctattacagatcaacagggtaatgatttttttttttcagaacaaactgtgtaatggtttatttacgatctaccggtaaattttaattaaactgctgtgttttattaatataaaattactgaaatacaaaatattttaaaatgtcaatattatgaggggtgtacagatccaatcccaaccgacccatccaatcccaaccgatctaatagaatcgtatatccaatcataattagatcggat

SEQ ID NO: 161571 - DNA, 1119 bp, Cannabis sativa
aacatcaatttctttaattccaaaatgtttccatgaaaatattcggacataaatttagaaagaaggaaatcccaattgaattttgaagttaaataagaaaaaaaatggttggctatgaaactgtgttgatcaatgaaattgaaagctttacgcacagaaaaagattgtgaaaactcaagaaataaagaaaaaaccctaaaccattgattaccagtgggtgcacgggctgcccaaaccgaattaaaacctttgttccgcaagagtatcacaagacttggcgaccaagaaaagttcttagggcctgagattccagcagaaacgaacgaaaccagcaaaagatagaacggaagaacgagagagtaccaagccactaaaaccctaataaatccgaactctgaagaagctggaaccccaattcggatcgcgaccttcaatcatgagctttcgaacgcatacaccatggaaaaagaagagagagagagagaagatttggctctgaagttctgaacactctttatttaagaacccatcggctcgagcgagttcggctaagttttaaccgttggattaaatccaaggtaatccaacggatatggaaatgccacgctttagatcttgaaagagcataaaattattacagcttttattagttataattctacgcgtcacaatcatttcattggcgcttaaatctgatacagtggaatttagtgtaggatataatttctatgtaagaagattctcgagacgaggcatacaatgtcaatattttagtccacgcatatgacgcggaaatgtcactggtgcggcgatctggtacaacgcattggtaggatccacggtaagactccgtagcttgtacgttagtaaagattgaaaagtaattaaaataaataataaaatattatattttcttaaagagaattatcttacatattgtttttttattttttttttatttacgggtttagatttttaaagtgcctacaagattagttacaatagaggtttaatttctatacaattttttgttgtaatttaggttgcagcgctagttgcaataggggtttttatgtagaattccgtaaaaatacgaaaaaaaaactgtttttaagtgta

SEQ ID NO: 161572 - DNA, 5908 bp, Cannabis sativa
  modified_base (4132)..(4133): a, c, t, g, unknown or other
atgttttaggtgccgattctgaatcacaaaaccataagtaggattcagcccaacactctggttcgattccgtggtatgatacaagacatgctggggaatgagttttacgtcggtgcttacaaggtatttatgctcttctattggtttttttttttctgacgatccttttgagagttcagactagtgtagcttttaattttgtaataactaatttgtatttttatttttaaaggatggctccgtgtggagaaccaacaagtttacggatgtttgtcaatctccaatgggttcttcttcagatatgcgaatttgggaacgacgcttggtctactgtgttccggtgagtcatacctctgtttctcaagctttgcccgtgaatttcaaagagccctaaagcatttttgaatttgattcggatatgtataaaccaaaaccatagcttgccttgccatgacttttttccttttgtgttgtccttttatttcaggttccgggccagaattcatgggctgaatcgttttctgatgcaaacgtctataaaagcatggattgggcatctcctcaaagagagaagcgccctagattggacgaggaagctctggatagcatggatacacttgtaattccttagtcatttttatatggatttactgttttgatttggatcatttcacaagttctggataacaaagtggataagtgtaggatagctgaaattagtgcagaatgttcattcggtgttgttttgttaggctccaaaatagaagtagctaagtgattcacacacataaatttggaagtatgatttgcggaaatttgctgaatctagtcggcaaattgattttttcactgatatgttttgtgatcgtttatatagtttttttagttatgtattttatggaaatgtttcatttttctttcatgacaggactctgatgatgtgattgaaggttctagtaccaaaaagatggtaagtaaaaatgagtggaaccaggtttcatttgtttcttatttttatttttgcatctattttctgattacctgagggatgttgagtttagggaagaaccaaaatagtgttaaaagtgattttatgtggtcgttcttcaagcttttgtttttaacattcattcattatcttttcatttgttagagagaagatggacatacttcacaggataatctacctcaagaattaattacgggcacctgctccagtgcaagtgttacacctaataacgagaaagactctcttccttgtcttgtcaaggtaatatttgcattattaattctcccaagctagttctgttacaactgaaaatgctcttatcttttcatatctgatggagcttttatttatattttagatatacgacacgctggagtctgacttaaagctaaatgaggtttttgagtttattggtgttatcacaccagatttagatggtatagtcgataaagttgagcatgatgacttcgaaaatggcttcagggaagatgatgcactagcgcatttacccaggagcaaggtattatttctattctctaccttctagaactttgtttttttattttattattatttcaatgttgctggaacctaattatttttctctattttgtaactattgatatgaatctatttatgctattcaatttcccttctgacactagagggtagataggtacttccaagttagtatctaatgaatagttacacaatgttggtactgtgatttcctaaatttacttggcgagttgtatacaagcagcttgactaaaatgttcatttaaaacctgaactagctcccataattttgtttagttgtcttgccaacctcattttgcatttggttgcaggtaccgtacctacactgtttcattcatcggaagcttgctgttcaagactttctccagagttctcctactttggaggtgatttttttcccacttcattaaattttattataagaataagtttgggtagaacatacctgtaataagaattctagaaccttatgcatctttttccatcattaattcattgtgcagttttgttaaaagttgtactactgttttattgtgcagccaaagccccaggttatcaaagagataagggaagctctcttgaggcatctgacggatgttcttggcaatgatggcctatctgctcattttgtactaatgcatcttctgtcaaaagtaagcaatccttgtgcagtgttaactgtcatttttctgcttgttgcatttcatatttcatactttcctagtttttcatttttataaatatattaactctgtcactatgagcacttttttgtctcactttaaccgtgtgcttatagttttacttgcttttcttgccaggttcattctagagacgacattgttactgtggggaatctttcgctaaatctcactggttttagcaaagaaaatgtttctgtgtttggcactcaacttagccttgcaataaagaacctcctacctttcactcattatatgccactaacagttgggtatctcaatactgcttctcttgctcccaagaaggattacgaggcaaataggtatatagatattactatttgtaaattatgattcaagttcacatgtagatttctactttattttgttggcagaagagttttcaacttttattttaagataatgctcacttcatatatttgctatgccaacattttttttccagactgataactgggagtctgcagctggctgagggctcacacttgatcattgatgagacccgattggatgcaggaaccctcaactatgttggggttgacaatgcaagattgcttaaacatttaatggtgatgcacaaggtgattttcatcctatcaaattttatatattatataatatatgtgaaactgagatgagcaggcttgtagatttctaatattttgcttcatgatttcctttttttttctttttaaataaaattaaattttacatattaatgtaaccactaactatcatgaaactgatactaccttataatttgtatatcaggtggagtacgactttaagtactacaaaatggacatggcagctgatatccagttgcttatattttcggaagggaaatcgaacatttgtcctgctgatttagttataccgttccagccttcttcagttgcttcttctcaagcatccacagaagcagtagaagcttggagatggtacttggctacacttagaacattggctcattctatagattcagaaatgcagacggtaagactgccttcattcatgggtttcatttcaaaacttaaacacttttaattgaagcttccaagtacttaatatttattgtatacttttcaggtgatagaaaatgacttggttgaagcaaggcaagcagatcggagcttgggtagccaagattttagcaggttagaaaagtcccaagtttttaatatgcatgctactatataagtattatgaattgagtttactttatagttgtataaactctattgtggtcacagtttgctgacaatggcccgtctaatgtcaatgagttatggggaaacgtctctctctttagagcattggcagatggtgaaagagctagataggctgcgacgagagcggctcaagtgactgttctttcccaagtcccaattgatattttgctatctgtgtaaattataaattagattgatacaatgaatctcttttacttaacagtgggtgctaattgagtttctgtttatttaatagtaaatacctttcgaaagctgcgggccaacacttagcctacttacttacttgatcgttttcgttcggtggttaatattcaatgtaaaagttgataatttaaaggacaaatgtgtgaaataaggcaattttttttcctaggctgatatattagtgattttaccattgttgtgaatacagaacacaaaatttcttgtcaattaattttggagttttttatttttacacattttttttttgcatttttatagaaatttacatagcaactaatagattaacttaaatcacgattaaaattcacatattaatttacatagaaattattagaataactattggaacaattcaaattgtaaattaaaaaaaaagttaaaanntagtatatgaagtaattttttttaaaattattatttggaataggagtaaatattatcgtggtttggttggggtctgtgatctcggtgcaccaggcgtagcatgatgggttccctttgtgtgtcatattcattttcttcataggttgtttagtgttgttggcaatttcttttgggttttagatttcgttcgatgtagttgggaggttcgttcgatcgagatctggatcagattgttggtggtctaaggatggtcttgtttttggattctacatggactcagtttggctttttgtccatggtgttgtgatagaaggttggtggttctagtttagatccgacaattagattttgctaaggatactgtgattaagtttttcgtactatagttaggttttgacattattgtcttctagtgtgagtaggattatgagatgtgaacctaatcaacctatatgttgtctaagatttttcttaaaatgcgtggcacgtcaagaaagggccatgtggcaacgagatccatagtacaggacgtgttatgttaaatcacattcggagtttgataattaggaggagcttcagaaagttagtcatctctaaaagaccctccaggaggacagttgatttttctctttccttctgcaagtaagctttacccagaggagagataggaggattgtacaaagtatagcgtgtagcccaagttcaagaaactgtgcacaaatttaatgcggcatgggaaagaataacttactccttaccacggaaagagtgtttgagggtttaaatccataattctctgacttcacgacatccaattcctaatttgactaatacattatgaactgtcaaatcatcagtaaaagacaaatctagtctcaccaaacgcctacatcaagtgcaggaacatcatacagaataggtaatcatgtcctataatcaagttgagaaattgtgcaagacatagtttatacaagcacgacaatggtgaccttctttctatactattatttataaatattcccaaaaatgtaggggaaagggagatcgaatcattgcatctctataacacaatccaggaataaaaatagctcgtcgactaaaactcattaatacccaaccacataaaaaatcctctaccttaatttgcattaattattcaatactttgtgaatgaattgttgtcaaaaatctcaatcaacactatatattattcttgtctctataccatgaagtgtcttttgttttgtttcgttgttggtttgttttctttgttattgagccatcaagtcgttgtaagtggtttgaaataatatgttctttgtcgttgaaggggttgttagtggtgcagtaatgtaccttgcactatagttgagtactcaagctaaggggttgaatgaacttggtgcattaatttctactattgtgttttttgagcggtggatgaaactgaatataagtttgtttaagattaattttgatgttgtaagctttttcatctgatgttatttctgtttcttttatcaaacgatctggtaatcagggggcgattagttggctcgtttttcttattctaattccagtcgtgtttctaacagaggaggtgtctcgaatgggttagttgattgctattaataaaattgcatgatttcttttaaaattattaagttgtttatacatgaattacttttaagttttttttaatgttcttataaactaagattaattttataaaatggaaatttttaaaaatatttttattttatttacaattttac

SEQ ID NO: 161573 - DNA, 1524 bp, Cannabis sativa
acaaccggccacgtgggaacaagtacttaagggtaaaaccttaacgcacggaatgctactaccctacataatattcaagtactaagcaaacaacaggtgctaagactccctaaagggaagcaaactttgagaaagacctcggaagtactgaagctcgagtgcaccaaccaatgggccctccacctaatatggagtgacctctgaatacaagaagaaccaatagaactcatccacaaggttctctccatcgctctaatgacatcagatctcgagaccatataaagggaaagggacctgccactcacaccaaaggataaaatcaaagactctacctagaaactggaggctatgagatctaacgagtaaggactaatgagaggcttcatacccaaaagtatttttgagattagagaggtgagttgtgttattactttgcatgaggccccgatgcccaacaatatgagtactttcctcgggtacatgggaagagttgaacttgagcaaccagtttaattctctccgtacttgtgatctaaatgaagactactttaaggaaagtagtcactgcaatgatccgaatgaccgttgtcaaagcgcatcatcccaagatgacccagattttaatccaaaaatatcatcgatgttgccttcacgacctcgtggttaggagacaaaaaccaaacctaagtcgactggaggtcacgattaacttgggagatcaaaggaactgcgtcacaccctaactagaaaaaggttggtggaagcaggggcttctagaggtgatcttgaccgggtaatagaagttcccactaggacacaaaccaccacccttggtgtcaacaggacagagtttgacaatctagtggccttggtaaaaggaatcacaaccccaaagttgtcaaaatttgaactggacagagagtggtgctcaccgctctctgaccaaatcaaagctctgccaatcactttggagattaagaatccttcctagcatcaatacaccaagaaagaagacccactgtctcacattcattacttcaaattgtagatagatctgcaaagagtaagagacaatgttaggtgtagaattttccctaccacgctaacaatcctagctcagcgatggtagctcaagcttccccctggatcaatcgattcatggaaaaatctggtgggtgcttttggtaatcaatttgctccttctcaatagtgccaaatcaaacctaatgctttggcggatgtgaaacagcaagaagatgaacccctcaaggactacattcaatggttcttagaggcaatcgttaagacgaaaatatttagcgaagatgcgagggttatggcaattgcagtcgagctcaaagagatgacttctcagtggttcgaatttcatctcaaatcagtgtacactatgaatgacttttttgatagagtagacgttgggaatatttcaccaaaatctaaatttactaacaagtatgttgattaacattctaaatatgatttctctaaaacaatgaaattaaa

SEQ ID NO: 161574 - DNA, 2988 bp, Cannabis sativa
  modified_base (2955)..(2955): a, c, t, g, unknown or other
aagaaaaaaaaaacttaacaacaagagtaatcttaagttttaacataacaaaaaaatatattttgttgtcaaactcactacgaatagctccgcagctggagcagatctccctgaattcatgtaatcttcaaaagtttttagaccattgtcaaggtccccagagtgtaaatagcacctgtaaaaaagatggtggcagcaaacacagttgatttacaagtgaacaagcaaaatgaattaacagaagtcataaaacataaataggaaacagcatgataggcacgcagaacataacactgacataactaaaactgacctgtaagaacaagcagatgcaatcacattgtgtgatatgagaaaaagatatgcataagggtttaatatccaatagtaataataccgctcacctcataatttgcatcgtaataaatgtatcaggaacttttccatccttctgtaacatctctgaaagagtctccatcaactgtgaaagacaatacattcaaataatgccaaaatgcatcagaaaaacttagagatatttatacaagaaatttatgcataactagagagacagacgctctcaagataggtggttttgcttaaatttagcaggaatatcaccttgacatttttgaggtctgcacaagcatgaaatgcaacgtgatatatagtcagttgattactaataaatccccctctccgatgagcataatcagccgtaggcatattatataactcctctaaagagacacccatcatcatattatcagcagagacactggatgattcaaccgatgtccactcttttgatcgctcgacaaactcaatgatcttaacgaaggaaaagaattggatattagataaaacctcttaaaaataggggggaaagtgatggagctagaaggaaaattgacgatgaatgtttactttggatgcaaaatcttctggtacaggtgttttgtttttatatgctgttataagtcctgcatagcaatacttatttagcccaaggccagcagcagtcatatctcgaataatggcatacctgtcacatcaaagtaaacatttcactcttaaatggaaaatgtctgtgagggctgatgaacttcatttaataaggatagttgcagaatgcagacaaagcatatataaaacatacagttatgaattataaaaaatatcccctctatcaggagttcccatgttaaaattgcaagaatgaaccagcataacaggtaattacaaattcggtcagcaaaaaagtaacatacactctatctaagcggccagcagcagcacatgcattaagcagacagacgtaggactgcaccattggcttaacttcgaatatcttcatatcctccaaaacctatatgccagtggtaaatttaaaggtacaactaaaacaatgtttcgggaggatacataaatatattactgtaattactaatgaaataataaagatatgtgatgcatacccgaattgcctgatcagagttatggcactttccacaaagtgagatcaaaatgttgtacaatgtaacctataatgtaaaggaccactaatcaaaagttgttacacgaaagaaattatattacaactgatcctaatccaataaccaaaggaacacaaatgatggaaaccagggcagggagagttcgtagtaatggatacatgtacatcaaattggttaatgaaatctaaaaattcacctagtaaagagaatgcaattacatggtgtaaacccttgcctataaaaaaactgaagtataatccccaaacttacgtatattacatgaaaatataaatcatatgcaggtgcaggtgcagcccatccaagcaagtgagttaggagaatatgatttaaaatgatcaattcttgcccttttcaggatatcaataagttcaatagaaaaatcttattttgctcattaagtaaatatattttgaaactacaacagtatttgggaaccaaaaacttataacaattactatcaaaatagcagaacgaactaacaatataacaaaatccaaaatggggaataaccatagatatgtatactggtccttgtttaaaaaagatatacaaaccgaaaactccaatcttaggagaaaaaatcccttttaaacaaaaatgattttgacatttgttaaatgaataattgagtttatgaattgagtaaacatacatcaggaaccaaacccatagacttcatttcatcagtgaagaagaaagcatcctgcaaccgagctcctttcattgttccagcaatgagcgaatgaaacgtgtcccttgtaggctgtacaccgtccagcaccatatcctcatacacatccctcaacaagaagtgcctaaaccaaaaaagaacccaatcacttattttcctcttaattctaaccaacacagattcaccaaacaaagatcaaatagaagaaaaagaagaaccttctctgagcagtgatggaatcgataacggtattgtactcggaaacattgttggcgtaattcctctttgcgtattcctccgtggaagcggcggcggcggcggaggagaagtatcggcggccaaagtgttgggccagtgacctgtggtgccctgaaagagaaacgtaaccattatcaggttgttaggagattgaaggagtcgaagaagattgaaaatggtgaagagagagtaccagtaaggagcttgaggaggctcatggcaatggcgttgctctgtttctctgatctgtacgaacaacttcgtacaaaacccagaaaacctctcccaaaccccttattcctcccttctctgcaagtcagtctccctgttgggcctaattgggcctgaacccgcttagactgggttttcattgcagccctatagttttcaaatatgccaaaacaaaagggaaatttacatggtatactaacttttttactgtgattttttataagtttcatactgcantatactgtgttaagtttttactggtgttttgta

SEQ ID NO: 161575 - DNA, 6605 bp, Cannabis sativa
  modified_base (6561)..(6565): a, c, t, g, unknown or other
tatattcaaaattatggtaccaatcactgtatcatatatatatgcttactagaataaacttctttttattatcattattatttattattattacttttctgtttcagatatggcttttggaacgaggagagggtttcgtctaggaaatgaatcaatggtgaaatggattgggaaatctttctaatcaacggaacaaactccccacacacattgattattgtgcaaatgggtttctgtttgtaatcgctttattgcccaatctacaagtttttgttgttggattttggggttaagggagtattgggttggaattttttggcttcttctccaagtgggttttggtgtttcggaagatttaattgattgattgattggttaatctcaattttctttttcttcacaaaaaagaaaatgttggaagctgagttatgctcctctcatagaattttatctccattgagagaagaaagtggagatgaagaactctcagtcctaccaaggcacaccaaagttattgtgactggaaataatagaactaagtctgttctggtgggtcttcaaggtgtggtgaagaaggctgttggtttaggaggatggcattggctggtaatttttctcttcccaaattatatatattgtaatcttttctatgaatattggtatcatatgcttaatttgacattaatcaattgttgattttcactaaatatatttttttcttaagaaaatatgctcatgaatgtagaaaagacaagaaagaaatcatctatatgtttttctttttcttttgagtttacaaatcaattatgtgttgttaatctttagctattctgtaagttctaatttttagtcactaataagcaaatgcttaaacccaaagatagaatacatgaaatttataatttttggaagcaaaagacgaaaaatgcggtgagtaatattagaaaataattgaaaagtatgatgctgctattattgttggtgtatattttgtcaaaagaaacagggaaaaaaatgttttttcttttttctttgttattttaatagaagaaaaggttgaaggagtcgaaatttgaaattaggataagatattccgaggcgcgtgtagtcaatcgcgttaaatctgttgtatgatttgtcttttatgctagtacaatattaggattattggcacgtgggaggcctggcctgtcaaggcggttactttatgtaattttcttttctttcatttgtaatcttcttggattactcgtaattacagggatttctgggtcaaacatgtaattttatttaattactcctaaatatattataggggttacttatttttagtctctttattttattttattgtttaacgttggagaacatcttttgttgaattttttttgagaaattatctcacattttttaaaaaaaaatttaaggtttgggtttattcagttgttttgatgtggaattccgtaaaaatgaaaaaaaatatattttttagtgtaaaaatgaaaaaaaaaaaaaaaaaaattaatgtttttatgattgtatttttttttatttttctctaattggactaattattttgatcaatgattttggcttattgaatctgtctggatgattggttctgatttgaattatttattattatattgtgtagtcaagcaattgagtggactgagtttatttagctgtacttgatataaaattgctgagatttgtttagttatttgaaaaaattgattatttatctatatcttcttctgcattgaatgacttaataatcctttcaaaacataaaaaggtagaaaggaagactaaacaaccaaataatttagtgatgagaatgagaattacgaagtttgaatggacccgtaattttttcttttgtgtcttaatttatgaatttttgtcatataaaggttctgaaaaatggggatgaagtgaaacttcaaaggaacgcattgagtgtgttagaacatcctactgggaatgaagaaggcgatgatcatgattacgacaactctagcactagctctgagattaatgacaaggacaatgatttcagtaagttgattacaagcattcaatatcatgttatgtcaatttgtaaactactccactgaactgtatttgttgagttgagcctttttttctgaagtttcttggcaattttgttgtgtcattttatcaggtagcagtaacgaatttcacaaacagtttaagccgagagttaggcatgctaagtcgtcggcactgtcaacatcagcaaaatcaatacaccgcggtttgtacaaagaagtccagtcgatccacaaatctagatcggtaagcatgaaattgaaatttgatagaatgtgtatttggcagttcataggttcttaatataatatttgtatatattggtgtattttcattgtctgatatattttggtatttactagatcaaatcatcgtattataaacagagccttaacatggcaagagtagaaacagactcattgaggagatattgcagatacttcaatcttgtaagtgtcattccccttagtcacttaccaattgagatagtatgtatctatgtctatatatattaaacatatataaatgtatactaagataacagaacataatttaaattttacagctcagtcatttttattttgcatggcattgaattttcataggttatgtttggttggggttgaatgaatggaataaaatggaaaagaattgagttttattcaattttattttagtttaaatttcaaacatgaaaaaaggattcattgtttatttcattctcgtctttggtttcaatttcaaacattgcaatgctattctgatttttctaccatttggctggactactattcttctcttaaactacaaaagtctattccaatagacaatatcttttggttttcttttatttgttatatattcatattctctgttatttgtctattccaagtatttagtaattactacagtcttcttttaaacattatagaggattagtcggccgagcttagtttctacggaaaaagaaaagtcatgattcagtttgacaagtgcaaaatgaggcatcagtgatttaaactattgttgaaatgcaggcaagtaaccattccaatccatcaagggagcagatgatcaatgttgttcaacgacattttaattcacagcaggtctctttcttaccttctcacttctcacactcacaattcaagcctgtttaaatataacttaacaacacatcaaatattataataaagactacatgttttttgtttttgtttttttgggttgattctaatgcctgtgtatttgtttaattggcttcagaagccactggatgatgttccagtaatcactgagtttgtccaagcagcagccaagagaagaagagaagccatgtttgctgagaagtacaggaaccaagagttttaagggtgtttgacacaatgtattatattattattattattattattattattttagttgtttagttttttctttagggttttttttatatataatataaatagtataagaaaaaagattacatatccaactctaacctttagataaatccgacttatttgggatgagtttgagatttacctgatcatcttgactctctctcgctctccctttattttaagttctaaccatgtagtaatattagtttatatatataataggatggttaatttattagagcatgttgttttttgtttcttagtttttatttttaatggttttcataatatggttaaattctatatatccttttataaattggtgatcaaataggaagttttcattgctgcaaaatatatatcttgaacaataaaaatttgaattttactaatcaagaattttctgttctcatggttttgtaaaaataatttcaatctacgtaaaataaaaaaataaaaataaaaataaaaataaaaaaactttttctacattcatgtgcatattcgataagtatttgattgttttttttttttttttttgaataaacctgtaaactgtcattgctaagggtacagagtgaaaaggttttacaaaagaaggtaaagaaccagtctaaattgacccagtatcttatcaaaggccaattttagcataatcatgagcaattttgttttgctctctcgaaatataagacacaaatatttgtatcagataatgagttcttaatacaattcaaaatatgaccaagaactgtaatattacaacattaaccattaagcttattcactatagttttaaaatcagtttcaataacacaaacaagaaacttaacaagttgtatcccattaattgcaagaaggatagccttagcttcagcaatatccggagaaatgtttcctatcaaaggcttgataactctagctgcctttgacagcatttagactgtcgaactacaattcccaaactatgcctcttcttattacagtctagagaagcatcagtattcactctcatgaatccatgaggaactcttggcgcacatgatttgctattctctactgcatcttatgattcaaagatacatgttgtgcattctcatagctatccacgaaacaatatttttattatgaaagatgttatttctttagttccacaaagcccaccaaaaaaagaaaaggcaaagtattagtattaaaagcattatgaataaaatcagaaatatcagtgtttatacatattataataatcatagaagccaaaatacttttaagctttcctagcactagagcattccaacaacaaagcatgcttaacagactcctgagtgaaggtgacatatagagcaaagaggagaaggaataatatgtctatgagacagaacaacaacaacgaggatagaattagaaacaaccctccaaacaaaatgtttaacctttggaggagtatgagaatttcaaagttttcctaaaaaacacttagaactttgaaaagaagaggagggtggaatatctctcttggaaatagcaagatgataagcaatttttgtttagattttatgtcctaaataaaacttattttcaatgttatcttaattttatttatcaataaaagaacaaaaattatttcattactatttcatatattatttggttcacatgttactttcatgatcatatgtttgatatttaaattttattaaatctttatcatattgttatttatgattatagtgttgtctacacagtaaaaagtaagtatgactatatgatataaactagattagtcttgtgatttgttagtgcattgagtttacactgacgtgacaatcagcaatgtcgtttacttacacttgtataagtgaaatatcttttttaagacattagcaaagtaagctagtatcggatgtattggtaatacatgttgacagtgaaaaagatatcataatattgatgcaaaaatatggatatagatctataagccatactcgctcgctagattggcgagaatgaattataagttaagtatatatatgacgacacaaggaatggagttgtgtctacttcaagttttatttctcacaagatagattacagaaaaatggctaaggctggatactctaatttttagatatcaaaactagagagagatgccctgaccttatagctctttcttgagcttaaaaaatgagctagtggagctctccttttataggggaatgaggtcctattaaatgacaataaaataacccaaaaatatagaaaaaatacacttaggctatttttaccttagatgatgatctaatggtaaaaattgacttcggaggttgattgtcaattttcagagcttgagtcgcgcctgcaggacctgctttgggtaagatgtagcttaaattcgtaattcccttaggggtaaaatttggagtcgataacttcagaattgtgattaaagtgtgattcatgacttgatagatcattgaaatagcttgaaaatacaagttgaatcacgtcaatcggatcaatattgagtgagttatggctattttactaaaggttgttctgggcccagcgcccaagttgtcatcccagcagccaggttgacatccagcgccgaggttgacatgtgatgtcaacctggacgctgtgtgagtggaaagtgtctaaatgtatttttgaaggcctaagtgatatttcgatatcacttagtccatttctgtatttttgcaaagcttgtcaccagttcttgaagatgtaactgttctacgaaaatgggtgactcaaaactactcgattttcgagtaattcaccatgtcgagaaagtgaaaatatgaagttatgaatttgactcttttgactttatggctctcagatatgatgaaaaactagacggacaatcgagatggaatcagaattggataagcagaacccaacgcaccaggccatttgtcaacatgggcacgagtgcctattctgagtttctaggatgtcgttttgatacttccaaagttttggaacttggggatgaggtctcctgccaagtttttgaccattttgaaaagaatactgttgggttttgtgcccnnnnnaaaattcatttcaatataattagatttattaattaataaa

SEQ ID NO: 161576 - DNA, 2804 bp, Cannabis sativa
ttttttttttttttgtgattttaacttaattacttatgtttgctttgcttggttgctgggaaaaactttgttagatttttctgggaaaattggggtggagaatctagggttagggtttgtgaagaggatgtgaattggggttttgaatatatctaacaagttctgtcttcattcaaaagatcagaactttagattttgtgagcaaattatatacatagtgatatgtattctttctttcttttgtttttttgtgtttgtttgtttatattttgatgtgtttagtttgctgtttggttgctgggaaaatgaaaattgtattgggttttctatgatatttctataagaaaaaaaaaaaaatacaaaagaatgttaagaaaaataagtacaaattatgtgattgaatatttgagctaattattattaggtaattgtatgtatgaattggatttgcattttctcgagaaagtaaaccaagttcattgcctactaatctgtaattgataagggtgctttaatcttatgtgattttcagatgaagagacagggtggtatgatggtcaggtatgaatcacatcatcaaactatatatgttttgtcatttgagttgaacacactactgtatgctttgtttggatccaaatctcttaattctcatttcttattgttctcctcatgtccttacactcattaactgaggcgaaatttgaattcgataatgtcgatcgagtttgtttagcaatgtctttctttttgagtggtattgattggcatcctaagttgatttgctgttgtaaattatgtgattttgaaccaagagagagatgacaaatcaaattaagtgctctcccaataaaacaataaagcttttgttactatcttttattctaatgaatgtattgagactatttctggtgcaaaatatgtcaaatctcttatttttgtggcaaattgtctatattatgtagttgttttcacttatcggtgatgagaatttaatccaaattgaccaaattggtttgattggattagatgaacaccttaatagatgttgattatagttcggggttaatacttcttggcatttttgtgaaagcttaaaattcaattttactggcagatgtgggttaagactgctgaagttctcgcacgcgatcggctgctcggttcattctctgtaagtctaattttttccttaattcacatgctattagtttgatttaaatacaaccaaagaaaaccaattagattaggtagaattttctgaagtgatttagtactttctttgtatccaaacaaaaaaacaggtgaagcctgtgctgagtagattgaagtacacactagttggtttgggattatcattgttagtctgcattatgtttctggtcaacattgatgagactactcaaactaaaaattatgaagatgatgagatgagagtcatacatggagtctataatgatgattcagccaggtcttttgagccagatgctttctatggtgaaccacctcctctcccttaatatacatacatctctatatataactgtatatgtgtatatatatatataaaaatgctgttactacaatatgaggaaattaatatttatataatatggtgattgaaagaattaatcactctttggctattcttaatttttgtttttgtttagctctttggcaattgaaacttgtatggattttcttaatataattacatatttgtaatgactaattggttttactgtaacaaattttgaaacttttattattaagggagatcaaataatattaaaaaaatatatgtatttcaaatagaaaagttatcatggccaaataaaaatttatttattattagaaaaaaagtttctatattaatgtattattattgggtgaatgatataacaaaagtaccatcagtatttttttttttttaagtaaaatcataaaattcgtaaacatatttaaaatttcacacaatatttttgtaattttttttttattatttttatgtagttgtgaaataaagttactatatcaaaattatttccacacttgatacgttacattaccaaggccaattgaagtgcttcaaactcgatcccaaatttgagaaacaatgtaagtgcagtacgagttcaagcaagaaaaattgaaagagtttcgatgattcctgtacgcactacaatggcttctgcctctgatttcgatgccctcttctccattttagttgcagccctagctaatttccacaaacaaccacactctctcctacccttaatcaacaaaagcttagccaaactccattgctcgcacatccaaacaccaattatctctcttcttttgacccttcttgcctctaaataaagaatttcccttttttctctcactgactttctatcaagcagaccctgacgcggacctcactcgaacatcgaccccagtttggaactggacgcgattccaacctagaacttggactatagggctgttcaaaaaaatcaacaaatagcttaacctgaataaaccgcccaatccaaactgtataaagcgacaaaaaatacaacccgaataactttacgaaaaattcaaactgcccaatgaatatattgggcaggttgaatattttttttctaacccgcccaaataacctgactaaaccaaataaatcgatttacatactttttactaaaattatttataacataatgtataaattatgttcaatatttgaactattttacatttaaagttgggtaaataccattttagaccctgtattttgcaaaagttacagattggaccct

SEQ ID NO: 161577 - DNA, 20888 bp, Cannabis sativa
aaaaaaaaaaaaaaatatttgcaaatacaacaagtttgatcgactcgttcatacacctaacatatcatattattaggtataaaatgttagtaatgttaactaattataataagaacaatttttataattataaaagattgttataagaactatatcaaacgtccaattttgtaaatacatatcaagtcgggtagtttgtacacttaatttttcatattatttaaaaaaaattatatgaaaaattaataaaattaaattttttaaacatccccagttatttacatactattataaaaacaacactttagtattatttccaaataaaattctacattattattaaaaagtaaaaataaatttacttcgttctgaatttttacttactaattattttattttttaaaaattaaaaatcataatttataatcatacactctctccttcatttagaagtttattcgtaattaagaaaaagcaaaattattatagatatttcattacttgaatttgaatcaaatagattagagactaaaaaaaccatatccacgtcaagaaaaaagccacaacctcacaagcctggattatttatattctactttaatgtacaacatggcaattattacatctgtagacaaactaggtaggtatacaactatgctagaccaaaaaacaaatggatctaactcgtgctcacataatttacaaataattgacattaataatagaaagctttacaaactactcgccaggaactatacaaattttaaaaataggaagctttaacattcaacttaaattaacaaacacaccgtacagggtccatcactccttcctgccttttcgaaaactcttgaatagcagtgcgaaaaatcgaggggtctgatttttgtatccagaggcagaacaagactcaacagttgaactcattaatcattccccctccgatttgaatccactcgatcaagtcgatcagctctccacgagattgaattagtggatttcaacagcaaaccaattgcagaagagcatgttgctctaacaacggcatcagatgagcggctcattttacccaccaacactccaaacacctaaaacaagagagaccatttgaaactgctatttcggattatctacacaataatcaatgagacaacatgaatctgaaaaatacctgcgtaaaatgacgagccaaaatgtgttgatcatctgaaaaagacagcatactgctagaaaagtatatagcatttgcctggatcactggccaaggggcatcgaaaacctgtaacattaacatcaaaccagtcaagttggtgcaccttgcagtggcagaagagaacacaatggtgtttgatctgagattctcaaggaacaatgtccccaagggccttcattccagatgatacaaaagcaatatattaacagcaattgttaagaacctttattattgatgccatgcaagtatcaactctagaaggaagatgctgaacgaattgctttgagaattctctaacaaagtcttcataatcgcttctggaaaaatataagatagagttagtattcttccatcactgtaaaaatatcattactttagatatcgtactgtaatgtaaataggcattatataatgtcagggactacctatgatcagaattgaaacaatgtaagctcagcagcacacttaatccctccatttccaacaaaagggaaatttgttttactgtattctattcacaagagaatagaaaacaagtgtaattaatactttcaatagtctccaattacaaaacaaaaaaaaaataggttgtaagtaaatacccgacaagcctgtcgcacaccaacatcatcatcatgcaggtgcaaaattaagcgaggaagagcaatatgtatctggttatcaaaaaaagggagcagcatgcatatcatatcatatatcaagttgcaagtattatataagtttgaaaagcaagcaggttgtcagtgaaaaaattagagcaactacctttgtaaggaactaagaattctaacaagactgaaatacgaaacattttaaaaaattccaaggtaagataagcttcaaaaagatacctgctcaagaaatgggtcccgttgtacaccaactccaaagttgctaagtactccaaaggctgcaaaagcattagctcgcatctttgagttcatacacacctattcgaaaagcaagtcagcacaaaagctctgattacaaataatacaaaatttggtgcgtatcattagtccttgtttcaacaaccaaacttctcgcacctgaagattacgaagtctcacagaaagattgattagaacaggttcgacggcatcacttggtgctgattcaagtatctatgcaagttaaataaataaaagagcaagaatgagcagtcaagtcaataatctgtaatccattgacgagagaaaagaaatcacattttttcaacataatatttaacatgaactgcaaaggaggctcactgtgagtaaacaagaaactgcagtcaactgcacagattcatctgagtcatcaagtaatgctaatattactcccagaacttgagctgtataccgcagaatatgaatagatggtatctgcatttcagatatttgaacatataatttatttgaaaatgaaaaacttcagaaaataaacattgagatacttgattcatcttcaagcactcattcctacatctcctaaaagggagtgaaatgcttgcagatattgagtgtgactgggaaaacatgtctgggtcatgtatgtagaagaaattgaagttcacactttcaaagaactgaaaataaaaacaataactacaaaataaaagttcagctgtaaaaattcaatgcaagcatctgaagacctgtactagccctctcaagcacaaacgtctaacagttgaagactcgtctgatacatgctgacacagcacctccaccatttgctccaacagggaaccaaatccaccgctgcagtattcagaaaaggcaataaagaatttactcaaaactaactaatatcgggagcgggaaaaagagctcaatattgctagttaacacataaataatagaagccatgaagaagctcgcacattaatgatggtcttaatatgtgactgaagtcttagacatgcaaggaataaggcataccatgtcaaaagcacattcaaatataatattgtagtaagcattcaaaaaaaatatttttattgtagtaagcatggagcctcgggactctcaattttttattgtagtaaaaaaaaacataatatttttattgtggcacaaaaaaacaaagatacccctaaatttgacaataatagcattcaaaaaaaaaaaataaataaataaaccctaaagcattaaaccccctcaaccatttttctccctatgtctctgctacaggtacctgtaccggacaaactcagacgatgcagcagctgcagcttctctttgatatttttgttgtcgatccaaggatttactcaaaagtaaacatatagtttgaacctgtaaaagacaaacaagaacgaaaaaagcagagagacttaagcaatacacatgcatatttttaaaatatttattcattatcatatggatctattggcatcttatccaccactcaaagacttgctatcattcaagaagggaaagagattttaaaacctagaaaagaactggccaaacccaaggcatgatgtgaacttgagttcacaaaaaataaattaaaaaattaaaaaaaatcattaatgtgaattgtgttcggcttgctgtaccatctttcagttaccaaccataaattatctaatatataatctagagcaagtatcctttgtagcaaatactgcacacaaacaatacagcatctttcttgtcactttcccgttgtatggactgattcaatatttttattgaacatccgtgggcacgcttatgaaaaacattcagaagtatatacctgaacatactcctctctactatatgaattttaatttcccaaagagcaaacacagattgaaaaacataatgagcaaaagagggtaacacatgcaccagaatacctcttttggtctctttatagagatgcagcctgctatttctccaagaagattgatccacttctcattttcattttgctccccttctctagccaaaatctacaaacaacataagataaataaatagaaagccacatttccttcaagctacaaaacttgatgaaaactccactacactagtaattctgttctgtgcgtttctctacctttcccatttcaaggtctccaacacattcacagaatgcctgaaatgcagtcaaaagagccctgcaaaatgagaagtggtacaaatacgcttaacttattgataaattcattatatgtggatgtgcttttcaagatatatgaagactcttttttggcttaaacttttcgtcgagtttttttcaagttttattgtctagttttccgaagacttttttaatgcttactttaaaggttctagctggccagaacttgctaggacatgacaacttcccagttgtaaagtaagctcagcaagaacagaagcatagttttgttcaacagctttctttcctactttaccaccacctctgcaaataaatcgaaacgaattaacccatggagctgaacaatataccttaagcatataatattagttgactatagttacctgaaaaaggcagtaagagcaatgatagcagcctgcaggatgttaccatctatttgaccgtccacaagttggctggagttttctgctttctctgaatcacctctaaggactggaatctgtttaaggacgccgatgacgtgctcgagaaacagaaaagaaagtgttgtatgctgggaaaatgcctaagggacacaacgaaagaaaacaaaatgatgcttcgattttcatttctataatccaccaggaaaataagtgtgtcaacccttttgatgcaattatgaataatgcaatgttttcctccaacacagtactttgcagagttcagtgatggatttttttttttaattttaaatagacaaatatataaataaagatttatcttccaaactggtccaaccaaaaggagcttcaacagaattagtaaaattatgattcacttaaggaattgagaattaatgacatattgtagtccacaaaatgtactaaaaaactcacatgaaacgcatcctgcattggccacccaccccgcagtcgggatatgtcctttgtcactatatcccttccagccatagccaatacatcattaaaaacaactttagtgctggtgttttcagccagagaagatatcttcagggagttaaggagctaaggtaagaaatataagcgatccaataccctctctaatacaaaaataaaaaaaatagaaagagggggagaaaaaaggatacagcaccaagtgtctccaaacgtaaatgcttatcagttacatgatttgtagcagcgagcaaagattgggtggtcctgtaggcatatttacatcaacagacctactttagagagattatatccttctttttattagaagtgttatgtttggtgaaaaatcaattgtaattttcattgaaaagtaatacacgtatacatacacagctaagaatctattataggaaactatacaattgggaaactagaattaagctaattaaacaactaatacacagccaacactcccccggaacatagatattgatcgtgcccaacttgctacatagataatcaacacattttccaaaccaggcttggggactctgtttcaaaccatataaagatttttaaagacactaaatgctacttgtctccccctaagtaacaaacccaagagtttgctccttatacacttcctcctgaagatcaccacgaagaaaaacattcttaatatctagttgatgcaaaagctagtcatgagtagctgccatcaaaataaataagtgaacagaggtcaattttgcaacaagaaaaaaggtattagaacaaactccataggtttgagctctccctttagtaacaagataggttttcaaacaagcaacagactcatcccgattgattgaccttaaatgaaaacacccacttgtgtcctataacttatttccctgaaggcaaatccaccaagtcccaaataccactatcatctaaaagatccatctcctctatcattgcactatgccaaccagaatgagagatggtttcatgaacagttttaagaatagatggtttcatgaacagttttaaaaatagagatggaatcaaggtaagcaataaaagaacaagaagacgacaggttgttatgtgaaacaaaagaaaaaataggataagtatattggcacttacctttgcgcaatgcattaggaagatcatctctcgggtctagatctcatgatgaagaagctggtgcaagacatgaaacaggaggtggacacctggagtacactttaataggaaacatgtcgggagttatggatgagacgggctgaataatgggagactcttagggaagtgtgtctgagaccagttatgcaacaacagacttgtctggaagtgtgtctagatcagaagacgagacagaatataccaacaaatcatcatcctcccctaacaagtaggaattgatggagacgagaaaaaaagcatgtgttccatgaaagtaacatcaatggagacaagatatttgttaagagtgaacaataacatctcgtctggaagtgtgtcaaggtcaaaagatgtgacaaaatataccaacaaatcatcatcatccccctgacgagtaggaattgatagagacgagaaataaggtttgtgttccatgaaagtaacataaataaagacaagatgtttgttaagactgggacaataacacccacacactttgtgaagacgagaatacccaagggatacagtcatacacacttcaataacttgggctctaatttggttaccgtggacaaacactgtaacgccccctgcttcacgcctcctttggacatccacctacaaacttatcgctcttctacacgggtatgtcactatattgcttcctggaatgacgattggccctgcaaacaacacaagtctttccaacgtgttttgtcctcactcgtacgcttactaggaaaacttcacaggaagtcacccatcatgagactactccaagtcaagtacgcttaactttggagttcttaagtgacggactacccaaaaaaaatgcatcttgttagcataggtagtactcatgaattcatctaagtcatcttcaactatgtagtcccatacctacaatgttataatcatcacacttgaccttccccacgtgatgtaggattgcacagctaacccaatctttcccttgcagatcacgagattttgactatcacaatcacccacttttgggatccaacgtcctcgtcggcaacatttctagttgggtgaaggctctgataccaaattgtaacgcccctgtttcaagcctccattgggcatccactcacaaacttatggctcttatacacaggtacgtcacatttggctacttcctagaattgaccctgaaaaccaacacgagtctttccaccatgttttgtctgcactcacacgcttcctggaaaaaatttccatgaggtcacccttcatgagattgcttcaggtcaagcacacttgactttggagttctcaagtgatgggctaccaaaaagaaacacgagatggtgacccatcgactaatggaacagtagaagtgaaagcatgagactaaagagtagaaaagaggatagaattaccagtactagtctgtggcaccgaagtcaatgacccatttggagcatgaagaaaaaagacatgcatttgttttactgactcggcaatagaagtgattggagatgaagactgtaaagattcttgatactgtaagaatttgacatattcgtctatagaaataagaacaaattttccagaataaattgcaaatactatgcccaatgtttaaaattgtgaatttaagcctaaaggcatttttttgtgaggcaaggtgtaagccttaaagcgcactgggcataaattgaggcgtaagccacaaatatttaattaaaataattaaaggaaagaggaggaaggaggaagcagtaaggagcaataattttctttctttttttattctctagtttgtgcgactaggggggagggggccacagctgttctaagttcaaactccagaaaatattgttttcttcttttaaattgtgttctttttttaaaaaagccttttgtttgagttttattgggattttgttgtttgttattgggccttttttaaaagttaaatgttattggacttttctttaattgctgaattaaaatgggctaaaaaaagccccaaattctggtttttcaatcacaacatttcagaccgcctcacatggctaaggcgtccgcctctctccaccattctgaggcacacgcaatagagtgtttttttccacctcaatctattgcgcataaacattgttatgtccttgccaacaagacaactaagtatggaaacaacaatcccaacaagccaacaaacaaattgtgacaaccaaaatccaactaggtataccgatgaagagggaaaggcaaaattagtcgaaagcccaaaccttggcaaatacaagcagtcgcaagtacaaaaactaagtggtcaaatcgaagcactaatcaaccagaatcacgatggagaagaaacaaaacaaaaactatcgtcggtgggctaggcaatgtgtatcgatacgtgcagtgttgtagctaacacattaagtatcccgcctggggagtacgtttgtaagaatgaaactcaaaggaaatgacgggggcctgcacaagtggcagagcatgtggtggggcctacgcctaaggagttagaccactggactttgccagcacgtggataggcagctgggattctcttggtgtgggtggtgagaatggaaaaccaacacaaatagggttttcaaaataaaccctaaaatttgtttatgtaagaccccaaaagaacaaacctaattttgtagcaaaattcaaattttataagctaaatgctctaataccatattatgtttggtgaaaaatcaattgcaattttcattgaaaagttttacaaataaatatacacaacaaggaatctattataggaaactatacaattgggaaactagaattaagctaattagacaagtaacagactgctaacaaaaagaaaaacaattcatcttccatttttcaaaatacttttagttattcacaattccattgaaaggcaaaccttgagacatcaatttcagttagctcattccctctcttagtaacaaactcaacaactgcctgaatggtcccttcggcagattgcttacttttatcacagatagctgcagtacaaccattcagggtagctacaagctgcaagccattaacaaatataaaatattgatctgttttaattatttttctgatttgtttaacaagatacctacctcatctttggtcaataaaatacaaacagatgagacaattctgttgaaaacctcagatggatcaatagaagcatcctgaaaaaatgggaaaccagaaattatggcagattcataattgtcctttcaggtcttcataaaagcagcaacaggatgggttaaggaaatcattatttaaatacatataatatttatatatatgtataaaaaggagaaggaggaggttcataatatatatgtatactagttgtagagatgtgcctatgtctcacccgttgttttttcttcttttttttcgttgtacaaatttagttgataaaagattaagaaaaacaaagtcaattccatattcacttgatagcaaaaagggcatatcttgcacacatatacaatatctttatatatattctttgttcagtataattatccgctataatacttcaattatttcaataatattaaattattcaatttgttttgccaaaacaatatactccctttggtctgcttttgtaataattaattttaataaaatagtaaacatgttttttctctttttaataaactcgaggggggattggtctaacgactagtggcccctttctcttttcaaaaaaaaatctacgaatatgaatatttatattcataatttttcttgttacatattaacttaaaataattttatttaataagtgtcatattaaaatattaacaacttatcctactttagaaaatttaataataaagaaggctgagaaagcttacacaatacttaaaaaaaatataaaaaagaaactatagaaaagtagctccatattaataagggataattgtggcataaatactcaaagctttgtgtttgtaaccagcataaactccataatattttttttgcagcataagtacccaatgttagtaaaactgtaatttttgttcaatttcgttaatatagactccgttttgaatttattaaaagaaaatttggaagtttctcatactacatgtttctgtctagactcaatgatttagaatttggatctaacatgtgtcatgcttaagatagtaacgttagaatttaggaacttatgccactaaaaaaattatttagatttatgccgcttaaaaactcaaaattttgggcacttaatgccactatttacccgattaataataatacaaataaacagcacaataaaaataaaggaaaattgtgaaaaaaaaaaaaagaaaagataactactaaaaggcgtagcacatttgtaataacaataaaacacatagaacgaaaatgtcaaataaaacaaaataaagaagaaaaaaaaggaaaactactataataaccctattcaatttttaaaaatataatattatattaaattatagaaaagagaaacataaaagggaaagggcaaaataggcatattcaaaaatgtgatctgtcaattattcatctttctataataataataataataatctgtaatagtagataagtaagtagaaggatgcttacactcctcaaaatagctattacatcctccaaagaggacaaagcactgtaggacaattctatatctggactaaatttagaagctgccggtcttggaagtgaaagggagatgctaaagagttgatcgagaatctatccaaataaaaagtacaccatgttatgtgttagtgaaaaaagaaacaatacaaaaactaacaagagaaaacaaaacgacgtaatcttattcgagggactagagtccacataggagaattatgtacgagaaaatctgttacatggcaaagcatacctgagccgaaacttttctaacttcagaattagtgtctgcacagcgtggtaaatatgcaatgaccctatcccctaagcacaaagccgcacgacttggcagtacaaatgcagctggaattttgaattttttaaaaacaaaataaacaaggaagctatacagagacataaaaatatggatattttaaaaagttatgatcgggaagaattacatggtaaattggaaaagtttccatgcaaagtgcgatcaatttgcttgctatgtgtacaacttccttggcagcccaaagcacaatatccactgatacacatcatgcgaaacttgagaagcatctcatgcactgcaatgcaacctcttcttctttgataatccacagatgaagatacgtacaaatcaatttgtctcaaaatatgcagtaactgctctgctcgactcctcccatcttctccactaaattgtattgacattgattagaccaggaaaccacaatgttaaaaatgagacacagcagcatggtaattaaacatataaaagaacaatgtccattaagaaaaacaaaaatgcatatatgtacatataatgagaacatctccagaaaatgtgcaaagctagcataatatcaactttgagaccaacaattttcttgcatatccaagaaaatacttaatattcatttcctccttttttattttaaatgtttctatcattccctgcaaccttcagatttctacaggattgaacaaggaaacaagtcctctgtctagagaatttcttatagtataacaaactatctttttttatagagtaaatagagtaaatagcatgctcttgaaatcctcaatcttccttgaatattttgtaagtcctaaactatttctataatatctaatctctaaacttgtgatttcatatcaagttagtccctgaagcatttctctcatctaatgatcctgagaagaatagtacataaaagagtaataagagaacaggcacttgatttcacaccacaggttagtcctcagacaatgctataggcatgcttaagacaaagttatatttgtcataccttgtaagaagaattgcacataaaagagtaataaggttgtcgatgagaggattcacaacatccattggatcatttggtaaagcaaagaaccctagggtggcctgtcattagaaagaaaattcaggtggcaaagttacaaagtatgttaagaataaattccaatacatatgggaaaggaaaagcagaataatatgagataataccttcaatacatgatttctggtttcaatagttagttttggctccacagaaaccaatgttgtacaagcacttaaagcaagggccttcaaatatacaagtaaaggaaaaagagtgaaaaatagctccatagttccactaaaagctaatgagattaagctgaggaacagctctaaaatttccaaactgagatttaatggaaatctttattgatactccaacaactcaagtgtaatctggttttattgttgtgtaacttgtgttgcaacaaaaacattttgcaatacctactgttttgtgcaccacaagttagattagatatttaagggaattattttcattattggtgaatattctcctaattaagattgaacacaatatgaacgtgatttttatatattatagatgtatatgagaaatgatacaacaccgtgcaactatgttaaagatgaagtattacatagtttaagcctattggtgcttgaaatggtttacataaccattaattaagtcaaatctacgggcatgccccatagacagagagaaactgaaccacattaaaaaattaacaatcttttactttactgctcctatttctgcatttcatgttagaaccaataacccttcttatgcaactcactatcccaattgcaacaaccagggcagctttattcagcaacttgattaattaataaatcaatttaataaaatatttaataatactataaaattggatctctcaaactcaaaagcaattaataaacctgagttcgcagaagttcaagagtagaatcagcaaagtcttcattgttgtcatcacgtcccatcaaagttaatatgtagtcaagcatttgatctcttcttttcagtggaaatgaagcaccattatcagcagcatttatgacagcacgccctacatggttaacattgtagttctatattacaataaatataatacaattatacatatacagattaagtagaattcaagtcagggcattggtccaatacaaaaagcagactaccaatatatatctcggtacaaaggacaagtagctggtgaaacaccacatattcttatttgcatgatgtcaaaggtgaccattaaccaattctctaagtatactagtgaaaactgattgtctacaattgaactatacatccatagtacatatcactttctttggaaaatacatactttaaaggcaatgtattgtttgggtgagcacatagtaagtagtaaaaggcacataaaacttttttttgagtttactctttgagatttcactcgggcttactctaatttctcaagacagagaaagaagcatccaatatttcttatcactttgcacagaagtacgacacaaatcctggttgtttgaaggattataactcatatttattcactactgacactgttgctcttggtaaaactttgctttatgtatgtaagtctcttggtgaatagtaaagaggttattcttaagaacccacggatgtcaggagttgtgtctcccatcttcatttcacatacaagtagaaagcataataaattacaaaacataggagcaaaggaaactatttcaaatatattctttcaagaaactataacaacttctatgtaggtacccaagagttactcagacctcaaactttattagaacaaaccgcataccttactatttgagctacccctctcgggtatttcaaattattggctgtgattaaaatagtacacacctacagttttttttttttttacagtttaaagtaaacaaaaccgtaataatttgaacagacctaacaaatcaatagctgtgataactgcctgcttcgcggtagggtgacgcacatgaagaagccgtgaaagcatattagtcccctacaagataaatacatattaatgtaaaagtagagaagtattgataatgatatcatactttactttctatttcaaattccaataataagcctttgttccacaaaacctattaaaatttactctcacctaattttgaacaaacttatctgagtggtatccttgtacagttaatacatctttaactaaattattatttttatttatttatttatttgaaactaatactaaaatgtgacatgagatttcaaaaaaagtaatttagatttagtttcaataaataaataacataacaaaccaattaacactatattatttatgacaaaaatataaggtggtgtttattcaaaaggaaaaaataaggccatgtggataatttaatcttggtaggttttataaaataataattatcattaaaattttctaaagtggagaatcaagtttgatatttgctaatagctaagcttaaatgtcatatgaacaaattgtatttttcctacatttttaatattgataccaaagtttactacaccagcaaaatgtatcaattttgtcagcatgagaactcaaaccaacaatgtatgtatttcctctcatgtaaatataaaatgaaactataaaacatatcttttagggaaattttggctctcagatgaatctatcaattgttgaaaacaaagagagaggataagatgtcatacaacaagtgcatctattctggcctctataactgttgatggagcatatttagcagcatacccatacattaaagccaaaccagcatgtatatcatcagactcttctggtttaaaactatcagagaagaaagacaagaatctgcaacaaatttcaaatgaagaagatgattgttacaatttaataaaatacagatataagctttcttaaaaagcatataaaaataaaaaccacatcatccataatagcaacaataatcataataataaaaaaaataaagagcttgaaagtcaaatctggaaatattttaccgcagttaaccaggaaaggccaaagtatcttatgaaatgaattcttaaagttagatattgacattttcttctaaaagttaattttataaatttcttccggagttataagtatatgttgcactgcaactgaaaaacttccaaaaagctataaaataaataaattaaaaaaaaaactcctattctgggtgtatacctctgaaagatactttggccgacattatctagaatatctttcaacttatccaagacagtgtccaagtgagatgcagctacctgtaggcaataagaagtaatgtcatatatagagcatgaaatggagaaaatggtcaatatactcaaaccatacttatttgtggaaagattctctactgttcacattcaaaaaataaataaataaataactcacgtacagacagtgtgtatataagttaaccctagcaactaaaatagaaactatgttaagataatatattccataactaatgggatattctaactgaataagaaactaaccaaactggcccagattttttaatactgttgatatctcaaaaaaactgattgtaaatcaatcttattttcccacacttaccaatccaaaagcttttgccaaaccaagcctgtttgttggaatggtgatgttagcttgcctgtacatccagtcaatcttattgcggacataacccctgtcactaactttttggagcagtatgccaaagcacctgcaagaaagattgtattattggcccagactatgaagtttaaaaccatcttcaacctatatacattcacaacgagggaaaagaaagtccctataaaggaacataataaagtataataatagcacataacattactacttgaatctaatatagctacatcgatggcaaaacataaatgctggtgaagaatgcagagtgctcactttcagacatgattacatgtttacacaaacatatcaacattgaagcattaatacctatggagaactgcagaatgttcatcatcagtagtataaagctcatattgcctggtaaaagcattcccaagggatatcacccactcagcatcttgaatgacatctaaagattctgcaagaaactgtaatcaaaatcaaagaaacatattaataatctgtccctgtgaagggcttagttttacacaatattttttcttaagagaaagcattttcgtaaatcaacttaatttaagctggaaatcttcaatattagtcgtctaacaatttgcctgatttactaacaaagaggaaagcttaaaaaagttggataagaaatgaaagttatcttattaataataaatattgttgtcaatgggaaacaactacaaaaatattcctgtcgtctaacaatttgcctggtttactaacagatggaagcttcaaaaaattggataggaaatgaaagctatctttttaataataaatattgttatcaatgagaaacagctaaaaaaaatacgcctgtcgtctaacaatttgcctggttactggtttactaataaaggggaaagcttagaaaaaattggataagaaatgaaagctatcttattaataataagtattgttatcaagggaaacaactaaaaaaatatgcctaaaggcagacgcacgcagccacagcttacaaactgactcttgatcagaaagtgaaacaaaaacaaactttaatacaacataaacattcctaatccctacattttaaatgtcataatcaagcaaacaataaacttttgccacaattgaaaatagtgaagagaaaaatatatcaaagctgaacatcaatatcactcacattgattatcatgtcatcccaagtctcttgatacatgggatcctgctttagatcttcagtgtcactgacataagccttcatctttggaatctagagcttaccaaagaaaaaaatgaataagctacaatcttatgttacttgtaaccaataaacaaaggatcaaactgaaaatacaatatttgctgaagcatgatgagagttgtattatagatgataaattgcatcagacctaatgtaccctttctcactaaatgtatctttaatttttgtaagctattcatgaattgatagagaaatgaaaagcttaagtatcgaattacttccgaaatgaccaataaaaaaaaaccctaaaattgttagcattgacatccatatatccacccaatgcctacacaagacaaattatgaagaggaaaaaaagaaaaaagactcgatatgaatacaccaatacctcactgagcccactcatccaaaaaacctaaagaaaactcttacaaaactatttgggactgaacatatctctataacgtatttgttgcatttgatttgtttacatctaaaactgagtcctctcacagaatctaactcaaccaccttcagaggttgatatgcgtaagaaaatgaactcaaacatgaaccttccaagtttaaatcaatatttgctacactgtacctcatcttgccaaaacaagttaatattttttggaaagagtggtgctaggtagcaaatgacctgcgaaataccagcaagagaaatattaacatagagaaatgcaatacatctacccacaacacaaagaatacctatgaattagtataatgtaagagaaggtacacactgaattcagatcatttttactagcactcaggtcttgtagaagaaacttccagctcattttaaaaaacatttagtgcgtaaataataaacaaaaagtgaagcagggtaaatcattcttactgtcagaatctgagtagccagctgatcccgtgccaaaggatcatgcaagagtaccaacaaacgggcaaagagctcctaatcacaatcataccaattataaagatgagatattaggtgattttgaacaaggactacaaagtgatagatttctacatatttaagttttacctcaggatttggtaaatcagcacgagccttacactcattaagcatggcattaccattcaaagattgatgcctgaacagctctgaaatgcatctgcaaacctgtaaaagaagtacaaaatttgcaagacaaatttataacaatgataaaacagagtacatatatctatatactcttaaacaagccaaatgcagaaccaaggagtaagattgtttcctttttataaagcttcaaatgtatgaattcataccaaggaaaagaaaagaagaagggaaaaaaaattggtttagctccacacaaacacacaaaaaaagaactcttgttgacaatgcagcagtataaagatgagtcaaaatagtttccacatagaaagcaataggaaatgaagttgtagactaaaacttactgtagcaactgctccagtataaactcgtggaataatcatctttaacagaaagggccaaagaatatgctgcagaaaagtttagcattagccttttatttaaatttaattttctcacatgtaccttcaattaatgattatgaaatcaaaatttatatttaaatttagcattgaacttcaatttacctccatttcaggaatagttatagtgagcaatagaagacctttctcacagattgctcttaactctattagacaaacagacccaattttcacctaacaaaaacaatattgtgtcagaaattgctacaaatgtaaaaaaaaaacattaattaagcagcatggatctcatttgtaaatctgatggaatagtgaaaagttttacttatcagtagtctaaaacctagcttgaacatattttcaagacaaaaactattaccaagaatcactcactttgttgctgatcaccaaaaaatttggacctcttaaacaaaaatttataatcccaattatacaaggtcaacaacctagttttataactcctcgtataaataactcactatccctgaattatttcctcatttaatacaagtttccgtttcttttacaaaaaaaaaatatatgtacatatatagctcagatgaaaacctccaatctcttgcgctgtgaaggaacataggctttgcctgatactgagacttccttagatctctgatgatcattgtcatcttgatctgttagagcacaatgccgcacaaggtattctacaaacaactcaccagatacaccaactaagtagcaatgtgaagccataaccacaatcaactacaccagagcaacacaagtcagagttcccttactgatattgctagaaaactctatcactatcagctgataaagaaaaatacctctgaaagtgcttttcggacccctaggttttgctcatccaacaagaactttacagtttcaacaagtaaaggtctcttattgtgccaagcttcagacaacctccaaataaaaacacgataaagtcagaccctgtacaagaatcataaaaataattcaaaaataagagaagcagaaggaacctgggcaagagatgctttaaaacgcatagtgcaccaaaagtcaaaggttcttcttttaacctgcacttctggttgcagaaatacaaaaagaaaataccatgataaaatcagaattaggttaataaaaaccacatcaataataagattacagccattataatagataggtaatgtttgctctagaaataaacataaattattataaagtactcacattcagaagaaacataaacaaatcctccgagtataccaagccaaccgtcagaaaacaatgttgaacttcattatatgtctgcacaataacaaaaactaataacgaccaatattcaccaagggttttaagcatcaaagatgattgtgtatgagataataatagacactagtaatttgttaaaacaaaaactagataagtgcaatagttcaaggagaaaaaatttcatttgtccagatataaaataatgtaggaaattaacaagaaccgggtaatgcataagacaacataaattccaaactatatttaaaaaataatacaaaagtcttccattctaagagagttaaacactcaaataattaaagaatagataagaaaccaaactatcaaccaaaacgtattaaaaaaatgcatttacataaggtaatcacaccttcagtccaactgaataatctgaattctctttgctgtcattgttgatgcaaaccacgggaagaagagatgacaaaacaactgtaagttcctgtacagcgtacgcccacaaaaataagtagctataacagagctccattcttgcaacttattaaagaaaatggagcttcatactcgtaactcatgccccaaaaaaaataaacaataataattaaattaaattaaaaaacttggagctgcttgcttccactttccttaatgcatccaactttctcattgttagatattagatgtatattagctgtaagaaagttagatatttagtagatattta

SEQ ID NO: 161578 - DNA, 4179 bp, Cannabis sativa
tggatacacaaatggtgattgctatgtatgggatactttattggctgaggtattttccacttgtttctcacaacgatcttatctgtttatctttctttagtacagaaggtgtgaggttcaaatccctattaagaacatgcctaggaatcagtaaagttttctagttttctaatattgaggtaggttaaggaagggggtcatttcaggttgacattgagaattgtgctcaaaattttcaaaatttttgatgtttgttatggcgattgggagagtcattttaggtcgctctttctcctacgttatccagaggccaatttgatgtcatttccaaatgtttttcattcaaatgaaagacaacctttggaatagtatttttacaataatcaatgccattatgggcgcaagcatcctaaacaaaccttacatgggaaaatgtcttcaccctttttcaggaaaaagggaaagcatttgcagtgttcaagtcataaaaatgcttgtaaattctgtatagacattcctactcattctgctattctttgtgttcatgctgtgattgatgtcctatatcattgttaatggattgatttatctttcactttgtggtaggtggttttgaacttaggatctctccagaactcacacgagggcagaattagctgcttgggtttgtcagctgatgggagtgccttgtgtacaggaagttgggatacgaatctaaaggttagtatgtctggacgtgataattcgtaaagctaggtagattattaatagtattaattaatagaactacccctgagtggagctgaaacttttggttatggtgacacgatttgatgtggaaatcggttcacagtgcactatcattctggaaatgaagttaatttctgcatattttgtcgttttcttctgaagagtacacaattacgtattgagtgcattattatattatcttagtaaaatctgagaaaatattatcaataaagtctattaattattctctgtttttgtcattctgctatgttgtcatgtattgtgattttattttgcaattgaagaaggtaacatattttcgttaattggtttttgtttcaatctacgcgcttgcagatatgggcatttggagggcatagaagggtactatgatcgatggggtaataataattgagctaccttagttgtcttgaggggttctcatctcaaatccatgaccatggggtcctaactgccttcacacagaattccttattttgggtttgagaaaaacgatattctgtaatgccatccctgtattcctcattggaaaagtaagaaatttcaatattgaaaagaatatatatcttatcttatcttatttcctattattataactctatgttaatatttgagtactaatattataaaaataatgtcttacttttataaaaacctcttattctggtgtgaacccgactattttaccagtgtggctgattttttttttttttttttgatgttcattttaaagacgtatctatccttctaaagatttgactttaatctggtaactgaatttttgtctgaactagcaagccttactttttggattaaggctgatttgttttttcattgaaattttcattccacttacaaaaattacatcattacatctgaaaataaaatggaacacatttgattttgttcatctacaaacgactttgggctcccaaaaccctgagtagggtagcctcatcacctccgcacaatgtatgcttggcaaacactcaacgtctaggtgaacactttgggcactagatgagtagcttgaatgtcgacatgttgtttccaattgttttcttcaaaagtctaagcaaataggtcaggacaacaccgaaattgggattaaaaactttagatgtcaacacaattggctgcctaggtaagctattagcgcccagatgagttatttttgccctagtttgtagtggttttgactcaaagtctcaacacgatgagcatttgattgcacaagaacaaatgcaattaagtatgcaaaaggaagccacaatctagtcccgatccccagaatcatcaccagaggtgagaaccacctaggggcctcgaggtggtacccaacacctaggtgagcatcctactcccttggcatacgacaactagggtattgagttcaagggtcaaattgtgtcgtagttccctcaaatcactcaaggaacgatatgtatacatgtgtctctacatctggcacccagaagggatacaaacactactcggtggccaagtgagcattctccaggtcacttggcacccaggtggtttactgagccaatagactatgttttggtgatagaactagtttctagattagtttttaactcaaatgatcatcaaacaacacgttctcccgaaagcagggacaagggacagtgacgatgaatttacctctgtttctcatgatgacttggagtaggggcagcagtgatgaggattctccctttgttcttgcaatgacaaggaataggggagcattgaagaagatgttccctaggtttcttaggatgacattgaacaagggagcgatagccaagattcccaatgaaaatgggaaaaccaaacacttgtaataagatattgaggtagtgggtatcgatacaagcatttgggaatcaaacgaaagtattatctcaacaaacacctagagggcgcctaggtgggcttaaaccctagatgtctagcacccagccaaatacttagtgcactcctaggctcaatctttttatttctcgttctacatgattaaatgatgatcaaatctcattatgattcaacctaggtgtttgttcactcaaaatcacaccccaagcttatgacatgagaatgatgcccaagtgaacattcacctaaagggcatgttctgctcatcaaatgaaaaatccgtcttgagcaaaatgcttctttagcattcgtaataactaagacttgtggtaagtcattcttcacaggaccctggccaccttgggcccaggtgacacaccaggttcccatgtgatttcatggcatcagcacacaaaacgtatttcaaccaagagcaggcgaactacgaaacctatgaaattaggttaattcactaacaattggtgatttaagcctcagagcaacatgagaatgtcaatgtaatgccctagctcgtaaggcaccaggtgtgtactttataaattagtttatgataataaactaatgatttaggataagatgtgaattaattaaaactcttagaaaattaattaaaagataacttatactttttttaaagtattactggattcgggtatccccttaattacaaaattttactaaaaattactaaactagcttgtttcaaaatattatttcatattcaaaacattaaaaaagacagatcatgtccactgagaaccaaaagatggcgggttgaaatgtacatttctggaagacctctgactcatagctggtccactttcccttttcccttacacaccacaaagcacccatgagtcacaaagactcagcaagaaaaacaggtaaaacacaaacatcgtgtatagcataaagtactcaatgttaatgaacaaacattgaaacatataacttaagcaactattcccagtgtaatcaaacaatagtaatcaactatttgtctaataagacaaactaaacctgatactttataaagcatccttaacccttgtaccaacgcattttttatcactatcgtttcttaatgaagcaaccgataagtaagaaacctaacatcgatttcaaatgagaaaataactctttcttaataacggtaattaccgtatcttacttttgacatggtatgcagtacaattgacttttcttagcttaataacaaatttaggtgtgtgggctgacctcggaaggtgtttagacacaaaatatgaaaaagcaaagagtaagcatgtgaggtcacatggtaatgacctcagaaaccactcgagcgacaaggtctgtggtaaggatctcccggacaacgacacaaaataattagaagagaaaatagccgccttaacaagttggtccgaaagtagagcagggtcttaacaagttgcccttacctacacatggaaatagcaattgtgagtcaacagactcaataaaagaagcataacataaaacataata

SEQ ID NO: 161579 - DNA, 2831 bp, Cannabis sativa
ctaaaataacttttaaacttgaaaaacaacaattacattttgctattagagtggcttgcccattgaaattaaattacattttgctatcgtggttcctgcaaaactacaatgaaatttgatattcttttttatttcttatgaaataacttaaataaaaaaaattaaaaataataatggagtgtgggactatggtggtaacttttagtgttgcttagtattaaaagatgttaaggagcaccttatagtgtcaagtactacaagatgtgatatattattattggtgaactaatattgggtccttcacattttgataagcgttacatcagtatagtgttggacaccataaggtgcctaataacaatggtcctattggagtgtactttgtagaaggaaagttgctaaaaataatgtagatgggtggaaataaaatattatatttttaaatggtatataatataaaggcaaatttttgggaggcttgcattaatgatgctcataagggactatattgggagagagttaacctattttatcatatatatatatatatatatatatgtggaaattgagaattagctagacttttattttggctatcttttaattagagtaaatattattttggattttgtattttacaaaaattatcgatcggatcttctgttttattgaccaacaaattagatcttatattttttgaaatggtacaaaataatactatggtctcaatttttatcaaaataaagctttatataataagatgacttagaggtgtttatgattgattatattttttgtatctgttcgctaaaaattaacttcatgttggttatgttaaaaaaaataggcaaaaattgagctaagggtagcgttttgttatattttgaaaaatatataatttggtattcttatttaataaaataaaaagtttaatcgataatttttgtaaaataaagagtccaaaatgctaaagttaaaacgtatctaggattaggatccatataaatcaaccattgatgatttgtggtgctaactataagttggacaaaccaaccaggtcatacggatgtgtaagatagagctagtggagctcacatttgaaggttagaactatcaaaagacggaaagtatacatattgttggagcttctaactttgtatatgctaaaggagtatgtattttcaaaaattaaataaagtcaaaagcatatttataatatttttatttgagtgttgctgtgttatttgattgaatattcagtttcatatattatattttaaattaaaatgtatgatgctcaataatgtgaaattacaccaataaaattctttatttattgagattttctttttcaacaaatattatcaattgtatttatgtcctaaaaagtcaaaaacaaaaatgagtaaattacttttaaataataataataataataatttaaggagttactatccgttgtcttcttttgatttgtaaaagtttatcaagaaaaagtcatataattccacatttaaaatgaataaatctattttgtaaaaaaaaaatgaaaaagttaaacaaagtcataattaaagaaaaattatagtttgcacaaacttcgtagatagcactaataaaaagcatttctaatttctaattattttgtctttcaatatatttgttgatcatgttgttgttgttgtgtcgtaaacgtaaacgacgactcttgcattaaaaaaaaacaaatcattgacgatgtcgatctgtttagctaatcattttctatttatcattgcctaaaatataagaccaacacgtgtacgacttcaccactaaaataacatatttaacagtattttatttttaaaatgcacaagtattttcatataatattaattagctcctctccaaaaaaatatattaattagtgttcattatagtttataattaattagctgcacttgtattgaacaaagattatatatataattataaataaaatgtgtattattattattatataatgagttaagattcagaagtaaaaggaccaagtccgataaaactcccatcaattaatattgagaaatactaaagtatggggcaagttaaggtgtcaaataaatggcatattgatacattttaatataggtaaatgctaatttagatcatgtgttttacaaaaattatcgattggactctttactttgttaaatagtaaaaataggaccttaagttcaattttcgataatttttttttaaaatataaccaacttgaaggtaatttttaatacgaacaagtgcagaaaatgtatccatttttgttataacaattcatattattattaaattttattttaaaaaaaataaaattaagggtgttatttgtactattttggaacatacagggttcattttatcaattaacaaaacagatggtcttattggtaacttttacaaaatacaaggtccaaaatggtatttactcttttaatgttaaagtttacacaatttgatttaataaataagataaaaaatcgctaatcaattataatgtatcattggtgtggcgttggatatcataaagtgtcaaataacaatgctcattaatattaacaatgtaacgtccccgcttcaagcctctattgagccttccctacaaactgtagttctagtgtgtgtttcctcacttgcacgctcttggggaaaattttctaggaggtcacctaccctaaaattatcctaagtcaaacacgcttaattgtggagttctttcgtaatgggctaccagaaaataagatgctccttgttgatatatatagtaccaatcaatccatttaagccctctt

SEQ ID NO: 161580 - DNA, 1960 bp, Cannabis sativa
ctctctctctctctctctatgaaacataacaaatctaaaaaataatattaaattaagttaaattaaatatttccaattaaaaaaaattaccactaaaattataaaatgttcaatttatattaattttacatgcataataaaaggcttaaaatataaaattttgagccttaatcacctcccattagaatgatgggctaagttagtggtaaaacaatgaccttaaaacatattaagtcacgatactctcatattcttagcctttaccaatgtttctaggacatcaacaaaacctatatccttgtgagaaattattttcatgactttttttgcttcaaggaattttgatcccccttacattctaaaagaagattctatccattaattggtgaggatctcccccttgtatttcccataataatttgttgacttacaaagactactaagcgacagccgcttactagattgacaagaatgaataagtatttaagtaattataagagagacacatatcaaattgatagtaatttactccctgtatcgcgacagtaatggagctacgactacttcgagtttgtatttctcacaagatggtaattatagaaaaatactaagtgttcgaagctccaatttctaaagagagaagctctgaccttgtgggtagttttttgaacttggaaaatgagattatagagctctccttttataacacttggtggtgatagccattttttggagctcggcaggtcccgttgtgcccattttacgattcccacaaataattggcagctactcatattttgaattaacgtcaacctactaatgaatatcgttagtaaaagagatggcatcggaaaagtcttgaaacattcaaacctcaactaatactcaagaaaaatttagttgatccttattcttcgtaacttgatcaagctgcaaagaagtagcaagcttcccccactatctgtaaaagagaacactcaccccaatacttgatatacaaactatgaagttgaatctaagtaagaattgaactaacatcctctttctgaagattagtataaggatgtcaaggcttcattatcacaggtttttttatcaagaaatagaaaactttcatcaagaattatatcttatgttaatagattgaaaacaagcaataaagacacctagattaagaacttcaacctcatcaacacctttgactttccatactcttttagcaaatctttcaaaaaatctccctaggagattagcacccaaaacatagcatacaataggagattttcaaaataagttttcatcctgaatatcctccatatatattttaaccccttagcttgatttcatttttatcgattcattttccccatatatagagcttaaattttgtattatatcattgacacagccagtatcatcaacgacataaatttttagtatatgaggtaaacaattcatacttgatcacacctaagatttgcaccttttagccacctccaaaaatctataaaattcaaatatgattttatcacgcagaagagcttacaccaaaaatctcggagacaaaactttagcaacatcttaaatagttttattttattttacaccttgtttctttgttcattccaatcatcctcttcgacattgccatcagattcagacagcttcgacactccaattattgccactatggattcggtcatacgtataaaatcggggaacatcggtcccagtttcctcttcactattagcttatgtttccactgcctactcgtacccttcattctaccattccacactccttatgatgttcacttcctagatcaagcttgacctgccatggccacagtcagggctggccctgaaaatatatgggcccaagatgaattatgccatccacctcaaccaactaagctatgaatatttgttgcttattatacacttaaattttacttaaata

SEQ ID NO: 161581 - DNA, 5691 bp, Cannabis sativa
aaaaaaaaaaaaccaaaaataaaacagtaacctttggccttttaaccaatttctttgtctctctccaaacagaaaattagcagagcaaataggagacgacatctttgagttgagagtcttgtaaagtaaaactgtaaagtcttgcttttgattttttacttgtcttctttctttttgattttttctatttaattctcgccctttcgttccattttctctcctatctcggaagaaccgccatgaatggcgatggagataaggatagagatcagggactgaaaatggaagaggctagtaaacagagagttgtgtacatgtgcggctaccttcccggagctttgccgcagaggtcgccgcttctttcaccgacgaccgtgcgtctcccgccgaattacacgtggatggatgttagcggtggaggttgcggctttgctatggccatttcaggtgattacttccatctcggcttaccgtgattttgactgtcttttttttggcattgcggttttatttttgttttaaaacattaaaaaataaagttgatttgattagcttagcttagcttaggccaataagcttacaacactgttttcttagactactttgtccttttgtttgttctgccagaaaatgtgttattttttttttaaaaaaataagctggaaaatacaacgtttttattctcttttgttgtcatgaaaacgtcgaatagaataaagtttatttcttttcttttatttattacattaactatcacaagagaatgaggttgggattgaattgaacccatgacaaacaactaaggccaagcctagaagctataaccaccagtttatttctgttttagtttgattgtgtttaatgatgtttaaaccttaaaactttcactttttctgtggaaacaatttactctttacttctttctttggttctgttttatgtgtttcgtagttgggctcttctattgacttaagttgtgttcattaagctcttcgtttttgcctctttagaggtgcggaattatagtcctcataaatgtagttcatcccactttttatctccttataatgcagtattgaatataggatttctaaggtcagactgtaatgttgcacccctttcttttgttcaagacaattttacttgttcaagtttcttctgatggaatctattgcaagcaagcaagctaattgtgtttatacttctggtttggtgtctaattcagtgtctggaaagctcatcacatggggttctacggatgatctgggtcaaagctatttaacatccgggaagcacggggtagagcagcattacacaatgctgaattaaattaatttattttacttagttgttttactgtggaatttaccatgcttctcaattcacttgttaaggaaattccggagccttttccccttccaaccgaggcatctatagtaaaagctgctgcaggttgggcccattgtgttgcagttacaggtaatagtaactccttactcaatttgacggctagttataatattgccagggtaatgattaaaagttatgtgaacaaacctggggatgtatttattctgcaagtcttcttgcggctatagagacacattcctgcatttaataactttttctacttttctttgataagtatgttccattaaaagagccaaggggttgcaaacaatgtagacaagaagtttacaagagaagcaccttactcaagtaattggtttttcaattgcatagaaagaaaaaaaaacattgtttatgttttatcaccttttacttctgttctgtttgatagagtcatcgcttgaaatgtaaggttttcttgtgtgctttgatgcagatagtggagaagtttacacatggggttggaaagagtgtgttccctcaggaaagatcattggagataaagattcgagttctgagaaggatacccttgaaaggcagagcccttttctgacagatcaaggttgcttcaattacaatttgacggttaaaataaacatgaaagaaaaggaatttatatgtataaatacatatttatatcttcaatttggctgcttctgataacaatgtgtaatatgcctttcgtcatagactaatgtattttagggtatgtcatttggtttgtacagttagccctcgttctctgggtgagcgatccagtggaggaacaggttctggtaatgatgctagaggaggtggagaggaaactaccaagcgaagaagggtatctgcagcaaagcaagtagctgagagttctgcatctggggatgaaaacctttcggccttgccatgtcttgtcacactaaatccaggaatccgaatagccagcgttgctgctggaggacggcatactttggcactgtctggtaaatttatcacgttttgaataaaaattgttgttgttgagctactgatttgttgccatatggtatttttcaacaatataaaggagaagttggctagatttatgagttatgctaattttcactaagttgcagatacaggacaggtgtggggttggggttatggaggtgaagggcagcttggtttaggctctcggatgcgcatggtatcctctcctcatcctgtaccttgcattgattcatctccttatggaaatgacagatccaatgctatctcccgtggaagcttgggcgaaggacaaggttatagagtgcctggaaattacgtgaaagcaatagcttgtggagggcggcacagtgctgtaatcacaggtgacagagcaatattttcttaaataaaattgtgggcattaccactctctcttcttaacttctccaattatattggtcagtgagtttaattagaattaatagtggtttgttcttggaatttgaagtcaattgaaaaacaatgaaaaattgaaaaagcttgaaatgtttattttaagagctgaaaatttcatattgaaagttgtttatgtaatgttaaaaacaatggtatttctgcattacagatgctggagctattcttacttttggttggagcctttatggacaggtgaattacgctagagcatttgtttcttattaaagtcatttttctttatttttattctattttttgttcatgttaagatatcgttaaggctattcgaagttcactcctcactctttctcttagtgcccttaaaaagtgagctttagctaatttgctttcatcagattattttctatgtcaaaagcttttaataaatggtagacaattttagttgtgatgactgagtataaaaaaaaatccagtttattgagcgatttgattattttttttggagtaattggactttttaaactttgggggttgattacatacactccattaaaagagtcggtctttaatttttctttttcttttcttgtaatctactgtatttttgatacacaatgcagctgtgaatataaaataaactaacttgtttgctttggtcatggtaaagtttaagaatggatcatacgtcaagtgcttatgcaattgaacaccaatctaagttgcttctgttctgtttactttttttttattgcataaccatttatgatgagcatgaaaaagaacctcatccagtgtagcctcaaaatatgcaaacacaatgtgtaaaatatgctccatttcttcactgccatctttcacttattaatcgttatatcccctttgattggttggagtttcccatattgactattctcagattaatatgtaggtaaagtagaattggtggagaaaaagcagtgtagatatgcaagatgaagttcatcaacaaggaatatatctattctgttttctgctaacgataacttttcactctgctggctacttgctgcgtgttttgtttaattgttaattataacttacttttccttgttatgtttccttcaagtgtgggcaaggatgtacggatgatgagttgagcccagtttgtgtttcttccttactgggtattcggatagtgggtgttgctgcaggactgtggcatactgtctgcatatctgctgatggtgatgtttatgcatttgggggaaatcagtttggacagctgggaactggaattgatcagcccgaggtggttttctatgatttttagtttgcactcctatatattaaattctagtggcagtaatttcttggaaatcttgttaagtaaatattagttctgcatttttatgcagtgtaagtgtagaatgctgatactttacattaaagtttttctatccatcttctaatgattatttacttgtgtttatatcgtaaagttttgctgatagattaccttgcaactatttttttttttaatctagactcttccaaggcttcttgattctccttgtcttgaaaacatgcatgcaaatattgtctcttgtggagctcgtcatagcgctataatcacaggtatgtagatataatacaattgtgaattcaacactccaccattgacatatgtcgtgcaaatttgaaagatcagattttgtgtgaaactagaaattttcatcacaccgtataatgtttgatgtatatctttatactcatttctcatcattccactgtgctttatcaatataattatttaagttcagaagtttgaaaacgtaaacttatggttacaggttgatgcttactatagtgattcttacatcatgatctttttcatttttcatctcagaggatagcaaggtgttctgctggggatggaacaagtatggccaggtatcatacccaggctgatatactaatcaaattagggccatcttatacgagccttggaaccttttttcagtttagttttttatatttaacatatttcttgaatgaatgtggcagcttgggttgggtgatgccaatgatcgcaatattcctactgaagttaccatggagggttgtgtccccaaaaatgtagcctgtggctggtggcataccctgcttttagccgaatcgcccacttgagttccttctcctctggccttggcacagttttgttaggtaggagttgaatggaccggaccagtaattctcgagacattatatgtatgtaatgtgtatatgaatgaacatatacatatatgcatctgctcattctttggtggcataagggtacaccacgactataaacaccatggcagattgattagtccactgtgtatataatcctttgcttttacctttttcgattatgcaatttgaactagtaatatagtgtaataagatgctctgtaatattaggttatttatgtgaaaagggatgttttagtagctttagagtggttttaactataaatattatggttagagcagtattgtattgttcttttgtataatatattttcttttcttccccttttatttaatgctgaccttggttatgatttaaggcaggaaaacttccgttcttacctaaatccgaaaatctaaacccaggggcgtctgctttctgaggtcgctaataataatattcatttattggattgtatttgttgacgaaaacgtcatattcggcacaaaattatgttaaaagtccggattatgtgacagcaatgtcttaaatattttagaggtctgttccaattttaaaaatttggcctttaataaaaataatagtataattaaattctaaatttaattttttttatttatttttcttaggtagatcaagtttaaaaatttacttctaga

SEQ ID NO: 161582 - DNA, 6037 bp, Cannabis sativa
tataatatatacaatgtaaatgtttaatgatattatatattcattgtaattaaaataattaatataaaataaaagtaaatgtatacaacataaattttatcattatataattttttaaaaaaacaaatataacataaaaaatgaaaatatttttgtactttttattatctaatttattatattttactattttttaaaaaactttgaaaaagaaaaaaaaaacatttacttaacttatttatctctttcggggtcattttccacctaaccccatcaaatatataagattttaaaatagagtcaaataagtactatattgagtgtttcaaaaagaaaaataagtactatattgaaaacaaaagttaccgaataaaagagtagatgtatttcaattgagtgtctaatattactcttatctatatatcacaaatgtaatcgaaattctttatgaattgtgtatggagtgaccactaatggaaggaagagattggttttcatgtttcacaatcgaaactgaaaatcactagataagtcatgagtgacgaatgttaaaatgaaaagtaacatatacaaacatattgacaatacaatgtgaattcattaaacaaactggaagattcaataatgcagtccagcttggtcccccctctaccacaaatatatgacattcctgtatggaagtttgaacaagctaagtggcttccaaaagtaacattttacattcttttcagcttcccattttactctattcatgcactgccccccatcaaaagagtgattatggtacaacactttcggcaaaagggtagaggaaatgaaaatttaacaacatggtaaccctcaatctctctaaaatatttgtatgacccatattgtaacctataatttaatatcattgttcaaaaaataataattgatccagagggcacaaacctgctgatgctgttcttgtgtttaggccttaagaggaatcttgcaatatagaatttccattcctagtcccaacaccaggattggtaaaaggaagcagctgtctttcaatgacactgttcctccaatagaagcttattaaatctactcagttgctacttcattttcggttcctcagaagaaggcaagttctttcttctctttggttcaggttcaccaagccgtaatgaaaataagatctcctcatcagaaccattcctcaatcctgagaggttttttgattctgggttttcctcttggccaatgttatgcactgtagatctgctggtaaaactaggaatgaattggtgttcaatgttcagatctgtttcaattccatttccagtgtgaatctcactatcccttaaagttctagctggtgcttgacaggattccctttcaattagaacttgtcgaatatttaaaccaagaggctccgaattcccttcaagtctatccctaaatggcactcggtctgtcggggatgactccccaactgtagaatccatccctgcagctgaagcatttatttgctcttgcaccgcagctatttgaacaatgaaaccacatatatgcaacactaatcaggaacaaagaaaaccataataacaataatatattaacacttggactaaattaatcaatccagtaatgtatcgagtaaaaaagagataagttaattacacattcaatagtgtcccagaaatttgctacaaactctcgttgtcttttggtgttccttcacttgtttaacatttgattaaggaaaatataacagcttaaccataatatttcatgcaatattgttatttgatattctgtctgtttactgactactaaagcctttatagtttatatatctacaattagacattttctactatacgattgcaatgtgtaaataaacaattataaaagaaaaccaattgctgtgcacaaacaaaaacagagacatcttgctggaggaaagtaaaaggatgtcagaaaaagttccagtgcccttgagaatccaccttagaactttatatggaagttaaaactatgacaagtgtcactttcttgttagcaagcccagtgcaccagagtagcaaacttaaacatcattagcaaggcgtccaacatcaaacccttcagcagaacaagcaataaaatttgcaatatcctcattcaaatagcacatatgaccaaacaaagatcatatttcacattaccctcagttaagacatccccatcatcatgtatccgcatatcttaaagcacgtcaatacatgatgatgaggactttgtaatcaatctggtcagtgtttgtgttactaaggggaaatgattagaatttgaattaataggccacaaggaatagcaaaagatatccatacaaagtttaaggatggatagtacaaattggctggcatttttactaattggatgaatagtaatttgaggtcatggttgcgattccagcttaaggatgtctaatgttgcagaaattactgccattctttacggttcggaaaagaaaaaatgaatagttttactttccacagtgaagcatgttacttagccaaattaagaaatgttttaatgaggtcatagcaaaggagcacaagaatgtctattaatatgtaagtaactagagagtgaaagaaaagaatgtcttcaggaaatcatagtaataagagatgagagaaaagccacctagctcaagagcacaaaccttgtagcccttcatttgttgtgataagatcaagttccaggagatcaagaaggcgtcctagatcaaccccactagtccaattctcgggggtttggccaacttttaatttcaagcggcccctgtttgctgtccctccccaaatgatcccaactggccgtggcttctccccatttggactagttaagaggatgagacttccactatcaccttcaagatcaaaggtctgctggttctcaccaacaacaagaaaatcagtgaagaaacagatccccttttcatcattgtactctagggcgtaagccattatggtcccagtagttaagccagaacttctcccaactttgaccacctgccttccaatcagactgttgatcggagactgcaaatctatgacattgacatcaccaatctcacccactcctttcacagttatatttacgttattcatgttgaaatcttccgcaaaaggaatgaaagcaccatcagctcgcacaaatgtttctgcaggaacaccacattgtagttggatgtatcgcagtcaggatacaatgggaaacctttagaaaaaatgtgagcagaaagataaaaaatgaaaccacccacaggatgcaccttcaggatactcaaatgcctaaaagcacaaaacatcaagaaaaacatgacagtaaacttcagctggtaggacaggagagagtccttcaccagtaatgtaataaaaataagtatctttctaactttgaaaaggcctcctttgaatactgatattatcaggagtttatagttcaataattctcagaagaaataaagaggtcaacgagacaaaagcttatagaaagtacatgaaaactactaattcacggaactgacataggttgatcttggctattctggagtaaagcttgaccacttccaaagtgaaaatctaaaagccaacatcagtgcctaagcttaaatttagctattttgatcctatgaagcatatagtgaatttaaaggaattttgtcccttggtcacatataagaaaagaaaaacgaaacaaagagaaagaactaggtatacaattctagtgcaggaaacaatacgcacagtcacacctcttcgctaacaaaacactaataatagtgataaaataactcttacgagtccaactaatagaagtaatgcatgattgattacagaaattaagaatttttttacctgcgtttgttccagcaaagattccataccaaagatcatctgtgataaaggatgttgccctctccacagctcccaaatatacaccaggtccaagacttggtggtaaaggatgaaacattttctggtttggataatctaaatcaacagccacatgtcgattagtgagaaaaccaacctgacgatttcccgttcgacttctaacaatagcacccaaggttccataagtctcttggcttgcaacctagacagaaatgaagcaattaaggtataagagtattaaaagtagcttgaactgtttacggcacttatcagagcataaaaaactccgtttcatgaattaatgatacagcgacatgaaaatcaatttataaaataacatatgtccctcaatgtcagaataatctaaccattaaatccatggtgtgtctaatcaaaccaacctgcggtgttccacacaagcaaatataatatggagaatataacgaatcaagataactttgtttatcaattctgtaccagttaaacttgtttgagtgacatcagaagaaactccactaacaataaaatttattattctcaagagaataaaagcaactgaaaatatcagaaggcctcccaaacccagtgacaagtcattgacacttttactctttattttaagcagtaaaacattatcatatattaagcaaaaggtagaaagagacaaagatagatgtctacttaggtacaacaataaatccacttggtaaagaaatcagaaaaacaaaaaatactttgaactctttacaccaaaaagccaagatgaaaagtgattgacctaatatatccagagagactcgctgtttaattcaaaccgatagaaaagcaggccataacatatattgagttacataataaactgaacatgcaaacacttggacataatatttataagaatgtagaagaagaaatatgtctgttaataataagcttccttttcccaacactttggtatagttgattcattcccaaaaaccagattataaaaacagttcttttgttggttgtaaatgaccatggcagtgaattgaaaggaccaacaaaacagaaccgccaataaattatcaatgtagaattgatctaacttgccaatactgtatttaccattgattgacataagaaccaattagtaacacatctacgtttgggaaagcttatagaaggaaaggacatatgatgacggagtggcttcttttaacactgtactttaatgacctgagaccaatgtaaaagcttaattaacacacatcaactgtgaatcaatagtagtagagagggccatttccatacaaataaagcaagaaattagcctgtggaagagccagatagaagttgccaagtttaagtaaccaaaatgatcttcaagcagtaaaccacaaataaataggtaaatccacatcatgaagaagaaaaaatgttcgtgaagcttaataaggagcaagtgtaagagagaacttaaataaacatagaaggaaataatttcagcttaccatatagaataacagaaattatggtcattatattttgaaatgagtaatacaatctacgcctttctggccattttatggacattatggttagagaagaacaagagatttttacaattgtactaagtcgatttaggatagcagtttgggtgcggtatcagagactgttctgtaatttaacagaattatcaagacttgtaaatgtcttgttttctgactcggaaagcaaagacatgttctgtaatttcccttagttatgggtgtatatcgggatcatttgacagaattatcaggaattgtattattagttagataatgatacagtatctttatttaataaaaataatcaaataagataaaactgtaagcaatatgacactgatcagaaaatcactacttgttttagtccttattttccaagatacattttgacaaaacaaaaggagtgcataatctttagattggagaggaatcttagccaggaaatgaatatactgctctgaaattagcaaaacagagaaaaaaaaaatataggcaattaggattttgaccccctaaactttaacatgtaccaaatcatgctcttgaacttttttggccgttaaaaattcccctaaactattgagattg

SEQ ID NO: 161583 - DNA, 2428 bp, Cannabis sativa
ataaaagaaaaaacactaaatggctctaaaaggaaatgcccacttacaaattctttatgtcaatgagcatttttctaacttcaaaagagggtgagcatgattggtgattaacatattgggaggatgaactccatgcaacttctctaagtggagaatgctttatcattaatttaatttaaagtttggaatatggctcttttctttcttatgctctctcctatgatgcttctgctgttctacttctttacctgtttattctttaatctcttttttatttaaaaattgataataataataattaaatttaatttctaattattttttacttctcttcttactgttgtttatgtttgatgctaaataatgcaataacctatttacttataagaatatgctttgagcctaagttttagcaattagcaccccacttaaaatttaaaaggtctcatcagagtgtctagagtagtgtttggtgtattagacccttaagagattattttattctttctttttcttcactctagatttagacacatgcttatttatgcatattatagttcagcaaacactttgtctgttttaataatataagcccaatcaaaattttatgataaacccaattggactctcaccatgattatcatagatgggctttttctattgtcaacagaaatgactggttaagaatagttagttaataaaggctagactcatttcttggttagcacttaacttatcactagagcaagttacctaactctagtggcttgatcccctaattggaatcccttaaagacacaattaagttaattcaagacataaaatgaagttaaaaataacttaaccagcaagggggtgtggttaattactattgtctaactctaagctacatgaagaaaatttctagaattagaatttggaataaatcaaaattatcttgaggttaatcctttttttttagatgtttggtatgttataagtatcaagattcatctatggtgtgaggctcgtgtttaccttattgatgagtatactaactatagtatcataatgatgcagatcttcatacgaagataaaaacaagatttaataagtctcattatagcattagatcgcgtttagttgggaggaatgaaaacataggaatacgaatgagaatgggaataggaatggaataaattttaaaatgcataaaatattaatttttttctcatcatgcaatagtatggtctttccttccatttcaaaatagaatagttattccaccaaaatgatagaaagacaactccattggaatgacatttcaatactttaatatgcaactaaacaaaagaatggaatgaaaattgtttcatttctatttcattacctccaaccaaacgccacctaatgtctgaatgaagaaactacagttgaaagggctgaattgaggaacctcatgttgcaaggtgccaagttttagataatattattaaggtgagcaaaagctaaggtacatacaattgccatttgcactactcactcaggttccaaaaaagctgagttgagtgccaggcatttctcatattttctttacatagaagcaacagagttatagcagtaaactagtcaccataatcctttcatttgtacaggctcttttttatgaaggtgagttttgtaatctccaaactccatgcttatcacctgatttcaaagttgggaaatttgggtgtcttctggactccggttgttcgctacgatcaatagagaccattattcagaacaccagactctatatacaagggggtagtacaagtaagcattctataactagctgcatcaatcttcctctacaattcagagcatgtaatcaaacaacataacatgtgtgtctggcgctacaaaaggcctcagattatcgatataaagatagaagcgtctcaggttttcctttgcaagagttactgcatcaatgacatcgttgatgctagttagaacccataaatctgtggagctaactctcttgaggcagccacgacaaaacgggcaggattctgatcgtgcattcctgtaattcaagtcaaattcttgcttagccataagaaaaaggaaaatggatatttctcaacaacacactatgcccatcaattttgagagttataagataccaatcatggaagcacaagatgcacatggagtgcccgcagttgggcaaaaccatctttgtagtgttttccatgcatatcccacattcttcttctctttcaagatctttatcttgaatctttctttggtgttcttctttatattggtttcttgtattgcaatccttcaattcggcaaactcgccttgaagttgcctaagtgaaggatatattacagctgccacaggttttgaataatggaaaaatatgaaaaatagtgaacaccaaagattcataatacc

SEQ ID NO: 161584 - DNA, 3458 bp, Cannabis sativa
aaaaaaaaaaaaaaaaagatggtagacaatatttaatcatgatcataaatgaactattgtacaaactacaaactataattaaagacattatcctaaggaagactctcatctgttttttgggaaaacaacttccacaaaaatacttaaatacacaatcaaaaacaaaagattaaaaagaaacaacaagttgttgatcttgaagccaagtgatctttctttcacctaagtttcatgttgttcctatccaactgagctgataaatggagtggcttagaggaatgttcagaaccagcaatgcttttcgaatcaccattagagaaaacacccgatttcttcataaactgaaactcatccattgattgcctaattctatgagttggctgctgttgctgctgttgttgttgttggttatacagcctttgtttcgctttagtagactcggttaagttcatgtaactcggtctgctgcaactgctgtcatctgttctatccgaagccaacattgttgtgttccccgaaataggagttgtagatgtgcagaatgaggaggaagctgagctctcatcataccgaaattcagaactaggactcgaggatgagcgagtagcttgccccatttgatgatgatgagtaggaggtttagccgaaatccttgttgtcacattgttccttctaactttaaccgaagatggttcaaaagatttcaatcgtttggaatctaaacaattctttgtagtaggagtgatctcagaagggtcaatgggttgagactgttccattagtctggtctcccatggtttcgccgccatccaacgctctaaccaactccatccccagctactcttgtcaaactcttgattccttaaagaatagcccgagcaagttgatcgagaattcgagtcttggattgatctccattgctgaaaatccatgacaacaaaaatctcaccaattccctaaaaaactaaacacaacaaaaattgtaacaagttcaattttttttcataccttttgagctagtgagtatgcaatggctctctccctcttaaaagctccttcttgcctcatatgtaacttggttttaacatcatctaatgttcccttgctatcacaccaaccttcctaaaaaaaacaaaaacaaacttcgattaggactcgaaaagggcaaattagcaattcactaaaccagtaaggaaatgaatggtggagaaacaaacctcagcttgtttgagaaggtcagccttgctgcgatgctcgtcgagtatttgctgcacagcttggccttccatagacatcctcacacgacgagctctaacacgagcttgaactctaacaagggcctgcatacacctcagtgtcacagcagcttgcttcctcacttgtcggcctcgaactaatgcttgaagccttactattccttttaaggccctcaaagcccttcttgcctaaaaatccaattaccaaacacagttaagattaagaacattttcactaaacaaatcacattatactaaaccaaggctgctcactcaaactgaggaaatcattaccaataccaaacaaagctaagaaaatttccacaaacagaacatatgatacttaaccaaatgctcaaaatccataaactaactgatatattaaagaaagttagaccagtgatatccaagctcaaagcccttttcgcaatgttatgagcaacagtattaaaactacgagatatcttaaagaaattacaagaacaacttagacgtattcttccatctaaagatggtacacttaatagcactaattagtaattactacttcagaatcactatccacaatcacaaaagaggcagttactaactttaccttagtgattatgattattaaatatgttacttaaaaacatgtcaagattaagaacatgttaagctcagtttacaaaaaatccaagtaccaatgaccaaacaaagtttaagattaacaacattgtcacaaaagagatcaaactgagtgaatcattaccaatcaccaaacaaagttgagaaaagtttcacaaacagaacactaagagaacaaagattgaacctttttgtttaacttaccaaaaatccacgaaaagcagtttgaatcctaatggcagcccattcttgtctaacaaccctaaaatctctaggaggagctctaacaacagtagccatggcagcagaaaaagcattatgattattagccaaacgaggagaagcagagccttcggaaccagctctttgaatccctttaaagcttttccaagcagaccccatatcccctgaagaactcttccaaagtctccattttttgctcttaacaacaaccttgtcctaaacacaaacacatagagaacattattaaaaaaatcaaaaacatgtttctaaacacattcatttcaaaaccttaaaaaagctttacatgttcttctttctctggcttcttcaaacctataaaagctttaacccattttcctgaagctcccattttttgctcaacagtagaggaggaatgaaaattcaaaagggttttgtttgtaaaagggaaatagactcaaagatcgaaactttaaagtaaaaatgtgtgttttttaagagatatagagagagtgggtgagtgtctttagtgggaagtgtgggaatgtgggagagagagagagagagagaaagaaagagttggttttactgaactgaaccaatggaaattgatagcaataataataaaagagaagtcttttttgttttgtttgtaaaatttattgggtttctatgtttgaaattcaaaaactcaacggacaaatgggattgggactcagtcccgctctcatctcttctttcttaccttattgagctttgtgattatttaccctttctttttcattaatattacaaaattgccattcaccatttcttttttcatttttgtttttaaggattattttttctaagctaattagaattttattttaacatgtactaaattatgttctttgaacttttttaactgttaaaaatttctcatgaattattgagattattaaatttaaggatgtttgtccatttcattcaattttactaattctgtgattgtccatgtgcggaatcataatttctacactttgttatctactaaatcatgctccttgaaatttgacatgtactaaatcaagtctcttaaacttttcatccatgttagattttttttttactaaaattagaaaaaattccttaaatccaacaatctcaatagttcagtgatgatttttaacgaccttaaaagttcaaatgacaaaatttgatacatgttaaagttcacgaggtaaaaattctaattagtcttttttttctattagaataattggcaacagaatctctttatattttaatttttatatgtaacgttcccgcttcaagcctccattgggtccttacacccacagaataatggct

SEQ ID NO: 161585 - DNA, 2123 bp, Cannabis sativa
gtttctagtttttccttaaaatttactctctttagaagaaaaaatagtaattagtatgaattcaattgaaaaggcaacagaaatacgtgtactctactctattttcattgcatttatatagaagccgaacgctgagaaaggctgaaaaagcataataaagtttaattgctagtttctcaagtataatatttttaatagtgactgtgattttgttttctttaatttgtgctctaactttgttatgtgctgatgtatggctaataggcaatttggatgagcgggttagtgagagagtgttgtatgatattctgattcaagcagggcgagtacttgatttgtacattcctcgtgacaaagaaactgataagcctaaaggttttgcctttgctgaatatgaaaccgaggaaattgcggattatgctgtgaggcttttcactggtctggtcactctctacaaccgcactctcaagtttgcagtatgttcctttttattgtactccccatggtcatgctctgtgtaatgtatgatgaaatatttatataattttggatttcatatgaacataattattaggttatgtttagggttagtgtttactttatgttgatttcttagggctgtttttggtaggcttagaattgcttctgtgtgaagagtgagttagtgattaccttcttcttgcttagaataaggtacaattttttgagactttatgttagctgaagatttttgttgttaactacatttcttttctatgaacagatctctggtcaagacaaaccgtcacttaatacaaaccctggaactactcatgcatcaaatgttcctcataaactgagattacagcctataccgatgaatgatatggaacgaatatcaaacagatcatcttcttaccctgtaaatttctctcaaggtgattgacctatgtaatatttttatatatgaaacaattattgagtcaaaattctatccgtagacaaattgcgacttaaattttatttgaaagatgctaaataatacctttctttctgtatcaatgcctccttctccaggtttaaataatggaaacaattttgaccatagtcgtcgaatttttggggctgatttggatagcattaaccgttctaggttacgtcgctttgacacaagtaatcctgtttcctatcctccctactaaagttgccataacactgttgaaggtcaaaatctcatttggtaactctctgtttttcaaattaaatggtattttaggcagatattgaagatagtctgtaaggtttaccgctggagtcaatgagctaaattaggtactcttaagttagatgacatagtattttgtgcgagagtgtggtgtaatatttaggtttgatgaacgagtggcaattttttttcctggctttcttttttatatatattaatactagtatttaatgctgtactttaatattcagaaccaaatttggtgtgaatttatactagtttgttcttgcgctcttagactatctccaatggagattggaaatgtaaataagttatggaaagttaaaatattgttcacttagcaaaaagtacatggaaagctaaaattttactgtgtactaaattcgcattactttttggcacaccattagggcatatttattatcaaatgagttatattttagctttacttcacttatttgaatttcaattgagatgctctaaggtcctgaattactcttttaacataatgtcatataaaaccaactgtcactgtctttgagctaatttcactccacttttgttcttcaactctgggcacggaataagagtgtgcatcaatctattgaaaaatcacttgaaacacaagcactacgtacaccagcaaagcaaaaagcgtgcaatacgtaacaacaagagtaaatattacaagttgctacaccatttttccaaaggatgggatgatttattggagagactaatttacaaagcctcgttgatacacgggaaagtaaataagagtaaacgggaatgcatttgtagtttgctcaccctaatttgaaatttaggggtgttcaataaaatttaggagttttttcataaatgtacaataaaaacaaaataattacaaaaaatgtgc

SEQ ID NO: 161586 - DNA, 2560 bp, Cannabis sativa
  modified_base (136)..(136): a, c, t, g, unknown or other
  modified_base (2512)..(2531): a, c, t, g, unknown or other
ctgataagcctatgtaatcatgctctaagggcatagacatgaaacggtaactttaacagggaataaagtacagacgaggaagaagaagaactcacttagctttagatattacagagaaaaagagagagagagaganagagagagagagagaagaagagtatgataagcttggtggtggtggtagtgatggtgatgatgatgattatgaagaagaagaagaagcttctgtggtttttgttttattttttatttggtgtatgtaatataatatgtataaactatccttctataccgtaaagtcgtgtattaaaaagcaaaacaaaaaaccaaatcatttcattttcatttataaacatttttttctaaaagaaagaacagaaaaaatggaaccgtttgtctctgttttaaattttaataatatatttattttaacattttctttatttaattttataattgtatatgaacctttttgtgggcaacctctccgacaggtcacagaaagtgcccggcaaactttccaataatacccttgacctttattattttttcaatattacgaaagagatagaaaagaaaaaagtaattaaaaataaattaattttttaaaaaaatggggaaggggaaacatgcgcgggtgaagctaacgtgcgccgtggcagtgtttgggagagtggaaaattgaaagaaccaaagggaaaagatgggggcagggaatcgcggaaagggatgggacgaaagcgggggtgggtgttgctgtaacgcgaaaacttttctcggattttcagaaggacaggaaaatcaccggctgaggaaaacgccgagggtgtttttggctgatttggtgtttggttgctgggaaaattaaaagaaaagaaaaaagaaatagtgagagaaaatgaaaagtcgtagagaaagtgagggaattttgagaaagctgacactactggactgcttcactgttatctctctcactctacaccgctcgaatcgacaacgaattgctatgaagaaaaaagagaaaacggcagtttgagaaactcagaaataatttttatttttatatttattttaggaatgtaattatgaactgaccctgttgtttctgtacaaagcccgtgtcgtttggatgcccggaattttgttttcccggaaagttttgcaattttttttttttttatttgttattttcctgttcttattgtcttttccggtttcaatatcaatagtagcagtagctttttaatttattatattatttggcgggaatattattaatattgacattaatatttaataataccattttattttatttgtcaaaaagaaaaataacacattttttaatgtttctttttttaaaaaaaatattaatttttaatgtttcaaaaccaatactatagtttcaagaaaaagaaacaattattaggttaatttttctttaacattccgtgaaaatagagaaaaaatagaaaaatatttatcaaaattagtttgtcatctatttttagtgcacgaattgcctaactcatgtgtatgacaaaaatgaatctaataaaggctttccttaataagaacctaattcattacaaaaaagagaattttctagagaacgcaaaaatcaaaattataaggactcgtttggtaggttgtattgtattaaataacaaataacattgttaactgtagatttagccaaccgacgtggagtctgattagaatcgaatttcgcttataactgtcacatgtggaataataataaatataaagatacagatttatagaagttcgacccctttgttcaggtaatgacctactctcattttagttgtattaagtgatcttgagataataccaagcaaattagaggctaaaatcttataatttttagctatggctctccatattacaatgagaatgagttttgcagatgagaagtataagaaaagatagaattctatgctttagtgcttcagagcgtgattagcttcgttcagagtgtcctcttaagcgtgtgtatcttatcctttatatagtgttagggttacaagttgttacgtataacaaataggaaaatattcctttaataaggaagttacatcgtatatttaaaatgcaatataactaataattctaaaagaatagggttgttatttattgatgaagaattcatattttcgtgggtagtttgagttattctgaagttgtaggagtgctgaggacgagttggatggcttgtgggaaaagtacaagtgttggggcatgccctgtatgcttggccgaccagctttattgaaaggcagcctggtgcatgaagcttgtctctcctggtcggccaactataggtctgaccaggactttgccagttcttgtacattcctgtctttgttggtggttttgatattaggatgaacctacttgtttcaatcgtgcatccatagaatcttaaaaggttggaaggttgcacagcactaacctagtcggttagtgtttgttggatatattttaccannnnnnnnnnnnnnnnnnnngtatgtttcattaacatcctactatgaat

SEQ ID NO: 161587 - DNA, 9898 bp, Cannabis sativa
ccaacaatataataaattaataggcatacaatttgttggtttattttatggattaatgtaattagtcaatttcttcttcttcttttagttcaattccatataatttgttttgattgtaattatttattagtcatctataattcttgtccatgaatttaaattaaaattcttgaatgtgaaatttgtatatgctttgattgttatggatgcaacttgatttaggacaaaaatacataggttgtttgtataattttattagttgttatgcttaatgctatctttgtgattaaacttaccataggaatatagaaaattttcatataaattgagcttataagccttaacaaaattataatcttcatagctcaacttatcaattgaatagaaagaagagaacttagttaattgcattaagaaataaaataaatgagttgtttttattattattctctctaaaaattaattattattttattttattttatttttcttaacaatttttattcatcaaatagaattaaagaataaattaattgatttcattgttttatttatttattagtgaacttaccgaacaattagttttattaagacaagttctattgtgaaaactattgaaagcaagttatctaaataaacaatctatactgatacgtgatatctcttgtttaagtaatatctcttttaaggttggacaaaaccttaaacatacaatttacttattaagtgcatcaaacaaacaactctcaatactattgaacttattctgatatagtatacactactggcctcgatgatcataatatcaaaatatacgatgcacactttttttctttcttttctaatggaatggtaacctctttttctttttttttttttgaacttaatcccaaacacaaagacttattcattcttaacttaaatcagcctaaaccaactaagcccattattattaatgaaccttattacaggccatgaccataaagatgaggtgaaagtcgaggcttagaaattacaacaagaggaaacttcttgggtgttgaaagcccaaaaatttcagtcatgtccaaatcctctttcttcatgttgggtggtaaggtccatgtgaaaccgtgcaagagattagccaaactggattgaatcacttttagaccaagactgtaaccagggcacatacgcctgccagcaccgaatggaaggagctcaaaatcatggcctttcacatcaatcgacttatcaagaaacctttcgggcataaactcctctggttgatcccataagctagggtccctccctatggtaaacacattgactaggactctagtatccttgggaatgtcatagcccgccacttgacaatcctctctggtaaatcttgggaccaacatgggagccacagggtgcaatctcatggtctctttaacgatggaattaatgtagggtagcttatctatgtctttctcttcaacccatctctctcttccaatcactctgtctaattcttcggttgctttttcgaaaatatctggcttctttaacatctctgagattgcccattccactgtcactgttgagctctctgttccacccgctattagatcctgcatacatttttaatgcacaaagtagaagttcatctttagtaacttattttatttttgtggctctaaatcactttctctttaataatttgatactgaaatctccttgaatgtcacattaaatgtcgtggggtattcaagcttacatatcaaacaaacagacatatgatatgaccttcaactaattagagacaacagtcctatactgttttttaaagaagagttatgtcaaaaataaaaattttattttatttaccatccgtcctcttaccattagaattatttgacagggatcctgaatcacttacccttcacaattgcccaaaaacactagcttacgtaccaattaactgacattgattgacactagcttataagtgcccaattaacactagcttagtgttgatgctcattttcagagtttagtttaataaaagaaatattgggtgtcgtttcaagaagagaaatactaaaagttagtaggggtgctaacacttatttacctggtaatattgttataggtttaattaaatatcaagttacatataatttaatgtaataatttttagagagtatagctagtcaataacaaggcgatatgtaaagaaatgctaggcaccactaattctaaataagaatgctttttaaaaaataaatggtatataaactattaattaataccattaaaaggattttttttctcaattggaacatagttttagtttggcatcattaatctgcaataataatattttgtacaagttttatcaggaatctacgtggcagctcttcattgatcttttaatattttttaaaaaaataattaattttcttttaaaaaattatttttttttaactgaatattaaaaattaatgataataataaaataaatgaacaattagtcagctcccctatctttcaagacactcgattgacccaaatagttaattttgtagtcagcatataaaaatataaagaaaaatgttagcacaatgcttaacaaccgtgaccgtattttattagtgtaattaaatattaaatatatataattttattaattaagtactttacttggcaaattattttatatataattatttattaaattaaaatatttaaaaataaattataattatataattttttatttttacactttataatatatcttttttaattattaccaaatttcacttaaaaactattatagcaattaaaaattaacttaaataacaaacaaaatctgtataaaaatacgtgaaaaaaaaatctgtgtaaaaatctacatagaaacactgaagaaatccaaaagacagctgttgtgatatttaaagaaaagtggttacctgggtaaaagccttgacgccatgtctttcaagcttaacctcaagatttggatcttcagcgagctgtaaaagcacatcgaccatatcttgggctacgtaatccttgacaccctttcttcgttcgttatgttcatccagcacatgttccaaaaacctatcaaactttttactcagagccttcattctctttatgtacccctgaaggtccaagaaatcgatccaaggtatcgaatcaccgatgttaagtactccactaagcaagaaaagctcatcaagcatttttttgaattcctcaggtgaaacgatggcgttttcagactcgtctgtgtactttttcccaagcaccattcggctaatcacgttaaggctcacattagataggtgctctttcagggtgatcggcttctctgcggactcgttcaggcccttaagcaaggaattcatttcttccttccttatgtactcgtacgagtctagtcttcgaacactgaacagctccatcagacacatttttcgggcctgtctccagtatggcccgtaaggggaccatgtgatgtcggagtagttgtaagttgtgtactttccggccgctgttttgggacgcccggcgaagattacgtcatgggttttgaggattactttggccatctcgactgaggaaccaactaccactgggtgtgacccaaattggagttgcatgattgggccgtacttcttggagatctcgtgaatggagcggtgtggtaatgggcctattaagttgaggtttccgattatgggccagggttttgggccgggtggtaagtttagtttacggcggcggagacgtttggagaggaggatgagtgccaccgtggcgagccaaatggccgcgtaggaaacccaagttaggtctttcatgttggttgtgggtaagatcagatgtagtgaaagagtcatatttggggatatttatagacttttttttattattattattatttattattttttttttgaaacaattattattatttattagattgtggacatttatgtagtaaagtaagtggaaatttgtcatctgactgacttttctttttcttttttctttttaatatatcgtagtttcggggacagtaatggtaagaaagaacttgcttttgtaatttttgatggccaataagattagtgtgttgttaaaaaaaataaaaaaagattagtgtgaagacacttgatggaaattggaaaatatgctagaagccaaaggtactagtgtggtttggttgggtagattaatgagagcccccacttttgtgtttttttcacacagcctaataattatttaatcttaattatatttttaattaattttgctgtaaatttatctaagaacactcacaataatagttaatgtaaaatagttataaaagttaaaaaaaaaagtcaaaaatgcacatttaatagataagctaaaataacttaaaattttaacttatgaataatgcttagttaaatgtagttaagagttaactataattttttttatataatttttataatgtattttgtttaatgataagtgcaaaaaataaataaatattatttaatacataatgatttattgtttatgtgtactatatatattatttaaatagtttagagaaattataaaacaactaatgtatggtataatataaatttgtgtgaggtaaaataaaaaaaattcgatttttaattaagtattttaaaaaacagagtagcaaaattgttgaaagtgttctaaattgttttaattatgtatttaaggacaaaattgtttatagataagcacctcgagcaaatcatcaacttgtttcaactttttattttttttaaacaaaaaatcaaaatatttgtccatattataaaaaataatattttttattttttaataaattatattttagtttattatataaaaaagcattgttaggaggtagcatctcaaatataattagtaatattttataaaaaattaatatatttaattgtaggattccatacttaattatacaaatagtaatataatatatatatatatgtatttaaagattttatgttctatttattaaggtaaaattgtatcatatagtattatattaaactgatgtataatattttatatttttatcatatgatgaaataaaaatttaatattaattatttatatgaacatataaatatctaacttttaattttaattaaaatttaatatactattttaatatgatatatataatataatttaataaataatatacaatacattatttctatctatctatccataatcttattgctaaacatgatgacatcgcattatatgagtttttttttctttcccaattctctatttttccaattttctcatttatttagtttataatcattattttaattttattttttactctattaatatgtgatactgtataattaaatattcagttaattaaaaaacaaattactgacttaatgaactacaaatttaaaacattaacacattaaaaaaaagtccaaaaaagttcaagtggcatcttatattttttttattaattaattataattaattataaaaaataacaaatatataaattattttataactgttagaagagtttatgaggagttcataatcttataatagtatattgttaatatcctttcattataaaaagtttcactatcacaatttgagactttttcttacattgcaaggtgatcaaattattggtttccaagacggaatattataccttctttcttatatataaagcatatgtgatatattagaaaactatatatattaattagtttattttattaatattataaacgcttaaaaacttgtataaactattattattattattattattataaatgatttaactgtaaagcacttgtaaattaattgaatattttaattagttggtcaatgagcacatctcaaattaaagtgtatatatttataaaggagagttatatatattcacactcttagtattattaagtgcacttcaaatatttaaatacatttttatccttttgtgaaatgattaaaataaacaaacttaaaaaattaaattagattataaaattaattattttttttaacacacttaattaccttactaaaatttattaggtagttaaaattgggtatcttcaaaccctaaaaaaaaaaaaaaattatcaattgaacaaaatagtattaaagttctatcatcattatctcatattgatgttataccatatgcaatatgtttctctcaattttttttagttatttaattctctcaattgtattattttattttcttactttaaggattcgtttagacaaataaaaatttaaatattacacaattattattattcaattattaattattaccaaaacacaacttaaaagttataaaataaatactaatactaatatactataaaaatgtaaacataaattataaattataaaataatattagaaatataaaattaaatacgtactaaacgggccctatcagggcggggaatgtaatcccatccctgcctgccaggtcgaggagtgtaatcttcgtcactgtcttgtttaacattaggggacaaaatataattcctcctcccgttctccatttagatggagtatctcagtcttattaaggacatgtccccacaagatctatccctgtaataaaaatgtgcatcctattattacacagacacattcaacctatatatccttactactttactagtggttactaaactttataacaagtataaaatcaactacaaacgttaaacgttaattttcttataattagtatatatttttaacaaataaaaatcaaatatattttagtttagctttttatgatgaattcatggtttttttaaacaaaaaaaaaaaaaataaccatatcgtctgttgttatttttatgtgaatatgtatttattttattttattttacttttgtaaattatgagtgttaaaaattataagaaaaataagtgtagataaatttattacacaggattcggctcatcaagcaagactgtttggctgcttggctgcttggcgagcacaaatgaagtacacaatagtgatatagtgagatatttacgcactttttaaaaataattttttttttttaaaacatgtggaaagaaagtttttaaatttttttctaaaaaaaagttaaaaattttattaaataaaaaatatgtaacttaatattattttgaattaaaatattgtaactataagaatatgtatctttactgccagcatttattctccaagtacacttaattaatttactgatactgttgtactttccctgaatagtcaatttcatggacccactttttctttttcttcatggaagtggattgtcgcttagatcgttttttcctaaaatagaagttctacaattccatgaaactctcatttcaaatctaaccatgaagattgaaatgatacttttccatccaatttctgatttaataacacagaattttaggtaccaattttaatttagcttgctccttaatcgctgcactttcttctaagtttcttggaaagtccaaggaaagaaaaatgaaaattccacaaaccaagaagtatgacgaggtcatttttatttatttatttatttatttttttgaagattgaattgacttgacttgagtaaacgtaagcagccggagactgaagacactatctttttcaaaggaagaagcaccattattaccaataccatacataaatgctagctccacttaaataataaagcaactctatcattgagagatacttagtatatatctgtcaaattttaataattgaacatgtggatcgtaccttattggggtctgagtatgattacttttttttattagacatcttgctaagcagaacactagtgattgaaaaccgccctctaattaatagatagattatactgattttattttaattttaattaatttctgtagtttgtaagacttttaacaatgtcatatacattacagttcatatttgtgatacatgtggaaggaactgacggagccacattgtaacacaggcccccaatttttttttattttatgttattttaatatacaattactatggaaaaagaaaattatatatagttattctattttatccaccctaaattaattctcatacattttgcccccaaattttattttctccttccttaatagaagaaagttatatcttactacttactagtactactattaaatactaaataactataaaatttactatagttataatatatatgataataaaaaaattgaactaaaattctctcctagatactaaaatagataaaaggtctattgaaatactgatttaaaattctttatatatattcagaaaatatattttttttttaaagatattcatacactttataaaatcccacaattcactcacatattttatgtaattataaatgtaatacaaattctacaaattaatatcgcaaatcaagtcttatacaataaaatcttttaaattacatattatgagtgtatctattttaaatatttatttaccacttgcatccttttaaattattgtttttaaaaaaacaaataattttgaagactactattcaacgaagcaagaaataattaatcatggattatatatataatttgttgctttcactatacacatacattagttttttatttatttatttattattcttaacatactgaaaacatattataattataggagtttcaagaaccattcagaaggtcatgttattttatctatatataccacaacaaccacaaatttggaacaaaactgatttcattattaataaattaatagcatggttccaaaaattaagggtaataataaagacaatcgtgattcacgaatgagcatatttctaactttttttccttgttaagttaagatgtagttagttaggacactgtaaaggttttgaaaaattctaaaaggaaacatttgcaagcataaatctcaaaaatttcagcttgatacaaaaaaatttccaacagtttattaagatagaagagctaagatggttatgctttgttgagcaatttaggggtcacaatttgttgatttggaagcgaatcaatagtaagctcagcaacacgaccggaagaggatggggcagccacaattttagaggccctaaaaattaaaatttatatattatatatacatatataaataaaatatgatatataaatcttagttcaattgcataaaagagttgtaatataattaataagttggaatgtatattggtgataaaaaaactataatgataataataataaatcaaatagttcaaaaaaataacttataagaatattataacttaaaaggttaaatgaaaataaaaaattattatatgggaataaaaaagttgaaattaatattgtgtcaacatttaaacaatatttattttaaatttttataaaagaaaaaggccctcaaatttcgctttagaataccaccttgtcagcaagttataatgatagtaacaattactcttgaccaatggataaaagctcaagatcgacatgttatctctatgaactcctttgtgtcgagtgaaatatggtcttgagaagtaaatgctactagttgaagaaaccttcaaagtaaatattaatattgtgttatttgctaaatttgagagacaattttactttcgttatcaaagattctttggggcagttagttgaggttcagataggatgtaagcatggagttgttagattaaaacttttgaaaagtaccattaggtttaaggaagctttgagttggattaagtagaagctaccaaaaagaatgattgtcgagatggacttgtaacgtccccgcttcaagcctcca

SEQ ID NO: 161588 - DNA, 5894 bp, Cannabis sativa
tgctggatcagccaaatagaaggtcgatttcaatcgatttaaaatactttagggatttctaaagctgttttgcatatagcatcctagtggatgagaaattcatatttagaaattagatttgacttagttcatatcccgtgttagggttatatgattaaaactaacattaatttttaaaatactaatattaatataattagataataataatgttaacgaaatattattatattcttagaatattctgttaaaaaaaaaaaagttaaataattactttattttttttgaattttttaaaatttaaaagatatctcaaataacttaaataaaccataccctgttatataattaattatctggatactgaaaatactaaaggagatgtatccgcaccgtagaagcacggccatatttggaaaaagaaatggagagatggaatagaatagtgttgaggaaaaaaaaaacattttactgagattcccttgtggagtggagtggagtagagtgaaagcagctgtgggctatggtcaagtgtgtcttttgatgcagaaatcattagctgcccttattctgagaaactggggtgggatatatttttttctacgagtaagagagaggatgggttgggtgggacctactaatctgcattctagtgttgatgggacttttcatgggtcctacctaccttttatatgctgctttaccattgagagaaatgacaacagactattgccttggctgcaaatcacatgcttttattagttggataggtgctctattccaatggggtggatccatgttcctcactcactcgtcccctccctctgtacccttgctattttcttttcttttttttttttttaagaaaataaatatataaaaaaagtgtttaatagaattgaaaagcattttctgaaatagctcataatgaatgaatttctcaaacttaacaataataatggtcaatcttctcaactcctccagatgccctcatctaatctcatctctgttcattttagtctgaatctccatgtgcctttctttgggttgacgtcattcaatcttctcatatttatttcttaaagaatatagatattattttcctttgttttttagaatagtttattttattggatttggttttgggggaaggagatattgtattgataatgattcgtcaaccactggtccagaaatgttttagttttatttagtcttcacctcgtggccatgttttttaacttttcttaagggagctggcccatttaatcagaaaccgtccatctcgcaacacatttccatggcttgggttggccacgacatcaaaaataagaaattaagagatcatatatttatttatttattaaaaatagggacagcatataaagcaacactaaaaaaaaaaaagcagattttcccatggtttttctattttccttttaagtatcttattacatttgtacatgaaattgtttttttttttatgcaaagtgtatgaattgttactttggttcctttatgtgatcaaagaatgatgttactttaagtttgtgaagaatgaaagcaagagtagtcaaagctatattattgtgtatcaaattgggaggtatattgattgcttaagtgatagtgtaacatacggaaatataacaaacaaaaaattcttttgcggtgtgacatttttagagctccaacattatagatgaaataaagataaaaaaaagtgtttatattgagaattgacacgccaaccatttaagacgtcatccacatctctctcaaatccattgtctttaagtacattgaaaataaatataataaattattattttttaaaacttggttaccaattgacttgatcgagtatgaaaaataaaactagtgttaaatcttgcgtaggtagggccactattttttcatctttttctttttttaattagaataaaagatattttaatatctgccacgaactagtcttggatcaaggtttaagataatacaatatgtcagtgcagtgtgcaaaatactctgccaaccaaacaatcactaactaataatagactaaacaaaaactattttaatgttaacagccaaactcttaagtctcatttccaaagttttgattggcaaaatctagatactagttttggcatgagatctttaagaagttacgtgtagttatagcactaatgattcaagtcaactaatatttgattttaattttcgttttagattttgttgtcgtatatgtggatgtagtctaaagtgaaggtggcttttttctctctcttaatatatatatatatcaattacaaaacagttcaattaaaaaaagtacgaaaaataattttatgtattattttttaattttttttaaaaaatttacgatataggttgttccggtgatttcttcaatagtttttgtgtaggttgctattgtaaattttaattacaatttaagttattctgttagttgctatagaattttttatgtataatttcgtaaaaatacaaaaaaaaatatatattttaaagtgtaaaaaaaaaaaatcaaaaaaataataaataaaaaaaaaaaacgctgaaggaaatcggactttgtttggaagatgttcactgctaattttaggcggtagggccagttggaaagtaaaatcacaaagtccccaattggacctttttctatgtccactttccactttccagcggaagaaaagaggttgcaatgcaatagcaaagtttacccaatttgatttcgcaaagatcaaacacatgtgaatgtgatgaggcttcaaagtcaaaaatagtcagaacgtcagatactccatccacccccacacccacacccacaccctctccctcggcagtcggccctggctggattactactaacaagtaacaaccaacattatcaaatccaaaggcactatagtattgtgtcaacaagtttgttgttgtgtaaatatatatgttcattgatcacaacagctgcgtcgaattctacttcgatgaaacttggaacaatttcatgttaacagtaatattctaattctctcaatgctaacattttattttcttggaaaatataaagtgctctcaccaatttacagatcactaccatcttatacatcaaacgcttctctaaccattcttgtgaccattataattcgacttttgaacaaatcagggagaaatcaatacgtggtaatatatatgatatcattaattttatcaatctttatgttatcttatatcctttccatataaatgaaaatttacacattacaaaaagctacaaatacccacaaacgtgggaaaagaatgaatgaatttgtgttaagtatttgcataattcttctgatgtgaaatattacacgtacgctgtatggcgatgggccatctctctactcccgacacaattgccaagagccatgtacaagttgttcatcaggttccccagattcggtaagtcattagccaaaatgaaaaccagatgactggaacgagctgttagatagatttggtagcctgcgaatggcaataacaccagctgcaagtgcagcgaaggaagccaagacaaacgcaggtacatttcctccgccaaataaagcatcccatggtccagctccaagtgatataatcatctaatttatacaatattataatcaataaaaataaataaggttgtagaagagacttataggaaaccagatgaaagaaccatttctatcatgggcagccaaagcaaaactgatttacatctctatataaaatgtggggtggaggggcaaagaagaagcatctaagcagaagaaacatattgaaaaagtgacaattaaaattttgaatttgagaactagggaaaaactttaaaagaatgcactataactacctgcggaacaacaattgctagatttagaacacctatagccagtcctgcataataacataatacaaacttcaaaaatcagaaagcagcaagggggaaaatagaagctggactcaacataaaagccatgctaaccttggccaccaccagaatctgctgtcagctgtgctgtcacagaaaatggaacactataggtaatctgcaaaagacaagcaatcaacataaacaaacacaaacaattaaaaatattaaatcctaaaattactttctagtacaagagcatcaacttacagcaagtgggaagccaagaatagcaaaaacaacaagggaagctgtcttgatagtatcattctcgccaattgcatgttcaattcctttagaatatttgccaaccgctatgatacttatgatagcagtgcctgccatgcagacaaacacaataaagttgctcaaagcccatactattctagcacccatcctctgacacataggttcgataaggaaagaactgattcccagaataacctattcatcccaaacaaccattagaatcagcataattccaaggagttaagggaaagaggaaaaaaccaaataatttcaaagggaatcaactcaaattagaattcttactgaattcaaaagcaagccaaatgcaccttctctgacaccttcatcataggcctttacttcagctgagtttccctttggattcccatgataaacctctcttcccatccaatccgtatcaaagagaaagaatggaaaccatgataactgtataaattaatatcagtgtcaaacataagatagtgacaagaaagaaagcgagcaaaaaaataacatggttaatcaacaatacttgcaaactctatacaaatacagcaggtaattgacaatgatcgtattatgataaagcaaactctatacaatacccacccaactgagagccataacaatgagcactgaatgcattgcaggtggtaaatgccttaaactaatcaacagattgactaaaacagcgccagggccatcaatatgcccaatattctgttcttcctccacatttgaattagcattgctttcacggccaccagtagcattcttcacattggcaccatttatggcggagatatcatgctttagttttgaaagctcaatgccattttgttgttgatcctccagcaaaggagcagcatctgataaacggcggggctctttcacagtgagtggaacctcttcagcaaaatatacagttataagtgtacaaaaagttagaaatacctgcaggatttcaaagctgagtattagatttgtagcacagcttgaaaataattggctccgaaaaatttcaatttttcattaaaaaattactgacactaactagcaaccaagcataacaaaaatctttatgctccataaatcaatctaaggtatcctttgttcgcagaaaatccattaatacccctaccctacccattgtgtgtatattaattcaattatacaatatgcaaggatgcattatgaacctaatcttggattacaaagcttaccactgcaacaagaaatgctgccttaagatttccacaagcttcacagcaagcccgggttaacagaaagggaaaccatctgccaaaagtaatttgaattagtcccataaaatggaaaagagagaccataaatggagaaaattaataggcagaagattttgtgccatgaaattaaaaggtttcattcatccaacttggtatgaaaggcatcatattgtgagtgatccttgcaagcatcaacaacataaagtgaaaagaaaagaaaatcagtctcacttgtgccactgtccacttgctcctgcagagaatcccaggatgttaccaacagccatccataagcaaaatacagcatttgaagtattgcgttgatcagggcctggaatgaaatcgagacaattatctaatcaatcaatgagtttttttttttttttttgaaaaagagaaagaggccactt

SEQ ID NO: 161589 - DNA, 3259 bp, Cannabis sativa
  modified_base (2710)..(2714): a, c, t, g, unknown or other
aaaaaaatatcagaaattgaacaatcttttttaaaaaagaaaaaagatctaacaattagacaattgataaatgtataaaaaattcattctatgattttaaaatcgttgttatcattgtatttcacttatagacgacattgtattcaacattaatatcatcactatatctcatttgttctctgtcaatgaatgtttttttaaaaaaagaaaaagaaaaaaaatggcattaaaagtgtttttcaaaatatttgtgcatgcttgttatatctttgttgttaacatatttaaatttggatttgcattacagttatatgacttttatgaaactttataagtattatttttgactcgaagttaatttgattagatggatgcaaaaaatttagaccttgaggatcatgcttcttggcctgaggctattgaatcgtattttattagtctcttgtatgaagaggccaaaaaaggattgcaaactagaaccttggacaaaaaagggtggctaaaaatagaaaatgacatatttagtacatttggaaagagatacaaaatagataaattgaaatcaaaattcaatcggttgagaaaggcatatcgagaattttctcatcttttggaacaaaatggaatggaatgggattctcaaacaagtactgttacagcaagtgatgaagtttgggatgcttatctaaaggtaataaagttatgttatagttgtgttgttgattacttgtttatttgaaatgctttttacatactaatgtgtttttgattttatagaaatatccaaatgcaaagagatatcgaaaaaaagggttgcaacattatgagatgcttggagaaatattcactaacacaacagctaccggtgggatgagttgcacctccactcaacctccacctatttcagttgaggaacatgaacaagagcggcattatattgacactggagcacatgttgatgatggtattgaatgcgatggtgaaaattttggagaggaagaagaagttactggtgtacgtcgtcgagctacttctgttccacttgatgcaccaagaccaaaggagaaaaagaacaaagggactaattctatcattgaacatgtgatggaggaacttgcaaaaagtatagctgctaaaactgaggcatcacttgtacaaagtgaaagtatgggtaagtatattgatacaagggagaagataatcaatggaaaatcaagcaatatcactagttcatgtaatgtggaagactgtcaaaatattctagatggtattccgaatttagatgacagaaaatacatcaaagcattacgtgagtttgttgcgaatccagaatggcgtggaatatttatgagaatgaatgatcaacgtcgtcgtgcatatcttgattcactattggagtgatttcttaccattttctttctatgacttttctttgtcttgaactactgaacaatgttgtaatgaaggtgacttggtgtttgtttttataattgagctatcttatgtttttatttattcttttagtgtttgtgaatttatttatcaaacatttattaggtaatattaacatatggatatattctaatatatatagtaatttttttttctttcaaagaaataaataacttcatttaggcatcttccaacaaggacacaaaggttaaatacatagtctagaccaacattgtataacacaagtgtttgataatgctcctctctatgatgtggctctgaacaaattgtaaaattgtaagttgttaaagcgatataaggttatgtggtggagcgttctctccaatgtcctgtaacaaagagaatgcatataaacaatattgattgtcttttatgtggggttggtgagaagatgataaaacacttttttttctattgcaattttgctttcaacttatggaaatttttcttgtagtgaataaccacccttaaaattgtttgttacagcagtaacaatattcaagatgcacaaaaataccaatcacaaaatcaaaactagaatttaatttaaattaaacaaaaataaacttagctcgagaatgaatgaaatatggatctttattgattgaaatagtcagtagtacacaattggatatgtacaagattaacactcaacacaatgaacgattacaaagaaatgtctcgcattgagaaaaatcacttcaagagtgatactcccattacatccctcccacacgtcgcttgctatgatcttggactctctctctctctctctaaacttgactccaaatctaaaatatgagcattggagattagagatcacttgagagagtagaggtactcctatttatagatgttggtgggaccctctttaagttggtgacaaagcaaactgttataactaacaacagctttcttcaaattttatttgatgagagaaaagatagacatactgactttgacagattaagtgagttcaaaagaaatgagtgaggacattaaatgtcctgaatgatcaacgagtttagacagtgcctaaatttgtctctagttacacttttagtaaaaatatctgcaaggttatcatgtgtacttatttttttcacttgcacctgcttggatgacgcaatatcccttataaagtgtaacttgatatcaacgtgctttaacctctcatgaaatattggatttttcataaaatgcaaaggactttgattgtcacaataaactgtgatannnnnagatttgaaacctaactcctctgttaaccccttaagccatataacctctttgatggcttttgtagcaaccatgtactcaacttctgttgatgacaaggctactactttctgtaggttagatttccaactgatacagtccccaagagcagtgaacacaaaccatgttaggctcattctagtgtctaggtttgctacaaaatctgagttcacgaaaccagtgatttcttccttgaaccagttctctttactgaacataattccagtgttcagagtacctttcaagtacctcattgtccattttagtgcttctccatgtttagggtcagggtttaaaatgtacttattgaccacactcatagcatgagctaagtcggttcttgaacacaccatggagtacatgagactcccaacacaacttgcctagggaattttgctcatcttggctctttatgcatctgtttttggtaactgagatgcagacaactcgaagtcttgagcaagtggtgttgcaactggtctgaacttgaccatgccaaacttattca

SEQ ID NO: 161590 - DNA, 8028 bp, Cannabis sativa
ttgtatatactctgctctagtgctctatacatggtggtggattggtgtgtttggtaacatatattcttgccaataaaatgccccacagttcaactaacttcatcacaacaactcaatgctccaaatctaaactaatcatcaaacatagtagtatactgcctcacttcaacacacatcctccaaatcaaactcatcatcttcaaacttcgatgagcatagatgcgttacccaaatcagtagaacactccaagaagagctagcttaaggatgataattaagttcttctcccctaaaatcctcatgagtcatgactagtgatccttagttccacacccacaagtagccaatggccttttaacgttattggagaacaggtttatgaaatgagaaatgccaaagagcaccttagggtgcccaacattctatacgactggtgtaaatgaacatcatcattcaaatttaaattatgaagaactaacaccatagtgctttataccattactcttatgaaaggttgaaactctggcttggatgatggccatagatgcctcgtttttgcttgatctaaactttatgacatgaaccattctggactctcctcaaggatgccacactctgttgactacacagggagaaagtcaccgcacaacactactaagaagcatagccatcctcgacataaatctgagtaatggtatgtgtactaaaattatgcacaaacattacacccagtgatgcacatactattactctaataatatagtacaacatcggtagtaaaaaatttataaataaaatattggcagtagaaacataaactaaaacatttaccatataatttggcgcagcacactaaagaaactgccagcctccaagaacaattgtttacggcatcatattatgtataatactatcatcttgtttaaatctttcagctgtggatggagacatccattgttcctgtaaatgtaatatccaacttcttgtttgctctgttctttatattagattagttagctttgactccttgtcattgtttttcacccgacgaatgactcatattttatttattgatatagcattactcatgagattatggtaaaggttgggcaagtttcaaaatgtgacagtaacactctttgctttctttgataaacttttaataacatactttatttattcattttcattcaaaacaacacaaatatttgtttcattctctgttttatgagtttctttatttttatttttttggttattgtagttataacaataatcagcttaattaatgatgagcctcattgcgattatcagtctcatcgtatatctcttcctgcaaagcaaagaaaatagaatagtcattagacactacatttcctcactttgtagatatattattatatcaatatattttacctgtaacaactcttcaataacatcttctaaggtgataattcctatggcttctccttcttcattaatatttggaagtggttcttcatcaatatgtagaaagtcagactggaaatcctttgaccatttcttgctcttgggaaaccctttacttagtttcgtctctttagataagcttttcaagttcttgagtgatctgtcactcttcaaacttctttcatggggttgcccttcaccatgaatgtccaaccgtacatctcttactgtgttcacttttattaagtatcattttcatcacaaaaatggacgagttattagaagaaaagggtaatgtgttaatagtttaaggtcagtgcttactctcttttgggtttgtggcaaatggcttctctgtatcgtttttctgtcttatgacaacagccatatggctatgacctttctgaaactcatttagtatctcgtatagtggcattgtttctgggactctgcaagttcaaagattcaaatatatgaagttctcataagttagtttttataattttaggtactcttcttggtcaaattaagtactgaaaaattaccttggaatcttacgaataacaatcttttttacaggaacttcatcatctggatggatggttaataagttctttgcctatatcaagttgactaggtattagtcttacaaaccatccttgtatgtataatgtttcaatgcattagagacttactaatcacaaacatggtaacttgaatgattgtttagcattctcatgagtttagtgaatcaacaaaaaattaccaatatgagtccaattatatttcttggttgttcatggtaaattggcaccctgctatgccctttctccaaaattactttcatcaagttcctgcataataaggatgaatagtaagctaatgtgatattaaattgtttgtttcattttcacaacatccattcacctcacctgtccaacttggcattcacatcaattgcaaaagtttctgaaattagagtcattgcatcactagctgccttgtcagagagttcaagtgctcctgcgattattgtcgtctcatctcgagtcagttcgccaccttttccagcctaagcataacagtaaacaagaacatgacactaactaattgtaaagatggaaattatgtatgtgtagtcaagtacgttaaattctaaaagcttggacctcatttccatgaaaatgaactagtgtcttcagttcagcccggcgaaaaagggcatcatgtccttgccccaacaagaagtctaaaagctgttaagactgctttgcataagttaagaaagaaaacatggttttgcagtgtgaaatagaaaaggaaaattatgaaaataatgaatatatcaatatttattaccttgcttattggatatgcaagaggaaaacatacgcaaactaaaagccgtacaaatggagcaactgctgcaccaactgccaaaccatatcttgaacaaacagcctgtggtataatctgcatataaaaggtaaaaaagaatcaagtattgagacttaagaaaatattgataattattcaaatcattattaataattacctctccaactaaaagtatcaaagtcactgagataaggatagcaccccatgcggttaccatgctatcaagaaaaatgggaagtgcctgaaatgtaattttcattactatttaccccaaagaaaaataataatagtaaaaggtgtttaaaacattattttggttaatgaaattatacctccatagcacaagcattacaaattaatagggtacaaagcaatagatgctgtcttttcaccactggtaatatctttgctgtcatcattatcgactttgaattagtggaaaacaaaagaaaattcatgttttggcctaaaagaattgtagagcaagcaaagcaactatttgttgttggagaatagataaaaggtccaataatgattctcttggatggaatacttttttttttttttttatggaacaaaagttctccatggatagaatactagaataatatatattgacagcaattctaaagatattgattcatttagtaaattgatgctgactctcatggataagttgtatttgtcacgggaaaagaagtgtagattttgattaaaataaaaaacaaaagaaatatgtgtatgaattcttcttaatcagtttcataaaaataaaataaaataaaaaacatgaacttaactagttaatctaatttattttctaaaactacttaataaattgcagctaaattaatcaatatatgcttgggtaatgtttgacacaatcacacaaattgtcaaaattaaatgatagacagagaagaaagtaccagcatgtaaacgatcagtaggcttgccagacttggcaagaacttcaagatccacaaggctcatagacataaggcccaaagtgagcccagacattagcccagcaaacaaaactagcacaatgataatcataatccgaatgaagaaatcagtgttgcagcaactgtactcaacttccattctcttctctctattttatttatttttgtgagagagaccagagaattatacatatgcaagagaagagaaaacttatatatgcattcttatataaaggaattaaaagatggtattaatcaaaatgttccctctttccaaattttatctttaaaaaaaaatgaaaattacaatacaatcacaaagagaataaaatcagattcgacatgttgtacagttggtgcactttgttatgaatgtgcagaaattaaaacagtaacaaatttattcgtaaattaaatccttctcaactaaggtaatgagttgtcatgtaagctcattagattagagcacttgcacttccatgtaaaatgtatattataaagaccaactcaaattattacacaagagacaaaatatataggaggggaaatcagatgagacaagatcgatgagatgagagtgttgttcaaaaggatgaaaaaaaaaaaatgagatgaaccaaccaagccatttaacttattcggtacttaattttctctccaagagagttgagcttttttttttttttcctaaccagagttgagtatttatccaaaaaggttgactgtttctccaagagagttgagtatttttcaatgagagtttaatgaatttttccaagcaatttgagtgtttctccataaaaattgagaagattttttatgtactgttgagcctgagttttaacatctctttgtataattttgcttacttataactccattcttcaaggcaataaagaagaaggcctagtgcttattcttatgtagatgtatataggctcaagcaattcgtgtttcttgcttagttttgttccaaattctagtagtttcatatgtagaaatagtaaatttgtttagcaagtattgttcttgctttattcatatatgtcaacattgaattaagttttaaatcttgaaattggttgatgtcataagacacttataaaatttcattcttgtgctttgagaaatactcagattgattaccatgaggacttggtttatgttatcaaatgctaaaaattagctcaacaataaaatagtattatgatatagatttctttacgccaggtacgatctaatcaaataacaaatctcttttagtttacgcaatttcctctctacaacaatgatcactctctcgttcttcagtctcagtttgaatagtttaaaagatgtattccaatagagttttgactagtttggtgtgagcaagaatccgtctgtctttttgaacgatgaggtcccctatttataggtgaaagtgattgctggtccttcgtgcatcctttgttcagattggtccacatagacttgttcctcttcacgttcttcgcgtgtttctacttttgattctccttatccaagctctttgtactctgtctttcaatctatcaagctttgctccattttcttatcttctcattctgccttttccttattaagtcaaacagtgtgtttaatcattcctgccatatcaccttatcatttcttctctacttataataattgaaattacttttttattcatgagattatttttatcacttataattgcccctcgattctataatttatgagctcgtgattgctttagtttgagataaagtgtcgtggaactatttacccaaaataattgtcacatgtcattaattaatcgtaattgatacaatggacaatcgtttcaaatttttgagacactgtccacgccatttcttatcaccctaatattttcatttgatttccattcaaatttaaatatgtagatacttattttaaaagaagaattaaaagtttaagtaactttcctggtactttttccttctaattcttcgtttcacctattttttctgcattcccaccttcatgttttgtgtatctaattcaagctttgttcgcattctgcaacaatggcctcaagggtttcctagagaaaatccaggtgagaaagtttcccctgtatatgatcccaattttatgctagagtatgaatcgacctttcaaagcatctactctgagtgccccactctagaaggagtaaccttttgcatgctgacgaaagacgagttgagcaagagtttggaagagcttgaaatggataatggtaaaatttttgtgagtgggaagtatatggaactcctatgattccccattccctctctactggcatacattctctcctttacggggattttcatgatctagcttgtttccaacttcgttcaaatagttttggatttagctgcagtctgcactctcatgggcataacgtttcccatctctgagttattctattacttcaatagaaccatctgcacttctcatttcatcgcttggtacatctccatgaaaagccccaattatttggtctatggtcttccaacttcaaacaaagtttgggatgcctatgttattgtaattggtggcaactggcttcccagggttatcaatcatgaagtctttactattgcaaatcgactttttacctcaatttattggtctttcagattctacacagtccatagatctatttcgtttaaattagggattatccatcattcaaaatacctcaattattatatcgacaacaacttgattgatcaggaggtttttaattgttcttctgccctaaaaatcaagactaatatgactaggaccaaccttactaaattaatagctaattactaagatttcttgaaatgggttgatgatgttgatgacccatgagtcctttcagaaattacctctactcatatttaacttctcaaagccaaaattgatgctcatgactagtgggtttttgacaaccaccaacgtttgatctttagttctgcaaccatcttgaatagaaaaggtattttatttctgagggcgtcactctattcacttatggggtagatttggcttagccttcatcaaggtatgatcttctggatactggtgagtaatcaagtgcaatggcctcatctacttttatttgttcattcgtcacctgtggtcctccaacttcaatttatactcatgtacagatccctcccgaagctaagggttcttacttcaaaaagaggaaacatgttgagaaagatcaggctctgtcggagagtgggaataccaagaagccttcttttgcaagaacctgcctcaatcaaaagttcaaaaactttcatcctgttgaagtaataactttgagctcgactgcccctgtttctactatatgcccactaggtctagtcaacccttcttctgggtttgcccctccttttccttattagacgatgtggatcaaattgtatataaccccaagtccattcaatctattctaatagactctatggctgttcatttttagagtcaaataaacattattgattatagaattgattcagcttcaacgacttctggagtagaggcgctttaaaaacatcttcacaatagagtaatgaagtcacccactttcttcctcttgatattgatgatatccctttagttcaatttttttacacaatatcctaataatccccacttctcaaatttttctatttttttggtcattctgaaactatatctgtctcattcgatgttaatagttcgcaacccttcattacctcttctagatctatcaccttttcttccatacccaccttacctcccatgcctccaaaatttagaccttcaccctcaatacccacaaacaataccattgcccctagctcttctgttccccttaaaatttccacgactaatgtcgaattgatggtgacaactaattttgtccctttcaagatcttctcatgctctgagttcatcctgccccagaaatttttctcattccttagagttacaacacactatttctgaccaacttgaggttgaaaataaaaaggtgtatcaactttgcaaagtgattgaacatggtgtttgtgctctattcgaccatagtttctcagccaactagaaattattttctttggttgctaatcctccttcaaattacaaagctcagtgtgatgcacttgttaggttgtttttagcattatttttaggttaattttta

SEQ ID NO: 161591 - DNA, 2013 bp, Cannabis sativa
  modified_base (1950)..(1956): a, c, t, g, unknown or other
tatgctggacaatatttttaaaattaattattttattgataaattataatcttaaataattatattttcgatacaataatgatttgatcattcaaagtataaataattttcattctttctacagtctatctataccttatattttaaacatgttattcaaccttacaacaaaaaaaaacatgttaatttaaagcttattgttgcatgaaaattactcataaagatatgaaaatttattttaacataggaactgtacaatcacacttcttatccaaaagtagttttgtttataaagttgttttaatatatatatatattctcatctaatgtaccaaataatcaaagtaaaggtaaataagttgataagttgaattttagccaataatttattgaaaaaatttatagtacactttctaaagtatttcggcatactctttctttgttgtttaatagaattttttagtttaaattatttttataatcgtgtacgttgtatttatttacaatcaattataaatttaaaaaaaaattaataattacagtgctaaagttatttattcaaattatttaaaaagaattatagatgataaaaaataactacaataaaaagaaaaaaaaaatgactttgataataatctttgatattctagttcacacctacctctcctaatcagtggaaaattattaataccttaaacatacagtaaggaagaaaaaaaaacagacattgtacctcccttcattttgacttatgtacattctttacatgaaaaatctcatacaaatatatatctaaaacaatacaatttaattcatttattatctaaaaacaataatatctatatgtacaaaatttagggcttaaagagaggataatgtggactatgagtggtcaatgccttgcttgcgtgtacaaaagtaaagaaatttacattttattattgcttttgggagaaaattgttagatttttcttcccacaatcacttctatttcgttttagtttcccactaatataactttacgtctcttcaaatcttaccaaacttagggagaaaattacaaatttaacacaactttgttttttttttttttaatttgtatatattaaaagaaactttttttaaaaaaaaaactttaaaattctgcttttaagattattaaattaattaaatagatattataatgttatcaagatgtttatacaaatatagaaattatttgaacagaagagaaatatgtttaaacagaaaattaacaaagaaaaaaaaatgaacataaaataaagaacacatatgattatacgtgttatcatcttttctttcaaattgctactagtttacggggtcatgcccagaaaattaaatttattagatgaatctcaaatgattacaaaactaaattaacttatacaaattaagactcctttcttgattttttttcaccactgttttaatctatcctcctaattaaatttttaaagtgtcgagatcttaaacttcgtagcacttgcatacttcctcctaaagagtgactcacgaacaagacttctcccgaagcttgatgaacgatatctaatatttgtacaatttcaacaagaaacaatacagtaataaacagtaatagattactaagaacttattggactcaagttcttcacacaataaagaaacactctaaaatttgaaaataatttagaacatgatacaccaagagagataatcaaaaccaacgacctaagggtgtctttatacacttcagaaacccttcaaaccgtggaagaataaacaagatactgccacccattaaatgaaaaatcttcccaaacatgttagtcaaattctattcaaacagacagacaattttttcaaacagatacattgaactttgacagttttttagcaaagtaccttatatataaataaggaaactgtaaagtccttttttggcannnnnnntgacaaaataatttttccatttatggtaagattgttgtgcattcatattcgatttct

SEQ ID NO: 161592 - DNA, 10217 bp, Cannabis sativa
tacttcggagaaataggaaatattgaattttggggaaaactattttatgtgaaaactattttataggaaatatatttatagaatttgtgtagatgtgtacttttcagaaagtatgtttggatttggatagtgtggtaattgagtaataaattgcattattaatgtcccacagtgaagggtaaggttacatagtgttagactttgatttaagttttaagatacgtacgtccaccaaaaaaaaaatatatgtatttaactgcttaataaagaatctatttaataaagtgatcagtttctttctattatttaaccaacactggcatcatcatcttcccaccaagaaaaatcattaataaaagttagtgttattctattacgtggctagctagaaaatacttgtaggatggcttttcaatttgtcttcatcaaaatataaatgttgctgttatcttccattttctctatgctgctttcaattatgtgataaaattaacaatgtgtaaacttattattttgattattgaattcaatcaaaacggggtacgtgaggcacacatacataatacccaccaccaattagtatcaaaacccgttacgagtctttatatcaaaattacttatataataataatgatatgacatgagatgagagtgttaaggtagtgatataaaaataaaattataaaaataaagaaaaagacatttatgtaagggaagttgacctgtggttgccgaacaagcagtggtcccacatgtaattaaggtctcaatactcactacctcattcatttattgactcctaactgacctaacctttcaacatggcaattgataaatcatgaccatccatcacatggccccacctctatccctaacatttttttcggtattatattgttattgatgtaattaagtattgagtctcatataatttaaattaataacttttaaaaaatattactaactaatcgtaggatactacctttagtagtgttacgcaccactgacacccagtaataatacaaaacacaatatcatcacttataattttgtacactaaaagatcattaaattaaatttattttcttatgatactaaaataaatcttaataatctcctaatataaaataacttgattttttgaacaatgaacacactacatttgatgtgagtcataagcttatgtgggtgttaattatgtgtaaagagattatgtttattatgcactctttaatccttttcccacattaatcttcagtttaaaataataactaattaagcttcaatactgtttgtttcaggttcataaagaaaatgggctgggatgagaagctagtaaacgaatcattcccatggattgagaagcaaatagttcacaagcctgttgttgcaccctggcaaaaagcattcagggacagtcttctatcagtgggtgtttcacctttcaatggtttcacctacgatcacatctatggaacaaaagttggtggaaccatttatgacaggttcggtcgccgccacactgctgctgagctcctagctactgggaaccctcagaagctcactgtcttgattcatgccactgtccaaaaagttgtttttgacaccactcaaggtatatatataatatcacttcattccatcttcttataataacattaacatttagtttaaatatagatattgaatgaactaaatattattaccctcttaggtaagagaccaaaagtagtgggagtgatcttcaaagatgaaaatgggaaccaacatgaagcagttctttcggaaaacccggatagtgaagtgatattgtcaagtggagccattgggacacctcaaatgctattgttgagtggtattggtccaagagatgagctcaaaaagatggatattccagtggttcttgataatgggtttgttggaaaaggcatggctgataaccccatgaactcaatctttattcctagtaaaagacctgttcgccagtcattgatacaaaccgttggcataactaagttcggtgtctacatcgaagctagcagtggatttggtcaatcacaggacagtattcattgccatcatggaatcatgtcagctgaggtaaaaataaataaatatataatttaaagcccatttaaattgattaacttacataaataaccacacaaacctcctcatcatgaacctgtttaatcatatatatacttgtacagattggacaactatcaaccattcctccaaagcagagaacaccagaagccattcaagcttacatcaagaacaaaaaagacttgcccctagaggcattcagaggaggattcatcttagaaaagattgctgatcccatgtcaacaggacaaatcactctaaagagcaccaacgtcgatgagaacccttctatcaccttcaactacttcagccatccacgcgaccttcaacgctgtgtccaaggcataagaatggctgtaaaagttgctcagtcagaacactttgctaactacactcaatatgacagtccaacaattgagaaggtgcttaacatgagtgccaaggccaatgtcaacttcgtacctcgacatacaaacgacgccaaatccttggagcagttctgcaaagacactgtgatcaccatttggcattaccatggtggtgctcatgtggacaaggttgttgatgccaaatacaaagtccttggtgttgacaggcttcgtgtcattgatggctccatctttactgaatctccagggactaatcctcaagctactgttatgatgatgggcaggtaatatataagaatcactacatttatgtaactattttggttttttgatgatggggtttttactctttgtgtaatgtgtgtattttcaggtacatgggagtgaagattttgagagagaggctgggaagaagagctggtatataataataatgaggttaatcaaaaagacttattaggtaggaaaggaggatgttgtgagtttgtgtgaggagtgttagatgattttgttggaaaaaaaagaagtctgtgtttaattgatggtattcattttgtttgttgatgtattttcttagcaagcaaaaatatgtaaaaatggagtgaaaacttgcttcgatctggtaattagtccctgagtctgactgagtccatatagtcagtgccagccttgtggccctgggctatgtgttgtttggtagatactattactttttttttctttctttctttctttttcaaggttcttgaatatgagaactgatatttgagagattaatgttcttaatttctagttaggaagtgaagttctacatgggattctataagtttccatgatcttgtttgtaatctttgatctattatttatatctactactttttatgctgcctaattacaaaaatatgaagttttgatttcatttgaaggattaacatagtactatgagtgtttaattagagttgaattttagtacaagggtacaacgtactaaatactaatgcttgatcttgattattattttgaacttgaaattattattttaaacttcagtacagaaattagagtcatattttcttttgcgttgcataaataaaaacaaaagtacttaggcagtgaaaaagggataataagaaagaaaaaaacacgaaaaacgacaaaaaaaataaaaaataggacaacaatgcaattgcaatctcagaaaagaaagacgagaacgcgaagtaagatgacgtcaacgctaagtttgtcaaacccttataaactacaaaacccagaaaatgacaaataggacaagaaaacgacaacattaagagatatgatgacaacattgtattagaataaaaaaaatattgtattagaagaaaacgacaaaataaaataaattagaatttagttgcaaataaccacagaatattaaaccatcaacaaaatttggataatggacagcaaaataaagacaaccgcaaagaacctatatgatacagcctacagaacaagttttctttttattattcatgtcaaatttagtttttgtatatatatatatttggataagataataaattttaaaataaaaaaaaaaatcggaaaaaagtataattcaagtgtagtataattttataaaaacttaccatagttataatctgtaacaaataaaattaagaaaagactttggaaatttggtttcatttcttctctctcttttccttcataattttttttcttattattttgtaaaaatccaatgtccaaaccaagctttatcttccaaacacaaagaaatagagaaaaagaatacaaagaaaaacttgcccatctaaaatctaaaaaggcattattattaggatggattaagggaaggaaaaaagaaacaaatatggatcttacaaggggaaaaaaagcctaaaactttcctctcttatccttaagacaaacactactccaagtacatagttttatttaaaacaagagaatcctattcatactcaatttagaagacattcaagttttctttgttcatataatatatatctcaagtaaaaaaaaaaataggaagagagcagctctatcaactagaacctggccaaagttttaatgagaaaccatgctcactagaacttcctctagacaaacttttcaacctttgccagaactgctttcttctccctattctcaaaggccctgaattactagaatacttccttaaagacccgaattcctccccttgttctactcccactgaggcaccactaaacaactctgaagttgacaatggcactttgttatcaatgtcacgactcgaaacagaaatgaaaaacgaacggtgtgattgtgacactccagcaatctcatgagaaactcttctggccctgctatctgcatggtcagccaaaaaatcattttggctatggcaccttgagctcaacccttttgcttcctcacactcattacaaactagcttcaatgcctggacaacttcacccatgaaagggcggtgactcacttctggctgtacacacattgaagctattgcagccaccttagacacactatcaagtgatatcatttcactctgtatacccgggtctattattgtttctaaaccttctttgctggttagaagtggacgagcccaagctaccaggttttcctggccttgaggttgagacaagtccaccggctttcttccagttaggagctcaagaaggactacaccgtagctgtaaacatcacttttcaccagaagatggccagtcattgcatattccggagctaagtaactgaaacaggaagataggaatagagaaactcagttgagaataagctggtgatcaaagttatagaagagattgtacatatccttacccaaaagtgcccataacatgtgttgagatatgtctgttaccgtctaatgctgctctggccaatccaaagtctgagaccttaggtgtaaagtcatgctctaacaggatgttgctggacttgaaatctcgatgaatcactcgtggattggagtcttcatgtagataagctaagcctcgggctgcccctagagcaatcttcattcgggcatcccaatcaagtggatcactatccttatccacccctgaaaccacagcaaaaacaaaaagggtcatagaattctttttctctcttccaaccacctaaaccctttacaaaataaaacttgttgagtatgtctataccgtgtaaatgagattcaacacttccatttggcacaagttcataaaccaagcagcgagtttggtcctctgtgcatataccaataagtttgaccaagtttctgtggtgcaggcggctaagcatctctacttctgctagaaactcttgaccgccgtgatgattatctcttttgagtaccttcacagccaccttccttccatcatctaaagtgccgttgtaaacaagtccaaacccaccttctccaagtattcttgaagcatcaaagctattagtggctctttccatctcattcaaactgaaaatcttagctgtcccggcataagtcattgtgccagaactaatagataatgactcagaacctctcatgcttcctaaccgtgtagaccctacagcagctcctgttgagttcccatagatacatacatatttaatgttacttttgacttcattatgaaagaaaggcaataatgttaagtgtcttaacatttagattgcctaataaagctctgtacctgtttgtttttcaagggatgaaatcaaagctggctgagcatcttgctgtttatgagtgtgagaaccaaatttcaacagcaaaaaccaaacaactgctaaacacacaacaaaggctgtgaaagatgaaacaatgattactgcaatcatgcttttgcttagaccattatgttttctccttgacacatcaactcctaaaggttttaatatttgctttccgtggttgtcatggccagtgtatggcccatcatctatggcagaaatgctcaaaggtgctgaaggaggagagggtggaagatctgttcagagataagaccattataagaagaaatccataaaggtcaggtctagtttatatggttggttcaatcatcctcaaacaaaagcatattattcttaagctcacttaaatctcagttgaaaactttataaagaagtaaaatttctaaacctgtgtaatgaacatataatacttcataggaaccaaaacgcgattcattaatcaaaacttgtttgcgccagaatttctcatagatagcaaatgcagtagtgtaaccaaatttgactcctttgggtaccaagttaacaaggactacagttttcacaagctgctgactagctgcatcagctcccattatgcgaacttggctatggttaaggttgacactggccgcaatttcctctgccagctctgaaactgaagagaagaatgtgtatatagcaattcctaggcggagtttaacttgaataggcaaaacacacccacaaggtgatccagttggcatatatgtcaatggctctgtgcatgtaacagatgaacaatctacaaataaaagtaaacacatgtcaaagtaaatatagaaaatcttaaaatgttcatttatatatatgaatgaagtagaactggataatgtgtgggatacctgtattaggaggtggaggaggtaatgctagaagaggtggtgatggtgggggagctttaatcttcttaagggatgaacccaatggagatattgtaggaggaaaaatgggcacttgcagaaacaacataatcattattcatatcattagttacaataaatgaagtaatccaaaaaattaaagcaaatcaaggtgaggttcccatactattatagtggctagaggagcttcttggtgactctgaaggtgctggtgcagttgaaggccagattcttgatgaaggaaagtgagatactgatggacctattattattcatttcataatagtattttcctttccataagaaagtaacataaagatgtttcttgaagttgaagaataaagactaatatatggttgaggccttgtggtcaggagattctgaccttgtttggtgtaagtgggatgagttggttttgtaactgaattgttgaattttcttcttttgtgatggtgattattgtatataactgaaggggaagatactggaccatgagcccatttctttgcaggggctctagaagatgacatagaaggtggaatcgcaatacttggagacctcgtagcatcatctggatcggcagctacaacaataaaattagatatatgaacactggtaattgatcattctcagcaacaatattcaaactttgacattttaactgattcattacctttagctggtaaccatttgtggtgaaatgctttctttgaaggcggtgctaccatctttgcatgtcgcttctggccaaagctcagtgaagatgtaggagaagaagcatgatctgttgcaacattaagcaaatatttaagtcttactactcagttcaccaaccaactttaagaataaataaacactgttgcataacttttttggtttttcttcattatggactctgaaaacttccctcattctgaaaggatttacttgtacatttgaaattttcaaacgtgattatggtattatcagagcataaactcagcttgattaaaaatttcagtcagctatagattagagtttactaactaacctggcaccttggaagattgcggacttggactgatatggtggatcagtgatggttctaacacccatcttctcaacgatggtgagtctattgccatataaaaaaagaaaatcacaaatgactatcatgcaatcaaataaactgccctgaatttggactgaaatcatgaactggcaagtccagtctgtgttatagaatagttatcaaacacataatctacactattgtaaagaagaaaataaaaagcaacagtctttccatgtatatagatcataaaagcattaacccagatccttaaatttaatctgaatttaaagctcataattaacatgtgatcatcagttaagtcataaaatatcataaacccaatttaaattacactatttactcatttaaaacacagtaaagaaaacagattaccttcagatccacgaaaatgcaaggcattggctgctaagcatatttccatcagcagaagaattatcttcacctccattttcaaaccaaaggaaagctagagaacagttctcaaaatctttgagacagttcacactccatcatctgaaagagaattagaacagtgaagatgaagtaaaaactggaaccataacaagacccagaagctgaaaatggctcacctttaagaaccaaaccgttcagtgaaaccaccaaaattgattaggtgaaaatataaatattatcaatgtttttgttgtcctattgaaactaagcacataaaacttgaaatggaatagtttgtttgttgtcaaggcaaaggatgattaaagtttcctagcaactgatcaagccaaaaaaaaaaaaaagctgtacagaacactaaaaagacaaagttatgtgagaaacttttctgtaagagagttggtggggttggaggaaaaagagaagaacaagaaagaaaactgatttttttttttttttgaatattattatataataataactatcaataagtgttaataatatcttgtttgaaagtgtgaaacactttagattgaattaagatgagaatgcttgactagtgttgtgttaattgtggtagtggatgatgatatatactttcaaagtatcatatcatgaatctattatgttatttggttttaattaattattttttattttcattgctccttttcggttatgtccaacttccaactatgaccacgggtgaggtaggtaaagatgacccatagtggtccattccaataatctcaactgaaaattaaacaatttcatataacaaaggtttcaagttctaatcccctttgatttttgattgattaaattctggtcttctcttgtctattatagtctaggtaggcgtataagaaccaaaaattttgggtttttttatagaagtataaagcttgagttgatgagcttattataagtgaacattaaatgaaatcttattgattagtgaattatatatggatcatatatgtccaactccccaaagttttgaagtctaagtttggtatccattaatcaattttgaaaccccacgtggccggcgttgcctcttcggtccaagacacatcacaaaataattgtaccactttttttgactcttctactcttttttcctttgttattcatttaacattttgaataaattttagtattttcttgtaaaatgttgtgttaggaaggaaaaaaaaacatatctagttactacatgaatattagttgataattcgtaattataatttattttggtttatacaaacaacatcaaatataaaattaactcataaataaaaattcaatatttataacactgtcattttttttcttatttcgtcagtacatattttatttcaaatttaaaacattaaatacttatactattatttattaatttattgattaggtagaaaactaaagttcaaactatttataaatagggcattttataattttgtatacattattttaattaattataaaatatgtgcaaaaaaacttattatcattttctcatacacttttatatat

SEQ ID NO: 161593 - DNA, 2042 bp, Cannabis sativa
cccccccaaatatttgccaacactggatctgtgaggcctaacaaactaccttcaacggtatcagagggtaactgagtagattgcaagactgaggatgacatgcgctcatcactagtatgtgaaacatcagcacgacgaaggggagcccaaacaccacggtcaggtctgtctttatttctggtacgtttctcttgcttttcactaacattacccccattatgctggcctttcttcataaacttgtcttctaaatccttttttctgtctccttcagacttcaatgaattcagttcatggtgagaaacctgaccgttcagccctctcatattccgtggaagtcgtttcacattttcaatgttcaaattttcaattttctgctgaggctgtcctgcagttgaactttgaccttgacgagattcattgtttaaaagaatgcttctgatcaacctaccactagcctcacgcctttgattctgctttggagaacctgaaacagaagaatttcctagagatgtctcctgctgctgctgcaacaaggcaagcccaaaaagccagcataacaatttcattataatccatagtgacattttgataggataagaacacaaaataaagagaaaagaataaacatccttgaataaaattttatcaaagtttcaaacaagaaagcgcagaatgaactgtaaattacgtagaataactgaacctgggaaaaaataacttacagttgtttcaggcctttttcctttaagaagcaagattttcttcttcccagaatcagcaatcacaggaatgccagaaaaagaaccttcaattgcagaaactacatttgaatgtgaaaataatcaaaatggccaatcaaagtggacaccacaatttgaagaacaaaacataccagattcaatttcagatatttctttcccaattgaagtcgtaagttgatcctctcgtctaggcaccacagtgaaatttgacttatcctttcgactggtatttcttgttttgtcctttaatatatactgtcaatcgaaagaaaaattgaacaaatctcatattactcgtgtaacagaattcagcaccacacatgcagtaaactaaaggcattggtaaatatttgcagaggcatataaaacaagctacaggtcaaacctagttttactcccagaaagaagaaaaacaaaaacagctcttcaatggattttcagcttaatcatcaatttatcaaagaaaaaaggaaaacttatgtaagcatcacttagttttaacagttaagagcatgtaacaatctgcattgagattaaaatagtacctctcacccgatgagatgattactaccttaaagtatcaatttaaaaaataaatatggttcaatttctggtggaactaatccaacacaccaatacaaacaatcctcaacctttaactgcaaaaagaaaccaagagatttctgtgagataaaattagacggaacctttttcttctccgaaacttttttcgtagatgagctgggctgccgctttcgtgaagatccggccccagatcttctgctaactttcccaacaactactgaaccctattatcaaacacaaaatttgaccattagacacgcacacaccacatgcacacacgcacaaaaaaaaaactaatcactaaaatcaggagaaagcaacactttctgtccttcatgaatcaagtttgaaaatatacaggttataggcaatatttaataatcaaagcattaaaagaagatgatgtaacttgtaccagggcaatcatattctttatttcctcctaattggtatttcatatcagagatttcagtgaggatgtatagatgaatacaatgaaatgagaaattccaaattccaagtaacgtctgttcagctaataagcttctctattgtaaaataagataacataaatttcaagaaaacactgatactgttaggactaaggtacgttttacctatgctaggagaggtaagaatgctattgctcaagggtagtgtggtcttttactttatgagggtattattgtaatt

SEQ ID NO: 161594 - DNA, 5989 bp, Cannabis sativa
aattatagcaatgtagtttaaattaagacagaaaattagatgagttgtgtttcagtgactgaactcgttaatgttaatgttaaatgtttttaccagaaagggcataagtggaaacttcggcttcggctcaaacagaccagaacccaaaaagacgaagaagaagaagaacaaaccaagaattttattacaccaaaacaaaaatattattattattaattataaataaaaactccaaaacctacgaaagccatagccatggaatcttcttcggagaaagacccaatggagtctgttctgtcttcgtcttcgttcgagaaagatcgccacgtcaagttcttgcagatgatgtatcaggttcttccgtacaactaccaaacccatgagatcaaccgactcactctcgcttactttgtcatctccggccttgacctcctcgcttcactccattccgtacgcataagacctctctttgttcttttcttttcctttcattctttctttctcgaataaatgtctagaaagttttgatttttagttttattttatctgtatagagaaagtgagagagaagcaaagattggatctttgacggtttctcatcttctattacttgtgaatcagaaaatgaaatgggtatcattttggcaaattgaaggatctgcatttgatatattttggattcaagattcattttttcttttttttggtcagtagtacataggatggttaaaattttagactagttagtggttgctcttctatttttgtataaattggttaaaattttgattttgattttttgttgtcaatgatgatttataagatcgacaaggacgcagttgctgaatgggtattgtcgtttcaagcacacccaagtgatgaagctcaattaaacaatggtattcctatggtttatttagtgacattattgctaggacgaatgatctgtctttgaatccagtttttcattcccttttcacaccttcattatttgatctttgatgagttaagctttcataacttggaaaatgagaaggagaaatatttaacttgctcgttggtttgttacaggacaattttatggcttcagtggttcaagaacatctcagtttcctccagatgataatggggtatgttaaactcgcaatgcactagtctataacttgtttatgttaaggcataacctgtttcgttgtcgtctttcgtggacataacttgtgtaattcatttccttgcaggttttggttcataatggtagtcatttggcaagtacttattgtgctttagcaattctaaaaataattggctataacttctccaaaattgattctgtaacaatattgacatccatgaaaaaccttcaacagcctgatgggaggtatttttaattctattttttgttctttttttttaattatctttcaaaatttgctggtgaaacttttcttgaaatgccaaatgttgttatgttacaaaagcacgaaaacaggctgattcgctccctctttctagattgtttatagcaatttggtttctcttattatagctgtgtttcctgatacaacctcatacaaggtactttccttctatttattgtcattttttttttctgtttgccagttttatgcccatccacactggggcagagagagatctaagattcatttattgtgctggtaagagaaaaataacgtttttatcattaagttgcaaattcatacaatggaatgtagtttgaatatggtttttcatttttttagctgccatttgttctttgttgaaaaattggagcggcatggacaaggagaaagccaaagagtacatattaagttgtcaggtttgttatttatgagatgagactggtttcttgtggttatgtgagttcctttttgttattgcaatgtgaagacttgatatccggtataatagatacttatgtgcagtgaaacatttatttcagtcatatgatggaggctttggtttgatccctggttcagaatctcatggtgagttgaaacagtgtactttcttgaagcattttttccatgtttctcagggccagtagttttctagtcttttagtatagttattttagaatttttgaagctgagtgtagttccaataatattatccaacagtgtttattttagtggcacaggtggtgcaacttattgcgctgtagcatctctccagttgatgggcttcattgaagatgacattatctctaaaaattggtcatcctgcataattaatgtaccattactcctggattggagcttgcaggtttgttttcttcatggccaaaacgtcaaggtttcacaattttgataacaaagcaagtgaaaacggttgagacatgatgacacagttaacataatgtttttcttatttaaattaatgaatgaaaataacacttgtattgctgcagaggcaggcaagtgatggtggatttcaaggccgggccaacaaggatagtgatacctgttatgcattttggtaggtgaaaggacatctttggaaggattttgcaaaagctttgaattattttgcttttgacgagcggtttattatgcttgtgtaggatcggagcagtacttcgaattttagggggccacaaattcattgaacaaaaatccttgcgtggatttttgctaacttgtcagtctgaggtatgtggttctcctttcctactactagcttattgaatttcagatcatatatcttctgtaaaatggctgatgtaatatgttctctgatttatatctatatattttatgtatggaccaccacaagtttttattggtgtatgagtgtgtaatacaaataattgagagggtagataggaaatcttgcatttgacatgagtgggagaaagaacctgatatgattgctgtaataatgtagactgatatttttttccattttttctctgttaattggtctctagttttaatgtgaggtttactgtgaatgtccttatttttaatgctcatatttgtctttgttagtatggtggtttcagcaagttcccgggaatgctaccggatctttaccattcctactacggatttacagtatttagtcttttggaagagtccggtctaaacccgctttgtgttgagctgggaatttcagatattgctacttcagaaatctgacattgtccttctgattcttccttggagcatgcttatgtgcataatcatcccgggataaagccagcttgtttatcaacctatataagtgtgtttcacatttttaggtttaagggatgcataagtttttcttttaccggtttacgatctttaaaacattcttttacctaaagaaaagaaaaagaagtgggaatgtaacttagttttttttaaataaacttatttaatgaatttagttataatgctgagctttttctaacatttacaagaaaaataataaatgatcttaagttttgccatttaactcagccagctgcaaatctacttgagaagatgcccagaaaaaaattaatatatatgtcataaacatcatgtgaaaaaggtctttgaaattgtacccgaataggttatacctttactttgtcaccttgttctatttagtagttaaatgtatgcaatggtcaacaatacatgtgccatgtaaccccaaagtatccctggcccactaatacccaattgtatatatgaggttggtcggaattgttgcttttaacacaaaagcttaagcttaaaacaaaagagaacaagggcgtgacactaatgatagcttatgcatgtctcactcattgtgagcacgagaaagggaaaggtgtcatttgggtaaatttatatgttttaagtatatttaaagagagaagacacaactttacaactcatagtgccattaggacaaagaaacatctgcgttctgcagcagtagcagcactattccctcacaggaatgattacaggtattggacagttcagtaagacatgaagattgaataaaacaaattagcctcactactctctccccacccccacttgtgcctctgaccccatctgtgtaacacatcatattgtccccattccattctccaacccattttgaaaacacaacattcattatcacacattttttcaggcttaaacttggaataactgagaactgatgatgatgatgatgatgccctctaggcctctaccaaagcataacaaacccagagccttaaaatggaaaaagaagtctaataaaaatgaaacctaaaaagaaaaaaaaaaatcaaaaatcaaattgggataagataatctaatgtggatataacgtcttgttaattgttgagctgaatgttgaaggtgaagaagcaaggggaagcacctgagaagatgagcttgaatggtgaatgacctcccttggtatgctcttgtcaacagtgatttctataaaagactcatcttgatcatcatcatcatcatcatcttctttaaggaagcttgaaatggtactacctttgtgccatctatcaccattattaggcccttcagtgttctgatcacctttatcatcagtctcctcttcttccattaatctcttctcgagtttcttctctgcttcctgtaagaacttgaacttgggaggaggtgaagaccttaatctgttgaactcagcatctgttgttgactcaaagtggaagttgaagccattttggctataagagccaccgggagtaagaggaggagtgacaaatgggggtgaagctaaaggggtcaaatatggagtctcaactgtgacaatcaaatcacttaagcttctatttcttgacccttttcggctcttattagatctcccatcatcagattctaagtcttctttggtctcttctatgattgtgaagagaaatcttggatggcctgaagggttttgcagcctcataaactcaccttccattccttcctctccaaagggtttaaatagaaaatcattgtttgagttcatatgaagctgagaatttgattctgggataaggttattggttgaaattcttgttgaagagcagagttgttgagggttaagagctgagtggccaaaagctgagtgttttctccagcaaaacatgtagaaaagctcttttgctgggctactactgtaatcattttccatctctctatttgtgaatctcttcttccaccagaacaagtagtaaagctcagccattagagctaagaaaaggcaactaaacactacacttaaacctattcctacactactcaaagacttcatcttttgcctaaaaataacattagaaaactaaatataaactggttttaacttaaaagaagaaccaacataaaataagcaagagattctatagtttcgaacttcaaatcaaacaaaagaaacaaaaaatagaatatgctttacttttacactactagttgctcaataccattaaagcctaattgggctgtaaaagaatcccaagaaagtgaaagaaaagctgatgagagtttctgaatggtaccaatcttctctgaacaaaggacaacccccccatgaacttggtcttgaacttgcacaaaaaaagaaaaaaagaagagaaaaactcacaagcacttatctactttgcaatataaaaaattttacaactttaaatctaaaatataatgtaaccccagttcagatacagcttaaaaaaaaacacccaacaaaaaatatttattattattattattatttttccctgaatatcacattcttcaatcatgaaccatgattatgaaagcttttcactttaaaccaactaacactaaacccatatagttgcagataattacatcatttaacctctaatactaattagtaacaaactaattccccaaaatggtttgagaaaaaagaaaaagtatgttgttgtattaggtgaaaaaaccaaataaaaaaaaaaaaaaaaaaaggaaaaggcaaagcttatagcagggagagagaaaagtcggcaaaagagctgactaggttt

SEQ ID NO: 161595 - DNA, 4664 bp, Cannabis sativa
ttccacttcctctttcaattccacccaccccaactgagtactcctcttgttcggcgtcggctcctctggttggtgttccggtggggaataatagctttagtggtggcgttgtcacagggattcctgtatggtgtgcttctcatgatcaaagaagatttaataactaataataaataggaaaattaatgtactttttagattaggaatatttaagttaatattattatgtacaattgtacatgttcgagtgaataataatggaattatttgaagacaaataattaatcaaatacagaaaacataattagttgggttattcttatattgtatgtcttttatttttttttttttctctttaatcatgtgtactaaattagtacccatataattgagagcattgctagaggcatgaattattggtgtcgtgtctcatttaattagttagcaaaattatatataattattaaattaaataatcagtgctatcatactagattttaggggtgttgatgaagccgtttaaattgcatgcaccgttaaaaaaaatactttttgaaatttgttgcggtgccgatgcggtcgtagtttaaatttttcttaaatcgtgcactacggtgcagtttgttaatatgcggttcaaactgcaccacactacacattataaaaatactaatttttatatttatttaggtgcaatatgtgaatgctcaacccaaagcctacgtactaatgattgtataattgaaacttatattttttttcatatttatttttaagccttacagtatttttgataaactttgcttaagctttattgtatttgtgatagtttaattattggtgataatccaaactgcaaaaccacaccgcactgtaccgcactattttttgcaatgtgattttttagcttcgaggtgcgagtgcggtttgggaaattagaaaaatctcatatgcgagttgatttgaaaaaatagtcaaaaaccgcaccactcacactggaaatacccctaataaattcaaaactcatcaattaagtgtaattaagtgtgatgagttacttactaggaagtcctaaaaactcacatgttaattatgtcatttttttgttagtagaaacagttgaagatgcatattatttgtacattggaaaaataaaaattcattctattcttttgtttagttgtatgttaaagtattggaatattattccaataaaatggtatttctactattttgatggaatgactatttcattttaaaatagaaggaaagaacattcaaatacaagattaattgaagaaaaaaaaattaataatttttttattaattttttttatatatattttaaattttattctatttcattcttatttcaatttttattcttattgttgttcttatactagatgtcacattaattttaaaatatttttttttgggcaaattaatccttgaatttgtaaattttggcacgatacaagaaaattggaaaatgagaacggatctattaccggtggaacaaatccgcctactattacgtgtcgacatacttagcagcaatatgagatatatgaacatttatagcagcaatatgagacttgagcattattcattaatgataataaaaataaaagagaacgaaatgatatatattgaaaatgtggtagcaattattttatatttagtggaatcagaatagatgcaagtagactgtcttttattatgttgtggatgatagttcatgtagtttgtttttttttttcctttaataaaaaaaatggaattgaaaaactggtaaagcttacaaaattgttgaagtttgacttcaaaattaatcacgggcgccgccaacggcattaattgactttggtaataacaaaatatataaaagagagttatctaattagaatttagaacgagctagcgtggatcagatttgtcatgcatattgcacgtgaactataatttaatcctgccgtccaaaacgtgtaatttgtttttgcgaaagtagctaggaaaaataattattaatattattttattttaaacgtttgattatgttgaaacaaaaattatttttatctcaaaacaaacaacaaaaaaaaggaaaaattattttgttttataaattgagaaagtaggatattgaattaataaaaaaaaaaaacgattgaataacttatttggaaataagtaattagaagtggtcattaaataagtttccttctcccaaaaagaaaaaagaataaaatagaaatatgtaattaaatttcatcttattatatattattaaaaatttcaaatatactataagataatacttaaatagagtcaccaaaaatatttgtacatacaattttgtttttattatctgtcactctattattttataccaataattaattaatttttttgatattatttttattttattttattttttgaataatttcatcaccataataaaaaaaagttaatgtattcaacattgtcctttagccttatttactaaaaaatcttcatatgaaatatcttacacgtggtaaactttattttttaagaaacacttttacaatatttttgtttaatgtatagtgaaacttggacattgaacttgagaaattaatggtcgtcaaagatcatcctttgatatattacaatagagacaaaaaaagtttatcgacttagcctaaataattattaattttttaaagtctaaaattactctattgggaggttattgtgctctaattggctagatgtgattatactatcaacttttacatttataagatagtgattgtcaatttgttttcttttaaaaaatttgctctttttgctcttctttatattttcttaagtttcagtacaagttgactgacttgtattacaaaataactagtaataagttaccaaatcaatgtgatatgggtgtgttattttctctctttttcatatgtagatgataaaaaaagatgagatataaaaaattattagaatttcttaattgcatcgatgaacaaaatatatatatgttaatacaatataatcaaccttcaagtgaataatatttatcgaaaactatgctaacatagtcatacgaactatggtaaaaaaattagtgttatttgattaattaattgtgtaatcaaatgtatttaaaaccttaattttgtatgttcaatgtgttcttcaatcattaaacttactgggaatgtatattgggatgatgtaatatggcaggatggactttgaggataaaattaagaaccaagttaacgtcgatagtaatgatgaaagtgacagttctactacaaaagtagaggaaggtaaatgtgtcactctcacaaaaaatatggaatggcataagttagtagagaatattggcctatcttcaaatgttgaggaaataaggagggatgttatattagggaaacgttttcaaagttcggatgaagaaaaaacttcattgttagctactcaaaatttatgagatttggtgtatgaaaaatgtagttgaggaagggtgtgaatggtaatttcaataggttactcgaatgggtttgctcaagagaagagaagcgaaattattgacttgtatcacaaaattattcaaaaaataataaaaggaaaatttgcgacaaaagttctcaaaaagtttaatttgatacagatataagttcccaacttcgaaaaatagctctaatatttattttttaaaaattaaaataataatttagactaataatatttctacacgcgacaatttaaaaaagtaaccagtttaattaaaattaggactaacggacaaataaaaaacatgaccttaaggactattaccgctatttttcgaggttggggacttatttgtatcaaactgaactttttgaaaatttttgccgcaaatttcccaaaataaaaataatataaaagtaataaattaaatatttgtataaaacaagagagagacaccttatggaaaaaaaatgtaaacaattaactgatatattctagtaacctagctattttcattcaagaaaaaaaacaagaccaagctattttcaaaatataaccttaattatcttattttatttagtacaatgtatctttttttttttttttggtaaatgtatctatccttttattttatttttatttttttaataagtatatatcctttaattaatcctaattaagctccatttgtcagaattaatggaagtgtaaatcttattagataagattttaaatcaataaatgtttttgttggaactaatgtttagaatttaaaggctcgtttcaatttcaagatagatttcactcattatattattctcaccaaattaaaaataaaattaaaataggagaattgtatatttttatattatgtaagtggagtctttaaaattttaatgaaaaatggtagaattagaaattaaaatgtaaactaacacataattatattaaaataactttttatgtaatgagtgacaacgataatcaattggactttcaattcattgattactcatatcttctactccagcttatgcaaatagataaatataaaaataataatactacaaacaaacagcaccagtggtctagtggtagaatagtaccctgccacggtacagacccgggttcgattcccggctggtgca

SEQ ID NO: 161596 - DNA, 4998 bp, Cannabis sativa
gttgcaaaggcagccgctgccgctgccaacgttgcatcaaatgccgcattgcaagccaaattgatggctgatgaagcttttatttcaaatagctttgaaaatctaagtcaaggtacaagaagctcattttatgatggagtaaatgtattggggaagactacccctgcctctattttgaggggggaagatggtgcaaacagttctagttcaataattacagttgctagggaaacagctaggagaaaggttgaagctgcctcagctgcttcaaagcgagctgaaaacatggatgcaattgttagggctgctgagcttgctgcagaagctatatcccaagcagggaaaattgttgccatgggtgatcccgtgcctttgagggagctgatagaagctggtccagagggttactggagggcacctcaagcttcttctgagttggttgcaaaatcagttgacatggatagagaacagtcaaacttaggagctggagaaggtgcacatacttctgctaagcatttaaaagatggaagagtggataagaaagatagtgaaaagtccgctatttcaagagggatgagcaaggagtcaatagaggagcatttgagattgatcgatggaatctcgggctctgctgcagtaagtgagaaggaaatgaaaggacaaaagggtcgtaaagtttctgatttgaccaaaaacattgttgttgttcttgagtctgatagtttatcaaaattgtcttccgttgaagttgaaaaggcagaagatgtccctggagaaaatggcattaaggaaggctctaaagttgaggtatatgggcaaaaattaatttgaatttttgagtagtaatcaaacttgataaaaatatttgaatattctgaaattatggtcacttgcatgactgttattacttggctgtttaactcaggtatataaagatggtgatggatttaaggcaggctggtatggagctaatgtattgagttttaatgatggtaaagcttgtgtatcatacacagagattgaacaggatgaaggtaaactattcccatgggtgttgttataaatattgtgcctctgtctagtgtgtttgtgtgcagaagtgagattttctttttgttcatctcatttatgacattggcattgtgtagatctgttgtatttgcttgggcatcttgcttttgataactaaagactaccttaccttttataggctcaaatgagttaaaagaatgggtgtctcttgaaggtgtgggcagtgacccacccaaaattcgctttgctcgccctgtcactgcaatgcgatatgaaggcactaggaagagacgcagggcagccatgggggattataattggtctgttggagataaagtcgatgcatggatgacaaataggtatgcttgatatgcacttgttgggtaattaactctatcaatataataaccaaatcatgaaaaagaaacttagagtatactttgattatgcttaattttccactcaagttgggttgctcagacagtcttgtggtttgttctcacaagaactgaagtttgagtcatattatgctcatccattgcaattgctttagttttctgatctccaaatattgtagggttaggcagaacacttatgcatattttcctagattttgtcaactaaaacatgtttcaattgaaatctggaagctgttctgtttaactgaattggatttggcagttcaaagaattcctatttattgtaataaatattaataaaagtagatgactttaattataacccgtaccgtaataagtgcttctgtgcttatttcatttctagagtggctgtaaacgtgaaatgcattgatgaaggagattggagtagtgattacctccaaaagacattgctatacagtatttccctatttcttgaaatattcatttggtgggaggcacaataatataagttttagtatttcactattttctttaaatattcatttggtgggaggcacaataataataacattttattattatttaaaacttaaaaggtttatgatcttaattttcacaaatgtttttatttaagtacaacttttgtggagctgtagaaacaagatcatttgcgattttctgtgtaccaacattgcaagacatgaaccttgtatctgtaggtgtaaagttgaaaatcaacatgcattaataaactcatttgtatcaaaactctggacttatttgccagacaatcagtctggatcacgtttttattttctattggtctcaacgatttgctttcacttttctctatgcatattcctgctctcatgatttagtaatttgattcttcagctggtgggaaggagtagtgacggaaaggaataaaaaagatgaaacatcggtaacagtccattttcctggtatgttaatgtgtgattttccttttcaaaatttcctctttgttgggacctaatgcttcctgctctagttttgttgattcttgatgactctcggatttttacttttgcagctcatggtgaaacttcagttgtgaaagcatggcaccttcgtccttctctcatttggaaggatggagaatgggttgagtgctcaaacttgcaaactgatccctcttcactcgaagtattacttcctcatttcgtcttttctgtttttcggttactagtgtggagacacttttcattttgcttttaatttcgttgttcagggtgatcttccacaggagaagcgactaaagatagggagtccctctatggaagccaaaggcaaggataaggtgtcaaaaagtatggacatcttagattcagggaaacctcaatcacaattactagatttatctgcaaatgataaagtatttaagatgggtaagaatgctagaaatgtgagcaagcctgactcatccagagtagctcgaactggtttgcagaaagagggatcaagagtaatttttggtgttcctaagcctggaaagaagagaaagtttatggaagttagcaagcattatgtggcagatcggagcaataagaatagtgaggctaatgaatctattaaatatcaaaaatacatggctcctcaagggtcaggatcacggacagtgaaaagtgatcctaaggaaaaacgaatggctgactcgaagcttaaaggtcttaagtctggtaagcagcaaagtgtgtcaggtagaaccattccacagcggaactttacaacaaatgcagtttctgtatctggtgaggttgagggtaccactggagaacttgcagcaagagacaaggaagtttctttaagcaatgttgataatatgtccagaaagcaaagcgtgatggaaactggatctttctctacctctgatagagctgcagaaggttcatttgcattttcttctgatgccccaacattagatggtccatctaagaaaaattctgtgtcaacatctagagtggagagagcaaataaaggaaatcttgcacctggtagtggaaaattgggtaaaattgatgaggataaagcttttagtggaaactctttcaaatcgacctctgaagccattgagccacggagatctaatcgaagaattcagccaacatctagagtaagtgtctactttgtttgatctctttcaaatgaaactgagtgcccatctaatgtgtcgatttatgttcctactatttttacgggaattcaattatttttcactggtcggttgcaatattatccatcatatcctttccttctcttctttttatattatgctctgatgccttttgtgtttctagcctgattcctttgttttgtttgctgacacagctattagaaggattgcaaagttcactggtgttaccaaagttctcttctatgtcgcatgacaaaggtcccagagctcaaaacagaaatacccctagaggttaaactttatttcccattaagatattatatctaatagaatagaatataataatagaacttgactgagtgcttggttgtggcagggaacaatcatggttaagagctctttcgtgtgaggcgtcccagtcccagtcccagtcccagtaccaaagaaagaacctagcatagtttatgtgtatatcgatattagggaacaaaactaggaaaagaatctctcatgcttcctttgttttagtcggctcataacaatttagtgagtagatgtttatattgattttagttttaaattatgattttcctaggtcttaccccattagcttgtatatgggaactccatgtagttggcttgtgattggagggtgaatttcagatgattaatcacaaactgttgctcatacatctctatctctctctctctcttcaccttcatttatttacataatgttttggtttgaaaataattgatatttctcgatggatattcctctaggttttccattcaagttttcttgaatttttgaggagtctaaatattccccatggaattttttcattcatttgtaaggtatgaaatcatcatattcatattgattggatgctcggccttagatagttaaaagtaaaggatatcaatcaatgactagacatttcaaattcttggcctgagattgtgctatgcattacacgacctttgattaatctgaataattattaattaatagggtaaatactattggattggattttgtctttttaaatgataaaatagactattttttaaaatggtacaaaatagaaaaatatattatgatttttttgttaaaatattcaatttaaaagtgttaatatggtgggttattttttctgtatttgttcgtactaaaaattattaataattaattatataataataaaaattgttcacaattgagctacataaggattaatcagaaaattttataacataacgattttaaaatgatattaactctaattaaaatattatattatggttaattagtaattttttttcccgaactttgacatataccaaatcatgttccctaaatttttttagccgttaaaaattctccctgaa

SEQ ID NO: 161597 - DNA, 5690 bp, Cannabis sativa
aaaaaaaaaaaaggaaaaaacaaatatattgtagaggaaagaaagaagtcagttttcttattttgattccattttccaatacacgtttctttcccttcctttagctaaaacaccagacacgaaaatggtggacttacagagcaacgtttcacctccaccctcaaactcactgctccttcaccactctctacaatgcctgtcccggcgagatttcttgggctgccgcaactacgccctcaaagcccaagagtccgacccaaacatcagagccgacgctagccaagtccttgccgtcgctgatgttctccacgcgtcggagcgtcgcctcaagaacaaccgtctcgactactactccatactccaaatcagtcgtaccgtgtctaatgatcgcagactcatttgggatcagttttcgaagctcgtgtctctcgtgaaccccaagaataacaagttcgcattttctacgcaggcctacggtcttcttctcgaagcctggaggttgttatcggaccctaagaagaaggcccagtacgacattgagataggggacttgccggaagtagcagaagaagttggagtttcggaccatggaaatgggtctggagagaatagtgagactttctggactgtgtgtcctttttgttactgcatgttcgagtacgagaaggtgtacgaaggttgctgcctcaggtgtcagaattgcaagagagggtttcatggggtggcgatcagccctccgtcgccggagataatggttccgggtgagagtcgatactatttctgttatggggttttctcagtaaagtattcggaggaagaaaacaatgctaacgtaaacgacgtcaagaaaagaaagtgtggtttggatgatcatggggtggtggacatttctgatgatgaaggtttggcttctttaaatgatgattctagtcacagtggaaacaacggaaagagtaacgattcttccgtggattcaaaaaatggtgatgaccaagatttcgttgatgacttttgggaagaggttttggaaactgagaatttgggtaagcatgaaagtgagattgggacaacagaggtgggtgttggtcaaaacttgccgaagaggatagtcaaagctcgggcaaggaggaggaagaatattaaatctgttgccttgaaatcgaataagatggcagggaatccgataaagagagctcaaactaccgagttggtgggtgatgatggtgacattgctatgggagtggcaggttcagatgtcaatgtagataaggggaaagggattgtaaatggagaagatgaaaatgaggttaatgcatggcatgaagatgctcattctggggtagtgtttactgaagtagaagatgatgtttttgatggcttgttatgtgactggtgagaaaggttgtgtggtaagtttctttttttgattggaaaagaatgtgattaatttctctgattttttggtctgtgaatatggttcttccattatatgatgatagactcatagccagagaatttagaatagatattgtcttgatgattgcatttacatgatgctttacttactgctaagtggaacaatagtcattgtatagtgttgctattcttatggatgaaccaatttcattctgtacagctcaatgggaaaattggaattgacctgtagtttgttcttccatttgcatctttatttatatatggttactgcatgactagaaatatacataacgtttggggaatggaatgtgactaatgtgccctggagtaatcatgaacaattgagcctttatttgtgattgtatgagcaaagaagtcatcattttaagcattttatcatatgtaatgctgtacatattaaattcaattaggtcattaacatggaatgaaatctcctcttcccaaattacatgtttccactctgtcccaccaccaagttgagacatgtggttatgtttcttttgcatcagcatggattgttttcaatttttatagtaatttgtggcttcttcacatgctttctcttctgaatatgatcccatatataaaatgtaattgtgaatttagtcagtactaatattagatgatagatacaatacaagttacaacaacaacatgatacatggagctaagaagtaaacatcatttgctgattgagttattcttcttcacctgaagttttagatggccagtaagatctcacctgctaactcaacacatcaagagaattgaaatcccacttgaggcctttatatattattgctctagaaaaagtaaaacctatataagagtatgattttccccagcttatccactttgtaagtttatctatcttgacagcaatccaaatttgcatttgaacttttaaaattgactatgcttgctatagatgcttgctatagctttcatgcttccactgattattagcagattagtcaaggcatgccaaattttatagcttagtttgttcagattgattatgtagtattttatttttgaataaaatgttatactttactaattcaaaagatcaatcagacaaggagattataatttagggggagcagaactcactccattgacacaatctggaagaaaataagatgacattgctatttacagtccttaatagtcaagacaaaaggagaagccacactactacttatggcatgaattagttgttgacaatctgattcaattatgacactgtcccatgcctatctcttgcatcagcttaaagcctccttaaaaccagctgcctcagctacaattggtgtcacctttccaaagtagcagccctgttttgctcttaagaaactgcattatgatccctcccaacacccatacccaagtctattctccttatcaaagactactccatctacattaaccttgaccagattaaacggtggctttgtccaattctcttttccataactcagatcactcaagaccgatgatgacacaagctcatgcgattgagactcaactaaatcagttcgtttcgagcccaccagactgcccaacaaatcataactgatgctgcaatatgttgtttgctgttgtcgttccttagcaatgtatccattcagtgagcaatgctccataactattttctttttaactttttggaggtatcttaaggttccaaattttcttccaaaatcctgagtttgcatctgtatttgcccgcccctttcaaatcctgcagataccctcactccttgaccaaccaagaggaattctcattggcattaattatgtagtatttgatatctgtgcatatttagtaaaaagagaaataaaagtgctacatatctgtatcgatgacaatttagttggttgctttcatgttatataacagatacaaatgttagtctttacacttattaagtcctacttaatatttatttttatttttttgctggaataagtcctacttatttagatagacacatagtatataataggtttttttttcccctttcttctctaaaggactactatcaaatctataatgtttttcggtcactttgttgtcctgtatcatcctgcaattaatgatatactaaaaaaagcttaataattcaaaagatccattacaagattttcaacatataaagaatatccaagctttttttttttcaacatttaagatcattaggatcctataatttaagggagaaaaatcagcccaaataaatacattatggcaatcaataatcatgaagagagtacaatatgatcttactataatctttctcatttaaacacagatataccacactatatatatatatccttgactaccacaatcatatgacaaggactcgaaatgcataaatattttcttctcttctaaaaaaaaaaaagaaagcttccccatatatataaaaccccctgatatttgttttccccatttatatacacataaaccgatatatcagattattacattaccaattaattaatctttggtattagtatacattttctttcattaaaatgcaaatggttcaagctggtgggcgtaacacatcaaggagttattcaaagcaaattgttgccttcaaacacagcgaggccgaaagaattagaagaatgcgtatcaatagtcaatacgccactcttcgtactattctcccaaatttgatcaaagtaagattttcttatatattttaacataaaaagaaaatccatttatacatacataattgtttgtagtattatcacatctaatttcaaagtcttacatttatataagatggacaaggcttcggtcctggcagaaacgataaagcgagtgagggagctgaagaaggcagtggaggaagtggattctgtttgtggtggcaccgccgtcccgagcggggacgatagcctgagcttggaatactctggaggattaaaagaagaagaaaaagatggtcaagtgtttataaaggtgacattgagtgttgaggacaggccagggctgatgttggagttgataaatgctataagatcggctaagggtagtggggaagttggattaataagggtggtcaaggctgagatggtcacagttggtggcaggaccaagaccctgctgtggctgcaaccaatgcctccgctgcctagctcaggtagcggtggcggcgatggtgatggtgatggtgaaggagtgttggtgttgcttaggaggagtttgaggttagttcttgccaaaaaagttgaagtgaaaaattaatatggaaaaggctaaacttagtattagacatgtatgtatgtatgtatgttggtttcttattttattgttagttaactaaattatgtgttttatttatttattgtttggacaactcgaagatactacttccttatttatattagtttagtatacataggatgaaattaattggacgtacatctacacttattttagtttcaaataaaagtaatatataatataattaacccatgatcgtgtcaatggtacttacacagtaaattaaaaagtgtaatgtaagcacagcagggtgacatttttgtgtattaatttagtactgaattatataaataaatatgttatatatgtatataaatcaatggaatttctacttagatttttgtatttgaattttattttcgctacttaagacttttacccgaaattgtgtcttcttaattttttaacctgttaaaaaaattcactctaaattattcttaaaatatatctttatttaaattttatttcatatggacaataaaatgttgatatgattgatttgtcattgtcatatcaacatcaatgttacatgtggaatttaaaatttaaaatgatgtatctttataaataattaataaattagaataaaataaaataaattttcttattaatggctaatttcaaaaaatcaaaaaatattttttttaattttaaattaattttaatttaacttatatatgttaggggtgagaaaacgtgtcattgtgtcgtgttcgtgtcatattttatgtgacccgctttttatttcgtgtcaagcgtgtcgacccgttttttgactcgtgtctaattatctcaatcctaacccgacccgtaaaaaatcgtgtcgtgttcgtatcgacccactgtgacatgttttactattattgaagctagaattatagaaaaaaataatagatttaagctccattagaaaacttatatacat

SEQ ID NO: 161598 - DNA, 1686 bp, Cannabis sativa
  modified_base (1537)..(1541): a, c, t, g, unknown or other
caacattttattaattaaatttgtcaaaagagaaaagagtaatagtgataattatgactcatgtggacctatatatatgcatgtcatatttatcatttattgttatattatttgtaagaaataatataatatattagattgatcgatcctcatgcatattttcgtagtaaataatatatagtaaccatatcaatgggcataattcccactccgcacccttataaatatacacacaaaaaagtccatcctcaatcctcatgcatggcataatatattatattgttcaagaaaagtaaagtaagagaatttccaaaaatgaaaaagaaaaaaaaaatgatgatgaagaagaagaaaacagtaaattttgaattaaaaaaaaaaatacataacattttaaattaaatattcccatgaatatggatgtggagctcatgcaacctattttttattttcttttcataatagtcaaaaacaaaaataaacacaccaaaataaacttaataaaactatcaacatcgcgtcaaagcttgttgttcaaccctgtgtgactgcacaaaaaaaaaaaagcaagttagacagatagaaacaaagaagaaaaaaaaagtatgtaaaccttgagttttcgaggttagaatctcaaatctaccgtcagagtggttggatcgagatatcaaatgagtaaaaaatagtagagccttcatcgtttgtctcgatctatcgactcattcgtggctcgagctttggaggttgaaataaaaaaaataaaaaaaaaaatagtagaccatttcaaaggttgagctacttgagcgtggagaagaaaaaaattcatagaaggaaggttgcaccgccgcttagagagagatagttgggagggaatgagatgtgtaatgaaatcctaaaaccaaatgttctttttatgtgtgtaaaggcccaaaacattgaaaggcccgcatatggtgaaactttttatcctgatttttacattaaaaccgggataaaaagtctcactaatgtttcgtttggtaaatgcacaaaatagcccctttcaacaccgttttttatctatttgccaatcaaggctcttgctccaaattcttttaaggcttcaaatgtaaatgtgggatcaaaagtttttatcccacttttatttaaagtgtaaaaaaaagttccttttattgtagtgcgaggcacaattatgcgtcagcaaaaggtctaaaatgagttggggggagttttgtagcgtaaggaaatgtttggggggaaaactaatatgtgccgacaaaagtctattgttaggctatttttagcctatgttttgggtcactttttatagttgttttctttttttattattctttttggaatggaattatgtttttttttctttggtttcaggtttcacacttggaatatatgaattgatcaaatttcgaaaaacaacaatctataaaatagagaaaattctgcaagaaaataaacctgaaacttcaagcttaaatttgactattttctgatcagattttggaaaaagtcaaannnnnaaagttttagatttctttttcttctttccaactcatgttgaatcaactcatttgaagttcgtatgtgaaagttatgcacattttctaaaagatgctgaagctgtcaaattttgcttcagtagtcgcgactaggagccaaacagcg

SEQ ID NO: 161599 - DNA, 11411 bp, Cannabis sativa
aaaaccgcaggtcgtgaagccatcgctagagaaaatccagtcgtcaaagcagcgaagatcgttagggtttgatttatcgatccatacgtagaaaaaaagataaaattatcatcatcagaaattctctaaacaaattccgagaaagaagaaaacacatcaacaacaacaacatcaacaaaaatctataatgatcgatcgatgaatatttacaggggatcaatctcgtgattgaattcccccgatctccttctcggagattgattatagagtcttcttcttctaaggagttttttaagtgagagaaacatagaaaaaaaaaaagaaagaaagagagagagagtaaaagattgttatcgaagatcacaaattctctctgataattatcttttttttttaatttttattttaaaatttaaatttgtttgtgttgtttgtctctctttcttttcatttcatttcttttttttttttctttgctttgatttgaaatgaaatctttattttccatttccatgggtgtttgctcaaagcttccttcttcttcatcttcttcctcaatatctcgcgagataataaaaaagcgtgaaaatatcgcgagatgagggaataatacgtaagcatgtgtgagattttaaataaataaatataaaagctgtaaagtgaatttgaagggaacatttgcgtatggtaattagttgatgtttacggaaaataaataaataaataaagaagtggacatctcaatatttatgatttgattaaaatcaacggttgtgattaaaaagagagttgtgggacccacttcacaagttgtgtgtttgggtagggaccactatatgggttgtttcactttgattgaggagtgtgacctttgatagcatgaaaaggtgtcagagatagtaaaattaattaaattttattaattattatttttttaaaaaaatatacctaaattttagctataccaatcattgttttgattatgagttaattaaatattaattttaatttgataaattataatttaatctatgtgagatgagttattataatatttacgaccaataataagtgaaattatgagttatttatagattaattgtgtttaggaccaatttagaaaaatgaattataaataataatctatttgtcattgtgttgctatgagtctattaaatgatataattttaagaattaggttctaaatttcacactaatttgattaatattattttggaaaaagttattttgagtctataaccttccaatgtatataatttactaaattttgatatttattaaattataatctctaaatttttataattgttatttattttttttttaactattgagattgttagattttaaggacttttctctaattttattcaattaaactaattcggtcggtgattgttcatgtattaaattatatttctcaaattttgatctataccaaatcattctttttaaattttgacatgtatcaaatcatgcccttaaattttaattcatgttaaatatttcttactaaaattagataaaaattattaaatccaacaatctcaataattcaagaaattttttaacaaaggacatgatttgatacatattaaaatttagggacaaaaatcgtaattagcccataaataataacccatttgtgtttatgttgctatgagtcctctattaaattatataattttatgatttagggtctaaatttcacactagtttaattaatattattttcaaaaagttattttgagtctataaccttccaatgtatattatttaattttgatttttaaaaaatgaaatgttttatgttttaattaattaagttaggcaactattaactaaaaaaataaaataagcctctccctataaaccatattattttactcaaccacaaaataatacacaatattaatttcatactattgcttttggatgatgagaggttgtactaattcaattaattagtttaattacataacttggaacctttctttggaatagtctcttcttcccaagttggtccatagtattattactcttcatttaatttcaaattaatatttaaattatttgttgtaaaaacttcttaggtaggctaatgaaaatttaatatcatattaaaaccaactttttaattttttttattcttaatatgttggtgaaatatatacatttcccctaaaaaaagacatcttagtcaataatcttaaggaatcaaaaccattcatgtctccaacaattttttttttttttttttgcttttgaataatactttatatcttttatgtttctatttaaaacccaaaaagtatggaaagtaacccatattttattttttttgtcataattaatcaaataaaaataaaattttattatttatataattaataattaaggccatcttttttgttttgcctctattattaagggaaacataagccaaaaaagataaccctgtttttaagcaattaattaaagtgaaacaaaggtttattatgaatgaaatagttaggaaggaatctaacacttttttatgactaaatactttgtatgaactatttttatttaaacaaatcccataataacaattaagttaaattcttttttttttaattgaagaaaaaacattgtgatctgtaaagaattattatgatataaatttatattaatatataaagaagataatattgagttttaaatacaaagtgaaagattgtgttcctatcaatataatagtttgtttttgtgctacttgttctttatattaatgctttcttagttgtcatatcttcttatctttttcacttttattttatttttatttttcacattcattagaaaataattatagtgtaaaaatttgataaagttgcaagtccaaatacaccaaaccatatacaaaatttttattcatttatatatttaaataagaagcataatttatttatttatatttttaaataaatatatgtgtagatatatatgaattgtgctttttcaacatatgtatggaaaaatatgtcatatgtgatatgacatcttttgaaagtggaaaatttgcctttgattttagtgacaaatataaaaatcaatgtaatggcatttttaattatacaaatagtataagcttagatagctcagccaataataagaaaacaaaactagttttttttatttttttttttcacttctttttttaatatctgattatggtaaaattttaacaacttgtttaagatatattcaatctatatttagctacaaactttattcaatatcataatactttaaaatcatacttattaaaaaccataaacactcttacaataatttattggaaatttatacactacacttaaatacttatataattgttctagtagattctttgtctgtttgtagtgtttaaaaaagttttttagtctatttttttttataattacgtacattatagttatttaagatcgtctgtaaatttttaaaaaatttcaaataattaatagtgtcataaataaggttcaaacattttaattgaaatatttaaatcttatctttcgatattgtaaatcatcaagaattttttaaaaatttataagtagttctaaatagctacaatatatgcgaccataaaaaaaataaactaaatattttttttagatgtcgaaacagataaaaaaaatctatcgaaaaattcctttaaagtggtgctacaaatattcctaataattttttcaatctatacaatttctttaaagtatacaatttctctcatgggaatggagctttgcctttgcgatgacccactcctaataggatgggacagagattatattttattcccgaatgttaaatctggacggagatgggaattacacttcttttattttatatttataataatattttataatttataattttgtttgtattttttaagtatattagtattatttttatgacctttaagtagtattttagataataattaatttattaaaatatgaatgatgtataatattataatttttatgtaatttgatatttttatatatttaaattttattataaacattatttttgtattaaaggattcttcgtcccgtccccgccttcaaattactaacgggaatgggaatgggaccgctaatttcttgctccgtgtgcattcttaattgggagcaatgaaagagtgagagaaatgattatttatttctttatttgaattttagtttttagttagaatgagaatacacgtgtcaaatcattctattgccacgtgtcgagaaaaaccatcgatggcgccaacgaacaaaaatcttcatcactgagattccttccttactcaaaaatcaatggagcttcactgctactatcaccaatggccataccaaaccctaacaatgtcatcttcttcaattccctgcaatgctccaaaattccaccattatcgtcatcatcatcttcttcttcttcctaaccctctgccatttccatccaagggttttagttttacttcaaatcggaagcaaaactaccatcgaaacactctcactcccactcggagaaacccttttatcccaaacgcaggaggaggagctaaaggcgccgcctttgtggtcgatgaacccaaattgggaaattatcaggtcttaaagggttacccggcgccgcttggtgctacgcttcgtgatggtggtgttaattttgctgtctactctggcaatgcggtttctgccactctttgtttgatcagtgtttctgatttggaggaggtaatcgaactttttttcttgttaattatatcttgaaatagtgaatttggattttttgggatttgttaaagaattgatcttttttatgtgatgcagaatagagtgagtgaggagataacacttgatcctatttgtaatcagactggaagtgtttggcatgtttttctcaaaggggattttaaagatatgctttatggttataaatttgatggtgaattttctccacaagatgggcattactttgatccttctcgtattgtattggatccatatgcaaaggttggtgtcaatgccattaataacccattttaagttgttcttggtttttaatagtttatacaaatagtaccaaattttccctttatgcctagctagaagaatgtatatatggttaatgtgaagtttaatggatactcgaattcgatttgatttgattggattggattggattgatttctaggcagtcattcgtagaggagagtttggagctttgggatcagatggaaattgttggccccaaatggcatgcatgataccttctattgatgacaaggtactactttgatttccataaggaacatgttcttcagaagagtgagagtttattgtgaccctggttctcatccttttgaaacatttggaatctaaagtttctttttttgtttcttatgtttgatttcagtttgactgggaaggagatttgcctcttaaatacccacaaaaagatcttattatttatgagatgcatgttagagggtttacgaggcatgaatctagcggaattgaattccccgggacttatatcggtgctgtggagaagcttgatcacttaaaggtatattacatcaacattacagaacaaatatgcaacccttcctaggaaattcaaaaattgatgaaatgatattgagcttcataatataagcagctatcttgctatgttaatcatgttattttcgtatttaatgctgaagatgagaaatatcagtggttagtcttctcaccagtcaccatgacttgaaatgctttctgcttcaaatcatatcaggaaaaccaaatattatcacagaacaatctcatttgtgcaatgattctatccaggaagacaagaaaaggaatgtttgagatgatttttggatgtgctcattagtttcctttattttgtaggaacttgggatcaactgtatagagctaatgccatgccacgagtttaatgagcttgagtaccacagctacaatgccattcagggtgattataagtatggcatttaacttcatatgtatagttttctgtcattgtttgtgagactctgtctgcctatctagttttagtgcgatcatatggcatttcatagcaatatccaaatttcaattagtcaaattataacaatatttgtataagctatgctaatggattttcacattgaattcttagttctggtcaaaagttctattcagccacatacattctgttttgttctcagggtaaacttttgggggtattctactgtcaattacttttcaccaatgatacgatattcatccgtgggcacacgtaattgcggacgtgatgcggtaaatgaacttaagctttttatcaaagaagcacataagcgaggaattgaggtgagagctagtagtataacttcacatttttcctttccttttagatttcatttcacagagctcgatgctcatccatgcttgtaggtgatcatggatgttgtatttaatcacacagctgaaggcaatgaaaatggtcctattttgtcttttagaggtgctgataatagtgcttactacatgattgcacctaaggtaagttacttgtttgtagtttgtgttctttggcactttttctggtaaaatgttgtgaaacaatataatgatttctagaagcaattttaatcatcaagtactgtttaatttttacttcctaagccatgccttccaatatgaattttaaactctgtaaaagtctgtatatatatatttcgtgttcttaaatttctgattttatattcttcagggagagttttacaattactcgggatgtggtaacaccttcaattgcaaccatcctattgtgcgccaatttatagtagactgcttaaggtagatattacagttctctatgtttcaagtaccatatcatagtttctaaagtttattttttgtcacatatgatatcttgaaggtgaccgagagaatcatggtattgtcattgtcaccttagagattttcctttaaaacattgattctgagtattttctgttttatgttcatttacaattccctagtgttgaccaatgagggtgtctgtgttttttctcctgtaacagatattgggtaacagaaatgcatgttgatggttttcggtttgatcttgcttccatcatgaccaggagtagcaggttatttgacctacatttttattcggtgcattgttttttaccgtcactcttcttattcgctttgttttttcttttcttttccgaacagtctttggaatgctgtcaatgtatatggtagtccaattgaaggcgactttctcacaattggcacgcctcttggcagccctcctttgattgacatgataagcaacgatccaatactccatggagtgaaggttctactttgggggtctctgttttatggcccatctcaaaattgaattttttttttttggggggtgttatttttctactaactgatcactaaacaaactttctttccctcttcaaatagcttattgctgaagcatgggataccggtggtttgtaccaagttggcgcctttcctcactggggtatttggtcagaatggaacggaaaggtttgtttattatttaaattattgtatttatcattccaactgagggaagaaaagaaaaggccgcaaccaccaacaccgtctgtaatattgaatttttcggttcattgtttagtttcccattttgttatgatgtgattttcttttttaattttcaattacagtatcgagacacagtgcgacagtttataaagggtacagatggtttttcaggggctctggctgaatgcctttgtggaagcccgaatctctaccaggtaatttcaattaccatgttattgcttcccgagaaacactttactcgtacttttacttcaatgaattaagtttgatagtctctgtcagctagtcttattcgcttttgtggctaatataattcgttctttaaaatcctggagtagaaaggaggaaggaaaccgtggaatagtatcaattttatctgtgcacacgatggttttactttggcggatctggttacatataacaataaacataacttggcaaatggagaagacaacaacgatggagagagtcataataatagctggaactgtggacaggtatatctgaataacacatgaataattcacatattttccttgtcgtcgatatgatcatcacggggaacgttgataagttgggcatgccttaatttagaactctaatgaataaggatgcttgcttcagtaaatagaaagaactgtgtaaacatttatggcagtggaattatatgctctacccaaatattttactatgttatatatatgtatgctttaaattatctgttaatatttatgccaagattttgaatgtcaaatatacataggagggagagtttgtaagcatttctgtgaagaaattaaggaagcgacagatgcggaattttttcctttgcctcatggtttcccaagtaaggttcaaatctacttcgatattctgagtttgtgtcttcgaattccagcaggacttttagatgtctacattttcacaactatagtttgcaagcaaaacataatattcttcgcttttatttttcgcgagcagggtgttccaatgatatacatgggcgatgaatatggtcatacaaaaggcggaaacaacaatacatattgccacgataattatgtgatcctcgaaactcttctgattctctttattctagatcaagttccaattgttaatggtgatttttactaggccgcagatcaattactttcggtgggataagaaggaagagaactcgtccgacttcttcagattttgttgccttgtgaccaaattccgacagtaattaattaaaacctctaaattacaagattgtacttttatatttgctttgtggttaacctttttccgtcttatgttaaatgctatgatcttgcagggaatgcgagtcactcggcttagatgactttccaacagctgagaggctgcagtggcatggccatgctccgggagtgccagactggtccgagacaagtcgttttgtggcctttagtctggtatgttctcttcttaaaacttataatgagattcactctttgaaaatgatctttagttcgtttttttattagctaattaggatttttatcctttaagttttgacatgtaccaaattgtcttctaaactattcagactattaaactattgagattgttggattcaataatttcagtctaattccgttcaattatgttgactgatgccaaatgtggtgattgtccatgtatcaagtcgtgttctttaaatttccatccacgttaggcgcctgttactaatattgaacggtattgaacgaaaatcgttaaatttaatatttcaatagttcagggtgaaatttcaacgacttgaaaagttcggaagtataatttggtacatatcagtagggaaaaattctaattagtcatttctaatttgtcatgaaaaattgcaatttctaaatggaaactaaagccctttaagctcgaaaagtgaaatggatgtaaaatgcattctgaattcaccaaaatgttgtcaaaacttaaattctttggcttcttcggttttagctaacattatcatttttacttgacaacgaacgcagaaagactcggtgaaaagagaaatctatgttgccttcaattccagtcatgtaccagttaccattacactgccagagcggcctggacacagatgggagccattgatcgacactggcaagtctgcaccttatgacatcctctctcccgatctcccaggaagagatgtcgcgttgagacagtatgcacacttcctcgactcgaacatgtaccctatgatgagttattcttccatcgttctattactatcaccggatgaagtcgaaatcatttgaatcaaactccacggcatacatgttcaaatcaatgtgtatatattctttactcagagtttgattatcaagcaaggtaatgtttatcattcaatcaaatcttcaccccatgtataatataatgaatggtcttaataaaaagagtagttaagctagttgttatcgttgttgtggtttgggggtaaaaatcctaattttgaatcgtgtacacatctcgatataactgccattacctcgccaaccatggattcgtacaccaaagcttaccgccttcgcttccttgccaaggaatctcatcgacactcgcaccagttccaatccctactaacacatagtcgattttgtacaatttgctagtgttgaaggaccattttcttcaccaattttccaacatgtctagccaagccaacacactttttggagactgaatataacttcactaagttttggccaaagaataaaaaattcatgaaagaatatagaacaatctaacttgtcttaacagaattatggaacttggattggattggtggaagaaattcaacatccaatgtataattggattatactgcattttaataatccatatatgtataaatatggtgtttctactttcatagttttaattttaatttgtttatataacaaatatattgttatttaagatattttataattttttttaaaaaaaattagaataattcactgtacaaaagatactagtctattttgcacacatgcaaaataaagtactcactggtataataaattatttgatttttttttttaaatttagctaaatagatataaaaaaatataattgtaatttatactatataaataaatgctaaaaacattaatgagtgtatcaatcaatgcacctattttgaagggtctattacaaaattttcttatatattttttaattaattacattttgacaaataatatgttaatgggtaaggatcttcaaatctatttacaattctcaacctaacacatcccacaaaaaaagagtgtctttactcttcacgagaagggagacactaacattacaaaaaagatggtcattttggtaaattctctctctctctttgacaaattttggtaaattctcttatttattttggtataaaatatatgatctttttttcaacattgtaaattatttgaaattttttaaaaatttacaggtgatactatataactataatacgatcataaaaaacaattggactaaatttttttctgaataccgaaacagatagggagtctacgaaaatacccttttaaaagagatgcaccaatgtatccatatctgttttggcatctgaaataattttgtagtcaaattttttctcatagtcatgtacgttataattatttaagacatcttgcaaaattttaaaaaattttaaaaaatttacaataa

SEQ ID NO: 161600 - DNA, 1493 bp, Cannabis sativa
caaacaatttattagtcaaaacactgattaggctgccttccttgttaactaggagcgtttgttagttagtctatcttaaacatgaagaatatggttgtaagtttgacagagcaggaaaaacttatccaagaaacacaagcacacctcaagagatatagctccccggtcactccaagtcatgtgaatgcaagatcttccaagtgctgcaaaccaatcatcatctctcctatttttgcaagatgaagtcatcaaaatctactcataaatccaacttaacagaagtttcaaaacagacaaaacaactgatggtgataccagttcttcacctttgcaggtactgatgtgttagttctccactggtaatggctcctacaaatagagaagggtcaaatccaagattctttattttgtccatggttactgaagaacgtctggaagaattacttatgatcaccatctttgctccactatgtgcaagcttttctactatcaaattcaaattaaacaacaaagcaaagacaattaaacaaacatgaaacatgcacagccgcacctgcattgccaaagaggcaatatcacaaaaaaataatgctcacccagaagccaaaaataacattatgaaaacattttatacatacatgtggaaatggcacccggataaggttgcttcccgtcatggagaaccccaaactgatctaagaaccatgcctgaaatgattggatttccaggaaattaatatataattatacacagaatatactaatacactatgaaagtacagaaaatgaagattcagcatctcaaattggaaaaaagatgttatttttggtgatgtggtgaattctgggtaccttgaaagaacgcctctcggtaatttgttgaagcccatttaaactctgaaagagattagtagcttcgttgggtggagcagaacatttgggcatcatcttcgtttttcagtgtccgtaaaaatctaaacttgaatcaataacccaagaccaccctttatttatttataactctcttgattttgaatattttgtttgctttcactacaaaacgggtcgggttctaaattcggtacctgatctatgaagctcttcgggttatttataattttatacagtagttttcagagggaaaagaaggatttccaaaactaaaaactacaacttttatacaggttgtgaaaattgagtataaagaaatgatttttgttttattttaaattataaaacaatttataccaaagcatatactattgtccttttctttcttttttactcagcaaaactaaaaaaaaaatccaacttgggcaaaataactgactattaagccaccatattagaatttacatccataccatacaatgatataattttcttttttggcggggattctcatttctcctctggtaaaaggatcctttgttttattgaaatgatacattgtttgaaggaaaaaaaaaatacgaaaaaggaataatatgtta

SEQ ID NO: 161601 - DNA, 13726 bp, Cannabis sativa
ggtataaaggaattgaactcttacctgttgaatagtgatatattaatgaaagagaaaacctgagtaaccagcttgcggatgaaaaaggaaggtacctgtatgacacaagttgttttgactcgtaaatacaaaaacataacaaggctcaaacattattattattaatcctctgactagcaaatctatattcatctgacaagtaacaagttttcttcctacatttcaaaaacaaattaatgaaaaacatgtatgaaaacactagaagaacaaagaaccaaaacagctcagaaaccttaaattctgatgatcattttagtcaccatttttaataaatatatgaaaagagtaataacactacaaacattacaactaacaaagtaaactgtaattactaggcatctttcggatcatcaataacatctaccgatgcagacattattaaataaaaagcaaatattagttgttacgtacgtgatttttacgtaattgatccataagagaatcaagaaacttgatgatgttgtcccactgattaccaggtgctgctgctggctgaggaccaccactactaggtgatttggatgactttccatgtactcgtgaattttttggcgccttaacaagtatcacaaaaacacaataatatcccatatcaagcttatatataatgaataaaaacaaagcagtaatttatcctactattccataaagaaaaaaaggaaataaagatagcattaaagtacaataaaaccaaattcctggcagttattatgtaaattatactgagcaagaaaacatacctgaatgcaaaagcccaacagtggagacaattctttcttcaaattgtcacgaattaagccaaaaatcttctctacgcaagcagtcaattgttgtttgaacagtatagctggataccttgcttcaaggtgtgttacaccatcgtcaaacccaaaatatttagaagaagattttaatccctgcaaaagtgaaactactaataagactggatacagatttcaaaaataacctcacaattacagagaaacaaccaaacaatgtcacaattgtgaagattttatctttctgactgatgagtaggaaaagagtataatctagtaaacgcaagagtaaattcactgtattacaacatttagagtaacagctttggtaactcacatgtccaatcctggccgccaacccagtggacccagcagaacgctgaggagttgccgtcaagaaaccatttgattttaaattcctttgaaggaggcatagaagtgcagatgcattggacagccaatagggcaacacagcgttctcatcaccaacctgttacagaagtgaaaagaaaaatttctagtaccccataatccaaattattgaaataaacttttaagtatatcaaaaactatttctcaaatctttttcatctctcactagctctgcataacatcttttttgaaggaaaaagaaaaaagaagatatttggttaccttcagagcctcatttattccttcaattatatagtcaaaaatggctgttcgttcagactcgaaggaacgccagtgaagaagacttttgtatatgatacaggctgccagtggctttccatctacaaaacccatatcttctttgatacaccttgaaaggaatatacaattctcctgcatattacatacattatagccgagggtgaacaatatttaatatgctcatcatattaaaatcaccaggtgctatcttcctaaggataatactataccaagaaaataggagagaaaaacaaaaaacactacagagaatattcaccagaccctgtaccaatattgtttcggcaaagtaatacgtaatatatatgactattttaggtgttaaatttgtttagagttgagttgtaattcatgactttgaatgttcttttatattaatataagatgcagaaaatagctttaaagttggataccatgggatgtttctctattctcattcaaaccaaagaaacaagaaaaaaaatcctttgaaatcaggaacaatacaatctcataaaatcctgaaaagcaaataaatagagaaaataaaagcctaactaacagatacattcagtttcaatgtgctagttttaaaatagtgaaagaaacaagaaaaaagacctgatgcttctcagcagctaattttggtcggcgtgattctgacaagctatgttgaagaggaacaataaccttcgtaggggtaggagactcctgcacacaatatattatattttataacgagaagaaacattttgggaactatgctcagctgtgaaaaaggaaaaaggctacaactcacaaatagtagcttccgatcagagtttgaaagagcaagtgcattagagtttttctggaaccaattcaaaaaagaaaacaaaacaaatcagaactgcagaatgttatgagtcattagcttttcaccatatgccaaaaccatagatgatattgaatcaacatacaaactaccttagtatccacatgcaaatgaaacccaaaattcataatcctaaattttcattagcaatgtttatcacaacttacctcagaatatgtccttgcaaaaccaggacgaatgctctttggagtggccaacgctttttgtcgcataatgtgattctcgccttctaaaagtgagactttctcttcaagactaacatttaaagagtagattattagatagttggttttctttttcacaatacattctgaattggaaaaaatcaaagtgcatttaaattttacattatagaatttttttaataagccagtttgttggttcagataattacgagtttaattcaagcttcttattgttttgctaatatctagtgcaatcgaattcaaattgaaaatgaaatacttcaataatttattcatttgatggcagaataccttttaacattctgctgaagctgtgagcacttctcttcgaactccttcaacttctgaatcatgtcactattgtccttttgcaccctgtgaagctcggtctccatatctgaattcttcttttccagagaattcaatgaactctgcacaaaacaatcagattagcatactcggcgctccccaccacttatccctctaaccaaaaagaaatgctattgatacaaaccctaaatagacaaaccataaataaatataaaataataatgaaaaacaaaatattgtacaaaagaaaatgacgcaccctcaataatgaattttcttttcttaattcggacattgttatgagttccctctccaatgcagatttctcctttgaagacaattctaactgattttggagcaccgcatttttgttgcactcattaattgtcgctaattttgctgcatctaactcaaggttcaaagtttccaccatcttctgaagtttcgaattttctattgacttggcatcttcattagaaacctgtccataaaacaattaccaaaacgaatgaaatttcatataaaagtttaaaagaaaaaaaaaattgcagagggcgataacactatatgtgcttgaattaaaaaaacgtcataacgccagctaaaattttgatacacaacattagtgtattggattcagtaaatgaaatagatagaaaatagtagggaacttttattgaaatagcaaaataacacgaacactcccaggatgtttgagagtcctagtacctctctcccaagcctaagcttaactacaataatccagacctaattatcccttccctttcctctccttaaatccctccaaactttcccgatataaacaaaatagaaatagaaaatacctcaaaacagaaacaaaataaatgaataatatcattttaaaaaaaaaaaataaaaaatcatagtattattaatttcccaaaaacaacccaatcccaaatcctctcattacttgtgattccttctaccatataagtgaaacaaatttgtggtttatcaagtttgtcatggatatataataccactttaaacatacaatggccaaataaaactatcaaatgttctaaataataaccaaacaactcaataaaaacaaaacagaatcaaaacaaaaggcaatacccgcaatcgtttttcaagatgcaatcgccaagtcaaatcttctaactgcttctcgagtttattcttagctaaacgcaatgcaccagtttcatttgcttcctgccaatgaaaaacaaattgaatgaataatagaatagagcataaattcatgtatttcagttcatcaaatgtggcacaacagttttcacctttctaagctttcgaagctctctttttgccaattttcttctccagagactttgtattgctattatagaagtctgttcatgtctgaaagctgtccgaaccttacacatcctccaccgagcctaataaaattaaattggtcaaagagaaaatgtgatgaagttagttgaagtagacagcaaaaatactgtgtgagaatattgtaataagacattttaacaagaaaaccataacagtgcacaataagaaatccttcttgtattctacatgtgctgcttgtagtgctcacacaaatactattaaaggttttccacccaattaaagaattgcataatgaatatggagaaatattcataatataatgctattaaattataaagagaaacgtaaatcatatgaaccttgaaaagaatcacctgaattaaaacagcagctctatgttttttccaatgtataaaccttttgcgagttgagaatccacgaaatctggattgtatggtaacagcagctgaaagtatttgcaagtatgccttccttgaaagccagcttcggacttgtttctgtagtacaagagcagctgcttcctctcgtttgacaatgtacatcttccgtgctaggcatcctataataatgaaaaccattaagaacaaatttaaaagaaaacaagaaagacaaagcagaaattgaagtagctcagcctaacagcagccgccattgaccttcattgtagagatttgcaatttgtccgttattaagcaacagccaattcaatgataaaaataagtaattaaaagagtgataaaatcatccaactataggctgatagcactagaatggctgtggatgttgaatggaaccctcaacatagtctccctagattaaactaaatgcaacatttagttggggcttaccatttaacaatctaaaaaagtaggtagagagtaacaaatatgacaataaacggatgaccagcacggatgtatcataattttgcgaacagaaagaaagtaaatctatcacaacatcaatacgaacaaaatgtggaaggggaaaaacaacaaacaaagaatctgaaatttcaacaagtttagcacaagaacctctacagtaagcttggagtaacaatgcagaagttcgagttgagataaaatccctgcgagcaatatatgttcgtatctgacgctgaataagttttgcagaattgtctaaaacctcagcacgacgagaatccaaaacaccaatttgtccagccctgagaaatactttggttctacccaactgcaaaggtaatagatgactaaataaaggcatccagaggcatgcatccaaacataagcaacttgaaaaatgagtaacgagacattcatataaaatatggaaaacatacctggaaattatcaaggtttaactttctcagaattttctctgtgatggctgtttcatcaaaactacagaatacaaataccaggaaagtacgttaataattgcaagaaacaaatggagctcttacaaaagttgtttaaaaattattagtgatattcaaacttccacaactgtagtgcacatgcacacaactacacctccatggattgaattaagcattgaaaaaaccacagacggacccaccttccatccatatattcaggagctaatattccaaatcgatctacaaactctgaataagtccttcgagtgggatagcctgccaaactaatccgaacagcctctaatacaccctacatcaaaacaaataactactacaataaatctaacaattattaaataaatgaaaaacacatacaattactacagggtaacaattgggagacaatcatttacgcaattgttttgctttgtggtcaatgtacttataatcctacatagtacaccatatcccacagcaaatgagcttcactgttatttttggtaaagctcaaaattcatacaactattatcaatagcagtgttgaaaaagaaagcctaaaacagaaatgtgaaacaagaacagatacttgaactcaagttaaaatattgtgcatgacttaattgactacatcatcttgaacagtaaatatatagatggctagttaaaaatgcatcaacactccacagaataacatagaagttctagagttacccaccccacaccgtagctgatgaagtatactcaggttctcaaacttttgtggtcggttcaaagaatttggtttcacacaacgtatataatgtggctctgttgtattgagtgtttccatcagagcttggagttggtgctacaagcagaaataggaaaaggaaaagttgtatcaatgtcaggaagaaaaaaatatgcaagtgataatgcagaggcagagtgacaggaacatccaaaacctaaacagaatatattaattgtcaccaaggcattcaaaatttacataaaagcaaatactatccagaagttacaaggcaacactacagtaaagaaattcaaggtaaaaaataaaggttctcaagacaagacattgtagaataataaaggagaaacactttcttcagtcagacgactatcacaatcactgcccagtattgttgacagtactgcaaacaactagtcagaacaagataaataacttacatcttgtgtaagaaaattaccaacaaagtaactacacaacacaaaagtcgtctaccttaaatcttgaggcaacagaagaaaacttgtatgatgatctcaatgattcctctggaagtaaggggaaaagaccagcgataagggtgcatttggaagaggatagcagattgcagtgttcaaccacaacataatcacgatttttatctaaaaaggtatctgtatggtaagtaacctacaaaaagtaatacataaattattttaattaaaattatctaggacacaggtctaattttctaactgtgattctatttgcaaatacaacaagacatataacatgcctttccagcataatgggaaacagtaaaatctgtttcggaaaattttgccttttccaatctcgagtgtgatcggaaatgctgaaataacttcatggaaaaagtttcatgtgttgatcttgggaacatgctgcaaaagtaagagaatcaggataaggataaattacagcaaaaaactatacagaactacacgcaccaatttatactgaagaactcaaattgtaccaagcttcatccaataatgcaattatcccaataggtttctgcataaggaaatgtaacataaggtccaacaattaaaatataataaagatatactaaatttagacctgaagacatcagccaaattacgtatacattctaaacatttttcggtgcactctcaatttccatcaatcctatgacagataaatatgcagagttcctcaactacagtaatacattttactaatctagccacacatgtacatggtatcttctatccttaaggtcccaacacaaaggaaagtgaaagaagattgtgcagttttaatccattaaccaaaaataagtctacaaaatttttgataacgaagaaaaccttctcaatcaaatctagaacatcttgattatctataaactcgatgtagctccaattgatttcctctttgctgtactcatcctgctccatcttgaagacatgctggaataaaggaaagagataaataataataagtttgtattgatcctttccagcaaacagggagagagggaaagaaagtttatactgaagaaggtagaatcactagcctcattaaaactaatacttcatattgtaataagtttacattatacttacaaaaaataaataaatggtgtacctcattaaaatgttgctgaagtttttcattcgcaaaatttatgcaaaattgctcaaaactgcaaaacataaaattaaaagtcaatacaaaaaaaaaaaagtaaaaaatcattaaattaataactaaggagtaaacttcttttgatcaaacattgaaacctctaagaagtaagtactaagtaatctctttattcccctttaaactgaaaaataaccctagtgtcatgtatgaaaagattattctctgattaaaccttaacaagtatcatctaaatgttcattgtaatcaaagtaaactaatttgtccaagttattttaaactgtcaaaagaaactgcatgaaatgataccaaaagttcaatactttttcatcacacaaacatgaataaacttacatggctaaccataaatacaaataactattgttagtaaacaaatataaaataattacctattatccttgaaacattcaaaaccataaatgtccagaactccaatttgtacttgagaattcaaatcttgcccaacagacttattaattttatcaaccaacctgaaacagaaatttagattgtcatcaacatctcccaataaagagaacactacaagagaatgattctttctttaagaagcaacaaaatttaccagtcaaataatcgtgcataaacagtttttgccagagcatctctaccagcaacagcagcattacaatcaagagccttaacaatacttccttcacgggtttgaattgaacgagtacatagtgttgctagtaagagatctacatcacacctaatagaaggaataaccaatttaatcaaaacaaaattaagaacaaatcgatctatcaaaatatggtcagagtgatagttgagctttctcaatccaaattccaaattataagaattattcttcagtacttttaaaataaatctcagagatattctcctgaaaactcaatattataaattcacattattaaaacatatatctacctaacttgacgtctaaaattacaaaattaacatttagacatacagataattgctaattaaaaaaaaatacttcctataactctacttcatatgaattcctataaaataaattttcaagctatcttgttgatcacttacatgaaaagattagcaaccatctgcagatgaaaatttgatttctgatcctttagaatggaagagtcgtgctctttcccaggagaaaattcaatgttgcccagatgaagaattccagccaaggagcgaaatattgcttcctaatagaacaaaaatataatataaaaaagattattttaaagaagaaaccaaatacaccataattcttaatttctaaagttaaagtagcatgcagagttttaaaacctggtcctcatgactaatgccaacaatgtccattgctctccttgtcttaatatattcctctgcattgcttactccatccaattcataaaccttactttgatttaaataatggaaatgggttggatgatctagcttgtacttttccgcatcctggacataaaaaaacaaacccaaaaacaatgttaagaagcttaatgaatctgaaagggatggccaagtatcggaatgaggatctatttatttacatatacatctagtcccttttgttcaaagaaatgatgcaaacacaaacacatgacaggggggagagtcgagagggacagagatatacatacaaattacatataaagagagagaatggggagggggaagagagtacccttccagaagcacacaaatgataaaagcagtgataatttctttcaggatctgtaatctgtacaacacgagatctttccaataggtaagttctaatagcagcacctgatattctaccatttgcatcaaactggatctcaacaaacttgccaaagcgactgcaaaagcatgaaaatgaaagcaatagttgtttagacaaagatacctagagaataattcatgaagcagtaaagcgagcaactccagtggctaaattgcaaaccttgaattgtcatttctaacagtccttgcattaccaaacgcttccaaaagaggatttgactgggaaaaaattgaaattatgaatcaacaaaaataagaaagcaaagaatttccaatgacataaaagtaaaacaaacataaatgttcacaatacaaaaacaaagcagctcttaagttttagcaactaaaacaatccattatacaagaaagttaatccatctaagtgtccgtgttcagagcaaggctcccctccattaaattacaatctagcttgcctgtgaaaaactaatggctttctattcaaaaccttttgggtacctggcctaaatcatcttgttcaaaattgtttccctgttgagccatacaaagtgcattaatttgaggataattcttacttcaagaacttgctgctcgacagttctgtcaccacccgcagctcggcctccaacataagtaaggtactgcatgataagtttagtcgtctcggttttcccagccccactttctccactgaccagtatagactggcttcgaccatcattcatcattgccctggattatacaaaatcacaaggggctaagaaaagatcttacttgcacagttgaactaaaaatatatgaaaaaagttgcaacttatttgaaaatataaaatcattaaacctatatgaagcatcagccacggcaaagacatgggggctcaactcgccaaaaggagctcccttatacatctccatcatatggccattgtataaatgaggaagctttgtgaacggattgaccgcaatcaaaatgcttcctgtgtatgtctaacaaagacagaacaatgcaagcagaggtcactgcaaaatccatggaatttacctaacgcgataatttcaagaataaaaggaaatattcaagtttacgaggtaatggaaagtgtctcatacgacaatgactaggaaagattaagcaaatttaacgccatctaaatatcgtatattatatttattaattttaaattgcagactagttaaagtcattccatttaagcaccaacataatgaatatggaacaataaagctactctctacctaattaatcgatcgaataaaagttagtataggacagatcaaatactaaattcgacccagttaggcgttacacttcaaaaggaaataaaaaaattttactatcttttctctaggaacaatcccaaggtttagtagacaataaacagcccatgatttaccaaaagacaaatcaaataccgaattcgacccggttaggcgttatacttcaaaaggaaatgataaaatttactctcttttcactagaaacaatcccaaggttgagtagacaataaatagccaatgattactcacataagaatccaatgattcaccacataagaacaatcaaaacaccatcaaacttttatttataggtcaactctaattacctaatcatttttatcccaagcttttgagaatataccaaaaaaaaaaacaaaaatcacttgagttcatgatttgaaaatttaaaaaagttggttggctttgtacagttaacaataatttcttgtccttctcttaaggtttgagtaaaacaaattcactccctttaaaacacactcataactaaacataattgaacaacaaccaaacctaacaaaaccctaaaatattatcaaaaagaaaacacaacattaatggcattgccaatcagtacaaatatatatattaaatgcaccactaacatatatatcattgagagcatatcttctctgaagattgtaaagaactcctggttcattcaaataagtcaatttcgtcatatcatcaacaccaccatgctcatcctcatcagcatccctaggaaaaactttctcaggagaaaccaaaatctataccaaaaacaaaaatcaaaaccacattacaatcaaaataactccaaattcaaaattcaaaaaacgaagaagcaaaagaagaccaccttcttccctgaaactgtaacagcatgaacttgctttccaccataatcgatgacctcagccgcaacccaagctaaattcttgtcctcgacccaaaccttcgagcctttccgtatactcatcgtaggttcctgtaaaagttaaaagaaaacattaacgaaatcaaaaccctaggtaaccgaaatggaatcggagaatagaagatgaaaaaccctagcgcgagagagataagagcgagttacgagcatgagtgagtcgaaccgagtcgagtcgagtccgagttgaggttgagagagagagaaatggggttcccgccctaacaggtgtgtttggacaaaaaaaaaaatatgagagaagcttcggtgtggtggtttttggtaacgtaactgacacgtcactctctgttctgtcacccacgctccaatttgatttggaatttcttgactgtgacgctacgatgtttgtgtactctagcaaaaccctcgcttacccttcttcctcacggctgaccgtgaccgtgagaccgtttggttccttaaatgaaaaatgtataaatatataaataattattataatatttcaaatgatgaaaagtaaataagacaaaaatgacttttattacaaatctagaaaaaaaataataaattttaattgttctttgattgtattaaaaagcaaagagattaatgtggtttttttttaaaaaaatactaataataaaaaacttattcggggttttaaagaatgtttgatgatatggatatatatttttttagtattttttaatgaattgatgatggtagtttggtgaatattaagaaggaatattggcagtaaagctacaaaaaaataaatattcaattaaaattagattagattggatgttaacggttggattctaattgaattatatcagttattgaatctcaaaatctaattaaaaaccgattaaatcaaataatatttatatatatttaaaaaaattatttatattgatttatataataaaagtaataaataaataaaaagtatatattaattgtattttaagtggtttttttgttcaacttgtagcagttggttgttttatatatttattttcatgatattttgttatattttattacttggtaatattattgctttagttattttaaatgtttagttacattatgcttgtaacaattatatttttataaagtattaaacttaaataaatggtgatgtttagtttttacgtatttttcttcaaatttttaagtcaatataaaaaaataggtgtgtaattagatatctaattgaaaaatcgatccaatccaattaataattagattggattttgagatctatttagtttggatcggatggtaatttttcaaattcaattactaattagtttggatcagatgaggataaaaaagttggattagatcggatgtctagtcctacacttaaccacataaattgattttttttgtggtaaaaccctcacaaccgcacttctattaactctattaactatttacctcttctgtttaaaaggctttgttaagtgtcacagtggacatgccacattgcacaatgtacacaagtatacacgtggaaaaatttcattggtctcataattttaataattgaaaattgaaaaaaaaaattaaaa

SEQ ID NO: 161602 - DNA, 1745 bp, Cannabis sativa
atatatacatatttatatatagaggaagaggacatatatattatgagtttattgctaaaaaggctggctatggagtggtcttaattaatattgtttcacaatccttatcatgtcatttggtttggtttggacctttttttctttcttactatcattatattcaccaaacagaaaagaaaatgacttcatcattattattattgttattactttaattaattatattttattttagaaaaaaaaaatgcaacaatttcaaaagtgttctttgtttgacaagaaattaatatgacatttgattgttttataactagagactattttgaattattgcatgcatattggccaatatataataatatcattatttttctaaattaaaaaaaaataaagttgtagagaaaaagggtctcattgaattattgtataaattattattattattattatgactaatttatatatgatttcacattgggaatgcattattaatgagtaatataattagaatctaaccatctttatattagtgatcgatctttaaaactgtaaaggcagaagcttttgtagtccaaaaaccatatataattaatccacattactttatttttcactttttaaccaaattaaatcacaataacatcccaactttatctatataaatagaatttattaattccaactagaataatatatataatgatttaaaaaataatttaaattttatcaaggacaaattccaatgttttgaaaaagtttcacatattaaatccattttcttaaaattgtataaaaatataaaataaagttaggagaggtagatggagctatcaacaaaaggattttaatatatatttatgtactttataattaattttaatattaataataaggcaatgaattgagatggggaatatgaaaaaaagggtcggcatgcatgaaatttttaccaaattaattataattagtgaagttaaaaaaactaattaattaattaattattagctcacatcaacacacaccaaactaattaataaagttgtagtaagatatatagacaagattttgcttttagttgattttaattaacgataaaatctctactttctattaactatttatttttctctcactcactttggcctaaaaggtggccccaatatctgtcaaaaagaagtgcaaagactatctgtttttttttttctcaccttaaatagaaaattatttatttattttctttttttttttttttaaaaataataataattaaaaaaaatgtaatgatttttccttttttaaatttcagaccatatcttcttcaccattattgaatcctttgactaaaaaatgtcttattggtttcccatttttctgcttagacaacatttataaaaaaacgacacgtcgtttattatgccataggtacaaaaaaaatacggcttttgtttattgtcgtattatttaaaaacgacagtcatataattaacggagtacgacaacttgtttgagtcaagacgaaacgacatcgtagtgaaataacgacaagtcgttgaattgtttgattgctacgcaagacaacctggcttatagatacgtatgccacgtaagcacagacgcattatctcaatatattccttttttattatttattaaattaaaaacaataattattttcaatagataatagtttaataatatataaagcgttgaaaaaaaaaaaaaaaatcagagaagaaaaagccgcc

SEQ ID NO: 161603 - DNA, 3058 bp, Cannabis sativa
agattaatttaattaatgtggaaaaaaaagatttaatatgtgacatgaactcttatttttattttttttaactatatggttatgcatggagttgatataagttgggatttaatagatttgttgttttaaaaatataataaaatagagtttgatgtactaaacaggtttgatccagaagttgctcttaagaaacttagagggaaaagggttttgtttgttggagattcattgcaaaggggtcaatggcaatcttttgtgtgtttggttgagtctataattcctaaagaccaaaaatctatgaaacgaggtcgttctcattctgtcttcacagccaaggtattattattattattaaggtacccgcataagtactaaaattttgaaagtttgtaaattacataaatttaatatttatttttagcaacataaatacttattgtttgtaaaattataatttttttttctaatttcatcagtaaaaactctattattgtcttaaatagggcacatataaaatctagattctaaatcattgtttctaaacagaaacatgtaacattagttattttcaaatgttcttttaataaatccaaaacaaaatttgtactgacgaaacggaaggaaaattacagttttacaaatattgggtacttaatacttatgctactaaaaattaacatgaagtttatgcgcttacaaaattaaaattttagatatttatcccactatttacctttattattattattattgtttgagtaaattggattcattttttaatttggttccatgcttggaaacgttgcacttcaaatttgtacataatattaataacaatgtgtacatatacatgtatgtgtatgtataggagtataatgctacaatcgaattttattgggcaccatttctggtggagtcgaattcagatttacacatagtagcagatccaaagaaaaggattctaaaagttgactcagtaaaaaagcatgccaagaattgggtgggagttgatattcttctattcaatacttatgtttggtggatgagtggtctcaagatcaagtcattgtgagttgtttatttatgtatttttttttctttttggttatatttaaataataaatacataaatattgatatgaatttcaattgagtgtgaaaatagatggggttcatttccaaatggtgaagaaggatatgaagaactggatgcaccagtggcttatagaatagctttgagaacttgggctaattgggttgacacaaccattaatccaaacaagactcgagtcttctttaccacaatgtcccctacacaccaaaggtatctctctctctctctctaatccatataagacttttagtcacaatttcatgatagaaaaaattatattttgataaaacacaaaataataataataaggctaattagaatttttgcttcccgaactttgacatgaatcaaatcatacctcctgtctttaaattattgagattgttggatttaaggacttttgtcacattttagtaaaaaaaattaacatgaatcaaagttaaggagacatgatttgatacatgtaaaagtttgaagacatgaattgacagaagtctgatgagcataatttaggatatgaaaatcactaaattagtaaaattgaatgaaattggaataaaatctttaaatccaacaatctcaagggaaatttttaatggtaaaaaaaattcagtaaaaatcctaattatcctaataataaaatattttcttctctttttctccttaaattattgagattgttagatttaagaatttttgtctaattttaataagaaaagtttaacatgaattaaaatttagaggatatgatttgatacgtgtcaaagtttgaaagacatgaattggtagaattaaaatttgaggagcataatttagtgcatggacaatcaccgaattaataaaattgaataaaagttcttaaatctaactatctcaataattcatgagaaatttttaaaaaatttagaagacatgatttgacacatgttaaatttcagaataaaaattctaattaacctactaattgtgcacctagacaaacttgattaactaaattagacaacaagtaacaatcatatacaagttgttcaatgatttatttcttttaacataaagttttgatatttaatgacagaaatgcagattggagtgataaaggaggaataaagtgctacaatgacacaaaaccagtaaagaaaaaaagtcattggggaagtggttcagatagaagagtaatgaaagttgtatcagatgtaattggaagaatgaaaacacctgtttctgtacttaatgttactcaaatctctgagtatcgagtcgatgcacacacctctgtctacacagaaacaggtggaaaactcttgactaaggaacaaaaagctgaccctcttcaccatgctgattgtattcattggtgtcttcctggtgttcctgatacttggaatcaaatcttcttagcacatctcttgtagccatatttttatatcatttcttcatctctttgaattttcatgatatgctgaattgcaaaggaaacaaaaaatttaattgaatataatgaattttgtcttcattttttgcctttttaaataatgattcgattaatcatgagtaaatattttgtattttacaaaaattattgattggactttgttaaatgataaaaaaatatagactatgtaaaatgataaaaataggacattgagcttaattttcgatattttttttttctaatttaaccaacttgaagatgattcctaacacaaaccgatacaaaaaatgtaaatagttttatcataacacctctagattagattattgtctaattttattttgacaaaaaattagtcaatttcctacttgtaccattttaaaaaatgcaaggtctattttgttatttagcagaagattcacttagggtgcgtttggaaagccacaatgtaattggatttgtgcgtaattggaggtaattacacaatttggcatgtttgtctgaccatgtaa

SEQ ID NO: 161604 - DNA, 1628 bp, Cannabis sativa
cccccccgccccccatctgcactataaaaaacaacaccagcaacaccttttccatcccataggagccatcaaaacacaccttgacttggtggcaatcaatatgaacagtatccacaaccaccgtggggccttggacattggaattctcgtcctcgagtaaaacttcagactcaagaatcctcttatgaataaccaacaacaaatcatccggggaaaaggatctctcttcatgaaaacattgatttctagcccaccaaagagagtcacatacaatacagttgacccgaacaaaaatctttgcgcaatctactatatgtcaagggaataaattccgcaaccaatagccacttaacgaactccgcacctaaagagaaatttagcgtgtcggtacgaataccccacctattagcaaaccagattgcttttgcagaatagcagtcccaaatcaagtgtaaaattgaatcagctgtatctttgtacaagcagcattagaaatggttacttgagaaaaagcttatatgttccccagtaggcaagcaattcattgccacacgccagagaaagagtttttacttttgaagaataagagctttccataatgtcttccacaatgtgttgtttgtattaaatttagctttatttaaagtcatataagctgacttagcactaaattttccattgaagttcggcctccaaatcatcatatcattactagaaggatggagttttggcatgcttagaatatggtcaatacctgttgcgggtgaacatagcttccaattggacagtagaccaatcgccattattatacaagaaagagtccatagtgacattagaaggaataacagttggattgaaggctgctcttatttcttcccaagtatccgaagtaagtcagggagcatgccaagcatcaattgaagcaccatttctaatgagaataccccagttattcctcaaaaattctctacttgcaaagatctccttatcaacaaacgaacaatttcttggtaacacaacatcccaaaaagaccggttaaacatataacgacctcgaaaaacctttgtccaaagagtctctttacccgaagcaagtaaccaccccagtttagagaggagagccatattaaagtcaaaacttctcctgaaccccagctcaccacgatcccaaggcttacataaagagtccacattaacgagagcaagaaaacgctcctttgtctcattaccaacccaccaaaaccttctcatttccttatccaagtcatcacaaacaattttagggagtaaaaaggaagacatgctatacatagttatggataagagttaaaattaaagtggctctcccagcttgggataagagtttcaaactccactcttgcaatctttgcttaacccgatcaaccagaaagttaaaattgcccaccttactgctagacataaagagaggatttctagggatttttttataacaccatattagtttaagcgtgctacagtgattttcatcattactgtgcaacctttgataatcaaaagatttatcaaaagtgataaaatttaaactttaataaataaacatatactgtattacattacaaaatttaggatctcgtatctacattttt

SEQ ID NO: 161605 - DNA, 3405 bp, Cannabis sativa
  modified_base (3342)..(3361): a, c, t, g, unknown or other
tatattgattttaatttttgcagctgaatattatccgaatatacaaacaattggagtactttcaacaatatcaaagcagggttggtgctctgattggagctgaggaagcacaaaggcttgtgaacgatgcattggtactcattacacttggtggaaatgactttgtcaacaactattacttggtccctttctctgctagatctcgccaatatgctctacctgactacgtagcttacatcatttttgaatatcgcaaagtcctctcggtaattaattactatatactctgatctacgtttttataataattataatatacacaaaatctatgatggggatatataataaattagtataatgtagctcatcatgtcacgagaattatacaataatagagtatatatattatatatagtgtttttcattaccgttttaaggattagtatgttgtatatggtaccgaaagttgaaaccgacatagaagaaaataatactcaaatagtcacaacaaagtaagggaaaatgattcttttcaagtgagaaaagtggggtcacaaatttattgatcaatttattattgtggggttggttgtgtgtgtttttgcagtgaggcaactgaatagttatgacaatcttgcttggttggtgagaccaacaagcattatgcattttcattaatgggaccatatatatattatatatatggaccaatgttttgatgatattactttattcgtttagttataataaaccctacttttttggaaaacaaaatataattcaacataagaattaatgctcttttaatcattattatctctctcattttatagtgacatttttatttgagcatatggtcgcctaacaccatgacacttcatcgtcggtggtttgtaggttaattttaatattatgatctgatcatgtgggacaccactaagtgcccttttagtaacattcttgtaaaaagtttaattaggcatgaaaatagtaattataattaatactaatgtgaactatgaagtgtatgtatacattgttaactacatgattagggtatttgatatcatgagtttgtgtgtgtgtatgtatatatttatagaggctgtatgagttaggagccaggcgagtgttggtgacaggaactggaccactagggtgtgtgccggcagagttggctcaacgaggcagaaatggtcagtgtgcggttgagctacaacgagctgcagccttattcaaccctcaacttgttgacatcatcaatagcttaaacagtgagattggctccaatgtctttatggctgcaaatgcatttaatatgcatatggatttcatctccaaccctcaagcatatggtatgcatatatatatatgtacacatgcaaatacaaacccttattatatatattatactatatagaatatataaagttttacaaaatcgagataagtagatggatcgaggaaaattctattaataatgactcataaatgtgataggttggtcctctgttaataatgaaaagaattaatgaagttgggtccctttaataatgcataaagtagtaatatatatgtacaatgagataggggttatacgtctagaacttcgagctatcaaatctattcacaaatgtcaaatagtgtaaattttcatttattgtttgttgtcaacctaaaatttaaacaaacaacattaaattattcaatcactaatgatataatgtattgtttctgattttaaaaacaaatatctctaatcacaataataatatatataacacctactaatagtggtcgaaaatacaatgtttcttagatttctgttataaggaattgaggctaaatatgacttatttattttatttatgaatatatatactgggccggcccaataaataagaaacacctggctcaagctagacacaatttgttgcaacttcatagtttctctaaacttatattccacaaattttctagagaatttcatatcttatacatttgttggtaatatttgtaggatttgaaacatcaaagattgcgtgctgtggacaaggaccatttaatggaataggactttgcaccccagtctcaaacttgtgtccaaacagagatgcttatgtgttctgggatgccttccacccatcagagagggcaaacagaataattgtgcagcaaattctggagggttctaacaagtacatgcacccaatgaatctcagcactatgatggcattggactcagctaggacctagagaggagagtcttttactacttctcattattacattatatatcactttctttttctttttttattttattgttctacgtgggccagtttgtcagtgctattattttacactttaatgccatttgtaaaattttattaggatatttcaataaggtgattagtttcagtttctctctttttttaaagtattggtgcaattgtgtttagatgtgtgagagtgatccaattgtgtatgctttttattgccactttaatggaagattaatgtatttatctttctcaaataaattagcttaacagtcatttttgttgattgatttttccaattttgaaaaactttattcttgttactttttcattgtgatttttttctacattgtgatttgagttttgagctagcctcaagtggttaatcaaagagagtccagtccataggtgaccaaaattgatgattgaatgggagaagaaaaactacatctcgctgagaagcaacacatcgggccgagcccgtaagtgaatttgggctcaaacatctgcttcgccccaaattgttagctaaagaaaagcctctcgacctcctttcatccaagggccttagtgaatcactgactcgctgtttatatagggcctttttattgaaaactgggctcaagttatttgggctcaaataatatattttctaaacctttttaggatgaatttaaaatttgttttattctaataaatgataatttaatttacagcctatcgtggatttaaaaaataaataaataaaattacagcctatcgttttcaccatgatcaatgagcatgcactctcttttattacaatcaattatcagtcattttccaaaataaaaaaataaaaaaatcaattatcagtcattaataaaagaatttatgactaccgattattattatagaaaagagattagttttctataattttaataaaggaaaataagtaacattaattttatattaaattgcacaacaacttgagatattttatttttttaaggagaactatttagtcaccaaagccgttgtagtaaataatacccactaggggtgttcatccgatccnnnnnnnnnnnnnnnnnnnnaacaacatccaatccgcactaagtgcggatttcatattttggat

SEQ ID NO: 161606 - DNA, 2126 bp, Cannabis sativa
atcaaaattatttataacaatggtctgataatgttgataatatgtgtgttccatttaaattatgattaggtaatggagagcttggagcacgcaatgaaacgaggtgcaccaattattgcagagtacttgggaggtgccgttaactgtgatgcttatcatatgactgacccaagagctgatgggttgggtgtgtcttcatgtatattgagtagcctagaagatgctggtgtgtcacctgaagaggtatcatcatcatcatcatcatcaatatcgatgtttgtcttaccattcattttattcaatggttattgatccagtgtatttcatgatttgtttgcattttaattttaccttgtttaatttactgtacttaatattactcgttgccgtcccgaaatgctagtattcattaatttccattggagtatggattcatttttctgtatatggaataattctttcgagtgcttgcaagtgtgctactatgtttatgaggaagatgttattgctatttcttctatacatgatattctgtagctagaattacacaatatcctcttagctgttcgttttcgttatatctggattgtgctttgtggaattaaactagttgatggccttcttaggttaactacatcaatgcacatgctacttctactcttgctggtgacttggctgagataaatgctatcaagaaggttttcaaggatacttcaggaatcaaaatcaatgcaactaaggcaatctctcttgctcgttctgtacatatatttatatcaatattgacatatgtatttatgttcacgtctacgtaattttcgattttctgaataaagtttacttttttctcttcaatttgttgcagtctatgataggacactgtcttggtgctgctggaggtttggaagctatcgctaccgtgaaagccattaacagcggatggttgcatcccagtataaaccaatttgtatgtgatgcattttcgattagagtttgcctgctcatatattttcaatcagttctcaaaagaaacaagcttaaatctttattccaattactatggataacatgctctatattgaaaaaaaatgcagaacccggagccctcggtcgattttgacaccgttgcaaacacaaagcaacaacacgaggttaatgttggtatggctctacttaaccttaaaatttacctgaatttcgcttttatgacaatggtattggaagtttttactcactgaaattattttatctgtgaattttcccagccatctcaaattcattcgggttcgggggccacaactctgtggtggctttctctgccttcaagccttgatgatcaattcaagtttattggaaatttttgtagatcaatcaaccatgctcacttgagaataggttttgttaatttattgttgaggctggctttttatattgtcaatttctcaggaagtttatgcaattgataatttaatttcaagccatttgttatatttacttgtgttgtaatagtttcaagtttcaactgtcaaattaaaaagctctatggtcccatcccaagggctctttctttagcacacattttaggttgaactaccaaaacttgtggtgttattgtgactagtctagcattatgggcctttttttttttatttgtggtgcatggaaattgtcattaaaagcataatgaaatggtcaaaaataaatggagaaattgtattaagaaagaactttgaggcatttcctttcaacaattgtttttaatttaaagcatagtgccaaatttatggtgtaaaatgtaaatgtaattttatgtttttagcattttacacaaaagtgcttatccaacaatatgtgaagtatatttcatttggctcaataatatgttttattataataatgtcacttcttagttatgttaaatgcaagagtattccaatcctaactatatgaaaatgatgtatatatagttctttgtaatatgaataatacattatcctatatatatatttcaagcaaagaaaaactatcttaaaagaatgtacaattaaaattggggtaagttgaaaaatatcacttttattaattaaatttatctttaattttatatttatttgaaacatacctct

SEQ ID NO: 161607 - DNA, 3797 bp, Cannabis sativa
  modified_base (3748)..(3750): a, c, t, g, unknown or other
agaagtattatactagctctgttgtagagggtcgaattcttctgatttggagaaggacttttgttcgtgtgtctgtgttggaggaaaccaattaatatgtttgtaatatccccacttcaagcttccattgggccttctcccacggaataatgactcttatacacgagtacgtcactcttggttgcttcatggaatgatgactaaccttacaaaccaacacgagtgtttctagtgtgctttgtcctcaattgcacgcttcttgagaaaacatcccaagaggtcacacatcctaaaattaccccaagtcaagcacgcttaattgtgaagttctttcgtgatgggctaccagaaaataagatgcaccttgttgatataggtagtaaaaatcaatctacctaagctctcttcaactatgtaatctcatacctacacaatctcaaaatcatcacacttgaccttcttcaagcaatgtgagattgtacagctcccgatattttcccttgcgaatcacgggactctgactgtcacaatcacctcccttttgggggtctgacatcctcatcgaccacactttcggttgggtgaaggctcttataccattttgtaacgttctcgcttcaagcctccattaggccttctctcatagaagaatgattcttatacatgagtacgtcactcttagttacttcatggaatgacgattggacctacaaaccaatacgagtgtttctagcatgctttatcctcactcgcatgcttcttgagaaaacttcccaggaggtcacccatcttaaaattatcccaggtcaggcacgtttaactgcgaatttctttcatgatgggctacgagaaaataagaggcaccttgttgatataagtagtaccaatcaatccatttaaaacctcttcaactatgtaggcccatacctacacagtcttacaatcatcacaaatgaccttccccaagagatgtgggattttacagctcattgtctttccctttgcggattacaggactctgactatcacaatgcccactgttatgttaaaatggaagggcataaggagcctttctgtgtcacttttgtgtatggtttgaataatttagaagaaaggaaggctttgtggaaaggtttagaaaggttgaaatttcatgttaagccttaaatcattatggaagattttaatgtattcttccattatgaagataaaataggaggtaatccagttggcttggttgaaattgaggactcaaatcaatggcttacttttggaatggtagataagctttctagaattggttcaaacttcacttggactaataatcaagatgatcagtgcatttattctcgaatcgatcatgtgcctaaaaatgaggattggatagacttatttcccaattcttatgcctcaatacaatgggagactatctcggatcattgttcttgtatggtgacttctactgttatgcaagatataggagtaaaattgtttagattttttaagttttggatagatcataaggacttaaaaaagttgtcatggtgagttggattaagcatgttcgtggtaaggggttgtatgttaattactacaaaatcttaaggttgaagcacattttgaaggtgttaataaacaaactattggggatattaaggtgatgtatgttgctgctaaagaaaactacctaatggccaagacttaaggtcaaataagaccaggtgatacttctttgatttaggatgaaagattgctactgatcagttttgtactcgtgcaaaaatattgcatagttttctagttcaaaagagtaaagttacccaaatgaaaaaaggtgatgagataaagtgtatttttatgcttacttaaagaaaagaagagaaaagaatcacattgctaactttgtaaatgatcagggacaagtaatcgataattactcggatgttgttaatcactttgttggtcattttaaaagatatatggatagcaatagttctatctctttaggcattaatcttgattgtattaattatggtgctaaactctttttgaatcactagctacaacttatttcgcctttcactcacaaggagatcaaaattgtaatgtttagtatttcgagtagtaaaagtcttggccctgacggattcgactctgaattctacaaggtgttatggcctgaaataggttcaaaagtgtgtaaatctattttgaaatttcttgacaatggaatcattttgacatagtagaataaaatttccatttctcttgttccaaaggtagatgttcctggtaaagctattaattataggtcggccgcctgctgtactataatttataaatgtataattaagttgatctgcttaagcctagctgatgttcttcatcatcttgttcaccagagtaaaggagcgtttgtgaagaatagaacaacaactcacaacattcttattcttcaagatcttatcaagaattatggaaggatgaatgtttctcctcggtgtgctattaaaatagatctctgtaaaacttatgacacagttgattggggctttcttgaagattttctcaaggctctttgttttcccacccgtttcttaagatggataatgacttgtttgaagatcacctcttactctctaatgatgaatggtcgacttcaagggaattttattgggaagaaagggcttaggcaaggcgatccttcctatgtccccttgctttttgttcacattatagaatacttgactagaagacttaaaatggaaccaacataaaagactttttgctaccatccaatgtgtaagagtcttaatctaataagtttttgtctgatcatctaattcttttttgcaaagggacaaaacaagcagttcatcacttgaagcttgctcttgaagattttagttgtgctacttgtttaatagccagcaaatctaaatcccaaatttattttggaggagtagatatggtcaaaaagtaggctatattacaagatattcattttgaggagggaacatttcctttaaaatatttggtgattcctttgagacctactaaatggtggaaggaggattgtggagctattattagtaagataaagcttaggttgctcatttggaaaactaggcaggtcaagtgcaactgattcattttagtgcttttaggccgtagaaattattggatgaatattatcatccttccttaaagtatcttcaggaaaattgagaagctttgctggggtttcttatgggggcagaatggtactaaaagtaaggctcatgttgcttcttgggagaaggtttgcttacccaaagcttttggtggtttggggttttggagatagtgcaaattggaatcgatctattcttaccagatacgtgtgggcgattatggagaagcacgatttgttgtgggtcaagtgggttaaggctatctatctaaaaggctctgagtttttggattaaaagcttagacatgatactagctggtattagcgtaaactttgtcagttgagattgaagttcagcaagcatagtattcaagcagcatgtaatgaggcaagattcgaactaccaaactttataacagtctgcttcagcaaactcctatcttttataaggaagttgtttggtgtaggataagtcttcctaacatagatttatgttatggcaggttgtcaactctcatctacttactagaaatattcttattggagaacattgtcccacatggattaaatgtaaannnattgagccatatataagaacatggtctactccactcattgccaattg

SEQ ID NO: 161608 - DNA, 3486 bp, Cannabis sativa
  modified_base (2278)..(2280): a, c, t, g, unknown or other
ttttatatatatatttttacatttaaaagtattttttgtttttttttttacatttttatgaaattcatacaagtaacctaaatcgtaattaaaattcacataacaactcacatataaattattatttttttttgaaaagactcacatataaattattagagcaacacaaactataaattaaaaaaaaaggttaaaaaataatatataagataaaaaaaaacactatagagtgaaatttcaatagtttttgcctacttaaagggaactacataattattatagtaattatgattaaaacgtaattgtctttatgattaaaagtaattttaatttgacccaataaacctttatgtatatatttttttgatacactttcattgcaatggcgatatttgtgatctcacagattatgaaattggagctttattttttctaagatggtagtcataaattgtgatgtatggttcaaaagaaaaagtttgagctgaataatatttttatatttttgttatgtaataagaagatgtaaaagggattattatatatttccaattccatatagatgatgtatttaatatcttcattaaaaaaaaggaaatatttatgcttaacacgtcgtacgtgtatataacaatttatttcatgctacctactgctacaatacaatctctaatcaaattttaaagttttaattttttgtttataaaaaaggagaagcaaatttaaaggttgaataatgttgcatcaaacaaaaataaaaagacaaaaacacacacacacacattgttaataatttggttttggttggttggttggtcgaaaatcgaaatatgaaacttttggttgatagattgtgcatacgtagagcgaaacgtgtccataaaattctactgacacgtgttcgtctgttattcgttggtagtttaagtggtcagtaccactgagatgagtacagtaaggaaggataaaggaaaagaaacgattgtgatgtgacctaaggaagaagaagagagagagaattgttgcaaacatattcgaacatttcccaattcccaaacttttcttttatttaatttttctttctttctgtgccatgggatatatggatgatccaatcactctaataatggggggaaagaagatcttctgcttctcgatcagaataataaagcctcctttcttatatgtattcattacctttcacaaaaataaagccatccactatatttcttgatcatgtattcatatcgaatattgtttatatatatatgtttttatacatatatatcttgttttgttttcttcctcttgtttcttatgtcactctaaataattggtttacatttcttattattaatcttcatacaataattatatgtaaagctttgttatttattcaaagttataaaagggtaggttttggctttcttaatatcgactttatagcctcaaaaagccaaattttcaaaacttttcaggcaaattgttttgttatatatttttatttattcaatgggtctaataatttacataaatatttttttcctagcgtttatacccattttctaattgatacactattttaaaatataactaggattacaatgaattgggtttatcagttttacatcaaattgcatcagtatcttggatctgtgtttgtatagtttttgaaagaaaaaaatttaaaataatcataacacaaattaataatgctagggcattgtataactttcctataatataaataattatttaaaaactatatatggacaacttaataaacatttaggtatgacaaaatgattcatataaatatatatatatttatatatatatcaaacaaaaataaatgaatatgtcaaaagaaagtatgtgattgaaaatttgtgatgtaatttttttttcttctatgagtagtgattccataaacatttcatcaaagttaattaaaaacaaataattataaaaacctttcttaaaatcaatctaaaccaaaaattatcgtaacaattcaagtattgcatgggatcgggtcattgaaaatattccctagctagtagctactatggtagagattatttaaactaaagcaaatgacatacaaaatgttatgcatgatatgatgactctacttagcaagttagcatactctaattgttattatttctcaagtagtggacattttttgccatcactttattgagtttttcctttttgtgcaaattatttgtccactctttttctactcttgtaattttatcaatttttttttttnnnaaaaaaaaagaaaagaaaaagagaaagaaaaagcaactaaataattaaacaagcaaaacaaaatacttgatccctctcattgataggatccaaaaaaacatttaggtcctcttgatttgacctatccattacatatggtgaaatatgatctcatggtgctcaatattatagaatcttcaactttattattataattattattttaaatttttcttataattgttataaaatttatagcttttatgcaaattgcccaaagtagaaaaggaaggttttgtaaaaaaaaaaaacaatatattgagaaggcacttgcaaagtggacaataaacttttacactgaactttctcacacactatatgatgagtgcaaatgttttgtctacacataacaagcactagctatagtcattactttatataatgtttggtcattgttttatttataaataataatatatatgaagatgtcactacattattgaattaaaatttaatttagctccttttggaaagaaaacaaaatctttattattagcaaattaaatttaatgatacgattattcatttatttattcctagtaaatataattctttacatcttcacttcacccaaaaaaattggatttcctattaaagaaatgatgcatgtaagattaaaatcagctaaaacacattgtgaagttaatttattaattatcaacaaaaaaactaaactatatatacagactttgcatgttgtaaaagtaattatcgaaagtatactatggatattatattgtgggtgcgtattggatgtcaatgtcatcattcatatatataaatatacttatttttatttgtggtataaatatttaattttaactttcaattgtaaataaatatataaatctaatttttgacgataataatatctaaattatattcactacaaggaaatgttacttttattagtgcagttcactactgtgctggtaaaaataacttttactagcgcttctcgcaaactgcactgacaaaaagtttaaagttttataagcgtacctttatagttgaaaaactaaatttttacaaatgtcaataatatatatcaaaatatataactgtatacgcctgcaaaaaccagttttgcagcgacaatatataacagacagaatataaaaataattgcagaaagttaaataacttgacacaagagatttgtacgtg

SEQ ID NO: 161609 - DNA, 1340 bp, Cannabis sativa
ttcacgcaaatctaaagaagttattacagacgagccacatgcagggaaacttgcacgtgtggttctaccctcaataacacgttcgatatccacttcgtggtagaattgaaaaagggatagatttagatccaattctttgacatatagcccacggcctggttgccaaagtgtagccattttgttctgcatagcttagaaatcaatggatcgattagttaaaaaacgacaacaaggagtcattgatgatcaatttttgataattcgtccgcacccacatcgaacaacaaaccttcatcgtcctcatcctctatcgaaaatgctaaatattgctcctccatatgtgagctacaggattgtctataactcatatggaggaggtgattattttatcaaaatctctaattgataaacataattttaaattaataaggtttctttattcttttaagtgaatattttacatttgataattacataactattatatatactaataatcatatcatataataaataaatttattagtatatataattaaattgagacaatatctatctataatctataactataataaaagtgttgctaattttggggtcctctaaaaaatttaaacttaatgaaaactttatgtattatttatttattaaaattaattaggtattttatgtattgattatttccctcttaacaaaaatcttaagttttcttaaacaaaaaaaaaaaatcttaaatattttattttacaaaaataaaacatgtgtaaaatatcttaaatatttttaagcgccacaaaattattaaataattttggtcttttttaattacattgaagatcaagacaaagaatcactttattactaatatattgaaaaaatatttgaagtaggggctcacgtgcgaaacacgttaaacccaactagtatatattaaatggtgtaaatgttgatcttaaataaataactatgtatgtattaaggtacagtttaaagtgtgtaacactacaaaagatgtacattttgtcatattatttgaataaataatatagaggattgttaactaattataaaataaaaatttttacaccaaaaatacaaaatacacactttattacatatatatatcttcacacggttaaaccaacatttatacccattaactttattttattacacttttaccacttgcacacacaatccatgaaaccacacacgtcatttattgatgacttatatcaatcacacattacatcattcccttatctttttctctttttttttattattattttcaattttttttcagttttttttttaaaataaaacttccatagctgaac

SEQ ID NO: 161610 - DNA, 2913 bp, Cannabis sativa
gtcagagaacggcgaaccattgccaaatacaattcaaaacttaaacattccaagttttcaaatctccccgaatgaataattgattaattagcagacaaataaagttcacagatttataaatatatataatttttgttttttttagaaaccatatagaagtacaaaagagaatgtagtaggagttgcatcagtccagcaaaagataaatggttgaagatgcattcagcggccctttgcgtaaaaattgtgttatcatagtaactatgtcgcttgagcattgtgccaccccttcgtgcatggaggaatggtgatgaactcatcgaattccttgacatgaatgtcacagcacttccactgtcaaaaattacaagatgttattactattatacatgtatataaaatgttagactaagattttctttctttttttttttttttcttttgtttatgcatatagattatatacgcacccctctcactcggtcgtggaaaatagcaggccctggatggtaactgcatgcagtttcatgattatctttctctttgaaagtttgaccacatcctttgtttttgcagatttggggttcgtttatatcaataaccttctttgcaggagcaggaatagtctgagcatctgtattgatttttgccacggaatctgtgcctgtaggttttggtttaacgtatttagcctgtgaacctgaaaaaaagaatgcaaaggacattgtgttaatgaaagttaagaggaagataaataaataaaaagcaacagaattgggaaagccatgatgaggaagtgagattcaaaattaaagaagttctttaggtagcggaagagcgaggagacctagagataactggaaagtcaattggactcaaaaagaataggctcattaaatcgaacatacagcttgaatgaatctttagatttgattcatgtgaaacatcaaacaaaccagaatgacactagaacaaattttgaaacattgaaacttagacaatgtctacttttcattccagatccaattcatactcaacattcaagtacaacattcagtagtaagaaagtatgaacagtgttcaaatactcaaagaacaaatcatataaacgagattaccatgatctgagcagaaaaacccttgccggcatctagagcaggattctttggctgatgcattgattgctggtgacgaagtagaaggtgaaatagaaatatttggtttacgcactggctttgttagcacaggtttctcagttgtgtgtttacctgttttacatcttcatcaacaaattatacagctttaggaaaacagacagtgaaatctatacaagtaaactatataagagtacttctcactcccacacacaaagaaagtaaaatgtacacaatgaaacccaaaaaagactttcctgaattaggtttctattttaaaaacgctagcttttaagcagttcataaactagattcgtaataaaactattcttaccttcatccacagtcaaaatccaatgcagggaggtcataaaaaaaatctaaaagtaactgagaataaagttgggtcttaaataaagggaacaattctgtttaaaccagtacagataggcaaacctcaattctttgtagtgcaaatgaaaatctattgttatactcctttcttcttttcatttcatgtgattacagcagtacataattatatgaaaaattgttgggtagtcattgtttttaatcactatgtataaagtttttttcccaatgatttagaaggctgaaataaagatcttaccaacttattgcacgtgtgctgtacaacatactaatttgaatcatgatattagcatcataaactatttacaaaatttgtaggacttcctgtcagtacatttatatgtagacaagtagaaaaaaagataaacaaaattgcattttatttaaatactaagaatatagtgattaaaagcaatcccttactatagtggtagtatataaatatgtatatacatataatcatttcacagtactgcagcatttatataacaattacaacccagcccatgataactaacccaattacagttacaaacttatgtttatcttcccgttgataaaaaagaaaacattaatgcttacccaggaatttctaaaaataaagaaaaatcatgacttctcttcttgcagcaactccactctttcattccgtcatgaaataaaggctggaaattaataaaacaaataagcaaaagaaattagtgattaaaaaaaaaaccagaaatataattcgaaaagatgtaaacatcggcgtaagacttactccctaaataaattgttgatgcccaggccaagcaagtgtgtagaaaccccatcatgcaaaaggccataataacatatgataactttaattaaaaagaagaagaagaagaagaagaagcataaccgaaaaaaaaaaactttaaaagcaaaatattggggttgccatggcaattaagttcaagtataatacaaagattagaattttaatagataagagatcaaagacaaccatgtatttcaattgggtgtatgaaaaagagagaagaaaaagcctttgaaggcatgaaattatttgatgaaataaaatagagaaaataaagaaaaataaaaaacttatggactgaagagagaataccgaatcatggtattgacaagaaccttcgggattatcgtcctcggagaaagtagcgtcgcagccaattcgctggcagcgaaccctaacagtacctttaccctcttccatagtctttgtctttgagagtagtgttcgaatctgcgttcctcggagtaaaactcaggacaactccactcaaagtgtttttttttaaccaaacttcaacaaagtttaaaagtgtaagtgcaactctttttttttttttttttt

SEQ ID NO: 161611 - DNA, 8070 bp, Cannabis sativa
  modified_base (5860)..(5872): a, c, t, g, unknown or other
  modified_base (6666)..(6667): a, c, t, g, unknown or other
atggaatcccatcagaggcaaatagtcctagaacatacacgaggaggagttctcctttgcattctcccttcggtagtaatgatagcttacagaaggtgaaagatcttttccctgttttcctttgagctaaatatgcagtctgtgacttagttaaatgtaccacaattatgtgttatggaggccccctttcttctagtttaggtcctccttttattattaggttttgagcttggtcttgttttgctttgcaagggtactcaattgactgtgttttgtttgcctattaaatgaagtaacttctggtcaaaacaaaaaagattgttaatctaacttttctgtctatctaatccaggatggttcagatcaccttcgcctccatagtccatatgaaagtcctccaaaaaatggtctggataaggcattatcagatgtgatacaatttgctgttcctcccaagggtttcttcccttctgattctgcaagtgcttcagtccattctttgtcttcaggaggctcagatagtgtgcatggtcatatgaaggcaatgcagatggatgcttttagagtcagtctatcaagtgctgttagttcatcaagccaaggttctggtcatgatgatggtgatgccttgggagacgttttcatttggggggagggcacaggggatggtgttttgggtggtgggatgcatagagttggaaatacttttgcaggaaaaatggattcgtttttgcccaaagccttagaatctgcagtagtccttgatgttcatcacatcgcatgtggtggaagacatgcttctttggttacaaagcaaggtgaagttttctcctggggtgaggaatctggaggcaggcttggccatggtgtagattctgatgtattttacccaaaacttattgatgccttaagtaatacaaacattgagcttgtagcttgtggtgagtatcacacatgtgctgtaactctttctggtgatttgtacacgtggggggatggtacttacaattttggtcttcttggccatggaaatgaagtgagtcattggatgccaaaaagagttaacggtcctttggaaggcattcatgtgtcgtctatctcttgcggaccctggcacactgctgttgtgacatctgctggacaattgttcacttttggtgatggaacttttggtgttttgggccatggagataggatgagtgtatctttacccagagaagtggagtccctgaaggggctccgtactgtgcgagcggcttgtggtgtttggcatactgctgccgttgtggaagtcatggttggaaactcaagttctagtaactgttcttcaggaaagctgttcacttggggagatggtgataaaggtcgtcttggtcatggcgacaaggaagcaaggcttgtgcctacttgtgttgctgctcttgttgaaccaaatttttgtcgagttgcctgtggacatagtttgacagttgcgcttacaacatcaggccatgtctatacgatgggcagtccattttgtggccagttgggaaatcctcaagctgatggaaagcttccaacccgtgtagaaggtaaactttccaagagttttgtagatgaaatagcttgtggtgcttatcatgttgctgttttgacttcaagaactgaagtttacacttggggaaagggagcaaatggtcgtttaggtcatggggacatagatgatcgaaattcacctaccttagttgaagccttgaaagacaagcaagttagaagcattgcttgtggcactaattttactgcagctatttgtcttcataagtgggtgtcaggaatcgatcagtctatgtgttctggttgccgtctaccgtttaatttcaaaagaaaacgccataattgttataattgtggacttgttttctgccattcatgcagcagtaagaagtctcttaaggcttccatggcaccaaaccccaacaaaccatatcgtgtttgtgatagttgttttaacaaactaagaaaaaatattgaaactgatgcttcatctcagtcttctgtgagcagaagaggtagtatcaatcaggggtcaaatgagttcattgataaagatgagaggttggattcaagatctcgaacacaacttgctaggttttcttctatggaatccttgaagcaagtggaaactcggtcttcaaagaagaacaagaaactggaatttaatagcagtcgggtctcacctattccaaatggaagttcacaatggggagctcttaatatttccaagtcttttaatccagtttttgggtcatccaagaagttcttctcagcttctgttcccggatcaagaattgtttctcgagcaacatctccaatttcaaggcggcccagcccccctcgttctacaacaccaactccaactcttggaggacttacatcaccaaagattgttgtagatgatgccaaaagaacaaacgagagcctcagccaggaggttaagaaactaagaacacaggtagcatgattttagacaagttaatacttagctttacagtttccatgttctcttaaaatttatacatttgctttatctttgctaaatgtatagatctttaaaaaggtagtaaggagtgtggactttatgtagaaagtttaaaaaacctgtactactgattctacccaaaccctttttgtgaaagggccaagctttttcatctaggagatatgctttgaagaaataattatagaagattgaggcagctatgataatttctcaaagataggagatgtagtagcgatgataatctctcatactcagaatagagtagtgttagcattctttttctctccctcttttacaatctttatctcactgattggtatgtgaacttcatataacatctcataattttcacggaaaagagccatccctttgatttttcagctttgagtgactagatgaaatgttctatgctttagactgtttgaaactcccataagtttcgtagtacaaactcttgggaagagtaatatatgcacattatgtttagtatgacaatgttttagggcaagcaaagaacctccaccaaccccactgcctgcacacactcacacccagcctcttgacccaacctcaagtagcaattgtagatgtacttttagttaggagtatatgcactgatcttcttattcatttacgagtctgcttgtggattcacttgatccgttaatgttattttgctttttttgatatctatcttaggttgaaagtcttacacggaaggcacaacttcaagaagttgagctggaaagaacaactaaactgctcaaggaagcaagagaaagtgcaggggaagaggcagccaagtgtaaggcagcaaaggaagtcatcaagtcacttacagcccaagtaagatggatatttcgtatttgtgtgcataactacactcatccattttttgagcagtttggtttttatgtgaatatgaatgttgttttatctagtttatcagggggagagtcttgtttcatttggaatcttgttttatttagtattcagtcattctattcaatgagctacgtccttcaattatctgtggtggataacatttattaattataatgtacttgcataactatgtcacatggatcttatttctattttgatgttgttaaattggtagatatttcatgataatattttgcttatgatgcattaaatttcttgtatggtaacagttaaaggagatggctgaaaaacttcctgttggagcatcccgtaacactaaatcaccttctctcacttctctgggctccgatcatgtttttagtgatatttctaatccttcagtagaaagattaagtggtcaaatattatcccaagattcagagtcgaatggaacaaatgtcccattgaattgtaatgggtccactaccaacagtaatagaagttcaggtcataataaacaaggccattcagatgtagcatctagaaatgggagccgaacaaaagatagtgaatctcgtaatgataatgaatgggttgagcaagatgaagcgggtgtttacattacacttacctctcttccaggaggtgccaaggatctcaagcgtgtccgcttcaggtatgtaattgttgggatttttccaccgtcatgatagatatcttataaaacacgtctgcatgttattagttgacagtgctgatgatcctataaaacatttaaggaaatcatgctgagctattcaagcaaagtaaatttatggttaaaaatctcattttgaaactttaatgatccattcggttttacatctaatcttaactaaaattgaatttcttggttatgttagctcgtgaagtcagtctcaattagtttagtcctcacaagtcaatgtataatctgaaatgtatcatttttacttaaaacatgcaacccagaacaagaactaatttttcttatcgcttaactcaattttatcttcaaaatgcagtcgaaaacgatttagtgaaaaacaagcagagcaatggtgggcagagaaccgcaccagagtttatgagcaatacaacgttcgcacgatggacaagtctagtgttggcgttggaagtgaggacttggcccactgacctgttgaaacaatctttatgtaaatgaaagggttttctctagattggagcttgagtaactgtgaggtcatactggttaattagagttggcttccatcttcctaaaggagctaaaaggcttgggtataggaaggagaattaagaggggtttgattgtgttttctcattttatccaatttgtctccgattttaatttttttccccctttttgatttgtattccattttttacctaagtgcttttgtgtgtgggggattgagggtcagaaatgtaaattcctagtaggttgctgctacatgttgaaagcagctgccttgtaaattccataagtgaatatgcagtttttttcttcccttcccttctccacggttttatacatttgttcaggtaatcttacaatcaaatgctacgtaatttctaggccatgctttgtttctctccaattaattttcatgcatataaaattttaagcggaaaataattgataaattagttgttggtttagggttttaataattggataaatgttatgtttagtgtgaagctatataacgtaaaattaagctagatgtaaaaaaaaaaatgcatttgtgcatttatcttttgctttagctcatagagaaactataatcacaattattattagttcttatatatacaacggtaattgttacagttattaaggtgacaaaatcagagtttaaaaattttgttgcgagtgtaagaaaaaaaaaacaatgcaatgcaattaccgtgcaaaattggagttataatttcaacccaaaccaaaaaccaaaaaaggtatgtagtatgtacatcctttttttaaaggttgtgttgagattgtttattttgagagtaagttgacaaaacatcatgtcaaatttgggttcaacaacaagtatggttgatatggcccattctatataaattagtgggagtgccacatgcaagacatgtgctgccatttattcctttaaatgtagtttgaactttgaagcaacatgttgtgtgaataaaacttaaaatttaagaatatattgaataaaactcaagatgaaacaaactagggaacttgcaccctagtattattgagtataccccaaatttttaaatgcatttttattcttttatcaaatgatttattcttaataagtacacctcgctcactaaaattcatccattagatattaaaatttcattcttaaatcaatcattcgttacaaaataaattgttaaacatattattattattattannnnnnnnnnnnntattattgttgttgttgttgttttgatagtatataaatttgtataatcatgttatcattatctttgtgatatgattttacataagtttatatactaatctaggggtttttataaaaataatttttagattaaagtttataattttaccgacataatttttttaaaaaaaatactatttttttataaaataatcgtaaaacaataaaatcgaacaattaaaacaacagtagaacaactaaaagacaaccctggaaacttaatacagtaaacagtatttttgaaaaaattccaccccacagtaaaaaaataaaaaagttaaaaatttcagtatgtggtgtaaaaactccattaatctatttgttttttttttctactttcaattatttttccgttctaaaattatatatattatggtttcttttgttgaatagaatcctttaatttttgtaaatatatatttattgtaacgccctgatacttaggcatgctacagtgattttttaattacagtgttatctttgctaattaaatttttttttcttgaaaatcgtgtcaaattaaaattttagatttaactaataaactttataaacttttatttaattatttacaaaagtcaggatcctgtagttaaatttttacaaaatactcaaaatacatttagtcaggtcgcacaacgactacaaaataaaaccctacatgtcccgagatcgaacactccaggttgcgccgccatgacatgtacaatatcatcctagctcgaaactcactcttgttcagccttcgcctttccnntacctacacatgaaagtagaactgtgagtagacaaactcaggtaagaaaagcatataacaaatcatataatatcgacttgaatctaggcacccatacacctatttacaaggcttaacaaatgagtaagaaccactgtaccacatacactatgtaccgacattgtacgagtgttggtagagtttgtgtcgtatcctgagtaccactaagtggtataccgcatatacactgtacctttccgtacttgtgttggtaacaccgtaatgtactcatataacaatatacattataccaatgcactctgtaccattttcgtacaagtgttggtagtgtattaaccataataagcgcatgcatatatatatatatcacacatacatatattcgcatatatatcacatgttctacactattcttacctcattttcgaattcaagtgagttggacaacctgaacggaaaacctcgtgttggatggatgcccttcactaattactccttgaattcagctagctcccttcaatttacaccagaaaatcccaggtctaggctggtttgtggtggtcgagcaaggaagaaagaggaagggtgatgattttctctaattttctttgtttttttccttatttctcaaatgaataacttaattaattaaacttaatcttttggctgaaaacaagtaaatggccagctgccactctcacatgcagccacctaatccccctttaaaatgaccaaaatgcccttttagcttaaacttaagctaacttaagcctaggggtaagatggtcaaaaactataaccccgctcaaactcggtattcaatttatttccaatattatcccacttaaaaaaaagttctagacttacccatgtgatttaaataactatccatcgcatttttcgtcgtcaccgagcaaatattgtaaaaagtagcataattcatatataatacaaatgatacatctagaatttaataaaatctctagaattgagaaattacaactctaatgcatatttctaaaaatgggacccataattaattaaattaataaatatttaaagaattatcaataattaacgctaattgcctttactaatccatattctaaaatgcggtcattataattatctccccattaaaaggatttcgtcctcgaaatctaacctgaatatctctggatattgagtcttcatgtcaaactctaactcccaggtggcttcctccaccttgttgttcctccagagcactttgaccaaggctacagtattgtttcgaagaaccttttccttactatcaaggatctaaactggttgttcttcataggactagtctgactgtagttcaagggcttcgtaactcaagacatgagtcggctctgaaacatatttcctcaacattgaaa

SEQ ID NO: 161612 - DNA, 2505 bp, Cannabis sativa
atgtataatttagtacttatagcagtaaaaatttatcaaactataccgaactttgtaaatatttcgtgtaataattatatataatggagatcaagactattgtaaattaaacatatattacgtacgtacttaggtataatttggtttgattttttatttacatcatgatgagctttgtgttatctttaattactaaatccataattaactagtactcgaccttagattcttcttttggtaaagaaacgacgattctctcgaataaaaaatgtagaggtatataataattcaatacactgcgctgctgatcactgttttggcatattattatataatagattaatactatatataatgttacttcaaattggagccgaaatatattatacataaatattttataataaagatcgttgattatgaacgacaagtacatttgaagtgcacatggaggacagagcaaactatctatataaaaatatattctacgtatattattatatatagttatctaatttttacgtaacaaagtatatattcttttgtcaataagatgaaagggttttgttattataatattaaaataaattaaccttattattattattattatcttcacttatcttgatagcatgccggaccccatttgctgatagtgagaaccaaaaagaaaaagactattatatttttcacttcaaaagtttaaatgtattattagtgtaatatataataaattgaaaaataaatataaaaacttcacccacctaaatgttgtgctatctttttaatcacaataaatttttaattatgactataaaacgacatttagtcacacaacacagacacacaccaaaaaagattaattgtagtactattgaattggaaatttaaaacaaatttacaaacttcacttaattatgttaaattgtattaattaatttattactctttattatatcaaccctctcaattggcagacaattaaaaatatataattgaataaaaaaatgagtagaatggtcccctcccctctatagattggtctagctagttacaccatattctttaccagcattaaagtttttttttttttttgatttaaattcttactactaattctcactcagaccgaaaagtcactgtagaatttcattctttcatattgtctggccttttttcacttctcacgctacataccattattgctccaaaccctttttttccttccttctcatattgatacataaaagcaattaatattttgattttttttgcagaaggtaacacttttggaaatgtacttttcaattttgccatgtacgtatacatatttaattaaacgcacaaatatatatatatatatatattacaaattaaactgagataactaacgtatgctcagaaagaaaagaaggaaataaaaaaaaaaaaaagtgagttttacatgcagtgaggcagttctcatcagttttcacaactcagtcaaaaattaaaaattaatatatataaatatatataaataataactgtaactaagcggtgggaatgcatttaaagccatataggtcaatatatttattctcttttttcacgttagctaggtttatataaatatgagagagagttacgtagtaataattttcattaatagaggacgttttatcacaccaaccaattatcttttccttcttttgttttgttttgttttttgttttttttttctaggacaccaaccagtttcctactgtattaatattcactgtacacatattatttatatatatttgcttaataaaacgccacattataacgagttgactacacatggaatacttatttcatcaagaactaatatatatttatttatgtggaaaatgataaatatatatgtattattatataaaagatgagattaaattgtatcaatgaattaaaaggtggaccgtatttcaaacaaacaaaaaaggaccagtatgtacttttcttaaaattaaatagtgtatatatatgctaatctagattacaaatcaatggcactagtcgtatatgtacatgtatatacatatctttattaaagctgtatctatatgtatgttgtttgaagctgagtacgaaaattgaaaacatatatacatgcagtatatataaagaaatgcaagccccagctgcacctacaagttgaattgtacaaaaaagtgtttatatatcttatatgtgataataaaaattttatctcattccaagaagaatatgtataatcatatatgtataaaatctgtacttcttaattagtatttagactctgaaaaattatttagtgcttaaattattatttattattttaacgcacataaatataatttataattaatgtatcattattatttatttttattattttcatttttatcaaaggatcgagcgtcttaattaagaataatttactcaatgcagactactccaactcagggccggcccaagcattgagcatcttgggccattgca

SEQ ID NO: 161613 - DNA, 4229 bp, Cannabis sativa
taaaaactaaaagaaaattaacataataacacgtaacatctatctagtatatatatatatatgcattcgaattaaagtttaatcttatcgaataataataaaatgaatcttctaactacagtaacatgccaagaaaaaaataattatagattaatgtaagttagctaaatcataagaacagaacatcagcttaatgatgaggttggaagtagtaaattgtccataaaaataaatctattaaatggaaattcgatcattcctttgaaaaaattcattaggagaaagaaagagagaaagctgaaaaaagtcgagctctattgtaatggatatagatgccatagctggaagatgcatccatcaacttgtttcccttttcgaaaatgggagaagagtagatcttacttattattacttattatggaacttaatttaattaccaatatttttaccttttcacagtgttttttttttttcttgaacactttttcagagtttttaaattttttccatacactgataagacttttttcagcagagccaaaaaaaaatcctatgtaacgaagttgacacactcataaccatgttcctaaggctactgcaccacttgatcgtcgatcaaagaatagtaagttatttccaccgtaaggatataactgatgtcgatgtatccatataatatatataaaatatatatggataaccttaaagtaatttgaaacatgtgcatattacttattaataggtagatatgtatcatacttgtaggttaaatacctattggtcataagtcgtgttttaatataaaaaagtaattaaattaacaattttttaataagacataatgattgtaacaatattgaacaatatacagagtgatgctcttttaacgacacaaaacaataaaataaaataataatgttaaaaataatacaaagaatttctacatacatctgatactctacctccacccatgtttaacgatggtgtaagaatttgctgccgtcaaaacttattatatatatttacggaaaagatggccaccaaaactcatacatttatttttcatgaaaaaaaataatatatattaattagaatgctctaatctaaatttaatcctaattaattgagagaattctaacaatataattaaatattagcggaagtgtactagagtttatagaatcgactttaaaattgtatgatcttacaaatttgcagtgaaatttttttctgtggaacttttgcctcttgatgatggggtttcatgaagaaaagatacaacactaaccattacctttttatattatcaactgctagtaatatttattaattatttttatttagcccctcgttaaattagaaattatccttatagcattttgcctttaacataaatattgttttaaaatacataacttcgacttatttatacgatgacccaatacacattttatatatataattgtagccccaagtaaataaatttctcaacaatattttcatattttaatccaattttatgtaatttctttttcgtttacgttccatctttattagtgtaatttttatatttatgcccattttgtttcatgtcattatctttacatttagggaatttttagatatttttttttaacttttggctcagctaaacaaaattctgaatcccaccaaagctcaggctttgctggcattaattagaaccatacctcgctgcggataacgacttttttccggtgaaatcatgggaatttttaatttttttttttttgtagtgcatgctgttaaagaaaatccatccagtcctatatgtaaaaatatgaaacaaaagaaagcgaacgatgagaatagatgaatttgcacataaataatctgtcatgactacataaagaattgcaaaatacccaaaatacccatgagaacgtattctataaatagaccccagttgtcttccattaaagccatcccaaacatataattagagttgcatgcataaaacacatacttctgaagatgaagttaagcaaccttcttacactcttttcaatttcctgtctttctgttttgctagtggggattgtctctacagatggagcccaatgtggaagacaggcaggcggggccttgtgtcgaaataacctctgttgtagccaatggggtttttgtggtagcacagaagcctattgtggagctggttgtcaaagtcaatgttggaatgaaagacctgatcacagatgtggggctggcactggaaacagtccatgcgctccaggaaggtgttgtagcagatttgggttttgtggtagcacagctgcttattgccaaggaaacaattgtcaataccaatgttggagaattgcaccttccactgatgaactcattcgtgctatgctcggagattataacgccaatgatgattcagatataagaaatgttattagtgaatcaatcttcaacgaaatgtttaagcatagaaaggattgcccaagtaaaggtttctacgattaccagtcttttgtcattgctgctgcctcttttcctggttttggtaccactggagatgtggcaactcgtaaaagggaaatcgcagctttctttgctcaaacatctcatgcaactgcaggttacttacgtaattaattaatggatattattcaataatatatatatatttatatatatagttactttaattattttgtgatactgatcaatcaatatttttcacgtgtaggaaaatggattgattcatttgatcaacatgcatggggatattgctttatcaatagaacttctggcgagtatgattattgtacatcttctcattggccatgtgctgctggcaaaaaatataatagtcgaggaccaattcaacttacccagtaagtattttattttagaggaattaatttcagttaatgttttatttataaataaaataatttactttagataagtaaatactactatatattcatcttctatttaatttattctatttttctcactctctatgcattaattaatattgtaaatttgattattaattgtatctatattatctgaatttgtattttaatatatatcattattgtttaaacagcaactacaactatgggcttgctagtgaagcactgggaatagatttgataaacaatcctgaattggtagcaacagactcagtggtgtccttcaaaactgccgtatggtattggatgactcaacatgataacaacccttcattccacaacattgttatcaatgcaaattctggaattaaaaaccaactcccaacttatgctaataccaataatgacaaaaaccttgttgggtactataaaaggtactgtgacatgttaagggtgagttatggagataacttagactatttgtctaagtttcctaacgcctctggcatttctatgctttcccagatctgaaatcgtttatagaggcaaaagtacgtaccataaaaatagtggcttgattataattatgaataaagaaagcctactacattgcctcatgtaattgtatatgtgtgtttgtattaaataaggagctcaacttgctatgttctgttgagctatgtttgtcttttgattgaataaaatgagcttatgctctctttattaattatattatgtagttactcaattcaaattcgtccaactttatttactacttatgaatatttattatgaattattattaaacagttactaaaatattcaatacactgacatatatatgatacagaaattgaagacacacaaggtattgttaattgcaatttcgcattttctatattcaataaagaaaagtttgcagcataaataccatatattttcaattttatatatttaaatatttttttagcggatttaatacaaaatgttgtattttaggcctctccgttactactattctgttagttgtgactaagtgtacacgtgtaaggcccaaattaaattcctatttttttttaaatgtttagttaaaattaaaaacttaactttttaatctaatatatctaacttaaatttaattttcataaaattattttaatgaattaaaattaaaaaaaaaaaattaaaaagcaaatgggaaaacgaataaatcatcccaattaaccctaaatctcatcgtcttcttcctgctgtcttcttcaaccaaaaaataaataaaaaaagggcattttacaattttgtatacattattttaattaa

SEQ ID NO: 161614 - DNA, 3416 bp, Cannabis sativa
aacttttttattactatgtcaaaataaaaacacaatagcatcaaagtatttcgtttgcttacaggtaacagattccccgcattttgatttctcatattcatattgggattgaactaagaaaatcattccgatcagtccggtggcaataatcaaccattattgacagaaattaaaaataagaataattataacaaataacaatgtttatgcggacgtttttacacctgtggtcagaaatagaaacttcaaacctatgccacagatcaaaatggaaatgtaaaactctttctttattgatacaaaaccattctatgccttaattctaaaatggaatggaatggaatggttggttaattaacgttttagtatctatacctaatcaaatacaaaatcataaaaaaatgcctgtcttcctcaccatctgatatcgaatgatgtcttttaaagtttctccataagaaactgaatatgcctgtcttttaacgtagcccacgtccactcactcactgcattgcatatcaaatatgaaaggttatatagacctggtgagaacatatcccttcaatgaatcacaaagcacactatgtcaatcctataaacaatacaaatgtaccaaatcagtccctagcttagtacaagattaatgaccaggttcatgtacttaaatctcaatcaacttatttttctatttatttaactttttcccttttcgagtaagaataatgtccagcccaggtaatatataaaatttctcaagaggacgctaattcagattattttgtattttttacacacacatttagatattcatcatgcaaagttctctcgagctgctactgttttgccacacagttttatcctttgggtgatcatttttattatcaagaacaagaacctgcttgtttttcaaaggatgcacatacaaaaacggctaagaagatggtggtgcaaaatttgtcaaccagctcctcaaagatgggcatgaaaattaggcatattgcaaacaaacaatgactgttttatttggaaatagaattaaacaatagtgcaaaaacaaatataaccacaaatcatatgatgaaagccagtgttagattaccttagacttcagccgcatggatcttctaggaaagtcttttctggtaataggttttgtacttctaaagaacattgcactagctctaccataactactttgatcagtttctatccttcttttctgaagtcctctagtatccaaagtatgagaactcaagcatgtcttcctagatgacttggaaaattgtgaacatctgaaagatgaaaaattagatataagctgagctcaccacaaaattgataaatcaaagttttcagtgaaaagaaaatttactctgaactttccgtctcttttaaaatgttactcttttcctgtaaacgaaagaacgttagagcaagtcactggaacaaatatgataagcttacaaagtaatatgtaaagttggatgtgcgtgcaattaaaaattttagagaacagaaatcaataatgccaataaatattctgtaaaaagattttaaaaatatacaagaatgttaatcagctcataattttacatgtgatatgccaggtttaaaatgcatcaaacaaggagggatggagacaaagatttctaactaatagaataattataagagatgatttcccaaagacacgagtaaaaaagacttttttttttcattattgaagtaagcaattcctaaagatgaaagagaaaaggtgttcaaaatagtgcagtatgcctagtcttaattcaaaattggcctaagatatgtagtctattcctaataaacagcataaatttccctagtggtttttctgtatttcctttaggacgaagaggaaaaaacaacagttcacatgacatcctgcataaacaacttaaataatttaaatgggaatatgacatgccaaccagttatagcttcgtttatgcagaaaggggaaacatagacataccctctcttcatcaagtgcaggcaaatgcttcttgtatgaattggggtccggttcacttaagttagctaatctggttttttcagtttcagtattgttctttgtgtcaaacccactcatgagtccactattttcacaacgtgaacaagatgcatctttgttgcagcttgcaacttctgatgactgcatgtctatagaaccacttactgagcatccagtatatatcacagtaggatctgcatcactacaaccattttgaaggaatgtattttcgtgctggctcacattggaattcagatggtctaatctctcaggaattaagggatcatctgagatagaattgacagcagaatcacagacagactttgtgtgatgagcaccaataacatctgaatcaagaaccaccgtaccaccatctttagcacaagagtcagcaacagaaattatattgtcatgtgcagtagaattaaactcagatgacttaggggtttgatcttcctttgacttttcaagaacatctacagaagcagtgcatggctgtattgtgaagcgagttaatgtttcaaaattttccggttcattaagctcagagtgatcattttgtgacacttttgaatttggggagcatcgggtttctatttgtccttccttgatttctcctgcatctatattccaaaaagagtttctcatttccttcccaccttccttgagatgcccaaggtcctcatgcaaactccgacacttattattctgcacattctcacatatatgaacttcatttttaaatctctgagtccagtctgatgggcttgaattcaaatcaacataaaggttaatcccctcttctgatctgacataaaactcaaaagaagagaaacgaacatttggagaactttcaatggcggaagccaaagaattttcggcaggacaactactatcatctttgtccctgcatttggtttgaggcataacttctacaaaattgtcttttgatgaactgaaaaacctctcctgagaggttttcctttgggctttcctattatttatactactaccattgcatttagactgagatgtcttctggagattacagatcgaaccattaattccctcctgtgcaagacaaattcaaatacatctaatcaacactaatttctcaacactagtttacagcaaggaagcaagccaaaaactaatcatcaactttttttcatcttcaatttgtatgttctgaaaatagcatctagtaaaacagtatatctcaacagaaaataagcaatcaagtaaagatcattacatatttgataacaaaaaaatggatagtggtaaaaaaaaaaagaggtaaaatgaagcacaatcaagaaccacatggaattagactgcatgtttacagttaaaagttttactcttttttttttttttt

SEQ ID NO: 161615 - DNA, 2291 bp, Cannabis sativa
  modified_base (2258)..(2266): a, c, t, g, unknown or other
cgaccccttttatgcagaatcttgtgaattatttcttgagtgagaatagatgactctgctatccaccttcctggaataaacgcagactgaaaagggtaaactaaatcgttcatgagcggacgcaatctattggataagatttttgcaattactttataagagaaattgcaaagacttatcggcctaaattggtctacactcatagaaaattccactttaggaatgagacacatgaaagtgttgttgagcttcgagtacattctgccacttgagaaaaattccttaactgtagtacatagattggctcctacaacatcccaatacttatggtagaaacaacctgaaaacccgtcaggccccggggcctttagaggatggagactgaaaactgcttctttaatctctgcatctgaggggatactggcaaacttttcatttgaaagagaatcaatcttattaacaaacaaaccttcaaacatctcatcaataactggttttgcagaggtgaacaattccatgaagtgtgagtagattacttccccaatatgcttcctatccttccagactttcccttccttatccttgagagaccatatactatttcttcttttcctgataattgttgcagcgtgaaaaaaactggtatttctatctcccaaggctagccaagtctcctttgacttttgtctccacatgctctctaatttggaccaggcagccgagagcagtgtttgaactctcaactcttcttctttaagtactgctgtaataggttggttttgaatccaaacaagtattccctctaagtctttaatttcaccatcatttatccccttaagattcttcttccaagcctgaagggcaatttttgattggtgaatgtttcggatgaaagtccaagtagcagttccacccgaagaggaccaggcagaagcaattacttgcttacaagaatcttcccacgacaaggcttcaaaaaaacgaaaaggtataaaacctctagcaatgaacacatgagtgtcaagaattataggagcatggtcagagattgagataggcaaattcctcacacccgctgaggcatactccaacaaccattctggagagcataaagctctatcaagacgctctctaatcagacctccagaaaatctattgttttgccatgtgaacttgtttccaataaactgcaaatccacactcccagtgttatccatgaagtctctaagccactttatatatgagaaggacacatttcgaccctcaactttctcctcttgactgcaaatacaattcaagtcccctgtcaatacccacgacatctgacaaggagagaactcagcttccatgcttttccaaaagacctattttgcatctatataaggggtcccataaaccacatataatttccaattcagttgaaggtgaacatcccacacagtagcttcaaagaaaccttcagcaaaataattaactaccaagtttatattattattccacatcagacaagaaccccctgccaaaccattagcaccaacacattctactcttgtaaaacccaacttccgagagactctctccatggtactcttacttactttagtttccatcaaaaagacacaatccaccttgtgtttattgacccaagctacaagagcttggggtgtcgggtctcttgcaaggccccgacaattccaggataggcacttcatggcgcttggggggcattataagggccgcctcctcgcccatagtaaaattttgggaactttcaacatgcacttcaaccagattgagagtatcaataagatttttctgggtaatattatcagcttctggttctaaattattgctttgattcttcttagtagctatagctttggatcgagaccccttccttctctgtttgtcaagtttcgtggaggaggaagaggctcctgagcccatcttaaactaagagttaggagctggagagaactctggtaggacagggacttcttcagagaattccatggtgttttcctctatatgttgcacataaggaactaaggtgaggctagctttccttttcctcggctatgggcattgatggactaaattggatacatcaattgggtcatgaaatagggtaggcattggctcaaacttgtccacaggtaatgggcccataagttcctcagccaaaccaatctcttcagcatatacgggccaagtaaagtgggtgggcttaggatgcttatgttgggttttatgccctnnnnnnnnntccatttcaatgtaatccattttat

SEQ ID NO: 161616 - DNA, 4154 bp, Cannabis sativa
catccaaccagttcgaccagtttttcggtgtgataaggcatgagtaacttcctgcgcaatgatgatgttatccgatattaatctaccaggaagaaaagcgctctgagtgggggagataatgcgactaagaataggcttaagacggttcactagcactcgagatatgattttatacggggtcgtgcagaggctaatgggtctgtagtcagcgatttgttgagggtgaggattcttcggtatgagtacaatgacggtgttatttatagcaccaagatcagcctccccattaagaaagctttttgcagcacggagaacatcctggccaagaatatgccagtttttttgatagaaagtaccagtgaagccatccgaacccggagccttgtcattggccaattgaaaagcagctctctttatttcagcatccgtgtaagtgctggtgagagaagcagcctcagactccgagatttgctcactcagaccggataagacgcaatccataagttcattgccaggattttgactggtgaaaagttgagaaaaatactgctcgataatgagagcaaaggagttattgtccttagcaatggacccgttggggtgcatcaaagagcgaatcttatttgtggctctacgagatgaagcaaattggtgaaagtattttgtgtttttgtcacccaatttgagccaattcacacgggatctttgcttccaatattcctcctctttgtataagaggtgatcaagttcattctctagctttcgcccaagcgtaagctgagcctcagttggctgagtacaattttgcaccgtgttaagacgcgcttgaatatccttgattttggatgttaaagatggccccagggtttttttccattggcgaagatgagatgagcaattctcaagctttttagttatgcctagaattggatcactgtcgtttatgtgagtacttgatgtcgaagcttttcgaaggcactcatcaaagccatcttcagccatccaaagtttgtcaaaaatgaaacgcggagtgggagagtttgaaagaacttggtgatgaagatttaaaatgagaggcctgtggtccgatccaaaaaagtcaccatggataaggtggtgactcggaaagagtgaatcccattccgaagaagtaatagcccattcaagccgctcctgagtatgagtgttttgcttttgcttatttgtccatgtgtaaatgttgccctggggagtaagagcatgaagggtaaaggcatccatgaagctcctaaattggcttgaagggctcctagaagtgtctcctccaagtttatcttccaagttaagaaaatcattgaaatcacccattatgagccaaggggagcttggaatattggagccaattctatgaagaatttgccaagtatgggatttgttatttgcatgaggtgctccataaaaactagtaaaataaaaggaaggcatattaataggcttgagataacaaaagaaatgacttatattataagaaagcaagtttacatcaacatcttgagtccagagcaacaaaagaccgccactaagcccgactcgaggtacttctaaaccattaggaaatttaagatacattttaaatctacttaaagagccaacagggagtttagtctccgatataaacaaaagtgctggcctaaacttcctaactaacagggagagagatcggaatgctcgtttactccctaaaccacgagcattccagcttaagataatcatgatgcccggcgggtgcgctgagcaacacccgcctcatcaatatatatacttcatcaagagcacgagcaaggtcacgagttcgtttcaacatctttcgaaactcaacctcattggcactttcggggcgcttggaccgatacttgcaagtagaaggagaggccgtagcaggtgaagaggtcgatctaatggtgaattggagaggttggcttgggttaagatcagccatgattgtagcaaatgcctgggagacaggaaccgtctgcccaatgacatcagatgtcaccatgggggctacattaggagcagccgagatagcagcagtacctactgcttgttcaggggctgaagcagcttgttgcatagggtcatttgatcctgaattggccaaaaacccagcaggggctgtagaccgaaccggggggctgcctaaatccacaacttgctcattacttggccatgccgagaaggttaagtgggagttagatccactatggccacgttggacaggagtgtgttgggaaggttgtgtcatataacacccaaccggggtagtacgaggttgatggaaatgttggacaccatattcagtagttggctcattgaatgggctttcggatatgattaggggctgatgagtgtgagagttgccagggactgctaaagagatggggttagtgatatgaggtcgaagacgagtgcgggtacttgcaatatagaaagggttggatgttattcgaaccttggctcctagggtatggtcataacggaggtgaaggggggctgaagaggagtcacagttagccaaaaactcaggacagtgattgattatatggtttagacagccgcagaaatgacagaagtcgggaagattttcaaagcgaaactcaagccaaacaggggcagccataccttggaagtggaacccggttcctcggggaagaggttgagtaacatcgatctcgatacggactcggagatatggtccccaagtttctttcaatgaggctgtgtcaacttctataaaacgccctaaaacctccccaagtttcctagccaaggctctagagcgtttgagaaacggaatgcccgatacttgaatccagaaaggagtagaggttaacatttcaggggtgatgatcgagccggcctcaagaggtgacataacgataagcttgtaatcaaagtgccatggctggccaatgaggacacgcctacgatcgccaaaacacccgaattcaacagtgaaaaaattgggctctttctccaggacattaatagaaaaccgctcaggccacatttcacggagacgtttcttaaaggcttccggattaaagtgcctattagtcaaaagcttgacagcaagaaaagcagaaggctcatccctgttttcatcttcaggcaattcagatggttcaacaaaggaatggattttggtttcaacatcagtaaggttcaggttggcagaaagagtgtttgtaaggtcatccatgatacaaagagaaaatgggaagttaagcagaaagattggacggattgcaagggagtaaatcaatttgggaaagagctattgtgtagtgtgtgccaggtttgggaatagtcgatctcttatatagggatttggcttacggatcagtaacttgtaaagccttcacagatgggagtaaattccccatgtcagacatagcaatgataagaactagcttacccatggcccctatttcgaatctaggggttctggcaaaggtgtaggggttacctaaaggagcaagggcaatgattgcccaagggggagcagaggaatgcaatattcctaatgtggtatctaacaaggttttgtttaaatgcagaacacaaaggctacgggtaagtgataaatgcagataagatgctatgcagaagcagttattgtcagatgggacacaaagaaggaagttattgttgagttgaaggttacctgctttgaagatgagaagcacattgaagcctcctctgtcagatttgacagtcaccggctccattaaagatggggaagaaagccctatcacaccgccactgagatagtcggacccaggacggacaccaacgctgatgaacagcgacgacgacgacgagatctgatgaaccatagcaaaccctagaacttgactcttcagagagaagaagaacagtccagaactaaaaatatatatatatatatgtgttacatcttttttttagtactaattttaccccttaaataataaaactaaacacagaaaaatacaaaaaagaaaaaaaaattacaaaaatactatagaccgactcattaaatatttatacagtccacatacaaatatttacaaaaataccacatgcactaaaccttcagctgcacggagcaaacgatgaagatgaacatacct

SEQ ID NO: 161617 - DNA, 2436 bp, Cannabis sativa
ggcggccgatgaagccgtttgaaggtgagccgtaagcgaaagcgaagccaaggaggtagtaggataacccaccggctgccgcgtcgagtacgttggtgagcattatgttcatggtgttcttggctcggactgagccggcgcagagcatggcgaagccgagttgcatagcgaagactaaatatgctgagaagagaaggtaagtgttgtcgatggcgtaggtggttgcagatagctgagctgatacggcgttgagttggccgcagaggaactccgctgcggctgcgttggaggtgtttgtggtggcgcccgagctgaggagagaagataggtcggagactgagcaggttagggaggccatagtactgtactggtggtggtggttggagtacgtgtgtgtttgaggattagtttcagagagaaatatatagagacattttttcttttcaggaaaagagttttgtggtttgtatttataaagccaaaaataatttaaaaggaaattttgggtttccagtatttttattttattagccataatagaaaatttgcaggtttaactctgtcatatttcttgtcttttcttttcaatttttaaaatataaagagttgacatgattattggtggtttgagcctaaacttgtaatttgattattaagatgatcttataataaccttatagggttggtgcttaattaataagcactgcttatattattattatttttttttttttgctaaatagcaaagtaatttaatattatttctagtaatcgtattgttaaataataatgaaagcaattacaacattattctaatctagtagagaaattcaaaatataagagtataaaaataacaacaacataacaaataaaaatcctaaactaattttgataaatgtaagggttatgcatatattttatgtcggagaaatcttaaaaggtaccagtacctactctcttatgtatcaatattgatattggtctaattaagtatcaggtgacatatagtttaatataatagtttttagagagtatcgctagctaatcacaagacaacacgtcttaagagtgttaggcaccactagtactcaatagcaatgctctttatatcgacataagattacgtcatattaatggttttatcacgattattattattattattatattttttgtgggactacgtgcgatggttgaattgttgatgacctatatatctacaactattgtggttcatataacatacatagatcactatattatgaagtattgtgtttagcgaactgtagtttcataatattagttagagattttttattatatttattaagagtattgttattggggattatatattagtgacgagtactttttataggtgatgttttataattgataagcgatatggcttaaaagttattttcttaaattatataacacatgatatttaattgtactaataacagtataatactaaggaaggtgctaagacaccaatagtacctcttagcaattctcatttattaaagtaaaacaggtaagatccaatattaaattataccaataataatattacacttcacaacaattttagacaccataaatataccatttttcttgtgaataacaatgagtattaatttataatattggagaaaatgaaatcaagttggagatagtgcgcacatgcacgtagattcgtatgattgtgtgaatatatgctgagggaattgtattaatgaagtagagggacttcaacttgtaactcaggatatatataaaactgaaataagtgaggaccaacataacaattttaaacacaattactttgtagcacaattgatttggggcaatttatttacagcagagaggtcagggatttatatataacgtatgtaaatattactttggtccttttattctcatcactaataattaaaatggtgtccctttaattattaaaaattaaaatagtaaataaaatccttaattataattatagtcaattataattataaataatatttcaaaaaaactaatatttaattttatataaggttatattttctttccaaatattacaataattaaataatattacaaatacataaattaaaataaaaggtcgtagcacaatttatatgtcgaagtatattatgttaaatttttacatagattatgaactatccaaacacacattaagaatattaatcatcattgctcataaccattaaatctaagatcaatactttatttagaacatccaaaacattacacacatacccaggggcggagccagcatgaaaagttaggggtgttggaatattttaatagtatctagatttactaccatgtatgtttttaacatcctaatatgaatttctaaaacaatgtaaataaatacataaaagttatgagaaaccttacagtgggtg

SEQ ID NO: 161618 - DNA, 8051 bp, Cannabis sativa
  modified_base (3075)..(3075): a, c, t, g, unknown or other
  modified_base (5951)..(5956): a, c, t, g, unknown or other
ttttttttttttttgtgattctaaaactatatacccaaatgacagaggtaatttaattaccattaaattaacgttatatccttttttcaaccgaaacaaagtataccgaaatgaagtacgtactggtactgcatttcgttttctttttcttgtgttagagtgtcaaccccatcatttatttgctttatttttgtatatttgttttgtttttttttttttttcatttttttcttttttctttgcttttttttttctgaaaagaaatgttgtgaataatcacacttcaaaaataggttagtttcaatattaatagggaataacataaaaattacaactaagtaaaagtagaaaaataattaagaaaaatagaaagatactatatgatggaatgttgtagcatagataagaggagacaccaaatttaatgaggttcattcttaaataattttttgcttggatcttatccccaagaataaccactttgtgaccaatctttattcagaaaagtagctcaaattacggagagtgatttcaaaggatcaagaacaaaaatggtgtcttgcacctacaattcactcacatgagagtgttgtgatcaaacacacatagcccctgcacatccctcctctctcaatctttttttcttagtttttttctctagcttatttcctagaattgagaactaaagcttcttatatagaagtaataatggaactccaagaagttgggaaaaatcgagtaacatcaacccaactaagtaactgtaaaaatagttaagttagttgatcactaaccacgtgtctaaaattctaacaatttatattttagacagttggtaacaaagtgagctaaatgtataaaaatagtaaataaagaattggtcgttccatcaatcattgagtgtctttgaacagatatctatcttccttcaatcttccataagcttaggaaaagcctaaacttttctcttgtaattggtttagtaaacatgtcagttgagttgacatgtgtactaatcttcttcacaccaactatcttggaagatatacatctatgtactttatatatatatatatgcttgaatctctcgtggaacataggacttttcatcaaatagagtacactttgggtgtcacaatgcactgtgatattgtctgaattgtatctcatttcttttgtcagacctttaatccatatagctttcttaatggctttagttgcagtcatacattctacctcagttggtgagaggcgctacaaccttttgcaggttgaattttcaacttacagaacctcctagagttgtaaacacataaccagttagtgacttttttgtgtatagatgtgcaacatagtcagggtttacaaatctagtcacttcttcttcattttgatctgtttcatcttcatataccagacttgtgctcattgttactttgacatatctcataatgcacttgagtgtagtctaatggtgatctcctagatttataatgtatttccttactacactcatacagtgagtaatgtatggtcatgtacagaccatgacatacatgagactaccaacacaactaacatagagaacgtccttattcatttttactgttttagcctctattttgggagattgttcttgtgactgtttggaataaggtctagaaacaagtttagaatctttcatgccaaacttctcaatcacttttttgagatgccttcctgagttaaagtgattgtatgtggcctattttttatagtcttagtgcccacaattttgttagctgctccttggtctttcatctcaaactcactactaagtttttgctttaaatggtttatggtagatttgtctttgccaactatgagtatgtcatcaacatatatagtaaaagataaatctaattgagatagcaaacacatggacaatgcttaattttgatgccaaccatgtaataccaatactgaaagatagtaaagtcatcgaatgcttaatctaattgaggtattttctctagttgttaagcacatatcaattagaattttgttggcacttgttgcgtgtcaagacatcgaactagaacaattagatgtgaagaatgcttttctgtatgaacatctggataaaagaattctaatgaaacaacctgaaggatttgaagaggttagaaaaggaacactgagtgtgcttgttgcagaagtctctgtatggtttgaaacaatctctaagacagtggaacatgagatttgatgattatgtgacaacgataggtttgaagagaagtaagtttgatccttgtatatatttctgaaagagaaaatggagatattttgtatcagttgctctacgtagataataatctgatcatcaacaagagtgtacaagagatcaagcacttgaaactccaactaaagacgaagtttgaaatgaaggatttgggtccaactagtaagatcttaagcatggatataagaagggaaaggagaaaaagactactgtacttaaatcagactagctacatcaaaaaggttctagatccctttgaaattagttactctaaggcagtgagtactccgcttgcacaacacttcaaactgagtgctactcaaatgccaaaagatgaaactaggaagtcaaagatgtcgagagttccatatgctagtgtcattgaatccttgatgtatgtcacggtttgtagtagactagacatagcatatgcactaagcattgtaattagattcatgggaatcctgaaaagaagcattgggaagccttgaaatagattctatgttagttgaagggaactgttgagaatggattagtatttggcatgaataagtataatgaagacttggatgttatcaatgattatgtggactctaattatgcagggtgtattaatacctgaaagtctttgaccggatacgtatttactatgttgtgagcaactattagttgaaaagcaaacctttagaaggttgtggcattatcgacaactgaagcagaatatatggccttgacggaaacgatcaaggaagcactatggttaactgggttgatggaggagctgaagctcnatcaaaaggttattactgttcattgtgatagtcagagtacaattcaattaactaagaattgtgtgcaccatgagcatactaagaacattgatatcaagcttcatttcatacaagagatcgtggagaaagatgctgtgaagattgccaaggttccaactgaagacaatccttctgatacgataatcaaggtagtgccaagtagtaagtttgagcattgcctgaagctgattagaatcagctgagcccggagggggctgaagggataatagtatttaaaataataatttatcaagcgacttcaacttgaaatcaaggtgaaaatttgttggttatggttacaagttttttcattcgagattggaagttgttatctggagagcagataccggaatcttattgtggatctaaaaagccctgtgtgaaaggtcttgtagactttagaaggtacttccatataagcttgtaccatatatggaatgtctctcctggatagcctattattaattcgaaggtacactcccggatagcttactgtcagtcttgaaggtccatccgggaaggaagctatgtacgtatccagaaggcttgtgtgtttatagagcttctagattgtctgtactgaaagcgtgttttttcagctggcgtggattattgttgttggtgacgagttggatcatttaaggtagtgtaaatgtaccacgataatttaggagataattttgatagcaatacaaatctatatatttgtaaatctttgtaacttgtgtgagaattagaccagatttgcttgagttaaaattgtgatagtgtaaggttgaggcagatagtcgaaactagagagagaaacttcttcttgtaatctctgaaagtttgtgaggattcttgtaaccttttggacattgatatcaataaagatatggctgctactgttcaaaccgagatgtagaacgttgcacatgactcaaactcgttaaacctgatgttattcttttctcttttacgactaaatttattatttaaatcttgatcttttggtatattatttcttgattgtgttgcgtatttgttggtcttgtaaattaaatcataagtcattgattgtttccatttcgtacaacaattactataaaatttaaattgtgagaaaaaaataaatataaaaattttatattaaatcacaaaataaatatcattaaaaagtaatttttttaagggaattttcattttctatggtcttacaatgtgtagatcatataaagacgataatatatatttataataggtgttaagtattattgatgcctaatagtaatactattttttattatatataagtaaatacttacacattaaaattagaaattttagtaattatcataataactctgcctaaaaaatatcaatataatagtcatatatagcccacagaattaaatgagttttcaatattttcgcctaattaatatacgagacttgcatagtagaatatggtcctctttggctaaatctatttggttatagctaaaattgtaagatcatttccaaaccaaaaaaaattgtattatatttgttacaaaagcttaatatgtaatatacattataatttctgtctaaaaatacataattcaagaataatttttaatctgttataaaaaattaaatcttaattttactagtatataaataaaaataatttttaaattgtaattagttatacattttatatgtctcgtattaaaaaaaatatacatctatataagaatattatatcttaataaaatatataattgtaaattaattattcatgtacaattaataatttttttccaatttataatatatgtataaatattgtatttattcaaaagtaattttattataatataatattaatgattttattataatataatattacaattttattataatacttttattcaaaaataattttattatataatattaatgattgtttattgttattgttgttacattgatattttttcgtggtttaatttttttagtgtaactctatttaattaaaactttctgatttatttgatttcaagtatattcttaaattaatagatatgtatttttttcttggatagacattctatatttctatgtatttggtacaatatcaatagtattatggtccaatgtgaaatagcaagagttggtatttttttatagatattattttaaggaagttggagtaaaattaaatttttcattaatgttcatttaatattatttaatatgtataatatattttttatatatatttatattttttatttattgagtgcagtgtatataggtcgtagtattatgacgtgttaaaaataggatatagactcgacacaatttataagctcggtatttttatactgtacacaaatttgtagtgttttactcgagctgatttgttttttttttttttaaacagactaacatatttcttatacgagcttgaattctccacatttttccattttattaattagtgagttaaatactaatttatatttgctctatttaataaatttctcttctatataattttttaacaataattacatataattatataaaaaaaataagaaaaatttacacggtatactaacttttgtcatatttttataaaagtactgtcaggtggtattttttatttttttttactgtgtttttttataagtttcatactacagtatactgtgttaagttttcactgttgttcaactgatattttttagttgttctactgttgttttgagttgttctgttttgtgatttaatggtgttttataaaatacaatttttttaaaaagatttccgagtgacggtatttttgtaaaagttaacccaannnnnngtatttttgtaagtttttcaaaaataattaagttattaattttaatatttaatattattttaattaataactaaattttataagtattgttattatcagattatcaagttttttttaaagtgtcatattttcgagttagtttatttgtgtttacatgtcgcgttcatgcttatgcccatattttttgtatcggtttggtgtggtatagccaacttcaagacaaataaaataaaataattaataggaaatagaaagtatacagagttgttattttttgactataccataaactcataaaaatatttatttataaatacctccctcatatacactctttctatcagagggaaacgtgaagacatattataacgactctatataatatgacaaacatggaagaaatcaagggagtacttaaagcaaaggatgttggtcgttgtgtggcaacaatcttagccattggcacagccaatcctttgagctgtgtgaaccaagatgaattcttacatagttatttcaaactcaccaacaatcacaacaactcatcgttcaaagagctcttcacccgcatttgtaagtaaattatacatatacatatagattatattactgttagcatttaagataaggtgaatgggattttatttctagatactatgttagaatttacgataaggtaagtgaggtttactggcaatgagaggagttgctcattcatattatatattttattatctttctacacattaacaacgtaaaaaactctagcaattactaatatatattttgaattatgatgaatattaattttgaaattttcttaccctatatttcaggcaataattcaatgataaagaatcgttacatgcatttaaccgaagatatcttgaaaaaaaacccaaacctttgtgactatgctgcccaatcactcaacacacgtcaagatattaagataaaagagataccaaagcttgcttaaagagctgcaatggtggccattaaagaatggggaaaaccaatatccaacataactcacataattttccattcatcaacaggtgcagctgatatgccaggagctgactacaagctcgtcaagtctctcggcctcaacagatccatcaagcgaatcatgctctacaatctaggctgctttgctggtggcactgtcctccgcatagccaaggacctcgtggaaaataatcacggggcttctgttctcgctgtttgcgctgaaataacatctatggacgcgacctttggccgcttatctaaggacgacaaggggtgccttgtgggccatgcgatattcggggacggtgcagctgctcttgttattggtaatgctgatgatcatgaaaacaaagggttgtttcaaatcgtttcgacatctcaaactattcttgctgactcagaaggttgtattgaaggacatataagagaagatggtgttacttttactttatctccacgagttccaaaattgattggtgacaatattgagatgtgtttggtggaggcttttactccatttaagattagtgattggaactcgttattctgggtggcgcatcctggtggcgcggccattcttagagaggtcgagtcgagagtggggctggaacaggagaagctgagggcttcatggcatgtgttgagggagtatgggaacatgtcaagtgcatcagtgttttttatattggatgagatgaggaacaagtctttggaggagggaaggaaaaccactggtgaggggaagaattggggtgttttgtttgggtttggtccaggtctaactgttgagactgtggtgcttcatagtattcccatataggttttttaatatatttttaaatatcaaaatgaaaacatactacatcatgtttattcatattatacatttgtatttgtagatatgtgtatttattatattatatatatttaaaatgaataaaatatattaaaatttgaaaaaaaatatactaaaacattagatatatatccaattgtgatcggatcagatgttatttttaaatatccaattggatcggatcggatggtggatggggtgtcaaaaatccaatacatccaacat

SEQ ID NO: 161619 - DNA, 3905 bp, Cannabis sativa
ttatttagggcataaaatctcaacttttagctctctaaccttccatccgagattgaaccttctcaacaataaaattgaaatctcttgacctattccccttaacaaacaaaggaattctaaggaactattcctccccaaacattatatcataacccaaatcctctgtaatcctcaattgtaactgctgtccataatttttagagaaaaaagatccttaacttatggaagtttatctattgacgcgactaataacaatccttagccaagacatctgtgatattctccatattaagggtattagcttgagtgaagaaaatggtgttgtcagcatacataaggtgagaaatcgaagtgctagaatgtataaacctatacccttcaatcgatccttgatgttctttagtaagaattaaccaagacaaaacttcagagtacaaaaatgaaaaggtaaggggagaggggatcctcttgccttagacctctttggggctcaaagtttttactcaaaccaccattcatcgagtctggaaactaacactagaaacacattgagaaataagtccctataatcgttcatcaaatccaaaggccaataaaactcgattaacaaaacaccattccaatttgtcataagcttttgacaatcacatttaatgccaacataagccatactcccctattttctttccatatcttacacaacttatgagcgataatcgagttgtcaatgatccacctccccttaacaaaagcaaactaaaaaggagagattaacttatctagcacagagaaaaatttgttagccgaaatttttgcaactattttatagctcacattgcatagactaatggggagataatcatcaaaacttctagcatgattctttttaggaattaaaacaatgaaggttcaatttacctcatttatgaatctccctgtggaaaagaattcaaggacaaagttaactgtccgttgcctaacaatctcccaacgatctttgtagaacttagcggggaaatatcagggccaggggacttgagctgaggcattttccacacaacatccttgatctctctaggagaaggaatggcgcaaagatagttactttcctcacgattaatacatagtttaattagagatataatctcaggctccatcgaagggtgagaagaagaaaaggaatcaatgaactttgatctaaaatactctacaacaagccgttgatcatcgatccaatgattcccatcttctgagatagcccaaataaagttcttcttcctatgcacaagcataaaaaagcatgaaaaaatcgagaatttctgtccccttccttcaactaaagctccctcaatttttgttgccaaatcatgtctagcctcattcatcaatctctaaattaatagcactttcagttgtaaattctcaggggagggaggacgattttgaagatcaattagtaatttctccaacacaactaatttccttttacagaacccaaaagaatcaacattccacttagagagcgcatgaatagtaatgcaaagtttggtacaaagaatgaaactttgatagatgctaaccaaatgttcccaagcttttttaataatgtttttaattccccatccattgtccatgcatcaatatatctaaaaggctttttaacatgagcattatcaagataattaagcatcaaggacaatcggtgcatggtctgaatgtcgaattagaaaattattggtgttggctttggcaaaatgagataaccaagatgtagagcagaggaccctgtccagcctttccttaattaaatggttcagatcttggccattagtcctagtaaataaggctctgattccttccaaatccactaccctactatcaaacatgaattttcagagccctcgctccttccatatctgtcataggcctgcccccaaccttgtcatcttggcaaagaatagaatttatatcccccatgagtatccaaggttcttccaaaacttaaacaacacctaacatatcatcttagaaactatctcgatctgctctcttgggaggagcgtaaataaaacacccataccaaggcttaaatttcctatcctcattgaaactaataataattgtgtcactctctagataaacaacattaatatcccaacccacacgccaaaaaaaagcaacccttccagctaccccagcagaggaaaaagcaacaccttcattaaatcctaatctttgccaaactcctttcatgtcctgactactaagtttcgtttccatcaaaaacaccacatctgaattaacgctatgaataagagatcgcagtgaattcattgcctgggaatgccaagcccccaacagttccaagacatgattaacatgggagaatcgggggcatgataaggcccgcctcctcagactgagaaaatccaaaccatcttcatccttggtttccttaatcaaatttgagtgagttcctccctcttgactgacttgtttgccatggtcacaaataatcccctcttcagagctctgttcttctatggtaatactaccttggcttacaaagcagcttcgtttaaggagcccctggtcttcctcatccaaagagacattactctcatttaactcgttccctaattactcggcccatctggcaactgatccaaccttcttttttatccatattaggaccaatagaactaggccagaacaattattgaagcccaaaagttccatgcgaacaaagcccttaagcttatgtctaagtttttgacaactattttagtgagggggtcaagagaccctttgaaaactattgccaaatgtgcaatttcagaatacgtgggtccactacacccagtaacattcttttcaagattcatatccatacctttgcgcaccacctttctgatccaacatctgcatgggaatagggttttgcacaccctcatccatactcgtcatatccgtactcatttcctttcccacctcagcctcgacttggatagtattcactccgttagccactggttctaacaactctccctgttcctctaagaattcatgacggatatccgtatccactagagcatgttaaaaaagaagcccttgcccgagaagagtaaggatttcttgcctcttaagttgttctagaataaccccagcatccctgttaacctcaacttgtgcattagctataccattatcaacattctcctagggctcatccccgagattaagagcatggaactccctttcagcatcttgtatcatgatactttcaaagcaatgtttttttcgagacccaaatctgacccaagttccatacataggtacatagcggttcatatcattcaggatatgtattctacgtcttgaacataccatctcatcgtgccctactatgcctcacttgaaacaaaacctaggaagttttcatatttaaaataacaccataaactaacaccttcttccatagggagatgaagacccacaagaagcgatttcttatgattgagctccacacgaagacgaagatactctgcaatagggaaaccattcctccacatcttgtcgatgctactcactccacctattttcttggtaatcgcattagcatttcgatcagtgaaaaagaaaggtggcacatcataaacccgaacacaaataggaataacttcccaattttcatctctctgtcttccatcttctagcataggcttgagaatcagatggccccacaaacctcccacggacttctagcaaccacaagttccacttctttctttttttgaaaatgtaaagtataaagattacccccttcagggccgtctcaaggtcttgagaggcttagggcaaaatttgaaatgaggctcttttttttacaaaaatttaaaataaat

SEQ ID NO: 161620 - DNA, 2365 bp, Cannabis sativa
  modified_base (2294)..(2299): a, c, t, g, unknown or other
tttttttatgcatataatgtactatactgataatttgatattttttatactttcgttaataagttttgatggagaaatgctaacagagtatttatagtgttttaacacttttataggatgttattgctataatttaatatcaagtctcattatttattctataaagatatgctaaaaatcttggtgctggcaatgctccttttgatgctatgttaaaagatcaataataattttaatttactctaaagttatatagtatttttcaaaaataaggattcgatatgtatgggttggattgtcatatatattatgatcatattggggtttcatattcaattgtatcaaataatttttatcacgtgaattcattatatgaaattggaaggaattgatcattattagagaaaatcatccaacatcctaaatagttctccgaattaataagcccgttgaaaatgtaggataatttatcatgttgttttctctccttaaaaaaaaaaaaaaaaatcattaacccaattgtggggaaggagtcagagattcaattttattaattgtacgtgaatatatgcagataaaaaaaaaaatactaaaataccatggtgccttgtaagaggtaaagactagaattgtatgctagctagaaaacaatagagaaaaaaatgaaagagagacataatcttttgaaataaaaagcattaacccaattgagttagctcataactttatttataatcacgaagttattatagctaagaagaaataaaattacaataaaaataagtcagctatacactcactaaccaactaacaaacaattaattatttatgtaatagaaccctaaaatgttgttaacatctcccttaaactaaaaggtgttataagacatcatgaatttggacttcaaacatgtgaaccgattagtagtgagagattcggtacactacaagaaataaaatttttaccaacgcacttttgcattggtaaaaggggttggcgaattggcattgacattaaaacttttgtcgatacaaaaacaaaaaatactggccaaaatgactcctgctaaatgcgctagtaaaaattagacttttgtcagcaaaaatgcgcgctgggaaaaatattacttttactagtacattaatgtgctgacaaaagtctaacttttgtaaaaatacccaaaccacataaaattatccatctccatttcgtttgtttgattcattttcttagcttctactttattatattgagtttttgaaaatcttggtaaacaaaccccgatgagcttatttcaaggcatctacactttatgcaatttacacacatgattagactttaaggcatccataaaaccttcaagttgttgcatgagcatagtttcattcaatgtgccattgaggaagccattgcttaagttgtttggcaatccagttaagtgagacaattagtgtaagtgtaattctcacgatagcaagtttgacaatagggaaaaatatttcctatagtctatacttgatgtttgcaagtattctttagtaactagacttgactttaatctatccaaggtgccatctgtatcaaacttcactctatgaagccatttgtttccaatgactaggagtgtatggaaccaaagtccatgtgcctgccttcttaagagcagcaaattcttgtttcatagatttgaaccattgtggatgttgaagagttactgaggtagaccttggttcggaaggtatgagggatttatgcaaggggtatttagttcccaagtaggctttggatttgacaatgccactgagagatcttgttctcatgccatgagttcgcgtttaagcaccggtattgtaggctgcagtagttcaacgagtattataggaggaaaatttaatggtgggggtaggttcaataggtactggaggttgctcatttgggaattgttcatttgtaagtaatgtaggtgttatttcttgagattcagtaacaaggggatccttagggcaaaggtggagatgatgtggaagcacttggattatgtaggttctcatttaatgtgatatgtgtttcctcaagtaccatttggagggtagcattaggaggtaacagagtagcagagttagtatgaactttaatagtagttgtttgaaaattagacaaggaaaataaatgagaaataaatacctctgatgctgcagatggagagctggcagggaaatgtgtttcattgaaagccacatttctagaaagcaagaaaaaggacgatactacaagaaaataagttttcagcgannnnnntttttgtgaccaaatcaacttagtcactaatagttagattttgcgactaatttttagtcgcaaata

SEQ ID NO: 161621 - DNA, 1815 bp, Cannabis sativa
agagagagagagagagagtggaacgccaaaatactaaatttagaatacggcatcaaagtgacttgaaacaagcaaccaacctcagtaaaccatttgaaaaatctagctgcattatctgttggctctccatctccataactacaaagtcaggcccaaatgtagagtaaatatattagctatccagattaatcttatttatcaaaaaatagaaaatataagtttttatctcacgtggccaccataaaaaatgacaaagtctccttcttcagcttttcttcatattgatcatcatccgcagcataatcatcctgattgaaagtgaaccataaacaaattgaggtgaagaaaaatatgcagctgattctcatgcagatatgcaatgtcaagaaaaaaaattccatctagcttaccaggtcaataactttgacagctgccttctcatatcttgccttgatctcttctgctaatgcctagatgataagaaaaaatgttaaaaagttcagtttgaggcccaaaaaaaaaaaaacaaaatcaaagcttttgatccaattttccacttaacacattgctatgttcctactcaactttcggttcccgaaatccatctttcccagctaaccaaacgcatactaataataataaataattaatttaccaatgacaaaacaaaacaataaagtctccattgtgctctaccttagcaaagccctcagcggtaccagtctgagtaccatagaagacagagaccttggtcttaccagagccaacctcaagctcatcattttcatccttaaccaagagcttcggcaccaccataggcttcacctccttgctccgatccgttgatttcctccaaaccagcaccaaaaccccaaatatcaccgccagtgaagtcgtcacaatcaatatcatcgagtccgtgaccgaacccccaaatgaaaccccaagcaaagactcaagcttctgaacaaactccgaattcgaactcattgcgtagattcgaatccaaaacttattccgaattcggagctcgaaaaccgtcaatcgaatcggccttgacagctgtggaactttctcgctttaggttttctctctctgcatagagagagagagagagagagagagagagagagttggtgaatggtgattgaggacgcctgagggaaagagagagagtatagcaattgagcacgagttcttccttctctctctcttttcttttcttaaaaaaaaaaacgggtactaaaagtttaactttacgtgtaattgacaaaaacaatggaacttttgcgcgttgacaaaaagataacagaaaaacctttgaacaacaaaactaaaaacaatgatgatttgacttcagcactttttctcacgtcacattacaatttttctgttgatgatttctgtgattacaatttctttttttttcgcaaagttctgaggttacattttcatacatactttctgctattttcctttttcttttttttttttttttttctaggaacttgctttctttttctttcattcacctagtttttatactgtgcatagttataaatgcccagctattctggatttcattttccatccaatttagtccaatcctaaagacaatagttaaataaaataacataatggccctacatgaattagtgcttaagttgaattatatggattaaaaaaaataaaatattaagaaaaaataacataatgaccctacatgaaaaggaccaatctttagttataattttaccacttttttcaactacttattcttcttttaataatactatattttccaattcaatccta

SEQ ID NO: 161622 - DNA, 2961 bp, Cannabis sativa
aaaataacaataattgcatgcctatggaattcataaaatatatatacaaataaatatttatgtaaatgtaattaatggccatttaagtatgatcaacacatggataatcaaaatttgcgtacatacatgtatctcttaaaaaacgcatgcatcattggacctcctaagctaattttttttttttagcctcataaatataaatattcaatagaatttaatgaaattaattcaaaaatttggataccaaaaataaaatattgaccttattaaataaaagtcaaggcatataaaatacactaatatcaattaataattatttatttatcaaaaagaaaaaaaaggaaagtattattttcaacaatttatgcatttcaaaaaagaaaaaaaaaatggaatgaaattagagtatctggtagcgaatcaaaaacttcccgatttgtatatatatgattacttacgagataaaaatatatctatatatatatatatatattaaactaaagccgcaccagccaaaaaaaaaaagaaagaaattattgaaaacaatatttttgattagattcgagggcagaggtagaagaagtcacacgtgtgcgaggcctttgttttacatcgcacgtgtcaatctgacggcctgtctttatcctaaatccaatcctaattaacccttactacgtctaaggtaaagcccaaagcccaaagcctaaaacaaaaccccacgttttctaaatatcacatccttcaaccaatcataatcagccacctcagcgttcattctctactaaaagtactttgattgtttttcttttttggggtcgcaggtaatgcgatgcaccggatccaaactcatgcaaaagactaatcagtatttgagtacgatcgtcaataataaaccccatcccgttccaatgaatcaacaaatcagattaggccacgtcatcatcgtcctttgtactgccaccgagcaatctttcaccgactatgtgcctgacctagatgttggacacgtttcattcttacaggaagtaaccggtaactgtagggttgggtaacggctgtaaccggtccgttaaacactgcaattcccgctaggtatataaacagcctacccgaaattctacccttctctcttccaattccagtttcctaattaagccccaaaataagaaaaataaagcaacatttcgcttttttcagctcccgattccatggttagtaccttcctacattatttttatctccattttttcttcttatttaatttactaaattccttttattaacttggactgctccgatcgatctctaccactttgaaactttagtgttgtgcttttctttttctctttttgatttttgatcttaattcatgctttgttagtgttattttgattgtttataacttgggttgtgtttaatttggggatttttgtaattccctgctgaattttagctgctttcagttcgatcttggactttgattcttggatattaggataaagtttaggccaaacctgggtttcttttgcttaatggtaagtgtagtgaagtaatttgcgtttctactttcgaagataacagtttagagcctttttgttaatgctcacttaatgtttataactgggtaagtgaaaaaattagggttttatggggtatgtttaaaaatcaaggtttttttgtcgcttagggcttgttccctcttctttgcgttttctttagggtgtggttatgcgggttagagctgttttagaatatggcctagtttctaattttagattcgatggtccccctgctaatgattgtgctcatattcgtttattttagatccgtatgagaaattgttgaaagctcaaaaagattagtgggtagtatgtgccattaggtttgtaatagtgttactttctttggtgacattatctatttggtgaattggaagtaaacactaaacgaaaattattttctgttggtattggttacatagagatgttgtatttataagctgttattggggatttttttatgtgggttttgcttgtgtattgtattcagtggctttgagcatatttattcttgtaaaaaacactagtaaggcctggctctggagagctatttagactctggccatccaggggcggtgcctcccatggtgccttctcgggtggctggagggctaacacaatcttcctcaagttctggaattttctttcaaggagacgggcagtcccaagctgttgttaactctcacttgagctcatccttcgcgaattcttctaattcaattcctggaactgggcgttcgaatttgggtccggtttctggggacatgaacaatgcagtgttgaacagtgtcgcgaattctggtccaagtgttggggcaagttctttggtcacagatgcaaattctgcactttcaggaggtccacatttgcagagaagtgcaagcatcaatacagagtcatatttatgcgtaccagcatcaccaatgtcattttcatcaaataacattagcatctctgggtcatcggttatggatggatcatctgtagtgcaacagagttctcatcaggatcataatgctcaacaagtacagcaaagtcagcagcatcaacaaggagcaacgagtgctacatcattacccacttcacaaactggtcaagtttcacttccaatgggtgtgcgccttcctggatcattccttcaagatccaaataatttatcccaggtgcaaaagaaaccccggttggatatgaagcagcaggaagatatgctgcaacatcaggtgttacagcaactcctgcaaagacaggactccatgcagttccaaggccgcaatccacagttacaagctttgcttcagcagcagagattacggcaacagcaacagatgttgcagtctatgccacagttgcagagagcccaattgcagcagcaacaacaacaacaacagcagcagcagcagca

SEQ ID NO: 161623 - DNA, 5753 bp, Cannabis sativa
  modified_base (3146)..(3146): a, c, t, g, unknown or other
atatattatatcaaattattatatatgaaatgaaactcccaatacttttggagtagtagagtttaaagtacgataattattaatactaatacgtagctttggcaacgtgttgtcatcaatacaatgacttcttcattttttatatatgtttatttataaatatcttcttttaaaaaatgaaataaattatttgaaaagaaaaaataaataaaataaaataacataaaatgtgaagagcaattttcaagagacattacttttgttcttatcgttgggtctttatgttttgtatgtgtgccacataagaaaattatgagccaatttcatacaattgtgttatgagaaaaacagttgtactgtgaaaaaagatagataaagaaaaaaaaattaagttgagtatttaataaattatgattataaatataatgaactaaattataacattatatcattatatcttaacaactcataatatgacaatagacaagagcgatataatgatataatgagtttcgccaaacgtgagttttgcctaaagattacaagacttttgaacgaaatttatacgtgtgtcaaaaagatatacaatctcctcctaacattccattctctcatgcataaataaggcgatttctgtcattttgtcgaatactgaccacatctaatgtcaattaacatccaattcagtctccctcttgtataatgttggtagaaattactttatttaaaacactgtaaacaatcccattagagggttaagactgtttaattaagtttcttaattaaggatgtcattacccatatatagagcaacaccctcactataaagggatcctagtttttgtgtcttaaagcaaaaacgttgcaaaaatattgaacacaataacacttctataatatttacttctagactaaaatttatttaacactccaaccacgtaaaaattattatctcatcttctacaaagctctaaacatttaagttttcatattttattctaattgctaaaaatctcagtcaacaacatgaaactgattattttgaaccttatttttaaaattataaattatttaaaatttctaataactacaatatacattgtcatatatatcaaactaaaatgagttataatttctttacgtatcaaaaaccgaaatgatcttagatgccccccaatataaaagtctcttatatatttatatatgatgatttagatgcactaatagaagtattaggcattatcttttggttgcagccgaccttaattaatttaaaatatattaaagctaagcattttacccatgtcttatactaatatatttgtttgtgattagggagagaagttggttttcaatatactaaaataaaaatcatttctctaattaaacaaggcaacattttataagaactaatcaataaataatagaaatatatatatagttcattgtagtagttgactttcattttttttttctatatatatttctttattattcatttttagattcaataagtttctatagtatgaccaagccaaggttgtaactatattatatacattgtacaagtgtctttgcactaagtcactaacttaatgctatgtcacatattaccaacaaaaaataaatataattaatttaaacaaaaatcattttaataaaaagaaaagtgaaagtgacttggctattgtttatgtcttatttatttatttttttaatttcttaattttgtgacgtaggagtatgaagtgggccgatattgtggaacaacatttaagtttatttgataattaattaattaataataaatataagtatataaatacaaaattaatatgtgtttgtgtatagtggtggtacacctcagttgccaattcacttcccatgaaaaatttctcattgttctaattgattgggcaaattttggattgttcaacaaagaccaacaacccccattaaaaataaaattaataataaaaaaataaaatatattttttaaaagatttatttaattaaatacaaaaaagtattatagaaatattaatagaatattttggtctaccaaatcagattcttcaccattgtagatttattgggattccttgcttagtcttgtatggctcttagttttttatttaattttaataagggataattaagttgccttttaatccttccaattaagattaggttcattttaattattcttatcttggttaatttaaccaaataataataaaaagtatgtgtctaaatgggaacttattattatatatctatagttaattataattattccaaattaaagtgaagtactccaattaatgtggtgataataaaatattggactacttgattaatttccaataatagtaataataattaatatattgttaatttgtcaaaagaatttaggctagctcctttattatcttgtttcccggttgtatcaaagatatggtataattaatacaatggaatattaatttcatctcattacaaataatttatataaatatgtaattatagaatggtaggaataattaattagggtaatggaattttttaggggttttcttatatttacactttaaaatatatatatatatattttttttttgtaattttacaaaatttcacatagaaacccgtatataagagttattattccataagtataaagactattcattatatttataataaattttttacacatttttaacttaaattattcaaaatttcacgcaaagtagatttgttattactacaataaacgatgaatatcataacttattcaccctatataatataaaatgtatatactttattatgatatgataatgcataaaaagtgtacattatttctaaccgtgccctagctatgtggtaataaattgttcttcattatgatccaatatgaaaacaaatatatatacgtaattgtttacatgcattacaaaaaaactagtttttgtgaaaacgttatagttataatataattttttatgattaaaatgtaatttttaatcataattaaaaattatttgtaactaaaatatattatatttaaattcaagttgtcactacaattttttttttacttttagtcacaacaaaacttatgactaaaagtaaaaaagttntgactaattattaattatcatttctatatatgttgtcactaaaaggtccgtgaccaaaggtattagtctcaaaaattacaatttgttgtgactaaaagtaaattagtgacaatttgtgtctaaatactatgttttaatcacaagtagttctttattgtgatcaaaagacatttagtcacaaaaaatttatgttgtgactaaaaagttcactaaaagtagctattttttgtagtgtgtaactaatttagttttaatcacaacaagtattatgactaaaaatgcttttactcacaacaaattgtaacttttatgactaatacctttaattacggatattttattcacagtataaaaataataatttacaattagttataacttttttacttttaataataaattttatttcattaccataaaagaaaagaattgtaacaaattatatatataaataaatattaataggttttggattcttagaaggcaaagacaataagatgtggtacaaacaaacacaagttgtctagttggtgaattttcaatatcaaaatatttaaataaataaaaaaaaaaaaaagcataattattataacatatatagttgttatgttatgttatgtcttctctttctttcttttttatttgatatttattgaaattaagtttacaatctttagtgaggtagctctcaaatgatttgcaaataacatagaaaaatgacatgtacacatgtatgtacatgtacaattgtacatccctaatatattccattaattattttaattaaaataaattaaattaatttataaatgaaaaccataaataactagttatcttcattaaataataataatatttcagagttactaattcttatatatgtattattaatttatataaatatatatctaataaaaaaattgaaacaataatttttcaagattttctattttctaactttattttttaaaagtattctttgaatcaatactataaaacacatttttcttgagagaacaatcttttctagttttgtctctattacataattatacattataatataatttcaaccacacaatataattagtttaattagtgagagtgtgaaatataaattggtggtggttgttattttgtactaaaatgtttgtctgtatataaatacactaagaattaatatatattacacatgaacttgagaaaaaatttagctaaaaaattattttcaatgctaaaataaatagtgcatcaatacatttatttaaaaggggtacattgtaaaattttcctatattttttactcgtgaaaattttaactatacttgacattatgcaaccaatgcattacctaataattatatataaaaaaaaatattatttaattatatatatgaacctttttaattattttatgaaaataaaaataaagagttttttcatgtttacacttaaaagtagtttttttttttttttttgcatttttacggaattccacacaaaaatttctatagcaactaacggaacaacctaaatcgcatttaaaatctatatagcaacccacatagaaattactgaagcaacccaaaccgtaaatttaaaaaaaaaataaaaaatagtatatagagtaattcctctatggccattatatatacttgataatttatagcttagagttaatttgtttcatatttgattaatttaatcgaataattgttgaatgatataaattaatgcgcgctcacataaattttttgaatagctaggttaaaatacacaattgaatgttagctaaatactttgctcgatggatcaccttcgataaggtgtattatttggccctatccaaccaactagcgctttaaaatttttttaaggcaatgaacgaaatgtgccaaggctgacactcaaaagagtgtgagccaaacttgaatttgaacccttgaccttcaaatcttagctaggcatgccactaatttgtttctaggcaaccacctagttgatattggttcgtagcaaagaaaaagcacgattagggttcgatcgagtaatatataatatgtatacatattaatttttactactataaaattatttttggtgtcagttttaaattgatacttataagaataatgtcatttcatagaactgacataaagttagagttttgatgtcgattttaaactgacactaatgaattttgatttcgattttaaaccgacacttaaaatatacatacatgtgttttcttagtgtcaatttaaaactaatagtaatgaattgactgtcctcattagcaaacaaagagcaggattatgtacacagaaaaaatattacacatgaagtgagattttcaactaattacaatattaatttagaaatgcttactacataagtgtgtaatattttgatggaatatgtatatatatatatatattaattattaggtccacattaagcatatgataaagttgatcatgatatattctactatagcacacatatatatatatatatatatacatgttgccaaaaagtaatgtgatatattaatattgaaatatgaattagtgagtcttgttgtaacatccccgcttcaagcctcca

SEQ ID NO: 161624 - DNA, 2334 bp, Cannabis sativa
ggtgaatgtttggcaaaacaccgccattagcaattgtaacagtccccaaaagcttgctcaactcctcgtcatttctcactgcgagttgtatatgtcttggcacgatacgattcttcttgttgtctcttgcagcgtttccagctagctccaaaacctgagaataattttttaaaaaataaataaacaaacagtgttgatcttgtactccgatcttataatgaacagtgttgatcataagccaatcaatgcaaatactttgcgaagaacaaatatggaagcaaatcaatccccatttgtatattgagaatccatttccaaaatcatttaccatcaatccgagttcacagaacatcatctctaaacctaggtgaataagcaaaacaatagaatccatacacaataataataacaataaataaagaccaaatcggaagtaaccgattaaaaagaacaaaatcaaatcagagaacaaaatcgatcaagagtgaaatacaaacctcagcagcaagatactcaagaacggcggaaaggtagaccggagcacctgcaccgactctctcggcatactttccgtttttaaggaatctggcgattcggccaacaggaaattggagaccggccttggaagacctggagacagatttggaggactttggcttgcctctgcctcctttggttgtagcggccgtactcatctttagggttttgctgtctggatcaaaatacaagtaaaccctaggaaatgtgatcgagcaagaagaacggcaagagagagaaaaagagacgtattgaagtgaaagtgagtgttctggaagaagacagtgtgtgcgtatttatacgaaggggtttggggaaagtgcagtagggcacaaatgatattattggtggatagccaaggacgtagatcgccaacctgtcaacatatttagtttttatttagaaaaagagggaaaattgttgtagggagggaacgagtgtatttttaaaactttgggattatttctttcaatgaaatgacagccagtctagtggttcctaaacctaatttatacggaggaatgctactcttagtctgctaccatcaatcttctgttataatttcttaatcaatttttacgttcgaaaatacatgttaaattttttttttcaaggccgtattcattatgcttataatatcatcaggctcggccttagacataggcggatcaggcctgtgcctagggcccacctagtctaggagcccaaaaaaaaatttcccttcaaaaattataccattttttttattttgaaaaatactacatttttttctaaataaaggcccaaaataaatttcttttctatggcctactaaatttcaaggccggccctgaacatcatccctgtaaatttttataattttcgaatagtttacaataccgaaaatacgtttgaaattttttaaacatgcgtggtaaactatagtgtcaagaactctgttttcggtactgtaaactattcggaattttttaaaaatttacagggatgatattgtaaatgtaacgaatactgctatgaaaaaaattaaaaaaaaatatttcgacatctgatttcggaagtggaggttgactaagagattgtaataggaggttataattagcatttttcatttataatcccttacatcattgctaatggtactttttatgttttttttagttaaaatgactagaaagttaaaataaaaagttatttttattgttattgctctaattatgctccttatttagtaagtatttaattattttaataatattttataattttaatttgttaaatataaattaggaatgctgccttcaccttttcatagcatctgctgccttccaaagtaggaatgcaagagtttgcttggttgtaaaacccttttatatttctcagcacgatttttctctgctttgtaattagttacaacaacattaagagaaacttcaactctttgcttgaataaagcatcaacatgagctctgccctcgtttaaagctttaatcacctctttctttttttggtctgagttaatacgctcagcctttaagatttctatattgtaggtcagcttagtcacgagagaagagcacctcttcgccatcagacccgcataaaagaaaaattacataaagtcaaatacaagtaaaaagtaattggaagtcacaattggaataaatatcggtgaacctgccacagtaatttagcttttaagactattgttaatgaaattagtctataactttatgtttctagaaagaaaaaaaggtattattttatatagagtttaaatttaaatttatataaacatat

SEQ ID NO: 161625 - DNA, 1809 bp, Cannabis sativa
gggtccgggtccaggtccggggtctaggtccgagtttagtttcgggccggggtccgggtccagggtccgaatttggtttcgggtcggggttcggtttcgaggcccgggctcggggtccggtttcgaggcccggttttagggtccgggtatatgagtaaaaaatgtaaaatataatatgttagtaaagaaaaaaaaaatgtttttgaaaatagaaagtaacattttgatgttttttttgttatataattttttaaaaattgagtttttaaaaagtttggccaaatagtccctattaatttttaaaagttgttttctctttttttaaattttagttacgaagccaaacaaccccttgatctctcctaatagagcctggtctcccaaaatataaataagtgtagaaaatatagactacaaggtcaccactagtagcataattacatcaaataatagcatcaagatattcatgtatgcgagagctcaatcaaagtgaaattcctgaagatttggtacaattctgaccgtactcaatactatccaagaacaaacaccaaagatagaaattaagagagaaaaattgaagctagtgcatagcttcaagatagttctattgatgaaatggttagaatgtcattaccaatgatattacaattagacttcttatttctctagtaataggtcttaattggtggtataacaccaagagaccttttcagctgggaaatgtggaaaacagggtgaattgaagaggtggaaggcagatctaacttgtaagtgacaactcccactcgagacaatactttgaatgtgccataatagcaagcttccagcttctcaaaccttctcttggctaaggattgctgacggtatggtcttagcttgaggtacaccaaggcaccttccttgaactctttgtgatgcctatgttggttggcttgattattcatctgtagctgggtgtgcaagagatgcatgcttaggttgtcactaagatagcatttcgatcagccaataaagtatctactgccgagacatgtgatgaaaaagtgaaataccggaccaagggtggtggatcccttccatagagggttgaaaatagggtgcatttggtagtgcgatgagtagaagtgttgtacccaatatttttcccttgctaaccacttggcccattgttttggtttctcatttgtgaaatattgaaggtaagtttctagagttgtttgactacttctgtttgcccatccgttcgggtggtatgtcgtgcttctcttcaatctagtgccttgccatttgtggagctcatttcaaaaatgtcttttcatgtcacttctttcatgccatttgtgataccggtggcttttaccacatcctagtgtttcttctagtattaacatgcaagggagttttgctaaaaagaaaaagaaaatagaaaagtgcttccttccctattttatgtggaatttattagttgtattgaatgtatatgtgtaggttgctttggaaaggtacaacaaaatgaaaggcaatgctcctgaaagattggtttctggttctgatgattttactatgtttttatgggaaccttttgtcagcaagcacccaaaaactcgcatgacaggccatcaacaggtacagcgtattttctttttcttttttacttttgttagtgttattttattttgaaaaagttagcagttaacatactaatttggtgtagctttaacataactgttacaatattagtttgattatgttggtttgttgctaaaatcccggaaaaagaaagactggtcagcgataactcagttg

SEQ ID NO: 161626 - DNA, 2749 bp, Cannabis sativa
tcctcaaaaagttaaggattagtaattgtgtctctctcttatattacttgcttatttcattacttatctcaccaatctactgagatggtgttggacagatctctgcgtcaacagagaaaactatataaaaacatagatgaacatgaaagatacacagcataatagaaaattggattaaagctatgaggaaaattttatatttcttaattaattaagttattattatgctcaaagtatatgttatttgttacatcatgccatgaacacattttttattttttatataggtgtttattaatatattataataatttgtggaagtttaatttccaatcgtaatattttttttctttaaatggctataatttttaatattttttaaagatattaaatatggattttgaagatcagtttttactcttagtaattttttattggtatgcacgtcataaacacactatttacttagagttaaatataatacatcaactctattcgatgcaagatacactttggagttcttatatggctcaaatcgacaatgcatagagttgatgtggatgtctcgtgatgcatttatttttttgtgcaatcactttagatagagagaatgaagtaaatataataagcatgtatctgttgaagaaaagatagcaacttttttaaccatatatcatagcacataatgagcaatttattgtcatgatgagaagttgcaacactcttcacaaactgttcacaagtatttttatgaggttcttgaagcaatgatgcgttttgtaaaagagataataatactcacaattgatcttgattccaatattccaatcactcaaaaaaaatattagaaattttttaaggcactgtattttctcataatggtaaatacaatggtttgagatgatatttacacaataattttagtgcagggacaatcggtggtgcacttgatagaacactagtacatgttgtaatcccattgataaacaaactgcttataaagaaagaggaactggtaattgctatcaaaatgttttagaaatatgtgacttcaacatagtcttcacctatgtttatgcaagatgaaaatgcgtaacacatgattcacgaattctaagagagatattagttaacccaaattattattttccatttcctcctctccaagttagtgattagtggaacctaatttattggtatgataaattaattctctactttatttagtttaataattttatttgtatacatttcagataagtattacatatgcgatgcagcatatccatgcactcggagattttacctccttattataatgttcgatattagttagaggattatcgtcaaagacgtgctgtaacaaaagaagaaaagtttaaccatatgctcatgctcaagaattgttattgagtgttcatttagagttttgaaagcagatttttaatactaaataagatggctccatatatatgagcttatgttcaaagagatgttattattgtatgttttgcaattaataattttatcagtaattagcatatgaatgatgaatgacttacttaatttgatcaacttcaagtaatctttaagtaaatgagcaaatattcgagaacagaagatacacaaatcttgaataatttaagagatgaacttgcgctaaaattaacataaagaaaagaaaataattgatacttataatttcttaaaaattattattttatttttcagttgagtacttgtatatttttttttaatcaaatataatttaatgaatttgttaacatcatataattaaaagtatattcagatgtgagttaaaatcttattatttagatatacatttaaattcatcacattatcttaaaaataaataataaatgcactcttagttatgttctacttgacgaagtatcaaactagattttatcaaagagtagaagaactattaatatgtttagttcaattatcaaatatctcatctattgttattttccttgtcatgatgattattgatagaagtgaaaaaccatcaactttttcgtgggtgtataaataaacttgtgaactttatttatatgcactttgcattttctttattgtatttttcttcacccaattccgaatgcttaattcagtttgaggcattcgaaaagtgatcttagttctttttataatacaaaaacccatgatggttaatgggtcatttaaacaagctagagacctagctaatttagatgttgatgaccgcgtaaaaagggtagctgatcaaaatggttagatatggaatttggtttcataagatttgaggagtttcttttcaagtaatattgtaagatgagattatggccttggctgcttttgggcttctaaaacttaaaaagtactttcactgccagattttatagttttaaaatacttctagccaaccaaacaagtcctacacgatagtactttattctcttgttgtagggattggaatattaaagggacaaaggtgtatgctgattttgagtgagatgtgcagatttgtctctagctaaataatccatgagcaaattaagtagttgacaaaaaacctgtcctaaccatgacttcagcactaaactacttctggttacttgtataaccagcattccgtacccatacaagaaaaagtccaccaatccgtacttgaaatataaaatttataatttgaataacaagtcaatacaacaagttactccaattctattattattattattat

SEQ ID NO: 161627 - DNA, 3355 bp, Cannabis sativa
  modified_base (2344)..(2348): a, c, t, g, unknown or other
  modified_base (3308)..(3311): a, c, t, g, unknown or other
acatataacaaataactttaaatctcgtgtttcatgaaagaataaatagagattgatttccatttacataatctgtgagaaagtgcaagtgggggtgaccaaaactacacatgtttcgactaaggagaaactcgcaaatatactaaccaagacattatttgcagctcaattcaaagttctaaaagacaaaattttggattgataagtatatacactccatcttgaggagtattaaactttgtagagttcagttaatgaggtagttagctgagttaaataagttagttagagttagttttgtttgttattctattatagtaatagaggttaatctattctacttgagctatagatataattctttctcattctaatcaattatagagagaattactctttcgctcttccacaactaataatactcaaataaatggttcatccttatccttaatttaatcaatatatatcattcctatatataatttctaattattacattctatatataatatataataagttttcaatactttttgttggttgatatatcaattcgtacacgatatatatgtttttttttcaaaaaaaatttatatataataatgatacaagtaagataagtatataatttttgtcgattaatatataatcaagccctaattagtttctcctcttattgattttgaatgacatatataaatttgatgatacatagtgtgaacaaaaacaagtatatattagttgaataattattactctgaataattaatggcaactataaaaaatatttataaatatatatacaccttaattaacacgtattatataaaaagaaagcgattttttgctaatataataaaaaaaaaatgacatgtgtaaggagctaatattgaatatgatgcaaaaccaaatgtataatattctaaatatcatatatttattatattgtccatatcataaatgtacaataacaatgtagctttcaaatttattttcttttatttttttaaaaagggaaaaaatcatgtaaagataacagagattatatatagttgaatgatcactacttccaacaactagctagcaaatagcacaagccatgaaatgagatgagatgagattagacccatatatatttatataatgacccttcactatagtccccttctttgaatgagcctttgtccacactcacaagcaaaaaatgttctagtagctagagatcatagcttacaataaattaaaaaagaaaaaagattcttttttttttcttcttctcaagtatttctctatcatgggggaccaagaaggataggtaggcaaaggggtttaatgggggaggagaatcaaagtcatgggttggcaattctttggaatggtatataaatatgtatgtatatgtgtatatatggtgttaaaattgtcaccatgttaatgtgtttatatttattgactttggatgcaaatataaaagagagagaagcttctcttagctctttcaaaggtgccaatggaatataattatttcagccaacgctatatagcttagcttcccacttttggccattaatattttcctacttttataagaagaggcaaatagaggtgtgtgtgtgaattgtctctttcaaccatacatctaatatttttatatatatatatatatgggccaaactgcacgattgtgtaaatcgtatagttaccattttattttggaagttgagtattagtgtgtctaatactttaatactttctataagtggcgttttacgattagttagtgatcgatgtttcttaaaagttattttcttaagtagttatatgagattcactacttaattactagtggtatgacacataaaaaggtagtagctaggcaccaatattactttttattttgaacattactattaggtatcattttgttttaaggtgactaacaccatatcggtgtaaccaaagacgaaggcagaaattaagaataagtggggccaaaagataaaaaaaaataattaagcggaccaaatacataattttttgaaaaaataaaattttaaacattaaattgctttataaattttttttgtctaaaattttgggaggggccatgaccccctttggagctaaagtaattctgtccctgggtgtaacatgttgtaagtagttaggaattttttataggaaattatctcatatactatttttttaactttttttttcttcaaatttacggtttgtatttctaaagtggttgcagtgctagttgcaataggggtttctataagattttttgttgcaatttacgttgcagcgctagttgcaatagggatttctatgtagaatnnnnnaaaaatacaaaaaaaaaaattgttttgaagtgtaaaaataaaaaagcctattttttattttatttattaaataaaaatatataaaatctaatattaaattatacctatatcaaactcttaaagtaattgatacttaaaatgtaaaaatcactatcatatatgatataaatagtaatagttctgatcttcatatatattatggagtatattttttttttctaaaaaaaatcaattatattctaaattatttttacttggagacttctcatagattaattagttgtgaatagttaattcaatagattatgtttccattatctttgtactttaatttgattatagttgtacacaaccaaagaattgattgcatatttttcactatataacctagctttatggaagaaaaaaaacaaaaacaaaagtaaataaatatatagaaagaaataaaaagtaaaaggtcaaagtaattatgtgtcttcattgatcattttcatatagatagatagtttcgtggatgtttctttttcatcctttttcaagaactacatttgtttatatagaaataattaaaataaaaaacaaacaaacaaattggttgaaaggtcactaattaattgtgttattgattaattaaattgaaaaacattagtttgaaaaacaagacaagaaaaaggaaagcaacatatgcaaacatgcattgtgcaatattcttattaacatttcttctatcataattgttaatgctaattaattaattaatatctctttctaccactttactctttattttttacttttccatattactttagactttgattttatattattttaagtaataataacaaacactacttaaaatttgtgtttatatatttgaatatatatatatatatatatagtaggttaaagatactatttgggaaacttacaaaaatactgaaatttgggttaattttnnnnaaaatactgtcacacgaaaatcttttcaaaaatactgtgttttt

SEQ ID NO: 161628 - DNA, 7665 bp, Cannabis sativa
taattattgtctcatcattttaaattttacaatactgaagaaattttagaacaattgtatgtttattcctctgaaatatttgcctattaataggctagctacaaataattgtatcgacaaaatttacaactaactacaactcatatcccaaaaatcagggatataaaataaataagaaaataaacataatcattaagaatttgtttccctaataattgatactgaattaaatacataaaatatttacataattttacactcccccctcaagctgggttatgtaaatcaaacattcccaacttgcacattaattcatcaaaagtagtcttgggaagaacttcggtgagaatattagttgtttgaagttttgatggagtatagatggtttgaattgtggcattttcaatcttctcaatgatgaagtgttgatctatctcaatatgttttgtcctgtcatggtgaacatgatatttagtgatactaatagcaacctgattgtcacaaaacatctttatagatccttctataaagagtctcaactcaactaataataatttgagccaaatccattcactgataccaagagccattgctctaagttctgccttagcaaaaattttagaaaccacagattgtttcttacttctccatgttgctaggttaccccaaacataagagcagtatctcgaagtactcctttaatcagttacatctcttgctcagtctgcattaggttagactttgatctctatgctattacttttcttgaaaagaagacctttctcgggattcatcttgagataccttaggattctaataacaacttccatgtgttcttcaatgggattgttatttactggctaacactatccaagaaaccaatgtcaggtctttatgagataaatagatcaagcgtccaactagtctttgagatctccccttgtccactagtatacaatctatttctgaaccaattttcttgttggaatccatcagagttgaggttggtttgcatcctaacattcttgtttctcttagtaagttcaaaacatacttacgttgcgagagaaaaatgccatgttttgattgagcgatttcccaagatttttaatctcgaattctctatctaagaagtttctcaatctttccatttcctcataacccgtcaatatgatgtcatctacatagacaattaggatagatatccttttatcttgttgagaatataacaaataaagtatgatcggtttgacattgagcgtaaccattttgaatgtttgacttagtgaatctatcgaagcaagcttgtggagactgtttaatgcaaaccttatctttgtttttaagagttctcgaatcccggtggaatgtccatataaacttcttcaagatcaccatttaggaatgcatttttcacttcaagttggtgaagaggcatgtctttatttgcagcaagagataacaatatgcgtagtatttagtttagcaacaggagcaaatgtttcttgataatcaaatgtttactatgtgattaaatgaatgtgattgtcagccttccaccatttatacattgaattatctgattttgggatcttgatctcccctgtgagatattcctccttcctttatctgccgatgtgcatcataacagactgtgacattgaatttgtgattagtgaccagtgaaacaacttcactgctgtgagatgaagaaccaattgagacatgaagattagagagagtagaagatgcatctgaggttaggctttcttttttagcagccatggcgagagatgtgtgaaaggtgaacagaaaaaaaaattgctggaagatacgattagggcagaaaaaaaacagcgtttagggttgtattaccttctctgataccataaagaatttttagaataatcttatgtctattcctctgaaatattttcctattaataggctagttacaaagaactgtaattacaactcatatcctaaaaatcagggatataaaataaataaggaaataaacataatcactgagaaactgtctcccttacataaaatatttacataattctacactccaaaagttaaaaaaacaagcctattattattgttaaaaataaaaatgcctcaaatatcctggttgatgttgatttctcataaaaaggcctctttgttatattggaataggaggtagatttgctgttaaatgatggcagtaaacacatcaatgtatcaggatggaggaagaatgctatgttttcaaagagagtcgatacaagtcgaaagaggagtaggcggtgcctgttaatgagtctggctttggcaaagacatcatcccagcaggttattcttagtttctgtatctattaatgtattgttagggttggaggactattttacttttcttggttcatcgatgttactttatttcatggtctatttaattgtgtggagcgatagagctggatgtaggtcctatagtctcgctgtcaaggtttatctccattgaaaattatgtatcttaattatgattttagaatctgttgaattttgaaatggtttcttatgtttctttgtttgctagataagcttatatatcacgtatattcttatgctaaaacctcgtggggctgtcttcaattggtttttgtgcagtaatactcagtgacatcagtgcatactgctttagattattcctaccaaacaataaatatcagtattttttccatctgtaatttttatgatttttgtcaagtaacgtatttgatttttttgtggctcagtgtgagatacatgagttattggctttggtatactacgatagtctgcagaatgtggtgccattttatgatcagcgatctgttatacctgtaaaggatgcagcgtggatgacgtattgtgagaactcaatgagacattttaagaaagcatttgctcacaagtaaatgcccctctccttatccacttttcatttcttactcatttgtataatcttgtctaagttgtcatctcttttgtttcaggcaagattggtctgatgcatactatattgggaaactctgtgaaaagcttgggttctctagtgacatatcgttatcatattatgacaagtctattaacttgaatccatcagctgtggattctgtgtacaggatgcatgcttcacgcttaaagttgctttttacatgtggaaaacagaacctagaggctttaaaggttttcggttttcttgcttctccaccgtatttagaactggcaagatttcttttctttctacctttttacattttttttttctaaattatcttcgtcattccaggttctttcagtatattcctttagtcaatcaaacaaagatgctgtcctgaatgtcttaaatagaatggatgctgagaatgcccgaactgataggagcaaacaagaagatgctggagaaataaggcacgaggatttacttacactggaggtgtggcgtattctttacagtgattgtctttctgcccttgaagcatgtgttgaaggggatctgaagcattttcataaagctagatatatgcttgctcaaagtctatataaaagaggtgatactggcgatttagagaaggcaaaggatgaactctctttttgcttcaaatcatctcgatcatctttcacaattaacatgtgggagattgatagcacagtcaagaagggaaggtagaacttatcattatttccaactacatatttggaacaaaatagtaatgtagtagagtaccaaggttaaaatctaaaaaataagtaaacaaatctaatagaaaatagtaacaattttgtaagcaatttttcaaggtattaaagggggaaaaaagaggctgaatagagaaccagaatatgagggtctttcatccttctgtcatatagatttgatagcaagattgcaatgttatgattcatcacatcgttctgttggactgtgctggattttagctttctaattgaactgtctagtatttcatgtaaatttgtaacttctttataagaaacagtacatatgctatgtaaaatagtcttatagaaagaggaagatgaaaaagaaatcacatcaatgaaaatcaatcccttgataaatctgaaaacgtaaacaacttaaattctttatcatgtaaaatagttttagttactgttttctccaaatgcatcattaccaactagatagtattccctatgtagaagacttttcataattttcattgtaaatcctagcaactcgacaaaagaattataatattgtttctaattgtctcactgcctttccccctgttaagtagttttttttaagttgatacttaacaagatcttttgcacagacgcaaaaaccctggaatctctgggagcaaaaagatccttgaagttaacttacctgaaagttctcggaaatttattacttgtatccgcaagtatctgttattctatttgaaactgttagaggagactggagacatctgtacacttgaacgtgcttatgtatctcttcgagcagataaaagggtaaccattcaaactagactcattgcttgatttatttgcaaattattttgatttaaagtttaaaagtggcagtatgtagttcaaaattcaattttctcttggttaatttcttttcataaacaagttaatcaacaattttattggtctttgtattttttggtgttttgcagttctccttgtgcattgaggatcttgtaccagtagcacttgggagatatgttaaggcccttgtttcatccatgggtcaagctgagaaggttggcggtgccgcaagcagttctgagcaaatactggagaaactgttttctttattcattgaacaggggaacttgtggccagagatatgtagcttgtctgagactaagggtccagagacatcagagagcagcttatatgggtattcctcatttatcagtttgactttgcttcagagatgtattgccctgttggatttttctgcatctttcttcttgtggcgcccattagataaaattctcaaaatttaggattcctaactattttagagaaattcaattctttaatagttgcgtacgtttgttaaatatgctattcttttcttgtttgcatgaaagcagtgcactctttttaatgttgcaggtatctccacgaacatatcacgttattagagagaaatggcaagctggaaatacttgaaggaataaatgagaagattcgaaagcgttttaagaatccaaaattgtcgaatagtaattgtgctaaagtttgcaggcatgcttcggttgcttggtgtcgttcacttataattagccttggacagatcactccgtcactgcctacaccatccactgagactcacgtactttgtcaatcagatggttctttggacagccaattgctttgtgttgatttgcaaatagatgagctatggaattcagcatttgagaacccaacccaattgaaagctcttgaaataaaatggaggccaatattgtcaaaaatgaaacatgtaatgattaagaaggtgtcagatgaaaatttggaggcggccaatgctttgcttaagtcttcttataactttcaccgtgagagctcatgtgtaatgccgccatctggtgtcaacctttttttggttccatcttggttagcaagggacaaccagtttcaaccaagtatgaatggcattgaaattcttgatctcagcgttccaaggaagcttatcttgtgggcatatacgctattgcatggtcgttatgcaaatatctcagttgttgtgaagtattgtgaagaaaatgcaaaggtatgaaaactcaccaattcagcatatactctgcaggggcttttcattaaagcatctcttttgatatcattttatttttgttttcctcctagtttacacgaccttgttgaggaacgtacaactgttaacatcaagggggattttatgccattaaaagcccctagtgtctaataatatgcaatacctggtgatggaggcaatgaaactttactgatttatcatgggatttgactgttttgcagtcaaaaatgaaaaaaggagctggcaccacatctgctgtctcaaatgcaagcataccaaatgttgtcactacccaaacaggttatgatcttatcatctactgcacccctgtcaggtgcttatcaagacagtacattagattataaaataaatcagccattcacaagtattgaagcatttgtatagacattattgggttttttgtggacatacctggtgaagtgcttatcaagactgttcattagaatttaaattctgtgtttcactagtattgaaacttttggatagacattattgggttttgtgtggacatactgtactttgcgaaaaactgatagttgtggaatatggttgtaggtggtcaaagagatggagcttgctatgggggaggaaatgatgcggaggctactctaaccccagcagcctctacttcagtggctgagggcaatgccactccctcttcaaacccatcttcttgttcgatggacagtcagaaggttttatttgctgctcagcaacacagtaactacactggagagaggagtaatgccatggcacaggaagcagatccaaacaaaggctgactttatatacatgtatataaaaattaattgaggcctagtaaatttaactgtacgtagaatttcaaggatcatatcactgtatcaagtagttaaaatgttctatcaagtgacaacaatgtaaaaaaaataaaattgattgcagcttgttgtgttcacactttgaaagtctcaattctttgctctggaaccttctagcggtgttgatcccgtttgtcttctggtacctcttccagttgatgattcatccattgtggtgttttttccctactatcctttaatttaatttggtcttagctttactgtttcttcattattgctctttcccttttacctcctttgcatttattgttctgaatcttctgatcttctcagaagatctggattctatctcaacacttctcttggttcttattcttcttaaaaccttggaaatccaaatttgtatctatttgggcggccgtatgctcttagatggtgatgattaagcctaagctctacggattttatcataattgcatgaagggatggatggattcgcctactactaccttctcttaaaagggctttcttacgaggtatgtgtttctccttggctatttaagattttgggttttctataaatccttactcctatatttctcccaaactttaacttcccttaaacctctgagtattgttgtcttcgtctggtccttttccatggattccattacccaaaccttgtttcaaaacttattccttactgagaaagagtctattattcatgagcttgttgatgacaatcccataatcgatcatggtaataaagcctactgtttggtttttcgtgttcttacccctagaactattaaacttgagttgtttgaaactgctatgagaaatgtctgaattattagagcacccattaccttctctgattatgattttggaatgtttgtggctcagtttagttgtgagggtgacatgagaagagttttagaaggccaaccctgacatttcaatcactgccttattacttgtgctaatcctgatggg

SEQ ID NO: 161629 - DNA, 2150 bp, Cannabis sativa
tcttcttcttctggtaatggtaatagttcctctgccatttcagaacttagtaaagtaaatcttgaaggttcagatgggaaaggagcggttttgaagacaacccagttgtccaatctcacccaacagggtaaaaatggaagctttaatggtgatgaagtaagatttcaacagaaaaccaatgatcccaataatattacatcggattttaaaaaagtagaaaatggaagcttttctggaaaagatgtgactattgagaatacaacttcaggggtgatgtcattgaaaaatttcagtgatggtgataataaaggcagaggaaacaataccaagggcaatgttattgttaatgttacttctcaagttgagaaaataaagagtgattctttagagaaatgcaatatttttgatggtaaatgggttagagatgattcaaagccttactatcctccgggctcttgccctcatattgacagagattttgattgccacttaaacggaaggccagacaatggatatgtcaaatggaaatggcagccaaatgggtgtgaaattccaaggtaagatctatatatttactgatacaacttccttttttgatctatgttgatgttattactaatcattggcaatgaccactataaggttatgtgtcactttgatcattattaggcatttacttatgttattagattagtgcatatactattttgatttacaaggaaaaagcaggaatatcatgagttagaaataccatttaagattattttaagtaaatcaaaattgttcaaatgggctccactacattgcttcaaattatacttctacatatgagaaaatgccttctattattgatacagattttgagtaagaatatatgattctaaaatactttgtttcgggatgtttattgtgttgtcttcttcagtcttaatgcgactgattttctagagaggcttaggggaaagaatttggtatttgttggtgattcattgaacagaaacatgtgggagtctcttgtttgtattcttcgccaaagtatcaaaaacaagaagaaagtttatgagatttcggggaagagagagttcaagaagaaaggcttttatgcattcagattcgaggcaagtttcctcttaatttatattcagtaccaaaatctcagcaaatggtatgttctaacaccttttgttgtgttcttgtaggactataattgttctgtagattttgttagctctccttttcttgttagacaatcttcattcaatggcaagaatggatcatttgagactctaagactagatttgatggatcagactactaaaatgtattatgatgctgatatcttaatcttcaacactggccattggtggacccatgagaaaacttctaaagggtatgtgttttagaatttttgattatctgtgatctaatcataatcacagatatctgatgcgttttcattcttacatgtggtggtttaacagagaagattactaccaagaaggcaattatgtgcaccctagattaaaggtgcttgaagcttatacaagggcccttagaacttggggcaaatgggttgataaaaatgttgatagcaacagaacacaagtcttctttagaggatattcagtcacccatttcaggtaatgagaaacacttgtaattttagctataagatctattgaaaggtaatgttgaactttaatcttgttggcagaggagggccatggaactcaggaggacaatgccacaaagaaaccgagccgattttcaacaacacttatttagctaagtacaataaaaagatgagggctttagagtatgtgattcaagatatgaaaactccagtgacatatctaaacataagcaggcttacagattacagaaaagacggtcacccttcgatttatcgaatggaatataaatcagtagaggagcaaattgctgctgtacattctcaagattgcagccattggtgtttgcctggtgttccagatacttggaatgagttactatatgtttctttgttaaagaccaacataggatcttggagatactaaacaaagttatacacaaaaaaaccacatattttcatgtaaattttagtccttttttttcttggttaaatttctcctgctattaattttagtcct

SEQ ID NO: 161630 - DNA, 4758 bp, Cannabis sativa
aaggtacaaaatagctaaataaacgtaaagataattcttgaaacattactctcttttactattgattacacattctattactttcttgttacatgttattctcaaaataaaaatctcaatctcatttggttacttctgtcatttattattaactttttgtttttatttttccactaatatttttgtccataatcatctctttgttgaatcgaccacccaatttatactacagccactgctagtggaagtcactttctggacgttaaacaatagtataatagaggtcatacttagttactatatttccctctaatggggaatttacatataatacataagtttgggcttatctggtgaagcccacccatgagacaatacgcgcatgctaatgtggagaattgatcacgatcgtatctgtccataccatgtcatatgattgtatcattaattacttgatctccaattgtatagttttctatcttaacatgattttattctttgttcgagatttaagggaagtaatttcttgtactacgcgaaatagaaaacgagaaactataactggcttctgggtacatgctgaaagttcttcgagatacacagagtcacgactcttctaaatattgattaggcttgacggaaccttgcgagcgagttgcatgatgttattttggaaggcaaaatggatcttggacttggcccaatttacgttattgggacccactcagggtgggccctgtgcataggcaggctaggcctgtgtctagcgcccacctagtccagggactcaaattttttttttcctttttaaaattacacaattttttttgctgattttgaaaaatacaattttttttctaaataagggcctaaacataactttttttcttatagcccactaaattacagagtcactgataagccataaatttctatttaaaatccacgtgtctcttcccaaaaaatacaaataatagtacccattactatgactccctatttaccatataaacccaacccacatgtatttaaccattatcatataagatatttaagcataatcttagtacatatcatatcatagttttaactatgtaattaaatcttataacacactatttaaataacataaattttagaaacacattatttatttaaatacatacatttagcaataattattctctaatattgtaatatatacttaaataagatgaatctacatcatacaatacaataaacaataaaaaagtcatgcagaatatctcaattaacttctctatttactgtttcagctctttggaggaaacttatattttacttaatttccttacctcacctcgattgtggagagaaactagtgttgattacactacgcttcaaatccttgtacaagagagcccctaaatttctaataactaaagaataattttaacaagtgacctccaaaaactgcgggaggaacaatgaaacccagaactttataaaatattttaccattgatccgactctttcaatcgaagtaagaaatgattatttgagatttcattgtttgaggagaaaatgaaataaaaccccatcgaaaattatcaagtgctatgtttgcgttgtttcaagaccattaataattaattcgtactactcatgtggtgtaggccattataccatccatcgatctcgagcacatttatctgaaatctgatatagatatacgaatttttatatacacacaaaccaaccaaccagatatatacattgtacttacctctctctttctttcttttttttttcttttcttttctctgaatccaatcaggttacctaactctatatatatacaaaatttattgtgagggcttcccatatttttttaactgatgcctccacttatataaatatatatattaattcattcacacaagtaaatatttcagatgtgagaaaatttagacaatttatcaagaagatgaaatattttgagaagaaaaaaaaaacaccatttatgattaatagtaataacgccatgggagaatgacgcattcgatcatactcatgatctggttttaaactacacaacgttacatataatataatgtactaaaattaagccttatatttattataatagaagattagtatttgcatttcctgattgtcttactttcttaatcttagcaccaagatccgcaagaacagtcggaggaaacaaagattcaatctcagtcgtgagatcaagtaaagctggtcgctgattcacttttcgcttcgtcttttggatcgttgacttgggtttcctcggcgctggtgggcacggaagaatcaccgggattttggtatccactgaagttggagtcttgaacccatcattatgatgatgattatcatcatcataattaatacgattattattacccttcattgtatttttttgatcatcgtgatccgcggctctgatcatgaattgttccacattattacgagttgggattttgagcttcagagaagaaaccaacacctcgaatttatcaccacgatcatcatcttctttattattattattatcattattaatattaatattaatattctctttactcatcacaatctcgtcatcttcattttcatgatgatgatgatgatgatgatgatgatcagctactacgccttggccgccgtcccgatcttttaaacgacaatttatctggtgtcgttccaacgttggatgacgtgatgatgatcgaaccaagaagctgttcatgaattccgaaacattcagatctttctccgagaaaatcatctcagaattggataccctcatcaacgaaattgactttgaaaactcagcagaacacatataatatataatttatatatataaatattgtgaaacctggaactgaaatagcgaatttaaaaaagaaaaaaagagagagatgaagcaaaacagataaaatacaaaagcaagagtttctattctaagccgccggctcgattaatagattgtataatcgttttctctcaacacttaaaacttggaacaatgctagttctacctaataatctaagctctaagcttcatatagccgactttaatagtagtaataaaattttcaaagggttatatatatagtgtgagagaaacaggttaaacaaagaatataatgatcaaaaactcactctctctcttttgagtgtgatttctctttctaagcatgtttgtttggactttagctctcaaaatgttcttgatgagagagagagagacaggtagacagagaagataggagattttgaaaacccacagcgaaggatccgatgtacataacattaatcccatcttatatctcatacttaatttttatttatttaaaaaatttactttttttttattgatatatataagagaatcaggcattaaacaaggtagaaaatactaggtcacagttatttttttttgctgttatatctacgaattttgaatctacaatgcacgtgatttcctacagagaaagaaaaacccatatatgataaagttgaattattttttttttccttctaggtgttacgtattatgtaatttgaatttctcgcgagatctagaatagtacacaactgcacatgttattatatattattattacatggaaaatttaaagagtaatttttgtttttctttttacagatgaattatataatttttatttttcaaggaaaagaaaaacttgtttgtagttttgctaggaaattttttgttgttggatgggttcgaagtcggctaatattttaagtgtccggccatataggaaaaatactacactactgtctagttttgtctttttatttgtaaatagatacaaaatttaatcaacctctactccactatatgtatgtgcgtatacatatatatgtgcatggccatatttgctgaatcatgcaataatgcacgtttaggtcaatctagtttatttcatattaatttattttccctcttggacaaatggtatgtttcagatttcacaactgcccatgttgcctgttgacataatttattcaaaatcataataaatgaacgtattggttaaaaaaaataatactttgatttattaatgaaaaaatttattatatatgcagttcggtagctaattagttcattaggtgggttagataaacctcttttcagtgttgtaattttaaagtaccatattattttattcagtggataacataatttatacatatatacaagagactactgtatatcacccaatgtgatactaggttacgtgaccgcgcctcgcgcggtcgttataataattgatttaaaataaaataatttaattatagcacggtcgctataataattgatttaaaatataataatttaattataattatttaaatttaaaatattttgtattgttagtgtaaaaaagtatgccttatgtaattattattaattttatgaaggaatgttatgataaaatataatttaaataatattttgaaaaacttctttgtaaataatattatttatgaaggttcaatctttcatctcatcatcatcgtttagtatgatcaatcattctcttatagtgactcgagagacaacaacatataattgatcatgagtaaatacttgcttagggcgatataatccaacatgtttaagagattgtccttgacttttatttattgtcatagaaaaatatggtgctaaaggaagttgtcgtctattaagcttgaatggccattttgatt

SEQ ID NO: 161631 - DNA, 1903 bp, Cannabis sativa
tattatttaatacatattaaataaacaaatttcttactatatgataaaataataaaaaaaaaattaaaataaaaaaggaaaagatgatatgatatgtatcacgtttttgagctaatgtattaatgtttacgttttgtactttctagcttgttgtatcgtgtcgtgcttaaattcatatttttttttgtcctgcctaagtacatattttctcgtgttaaatcgtacttgtatctctcgagcttgtacctgtttcatgccttgtcaaaaatctgagcttagagcacctatagataatgcccctattggagatacttgcactgttttttaaatatacaaatctatttttcttaaaattttcgagttttcaaattagacattaatttcacctttctctaccatgtccatttgtttgctattaagttaaccattgatatgacatgagttcatattttgaattcacctaatttgatagtcggctatgctttcacctaaaaggatatacatctccaaaaaaaaaaaccatctagctaaataagttgttaaaaaaaattatttattcattcaaataacatacacaactaatttataatcaatcacattgaccgtccaatatacatgattaaagacactcttaaaaatttaaataacatacttactacattcactaacaatcatcataaatctactttcctataacaaattaacaatgatcctagttctgtttttatttttttttcctgttcttggtttatttatactttaaccaaatgagctggttagtgacaagtgaatgatttagctagaaaccactactaaaatatatattttactagtttagaaactatctattattagtttagtatctagttaccttgattactggtgttattattataattttgttggtgcattttaattttaactcaagttcttatttcgtagattcttttttaatggttattattttaatgttgtctgttaattcttgacaagctcttcttatctacaaatccaatatttttcttttgttgtttattttttggtcttagttaataaattcctttccaaagtatacatattaaccacttctttcatcattttaaagagatcagccaacaataaatacttttcaacattatataggttaccacaccatacgtttgaaaaaacaaatcaatatttgttcacattttaataacttgttttttatagccttgatattaattttggagaacctgaaaatgcaaagggttgttggaaaagaaggcatctaaattaccaacagtaacttgaaacagagcctcaaaagattcgagagtgaaaacgccccaatgtggagagagaaccacattgtccaatccaatcaattcctgaggaacatttggttcatcctcaaacacatccaaaccagctcctccaatctctcctcccaccaaacactcaaccaattccttctcctttatgatttccccacgccccacgttgattatcactccatcttttcccaatgcacacattactgttctgtcgatcatgtgccgtgtttggttattcaaactacaacatattattaagacttcattatcattagcaagctcacaaatattgttgtagaaacgataagaaacggagtctttcttggtccttgagttatatgaaatcttacacccaaaggcttccagtctcttcgcaacttcactcccgatccttcccagtccaacaattccaaccggcttacctcccaactgcttatcatcaaaattaatagggcattttacaattttgtatatattattttaattaattacaaaatatgtgtaaaaaaatttattatcattttcccatactaaaaacttttttttcaatttcatcaaaaaaaaaaatttcaattttttttttaata

SEQ ID NO: 161632 - DNA, 1904 bp, Cannabis sativa
atttttacttccattaaacttttactagcacttgttacatagttcaatatggaacatgaacaaatggatgtgaaaactgtatttctccatgtaaagttggaggaagcgatctacatggcttagccttagggatttatatagccagaaaacaaagtatctttactacgaaaatctctgtatggactaaagcagtcaccaagataggtacattacatttgatgaagttatgatgaagaaaaactacttgagaagttgttatgaaaaatttgtgtatgtcgaatgggttaaggaaaagatttgtttttgctattatatgtagattatatgttgctagcatcaactagtatgaaaaaaattgaaaaggtgaaagaactcttgaacaaagagtttgagatgatggatctaggagcagtaaagaagattctaggtatggatataaagagaaatagaagtattgtagacatgtttatttctaaaacttattatattcttaaggtacttaacaattttaaaaaagataatacaaaggttgtacagacacctttggcctactcatttaaaattatcatctactgtatcacctgcaaccgagaaataaaaatttgagataggtaatgttccctatgttagtgctattggtagcttgatgtatgacatggttagtacaagatctaatgtgacatatgaagccaaattagttagagatatatgtcaaatcctagggaaggtcgttgggaagctatcaagtggatattcaggtatatcaagagcgtgttatattttaatttatactgtaagcaaaggaaaatgttagagatggaagagaagcttgtggggtatgtagattctgattttgagtgacttagataaggcaaggtcactaacaagttatctttattctttatttggttgtaccatcatatgaaaagcaatactgcaaccagtaattgctttgccaacaagtgaggttgaactaattgcagcaattgaggtttccaagcaggttttgtggcttcaaggcataatgggagaacttgggataaatcaaaagaaagtgaaagtactcggtgataatcagaattctatacacctaactaaaaattatatttttcataaaaaaaaaaataatacataacgatattaagtattacttcattagggacattgttgctcaaaagaaggtgataatagagaaggtccatactgatgagaatgttgctaatatctttacaaagacaatcacttcaagcaagttttatcattgccttgaattgatcaaagttaaggctgcaaacttcatatagtgatggagttggcttggtttccaattgtaataaggatgttgcatcttaatcttcaaatcaaagtagaaatttttggagaagtttttattctatcattaagttgctttgtgacatggcagcattgtccatgttgcacttgatatgggagcaaatcattgatgatgtgcttgttctcgtgtggcatcatcattggaagaatggttggaaatatatgattttctattcctaacatttacgaaataagatgaattttaatgaatattcctttgtattttgtgtgagtaagaaaaggtgcagtgagcttgaataaaaagactaagcaagagagaaaatactaaaagactccactgtagtgagttgtgagtggtgagatgaaaaactttgtaatataataggagagtttgtttatattgaacatagttttgtatgtgtggatcaacttattgtatttgtaatctcaaactagaatattggatttgatggccaagccaagtaggatgtaggagatgaattatgtggtggatttgactcatttgtcccctgccacatcagcaaatacctatcctagtggcaagaaggcagttaattcggttggagctt

SEQ ID NO: 161633 - DNA, 3981 bp, Cannabis sativa
tttctgtatcttgttatgaattgaatgaaaaatgcagatccgggttgaatctcctgctcatcactcacttggaaaaagaatgcaaagcatgttttgttggtgagtgtacctaacttccaaataaacgtgccaccctccccaatttcatcactactcactaagttgttctttctctgaagagaaacacaagggcctaaggcaccacatatttttaaatcttttgtcgtcactacctcaatagttgcatcaaaatacatattcaaatgcccctcttcatcacgggtaaaaatttgcctcaggcagcttctgaattgactcgactcaaatgactctgctaacatcatgaaacccccagatttctcaacagcatccttcagctctgctgatccaacttgatcaagagagcaagcaaacaaatcaagaacaatagatgcatcagataacctctgtgacaatcgcttgtagaagctgcaagattttctataatagggtgcgcaaccattgatgagatccctgtgagttctgatggaattactaagatctgagtctacaacaattccaggacctagagttgcaggtcctgatgtaaataccatgattcgtgagccagtgtttcctaagcatccttctagaagtccaatcgcaactgatatagctgcccctgtacatctttgaggacgatggcctcgtttaacttcatgtgaacaatgaatctcttcaattgcagttgtaatattaaattcacattcagaaactggtatcagaaagccttggttttgtaaaattgatgtagttccaaggggctttggctttgtgtgtttaaaccccagaaattgttgtgtctgaggattttgaaatgaaagaaagaaaaaaaaaaactgttaagaagggatgaagaaaataaatgggaatccatagaacaccaagaaacttcatatcacaattctcctggacagtacttaattgaagggaagtcatggcagttagcttcagaatatctagtttcgaaggttccaagtataatagcaaatatggagagcaggacttcagatagccaatgacagtgatacttgacttaatttataaatctgtaaattaatattcatttgataattatttgcaaatttaacaggaattcctcaaggtgattactatactgggaatgatactttgcaaggaaatatatatataaaaagaccactatgcagagaaagaaaaaaaaaacatactttgccaagcactctatcttcagcactaaagatcactatatggttttgcttctaatttcagataccaaaaaacataaactttggcataatgttgttaactagattgtattatccacacaaaagaattctgattcataccaaagttctagaaaagcttaaacggaatgtactagaatcatgattagctttaaacactgtcaagtactaaaatctacagtaaaaatcccaacttcagaacacagcatataatcatgaaatagcaaaaccaaaatttgaagctaaatattatacctgatcagatgatagctcccgttcaccatgaaacatcacgaccttcgaacactcagaaaatccaagatcatgaacatgaaccattgaatcaaacgtaactagactaacaagagcattctcaggcaactgctctataacacgcatcagctcgttcttgagtgcccgaaactcatccacagccgaacaagcatccacaacaaacacaaaagcaggaccgatcgagcgcgagtccaaacccgccaacgacgaagccgaagccatagacgataacgacaacgaagatgaagacaacccatttggcctgctcttgaaactgaggttcaaaccagagcccgtactcggggggccaccgctggtgattttcctaccgggcgcgtactcaacgacgctgtaagtcgggaaaagctcagccggaagattagtctctccgattccggcataagaggaggggaacgagttcttgtgctgacaaaaggggcagaaccaaatgcgggaagcgtattgaaccctggcataagggttcaaaacggcagcacattgagagcaaacgacaggttcgtaagaaagaatgggaagctccggctgttgcatcaatggcgtgcacataatactgagagggataatcaaggcggtcgaatcaggtttggacgcgggccatgagttccaggcccaccggagaccctcgatcgcctccaattcaacgaaatccatggaaaacccgaattgggtaagtgtgatttggagtttgtatcttcagattgataggatcacatcgagatttgattaggtaagagtgaagtgttgggaaaggaaagagtgaaaagagaatcaaaaacctttttccctcactttcattattgtgttgctttttgagtgatcggtaaacccctggcctgggactgggagagactagagactatagagagccgagtgttgaataaatgagaaacaatgaatattattattattatcattaggggaaaacgaaacattccaacttcttatttcgtttattaccacacatacgatgtaatattcccacgctaataatagacacctttatcttgtcaaaaaaaaaaaactatttttacatagtggcaagtttgggattttgaactcacaaatttagctcgcttctcttttctagggcgatgtcgcgaggtactgagatctcgcggtgttagtggcgaagggtgcctcggtgatgatgggatctccttcctttgtgtcatacatttaccttcggtcgtgatgggggcggtaactccgtcgcgctgcatgtccactagggtctttctacggtgacggtctccttgctttgtttgagattcctgcctgctcgcgccctctcctcgtacctgaggctggatgacactctcattttctcctcttacttgagggctgcgaccattagcaccttcttctccgatgatgggtggagggaggtcttacaccaaatcgaccaactggttgtcgtcaaggcgaatctccatgtcctgaaagcgaggagagggtctaggcattttgtatcgattgtgtgaaaaggaacgactcgactcaagtttgtcgttctcacagatggcgccaaactattgatagtgagaattcgtcaaccaacttgtggccaaaacatcaacttatgcttcaagatcagaaatgagatgaagtaaaagatgaaatgtaaactcaaattgctatcttgaaaaggagaaaataatggagaaatatctattgctctcaatatggtgttacaagtatgatttttcaacccctcctcacatttgaaaaaaggggtatttataggctctaatggcctgatgtacaaaatggtcccaaggggacaaaatgtcgctatcacgctgcatgtcgtaggtgtaggaggtggccttgcacctcgtacccttgcctggtgtcaggtggtccccggttgcaggagggtggtccccgattgcaggcatttgacccttggttataggatgcaaaagggtggtccttggttgcaggcatgtgatccctggttacaggttgcaggagggtgatcctcagttgtaggagggtggtccccggttgcaggcatgtggtccatagttataggttgcaggagggtgactgtagcgtacctttggttgggtcttcagaccttataggtctgttgtcaccgctactcataccttctcgctttcaaagtcttcaagaggcgtggttgtacgctttttccttgcaccgccttgtcctttgattcctcctctaaatttattcttgtcggtgtgcattcacctctcactttatacttataaccctcggaacacattcacacaacacacacaacaactcgcatgcgagaccccccatgggttcgcatgtgagcccccaacacccaacatatgcacacacgttgggctcgcatgcgagctcccatacactcctcacacacacacgacacccttcccccccccccccc

SEQ ID NO: 161634 - DNA, 1406 bp, Cannabis sativa
  modified_base (1356)..(1358): a, c, t, g, unknown or other
tttattttgatggaaaatgtaagatatatacacttgtagcttcgaaaacaaaaaaaaatagatagttctatgcaattgctcaaacacatttgagatgttctattataccagacataaaatctactagatcattgctacagtctcaaaactgcatatctacaaaactattttgcaaatctcattcaattatttctaaatctcagatattgtatggcacaatgcatatttgtctctttttaagtttaaaatttaaaccaaagcaaaaaaaaacattgtgaagtttttgtgtacttctgagcaactatctcatgtctatggtagtggcttgaaacaagtagagcaaaaacagatatggcacgaaacaactcgctattctcgtcttaaaatatgccagacaagattaaatgcattaagtttcacgttcatcatcgctggcaccgccaaacatggaggccattttcaatgccatatttgcagccatttctctcctttgagaatcaggcatcaaccttaaactatctcgtatgttaccgatctcagacatcaactgttccaactcctcaaactcaaaatgtgaaccttgatctggtttcaatgcttggttagaatcttctggatggggaatcatgtcggccttgtcattctcatcatgaaatgcagtcccagatgttgagggccgcatctcctccctatcatatttgattacattctctagattggaattaccttgagggctcgcaacacttgcagaaacccattctttatctgtatcatcccatggttcagctgagccagcagacagaatttcatactccaattcgtaatcagattcttcttcggacaggtctgaaaggaaagaataaaaaacttagtatttccaaacaagaagtcaagtagtaaccaaatgtagatgggagtaagaccttctctttcaggaaatgatggcactgtaatcctatctcctgacttaagaatcattccaggccacatatgagcagagagagcaccggaaagacgctcaactccttgtaaatcaccatgtactgacaaacctgctcaggaaaagcatacttttcattgacataataaaggcaaagaaaatcacttaatatagatattataggaccaaggaagagaacttcattggcataccatgacactgttagaacctaggattagtatggtgtgctagaatatagtaaataaaaagtgtacattggtttttatatgggagggtagtcttgagtaaagtgtgtaaggcaagaatccctcttactaactggaatcaaataattagtagatcagttccgcccaaaagcaatatgggccaaggttatgaacttataatcgataatnnnatgatcgagtcgattccatgattataagttcattccataccggaccag

SEQ ID NO: 161635 - DNA, 4702 bp, Cannabis sativa
  modified_base (4540)..(4546): a, c, t, g, unknown or other
tacttatgttgtgtgtagtctctctagatatagatttactacaatttggcatgtgatcatgttgatcatttcatcactttcacattttttttttaaaaagagtcaaattaatatatgtttatgtgtatatattccatttttataagagccgccttatttacatatgaagaaaaactaatttatattatttattccaaagctattttaatattctaaaattttcatttaaatgtgcttatctccattttttttataatgaacttgattcctttctgtgactgagctcattcgttatatacaaagcttcattattattatttttctttccattcttttgggacagcttggtaatgttcaatgactggctgtgcaataataatttatttagtttttattactccaaatatattaattccacgtgtgtgactttcatcactaccctctctctccatatatttatatattatattagtattcaatatcccacataactaataatatatatattttgacaaaaaataaatattttttcttttgtttacaaaactaattggtttttgggtgtgtgtgtctgtagaagaatggaacacatattatactatcttgaactaattaatcttctagtacaaactaaagttctcaagtaacatatatatgttactttcaattgttgttatcttcttcccctcaagcagatattattgattacacaaattaaatcattgacaaaattttgataaatgacaatatattaatttttagatttgatgtgtgtagaactgttttataaggtaaaaataatgcaataaaagtacttgtctatatatagtcttttctttttcttttttaaataataataatagtgtttattggataaatgtatagttaattgagattgataattgggtatgcgagagtctatatatccataattaaattctaatatattttttcccagtgataattttgataaaaataccaagacttcaaatcaaaaaataattgaagggtgaataaatgaagtataatttaaataaattaaagactaaagatcctaagttgggtgatgggtgtaatgatggatagtttgatatatacaagagaagaatgagagtgagtgatcttgcaaattgtcctccacaagattttcaatgaaagaaattattatgacatggaaatggacccaactatatatatgtttcattttcattttataattttattttaagtttattattttctttcttttctgaaaggcccactatacattcatacatatcaaacattaatattgtttgctccaagctagatatagagcatgccagcatggatatgcacccttcacattgctatcttttttcttatatatattatatgatgattctttaagaaatagctacatgattatgatgaaggcaaaatttatagatgagcaaattgtgtggatgtaatgtcacaatagcttcttggggttactgaaaatcaagaataaaaaattaggacggctattttcagaaaaataaataatatctttttattaaagcacattatcttgacctcttgagagaaagcaaaaacaaaaaaaaaaaaaaaacaaaaagaaagaaatcaaaataagagtgctttaaaggttttatttatgtatattttattattatttaggttgttttagaggactaggtgtattaaaacaagtgtttgttagtccatatacttaagtacttgtcattgactaatcttcttttgaaggaacaacattgactactcttatttaagcaaaagaagatcacttgccatgtttacatatatcttttttattttgttttgaaaaactagtttaagttcaatctctttgttatttattatctattattgtgggatgaaatatataaaattaaccaatgagttaaggaaatgctttagactattttgcaatttttatgattttgtgctaatgtataatgacaaaatttaatatctaattaatgcacttttaatatttaaatcagtaataatctatatattaagaagacagaaatgaaacaattcaacagtaagtctaaaattatgaacaaatctattttcttaattactaaaattacatatatatttttatatatataatcacagatttaaaatataatttagtttcttaatattcttctgctaattgagtaaaaaaacacgatgtttcacatttttctaatgcatataatataacaatagatattatacatctaagttagttgtacatttttaaaacatacatctaagttagttgaatcttaaaatattatgatttgtttccataaaatatttaacattattttatgaacttaattacttaaagtctctcgacatattgattctgcccaaatactttattaaaacaacaattgacaaaaaaaaaaaaaaacaattaatagaaaactgaaagtgcatgtgttacaattgatttggtctatattatttagtgacaaatgacaattcagtaatattcatttaaaacataactcaaattgccctaaataaaaaaataaattgataatatacatcctcttttgtaaattgtaagtgcctccataacttaacatctctatttttggcctatttagataggatacattcatttaacccactttttaaataaggtaaaaaagtggaaacgaaaaagaaaaggtgaaaaaacaaaacatttcttcattaaaaaaagaaaaagaaaagaacagaatgatataagacattggcaaaagaagttcctcacacgcgacacttactcattacgtgttggggggcttaagattaagaatagactaaaataaaaaaggaaaagaagaaggaaaatgaaaatgttggtttgttccctcaaagattttccctttcaccaaacacaaaaaggaaaatcttctctctatagtctctactgtgttcggtagacaacatgaaacttagtacgtacccttttctttctttacatatatacacctcttttgctctctatgctacccacccaaccaccactctcaccttcaaagcgcgtgtgataaatatggtagcaaaaaccaaacatatattatcaaatattcttccctaaataagtccctttcaccttacaaaaataaataagtccctttcattttgtggcccattgataataacaataatatttcttttttttcatatgtggggctatcttgggcattaaattttgtatttaagtttaggattgaaattcaaatttggttggttttgtttttgcaacttatggttttagattgggatgaggtcaatgctcttgaatattgttgatgctattgtttcatataatcaagaaaaatcaatatggaaaaggaatatagtaaatgcatatgaaaggcatgtatcatcaattcatataaatatatataaataaatataatttattttaaatcttaatccctcactataaaaatatatataatataaaatagtactcataattgacctttgatgttctaccattttttttctatgcatgatgcatgcaagcaaaccttctttttggacatatcaataataatgatataaataattatatatttatgttttcaaataatcattcaatcatattttatgaggaaattatatgagtatatagaaaacattgatatcaaatatttattatcaacaataatttgcaatatttcttagaaataaagactcacattacaaggggtccatcttgttctgaatctaaccatacaaatttataattatgaataataaaaaaagtctgaagcacatatgtcatctctcatatatatctctaaaactaaataaataaatatgtcataattaatatatcttataaaatataataacaacttccctagatccacacctaagtccaatgcatctagcaataaaataaatataacacaaaaccaaatgaaattcaaataaatctcttataatccttaattattctactaaattcaaaaatacaaatggattatatcattttatacccataaattttagctaaacataagataacttcataatttttaaaacgcgtcagaaataatctgagactaatttttgtccatttatttttttataaagcttttattaaaatctcaaactatgctttaaatgaattataacttcttgtgcgaaacaaaaacaacttacgatttagtataccaaaccaataaatatgcaacacaatcaaaaaacaataaattaagagatctcagaatttaagtaatgaattaagcagtaaaacaaaaaagaataaaactacgtttaacgagtttcagccatgtgcaatgatcaccatttcggtcagaacaacaacaatcgtatctttattgatatcaatatttatgtaaagtccttttttaacaagttagatggcaaaatattttttcttttatagtaagatatttttgcattcatacccgatggtattaccttgtatattcagttttaattgctcttttctatattaggaaagatgcattttacagctgatcttttcttgtatggaaacttcttnnnnnnnaagcaattctcttatggaaagttagttcttaaaggaaactttgatacttatcactttccttgttaagtttgattttgtcttgattatatcagatcatatttgctgtttatagcaggtatcaagacccaatagaagatcagacccgattatagcaag

SEQ ID NO: 161636 - DNA, 4921 bp, Cannabis sativa
tagttagggtgttacagttatgcttatgcttttcttactatttgtcgactcacatatattgtttgcatgtgtatgtaagggcaaagctaaagctaaataggagcgagctcaaggtaatgaagattgtacatattgggagagttagacttggagtgttcaatctttaagacagcaggctatatttttgtagtcattaggcgacaacttttgtaagtaagtgttttgtaatgcagttgtcacctataaagatgggatcccagattatgtaaactttatctatttaattaaacatgatttttagtaaaaccattgattgtcaatggattacatagtaaatatctaaatcacaataacatgcctaatctactatggtgttacaattttgtatcacagccgtcaggttgtctttcattgatcttcacaatatgtataattgtcatcagagataagctcaactcatggtttagtaagccctttatgctttagtagtttattttgttagtaagtaatgagaaaagcctattatagagcatgttagtagtcagatagcataataggcacatgttttattttcttaagtaagcgataattaaatgtaaccttgatcgttatcttactaagatacctcattgtttcgcaggtgattctaatagaatagattcgaggcagaacacgagaagccagggtaatttggtcagatgcagtgatggtcagggggtttagtttccccctaatatttgcgatcgacatagaggcccaagaagcagggcacgcggtcagggtgatgttaacccacaacaagttacatcagtttgctaaaattcaagcgaaaattaatgagcaagatgatgagatttagtgtctgagatagtagagtgctcttacaaagcctactcctgaggtgcaaatggctcccgcgcctattatgcaagtggggccagttttgttgccaaccgaatggaaccactttatgaaaggctgcgtaagcaagaacctcaagtttttctaggaggtccagacgttttgaaagtcgagcaatggctaaccattattaataggattttgaattttattggagtcactggcaacgataaagtggcttgtgcaatgttcaaattctaagaagacgcttaagtctgctaggatatggtatccctcaccggggcgtcaccagaattacctgggaagaatttcaagagttgtttaatgtaatgtactacaattaggctctccgtagtgcaaaaagaaaggagtttccacaatttactcaaaaggagaatatgtcagttacaaagtataatacaatttgacagactagctacgttggcctcatgaatagtgcaaattaagtttagtaagaaagagaagtatctggatgggttaaatcccaagattagacacgacgtgatgattacaatggatgatgccaccacttatgctgatatggtggggaaagcactacaagctaaggacaccattaagtttattcaggaagcccaagggattcatattgctggtggagccattgctcttcctacctttggttatggtaggggtggtagtgactcaaccacaaatcagaagagaaaagtttgatctgcttctggtggctcaactcaaaaaaaaaggttatgagggaaccaaggtcgtggtaaccgtcatggtgggtctaagaaccgatacacttacccagaattccccaactataagaagcatcatttgaatgagtgtagaggtcaaggatgtttctaatgtggtgtaactagacactatgaaggagactggccacaattaaagaaggaagaacataagtctgaggtgaaacccgcttcagcaagggtgtttcctcttacacaagctgatgcagaagctatcccttaagttgttataggtcagctctcattcaacaactcttattactctattttgtttgactctgggacaactcattattatgtggcagccaaagtaattgataaattgggtaggccatgtgatttacgataaagggtttagaaccctactgcttggcgcagaattagttatctccaagaggtgggttaggtctataccaattcgaatttaagatagtgagttaagcactaatcttgttgaattgggtttagcaaattttgatattatttttgtaagggagttcttgtccaaatatgctactagtattgattgcaagcgaaagatggtaatcttccaaccagcaggtgaagaactatttgtgtttgtgggattagttcaaggttctcatattctagtaatttctgtatagaaagcaagggaactgttgcaagaagggtgcttagggtttctggcagtagtattagatgccactaggcctaaattggctcagcctaaggatatcaaagttgttcaagaattcttggacgtgtttcctgaagaattttcgggcttaccacaacaacagaaaatagactttgtaattgattttgcacatggagtggagcatgtttctatagcaccttatagaatggctcttgcaaaacttaaagaaataaagattcaactttaagggacgcctgattcagggttttctcgacccagtgtgtcaccccaggaagttccagtggtgtttgtcaagaagaaagaaggatcacttcatatgtgtattgactattgagaattatcagttgacaatcaagaataagtaccctttatctaggatcaacgatttatttgatcaacttcacgaaaagagagtcttttctaagattgatctctgataaggctatcattagttgacaatctaagaggagaacattccaaagattgccttttgtactaggtatggccattatgaattcttggttatgtcttttggactgaccaatgctttggtagctttcatggacatgatgaataaggtattcaaggatttgatatatgtgttgtagtatttattgatgacatccttgtgtaatctcagtcaaaaacagagcatgagtagtatttcatagatggttttacaacgactacaagaacacaagctctatgctaagtttaagaaatgtgaattcttgttatcccaagtgtcattcttagggcatattgtcagtaaggatgggatcatggttgatccaggaaagattgaatctgttagggatttgccaagaccaaagaaagttattaaagtcagaagttttctcggtttagctaattatgatcaacattttgttgagggatttacaatgatttccatgcctttaacagaattaactaagaagaatcaacaatttttatggacaaagatgtgtgaagcaagtttccaataatataaccagcgattgattgcagctctagtactggcatgaccatgagagcaggaaaagtttgtagtttactatgatgcatccagaaaaggtttggggtgtgttctaatgcaagcttacagggtttttgcttatgcctcttgtcaactgaacgagtatgagcagcaatactagactcatgacctagagcttgcataagtcgttttttcattaaaaatatggcgaaactatctatacagagagaagtgtgagaattatgccaatcacaagaaccccatatgtttctttactcataaagatttgaatataaggcgaaggcggtggttagagttcgttaaagattattattgtgaaatccttaatcatcctgggaaggctaacgtagtggcagatgccctaagtaggaagggtctcgggtaggtatccaacattgctatgatttcacctcagtttgtagatgacatggtcaagttagatatttagtttgggataggcaaactcagtgacttgacactgtaattagatttcctagacagagttagaactgttcagttagttgatccagagttagttaaagttcgagaacaagctctaactggtcaagctaaggatttcatagtctcaagtaatagaatgctactttataaaacttgagtttgggatttgaatagtgtggaacataaaaaagaaattctatgaagcacataccgatccctattcattacaccctggcactgccaaaatgtatctagacttaaaacccttttattggtagcgtagtatcaaaaaggatgtggtaaaatacgtatctcgatgcttaacttattagtaggttaaggattaacaccaaagagatgcagggttgttgtagcttttgactcttctaaagtggaaattggaggatgcactatggattttgtgttgtagaattacctagaaccacgggtatgtttgattccatatggctagttgtggatcgttttaccaagtcagcacactttttactggtgaaaataacatacacagtggatcagtatgcaaaattatatgtgacagaaatagtaaggttgcatggggctccaaagtctattgtatcaaatagggatcccaagtttacttccaagttttgggtaagtctctggcgagccatgggtacaaagctgaagttcagtaaagctttccatccccaaatagattgtcattctaagagaacaattcatattttagaaaatttgtgacgagcttgtgtgatggattttgaaggctcatggagtaattattttccattgattgaaatttcatacaacaatagctatcaaagtactataaggatggttcccgatgagacgttgtatggtaggaagtgtagatctctaactcactgggataaaaaggaaaaaggaagtacttggggtccagaatcagttcagcgcaccaatgaggcatttgaaaagatcaaggccaggatgctcgcctctcggagtaggtaaaagagaaatgcagacctaaaatgcaagaatatagagttttagataggagatcatgttctcctacgagtgtctccaatgaaggggattaaacattttggggaaaagggctagttatgccctagatttaca

SEQ ID NO: 161637 - DNA, 7195 bp, Cannabis sativa
caacaatgtagccatacattattagtttatgaaagtttgaccctttggtggttctttgattaattttcttcggtagtgaaggttctttaacaaattcagttcgattgtaaaactgacatggaagtttcacatggcactttggggtatgaggccagttggtttaagtgataacagttaggatatggattaggcaacacgaacaagaattaaatatctggaaatatattgcaactcttccctgtggagcaaatttatatctatcaattccttttcctagtttagattatttagggagcttagctcgatatggatattactgagaaggccaatggggttcggcagctgtacaattgtgcagaaagtaagacttgaacctctacatccttcttttgtctgtgaagtgtgtctgttaggatcccaaattgaccaagggattggttagtagtatataactacttgggcaccctcctctcttaggctagcttttgggagtgaatccacacaagtggttgtataaaatggtataaaagccatgcacccttaagtgggattgacgttgcaaaaaggggtgagctatggattaggtccatagtaggccaccgtagagtgggccgccatggacgtcgactccaaagggaggtgtattgttaggatccctcattcaccaagtatgagattggttagtagtatataactacttgggcaccctcctctcttaggctagcttttgggagtgagttctactcaagtagctgtattaagtaatatcagagccatgcaccgtgaagtgggaccgaagtcggattaggggctatgaatggaaggtgcagcatgcagaaggggtgacctgtggattaggcctagagtaggccaccgtggatgtcaactcccaagggggatgtactgttaggatccctcattaaccaagtatgggattggttattagtacataactacttagtcaccctcttctctccggctagcttttggaagtgagttctacctaattagttgtatcagtgtcacaccatagaattgccctttgaatgcatggttttattaccttgacaggcctcccactttatactcaataattgaaaggtttttaagatgataaacacctcatgttcaaccccaaaagtcttatccaaatgtttatagctaaaggacgccataaccatgaaaagattgtagcgagaactcactatgaacatttttaaaatcatttttttttcttttgaaagaggttatgtggtacccttgatgggaacattaactttggtggatggtgggtgtagtaacgtccattctcttgatactaggtgaagtcgtcacttgaaaaggtgggtgtagtaacatcaaacattagtagctttctcatttttcatttcatttaatatgacattttatatatatatatatatatattatatattaagaaattggaaagaggaaatgttagcttcgtcattttatgttaggtttgagatgttttgtgatgtttgaatgtttaattttggtatatatatgtataaagaaatcggaaagaggaaatgttagcttcgtcaatttatgttaggttgagatgttttgtgatgtttgaatgtttaattttggtttgtttgagacttagtcgtaattctagtattatgttcatgatttataattttttatttacacttctcactttttttagtagaaagtttgtggctcacacattgccttaccaaaacaaagcatcttggtactagctatttcaaacattgtttttgcttattaaaataatgtttttatctacggttactattaaaaacaaacattgttgctttgttattgtgacttcgtattcctaaacctccattacagtttggtatgtgttgatggaagtttaacaacaggtgattgagttggattagttgagtgaataatgcaatacaagcacttacataaatctttgtattgtggttgttccaagtgacctagtccacgattttcctgtttattgagagagaattttgtagtaacaatatatcatatggaattccccctttacatatagtggtcaagcccctattcataggtcaaagaaagttaaatatttagataatagaagcgagatgtggtctagtgcataggtcaagcccttattgcattggtccttgcgtgtaactaagaagtggtatgcttgcatgataattttatcatacaacaatagcccctaatttgttgaaagttttcttcatcaaagatgttgtccatgcaaatcaatgcatacaagtgttttatttgcatcttataacaataatatttaggatatgtgctctagcacttaaagcttgcgattactatgtatagagtttttgctttttggaacacttatagacgaagttcacactttgggaatttgttgagatggagctcgcactgagtgtttgtgctctcacatgagaagaactttaagaataagtttatacattttgggagcttcctctctttcataagggacacattaagatgaagtttgctcattggtcactcattgagtcgaaactcatgttggaagcttgtgcttgcaaaagagtagcatgtgctctcatagcatagataagcatgtgctcccgcatggagtgcgtggcgtgttaagatgaagctcgcactttgggagcttgtgcttgcccatgaggagcacacttgagaaagattttgctctttcgagaactcgtgctcacatatgaggaatagattaagatgaaatttgtgttttaggaactcaatgaactctagctcccactcttggagctttttgagacaatacttacactttaggagcttgtgctagcctatgaagagcatgtttgaaaaaaaaaaacttttttaattttgagaactagtgctcgcgaatgagaatcacattaagatgaagttcaagcattgggaattcattaagatgaaactttcacttttggagcttgttaagttgacacttgtacttaaggaactcatgttcgggtaagagtagctcaagctctcattgaaagaacttgtgctcacacatgaggagctagtgctcgtgcaagaagactcatacttacgtggaggctagctccttcgaggctataccactgctagcactagttcattttgcagattctctccattgctaagtccaatttatggatttcttcaagattctagagtttggaaacaacacacaattggaactttcaattgtaggtttgcttttagttgtttagtttctaaccttgtaactggtgaagaaaaatggagcaaaacagtgtagaaaagttgtgtaccttccaaggtataagttttcagttgattactagtgatggataaggttaaagtccattaggtattacaaagaaagccctaccagttactatctttgggttggtgtgtatgctgccgaaagaatggcgataaacttcttcccatttgttcctgaagtgttcttttaggaacagcctgtaggcttgattgctgagaaagtttgggattcaatggtgtatgccctagacattcagatgtatgggaaaagatcaaatcctgggtggctacatggttgtttaagtcgaaagtgtttgaggggatatcttttcaagagttgactaaagactgggatcttattttacattaagaaatcatagatagtttgtaattttgacttgtttgtatttcttttgttatcttttgagtcttatttatgtttatggccaaacgctaaaacttagccagtaaccacggtttttctccgccataagtgacgctcccgaataaaatttggcaggagttacaaaaaagtggcctttgtctctttctcaaaaataaaataaaataatcattaatcttagcctgtaccgatagtgaattttaaagatgattggtctaagtttggcctagttcccaattatcttattgagagtgaattttctagaataacaataatcaagaagaatccccctttataaagagttctcaagcccctattataaggaagagcaagttaaatgtttatctgacttttgatagtacaattgacatttcgtttggttgcactcttgtgacatctaatgtgaccatttaactcataatatagagtagaaccctgctatttccttagaataaagttcatgatgaagcttgtttaaggaaggttcatgtggcatatcctttgggattcttcagtagataattgtatggcagaaggctgtgtactttggttcagtttttatttcattagctgtttggtttccttttgtggcttatgtagtagacatcctacccataagtgtgctattcactttttcatcttttaacattttattcagtcaccttggtcaattacttttagttggtgtgcaatgcaaattgcaggatgctacttacaaattatttgaatggttgattatttgtttaatataaaacacaagacctcattaatttgaaacaaagctccaaaactaactgcctttggtgattagtttctcaacttttaccactcttgactagctatctctagtttcatcaactagtgtattttttcagaaagaaaaaaagttaacaatgtgcaaacaagattgttgttttcagggttactatatttgttcaagcttctttgttttcaccttgttttgtctatctgcaggctgctcttgaaaaagagaagagctcggaacagagtgaagttgaggaaactaacaaggaagaattagtaccgcttaaaaatgttggccgtggttcggaatctgtcaagtcattgacatctcaaatgaatgagctagatgtttccgcaaatccttcagcggtttctcctccttcagactcagtagaggactcaaattcaggagatcccatccaagatattgataaaagaattcgagctcttaaaaagaaggtacaaataatttttatacataaccttcgcgttattttctcgaatgttttaattgtaaaaagtaacccctaataatttcgaacattctttagaaatctcttggacaatttattgattttctcgaacccttctatttcaaatttgtgaggattagttttattggcacaatagacacaataagggttttatgtaactcttattcatcttaaatgattctagaaataggtcttacctttttctttctgcaaagattatcaagaattatatatctttggacaagaatatattttagctctttttttctttttcccttttaatttatgttttattgaacttttaagtttctgtatcaacattggactcgacagcaatagtatcctgatttcaattgtgaatttgtttctgttgtacctaaatgcagattcgacttactgaagctcaaaaacagaaaatcgcagagcaggacatgaagcctgaacagttagacaagttttcaaagcttgaaggttggtgtcaagaactaaagcttttagaggatagaaaagctgaacttactgcatcttgaattaggttttgtgttagataaagcttgaaataaccatgtagtttttcttttttatctcctttttagattatgtctttgtttttgtgaaaatgagaaaaaaaaaagaagaagttattttttcttttgtgaaaaagaaagtttatgtattcatgtttcatttcaattaatgtgatacattttcatgacttgggggccatttccaatataagaccagtttccctacttatagagttataagattatatctgttaacacaattatagagataattttgcttggattcttcttctgttttaagagttactagcatttgttcattaaaaaaaaaaaaaatggttactgccattcttctgaattttttttcgaaaaggcaaaatgatccttgaagaattactggtcttttcaattaggtacttggatttcattttatttgcaaaatattggggaattcttttgtatttgggggggtatgtttgctaattgatggtaatattataaactaatggagtgtgtgttataaaaaaaagtgaaaaataatatctgaaggagatgtactgttgcagaatcttcattttacaactaccggaatggtttttatgggttgttttttaaaatttgtagaattgtttaaagtagagtggtataattgtaatgtgaatttgatatacaattaaaaaaagataattacataagtcattattttttaaaaaaaaaattacatttttatatatatattttttacatttttaccgtttctttataaaagtaatacgaaaacaattaaaaaactacataaaagtaatatgaaaataatgtctaaacaatattaaaataacaataaaaaaaaacatacatataacaaaaaattaacaagagtacaacataaagagatagtattttttttataaataaatcataaaaattgtaaaaatatttaaaattctacacaactatatttttgtaattattattttgttgtttttatgtatttgtgaaaaaatcatattaaaaaaagtgtggttctgataattgttttgaaagatattgttgggagtgttgtgcaggtggaagaaaggaattagatatttaatttagatatctaatcataataattggatcggatcggatgtaaattttaaaaatctaatcggatcagatgtaaattttaaaaatctaatcggatcggatcggatcggttgttggatgggacatccaatctaatggataaccgaccgatccaattatcatccaattatatttacatatttttaaaatacatttataattttatatattttatttaaaaaatatattaattgatttaatatacatttaacacatgagattaaaagaaaaataatcttagatataaaatataaattcttatcttcctaatgctaataaagttgtcaatacatattgaataagttttattttttggcggttttattctgagatcataagaattaggttagactaaactaatgtttattatgtatgctggattattaagttttaaattatatttctttatgtatatttttcttcttaatgaaatcaacttaaatggtagctaatatggattggatccaatagaaaaccagtcaatagatccaataattggaaccaatctaattcaatacatctattggatcgaatcggatgactcaattcgattggattggatcagatcaatatttaataaataattggat

SEQ ID NO: 161638 - DNA, 1588 bp, Cannabis sativa
ttttttttttttgagtgatgaagaatttaatgaaaagtaaattccttcatctaaaagaaaaaaaaaaagataaagtagcaagccaaactatggctaaacaaaagtgtgtattacaactatcaaattttagtcgtactcacaggacaaaggcaatattattaggacatctctaataatgtgttaaatgagaggtataatacatcattatattttgatattttcccaatttagggttacaactcctcatctaatagctagtactattaatatgagagaatttgcactctttttagtaatattgttgcgtaaaataaaacttagtgtaagtgtacactgtcaacaataattattacagtagcaagtaccaaatgtcatggactacttttatgcttctaattgtgaaaataaactctagcaaaattattaaagtgtaaaaaaattaaataaaaatagatggtgatttagatatgggcaataaataagtaattaaaaatagaaaaatataaggagcaaactggaaagatattagtacaaagtctcagatatgagatatcaagctacaataattatttctctaatatgagaactcaggtaatgatagtagattatttttctttttattattgaagtgtttatacataaattacattacacaacctgtgattcaatcccaagaacccccacacaaaagcaccctcccatacccgctatggtcacttgacctaacctcaaggggtatagtgatgctagattgaaattgcaacaacataacatttaatagtcaagaattcttattgatttaacaggcttccatcgaagtcactccaatcttttaattaaatcacatatgtttaatataattgaacttcaagaatacaagtgtaaacatcaattttatagaattatagaaggtaataatatatatctatatcactggaataataaaataaaaactttatcatgttccatagaaattgtgtgtcaattaaatcaaatctttttaaaatttaatatcaactaaattatttacaaacagtgatcaataaaattacaaagagtaagcaagataaatatttaaataaataaactttatattgcattaccatcaatattgaagtctcaagttaataaaataatgactttctctctctttgatagctctaataggatttcgcacgatcttcagtttatcaacttaggccatggcgggttgaggccttctcactttttgatagctcttataattcaattaagaattatataaaataattcttgtcattgactttttattttcatttgtctttttgtttgactgaatgaagaatttgatgaaaaatcaactcctcgttccctaaatattaaatatctaaaatttaatattcatttacaccaatagtaattgtatagggtggtatactttttaattttttttaagtatttcttatcaatgaaaaaattatattatttttaacttacgcctaaaagagagaaaaaatatagtaaaatgtacatttataaccttaattaagaattatataggttttttcttttcttgtctttgtatttttttttttttttgagtgatgaa

SEQ ID NO: 161639 - DNA, 1762 bp, Cannabis sativa
ctttccctttttttgaaattatgcactttggtcgccataacttacggtgattgtgttctgatctgtctgcagctccaaatagaactcccctaagttgggaaagacgaatgcaaattgcaattgatgtagctaatgctctggtaattcttggaatcatgcttacttctggataaatgtgattgtaaactttttgaaaatcttccttcacttaatggcgatacacatctttaatttcctatctgttttgttgacctgcaggagtacctccatttctattgcaatcctcctctgtgccacagagatattaagtccagcaacattttactagatgggaattttgttgccaaggtagcatgtcgatcgaatgcatatgaataacaatttgctctttccgtttgtgcattttgtgctaaaaatgaaaatgaatgaactttttcctattaattcggattgttttcttttgaatatagtttatttctgttattttcttccaggttgcagattttggccttgcacatgcatcgatagatggttctatttcctttgaacctgtaaacaccgaagttcggggaactccaggttagatgaaaaaaaatgttgctccttaaatatgaatgctttatattctgtggtaaggagtgataaatgtgtaatgactctaggatatatggacccggagtatgtagtcacgcaagagctgactgagaaaagcgatgtctatagctatggcgttttactactggaaatagtgactggaagacgagcagtacataattgcaagaatttggttgagtggtcacaaatacaccaggtaccagaatcaaggctatctgatctgattgatccaaggatacaaggtgcttttgattcagaccagcttcaaacaattgcttcaatagtgagatggtgcacccaaaaggaaggctgggcaaggccttcaattaaacaggtcttaaggatgttatatgaaagttcagaccccatggatagtggatttgcagaagctcttgaagacgaagagtatgatggaactgaaggaagaccgagaacaagtaaaggcaaaacacaaaggaatgataacatgttctacagcggcgatgggagatgtcttgcttcttcttcaagtacatcgagatcctattgtagccgaagcttcttacttgaaaacggttctccacaatctccacctaacattttatctgtttaaattcaacaattcagagactctcaacacttgtttatggaaatgggaacacttaaaactaactcttagttgacaccattagatcagatcaaccttctttcgatttttcaaagttaagataagaagaacatggagtttgcaattttttgtctttcaataacctgttcaagggaattgatgagagttatattatacctgccttgtgaaaagtgagaaagctgtacaagttatcttttttgtgctaacattttggagatatcaaatataattggtttgctttagtttgttgtattggtacaatcaaacaatttattctcaatgttttgatgaatttcatacctgaatgattacacgtttaacactacattttacaccaaaaagaccatgcaggcacgctggatgttattatcttgattctcattacaagtcaaagcaagcattttttttctcctgtcattataatagggaaatttgaatttatatccatcttttatacctaaattaattttttaaactaatacttataactattagaaaaatatgatcactttttcctaa

SEQ ID NO: 161640 - DNA, 1093 bp, Cannabis sativa
ttttccaccaacacaccatgatgcttctgtaacacacactccctttagtgttattacaaactttcctcaagaactcacacagccatctatttcgcaccagtcaacaaatagccataacactttcacaacccataatcagcctccactaaatcaaccatcaatatccaaaccattaccttctgtgatagtcaaccccacttcttttgtctctacctcacactccaatctgcatgatcctactagtcagcctcttattcatctatctggcatctttactccagatattggttctactgtttcacctatttaccccgtggcaacttaccctccaaatttgtctccactttctatcactcaatcaagcactaatgccccacacttgttccctgccacctccactatttctccccctatagttgctactgtcataaacaaggaaaacttaccacccatgcctaccattaagagacaaagtgactctctcactatgagacagctcttaaaacgttgccgaaatcagaaccatgctacatctgctgccatgtttgtgggcgaaagctcaagtcaaatagtttcctttgatgatatggattccgatgacttcattgacaattccgcggagattgctttgcaatcccgcgactcattatgaaaatcttgagttggaatgcgcggggtttggggaacccgtctgcattcaggcaccttcggttgcttgtcaaacagcaatcgccccacattctgtttcttatggaaacaaagctcccacagaattctcttacgcattttcggcaaactttaaattttagtaatggtttagaatcaccacgttctggtctaagtggtggaatgatgcttctttggcaacatgatattgacatctctattctgaattatggtagaactttctttgatggttttgttcaagtggagaatgacaaaagttttcatctcacagccttttatggtgctccggatgctcacaataaagctgattcttggctccttttgcaacgtcttgctgatgtgtccccttttgttccatggtttgctataggagatttcaatgaaatactatccaacaatgacaaat

SEQ ID NO: 161641 - DNA, 1724 bp, Cannabis sativa
attggtgttaactcttaacactcctattcaaaacttatgccccaaacataccgaatgcgagactagcaactcaggaggtaacatgtgtgacttgtaccttagactttcaagtagagttgggggggttccccacacttctctaaagagctttccacttactcccataaggactataaatatgaactttcaatatatagtggagtagatgggaaagtccataggtgggaccattgaatgatgattggggagatgctttatgcgagcaaccccatcattaaagtattgtacgcgtcgaaattggatcaatatgactccaaccttatgtttaaaaaaagataacactttattacttcctttggagagagaaaatagctttagggaaaattcgttcctttgttgccttgcttgacttactgacttggatatatatttgtggttgtgctatgtctctatgttgctttttataattataacttgcacttcatttatttttacattctttgtaatagctgacacgtggggtttccctttgatcttttaggaaatatggacaacttggcaacctccactaaacagacaataaagagacaggaaatggataaaaaaagaatatgtctcctccttcggcaaagggagcttcttcgatagtcactctaactcaggtggcttaactgagcaccccaagtgtgcccgcaaaagaggccccgacatctaagggtccctctcctgcagccatgtcaccattgggcctgggccctacttgtatgctgcctccttctgcgaccgtcactactcccactttgagaggtggggttctatccccggtgacagtagtggctttacctacaggctcacctattcaattggtagcccctccttttgggcagcctcagcatctagtcatgggaccatcgcctagtgttgcgccgaatcagaatatccttcagcaactagcgcgaagttttgcacttctaggagaagcttccgatgcctttaatgcctggagtgggcaggttttgatgaacattggctcaagaatatctttcttcaatgcatcgactaggagagcctttgagaatgacactatttcttgagtaagcttacccaatggcgtcttagctctcttgccatggtatttggatttaatcaatttagcttttgtttctccatgtaaatctccataatgtagctgaatgtattgtgtagtttttacaattcctatttgacgaatttagccttttccatagaattaatatttctcacaacatctgtggagaaattcaaagatatggaaaagtgccatacggagaccatgttgaaagttaaggaacttgaaggcacgcttgtttcttctcaaaagacatccgaaaagaaattaaaagaggtggatgttaatttgaaagctgctgaggatgaagttaaggctaaaaataatgatcttggtactttaaccgccaatcttgctaaacttaaggctgattgaaggctttaaacaacaagcatgtggcagccattagcaagttgaatttggaaaagaaacaagctttggacattgttgaacaaatgaagatggccaacaagcgtgagcttgatcatcttgagaaaatgggcaaggaaaattcttttggtgttgcatactgttataggcataaatctaccctccccgcgagaaagacttgtctatagagaactcgctgtattgaaggtggctcgcaatattatag

SEQ ID NO: 161642 - DNA, 1437 bp, Cannabis sativa
attaattattatcattttagcttagctattactaggtaactagttcctaagttgcagttttacttttcaatattctcacccaaaaaaataaagtggtcctctcctcttacttttgtaatcaacttccttgtttgtggaaagtattatacattttattatcatttcatttgactataatctatgatagcacactcctctaataagccataatatgtatgggcctacctttctcatatgaggaacttagcatcatataagatttaatttaatttaatttttgtgtaaatgacatgttttgctttcaaatatatcataaataccacacattttgttttgaagtttacatttgaattgatttcctttattccccaccacaatatggaaaggtcattttctactttttccttttggaagggacctattatgacttcacttaggtccaaatgagatattgagaacaactattcaagaaccatttcgttataatatgcaacctcaccaaatgacaagtcataatagatgggggaaactccatcaaatgggccttaaaatatctcaaaaatatatgtccatttcaatacttttattattattgtaataatatatagttgtagactgaatcaccccttgtgttaaaagaataatgaaatgcactgcacccatataataatatgggaaattaagttttgagccacttatttatttatttttttttttaaagaaatcgaagaaaatataatttaagagatgtctatttacgaaattaggatatctttccaacccaaaatactcgctctcttagtttgggccagctaaaccaacatccaatttgttgggttatgtaggcccatgaagttttcttccacttttgagaaaagttgaaaaataccagtttcattattaagttatcataaatacccctataagtagtttgattaaagttttacataattttgatgagcgaattttgttgttgtaaatgatacataggagtataaatggtattctaattataaattggggtatatatttaatgatttaaaaaatttaaatcaatatctaaaagttaggcgtaccatttttcacttttttttttttggtaacaattggcccatgaagtattgaataacataaaactacaagttcccaaccataagcactttattctttaaatcaataatagaagattgcaatttatttgcttttcgaaatccatctttgatcgtagtagcatggtgaaaaaatgacattgaatatttgaatactatgaagggaaacaattattttgataatttgcaacaaaattacaagatgacttttatttgtgaatcgatgactagatcaatctattcaaaacgtcgggaaacattattaagaagggaaatttcactttttgcctttaataatataccccatatcaaattttataccccttac

SEQ ID NO: 161643 - DNA, 5035 bp, Cannabis sativa
acctatatgaccccaaacgtaaacttcaagccactgaaaattaattcagagataggaagcttcctcgaagcatcacacttatcaatttttataagtaaaaaataccactaaagctgttatatatatataactctggaattccatttacccaatttatacccaccattttacattttcacttctgtttttttgttctttggagtactgggtcgtgggggttcatctcattttaattaatggtgtagtttttgtgttaatatgtatgtgtaaataaattgatatgatatgaatgtgtgtgtagtgtgcattattattagttataataagttttggaaaattaattgtttgataaaagaaatggccatttttgaagtggttttggagggagtgaaggtgtttgtttcaacgctatgggagctgcaagaaatgcgatttgccgccattttggacgacgtcgtttcaatggccattaccattgtagtggcttcagtttcttgcttcttggctactaccacaacaacataacacaatatattataattttttttagttataaatttatggattttttttttcatagcttcaatctcacaatttcgtaagtagtttaatttttatttgtaaaactagaaattattgataaaaaacagtagtatttataaataattttggatattaatccgaaaacttttgatttattttcgattcaccgatacaactagggaaataaataaattacaagtaacataaataatattattcaactttagctttaaaaataaatatataaaatgataatttgagtgataatatcatcaaccaaaactagtagcactgaagaagaaaaaaaacacctcttattaagtttttatatgcaatacagtacaatggtatttcaggtatcaatatttacatgtatgattcctaatggtttatctttttcaacccttaaactgagagtagatgaagagtttgtaaaagggtgctttatagttagatcatagtccccatgagagagtgtaacatctatgaatccttgactatctgttatggtgtcttgatcagccccagagttccactctttaagcaacttatcaaccacatcaccagatggagtgttcttgaaattttgatcagcaagaattggggtgttaaaaccagcagagactggacctgtaaacatgattatgccttgtacagcaggatgagcatagccctctcttagtacctcttccaagtatttagcctgtaataaaagaaagaaacaaagtttaattaagtctcaactcaattaattcaattgattaaatctctaatgcaaatcccagatagagaattgattgattcttacttcattggggctgttagccactgatatttctgtaagccaaatgggaaactttgttgcacctaaaatgtccaaagcagatctcatatatgcaaggtttggttgatcagcagtgaaatgaccttctaatcctattcccaatttcaaatgagcatttccaggataagacaaaatctccctaattttgttaaggtatttagctggggtaacagcagtgtcaccagaatactcaattgtattatactcattaaggaacatggttgtttgtggatcaagttgctgagctattttgtagtaatcagcagaagcagttttaccaagtttatcctcaaagaaattgaaatgcatattctcattcataacatcccacccaattacctttcctctgtacttagaaactacagaattgattcttttagcagccgactttcgcaactcgtctggagaaagagaacgaacccaataaggctggtagataggatcatcccaaaatatgttgtgacctctaatagaaatgccatgcttttgggcaaattccaccatggcatctgcagtggagtagttttcttggccttgtacattctcagtactataccatttcatctcatttgtgaaagtggtagcatgaaatcttgatgagaaccaattttggtactgagtacttgttagtatattgtggttcatacaacatccaaataaaaatcctggttttttctgcttaatagacactacagcaccttgcaatagagttctattctcatcacttacttgaatccttaccttacttcttctaacctgccaattttttcaatcatagattggtgttcatattggtcttttttattgagattatgttattgggatttcaatatttaccttgttaatgcttttttcttgttgggatctccattgcttctgggtgaatggttgaagtgaaacactgtcaacccaaatttctactgatgtattcttggtctacatgggaaaatccaagttaattcaaagaaaaataaagtcaattttcttttgaacttttaataagtttgacttgataatgacctcaactaattacctcaaaagaaatatcaagagggccagagaaatttgccaccataccaccttttagcagagtccaacatccactattagctgtggttgtgccaccatgtataagatatcccttattggatttaaagacaactgttacatcctcacttccttcactgacttgaatccaagctgataatgcaaacatacaacaagttactcaatcaaattcatagacagttataataaaactttgattctaaaaagatgattgttttcaatttgggtgtgattgatatatgatcattaaaataagaacaatttaatatatttacctgagaaagaatagatttttccattctcaacttgaacttggtgagagaaactatgtaatgggtgtgttgggttatgtgccacaatgaacttatttccttcctttgataatcgttgctctatttttcctttcccaaacatcacccacccttgactgttattatggttaaactctggattaactattacaccacctccatacagagctttttggggctctttcaaggactgcatttttatcaattatcaatttcttactaattaatataatatcttttattagattaatactaaccttctatttctaacttttttttaacagcattgtacattgtatggaaagaaaaattgtataaaaaaaatatttaattcaatgaaatttaatttttttttcccacttttattttccttacatttttttgttatcaaaattaactttcaaacatagcctaaaggtttacattgacaaaaataagtttgaatttttgtaaacacacatgacatagttactccatatatattttgagcatatggtggtattaagtaccttcttagtaatatatcttaaaaattatttttttaagttatatgaaacccgatacttaattacactaataacaatatgatactgaaaaatgtatagatactaatagtggtttttagcaattctctatatactttaggggaaggaagttgaaaaataaattaaaataagatgtcaaccgtatccctttatcttttaatcattaaaaatcgattgaattacttaccgttgtggttgcatagtaattgtatggtgaagcataaaggccatgccctgcaagaaaaaaatataatataaataaacctttcacagaattaccattatttatactcatttatatgtatatatatagtgtataaaaagaaagctttttacatatattgcaaatacaataagatagttaagagaaaataagtgacctgagaagacccataagaacaaaagtaataagccacaagtatcaatgaaagccttcatcactacacagagaaaaaaaggtgtttgggaagaaagaaaatgatataaagaagtgatgaaaaatggttgaatttatataggtacatacaaactacaaaatacacatatattgcatgtttgtacccattcttgaaattgagtaatatattcctcaaaaagtaaaaaaatatatataaatgtaaatggtaactgttttattaatacagtcagcactttcctttctcttttcattctctttgacaactattgatgtatcataatttgtggtcagtaaatctgtatccaaccactcataccttaacaggatcctcattacaatgtaattttgtataatatagagtggattatatagaatgtaggatctgtaataatcagtatacaatatccagtatccattacttttccatttattctgcctttaattaatatacctttttcatttataatgacactcatcacaccttagaaatttttcacttggaagctggctttatttataaggacattcataacttatttttagttgataatcataaattactcactagctggctaaatagtttaaatataaatttaattattatctatggaaatattcaataatatatatgtatatgtatggtgattatgcatagttttggagatatttttctttaagctcctctggttaaacttttacttttaattatagttaaaagtataggataagtagaaactttgatttatttttattgtagggataattattatataaaaattttaatgaaaaatatttttcaaagtgtttgaatatcattaaaaaaaattcaaaattatgtaaattattataattttaaaagagcttattaaaaattcttttgagaaaaactacaaatcctaattttttttctaaaaagattttcattttttagtcaaacactcctaaaatgactttttttaattctaaaagctaaataaaaatttataaaaactaagccaaacagtattagagttagttttacattactaatgtatgaaaataaaatatcatatataagatgaatgaactactcatctcattgtcaattggttttgagatggaatcctatgaaccttatcaaattctaacatgatatcagaactaaaaaagaaaaacatctgtctcccctttaatctccattatttgggacctttcgaccaatatgtgtcaatctcccatttaacctccatttgagattttttggccaatgtgccactttctagtgttgggatctttgaccgtattttgaaaaaaaaatgttttgttt

SEQ ID NO: 161644 - DNA, 2606 bp, Cannabis sativa
  modified_base (2528)..(2555): a, c, t, g, unknown or other
tgagaaaagtctatgacattatccacaaagaataaatgagtaagcttgaactcattatacttttcatggtatttaaactcatcatgctcaactattctattaagaatttgagttaaaaatactccatgccaaagacaaagaaaaggggagagggatccctagcctcaaacttcttttaaaattaaagaatccttgtacactaccattaatcataaaaaagactttagggatttagacacaggtcatagtgagatgaataaatagaatgggaaatttcaaagctattaacatctctttcaaaaaaaattattcaatagtattataagcctttctcaaatttattttgatcaagcattgtaggttcacatgtttccatttatagtgcttcaccatgtcttggcaaatgaaaatattgcggacaatttctaacctttaattaaatctccttagttttttgaaataaaatagtaaaattgtgttcaatcgtttatatatattttgattcctaccttgtaaatgacattataacaagagattagtttgaacttagttatattgtttgggcaagccactttagaaattagagtgatagttatagtatttgttttcttaagatcatgccactctctaagaaattcaaaacgactctccacatgctcaccaaccccactgattttgaatgaaaaactgctaaaaccattcggcccaaaaactttacttccaagaataaaaaagatagccttgcagaccttttcattagtgaaaggttgaaccaaaaagttggctttgatttgtattaagaggaccactttgcacaataagtttattcactgatgtcctatttgagatggttttccctaaaagatcagtatagtactcaaaggcttgagatacatcaaaagaagtgcttacctttgtcaccatctttgtctatgattgagtaaatcgtattttgacttctcctttctctgagacttttatgggagactgaagtgttctcactattcccatatatccaagcaaccttggctttttggctcaagattgtggtgtacattttatctgtttgttttagttccctcttgcctccatttcttctaccattaaattcaaatttttaagatcctactgaagctcagatcaataacaagagaatcagctgtctctttatctactacaacaatatctccaatggaagattttctaaactcctttagtgctgattttattctcttcaccttactaaccagctaatacattttggagccataaaccatgttgtttcaattttcagccaccactttatttaaaccttctagatctttctagaacttgaagaagtaaaatagtttgtgaccaataattttgtgaagatatatgtctagaacattgaggcagtgctcatacaacccttcaagaagtaattcatctctacattcagaaaagcatccaactaatacatgttctcaatacctctatcaagttttctcttcaaatgacccttggatatacccttcttgtttaggtcctctagatatctttgactgacatgtcctaacctcgattgacatagtcttgtactgatctcagaattttgactcacagtaggtgatgcatcaccagtcacagttttaccatctaggcagtagagttaattgtttaattgtccctctatgacaacctttgaacctcaagaaattctaagcatatcttcttcaatcttgattatacataaatttttatcattccaatggataatatatttttctttaaatctagcatatatctcacttgttgcacaattcttgtaacaccatcatgcatctgcataacaactgatcaaattttcttaacttcacaagctttgttgttcccaaataacacaatccatcacgttcatatgagaaagaactaaacagttctttattgggtgtcatgtggaaagaacatcctaaatctaagatccaggctccacctgaaacacagctagatgcaactaacacatcaactgattcatagccatctgctatatcagcctcaccattcttgcccttgtttttatctctttttaattttgccttaagtgcaaaataatcatctctaaagtgacattctttattacaataataatattttgttagatttttcaatttgaatctgtcagagttatctttgttattgctgtaagaatgattgtggcctttgtattcattctttgcgaattttccttttactatcaatagatcatcaccattgttttctgaacgataatcttttctttgaatctccttggaacacagcgtcgccttgagttctgtcatagtcaaagtatctttaccatacaagatagtatccaaaaaatgttcatacattttgagtagagaacttaggagaaagatatattggtcctcctcttcgattttcacacctagattatttaggtccagaataatcttgttataaccatcaagatattttgaaagttcttagattcatccattcaaagaatgtaacaccctaactacctnnnnnnnnnnnnnnnnnnnnnnnnnnnnctgtgcagctcgttgctaaagatcggaagagcgtcgtgtagggaaagagtg

SEQ ID NO: 161645 - DNA, 4424 bp, Cannabis sativa
agtggaaaaacagtaggaatcattgggttggggaggattggagaagccatagccaaaagggtagaaggatttaattgtcccataatataccactcaagatcagaaaaggcaggagtgaaatacaagtattacccaaatgtggtggagttggctgccaactgccaaatcctggtggtggcatgttcattaacgccggacaatcacaacattgtgaaccgccgagtgatcgatgctctagggcccaagggtgttgtcatcaacatcgggagaggcgctcacgtcgacgagggcgagctggtttgtgctctggttgagggccgattaggtggagcagggcttgatgtgtaccaaaatgagcctaatgttccaccacaacttttggagcttgataatgtgttgttgttgcatcatgttggaagtagcacctttgagactcgcatcagcatgactgaattggtcatcgccaacttagatgctcactttttttataacaaaccactcttaactccagttgtttagattagcacatgattgattatttatagctactagttatataatcttttaacaatgctcattaatgattgtatgatttgatattcaaaatattaaaattaaatattccgttttcagaagtaaaaaattgtaatgagatagtgtaattagcacttctcatttgattttatcttattacatttacaatatcttttttgacttctgtacttgaaaatacatattagaatatttaattttaatatttttgcatcacaagttaacatattaagaattctattgtcaaatgaattattttaaatttttcaaaaattttacatatttaaattctaaactcaaatgagtattttttttttctagtgtttattatagattatccttgaaaagattctcagctaattattaatgcttctttgactcaaaaagttttattaatcctataataaatatacaaacaaaacaaaggaaaggaaagtaggaagcttttgtatcactatattgatcggatttcccccactcttatatgtaacaaaaattttgatttcactttttctttaattaattttgtaccactatattgatcggattgccttacacttttatatcttacaacaaatatcatatccacctgtgtatatgaatctaaataaatgatggtatgtacttctcgtatagccttcagctcaaataatttagcctttcttgtgtaaaaacgtttggaaaaacaatcaaaaagtcaaagaatgcatcaccagcactagcatggaacatcatgacagttactccctgtctgggatcttccttgcagcaccaatttaagtgagctagcccaccgttactggcgctttcacctgaaaatattgtagaagaaacacataaaatcaatgtaaaatcagataaatgccaccaactaagcctggcaaccaatcaccaccttcctctgaaatatttaatattgatctttacagagaaaaagcaactcatttgttttggtctaatttagaaaaccacttactgttttaactgatcccctcaaatccccaaggaagtcttcaacagctgatacatgttgaagggctatccaaacatgaatgcttgtttaagtctgcactcattactattgtctcatctacgcctcacaacaaaaatcttcggctgcactgaaatcctcggctgcagtataaccaccatctttcattaactcggtcaatccatctgatacaaggtaaatgtcaggttttgacgtgtccccaaccagaaagggagagaatccattgcccacatcaacccaagcacagccaggggatttcctcacacccaaatctctcatgaacaccctcacctctgctagctttttccaattcccggcagcagcatacatatttgcaattaacacatagtagcctgaattctcagtcctcattttcagtaggttctcggctgcccattcccctatttctacactcccatggattcgacaagctccaatcagagtggcccacatggcagcagttggcttgcagttgtgtggcatccttgtgatagtctcctttgcttgctttattagaccagccctcccatagagatcaaccatgcaagcatagtgctccagacggggacatatatcaaaaacactcgacatcttctcaaatagcattttaccttgcatcacaagacccgcatggctacatgctgataaaatagcaaccatggttacatcatctggtttgatcccatgtctggtcatctcatcaaatatcttcaaagcagcttggccctctccctgcatcccataaccggacatcatagtagtaaaggttactttgtctctcttggtcaaagaatcaaatacttttttagccttgaaaatcttgcccgaccttgcatacatgtccacaattgcattccacaacaacaaataattcccaaattctttccgctttataatgtaacaatggaactcctttccatgttggagatttgctactcgggcacagagaggtaggatgctggcaattgtgacataatttggttcaaatcccgacagcatcatttctctaaataagaatgaggcttcctcaactctatccatatgagcaaaaccagaaatcatagaattccaagtaattatatttttatcttctatcaattgaaacatagtatatgcatgcctaaggtcttcacacctggaatacatagtaattagtgcattttttaaattttcaaacccataaataccactgcgaactgcaaaaccatggatttccttccccaacttaacggcacccatgtgggaacaagcattcaagccaataatcatccccactgagtccaaaagattaccactgactctcatttgagaaagcaatttaagtgctcccacgaaatttcctgtacgcacacaccctccagcaatggtgttccaagtgatgacatttacttcattactctcgatccacatgctttcaaacaattcaaatgcttcattccacattcccctagaggcatagacagagatcattgcattccaagatactgcatccctcttgggcattttatcgaacaagtggcgagcaatgtctataagcccaaacttcccatacatggcgactaatgcattgtgcacaaacaagctccactccaaagagcaatgctcaatggacatgtgtgcctctcttccaaaagctacgtccatcttttcgccacaagcctttagcacagccgggtaagtgaaattatctggtctaatccctctatttaccatttgtttgaaggcagatagagcctcaccaaatagcccatttttaacgtatgaaaatatgagcagattccaaggcaaaggatgcaatatcttagaattctcagtaaaaacatgagcatcaacaagaaggttaaagcttgtgtaaaaagagaccagctttggaaccaagctaggatattgttcaaatcccaacacaataatgtgagcatgaagttgtttaccttcagaaagtgatttaagattggtgcaggatgtaataagagacgaaatgggtcgtaataataaaatgttgttggaacaactagtagaagaagagacatgattttggacagtagagaaagctttaaatgcttttgataaatggccctcgcttgtgaagttcttaatggcaataagaagagaatctatcatagaaacatcactatttgaaatcgtccctttccactttctaggaataaatttttgaatgtgagatacagagaggctccgaaggttgaaacgaaatgaagaagattgcatatactgtatatgccaaatcgaaacaccataaattagattttatttggagagaaatttctcaatgccaccaaacacttcatttacaccaagatatgaaattatccgaaaaactaaaaacttaaacacagtactgaaataaaatagatgtagaacaaatacaatgcaaatgagatcgattcacatgaaagaaacagcaagttttttattgaaccaaaaaatcagaaaatcatgaaaatttcttacgtttcaaatctacacatccaacaaatttcgtatgattcattactaacagatattcatactgtaacgtttcaaatggtaacaatttctaaatcttagcactaaacattatgaagacaaacctaactatcattaaagaattgaatagtagctaaatcaaatccctacaggttgtcacaaaaacagattgaagcacttgacaaaactcaaacaaccaaacatagtttccatcgcttttttgtattcaataacagcctcaaaaccctaagtaaattacctgttgtgagcgaaacaagtgaaacggaattcctcctctccaatctccgatctaaggttgacgatagttctagggtaccgctgattgagtttagtgacaaaaccgaagaaagca

SEQ ID NO: 161646 - DNA, 2610 bp, Cannabis sativa
  modified_base (2535)..(2540): a, c, t, g, unknown or other
atgagcatgaaaaaacttagtgtttggatccccactttgtagcctatccacacgtgatcgctactgccaatacatctcctcttgtgcaagaaggtcatcaagaattctttttgagcattttagttcatttattactgttgctgtctggttagtctcattgttcagcaatgttacattcttctgtaccttggaaatttcctttttgaagttgccaaacttggatctatgccactgttgtaaagaggatgcacatgagtctaaattactcaaataaccttcaattgcacttcgggtttgatcattctttcaattattttgaatgacatcagctgcttcctcatgttgtagccatagctttataaatcgaaatcttctctgagttattgtttgctggttttggtcaccatgaggccgaacgtccctcgatattgctctatgattcgagttgtagtagtccaagtgatgtccagtgattgattggaaagtagaatcccaatgatcattaacaaaacaccaatctagtctttctttaagagcatctgttgtatgttttcctttaatccaagtgaaatgatttccatcatagctttgttcatttaaatggcagcaatcaaggacttgtctgaatttttccatctgcctttcacttcgtaaggttccacttgacttatcttggtttgataatatttcattaaaatcaccaaaaacaagccatggggaaagaggttccacatccttgagtctctctgcaagtgaccatgtatgcacacggttttgagttgagggtgcaccataaaaggcagtgaagtgtcatttgaatccatttgtaagagaaatataacaatcaaatatgtttgtattaaaattcaaaagagttacatctacatcatccttccatagcaacatcaaaccacctcccaaacctactctgggacttcaagtccatgactgaaatgtaaagcttgacgaaaatgagaaagtacattagagcctaacttagtttccattaaaaacagaacatgtggggattgctcttttacaagcaaacggagatgacgaaatgcgcttagattccccaaaccacatgcattccaactaacgattttcatggctgagggcggggctggaaaccagccaccgctgtattgttgaaagagccagaagaatccattggtgctgcagaaacttcatgacttggtccttcttcaactgtcaaggttggagtgaacccatatgtttgaataccccgacatcgtttaagtgtgtctctaagtgaactcccatctatttgtcttttataattgcgatttggggagttttttttcttttccgtgatgtccacattttattgatgtatccactgcagatgagtctttggcagtaagaattgccattgttaaatttgctgatggttgaagcattactgatgatggttgtggaggataggttgctatgatattggtccttgtgtttaaacctataatcagcatgtagactgtacaaaaatcagtaaagttgtcttgattctagtttgagagtggggcagctttagcatttggatggctagtaagcattggttgcttcaacacaatttttggtgttggtagtttcttcaacacttggggattataggatacaggtgtaacaagatcacttgatatgtcaatagtagtgtgtgtatgaggcttgtcattaggatctcgattgtggttggggtctacatttgaagattgctgaactaccatctagtttatgtaaaaactagcagttacttggtgttgctgaaagtccatcttgtttgaggaaaaaccagcagtggcttgttgttgttgcatattcatctggtttgagtatgatccagtgacttgttgttcctgtgaagattcaccatggaatagttgtcgtggatatggctgtgatcttttattcaagtttggaacaacaaaaataagagaagtgcgagccatcgagtaattcgttgccaagcgtgtccttttgaaaaattagctcggtatcgatcatagtttgaagttggcaacgcagatcctttcattgttggcctatactcgagatctagttcctctccattgtcaagcttttcaaaaaataccaaacatttattaaaaggatgtcctaaccgtccacattccatacaatatttcgacaatctttcatagcggaattctacccaaaacttatcacgaacttgttaaagagtgatcattcggcctctaagcaaacgcttggtgacatcaattttgacacgaatgcgaagaaaagggccccatccttcattgagagagtcatcaaaaacttctataaactcacctattatattcccaagagcctcagccagttgttttgttttactcataaaaggcaacatgtatacttggacccaaaaggtagagaaaataagtttctttggtgtgacgttctcacaaactgaaggcatgtacaacactgtgatgattttggaagtgaaatggttcacgatgtagaacacgttgcttatctgttggaatatattttacnnnnnnctagatttactaccatgtatgtaacaccctaactgacttaggcgtattacgtgatttttaacgtactgtg

SEQ ID NO: 161647 - DNA, 1297 bp, Cannabis sativa
aaaataatttccaacagaaacatgagggttgtcctcatgaggaagccaaggatcacacataatagaaacaatctcacccgatccaataagcaaccggtctcctttagtaatcaagtattttgcttcaagtatacttctccaaaaaaagcttgatttgttgcccaattcagtagtgatgaattaaccacgagaataatattgagccttgaaaagcttgctaagaagagagtatgtgcgagtgtgcaatctccaagcttatttgccaagaagagcgatattaaactcgtgcaaatgtcgaaacctcataccaccttgatccttagaaatacacataagatcccagttcatccaatggataccgagccttgcctatatttggttctccaccagaattaacacattagtttctccaagtcttcacatatacctttgggaatcaagaaaacactcatagcataattaggaagagattgagtagaagacttcaacagaacttctttactagcaggagataaaaatttgttgtcccaactttcaattcttttcttcattttatctgttagaaatcccaacacaatatttttattatgcttcatgatatttggtaatcccagataaaaaccttcatcaccagcttccaccattctgagaatagagcacacacgtcccttaacatccaaaggaggatttttctgaacaaaatagaatattttttacgattaactttttgaccaaaagcatgttcaaaactagccaatagggttatgattctttcagcctcagtctcaagagcctgacagtacagacagctgtcatcagcaaagaacacatgtgacacagaaggagccccacgagccacttgacaccctttaagccaaccacaactttcgtacctacggataagagaagaaagactttttgcatagagaatgaaaagatatggagatagaggatcaccctgaggaataccccgtgatggagttatgggtcccaacagttgaccacctgaagtgatccaataccgcacagagcaaagaagagccataataagctgaacccatctagcatgaaaccccatttttaaaagcaacatctccagaaatgaccacacaacacggtcgtaagctttgctcatatcaagtttcaaagccatttgaccaacctttcccctgtttttccttttgagataatgcataatctcaaaagacaccaagatattgttggaaaatattttaccaggatcttagtgttgggttttatgcccaaaataaaactccatttcaatgtaatctatttt

SEQ ID NO: 161648 - DNA, 4123 bp, Cannabis sativa
tagggagccaaacattgcttagttacttctaactagatataagataaacaacccaactaaaatgattatttctaatatacaacgaaacaaattagcattggcatacaaatatctcagtataatttgttattgctggacaaacaattacaacagaatagtcaaattgatggacaagcaaaagtggttgagggcagcgcccaattctctctagttgaaacttggttattcaaaaacaaacttcagttggttcggcttcttaaaagtcgaattggttcagttcggcttcttaaaagttggaactcattggaaactcgcttcaaaatgatttgagtttcgtaagtccagcaatgactactaaaagttcagccaaacaaccccgaagggcgccaagaaatgtttgagggtactaacaccaccaaattatgatgaatatgcaataattacagtctattatagtagtaaacatataacactatcacttccctctaaataaaaaagccttgtgagcatgagaaaacaacattaaacactcttcacacattttcttcattcagccttaattcctctcttgcccgtgatatacatttttactcaatattggcttgacttttgggaaacgtcatgcacggtttgaagtgaacaaatcaaaacgtcacgaccgagggaaaaaaaccaaggaccctattggttttaaaagaataacttttaacaagtctagcaaacgttctcatttcaaaggattatccaatttatctgactcattaaataaagaagcacatcataagattacaggcatggctctaaataacaagattagcagttgtgcaacaccttcaactcattgtactattggcgggaaggaaataaaaagggttgatttagaccataatatgagtaactacctcaggcacagcgtatcacttgaagcatcaagataaacatgccaaaaaagggaagagtaactactaacagtgtgtatcacaaggaatcagagaaagcatttaggtgactcaaattgggatgcaataaacaaaaaaaaaaggtaaaaacaaaaaaactagaattttagcaacattttaattatataaaaatggcacaaaatccccattaatcctctctaagatgcaggagccttctcttctgcggctgcttcaaaagtctgcccaggaactagctctggaacatcatcatcgtcatcttcttgtgctgttgcatcgccagcaccagcggcaccaggtgcctgcttctggaactgttctgctagtttcttcaggttatccaagttatctggtcctgaaaaaaattataagtaaaattttagtcagcataatcattaaaaaataccaaattgcattgaaggttgtaagtagttagcaagagtgtacccaattggttgaggatgctaggaagaatatcctgcaattctgaaacagaaaaattaagatgttagatcagagtaaaacaaagagaaacatatcactagttggaaacacaaaagacgcttcctttaatttaaaataatattagctaactcgcaaaaataactcatgatccaaaaaaacatgaaatatttaaaggacaagagccatactctttgtctgaggagatccactaacaacccaagtgttggcagcaatagatgcttgaactgaaacattaagaaaaatgttaatccccaccaaagagaattaaaatgtagatataaaatgcacatctgagagaaatagagttaactgcacctttggggttaatgaactgaatgacaacatcatccttaaagatgttgacttcttcaattgcgggaatagcgttcacccctattctcttcagagtgctctgaagccttttgtcatctgtggtagtagtcttgtgtacggccttcttctttctatgaaagaagaaaactttaaataaactcgccttatttgagaaaaaaaatataaatcttctacctttttacatctcaaagataatacttgcagaaacctaacactattccgttaatctaacacaccaaaccattgcattaataaaatgtgcattttgatttaagcgtacaattaatattagtaaacaagagaagtaataataaataaaataataatagtaataatagtgaacaaattaaacaaatgtctctgtcagaaacctcagaacctgtcctaacctgttaaattctcctatcaataatacatgtcaaatcattctgcaattttattaacaaattaaaatctggctttattaacttagcaaagagataactaaatggatattgatagtccatagtttaaaagcaaaaagaaatataccttctcacgctacctttcccaccggtgcgaacggcaccagccatcttcttaagcttatccacattcatctgtatagcagaaaaggataaggtaaatattatatgactccttaagataaagaatattgcacagtaagttaattcaaaagaaaataccaagcaaataaacttctaacaagttcaagaaaaaatccatatgaaaaggctcaaatgcagcaattaatagggcataaaccccccaaaaaaaaagaagataatcataacattacaagcctactactaacatttaagccaagttattatattctttaacatccttccaaggcataatcattatttcagtatttcaacgagacaacaatgacattacaagtccacttaagttggtaatatttaacttccatccatcctgagaataatctttataaattctatacgattggaataaggcctgtaatggttccacaatttcatgaatacttctttaaacttgcatttccaaagacaaagatgacaagaatcaaatcttacccaaatactggtagatgaatctattcagtgtacaattactttgtaaataaataaaataaaaatgaagatgtctctaattgcacttaatcatctcacttgtaaagcgacaaaaaagcttctctggactatataaactgataaacacatagttacatacaaagacatcaaaccccaataaatttctccatttctaagccgcagtaaacaaaatcttgacagaatcaaatgatataaacctcaatattaaaacaaaagcgtcgaaacgaaaaccctgacccaatccaaatattctttatccaaataaatcagagaccggaaaccctaacaaacttatcaagaacaagaaacgaagcaaatgccattaaaatcgaagatcagagaacgggatagagaagaagaaactttagggtttttaccttggctagggtttaggtagaggaacgaggctgataagattagagagagtgagaagagcactcagacagacggcgctaaagaaacccattcggtcctattaaaggagcggctaagacgataacgtaagtgggtgatgatccgacggtcacaatttcatttcgtttctctcactgatagggtttgtattttattttgtaattttctaaggttcttgatagctagtatgtaccctcattctccaccgtcggatctcatttctaatcaaaaattgacatgatgtatgcataaaattaaaaaggatatgtttactcctcagcaagagcatgtcgtctctcatttgcaataatttctctaaaataaaaaataaaaaaaaaattaaagaattgtaattaaaaatatactacaacagagttttttaaatttcttatttatttattttaaagttttttttaaaaatattatttataatttatatttagaaaatactattcacgattctaaacatattttattaattatttgagttttaataattattattgtatataaatttatatatatactagataatgtttagtgaatgtttattaaggctactatatataataaaatactaacatcattttgtaattattatattatttaggtcacaaactattagagaatttcagttggaaaaactaaagaattatttcattgaattaaattaattaaatagtataaagagatgagtgtttatatatagtacaaagcacttgagctagacctaactaacctataacagaaaataactaacataacagaataagctaacttaatagcaggggtattcattggaccacatccaatgtttttaggcctatccag

SEQ ID NO: 161649 - DNA, 1105 bp, Cannabis sativa
agcatgtttccatgctcttttaatatttatgacagtagatacaataccaaaatgcgttagcttttggttgataggaaaaggagaaaatggaatcatttttaactttagtagcatctattatcaaactagtgccacaaaaggttttttttttggatagatttagtcacaccaaacacagtatttacccaattaccaaaacccagtcactatatataaatcttaatatatgtccacttgctttttagttatatcttatgtatatgcccactttcttttttagctgaattttgtgcttatgttggcttaccttcaataaaaatattagaagggtggtgcatcaaagatctagagtactaatcttatttcaatcttcataccaaaactatggcattttctagggaaaaaaaatcttttaagaaaagaatataaacaagaaagatttggtgtttttatattgtgtttaacgcataattattgagcctgatctttagctatcctctaactttgaatattgtttcacagttctttaccacaagccctcttgcttgtgatccttcaactttacccaaatatcctcccagcaaggagattgatgctaaatttctagaggaagaagttagaaggtacatgttggaacattctttttttggtttgaagaattgaggttatttttaaggatctatggtcttctataaaatatagattcttgcatttttaatgcacctattgctaatattttatgaaagattaatggttatgtatcagttcccttttacactcctatttacattagacagaagcatttgtgtattttctagttaattatttatataacttgtacagacaaggagcaaggggccacaagattgatcttgaaagaagaggacaaagggaagctcaagcaattcatgcagcaaatgcttatgctggggtaatcatgtcatcttttagtttcaagttacattgtcctgttataaactaaagagagacaaatggaatgaatagaaaagaagattgaacttagattttaaacaaaaaagtttgatgtttgaaatcaggatattacttgaactgtattttggaactattgaaatctcattggcat

SEQ ID NO: 161650 - DNA, 2985 bp, Cannabis sativa
gggcataaaacccaacacatagaattcaggtagtgtttcagaatcaatcgtcatttaatcatcaaacctagtttgtaacatgataattctagatcttttaacatctgcaattccttcaaactgggtttgaaggatagtccatgcatctttagccgctttattgttataacaccatccttattttcctctgagggaggagaccatctagacaaaattactttccatacattttcacactgtgctttaatgaaggctctcagcctcactttttagtacggataatttgagtcattgagtagcgaatgatgagatattgaacttccttagaaagacatttcacagaagaaacaaattaaatataagatctcactaagagttagtgaaccgctctgataccaattgaaattctatttttataattactaaataaaattatcaaacaatttaaataatgcagaactataataaaattatttgaacagaatttaactctgttttatcagacacagaatttgacagaacagaattatactgcaaaaagtaaaatagcagaaaaaaatgacacacaacattctatatgtggtaccagcaaccctttcgaattgctcctagtttacggggccacgcccagagaataaaaattattagatgaatctcaagtgattacaaaacaaaattgacttatacaaataaagactctatctttgaatttgtcgcaattgttgtaatttactcttctaatcaattttctgaagtgttgagacattgaactcccttcaaatcgtagcacttgcacacttcatcccgaagagtgactcacttgcaatcttcctcccgaagagtgtttaacatgcaatcttcctcctaaagagtgactcacttgtaatcttcttcctgaagagtgactaacttgcaatctttctcccgaagagtgactaacttgcactttttctcctgaaaaatgactcacaaacaagacttcttccgaagcttgatgaatatccaaggtgttcaacctgcacaatttcaacaagaaacaatacataataacacaataataaaatactaagaacttgttggactcaagttcttcacacaataaaaaaattctctaaatttgaaagcaatttaggaaattatacaccaagagagcaaaataccagcaacctaagggtgtattacactttagaatccctctaggtcgtggtcaaacaaccaagaaacaaccagatcaagaaatgaaaaatcttcccaaataggaaagtcaaaacctatttgaacagacaacgagtctgttcaaatgggtacattgaacctggacagatttttaacaaagtttccataaataaataagaaaactttgacaacctttacacacacaactatatatggtttcttggttaagaaatcaggtaaaaaataaataaatataattaagaatttctttaaaaatacaaaaataatatcaaataatctaaataaggaaaattcatatttatttacaaataaagtcaaaaaagaatagaatctaattttgaaagccttttcacaccaaaaaagaaaactatattttcgaaataatgaatacacaaataaaatcaatttcaaaaatactacaaatattatttttatctattttattaaatatgccaataaaaaattatatatttatttatatattaaactttcatgtatcaatttgtatgattattaactaaaaatatataaagtcgccaataaataaaatttgattaattaaatagtttatcataaactaacaagaaacaaaattcttaatatcaatgtgacaagctatcttattcttgtaaagaattacctttctactttttatttattttttatgaaaataaattacaattcactatatattattgcgtcattccagttcaacaaattttgacccgcatctactttttataaccttaatctgtaataatttgtatcgaactcctgttatgttgtcgtattgtgaactaaattgtcacctctaatatatacttttgttgaaagagttatttgatcattgacgccacaaactcccatttaagtgtgttacatgatattatatttgtatatattgacatatattatatatgacagtttttatatagtgttatatttggtattattttgtacgtatatatgaatgtatggtaccaaatgtaatgtaatagggttaccattcattcataaaaacgaataaataaatatgtacaaatttatttcactgaatagctttttgtagtgcaatttactcttggaaaatactagccaattagacaaagaactagctagtgtagtaagaacgaacaaaatattacattatttacacaatattgcaaacatataaacttttctcatactttcttaatcaataaaatgtactgcttttcaccgtggttcagctgcgcggatggttttcgtggcttgtggaggtccacatcaaaatttatatcactttctgctgttttggcttgcatgattttttttcattcacctacatatcactacaggaaacgagcttattaatgacaacgtttgttgtcgctaatagttgtattgtattcgccaaaaagcttcaccaaaataattttacttattgcctgttgttgttgctctctctctctctaaacagcgaggtaaagttttattagtaacaacttctcactgttatttctattcatgatgtttagcaaccacattggcctcgcgcgctaattttttttcccactattaacgcaaggccaatgtggttgctaaacgtcatgaatagaaataatagtaagaagttgttactaatgaaactctacctggctcacgtaaattaaataaggaaaatttgcgttaaaagtccccaaaaagttcagtttgatacagataaatccctaacctccaaaaatagcggcaatagtcctcaaggtcatgttttttatttgtccatgggtctctaagttaacaaatccg

SEQ ID NO: 161651 - DNA, 1973 bp, Cannabis sativa
atcaaactcatacagattatatattattctgtgaagataattttttttctatctaatgtaacattgatccccctactcatatcataggctattgccattggcatctaataaaacagttctccctacatgcattgccaaataataataatcatgactcaaaatccataattggtcatttcaatatgcataaaaaaatatgaagaataaagtccaaaacagagtcttactcacctcattcattcatgtgcttctaacgaaaaccatcgatagtgggagaaaaagggcacttttttttttaatcagaaaagaaataatattatatatgtatataaatatctatatgtacatatttgtacatacaaaaaggaaaaagtaaataaagaagaagaagaagaagaatttgtatatgtaagagaaagaaaagaaagaaaaagaaacaatattttatatacgtgtcattgtgaaaaggcagaagtgggaatcagtagtagccaccttccgttttcctcttcccacagcacacttaatggtcctcctcgtattttaggagtaactcaacttaatgtattattattgtatgtagtacatgtttctgtccaagttcaatatctactcaaactgcttccttgttcatcactttggttcataatctaatttaattaaccgttaacctaaatttttgggtattctaagattcataacatttaactttttctttttaacttaatgaaaaagtctcgacaaaaaaaagaataggagattgttttttattattattaatagctgggaaatattaagtgtggggactttgatgatccacgtgttgaatgaaaaagtcaagggtggggagtgtttttttcagaggtgtggaccccacaaattttgaataaggacgtttttagggtcatattcaataatcagctcccgcctaagctgtattcttttcaaactggttgaccgactacaaagatttacatatttatttatttattttacaatattaataaaaatctaataataaatagaaactgctaatttggctataacattaagattcatatttttaatttaattattataatgttttgtatagatagaagttaaaacaacagtaattacctgcattaaggctatctttaattaaagatctattgtaataaatgattcaaaatataaatataaatgttatatttgatataatatttgttattataatcgagtgtataatataattttaagatgtaaattaggacaaaaagtaaaggagccagcaaaggagctgtatttgagagatgaagaaatttgtttttgtttttattattatttttttttttaaatattgttttttggtacaatatatatatataagcagtagagtctctatctatgaatactctatttaagaataatctctaatttgttataaagaatacaagtcttaatttgatcaaattataaataagaataacctttaataatttatttataagaataattacatcttattaataaatatagacatatattttataaatttatttacgtagaattaataattttattctaaattatagtatatgtataaatattatatttacttaaaaataattttattataatatagtattaatgattgtataatgttattgttgttatattgatattttttagtgttttattttttttttctagtgtaactctatttactgttacaaaggtatgatacccaaaaatctcattacaaaaaattaacaaagtccagtcaaatctggcttattcatcttcctaatggctatattgagaattctagtttgaaaatctctttcattcaactccacactagaatacacattataagattttctttcatagatacaagcttttttatttgggaaatttgaatttctatgcttacattaaggaataattttttccctaaacttaaaatggggaatattggtaaaatgggataa

SEQ ID NO: 161652 - DNA, 1850 bp, Cannabis sativa
atcataaagggagagtgaatagatgaatacaatccaattaagtgtttaaccatagtataaaactatgtcattcgaataaaataaaaaataaaaaataaccatgtcatgataaggttgttaaaaattaggtgtaaagcaaaactaccatgaaataacaatattcaattcaacatgagattatgtcctattattaatttattggtgagtaatcttctaagcttgggaatagggagtgaccttgaaaaagtcaaaaagggtcacccaaacccatctctctatccctttgacaaggactatttttagtcttgatacaaaggaaggagggtgaagttttctctttttttccccctatttttgttccaataggaaatgagatcaaaaattcaaatctaaaaacaaatactcaagtgaccactcaaatacttctctcaaaagtggagcatgtggcactcattatgctattcaattgtctttcttgtggttaagtgtgctttaattaaatatatatatatatttatatatataactatttaatcatcaagattatgtgatcttaatttacaagtaatgatggtattgtgggttgtacattacaacagcaacccgatcaagatgccttgtttggcatccaaagagggtatggtatgtatagtatagtatagtgtatagtagtgtcaaaagtgtaagactttctgtgtcatattaatttttcactcaattattatttaagggacccatttaatatttcttcaaaatctgcaggactcattaaccattgtatagaagcaaagattttaaaccatttctttgtcatattaagacctttttttttcctaatatataataggaagaataaaaaaagtgagaaaagaaagggaaagcaaacaaatgtacaagagttgtacatttctaataacaacaacaaacaaatacttgacattatcttcaacaccatatttctgtgctcagtaagttcagagattaattattgtatggttcatagatgaaaatactgtcaaatttcagactatctacactgcatgttgagaaaatttcctgtgcagactcaattattttcactttgacattaatttttcagtcaaaactgatgaaaaattaaataaaaaccttggactttttgctcttgtattattttcttttctcaatttagacctggtcaagtttttgggccacatgtaggctgagtagtagcagtagtaaccattttctctagggtaggttattatataaaagaattggttatatgtggtttattaaattgtaattgaaaaatgaaggataaccctcaaagtcacaatcactttggtgaagctttcttatttatttatttcttgagcagtgcaaagaagtgttgaagaaaacttgatttgagatatggtagggcacttgttggacatgtgattgaaatagggaacaatagttatatttatcatcactctagctacaatatatagatcaatgtgtggagatcatgaaaagctattttggattgaaatttaagatagggtccacatacccttaaggctcataaggccccctcctctactaatatatttatatatatatatataaatttatatgtatgtatgacttacattaacaactttctttggtttcttgtgaataagagaaacttaaagtgtttataaatacattataaaaataatgtttgttttatcatatcatcatagtcttgcataaatataggtgggttatcaatgagctaggggaggcataatccttatgttatgcaatgagaaattgagagatgtttagtttactataagattaatcaactgtatatttgacccaatttttttttttttttt

SEQ ID NO: 161653 - DNA, 4189 bp, Cannabis sativa
  modified_base (2266)..(2282): a, c, t, g, unknown or other
  modified_base (4121)..(4142): a, c, t, g, unknown or other
aaaaaaaaaaaaaacaaaaccatagtactagtatttaaagaaatcactacccattatttttggtataaatatacatgaataattagattacaagttaggttacttggtgccactttgttacacgtttgatagatcgctttcatatattatctttatatgtatatatttatataatatgattgtatgaagtcatcaaacgaatgtcaaattatataaacacaaaagctatccataatatattatagtgtcaatattgtcgacaattaaaatactccaaatccaaaaacttacgtcaatttaacgtgcttcgtattattgctcttgaaatgactaaagatactaaaatcatttaaatattcttatgtatatacggagaaattataatgaatgtagtcaaacaaagaatcgtaatttgctcttaaattttaaaatatatatttcctgaaataacaacaaaaaatctgtaaaatacaaaacccaccagattatgatgatgacccccaaaggcggccagtttccttatttcataatacaaatggttcaatcgttttatacaaaagccaaaagtgagtacgtactttgatcgcgaccagatgaggagacttaattattatataagtattatgacaattaattaagtaattaatattatccggaacctcctgtagtagacataatatctagtggtactgctgaagaagtagtactagagggcatttcgaacactttcccaaaagggttctcgttaatgtagttgcctggtggatcatactcgcagtagacaagaacgccgccattgtgacacttcatccgtgcgcagcccacacggaggctgctacgccacaccacctgcgtgtagtgtccacacatctcaccatagaggcactggttggtcatggggtcgtagaactggttctctctcgcccaagactcaacggcatcggtcgctgtccagtgatcctgcccaccccagaatatgttctccccgtagggaccaaaagagtgcatcatcttgcattcatccagctgcttcgtggcccagcgtcgagcatagcgtgccaagttcctgtcccacgtaagcggtggctcgttcaattgtcgtctgatcacgttgtgcgcttccacgaactggcgggagagcgggatgtggtggtggtggtggcggcggtggccgtggtgcttcttgtgcttcttgtgattatgatcatgattttgagtggtttcgttctcgtttatgccgaggaagttgtgggcccgcctcgggtggtgattgaattgttcagcggagatggttatgagaagttgggagaatatgacgatgagaatgggaataaaaataagaataaacggagtttgccaagctggtgacggcattggtggctgggtgcagttgcagcggcggtagtgacgagaggtattgtgggtggctttgtgtgattatgattggctgctctcatcatccgagagagcagcagcaaatggggttcggatttcgtttggaattagaccctaaaattaatggtctatttggttattaattaggacatagctaaaataaggccagttgcctatgcatggttctattatcaacccttctttctcggacaattcatgaccaaatattttatatactatattttgccatttagaaagtgctggacagatgtacattaatttgttaattattattagaattaaagtaagtaattaacatagagtatgagttctaattttcgttatgttagtcattcgatgcaatcaaatcaatagttttgtatcttattatgtggttgtgaataaaaatagctaataacggtcaatggtcaatttttcacttgtgtagatacgtgtatgtatgtaattttttatggagaaatgtgaaaaggcagcctcgcattttatagctattggttcaattaagtatcgggttccatgtagtttaatgtaataatatttaggggtatcgctagccaatgacaaggcgatatgtttaaaggtgctaggtactactaatgcctactaataatgcttttttttatgtaccaaacgtttttttgaagggaaactactccaaagcaacttaaataatattatatgtgagttgagggcatatattccgattcatgagcaatcgttatctaatcccaattatttaagttgctttggagtagtttttctttaaaaaaaatgtatactcaagtttgttcccgtaaaatttagtttttacaaattaaatttttaatatttaaatgaattttttaataannnnnnnnnnnnnnnnnaaatcgcttaattagttttaaaaattttaatttattttttaatttttttatcattcaacataattttttcttaagatctaaattcatttttaaagatttactaaaaaaaaagtgttaaatctttctcaggtttattttcaggcagtacgatttgatagttctcaaagtttagtagcatagttggtaatttacaaagacatgtcatcatttaaataggaataatgggacagaaccaaacagaagattcttagcaagttgtatattttaaggggcaaaatcaatattgctaaaagtttaagggtaaaatttattaattattcttaaattaattatgtataaataaggaattatattattatatagtcaattatgtaaaattatttgagatttatcgcatttaagacttcatttatatgtgttaagggtatgttagtaattttagtgtgagaagggaaaaatcgtaatttttttatatattatgctaatagattatattataatatagtatgttcattttttcttattgcatgttatttttgataagttagcccggtatagttataatcgagtatttttgctcgagttgtgttcagagtccaaaatttatgaactttgttgttatggcaataatctgaaatatacataataacataaatataagcttgtgatgtgaaatgttagaaatgcccttacttgtttagtatgtagaattttagtctcaagggtaaaatggtcattttaccacttttgactaatcaagtaaaacgcattttgactaagtatagaattgaaaaatcaaaatctggctttgaagaaagcttcaccgatccctctctctctctcattaaccctcattttgtagttctttgcttctcttcagattattggaaagaaaactagtcttcgagattaaaaattatgtggaattattgaagcaagtttgaggagcacttaaggtagctttagttttatttttttaatgttttgctttcaaaatctgattactatgattttatgtgtgtgttattattttacaatttgaaagttgagttaggtgttttcatggatgagatttggaattctttgttggtaaaaagtaattgagcatgaatttgagttttgatcaattttatttgatatattttgttgtggtttaagtgaacttgagcatgaagtgagctaagctgcttaaatcttaatgatatgagttttgttgattttgaatagtatattttgttgagggaattttggtgttagttttgatgggtgaaaattttaggacattagtattattgagatatgttggttataccctatgttgagcttaaaaatgtgatgcgtgaattatatgagatttgaggaattaggtaatttttgaagtgctaaatgaattggtatttttaggtttttaggccgagctgccacgaacagatgtttggttaccacaacgaggcttgaacccaaaaataagggaaagaccctttcccaatctcggtgtggtgagcatatggtcttttcgttgcaaccctgcagcgataattcattttagcctcatgtttcggacataacctttgactctgaactttgttttggatgtttaatattttattggaaagctcattttgagctctattacttggttcaatgttggagtcataaatgtgattttttatgaaatgggattttgagattaaccctattgtgtgaaactcgagaattgtgactatggataccaacactaggttaaaatcacttatggattgcaatttctcctcagacattagaaataaagtaagacagtgaactatgtatatagagttgttgggttttgtgccctannnnnnnnnnnnnnnnnnnnnntcagatttacttattaataaagataagaaataacattttatgttgca

SEQ ID NO: 161654 - DNA, 3332 bp, Cannabis sativa
tttttttttttttttggtgggggagccaaagtggtagcatataaagtgctcctagaatccatacataggtatgatctgtaagatctcatacaaaattatatattttttttgaaactaattaacactaggttgtctcttttccagataaaaccatagatgataaaatttctaactcctatatcctattaaggcctcttctcctgaggctaaacagcaaagacaaaaggataaagttaatcatacagaagcaagtttaccaatcacgccctttccttgaatatcatcttcataatcatgatcatcatcctcactatcaatctgcttcaatgcagttgattcacgctgtgaagaagcactgccaactccagtaactgattgctgataaagaattcctcctataattgtaaagaggaggcagagcaaaccaaagggactggcatgcttatcccaaatcgtgacattgatggcaactgtaagaaacttgttaaccactcccgtaactgtgaatgctgtggcagagacagccttcctagcagcaaatccaaagaagctgatgagcaaaccaaagacacaagacaacgacactgcaataaaagcactggatttaaaccaattcccagtactggtttccacagctgcaaacacctcaacatactctccagtaataatccaaaacagaggagccatcatcaatgacaacagattgttgtacaacacgaaaccccaagtgttcagcccaagattggtaaccatgtgcttgatataaaccatttcagtagtgatggtcaccaggtaagcaaatgcccacgaataagcagtcaaagtaaaacctgaatcagtagcaacatacccaatagctccacccaaaatgaccaacaatgatacaaaagtaagcttggaagggcatggttgtttcctgaatgtggtgtcagcaattgcaaccaaaaggggtgtcaaggatctgaacactataaacgtatccacattggcatgtcgaagaaggtttgtgttggtgaagattgcaaggtagaaaacggtggcagctggtaagaacttcttggcagtctcccatgtaaagggatcatggtgcaaaaatcctagcttccccaaaacccaaactcccaaagcagaagttaggtactgcagagcagtcaaaaggccaggaaagttgaatttagtaatggcgaacttgtttatgactgcaagcaagctcgaacagagagcataccctatcacaagactgctagtggcgtagtattgctttgaggaatcgaatcgaatcgaagacattttccctaaatctaaattaattctcacctcaaaatctcacaacacaaatcaaatcaagagctttcagccattctagataggtgaaaatataaaagtagaaagaaaacttcgtcccaaaatctatgatatgggtatccaatatgatccgacagatttctgcaaacataaaaaggattagttacatatgtgcagaaatgctaccagcaactagtaattaatttctgcaaacataaaaaggattatcatgaaaaattaatttctttttaatagatacatttatggggaattgaaccctaaattactcattcactcacccaactacaacacttcagctagagctaaccaagtggccgactgctcctccatatagttctacaaaactgaaacactgaagtggattaaaattaatattaataccatctgaaaattcacacaaatgaactgaagtttcatgtaatctaacctacaagcaatacattataactcagggaaagtaaatcaaatggtggtgtcggtggtgtcatacataaacttatatgttttatgtttttgctataagtactcatatagtaaaatattgaaatctaactagaaatacaaaaaatcaaaatataaactacacaaacataaagaacggagattaaaaacttagatttcagacttgatgccaaaaaaagccctaattttaccaacaaaactaaaaataacttaacttgactaaattgaaactgaaactcataaatcaaattcaaaataattggaagaagactctaaggagatagaaacaatgagaagaaggaaaaaaaaaaagtgcttattgtttagacgagaataagagattgacctcatccttttcccagaacacatttcagtagcacaaatccgtgaataaaaaacgaaaaaagcacagaaagagcaaggaaaggaaatttgggtataatctgaactcggcggaactcggcgtcggcggcgacctcttgagtgaaatcgcaatattagagagagtgtgagagtagagagagaatggaaatcggaatatgaagattgaagatgcgatctacgacccaccagaattcggtgaataagtgatatatttggtgacatttctcatgttcgtgtgtgttatattaagggaaatttacaactacagtcgtcttttacctcttaattacaaaactaacttgcagaatcttaattacgtatattcaccgacagataaaggaggtcaaatctaagatataggtatccaaatatgatccgattccgacctactaaagaacacaaaatgcagcttaaaaatgaatatcttacaagaaattatacatcaccgacagataaaggagatcaaatcttacaagaaatggaacagtgaagagtcagatatcgaaatcagactgcgaaatgagaaacacccagcgaaagctttaatggaggtccttccgaaacgcagtagaagagagatggagacgaatcgctgaattgataattgaatgtaacatttatggcactgattttcgtagtacaaagtcctcgatttcttctgtctacagcaaaacatgttacaacattcaacaccaaacagttaacacggtgtcgtttagggttgtccaacgcctgaccattctattttattttattctgcttaaattttaaattattattattattttgagaaaagtaagattttcatatttatggggtagtatttttttttatcctttttctttctgtttttttattacaaatattttggtaatgttttctgagagataataataaaaatgggaatataaatggagagaatgaacaaaattcaatagattaataatttttttaacaatgaacttatattttattaaaaaataatataagagtaatatattatgaaaaaatataaaaaaaatttattatgggaaatttgattttctatacttatgaaacttaatttttcttttaaaccaatacattttacactacaaaaaatatgctaattttttgaaaaccccaaaaatacccccctcataactcaaaccatttctctc

SEQ ID NO: 161655 - DNA, 3549 bp, Cannabis sativa
ctctctctctctctctctcaactaaactccaaaataagtcggccttagcacatctgcctctgcactaaatgccaatgctctgctctccgtttgtagtttctctcacctcaaccagcaaaactaaaatggataaattataaaaaatatagaaaaatacaagcatcgaaaaatcatagataaaccattttaaaaagtatcacaatcgtattaaaactatcacaataataaaaaaacataaaacataaaaaaaaaaccccattgatgacctattgataaacacatcgagaagctattgagaaatcattcgaaataatctatcgaaaaactattgaaataacacctcagttaagtttttagcataggaaccccaaaccaaatcgaaaaataccataacagcctatatattaggcctcaagcaaacacacaaaaaaacaaaaaaaaacaaaaaaaaaaaaaacaaaaacaaaaatcgaatcaacaaaattaaacctttggctcggttgataagggtggggcttcgacgaagatgagactatcggtggggactcaggatttggcctttcaagctcgagatttggttgggtagggcttcgacgccgaacaacaagaggagtgggagttcgacagagatgggactatcaacgacgtagggtttcgacgacagactgggttcggtcttgccggtatcgatcttcttcttgtcgcatctcggatgggctcccaatatagttggttttttgttatgaagggataaaatggggaaactaacactatgtttgatagaggagaaaggaggagagagagataggggtgtagggagagggatagaggaattgaattcccttgtttggcaagtgggagaggggggaaggaagaggattgatgaagggagactctttccctttcaaatacacaatttctaatccttcaaaaaatgagggaatggaagaaaaagacaaaaaaaatatctaaaatgactattttacccttcaaactaatatatataattacattaaaaataataaaatagtaattttaatatttattttactctttatcctttcagctttacttttaataccaaacaacacgaatgaaagtaactatcatatccatcctttttactcctcattctttcgaaactctccatttatactacttgcattccttcttaccaaacatagcctaaagtaaaagtacaaataatttggtataaaatatttttgggatttaaaattaattatttgagtaaacatttaaagatggttattgaaatttcacttacaaaaatcctaaatgaggttatagcttgttgaatactaagtgtaatataaatgccataaattactcacacataaataatgtaaaacaaatacacaaacattatatatatataaaaaatagtaaataacgatataagtactcaaagttttgagtttgtaagagtcataaattcaataaaaaattttagcggcataagcatcaaatgttaataaaattataattttccttcactttcttcaatatagattctgttttgaatttattaataaaatatttgaaattaattggtacaacatgtttatgtctagactaaatagtctaaaatatgagcatagtatgtgccttgttttaaataaaaatagtgtctgtactaataaaattaaaaaaaattataatttttataaatattatgtacttatgcctctaaaaaaattattaaatttataccactatttatcttatatacgtaaagagtatgggctcttaattgggcatatgtcaatgtaaattaaaagaagaccgactgtatagtgtatacccatgtgaatgcacatcccgtgaaattgaaagtccaagatagtcatcatgcttcacttattagccaatttacatgacacgtgcaacatgtctcgtgattgagaataataaatacaaattggcttggttttgctttgctttgaatatcacaaattttatgaccattccaaattaaatattcggctaattagtatttttgctccgaattttgacatgtgctaaattacgtcttttaaacttttaaagtcgttaaaaatacaccctgaactattaagattgttggattaaaagatattttttttttcaaatttagtaaaaaagtctaacatagatgaaagttcaaggatcataatttaatacatgccaaagttcgggagacatgatttggtagatatcaaagtctggggagtatgatttagtacataaacaatcattgaaacaatataattgaatgaaattagagaaaagtccttaaatccaacaatttcaatagttcaagggcatttttaacgacattaaaagttcaggaggcatgattcggtacatgtcaaagttcaggggacaaaaatcctaattaacctcaatatttattgtatatactataacgttaattatgcctacattattggtacagactcggacgagagaataatttttgtgtatatgtaacaagaactcccttaaaaataacaaatacgtaaaaagaaaacacaaaatccttgatatatgataatatagatatggtgagatgaaaattaagttaatgtgatcttgtaatagctacaatagatattaatccatgcatgatataatgcttccaaagttccttactacaagaaatattacttgccggctctaatttgtatcggcagaagtctactaaattgggcctttgagttcatgttgttcataagatgatacatgaaatgcatgtaatgttttgtagttaaattaatgaaagaaataatgaaaatgaaaattctcttttgaagctcctcagagaaaagtattgatgtataataatacaactcacaagtcatcagactttctttcttttttcttgttaacattaacatggttaattttaagattatactttagtactcttgagagttggcataatttttttttttttgtgaataaaaatttaaatgatgaaacttcttcaaaaaaatttctttcaactttttgtttttccagtatgtaggataaaaataaaaactctaagtttttttgaaggaaataaaaactctaagttagttgaatattgaatttatttatttattttgaaatggacaatattagattctaggtaacgtaacaatgcattcattcctaaattcggataattatataatacactatttttttttttttatattttaatgtttaaagatttttttttttgtatttttacattctataaaaacaacaagaaaactacataacatgaaaactacataaagtaaatttacaaataaaaaaaaataacatcaaaacaaaaaaaaaaaagaacatgaaataataaaaaattaacaacaaattaataagagtaaaacataaaaatatatcaaaagcaggaccggcccaaacattttaggggccttgtgcaaaattttaaaattaggctctttgaaaaaaaaaattatgtacattttaaaactacaattctattactagttttttttttttttcttacgattggttcataaattttcaattataaat

SEQ ID NO: 161656 - DNA, 5259 bp, Cannabis sativa
  modified_base (5208)..(5209): a, c, t, g, unknown or other
gctaggttttgattttcctggtaagtaaaacacatcatttttagagatgttaatttttctattgtgtaaaggtaagagtaacccacggtaaactcaaaacctcactcaaaaaaattaaaaatgcataccaaacataagttagactttagtattctcattcgaaaactatgtaccatatcataccgcataaaaaatacgatttaaaattatttacactgcagttacagtttgtgttttcgccaaatcgtacgatgcggtacattttgcgattccgaatttaataatcacagttcaaactgtaccgcattatatgttacaaaactattaatttttaaggaacatctatataaattattcttattttttattttatttttgttcatttcttattgttaatctattgatatatatatatatatatatgtaatttgattattatatatgttatgacggtaaaagtttgataagatattttcttttattaattatttaagttttattagactatttttttattttaatattttatactgatgatagtgtaaatcgtctaaatcgtactgtactataccgtttttctgtagtgttgttttcacggttttatggtcttgcaatgcggttgcaatttgagaaattacaaaaatcacatatgtattttggtttaaaaaaatagtctaaaactgcaccacccgcgctgcgaacagcttctagtgacaattggcaactagatatttgggacaagttttctagaacgacacgagcatgacacgacaaaatatggcctggaactgacacaacacaaaaaattatgggtagggctgaggcaagccaaacgtgtgcctcgggcccccgaacactcaggccccaaaattataaaaaaaaaatattagtatattttaaactatttttagatatcgtattttaataaattgacaatttggttcttaaattttttaaaatactattttaaactttgtattttgtaaatgattataattaagacataaggtctaaacatttttacatatattctatttgatatatatatgtatatatattgaatggaagtacaagaattttattagatagccaaattcgcaattacaaaagacttaagagtagcaggaatagtattctcaataaaactacgatcagaccaataacacgagttacaagtcaaatagtgtgcggctttgttagcagatcgtttaacatgataaatattaacattattaaaagaaaataataaaagtttgcactcttgtacaatcaaaccaaaaatagaagacatatccacccaactatgcaaaacttgtatagcaataagataataataatgtttgaaaaattagagacttttatccaacacataaatacataataaataatacaacacataaatgtatgtatctagttgaatcatatgcaaaagtacgtacaacatgaaatttgcgaaaatatcggaatatacatatatgaagattataattatctaataatacttgttaatttcctaaaataattaatagtcattagtatttgaagaagaggcacgatttagcctttaaccactaatataacattaaattttcacatatttaaaaccaaaagcagcctctaaaatattaataataaaaatgcacccttgaaatatatatacacatgcacttatgttagatgtgcataaatcgatttaattcaatgataaccaactaatttaattataattgaccttcaaatattgaatactcaattgtgatcgaatcgaattgaatattatctttgaatatccaattgaatcgaatattagatggagtgtccaaaaatttaatacctaacatccaattaaactatttaatatagtaattaaattttatattgttatatataaaaaaatatatgtatatataaaaattaatattaaaattttacttttttttagattgaatgaatttaattcaattcaataaatactggatatatattaatattggatgaatctgattcaatacaataaatattaaatatatatatatacatgaaatacattaattaatggatagaaccaatccaattcaatatctattagatcgactggatgactaaaattaattagaacggaccgaattgtaaaatttaacatctaatatataattggatcggatccgaatatatcttaaaacattagatttggtcaaataaacacccctacctatacatacctatatatgttatgttatattagttacactattttgacttatgaaaagtcaacacacaaatcatatacatacataatacattaatttaagtatataatacaagacacaatatactagtacactatacaaccacgtttgtacaactaatatatcaattcaattatagtgaccaaaaacaattaatataataaatcaattctcatgatgcaaccctatatataggggactaattaaaactacaacatactcattaaatctcatcacttgctataactactcattcataacattattgttgttaattacataattagactactaagctaataatatgaatatgaatagaataatgtttagagtttatatgggcattgccataatttttatggggttaagtggggagtgttatggtgctttgaagaatggttattacagcctaaaatgcatgagcaccaccactaatagggaaagctcgggttcatggactagaacccgaactgtaacatcatcagttgatgtcgagcaaactgtcagaactgccatgaaacaagcttataatgatgacgctagtattgttgctgctcttcttcgtatgcagtttcacgactgttttgttaaggtaatcattaattaaataattaatcaatttacattatatgttgatctaattaattttactaattaatctaagagtctgtattatttgaaattagggttgtgatgcttcaattctaatagatagaaataaaaatggggcagcaacagagaaaagagcaggtgcaaatctaagtgtaagaggttatgaaattatagatgatataaagaacatttttgagactcaatgccctaatgttgtctcttgtgctgacatcatcaccatggctacaagagatgctgttttcttctctagtgtaagtaaatatataataatgcatgaattttgatgaattaatacttaattattaaataatttataacattggataaattatatttctattcggtttcgattggtataaatggtcttcgatttttaagttatttttcactttgacctatttttgataatttttttttttaaaaaaaataatagcgatcaacatcttagatatctggtcaaaaaaatttaatagatagtcgaaatttttagataactactcgaattttagatcttgatcaaattagaaggttattttgtaaaaagttattattagattattaattttaatattattattataaagataatattaattactttgaatatttattaaatatgcagagtggtgaaatagattatggtgtagaaaatggaagattagatggaaaagaatctaaggcatcaaatgttaatcttccttctactaaaatatcagtctctgactctattaaggcctttcagcaaaaaggacttggtgttaatgacatggtttatcttcttggtataattactcacctaccttaattaattactattattaattgcttaattttgaagaaagaaaattttattcaatctttgatattaaaactttaccaaaaaagaaatctttgatataaaataaaggtattgtataggcccggctctaagtatagacaaactaggttttccttttaaagttatatatatatataaatatttttattttgaaaaatatcatatattttttttctaaatgataaatagcgtcataagtatttaaagttttaagtttgtaagtagtataataatttcaagcatgataataatatttaacgaatctgtatctaaatttactatatatttttttttgaaacactatatttttaatactaaatacattattatgtacgcttatccaacacaatctttggtgtattaattaatacatgtattgttttatgcattttaggcggtcattcggtgggagtatcagaatgcactttcttcgaagatcgtctatacaacttcggtggtagcaacagagctgacccgaccatggactcatccttggtaagcagactcaagttgcaatgccctccaggctcccttagcagtgctttcttagatcagacaccaaggagttctatggtcatagacaagtcgttctacaatcaacttataatgaaaagaggtgttcttgcaatcgaccaaaagttagccaatgatgctcagaccaagagcatcgtgtctgccctagctaaagggtcggtggactttcgccaaaagtttggggaggccatggtcaagatgggacgaattggagtcatcactgatgctactaaaggcgagattagaaaattttgtcgagcaacaaattaaattaaataatatgatcattattattagaaataatcctttggattgagattgttgcttttattttagttattttagttattttatttttcttttgaatattttaataattgtgtacaagaaataattacagtttcactataagaaaatttgaatgatttggctcgatcgaccctattcaattttgattgatatcttaattaagtatgaatataataaatatatgcatttgatatgaattttttgtcaaataataccacaaaaataataatcaaaagtatatattactatttttttttttttgaacaaagtatatattactattaaagtaattcttgcagtgataacgtatattattataaataaattaactattataattaatattaaaactaagttgctgtggtgtagtggttatcacgttagtcttacacactaaaggtccccagttcgatcctgggcagcaacatatgaggatgcaatataattttttattattatctttttaatattcttatgagcatcacatatataaagtttgggaaaaattctacaatttagtctctcctaaaagagatatattaatgcatttatatttatttcggtatttgagaaaaaaaatttagtttatttttttcataactaagtaaacatctcgcgcttcgcggcggatatataaaatatttnnaattatatataaaaaataaattgtataatttaattaataataattactta

SEQ ID NO: 161657 - DNA, 3041 bp, Cannabis sativa
  modified_base (2919)..(2928): a, c, t, g, unknown or other
atcaagaagtcccacatcgggaatgaattaaatatacttcgcatttataaagctatgctattgcttaacaaaatgtgttcgtagaaaggagagacggttggcatctcccctgacagggacgggaacagccttcgggcttccctgttatagacacacccggtttctccggcaaggctaacaaatttttttctgactttttcccttgaaattattattattattagttctttctttttttttttggtagacccttcaaattgtgttgtggaaaaatatataaaattcaagtatctgtgaaactgaagtgcaataaataaaaccaaaatactttctcatgtaacaaaatttaaaggaattacaaactataaacatactaaaatgcaatgtttttggtttctcatatttaggcagttacaatagactgaacctttgattgtacccaagacattaaatcttctcttgttgccacaaaacaaccagctttgtcttcacattgcttaaaaggaactgaaagtttcttcacatgggaagcaaaagaatttgccattccttgagcatacttgtgatttccagcaccagtttgagccgaaaacaactccggtaactcctcttttcgctgaacaatcctcgaaagagttcccatccattcctctagtgcagtttgggctgcaccaactgataaagacctaacatccaaactccattcattagcagtcttgttgtgaagacctggatacaaaccataaagtgttcccagatagagcaactcatgagctctctcatggcgatttccatttcgacatatgtcaatcaagcaattgcagaagggtcttctcgattcgattgaagtcttgccaatcacaccacgaaactcttctttcacagcttcgaaactcggcttatcttcttgtagtaacttaacaagattaaccattttcgggttggcttgtatcaagcaacctagaaccttattttcatcatcaacattctcacataaggacataacagaaagcaaacaaccacagagtctgtcatcaggcctaactcccttcccaacagcaacattaaagactttaacaacatcatcaactcttttagtcttccccaagcattgaatcaaacaagtggtgcccatcacattaagctgaacacctctctcagacatttcatcaaacagttccatagccttttcaacattccctccactaccataaatgttaagcattgctgtgtaactccaactatctgggagagaattcttagactgattcatctccccaaatagcttttcagcttcctcctccaatcccaaatcagcacacatgttcaacaaagtgttatacagaatcaagtccataggccaagaattagacctcattttatcccataactccattgcatctcttgcccacctagccttaccataaatcttaacaagggcagttaaagttttctcattcggagtcaaacccgattcgataagctcttcaaacaagttccttgccaaaccaggcttcccagcttttcccaaagcttccaacaaagtattgtacacaacaacattaggctgaaccccagcagatttcatctcttgcaacacatacctaatcccatcaaaatcaccagcttcaccaaacattttccccaaaactgaataagtaatagcatctggtttccaaccactagctctacctctttcatataatccaagtacttcttcaactttacctaattgagcataaacatcaagaatagcagagtaagtaacctcatcaggcatcacaccagtggtgtacattctctcaaaccaaaccacagctttatcaaaaagtctacaccttttagcacaagtgataatagttgaataagtaatgttatcaagcacaatctcattactaatcatctcattagcaagttcttcaataagctcaaactgtctcccaaaccttaaagacttcattgtcacattgtagaatatagtttccattggaaaagaattctgggtcttaacccaattgaagaacaaaagggttttctgccatggcctcaagctattgagtatcaaaagagcattctctcttgtcggtgcttgtgggatttcctcaagggcagccatgaaagcagcttcagagtcatcttcagagttattaagcttctgggcaaactgtctcagttctctcaactgaggattatgagagtgagaagactttctttgtctctctaacgaaattacagaacgtctgggtctagcagggttgacccaagttgacttaggcttagataagtgatgggtttgttgttggtggtggtcttctgataaagtggtggctgttaaaggcttgagttggtcggaaagagacttggatttttcagaatgggattttgagtttgaggtgcaagaaatggaggaagagagtgattttcttcttctggggaataaatgggtgagctttggtgaggtgaagaagatggttctggttgagtcagaatgtttggttaggtgaacatcgagaggtgttgatatggccggacttgccattggagaaggtgaggaaggaatgagctgagctgaactgaggagagtggggttttgggggttcagttccaacccaaattaatccgacgaagagaagagaagagaagaacccaaaacgatattttttctgaccttatctaaatgtttattttttttccccataaaataataataagaagaagaacaaaaaatttaaattgttatagttgggttgggtgtatatttaagaatttatttttacattaaactttaacatagttttaagcttggattttagtaattgtaataacatagcggtttttacattacattatcaaaactaagtaaacatatatatataaaatattttaaattatgcataaaaaaataaattgtgtattttnnnnnnnnnnaattacttaataaaattatattttttcttttgaaagaaagtaatctttattagacagaatcattagctaatataatggactaaagagcaaggggaacatcgctctcagtaaaa

SEQ ID NO: 161658 - DNA, 2223 bp, Cannabis sativa
ttttctcaatttatatatgtatattactctatatgagacccttataatatatataggcacgtatatatatatatttatatatgggtgcacttttaatgggtaatatttaaaaattttgagttcttatgattaatttttggaacatcgagctcctagactggaacaacctttctcgccataaaagccaatcgcaacaatttattggaagtcattgaagggattggcaagtttaacacacgaccttctagcggtaaccatagcaatttggtgtcccaattcagaggaatgcggttcattctttcaagaatcaagaaaacgtgttaaataacctggggcatcttagacacaatacgatttaagtgagatgggttcttgaaagacaaaacaaggaacaatgaagagtgacacttgccttttaatttaaaatccctatctttctctctcaatttccaaatgcgacacaaaattattttcaagaaggatttgcataaatcgtgcctggtgtagagatggcctctaaggctgagcttgccaaccgacccagcacttgaatcattcacttcccatccttcatcatcaagcacattaagatttatagtgctctccaacataccttcatagctaccatactccaagagtatattgaaaagggtttttgctggcgacgagagcataacccccaaactgagggaaggggacccatgccacgatattattttatatttttaataaaaaaaaattagtaaacattaaattttataattgtacactagactataatactaaaaattaatacaaatatatcataaaattattaggagggtcttattgatgctcttactaaacaacatgaatgaatttgatattattgaaaagaaaagaaaacatattcttgtttattagaccaaaaacttttcttaaaagtttccttataaaatgtttgttccgacttcagaaattgtggacatacaaaacaattgtgtgactgaattttagcaacaaaaaggagaaaaaatgtaataacaatctcctattgatcaaatgaaagtaaagaggaaacaaacggataagtaagaaggataatacatttggaataactccaatatctgtcataatatatcttccgcaatctacagctcgagttaaacacttaagaatacacataataagcacatatttcacattattcctcaatatgtaagaacaatcaatgaaactggctatacaactgaagttgactccaacaatggatcaaggtactctttgagcttcacctttgtgattgcaccttctctcctactttctggtacttcctttccattattaaataagatcaaagctggcaatccatacactttgtactcttcaattaattttggatttgcatcatgatcaatctttacaactgttaatctgtccttgtattcctatacatggcaaacaatttttactcacatattatgacatgaaaactccaatatcattaccagctaaaattaaacgttttttttttttttttggcaggggagctagattaaacaacttaacagagtagatttgtggatccacctatcaacattagctatgtaattcttatgctttactgcaattggtctaacatttttactaagccgtgaacacacgacatcaatccaatcttacaatttaaaagctttgctttgaaaagttaattcttggttgatgaaaaatttgaccctcatggagattacacagaattatcataacggcgaatttctatcccaaaccacacagctactttttagaggacgaaataactggactgacacttttcaaaagatacatgaatgttggatgacctacttttgcaaccatttatataaaatgtggaaggatgaggttgtaagatattagatttaaaatatattgattttccaataccggaaacaaagaaaaattttccactagtaagtagtaaggtttggaatcataagaaacaaaactaatttccactgaagtagcttactagtaattatcagaaatcagatcacgcttgcagaataagtcttctttctaaattgcactaagagtgtaggacgacaaatactcttcctcaacagttcaataaaatgtatttcagtgcagtattttaagcagctagaatagtatttttttcgtggggaattaacccatatattattggtttctaaaatagttgcaatgctagttgcaataggagtttct

SEQ ID NO: 161659 - DNA, 671 bp, Cannabis sativa
tcttggaatacaaacaatgacttctctgatagaaacttaatagaggcttggtggtgcactatatggcagcttcaattccacccaaagtcaaggtttttctggtggaaagtttgtcataaatggatacttgttcgtgctagtcttaacaataggggaatgaagattgaggtgcagtgtgctcgctgtaacaagacccgggagaatgtcctgcatgccttgtggtactatcaagaggtgaaagaagtgtggaagttgagcatgtaccatcatttgtttcctccttattcttcggacccgaatctgcttggcctccacatgcaaacttagctttataagtcaaattttgagaggttcttggttactatttggcaggggcaaaataggtttgagcatcacttgggtttacttgcagctgcaaacattatgcattgggctgagtcacttttaacccctcctctatttccttctatgtccaacaatagggttaggggtgttcacgaattggtttggtccagattttcatatatttttttttaaccaaactagtataatagttttttgaatattggaaactgttgcccttgatttttcccacaatacgtggacatggataaggctgacacgtgaatctgtaagaaccatcacttatgaaaaatcaactaagtcttaga

SEQ ID NO: 161660 - DNA, 5823 bp, Cannabis sativa
  modified_base (218)..(222): a, c, t, g, unknown or other
taaattaccttagtaaatctgctaataaaagaaattggaaataggaagataatcatattagaccataatcaatagatacaattgaaatcgaaagccctaactttaatcattgttaatttccttttactttatttgcttcttaatttcactatttctttagtgtttataaatttaattttctcttaattttgacataaccaaatagaagtaaagatttnnnnntaaagtacttaactacaattcttgtgggatcgattaacaatgattaaagttaggactttcgatttcaattgtatctattgactatggcctaatatgattatcttcatatttcaaatttctatgcaatagcaagtttactaaggtaatttataatcttcttagatatataaacctcaatgataaattaaacatgcaacagacattaaacgcagaaaccctataagctatctaaatcatacaggtactctcgtcctatatcgaaattcagttttatttcactatagcataattgacactcacttctcagatctcgcatcaaaattatagacagttaattggtgatcaggcaatttaaagtaattaagtacgaatgaaatagaatacatagaaattgagggaaaataaaatcatattaaaaccataaaacaatgtcaaacaatatccatctagatcttaattaagtgtttagttattcatgtttattatagcaaaatcacacatattaacttaagaaaaaagaagaaaatagagaaaaagagaatgtttaaaaccctctgacgaatgcctccagtattgaattcggtttctgaaatttgtactcatttttctgcctttaatttccttttgaatacttcttgaaaattattgaagtccacttcttttatagccacaatatcaccatggtattaactcctgttactcgggtcccttcagtgttttccacttttaaacattcacattattattaatatattttttttattaaattattaaataacacattaaattttagagtaaaaattgatataaaaatgttacaaaattactttttgtgtcaaatatagttcaatttttacatctatcataataatgatgtattgggcatatgattttcaaacaaacacgcactaaacatatgtcaaatttgactagacccaaacaaaatgtgtcagtctagtcttgttaggtgttacaatatataacaaacccaataagaaaatacagagcacaaccaaagtcaagaagattaccttaatattagctttaacttttctccactagggacaggggcgcacatttgttttctcacactagcggtgtgtccgatggtccctatgccaccgcattttcccttcctcctctcttaattcttcgatcaaaatttttaagacaattagacaaagcatatttatgacaggcccatttgagaagaacaaatatatctaattaagacaacccttattatacatatctttttctttccatcacctatatctttgagatattcaaaatactaactaaatagtagcaaatgtatacgaagttatgataacaactgatttctggttgtaaatttttaccctatacaatcttttactgattcttaaaacccaatgctgaaaattatattacttttcataccataatataagacctaacaaagcaaatccaatcattttttcaagaagttatttcacaaagggactgagcaatgatgctaacagagaggaccgagacattcataatcaataatctggaaaccaagagcaaaatatggagaatgtacttctttcatggatgttaacaagctgttccaagaaagagtttctcaaaaacacagattaataatgaacaattaatgtgtgcaagcttctgaaaaacaggatcccatatgggtgcacacatcattagtgttcatgaaaaccaatgtaagaattacccatatacatcatgctggtttgggataatcacatgactgagctgccaagtttatatccgacaaaacaagtccctaattaattcacaatcaccatatacttacaatatagtaggactaatcggctttcagcctttaatttaattaaactaaaatcaaaacacgagacatcacattgccaaagcctttaattcacaatcttactgtaattgaactacaaaaactacagacagagatagatataaattatatatagagagagtttagaaaccagaattaggacgacggctgcttggtttttgagttccagatacattaccaccagagacctcttctttcttcatccaaaccattcgagtattttctagtttatgtactgcgcgaccagggaaactcttatacccatatctactggactcccgataaccacgatagtgatgggcgcttgttctccttaacccattaccattttccccagttccaccatttagagaaaaaacactaaatttaggtacgatagtatcaatctgatcaaaaccattgttctcaatctctgcctttaagtcacttctggttccaggcaaacccccaagtttgagaacaacatcagctgtgtgattcaaatcactgccctctgcctgattttcacttctgcttccatggtttactgaatgcccctcttctaaggtgagataaattttcctaccatttgcacttgcagacactgatttgttatgagctctctgattcaaattactgctctctgccctagttttagttttagttttagttttacctttacctctactttctgtgcttcttctccctgacacttgttctttctcgccattctcattcacattcacattcaccgccacagcttcgttttcagggatccccttttcaaccctaacataaatcatagacgaatccccaacctttgctttgatacgagtcgaaatttttccgattcttcggttcctcatccctgatatgtctttcctgttcccttccgtcaatggcgtctgcaccacaacttcctttcctgcaacctccttctctaccatcgcagacgaaaccctgaatttcgtatcgatatcagcccgctctgccctaaattcacctttctttggtctgcttctttgatttcctctctttttcatctctcccttctcgtcattcgccaaaggaaactgcacctcaatcccctctccgactacctctttctgaagcttgtttcccttgcatttcttcttcttcttcttcttcgacttagcttcctcgccttcttctcccacttgatcagcactatcaactcctccgatgacaacgatctccgatactgtccgagtgacagcgttgtggtgatcttgctcttgttgttgctttaattgcttttctttgagccaacgctcctgaagttgacacagagtgacgtaattggagggaaaagaggtcttcttcttctcgtcctccatttttacaaaaccaccaccaccaccaccgatttcttcttcttcctaactaagacacagtcatctctcatcgatcccaatttcccaaatccaatcatcattattacttcattcacaagaaacctatcaattccgaggaactactttttctatttcttttcaaaaaaaaacaaataaataaataaattcttttcaattttttttttttaaaaaaatagaatttgttttgtcctttattgagatatttatagggataaatttttagtttttttatttttatacgtggagcggaatttttttttttaaattattttgttttttttttaaaaaaatactgtgtatagtgttaagtttttactgttattttttagttatttcactgttgtttttagaagttctgttttgtgttcaactattgttttataaaaatatagtaattttgaaaaaatttctgtatgattgtatttttgtgaaaattaaccaaaatttcagtatttttgtaaatttatctatttatatagttttgaataaaaaaaaaaaggggatcttacaaaagtgcctaattttttgttatttttatatttttactatcacactcttttttttatatttttattgtactaagtttttaaaaataccgtgttgaagttttaaattacaaaaatattaatttttagtaaaataaaaaaataacttaaaaactactaaaaaatgactctaaaataacttaacaaacaactataaaataacaaacagataactactaagtgacggaaaataacaaaaaataatctaactgtaatatgcaaaacaatatcaactcctcaatatgtttttgtattatgatttttttacttagttttgacaactttatttatctttttatactactacattactgtttttagagcaatttgcggcgaaacccccttatgttttaatttttatacacttaatcccctctttttttttggcaaaattcccttatgttttaatttttatacacttaaactccttatcatttttttgtggcaaaactctcttatgttttaatttttatacatttaacctccttatattttttttgttggcaaaatttccttatatttatttttctttgtaaatttgacacgccagctaaatattatcgttaaatatcaactagaagaccagtgtatacaccaatgtatatgtaacagtaaaatcttgagttagtgatagaagaccagtgtatacaccaatgtatatgtaacagtaaaatcttgagttagtgatagttaaaatgataatttattttttaaaagttaaataaataataacattaataatagaaataataaaatcttataatttcaaaatgaagtatataatataatgagtaatatataattaatatgtcaatatctactactgcacattgtgtcagttagaaaaaacaaaaaacattatctttgtattttaataaaatgtgtccaaaaatgaactaaatatatgtatttaaactacaaagcaacacacatacaaccaaaaaagttatcatgaagaaactaaaaatatatactataaaaaatacatgtgaataaaaaaataactgttgaacaaaaaaaattgtgaaaaccatttaaaataactaaaaaataacaaaacaaatgataatatatatacaacaacaaaaaattgtgtggaataaactaaaaaaatacaccattaaaaattcacataaactaaacaacaactgtacaaaaaaataaataaaaacaacagaaaaataactataaaacacctaaacaacaatgttatccgtgttttcgacaacagacacgtggaatcctagtcagcatcaaaggtccaccaataggcccccaaggaagacaatttgggccaagcccaaattacataggaccttccaagaacacaccttagctctgtgatcagatggtcttccaccaataatagtccatattcagaagcaattccagtaccgtgatgccaaaaggtcaggcagcgtgttcctggacgaccagtccagtttcctcttatatttgagcacaccaaatgaggaaataaatgctcctcagaactcgacagaagatcatatcaagctaaaatgggaaactacctgaatgaagatcaagcaattaattcacgattaattgcccatgatcataggatgcaattttaactaattcaaccacatctaataagcctagtcagcagatcatctccttcctgggctgaacttcacaagacaatccaaattatgtaattcaatataatctccccattagaggggaaaaaggaaactaaggctatgtttgttaggaaggatggagaataggaaggatggagagttggttgaggatgtagaataagagggagggagaggagagtagcaatccttttaagttg

SEQ ID NO: 161661 - DNA, 1620 bp, Cannabis sativa
atctctacttcatccacaaccaagcctatcacttccaccattatttctgctgaattaagcaaccaagaaaatattcatccaaaccattttcccaaaagaaagctagaaatcaaatctttgaggcaaacacttaagaaatgtcgtgcaactcaactctttcaaacttcctcctcatcagttaaagtggaaaataaccagcaagtttctgttgatgctatagatctattggtttttttaggtgatgcagcagagattgttcaacaatcccttcctttaccatgaaaatcataagttggaatgctcgtggccttgggaactcgagtgtattctatcatcttcgtttgcttattcatgagcaaactcctcatgttttattccttatagaaactaaagttaatgcttgtactctatctcattttaagcaatctttgaattttagtaatggtcttgaagtttctcgtgttggtatgaaaggtggtataatgttattgtagaaggataatactgatgctactcatttgtcaatgaatacaaacaattttgattactttgcctcttttgatgatggaccacagtggcatttttctgcaatatatggctttcctaaggttgttaataagagatacacttgggctttaattcatcaactcgctgatgtttctccccttgatctctggttgatcataggagatcataatgagatattttctcacaatcataaaagtaattgacccctccgtcaagataactagatgtaaaattttcaaaatactcttgaccaatgttctttgcaagaattgccttacaagggagcaaacttcagttggacaaaaaataggaaaaatcatcatgatctttaagaacggattgattggtgttttgttaataaagtgtggcaagatgagttgttttctccacaaatttctcatttagattattatggttccgatcatagagcccttctagctaatatttactgtgatgttgatcccgaacaacaaaaaaagcgaagatctcaatttcattttgaaagaatgtggttcaatgatgctgaatgtggtgaagttattgttgattgttggcattatgctaatatggatgatggtctgactgccttagttgactatttgaataggtgtgctgttaatttacaaaagtggcataatgctaggtttggtcagtaaagcgagacattaccaaggcttaagacagagtaaatactctgcattcaactgttcctcctactccagatcactatcaaactgtcctaaatgtcgagactcttttggatgaactattagctaatgtggagcaatattggtagcagccttgagaatcgattggttacagtctggagattgaaatacaaaatttttccatgccaaagcctcagcccgaaactctaacaatacaattcattcactttgagacaatgatggaaataatgttacatcaaagaatggtattttaggtattgttgcagattatttcaaaaatctttttactacctctgaagatgatcattgggctctctcccatgttttttgcactatttaaactaccattactcaagatcacaatgaatctttgctatgtgaatttactgttgggttttatgcc

SEQ ID NO: 161662 - DNA, 1913 bp, Cannabis sativa
  modified_base (1884)..(1886): a, c, t, g, unknown or other
ctctctctctctctctcttataaggtggttgtacacaatgtacaggcaatgctgttttgtatcaatgtaggggtttgtatgtgtacatatttccttttgtttacccaatagcacatccatgggtaaattaccaagcatttataattgaaaccatcaaatcgtaaagcctttcatagtattagaaattaaaactagaggctccatcaagctattacagacttacagtttcttcttatctgaagtgttaatccattttggtcttacaaataagatgggattgttatcttagctctaaatgttgactgaggccctacattttattgagcccaaaatttagacaatccgaggcttaaatctccactattatttaggcaaatgcatgtgggaagttcagaaacttggctggagacatgctaaacacagcataatctataaatgcaattttgagaaaatgtgtttttcgtgatttatgtaaagcattttgccaaatgttttatctcagctgattcacattccatccttatataaatagttttctttaaaaaattatatgatttgccaaatattttataattctcatatgtcaactgattgacattccatctaggcatctagtattattttgagtatatacctgtgtaaacgctaagtataaattctgatagaatgtgggatatgataaatatatcattatgctctaatttactttcatgacataaagacctcagtgtgaaattgagatatcttgagtttcttttgttaatcaaatgcataattctctaatatattttatgtcatataatattccacagctcgaagtggtgggacctggaggatctccagatggacatgatgatgatgaacatcactgatcacagccttcagttatcctccttgatggaataaaagaaaaagaaaaaaaaaaggtgtctagagaaatgaaagtgaaaattttcagtacacactgcagatttcgaattcaaaaaaaaaagaaaaagattgcattttgtttgattttggtcggtcttagtcttctttttgctgttgctttttttgcaacaatttgagactatttaattttctctgataaatttagacaaaggctggtcatctgttggaacaatagatctgttctatgcatttgtcgaataatcgatggctacttgattcttttcgaacagtagaacctgagtttttttccgtctgctgcaaggggttattccttgcaattaaatagcctaatcacttttgttcatctcttattttgtcaataaatcttttcaattttttgggctcaatttgatcaattaaccaagcaagtcacttttgaatcattattagtcatgacaacaaacaaaagaaagtatttatttcaaaattggagtaagcatttattggctttggagaacccaattgagtgttaatgatagttttcgttgtagtgaactgaactatagtaaattgctgatataaacatataaaatttatttagaacatattcgggaagaaagctttggatattagatttttgtttcgaaagaaaatattgtatatgtaatagaaggaaaatattgtaccgtgggaaattataaaagagaaatgggaataaaaatggaatagattcaaaggctcactcactcatatcacaatcttaccaataacgagatagaataacatcagcttttgttccactgagaaaaatgacagacaaatgcctggatagaaacttggacgtctattaacaatccaccaatattttcttccattttcatatcaaacttatttatcaaaaaatagaaagaaaaaaaaacaaaaaagttttatactcagtttataatgagtccactatcccaatgaacaagccctctctctctctctctctcnnnctctctctctctctctcgtgaacccta

SEQ ID NO: 161663 - DNA, 3520 bp, Cannabis sativa
tgacaagacaacaccttctacacgtcaaacatcaactaagtcgaatcctagaaattaaatgaagttattcccaatacataatgaaaaaaaactcggtcaacaaacagaagtagtaaaaacaaccaattttaagagtttaaaaataaatacacaaaacttaaccacaaatcaatagaaacataatagccaattggtggagcagaaactattttatgtaaatataacaaaggaatatgtgatttgtccatctcatgtaattgattaaattaaatgcataatatgattcattgatttgaattttagttgagattaactacaaatttgggtcagttacaatataaaatattaaattaaattcttatgttttaaaagaactcacatgtgtaggatgctaaaaaattatgaccacttcaattagccttattacaattttactgaatggtttacattcgagttttttcttttttttttcagctttttgggctcaaataatatacattagtattgagacttgttattttgtagttggtggaagtatgagactctatttgatgataatacatatttttttatgtataccgtttagctaatatgtagttaagtaacaattctagttctctccttctccaacaacaacagatgagataattttctaggacattgaaaattgaaatcatatcccaaagttaaagactcggttaaagagttgatcactagagaagatccaccaaaaccaattgagcaaccctttccttgtataatagtcataagatatggaagtggccaccattatactttgcaaagcaacttttcaatatatttttgtttacagtcaaaaagcacaagcaaagaacttatattaagcaaaacaagagtacatcatgaaaatatatctacaacaagagcagaatacacctctagagggaccccatcattcctttccaatacatagaagctcccttacattaaacagtgaatgcacaagagagatcacctatctactagtaagcataaaactaatatgttcaaaacaaaaatatcaaaatcacaaaaattagcagatatccatagtccaaaccactctgtgtatgtgtttcaaagtctacttttcttttcgttctttctaatcaaaagtttcatagataccaagctatatcaattcttagaccaaagactcgatgaatttccaatagaggaagaagacacaaattaaactttttagacttcattccctcatttcatttcaatagcttaatcaatgaaaattacacattttcttttaacaagtgccttcatgcatgtatcagaatcaagaaattaagtgcaagaattaactatcaagcaattattcaaaatataaaccaagtattcagagtcattttatcaaacattgtacatgcaactacaagtctacaacaatatcatattactaaaggttgaaacatacttctcatattaagaaacatcaaaggcatattcaattcagagttcaaaaattatcatatataatttcaatagaccaagcgaacaaaattcaacaatcccataagtaaactgtaaatattacattccactgattctactaatgtcatctataaaattatataacaccctcatcaagaggaagaatgagggggggttgggaaagggattgtgagtgattactgatgtgtgagtatgagagaggtgagtacctataacaatgtggctgtgggtctagagtaccgattggagatggtagactagcaatgccgcacaaagctttcttcggctggggagtagaaagaggagaacatgataaagaggggggaaaatattttataacataattatttatgtgttttttatattaataatgatttattatgtgaaaaatatggaattgaactttttgataattggtttgtgattcgataattgtatttttgtaaatttctaattgcactttatgagagtcattagccttttctccattttgatctctgaagccttaacattgttccgaatttcaaatggtatttgaaacctataagacaaacttctaactagtataaaatcatcactaggatactcaattattatatttacatcatataaataaataaaatcattacaatgctaagaagaattgttaaataatgatcagatggacaaacctgatcagtcaatggatcatgagagtaataagtaacatgctttgttgaaagtgtaatgactaatgagctggtacaattttaatgtagcagtagcagagcaagcaagctaatgattagttaaaaatttttatagtcatgaaagacatagcaattgttttgcagaatttatagatttctatccaacaccacagtgtattatcttaggttagggaagtgtgagcatatagaaccctaaacctaaataccaatctcttaatttcaccatcctccttccgcctccctgtgtatctttcccaaatatcacaaacaaaaaaccataaacccatacataatcattctcttctccaccataaatccatattcaacctatataattaaacatggaaaaaaaaaaaaaaaacattgcagctgctcaatcttcgttggaccgcaagcctaaggtgaaaaagaaaaaaaaaaaaagtctgtacctcgacttggctgagcgaaagcttgtaacccagagcaacctcgactctgtgctctatcgattgattaaagatggtgagattttaatcaggagtgcagctcttcataaagttgttgccgttccagctcattgtcgaagaaggaagccgtacgatctgagtcgaggaacttgataactcggttacagattctggatattaagttaaactattgggccagtaccttccatggtgtctcaggatttttgcactaattttttttttaataagaagcgtattatcgaaaaagttagacctcccgatcattacaaaataaattctccggtaaggaggaaatcgaaatagaaccgttcaaatagtgagtaaaagctcacgttgtgggtaacaaaattacaggacctactaatattgataaaattacaactaatgaaagagggagaaacttagaacaaactgagacatagttctcaagagcccaatgggactctttctcattgagcccattgattactagtctcgagtcactctccactatacaaatttagatcccatttctaacgccaccgagacggctaaacaacaagtcgcagcctctccacagagtgcatccgaaaagtccaactgagccaagtggattcggatcacctcacccaggtgattccttgcgacaactgcagtacacatactctccaggtccactctaacgtcacaattaagtttaatccagtcctgaggaagaggagcccaagactcccgccatatcggaacatgatcaagtaagatagtagcatatatatctgcaaaggaataacaaacagagtcaatgcatttcttcacatcaggcagacagtcattatgaaccacttcgttgcctgtcctccaaatggtgtcgactac

SEQ ID NO: 161664 - DNA, 2105 bp, Cannabis sativa
  modified_base (2029)..(2032): a, c, t, g, unknown or other
aactaaatttcagttcctagtggacaacttcaagtgaaataatcaccttgtcgtttgaggagtggtattaataattgattggtgacttagctgtgctgtcattgatagagtggcactagttcttgtgaaaggtgtagtagaaggaatattttttgttatagatttcagcaatttggtagcataggttttattgttattcctttttgtaatcaagtgacaagtattctttactcaatgtctgacatcatgtattgtatccaacacttattgttattccttttttgtaattgaaatgctcaccctagttatattttattgggcactaatttttccaacacttattagagtattttttttattataatttaaccaaaaatagaatctcgacggtgataaaatgaaaattactaattaagtgatcatcagagaacatacatgtcatattgatgatgaatgaatactatgctatgatatatttatatatactatattattattgttaattagtaattatgtaagctcataattaatatgaatcaatgtacctgatatttgtgtttatagagattaacagcaatggcatgagcaagaatggtgtggtgaaccacaatatatggttcagtagctgaatttcctgcactgcaatttcccatggagctagagcatcgacctggtgcaaacacaccatagttatacccacctattgcaaatatgtttgcctcattaaatgttatccacttcttcaccctatccccaaattctttaaagcaaaactccacataatctctataatcattcctgtaatataataatcaattattattatatgtaacgtatcaattatgtctctcaaataatgttatatacataagtttgtcttacacaatattaggacttaagaatccaccatactcatcttcaagagcttgtggtaaatcccaatggaacaaagttactaaaggttgtatacctgtacgtacatgttcaatgacgaataacccaataatcatgctagtgtttgaacattatatgatgtattggactattattaattatatgtatatctatatgagagagagagtgagagagcataggaactcaccattagataacagctcatctatgagactgttatagaactttacaccctcctcattcactcctccacttatttttcctcctatttttatataaatatgtatcttataaattattttaaacaaattgacaataacacatagaaatgaaagataatgtcaattaattcatccatacatataaattaatagtactaacccggtagtagtctagaccaagagatggaaaatctaaaggaatcataaccaatgtatttcatcaatgctatatcctcctataacattattataatatcaatcatttcagtatatggctaaaaaataaaccgaaagaaagagaattaattaggttaggtcgtataaatgtaaacaattgtatcattgttatacatattaatagaactcatttgctaattggcagaggcaaataatgaaatgatattttttattattattattattaaaaaagaaacaaaagcagaatattcgaaaaaagaaaaaaaaaattagaacattttttaaaatcgttttatatataagataagacatcacgtactggctccacaattgagtgtggtaataattaataatacatagtttttaattaatgtgctatagttgctttaaatttaaaaggtttgattaatcaaatgaattgcaagtggggcgaccaaataaggtgtttctttacaggaagaaagaaaaggttggataagaacatgatagggataacgtaccaaatcgttgcaattaaagaataattagtcgtgtaattattggtaggggtgtggagaaagtcatccaatctaattataattgacggatacaatcccaaccaatccaatcgaatcggatatccaatcataattagatcgaattggatgtaaattttgaaaataaactgtttaaacattgttttttatattgtaaannnntctgaatttctcaaaattttgtaggatatcttaaatagttataacgtagtatgaaaaaaatagactaaatttt

SEQ ID NO: 161665 - DNA, 2640 bp, Cannabis sativa
gtacagcaatcggtcgtgcaccaccaaaaaactgatgcagcgagcgattcaaatcgtcgccagtagtcttggacggtggattgttggtggagaacaaagaaacagtcaaagacagttccctcgctcttgggacgaaatctcctcagtagaaacgactcaattcatcccaagtttgaattgtttgccgttgattttcccatcggaaccaactcagcgctggcccttcgaaacacagaactgcagcttctaactgcttagctggtgacaaccgctgcaacccgaagtatctttcagcccgataagtccattcgtcgaggtcatctcctgtgtagactggaagttcgatttttcgagcatgaaactcgattcgacggtctcccccgtccccgtttctgccattgaacccagctccccccgtggccgtggaaccttccccttgcggttgccgagctgtatggctgactcccgtcgaccgttcacggagaaatgccaattcatctgcaactcgactttgagcaatcaccagccgatcttgtccagctaccagccaatccaacacttccctcatggtctgaagttcgaccccatgagtcttcaaaataacaccatgatcatccaactggttttggatgcccataatagatgattcaactccatcaacacgagactccattcgagttgctaccggcattcaccaagttcgagtggctctgataccaattgataagcacctgggtaattgaataacaattatagcagtaaaataaaatgcaacaacagagatgaagaagaattcctggaagctttattgaattgtaaggaaaaaaaagagactatagtctcatacaatagaaagaagagttctcatgatgcagagaaacttctcagtacttgcataacagaaaaaaaatagcttcctatggcactaaaaggccaacaacaatcacctcaattcccaaactaccctctaacaaactcacccagccaaaagactcaatctacccttgacccatttgtccaacattccttctagtataggtgaatcgtataggaggcttagcattcttatcaaattattaatttaatatttcatctgttattagtaaccataatcttaaagtttataagaaaattgaaaaagtttggaatatatttttatattttggttaatgttttacaataagtcaaaatatgacgatgttaattacattgcacatagtgcctcgactagaacccttgcaatgttttcataaactttaacctttgcataaattctgccaaactgtccaactttctttctctgggcatctttgtttattccaatcctttgatcattggatacaactatctcaaagtaatgaaaatgaataagatactcaactaaggaaaacattaaaataagacactttaatctctctttgaatcagatatgtatataaaaatacattcagataaaggaaacttagaaagaaaaagaaataccaagttacttcatttttttttccctttcaatagttattgagtactgtaaaatggctcagaatgtgcaaaaaacaagtgaaaatgcaattgaagatgccaatgtagctgatgatttttactattggaatctcaatgaagatttctgtgccaattctcagtttaaaaccatacatttcagctctgatgaatcagctagctctattggatcagtatcctcatctgacttacttgatgataatgatgatgatgatgccttatcaaatttatctccaaaaacttatgtactacatgaattttctcacccaacaacgaaatcccaagttactacaaagtgagaatttttgttttattttttacaggctcaattaccacaaaagatatttccaattaagagcaatatattttaatttacattttttttattggattgcagacaagggctttcgaggtattatgaagggaaggccaaaacattctcatcacttttagaagtgaaatatgtacaagatttagccaagaaacaaatcccttttatgaagagaggccatagaagaagtagaacctatttacagtccccaaagtatcattatatcaatgaaaaataatacaagaagggactctactcagcctctcattccactgtatagatttttcaaaactactgtttaagttaactaagcagcatattattgattctatcgttacgaaatatctcaaaaatatctaattatattttatgatgtttatccatatttcttttcttttttgtcactaaaacatctctaatgggaatgaaaatgtttgatgatatagattggagtaaaaaagaatatgaaaaaatgcgtaacaacatctctaatggagatataaatacgtaatgcaaatgcaaaatataattcactttgttaaaagtctatggtgtgctaaattatgatgcaaaaatctcacataatcaaaagtgatccaaatttgcatcacaatatagcatgatgcaaaatttgaatcataataaatattatacttttatatttaccattatgccatttttaatattttattattaaattttagctaacacactcctttacattaaataacttgtattattattattattttattattaaattttacatttaactttgcattattattatt

SEQ ID NO: 161666 - DNA, 17272 bp, Cannabis sativa
  modified_base (2634)..(2635): a, c, t, g, unknown or other
  modified_base (17228)..(17247): a, c, t, g, unknown or other
gatgtaaattttcctataaaatattgtactccgtatttgttgttacctaattattactatgaatctaagcactatttcattcttttaagaaaacagttgttctgaagcgtcatccatcataggggatgtgttcgaatatttgtggaaacaatttagaagatatataaattttaaaaaagtcattttatttacattttgcacattaattttaactttatttatttctttctttaacattcaaaaatgttatataaaaattatttatttattattttttacatatagttaaaaaaaaaaatgggaggccatggcaccctctccccctgattccgtcattgtttatattatatgttcgaactttgaacatagtcaatttttttgacaaaatactgaaggcagaggacaatattaataattaatttgagaattactttatatatcatgatttaattttttttatgaagtttatggtttggattttcttactaatttttatttttatgtgagttgctatatggatcttgattgcaatttaggttgctcatttagttgctaatttttgtaaaaaaaaaaaaaaactattttaaaagtataaaaataaaaaatcccttaattaataataataatataaaactcaagtcagttgcacaaattagtaggaagaaaattattacaaacgaagagggagaaaaaaaaaacttgattctcatctgatataaaaatttgataaattgcataaatttattcatatgaagaagagaatccaaattcttctttcttctaacgtccacatacagtcatttatttctagcagctttttctaaattcatgaacgatcatttatttcttttatagcctaatgttgaatttttcttaagtcatattacatatagtcataagggggacttaataaagtttcttctgtcttgtcttttgacatgttcgtcaatctgatgtgttaatttgttggtaacggtgttgcttgtttaaggcttttagtagtcagatgatgaaagagcatgagaaattaatgagctgatttacaagttgatgaagaggaaagggtcggtttattgtttcatcaagaggagggactggttgatgattttgatgcacgttggtgtttggtgggtaaactattgtcgaataggcccgttaattttgacactttccaaaatgtaatggcatctctatggcagtcaagcaagggtatgtaagtaaagaaattgaaaattagtacctattgcaattttttcatggggcacattggtagagctatagagggtactctgcggacattcaataagatttcactaattatagaatgattgaaagaatgtgagaattccagtattcgaccattgactacgatggaaatatgggttcaggttcaagatatacaagttgggtttaagtctgatcgagctttaaaggttgtggatgcttatattgggaagtatgtctcatcatgtccgaaaaactttgttagaatttggagggactatttcagagttcgggtattcataaataaaagcctctcaagcgaagaatgaggatctctaaaacaaggatgtaatgaccacatgttattagaatatggattagcaaaggcaattatcattaattattgatatttttataattatgcatgggtttattattttgtgaattctattattaaaaatgggaagtagagttataatttctcgattctggagattttattaaactctaaaagtattatttatgctatatataaattatgcaatttttatgatttttgttcggcgacgtcaaaaaatacgatagatgaacgttagagtcacataggtaagtctagagcctaattcttagcgggacaaacataaggaatattttgaatgccgagtttgagcgggctcactatttcttagtatgaaagatcatgggtattttagtaattttcctttaggggattctgtggctttctcataagatagcagctggccatatctcttttatttagttaagtatgatgttgagtttaatcaatttaaagaaaaattaattattcaaaggataaacaaaattttatctatcttttccttctttctctttgaaccaaacttggaccaaggggtttgccgttgagttcttcattttagcaggattcaagggcctttctctaggtgaaagattcagtattagcttgagggcattcatccagcacaagattttccattcaggtcgaccaactcacttaaattcaaaaatgaggtaagaatagcatatgacatattatatatgtgaatgtatgtatgtgtgacatatatgcatgcttattgtgattcatacactaccaacactagtacggtgtactgagtgcattggtatagtgtacgatatgtaaagagtacattacggtgttaccagcactcgtacggacaggtacagaatgtgtgtggtacaacacttagctgtactcagggtatgaaacaaaccctaccaacactcgtacagtagcagtacgtagtgtatgtggtacagtggttgtaccctagtaaagaacgttcttactcatctgttaagccttgtagataggtgtatggacgcctagatacaagtcgatattatattatttgttatatgcttttnntactgagtctgttgactcacaattgctactaccatttgtaggtaaagaaaaggcgaaggctgaacaagattgagctctgggcttggatggtggttgtacatgttacgacgacgcgaactggagtgttcggtcttgagacatcttggatagtattttatagtcactgtgcgacatgtatatgaaagtattttttaaacatttgtaaaagtttaattcgggatcccaactatgtaaatatatataagtttataatgtttaataattttagtcaaggttttaattaaacacgattttcgaagaaaacccttgattagcaaggtagtatgttaattgaaaaatcactatagtgcctaagtatcaaggcattacaaaggaagaatggttctgggtaaactttaaatatgagagagcgccagccttttgctttatatgtggtgtcattgggcatcctgaaaggttctgtcatagattgtttgatgagccattggagaccattgctaagccatatggtatgttgaaattagagggctatcatttgtttcatgctactggtttttatggaaccatataggagtcttagaagaaattcctggatatttattaggcaactagcaaaagagtcttcattacattagtgtttactaggtgatttgaataaaacctttcatcatagtgataagaggggagggtacccctatcccaattagcttctctcaaggttccaagatgttgtttcgaactataatcttattaatatggagccggtggggcatccatatacgtgggaaaagggtaaggacattattcaatgggttgaagtttaggtcgggctcttattacttaagcttggaatttcttgtttcctgcagcaaggttagagaacttagaaatttctatttttaaacattatccaatttgcgtgaatcttgctatttctaagcctgtaatttttttcaagaagttttgttttgaaaatgtgtgagttcgtgagcctatgtgtcgttagattgtaaaagataattgggaactgcttgatgctagtcccttgcatatgacgattaaatgttgcaacaatgctttggcagagtgagaaagagatataactggtaatttcaaaggaaggattcgtaactgcaataagattctaaagctattaaaaagtcaaagggatgcgaggtctatcgagaaatataaggaggttgaatattagttgtttgaaattcttacttataaagagattttctatagacaacgctctaagcaattatggttacaggcaggggatcaaaatacaaaatatttccatgcttgtgctagtactcgaaagaaaaataatcaaatactgagattgaagaatggtgatggattgggataatgagtttgagagaggtaatagaggtttatttcaaagatttgtttgtggcttctaacacggactggcagagggtcacaaaatgtgttcaagacggtatctcagaagttaaaatttgggtttattagcctcgattgatgatgctgaagttaggacggtttgttccaaatgcaccctgacaaatcacccgggcctaatggattcaattcaggtttttaccaaaaattttggaatattgttggcaaagatgtgagtcagtttgtacaatattttttaacttttggtaagttccatgaccatttaatggacactaatattgtgatttattccaaaaaaatacagacccaaaagtatgagtgatttgcgacctatttctctatgtaatgtgatttataaaattgtttctaaggttttagaaaatatattgtaaggggtacttcctagcatcatctctaaaactcaaagtgcattcttactgaggtgtcttattacagataacatcttagtttcatttgaaattgtgcattatttgaaaaggaagcattcatgtaaggatggttttatggcttttaagttggatatgaacaaggcatataataggatcgagtgggttattttttaaatgctatattgaggaagatgggattctattagtactggataaggttgattatgatgtgtgttagctcgatctcgtacaaaattgtggctaggggtcaagagattgggctaattgttcctacgagaggtttaagacaaggtgatccactctcaccttatctttttatcttgtgcgtgaaggattttttagctttgataaaaacttatgagagattgggcaagattcgtggctgcaaagttgcaaggggagcttcgttggttctcacacatgcttttttacagatgatagatatgtataatgtatggcttcagaggaaggggctaccatgtgatggagctattgcagtgttttcaattaacatctggtcagcaagttaatttgcaaaattcatcaattttctttagtgcaaatacagctaatgatgctcggttgagagtatgttcaattctagacatctttcatggtgaagccaatcattctcacacaaaactttttcctattaagtcatatgcaggataataccatgcatattacaggcttaaaccttgtaatttctagctatgactctctttgaatgttacaatggtgagaattgatgcattacagattctgaacaagcgagatgagaaaatagactaagtgtccaatgaataggatatggcatgagagagagggagtaatagagctacagagcttaagagattagaattcaggtcccctttctaagtgcttaagatccttatatatttttagggcttacaaaatatcaatattcaaataagtaagtatcccttcaaaataagaaacacaacacttttatcatatatttaagttacaaaaataactaagtaatatccttgaaagataggtaaataatttgaggttaaattccttactttgtgggttgttggagttgtcctataattgaaaccaagttgtgaatcgtccagaaagatggtcgtggacctcaccattcaattggactccccctttgatgctttttgtctgtgctggttggccttcccttttcttaggacatggctggcacataagcttcattggccagctaggtatggttcggccagaccctcttcgctggccatttcctacaattcagtcgtgcctgagtatttgacacccttgttaattgacgtgttgtccaaggtgaccttgctcattctattgataggttgtattccacgtggcctcagttttgcctatgttgacatgccatgtcaagaggtcaaaaattgggataacaccccactttgctttcggaccaattttgttaaggcaactatctactgttccaaccttttagtgtcacttcccgagagatccctctcactgaccttgtcgttcaagtggtacctgagctcattaccacaaggcctcgccttctcacttttttatttcttgtacttggcgtctaaacaccttttgagatccactgtggaccgactgttgtcggagtactgtccccctgccccaccatcttggtttactaaatcacatggacagttttccttcccttgggcttaggtactttcacaccaagcctttttggcgtcttctaggtagaagagcgcccgagcctggaggtgttggctgccttctgtgcttgagaaggcctgttggcctgatttgcatttttctgaggaggctgaggagcatgaaagttcttagggtcacttactttttccttctcccttgtcctgtggaggagcagaggttccaatatcactagggttttcctttatatttgctcaaacacactccactgaagggtcattgtgagaatcttccccgtccaaatctccaaagaaggctcaaaggcgagccatcatcttctccatcttttgagaaaatctctcttaacgggctagcttctatctagtctcaagcaactcattatgcactcaaaccacctcaagatcttgctcataatggtagccgtctttataatatccatgtttgacataatcttcatcgtcttcttccccttctttattctcagcatgcttgtcatcgtcgacatggtcatgctagttctctagatcgtcctcttgatcattcatattggacgtattctcgccccttgcactgctcgactgggtgtgctctggcgagagggggtttacttcctccatgaccgtctcgaggccaccttgaagagtctttttaggaactattttttgtgtgaacaccatggcagcagcagtggtttatgtctttcttcagatctcaatgaaagtacaaaaatatttaccgatattttcagaaactaaatatttaggagctaaagaaatagtaacttgcaaaaataaagagatgaagaattttacgtagttcgggtataaataaatcttagtccacgagtcagtctattagcctctaagggcggtattgatgtgtttataatatttttgcgggataccctaactcaaacttagagtaatactggcagagttttagctatgtgagatgtgatgcccccttcgtatgagaatcggggggtatttatagactaagcagcgggtatggacaggcccataattttcctaaggtaactgctcaaatatcacttttggggtaaattacataaagctgactgaatgatcccatgagaaatattatgcccgtgcgtgcaacaactggataatagggaccacttcgtaccatcgggatacgaggcgtgcaaatatttaatctttaaaagtagaggtcacatgttgctcaaaatacactcctttacaaatgggagtgtgtaatatctgcttggcaaaaaggtggtggtggtatgcgtactaccatacttagatgtaggaaacaagatctgatcttcgtcagaaaaagcataaccgacactttggtgacctagtatgtataaaaggtcaacattcgcgacaacttaggatggtagatgtctgtgttaaaccattcgagtatgatctcggtgagcttccgttcttaaaccctccgggtcaggaagaagtatttcaccttccacgtctaggaggttaaagctagtatgagtaggctttcgtgtatccttccttcttgaatatttcccaattccaggaagcctctccatgacagggtaggatcaaaggactcaaataggaaagtattacgttattctctctcattaaatgtcacgttttatacttcgtaaaaatgtaaataacaatgatagtaatatttttttagaatataaatttataagtgaaaagtgatcatttgcattatgactgctaattttttttttttatttttaagcttcatattctatagaaattaagcttatcacatttacatatccaggcacaggcacgcatgaatttctgtttacagcaagcttttttatatgctacgttataaatgaaataaaataaataaataaataaaataattatgtattctcatatgaatagcatattcatctggcatcttctccattatatacattgcatattaaatttttcgatctacatatacttttacaatgtatttccatgcatggaccatgcatgctgatgcataaagtactgttgggtaagtttggtcaaatatgtatcaaatcatgtggtcgataggtgtgtcaatatatatatatactattggaaaacaccctattatatatataaataaaataatgagtgagccataaattttacaaaattaattaagagagtgattccatgagaagtagaattaattgaataaggaacatgagatgagaatagaatctaatagaagcagtaataagaagacatcatgaacccgagaaataggagtatatataattgatttgataaccccataataaaaataaaatccatccaccgaacaagacaagaatattatctaatttagaattcctacaatttgggaagccagagaatcatatattacgtatgcattaggctgttgttgttgttgttggattccatttaattgtgtatgtattacttcttagccttgtgtttcatacactacaaactctagtgcggagtctactatacgcccactctcacacgtgcttctctctcgtacacccaattaatctatgttagggcctcaatttatttttttatatatctggggtaaataaataccttttagttaaaccaataatatagtacttaagtataattactaaaactacgatatgcataattaatgatatatataaatatattacattttatatatatttgaattctctatataaaacgaaagaaaaaactagatttgtttaatggaaaattaagaaattataatcaactgtgttatcatgtgatgtgcgaaatactgaggaattgaataatcatcatatatagacattgaaagaaattctaaatttattaggtaatgttctataaaaaaaatatatatttggtaatgagctagtgtgccgcagccttgcaagaacattcccatttttaggaatattaaataataaaaaaaaaaaaatctttgttatattttaaatgattgaaatgtagatgattatttcatttaaaaataagaggaaaaactatttaaaatttaaggttaaaaagagaaaaaattaataaattttttaagcatgttagttttttttttaggaaatattcctcttaactaaacatacttcaagagagctggccaaccaaagttatttaattagatctagactagagctgtagttttcattatttaataagaaaatatattgcaacgtaagtccactatatatagtataaggattaatggtgtagccatttcggtaacaaaacttgcttttctccaacgaggtccactgagacccactagccacgctttaaattcctagttccttatcgaatagatatatatcatattcgggccattagttaagtgaaattgggtatcagtgtgtctagcactctcctacatatcaatatcgttataagtccaactaagtatcgggtcccatataatttaatataatataccttttagggagtatcgttaaccaatcacaacgtgacatattgaggcaccactgatacctcatagcaatgctcattagttaattacacacacgcacgaacacaaaacacattaatatttatatatataataatgacgttattgtattattttgttacgattgttatataccagagccagaaataatgaattgcacctgtaaatgtaattagagaatttaacagcccttacaaccaaatatataaatgaggatgatttattggtctgttttcatgggcgaaacattattaataaatattctgtgcaggtaagggcggcaacagtgacggagggagtcattgagttagggctgtagccctcctagctcaaacaaaatttactactttatatatgttcggtaaaattaatacgtaagtatacgtaataaaatatagtatcgttctcacaataattaattattaattactaattgattaattttttatttttatttgattaataaaagtattagagaatattaagtaacacaaaataaataattaatatttaaaaataacaataataaaaataaggattattatgatcccaactatcctttattttattttttgatgtaattacttaatttttttcttcctattcaattgaaaagttgaattatattgtttataatctagttaagacttacaaactcaacctatatgaaaactctcaggattactatggtaaaatttaatcaaaagaaaatattaggcaaagtaattcataaaatcatacaaataatttagatactttcgtcctaagtcaatttgcatccataaatcaaatcatattcaaatctcactttttcaaattttgattcaaattcatagataacaattaaaggtgatcagtcaataattgtaaagttaaattagattgcatggaatttaaataagataagaagatgaaattgaataaggacattaatccataaaaaaaactcaagtgcttcacatgataattcttaaaaaaattagctattaaaagtattctaaaacaatagaaattatattaaaaacataaaagataaaaatagagaaaatagaacaatgtttggagtccttcaatggtgtcttctgctccaagttgtccttctatgttccaaattggtctctaaactcgaatgataaagaaaacctagctccaactcgttttatagacaaaatttgggaagtttcccctttttctttcgcaagaaccgcgacatttgatagagagttgcgactctctcatttttctgattttttgttgtgatgactgatagtatttagattataactctcttgatataactcaaaattggacaattcaagttgttttggaaagctgaaagagagatatagagcttttattcaaaaagtttttcctaaaagtgaatggatcatagtcaaacattcgctttaagctttagactttatttttgatcacaaacgaaacgtgttgaacatttaaaaatttagaatttttcacccattgtatcttacaactccaaaattcatgctaaattcataaaattcatattatttagcatattttctctcattttaacccacatgatatatttgaccattaaaacttgaaacaaaaagaaaacaaatgtaaacctgaaccaaaacaaatgaaaactactaaaacacatactaaaatagactgtaaaaatgtataaaaataaacctaacaaatttctttaaacttaacatttacttgccctcgagtgaagaccaagttaaactaacgaacaaaaaaaaaacaaacaaacaatgaacacacaaagtaagccaccattgccatatactacatccccttcctctgaaatcttaattgcaatttttaactaaattttcagctcaactgcctcaaagttaaacattaaagctcaattagagaaataaataataaatgaccccaatattttgactccaccatacatgttcatttcatagcaaacaattccacaaaccaatttttcaatatgcttacattatttaaccttctccactaatgtcaacaacaaatgttttgaagtcaaaaggactttaacaagttataacgtcatgataaaggttgataaaaatgtcatttatgctcaaccataccataagctttttacattttaaaaacttcaatttcatttcaaaattatccccaatccccacttaataatgcaatacaagagagagaatttttatttctttttactttgctttgtaatccatatgaagaattattttctatattttttttttgtttcttttgtttcttcttaattttttcttttaggtaattaaagaaaataattgcaacatattaaaacaaaaattctctctcattctttttttttttttgacgcggtgaacaaagtcacacatgattaaacaatgcagcaaaccacaattggccatggaacctcctcgaaccaggatagctcatcgtaatttctttttaagcctcctcaaaatacaatatccaattgtaatttcttccaaacttatatgaaactcatggtatagtcaggacaaagaaaagtaatacatgagtcaatttctctttactttttttagctcaaaaagtgtgtaacaaaaagaacaatcaatttaatgttcaaaaggggtaagctaagaataatcacaaaatatgttagtttgaaagatacaaacgttccaaaaaaattgcctaaattatttttcaaagcataagtcatcaatgatttcgcttcaaaggccaaacaatgcaagttctatcaaattcaaactatcataccaccaaccctaatcaagtatatataataaaatctaacatattttatttacgaaacatattaaaactttcccacacaaaacctttcaattaaactctaacactattaaagcacacagttattagcgatttctttttcataagtaaagcaatttaatatagacaaaaacaatgacttaacaacttaaaaacaaacattaacacaaacaacaaaacaacacaaaaaaaaataactaaaaattataagtccatcccccatactaaaaattcacattgttcccagtgtgacaacaagaacaaagagagagaacttacctcaagccacataagtacggcagtggatggtatgacggtaagatctttcaatatgttaaaccctcaaagtagtgtcgccgctctaccttctttctcaattgttttttttaaacgtatttcacaattcaagagattcaattacaaagaaataacttcaaaaattaaaactaaagtaaaaataaatattaaggaatccaacaatcaaaaataaattcaaactgaaaataacattaggttgtctcccaaaagcgcttactttaacgtctttagctagacactcaatgccatatagtgtcataagaagaagctcgtcttgtaccattggaaactttaaaattatccctaatatcatcaatgccttcaagttttccacagaacaatgacttcatatgacgccgaaaaaaatgagatcgtttcttggtcttcttctttctcctttttaatcttagaccatcatccactacttaaattctacaacaagtgggaatatcagttgttgcaaaaacattaaatgttacatcttctttttgcacctacaacttcaattcttccttttgtacatcaatcatcgctctccctgtggctaagaatggcctccctagtataattaggatatttgcatcttccttcatgtcaagaataatgaaatcaacaagaaatatgaatttaccaacctttactagaacctcctcaatcactcccctaggatgcttaacagagcaatccgccatttgtaaggagatagttgtagcgcaagcttcttccactttcagctttcgaaaaactaatagaggaattaaatttatactagcccccaataacacaaggcctttgttttagctaagcctcatatagagcatggaatattaaaactacccagatctttgagctttggatgtaatttttttttgcaagatagcattgcattccttagtaagtgctatagtctcatattcctccaatctccttttctttgataagatttccttcataaacttcacataacttagcatttgttcaattgccttggcaaaagatatgttaatgcgaagctttcaaaaaaatatcaagaaactttaaaaactgcttgtcaagtgtcttcttttaaagtcgttgaggatatggaatcttgatgtggtactcacaactaatctatggctattttttctcaaggttctcagtaaccttgtcttccactaaactatcattctgaacctcaatctttggtacaagaataggtttctttataggctcttttaactctttaccactatttagagtgattgcactgcaattttctttaggatttacctctgtattccttgataaatttccttgaggtctcttatgaagcatattagtcaatttccctatttgtgtatcaaaatttctgatggatgctcttgtctcagtcataaactaagtttggtgaaaataagcaaagcacatagtagatcaattgttggagcaggcggagcttctggattttgttgctaagaagtagaagcttagttttgattctgaaattgaggctactgcccctgattatttatccattcattgttgaattgcctctaaaaataggctatggcttgaacttgagtaggattcataagaatattattagttgatgtgcatttatcaaaagtatgaggacctcaactcatttcacaaccagtttgagcttggatagcgttaatagctacggttgtttgcgcaactttttaagtgagagtagcaacctgagcagtcaaagcgaaaatcacatctaattcatacatttcagttattttcttcttcccagatgctctctcatcagaccactgatgattattcatagacatatcttctaaaagttcataggctccagttgcgctcttactcatgaatgtgcctccagaagcaacatcaataattaatagttctacttgtgggacacaaactattataaaaattttaaattaacatccacttctcaatgcaatggcttggatattttctcaacagttccttaaatcgctcccaagcctcatatagagattctccatcattctagcaaaaattattaatttctcccctcagtttagcagcattagatggagggaaaagtttagacaaaattttttgagccaaatcttcccaagtaacaatagaattcagttgaaaggaactaagacaactttttgctcttttcctcaaagaaaatgggaaaggcctaagtttaattacatcatgactcactccttcgtatttaaaagtaccacaaagccacagaaaattagacagatgagagtgaggatcttcagtcgacaatccactaaactgaaaagaagaatgcaccatttgtaaaatagttggcttaattttaaagttattggcttcaactgctggtgaacttctacagttttgtaacctcgtcagagtgggcagtacatagtctattaggctcctttcaacattattctgagcttgacccccttgtacaactacaggaatgagatcattcctataatccccatcattttgtgccatcaccccagacttctggattttcctcttgttctttcaattttgcttacaagacttctcagtcttaggattcaaagatgcaagattgttagctcctcttttgctacacatataaaaattcacttaagataggcaaaaggagcaactaaacaagttagagacaagagcaaaagaaatcaaattagaataaaaattaattagactgatattcataatttttcaatctccggcaataacgtccaaaacttgttcggtaaaattgatacacaagtatacgcaatcgaactaagtaataatgataaaatagagtatcattcccgcgatcattgattatcaactaccaattagttaattatcttctttctgtttaattaataaaaatattggagaaaagtaaataacacaaaacaaataattaaaatttaagaaataacaatgataaaattaagaattattatgatccccaattatcctttattttatttcttaatgcaattatccaatttctcttcttcatattcaattaacaagttgaattaagtagtttataatctgattaagacttacaaacccaatctacgtgaaagctccctatattcctatggtaaagtttaatcacaaagaaagcattaagcaaaacaactcataaaatcatacaaataatatagatactttcgtcctaaatcaatttgcatccatgacaatcaaaacataatcaaatctcactttccagaattttaattcgaattcatagataacaattaaaggtgatcactcaataattataaaattaaatcagattgtatggaattaaaaaaaaagagaagaagatgaaattaaataactacattaatctataaaataaactcaagtgctttccataataatccttaaaaaatattagttattgaaagtcattctaaaacaaaaaaaaaattaattaaaaacatacaagataaagatagaggagatagaacactgtttggagtcctccaatagtgtcttctgctccaaactgtccttctatgctccaaattagcctccaagtttaaatgataaaggaaacctagctccaactcattttatagaaaaaatttaggaagttttctatttttttcgcaagatccgcggcattggatagagagttgtgattctcttgtttttctgatttcctattgcgatgaatgatagtattttggtcattaccctcttgatataactttgaattggccaattcaagatatttcggaaagatgaaagagagatctaaaacttttattcataaagtttttcctggaagtgaatagaacatagtaaaaaattggcttaaagtttcagactatattttcgatcacaaacggagcgtgttgaacatcctaaacttagaatttttcacccattgtattttacaattccaaaattcatgctaaatccatataatttatatatttagcatatgttctctcattttaacccacatgatatatttggccactaaaacttaaaataaaaagaaaacaaacgtaaacttgaacaaaaacaaataaaaactactaaaacacatactaaaatggactctaaaaatgcataaaaataaatgtaaatatgtaaaaaaaaaaaaaaactatgtatagttattggtaaatgggtcaaatacgataacatgactcgaaactcgcattaaataaatgggtttgaattttctttaaataagtttggatcattttcgagttaacacggctaacctattttttaaacatgtcatttcgagttgacacgcctaacccaaaaataattggacaatgacctactcaaaatgtacacaactatatatttattataatttattatatataaattatattgagttagttaagtaggagatatatgttaaataactcataaatatatcatagagtcataaataggttaaacattttataaacatatcagggttcgtttggtacgccgtattgtannnnnnnnnnnnnnnnnnnnttggattgtgttgtattgtattgta

SEQ ID NO: 161667 - DNA, 4537 bp, Cannabis sativa
aaagagtttaagttatacttaaatgtatgtaactaaggggatccccgaattcagtaatgttttgaaaaagagtttaagttatacttaaatttattttctagaagttttaattaaataccattttcttcctaaaatcattagttcattattataaactaaattataaaagcacacacttggtgtccttacaagttagggcgttacaacaaagctcaaaagtgaatctttttcatcatgaaatcatacattatgcatcctaaaactatcatgtggataaatacaaacaatactacaatctaacgtgagaatcaagaatgtaaaaagcttgaacacaacaatggaaaattcaagaaaaaaagtagagaataggatttgaaagctcactcaatagtgaaaacttttgaggaagcctatgggaagcttaaacaaagcaagaatatctggattcgggggacttaggggcatcaggctccaagggaagtgaagagcttctctttttcctttcttgaagagagagagtataagtggtgatatgagaatgtgctttaccaaatagccttaaataggttttggtgagcccttttcatccaacatgcaacaagcagttatagaacttgcaaaataaccatgtagaatattatcagttccctaccggggaatgtgagcaaccaaaaaatattttataactaaaattgttacataaacctgcctagttgagacttcaataatcaaaattgaagttagaaagtccctattcggacttgggggtaaatgttatcccaatttttacccaaatgatgtggtttgtccacacaggcaagattgaagccacgtggagtacaacttgttagcaagaagaccaagtaaccatgcacaacataccagttgtcgaagagtccaaatacttaagcagaacaaagagacaacaaactagccaactaggggtcaggtttgaccacccctggccgaccctagtgccaacataggccgacaaacctccaacaaatgataggtcgaccaacctctcttctggtaggaacttatggtgtctctgtagctttcagcctggacaatacttttagctacgaattagcctcaaacaacccacaaaaataggggtttaacttcagttatttacctattccttaggactaattaacaagttattctattatttatttaattggtgatatctccttattttaagggatatcaacctactatctcttgtatgctctctcatgtatagagagcactaaactaaacctgaaagctctaagccttaagttttgaagcctaagttctcattcctaagctattgaaaccctatatcaccctctcttctacacaccattagtagtgtagaagaggctaagtctccctcatctcatctacttgagaacttcctcccattctcactattttaatcttaagaaaaccactctagaatccacaacgtttgtgatctgagtggtattatctctcatatcaaatacaactaaaaaggggagtaggtcgttacccgctaactaaggggcccgaacctctataaaattattgtgtcctttttatttaattgttctcgttgtttacacgtggtgatttcaatcataaacacgactctgctgttagttgaccaaattctaggtcaacaacacgctctttatattttgtttttatttttctgcatgttggggcgacatttaagagcctttccctaggcttctattatccttcttccttttctctttttggacatactttgataagtacattttatgggcatctatgagtacatatgtttaatgatgctttgctatttttgcttatgcatatatgcctcactacccggtaagtgagttaaattttgggtcacttagtctgaattcaaaaggataatatactacattatgtttttagtttgaaaaaggtattcttaacttgaaaatttaaagatgaaattaaataccaagctcctaactattgatagtacttacgaaggtgattgacattccatgctcttgggattagggatccatccatatgctttagcttgtaggtccaaaagcctatttcatcttcaattttttatggtccttcccaatttgggtctagtacccccactttcggatcttgggaagtaggaaatactctccttaggaccagttctccaattacaaactttcggtctttgacttttaagttgcattcttttgccacctttctttagtatgctgccaggcatatctgggactcctcctggagttcttctacaagatttagtgactctcgtagcaatgcttagtttttggctggtcagaagtagttcttctatgggaggggactatattctccacagggaccatggcttcacatccataaaccattaaaaattgagaatgtccaatggtggtctgggcagtggttctgtatgcccagagtactcgtggcaactcattcggtcaatttttttttacagtaagagttttttcttgagggtgacttttaatatattttgttcacaacttctacttgaccattcatttggggtcttgccactgcggataaacttttaataactctgtatatctcgcaacactctgtgaatgcatgcacaataaaattgcttgccattgtctaagattatcttatggggtagtctgtaccgaaagacaatgttttttattacaaaatccaaggctttcttggccatcattgatttcattggctccgcttccgtccattttatgaagtaatctactgcaactattacatacttgactctaccttttcccatcacgagagacctaatgagatcagtaccctatactgcggaggtctaagggctcgtcatcaaagtgatttcattcagaggagcctttaggatgtttgtgaacctttgacatgggtcacacttttgactgtagtctacgcaatctttcttcatagtgagctaaaagtagccttgtcttaaaactttcttagagaggcttggacccccaatgtggtgtccgcaaaatccttcatggattacttgtatgatttgtttagcttcagagtccgagatgcatcttaagcatggcacgcttaaacctctctagtagaggatgccttcgattatgaggtaatggagggattgataatggatcctcctggaggcttcccggccttagggtaactctctctttgttaaatagttgataatcaaatccatccaacctgatacttgatcagtttccacaagatacttggctctgggaggtactcgataggaactacccccagtttttccatttcttgttcttatgttagcttggctaggcagtctgcatgagcattcttttctcgaggaatttgttcaatttgtaaggaattcccttgcggcaaagacataagcaaccatcttttctttgcgattttgatattctccaaacaattggttgacaaccaattaggaatcactgaagacttctattctttgggctctcataagtttagccactttcaaccctgctagtagggcttcatacttaacttcattattaaaaattagaaatttgaatcactaggtagcttgaagcctcaacccttctggaggtatcattgctatccctgctcctactccattctcatttgacgcaccatccacatataccttccatgtgggagtaactaggtctggtaagtccacaatttcgtccttttcattgcattcaaccatgaaatctgtcagagctttcctttaatcaagacgcgaggggcatactatatgtcaaattggctaagttccatttcccacttaaggagtcttttggtttccagaggacttgccagagcaaatggttggtgaacactttaatagaatgtgccttaaagtgtagccacaacttccttgatgcaattaggaggcagaaggctacttctcaatcaaagggtactgaacttctgcccctaccattcgtttgctgacgtaatacacaaggtgctaaattttttcttcctctggaccaaagcagcactaactgcgttctcaaagatagccaaatataagtacagatcttccatatgtaatgatttggataggacaggtggcttggccatatgttcttttagttttctgaatgcttcttcgcattcttcggtccattcaaacttttgactattcttcaaaatgttaaggaacagcacacacttgtgggtagatttggagatgaattggctcaaagcagctatttattccattaagctctacatattcttatgcttcttgggagaaggcatgtctaacaaggcctgtattttctctagatttgcttctatccctcgttggcttactatgaatcttagaaatttcctaaatttgacattgaaagtgaactttatgggattgagcttcatcctgtatttcctcaccacttcgaaacactctttaagatcataagagtgatttttattagttttggacttaactagtatgtgttggaaatattttagcaagatttaggatttactaccatgtatgtttcattaacatcct

SEQ ID NO: 161668 - DNA, 5901 bp, Cannabis sativa
aaaaaaaaaaaaaaaagaagcgtattcgccttaaaaatctgaaatttgcacatttttctttaaaaaattataatctatgctcaatagtttaatgatagtctcatagaaacatgatgtgaatctactaatatttagcaatagtttatgatgctcgcatgaaaattttattttaggccaaaaaggatgcttgatgatgattctattagaacatatttttagggaaaagaagaaaaagaaatgatgctcaacagtaaaagattgtagcgaagcgaggcataactttttaattggttgtcggttcgaagtaattcttttgtgttggtattttttttctaaatgaacacataaaatgtagaacatcgaatttgaggtgtagagcaacaaatttctggatctgtcctcttgataccaatcaaactttttaagttatgcacactctaaatttaaagttataaggattttaaacgtataaacccgaaaaagaaaatcctataattagctatcgaatgaaaagttatgcctcgtcaaagattttatcaaaatttgattgcaaaccactgtgtattattgcaaaaccatctttaaatattttctttttgcttaaaaaatacatttgcatgtgaccatcattaaagtaccgtcaaaacttgacgtaatatttagtttaaaattaagatttcatgtgatcatcgttaaatatcgcaaaattatttttacgcatcaatttgttttggtgccaaaaatcatgttttatgggaccatttttttttttattaatcatcactttctggcctaaaatagattttcaagaccaacgctaaatcactgtcaagaatcaatttgtatttttttttctaatttcttttttaaaaaaattacaaatctaaaaaaaatgagcaaaagtaatttctacacattaaatcactgtcaagaatcaacttattattttttttctaaatgaatgtttctcatagatttaaattttagattgaatttttaattaattagagttaggacaagtagtgattaaagtgtatagagttccatctataaatcaactgataagaaaagtgggccatttatcttatatatgactttttatttttacacattaacaatgtgagactaactctaatataataattaatatatataacgacgagtgaagatggcattaataactagagaggcgatggaggacggcgaggtttaggtctcaccttttaaaatggttaaagatgtgagggagatgaaagaaacaaaaaggttagagagagtagtttgaatgagatgggtattattgtcaaaccagacagttggtatattatgtcaactttaaattatgttggtaacttggcatattctttgtcacaacccgagccctagggcgtgataaatatgttatatctataacttacactttgaccttgtaaaaaattattacttataaatgatattttaatttatattacaaaatatgtatttaaaaataatataataacttttataattataaagtaaacattcctaacaaaattaagatcattcattaatataaaagaactatgataatatccctacagtcatatagtcaccgaatagatagatttaataagtcaataaacactacaataatatctaatatccatcactcctcatttctaactaatacatagctaatttaagtaattcaaaccatctattaaagcttaaatacaagatcagttttcaatggaaagtttgaaaaataggataagactaaactaataacgactttcttcctcaatgataccatcctcttcgactagcttcaaactgagttcctgaaatgagaaaaaatagagagtgagcttataaagcccagtaggaaaacaactaatatcaaatgaccctttatttaaataaaaatttctgcatggatagcttttaaaaataaaacagctcatcaccatagcaatgcacattaactattggtggtggtagaaattggtgtaccgaaaaagctaaaaataggaatattatatatcaaaacgactacatcggcgagtaaattacatccatcccaaccatttatcaaaacggtacacgacatcaccaaaaagttgccaaaaaaggatggagctacaaaaacgttaccgaaaaaaaatatcatatttaactctgatgtctttctaaatcccatatttaatgttttaaatcttgtttctctttgtttgaagcataaactagagaagccaaatgaactgatttttttatcaaaaaacttgttttgaatacatagaaaaaaatttatacacaagtttttaaatttttatggtattacttcttatctatgatgatttcatcaaaaaaaccgattttttcatcaaaaaactaatttgtttatcaagaaattgattttgattatataaaagtaaaatttatatacgaatttttaaattttatagtatttcttcttatgatgatttattccatatttttaaattcttatctataatatgcaattaatttgcatgccatattttagcaaaaaaaaataagattacatgctatatatatatcaaaacttttctattttttttccgtaaatatcccaagaataaataattacactaggggcccaataattgttcctgtgatggtgtgtaatattacaacaaaaaacaaatgacaatcaatcacattctttgaaaaattatgtgttagaccactatatatgtgatttcagagaggaatagcagaaacaattggtctactactcttgcctttagatattctagaacagaacatgaacatcaaaagcacagaggataacaaaaagagcctaaaatatgttcttatctcttgcatcccaagctcaaagacctctttcttcttcccatatctactactcctctccattaaatatccgtcaagatactcatctatagatacccacttttccaatttggatacagaagccttgtacgggacttcgccaatctgttgtggcgctaatttaaagactgttaaaaatgccgcagaccaatcattgagaactctctgaaactcaaaaaaacaatccaatgttaaacctctgttcaactcctaataaagaacaataactctagagattttagtgtggagcatacattgaatgtaccgaaatcagtggggttaaacattttaaagcaatcttttgttgaagccgtttcatcaccgtaaatctgttagacaaaaagaatgaagatgatcagctaaatgagaagtgtgccaactttgaataaatttgaaaggatcaaaaaacttgacaaacctcaaaggtaaaagccattggcacatttacaatgtcatacataaaatcagttgctgttccatgagccaagtacctataatatgggacataagataaccccattaagttctaacttaaagaatgaacaaaggcataaaaataatgaaactaagatccacgcctaaccctatatgtgggagcaaagtacatgtctaattatttgagctaccctttttgagtaaaataatggcaagtattattacccaacagagcccccaccagatccaatcatgcaacgttggtggcaatgaagaaggttcacgttctcaagcaacgacttcattctctctgacatgactccatcaggcgttctgtttttatgatcataaggcataaacaatgcctggaagaaagagaatttaaaaaaaacaattggtgatgtgatcatgcaatatttaccaaaatggaaaacaaaacacatgaaaagaaagatggttgaccagagatgatacatcataatcatttacctccattccggaatgcacattaacccatatatgtggatcaaatgacagggcaagtttccgcattatttgagtttcaggctcactaaatggtgcaattccaggattttcctcatatggatcaaaatcctgtgagggtacaacatgaaagatgaatccaaacggttatgagcatgatctagtgcatattttaggtctttaaactagaaaacaaaagggttttagtaatacgacaagcttagcagacctcttctttttttccccaatctacgctccaatttcggttgagatcaacacctcttcctgccacaacaaagaaatcctcaaaaattacattcattcacaaattaatatttctttcaagatgattacagcaaactagctcaccatttcttctctcacaaagatctcccgattcaacaagttcacgaccattcaaattttccatggggaccacctaatatatcattagatatcagagttcaaacagtaacaaagtcacaaatacaagaataaaatagttacattacgaaaaaaaaactgctttaatgacctcttcttatcattgtaaagaatggatcatcaaatatcagccaacttcttggcaaacaatttacatcgccaaggagaacaaaaacaaacaatttgctgctacctagattctaagtatggaaaacacttttcgaagtcgtagaagtagaagagaagttaccttaatgatgagcttatcaagagtgctatttaagaaatctgaatccatgttaggtagaaagtgttccccactcaagactgagaggatcctcaacgcaagttcagatgtaataagctctcttccatgctgcccaaaactctggaagacaaggaatcatctgtcaaaaacaacagccattacaaatctgagattatctacacagtatatccacaactagtccctgatgtaaattctaatcaatttctctaaagtcggttaaaaatatacatatatctacacacacaatgaactgttggagtacttacaagaaggattcggtactttgatctatcatcattctccttccttctcctgccgtatgtcacaactgcaacctcagcctggtaccctttgtttctagatgtaaccgtttccaactgttttgaacacaagaacaattataattgctgtgtagtatgaactcaaatctcaggccaatcatttgaactattagagtctgattcaaacatatagtaaaaaaactaattcaaatacaatttatagattatacaacatacactaagtttgtttggatgacgatgcactaaaccctttatctctttcatcaaattctcactgcaaaaggaaaaaaaaatcccatattagaacctcaaagaactagacccaaagtaaatttgattcgaattatagctaactgaaatcaacaacacattcagcttccgaatctaaacctttcactcgaattttatggatctccacacaaatcacaaagaaatgattttttgaaacaaagcttagattatatatataaataaaaaagatttacctggaatggtagagatcgtggttgatgtgggtgagatcgggtttagcatggacaacccaaaaagcttgtaaggaaaacaaaacacaaagacccaaagagaagccagaagcgtagaggagaaaacggagacgacccatatgagagagtcgaagaagaactagagatacaggtcaagattcgattttggtctaattcttacaataatatcaccatgggattggcgatgtcgtggtgtcgatccatttggttgtggaagtttttccattggtttttccaagtttcaaactttatgcttggattcgatgtctggtgagagaggatgcttcgatgtttccacgttcaacggtctcgatagctccattcaccaatcggattgtgcttgggttgggcccattcttactgactcaatattcttcccttccggaccattggaggcccatgggcccctactcgttgggccaccacatatgttccaataacttcttgtatttatttatgggataatttcaaaaagtttaattagtaatttttttccttaaattttgatatgtactaaattgtgtcc

SEQ ID NO: 161669 - DNA, 6022 bp, Cannabis sativa
ctctctctctctctctctccctgtgcctttaatggttctcattcagttttggatatacacaatgcattatgttctttcaattttgtttttcttttagttaccatgataatgattccatgttctgataaaagcccattaatgaatttggtatttagtccatggaagtacttgtttaaatgatatgtgttaagttatttgttgtattctgtatccaagcttcggtttttttgctctaatatttagttgaatttatttgtttatgatgttaaaaaacagctcattatgatcacacccattttgtaaaaatccaatcttgcttgatgctcaactcattggcttgagtcatttttcttttctttgtttgagaatgagtttacaagtattgagagttatagctgattaatggcactctttatttcagggaattcccaaagttaaattaagtcgtgaagagtttgtggcagcattgcttgatagaagatggacattgccaaaacctgataccaaaatccagcaaataatattatcttcaaagaaagtaacacacccttttcttgaaatgattgagaaggaaagccaagaaccatctttctatgttgtgagggatgatttgttgcatccattagtaaatggcaataaatcaagaaaattggatgcattgtttcctcttgtggaagatcatttggtgacagatgtggtgagttttaatgttttacttcgaaactaggctcccgcctgatcctgtagtacaataaaattataacaattgctgtgcagtgtaagtatccaacacggactcgaaccttatttgagttatccctcttgtatttttaattttaccacagaccatgtgaatctggggtacatcttcagagtgaagaatgtcagcataagctaataagcttaacttttaaagaacttactttaaagaaaacagcagattatttcattatgtactatctgctttgtatgtttgaataatttttgttttatagtgactgttacatcagtaataatttgatggaggaaatgttgtttagattgatctgacttcaaagttctagtgctggactttacatctttaaatgaattgtatcctttttaggctgttccctagtgagtcataactatttattcttctactcttctttttactttgttgaatcccaatactattcagcattgtcttatagtgttgcaatttgttccaggttacatgtggagggtgtcaaagtgcacacgcagcagcagtaggttggtacttcgtcgctgcagttactggaggcttactttattacaatgaggcatgagaagtgttggctactaagtgattgtctttgcctatatttcagctgtttcttgtgcagagagaggaataaagtcacatttgcttttacgcggggagcagcctgaaattcagacgggctataacttgatatcgtcattatatggaaatgtaacttacattccaagatctgtatatgctgacagaacaaagatgctaaagagccatgctgattatgtggcaggaagtagtggccatgttcttaggtttgatgatattttggaggcttctctaactcaaaacaatttaagttcagaatctgcacaaaaagaagcttgtaaagatgacaatacaagaagggttgttattgttagtgaaggtgctggggatgttgtagctttactaggtaattggaagtgtttttactttcactatatattcttttgtagaaaaataatacccttttatgattgtgtaaggaaaactgattattgtcattggaagcttaccataacatggtttcattttcataggttcaattcgtctagtgcagtatttatctcaagatcacttatttggaaaagaaaaggcattgaaacttgttgtagatgctggaactgggacaacagctgttggtttaggaattggaacaatttgcttagggtgtgtactagttgaattttatgttcttaaaattgaagcatatcatatcatattttgacaatatttctggtttttgattcatgtcaggctcccatgggagatcactgctgtaatgctagctgatacaattgagggttaccgacaacaagagaaacacttgatttccaatttcaagaggcattttgatttggattccataggaattggattggatgatattctagagaatggtattgtggattgggtagaacgtcacaatccgcgaaagtaagcttctcttcatcttctaagtttgcagtactcttgatagttgtttcctataatcttcacagctaaactagctttctttttttaacctttggttatggaatcaattcatcaagttctaataaatctttagtgggttatgaatatctaaatttcgatagagacactgcagaaaatttctatccaatcgtttgagctaaaataggaagtgcagtgtgtaagaaatttataaaatactaagatacaatattgcatacagatacaatttataacactatatatgagtaatttaatgatatagaaaatatatctcatttatctattgagataattgagaaatactggagattggtagtgtaatactaacctactaagtcttcctcccaagatctataaattagaagcaaattatgtaattaaccaaaagcatccaattgtgacgagacaatatgtaattataaagttagagaggggacaattgtgatgagaaaataataaccaactaagtcttcctcctaagatctctaaattagaagcagattatgcgatcaaccaaaagcatacaattgtgatgagactatatgtagctataaagttagggagagaacttaacaataaaactccaaaagagcaaaaaaaaaaaaaaactatttatcaacccatattgtagtaaaacaattaaaatgttaatgtaaatccaaaataaaagtcttacacaatgaaccttagataaacccaatccctccttaaatgctctatttttaaagtaagagagctcatcacacttagcaagctgttcatgtgattttttggaaataataatgttaaatgttttgtttggtgaagaattgtttagtaagagctattctagggatgttctttaatttctagccaaatttagctaagctgatttagggagctccttatttttttttttcttttcaagttcagtcatatttcttatttaagctaacaaagttcactccactccctattttagctaaaagggttagataggaagttcctttgaattgatctaatttagattatttttcttatttaataaattttgtattttggtaaagtattgtggggaacaccttatgctctttcataaaatttagggagtggttgaagtactctacaccctaaagtccacttctttctttattttgctaaaaagattggttatggagctcttttgaagttgccctaaattgcgctatcattttaattttaatttaatagcataaaatgtttatcaccttacattcagtctatatttttacttgtatttcattcatgcataattttgatccacacccatctttaatttattctattttattttgtttgcaatactctctaaaaataataattataatttaaaaataaaaaattaaaaaaaaataacatcaatcactgttagccagaataaagatatagttaaaataaaggttagcaccaagctattttcagttagaatttgactgaagatttaaggagcaagcttagagtagctctaatctagtgtaattgacttgtgctatgcttatgatgattccttactaaagaaaaggtcaaactatctttacttttattatctagcatttgatatacttgtttaataaaatgacataaagcacaagttaagacaagacatacatatttgctacttttccataaattgagtttatattttacattttacaagaccacactgatctgatctgtgtctcagatttggaaatgtattgaaaggggagatagaggcctgccaagacatagcacagacaactggtgtcctacttgatcccatgtatactctttctgcttgggaaatggcaacaacactcagtcaaaaggaaactaaaagggacaccaaagtggtaatgcttcacattggaggcactttgggcatgtttggattagcacagaggtatagatcatacttttctaatctcaaatcataaactcatttagagagacacaaacacagattccatataactaacatgttttttcacctcttaattaacatgtcattaattattttcagtacaaaatagtttaggattccaattctaaccaaaagaaaagcaagcctagttaaataataacaatgaaaccagaattgtatgatcacttaaaaggaatttgggagttggtatccttgttcttatggaacttgtttgttgtttattcataatcgtttgtaatggactttgttctttgtttttatatatgaaaatatatttatatatattatgcaactccaacaggagtataaagccagaggaacttttgtgtagccatctggggttatggttaagagtgccaaagtgggaaaaggccactcatattatccattaaactttcctctttctccatataataatgaactttacttcactaattttatccaactattaaggaagtttggtccagaagtgaacagaccaaaacataaataaatatctcaacatataaaattcaaatttatatgataatttaaggttctcctacccacctagtgctgctagtgagattctgtttccaaaccccaaaatggaaatattcaaactataatttatatatgtaataagtataataatataacattggaatccactccttcccatatggatgaatagtagagtggttaaaaaagaaaaaagaagaaaaaagagactagaataatgttttgtccaaataagaaaatgggtaaaaagtgaagagaggttgtctcattacacaaaagtttatttaaagcgtaaccattggtgctgacctaaccgtaacatgagatgtcgacttgcgaataattagtgattttttcataattatttttaaaattaaattatataaaacttaatacttaaaacatatctaatagaatatagtatagagatgctttaaagaatgacaaatgttatatgtttaaattggttcaattgtatctttttttgttaccaagttcaattgtatctaataattaaacataatattatccctttattataattagagattgctaaaaagtattagtggtacctagcactctcatcgctcttattagtataattaagtatcggatcccatataacttaagaaaatattttttttaaggaaatatcgttaactaattgtggagcgatacctagaaaatgttaggcaccattagtacccaataataatgttcttataattatgccatctcaataaaattattgctactaattatttattttattgctgaattaatattaaaagaaccctattaagaataaaataatcactacaaatatgtgtaattgctcaaaaaaaaaaaaatgcattttagaggggaaaaaaggccaacaaccttagcattattgtttatttatctggtaaggagaaacaaaagttatttattttgttaagttttttttttaataatatttgattattgtaaaacatttttatttaagtaaataaatatttttagtcaataacgtttttagttagaaaaaaaaaagaagatgtttttcttttagaaaaaaaatatattttttttatttgaatagaatgagccaatttcattaaataacaacgtgacaattgatagcagaaataaataattttaatttaaaataatttaatttttattttattatttactaaattaattttttttatgcggtgatcaaaatcacacatgattaatattgcagcaatccacaaacagcggcaacatttctttgaaccaagatagctcatcgtctaaccgaagggcatattttgtcaaaccatgcgctgcaaaattct

SEQ ID NO: 161670 - DNA, 1749 bp, Cannabis sativa
ctcaccaccaatatgttttatttggaaagtaaagtctttctttttctctttcatctattatagaaattggtcgttatgtatcagtctgattaaatattcttaaagttatgatggacttggtgtttggattgagcatgttctctctcaggtagctgcattccagcccttagtacttcttcacagtatgattttctattaggagctaagtaaaatgaaatatatttcctaaggtaactgtgatgactcatttgatgtttattcctgcgattaagataagtggtaattctcttcaagcaggtaaagcgtcttcttgataatggaatggacgtgaatgtgccaacttggggccccaaatcgaaaggggcaactcctctccatttggctgccgagggtggccacctttcagttatggacgaactacttgagcgtggagcaaatattgatgctagaactaagggtgcctgtggatgtgagtgttttcatgaagtttttctttctctcctccccctctcccctcctccttctgtttaaatatttgtaaggttatatctaattattatcactgtcaccctctcgatgccaaattagggactccacttcacaatgcagccaaagaacggaggagagcagcggtgaagtttttagttgagaatggagcattcttaccacccgatattaatgattgcaggttcaaccccccacttcattattgtcccggccttgactgggcatatgaggagttggaacgtctacaacaagagagcttgtcttctggggaaacttcttccagctctgaaggctaaattacaatgctttaatagtttgttgatttatctggatcctttgggttcgcttggtgctgttatgttgtaactattgaatataccatactacttgttactgtgttcattgttgttgtggtgtcgttttgtggttgtttgggaatgacaacttttattttaatggagtagtacgagtgatgagtcttgtcatatttacaaacctggttacagttggctgacctgcagtacactacacagcctcccttgcaagttaagggcacatttgttatgcagggttgtgttgaattatgttattattatattattatgtttgatgtttggtgtaggatagaagttggaatagtaaataaatgccatcacctaaggatgccgggcacccatgtataccctatagcatttttcctaaatggagcataaactttatttatttatttattttaaaaaatatatatattttttttgctcactaatggaatactcttttatttggctttcatacatattagaatttgtaagttttaggatgaaaatagggatgagtgagtgtatggtaagatgtatagttgttaatacttgttggtgcggttcatattttaaaaagcttgcaatcatatgtattgtcatgttgacttgtgttatgtcaatattttaaagtgcaagtctgacatgacctaattcgaactcgagtcgcggtttattcgagctgatccttttgttttttacgggtcaaacttgggttttactttttattatattttatttttacaagtgagttgattattaaattatatgtacttttttttttcataattctaattgtttttaaacaatttttttttaataatactacataatcatataaaaaaaaattagaacgattaaaattcaaatatttattattaaataatagaaatttttataccaaaaatttaatttacacaattta

SEQ ID NO: 161671 - DNA, 4258 bp, Cannabis sativa
atgaagctgaggaataggaatatagcttatattttagttacaagaaaagaaaataaccaaaatattttcccaatttttctgttaaaaaaataaaaatcatttatttttggaagctattctctctcttcctcaagctcaaccatcatcatcaatggcttcttaagcttcttctttcctattccccaaactgtggagaagtgatgaagctctctcttaagctccaaggcgaccaccatgaccagaccaccctccttcatcaccaaacccctctggtaacagccaaggtacccatttccattttcaaccaaccattcctcacctccgtctccacaaccccaaccgccacgaccacctcaccctcttctcacctctctttctctctctcatccttcttcaaatctggtccttctatcaagttcacctattctcccacctccgccatttccccacctttctctctttccctcaagtccggtctcggcctattcggatcagcagaccagtcccctctcgttttcaaagcccacttcaatttttcctcaaccaatccctctttctctctccatttcaaaccccagttcggaaatttctctctcaggaagaccactttctcaaaccctaatggcggcgatcgagtttctggtgggtctgccttcgttcgggatatccctttggattctggtgtgtcgggagatgggtttgttcccggaggatcttctgggtggcaggagctgaaattggagccttgtagtggcaaaattggggttgattctgatgagggtaagtctgaaaggtctctttcatggaaggagcctgaaaaagatagcttttttactgggatagctgtaatggcgaagactctgttgccggtgactaaaggggtgtcaatgaatatgagatggggtgtgggtttaccctcgaatttgggatcgaaattgccttgtttgactttgaataaaattgggattgagagagttgaggaggaaagtgaagaggagaagaataataagaataagagcaagaaaaagagtgaggagagtactgtgagtgatttggagttgttgaaaggtatgtgtttttggatgaaaagggatttggagttgttggagaaagagaataatgagatgaagcaaagcttggagaaaatgaagtttggagcttctggcaaacattttcgaggtgggagtgataatggcgggaaggtaatgcagttgtcttcaggggagagcactagcgggtttgagcagtggaagaagaataaaaagacttctaaagatgagaatggtaaaagagatttgaagaattgtgctaccactcagacgagtgacttggaatctgaattggagaaggctatcaaggctgcttcatcttcttgaggtggggtagttatataatcttgagttttattctttaataagttttaattgtatatgaaaaaaaaaaactaaactttagagtcgataaagatcagggtactcagatgcaatgattgggttggtggggtttgttcatacattaataaagggtagtgtaattgtaacctatagaatgaaaatggaataggggaaatctttgcaatggtcgcagccattgattccacatttcattttttttcaaatgctcttaatgtatgaacaatttgtttttaatgttatggttttgctgtgttttttagttttggtttaatttattcaaatttatatgagggattttactcttgtgcatacatctgcatagaaagatgagtctttaaggcgaacggttatggaaattaaactttacattctctgtagttttgttaaaactcttataagtcactataatatgggctggtatagctgctggatgcttgtaggaaaatttcaacgaaacaaccaaggaaaaatgtaagaacttgataaatacttctgtccctttcttttattttatattttgtatatgtgatatatgttgaatcacattcaactcaacatttcatggtaggttacatagtgatgaatatttatcaactgcccattaatttttcttgtatttttaggtttttgtataagaaagtttccatgtcaatctatagcttagcatataggatatgggttatgtacctccttttaataaaagagtgtaattctatggaatgtagctactactttctggtttatttgtgggataaaattagatagtgcttgtttattgatttattgttttttctggaattttttgtctattaaatgtatctatgaaaataaatttgatgaaattttattttatgattttgtgagatcatgttgatgcaatttttctttttttcttttttcccaaaacatactctctattctagatgacatgatagacaaaaaccaactatctatccccattagcagagaaaaaattgcacacgttttgtctcattaaacttagacttcaatctctctaatctcaattttagagaaacaatggtgcccaactgcagaagtggtctttgccctcttactattatcaggtaaattaaaacttttctttttgcctatattcatttacatttttttgggggaagtctttgctaggggagtttttcttctttgattattattgtatatgaatttgaactttattagcagcataaaattattgtattattctaagtgctctgaaattttgaaatcccccttctttggtggtacttagtgatgtacttcagggaactatagtttctcatataaattattagttggtaatattctggcttgagtttccatgagatctctcctgtaagaacaatgaatttcctagggaaaaataaatatttgaataacaaatcacagggtaaaaaaaaaaagagaagatgataaaatatataaattacaataaaaagagactatatatatacatatatttatatagaaaaagagattacacttattgatgaatttgtgagtcttttccaactcaagtacatccacatttgtgttttatgtatctttgttctatgtaatttattgatttgtggtttatgtgccagcacaagatcactgttttattttcaattgttacacttacaggtgtatgaatattttttgttatccctctcttgtttgatttacttatttaaaaatgcttttcttgtctaaacagaaaaagttctaatttttgaaaatattaataataccaacaccaccacctactagtttcaaataaattaatcttgaagctagattgtctacgaaatatatcaaatttattttccagatggagtgagaatgcaggtttgagccaaagaaactaaagctattaagttgaataaaacaacattgatactaaaattattacctatgaatcatgatccttattacattaagaagaaattatatataaatattaataaagataaatggcagcataaagatgaacactttggaagtacaatatactggatgatagtgtcgtttgctttgttgcatgaaaggatggagtagatttacactttcatgttctgtatgtgacaaactatgaactaacaaaagtgggtgtatgttgcaggcttgtaaaactttgtatacagaggcaaattaaaaacaaaacagacattttttgtttaataattatgctgcgccgtttagtagccttggaagattggtggtggtggggatgcatactggaacccaaaggttggtggtagaatcaactcatctggaggtggtggtggtggtgagaatgttgaatgatgaggaggagttgaaggagatggggaaggtggtggtggagattgaattggtggaggtggtgagggaacttgtcggggtggtggagagtggactggtggtggtggtggtgaatgtactggtggaggtggagagcggattggtggtggtggagaatggactggtggaggtggagaatggactggtggtggtggtgaatggactggtggaggtggagagtggactggtggtggtggtggtgaatgaactggtggaggtggagaatggactggtggtggtggtggtgagtggactggtggaggtggagattgtaccggtggtggtggtgaatggactggtggaggtggagattgtaccggtgggggaggggaataaactggtggaggtggtggtggggagtacactggaggcgggggagattgaaccgggggaggtggtggtggggagtaaactggaggtgggggagattgcactggtggaggtggtggtggggaatacactggaggtgggggggattgaactggtggaggtggtggtgg

SEQ ID NO: 161672 - DNA, 8377 bp, Cannabis sativa
aaatctttttcatttcttgcatatgtgaagtatatatattgtaaaatgaagaaaggtcaaaatgctaaatgagcacatctagaaaactgaaatttcatttcctttcatttcttatatattgtttaccgaaaatgacacaattatagcacgtctaaattatatgaatatatatatactactactaatcatttaagtattgtttgtgtttctatgtatagaattatgttagtcgcattaattttgtatattgtgtcataactaatttattaatcatgtatttttatatcatcacatgattatgaacggttatataccgtgatattgtgttatcttatgtgatcagttgagaaattgtatttgtgtttagagtaaattgacacaattactgataatattttattcatgtttcaccataagcgtgtcaaatgatcatgacacgaattgttaactgtaatttaattaattagaatttgatgtaattagtatgtgataattgtttgactaataagtactttttatctttataattaatgataattgatgagacatatatttatattctcatgatctcattaatattctagagttataaacacacaaaataaataatattcaatatcaaaatggtatttttattatttttcacttaacacataatttcaggcaaataacaaacaacgaaataataagtacaaattagaatattgccttaggaaagctcattaacaaatacgtgcatataaaatatgtattaaaacacaacacaaagacgtatcataattagtttgaaaatagaggattaaaactatcacgtgtatttaagttattcaaaataaatagaatcatactgttctagatagctggttagagttttaagggctcaaattaacattaacaaatataataaacaggagactcaacaatattgataggtattaattatgactttgtccaatttattttttcaaaatgataatattcaatttcaaaatccaaccgatctggaataaagagatttaaaatcactacatatgtaattaagaaacagctagtaaagagattcatataatcattgcttgtcaaacaatatatggcagcaatttggaaaacagtaagaacatatatatatatattagttaattattacttacggtggtgtcgaagaagcgcgtggagaatattaaagcggcagtgaaaaggaagaagatgaaaaggaaaagaggtgatgatctagtcgtacatggctgccataactttctcatcccctcaatcatttccgttttgctgtcctttctttttttctgacgaaatttgaccaaaataatcagaacattagtaccttaccatttattcaactaatagtaccatttttttattagaaagataaaaaaaatcgtcaggtaggtcccatcaattattggtgaaagtagtttaagtcataggaaataacgaatttttgaagctgaaaatttatgacataaatttattgagaacgaatttactaagcattacgagaaaaatttgacataaatatcattgtatttgttgctaataagtttttaaattcaaaaaataacagcataaatacctaaatcttcaaaattaacagatccattaatacccaatctaataactcggttaaatgccacatgtcaatgttctattggtcaaactaataattttttttaaaaaactattttcataatttttttcttaaaaaaaaataaagataaattaaaattaattacatatgtacgagagcattttcatccggtaatgctctcgtacactaacatacccaaaattaaatcagatctcatcaaccatttacaaattcatataaaaagatacacaataaaacccaaattcaaatcttacctcgcacattggaatcaatatcaaaatcaaaccatacccaaactcagatcggacaaaaagagacgaaagaggatatggccttccatggtctcgttcggctaattaaccgttggtgactagcctgcgaccggttggtcgagatgctccattaatggtatcgatcgagagagaacgagctaggagggtttgaaggacggagtgttgctggtgagagctgattggctcatcggcgatgggcttgcaggacgacgtcggcgaggtcctgagctcagatctgagcgtggtgtgggtttgactctttttactagattttatgatgatggttggtgagagggagggttgggaggtttggctctgactggagataccatgatgaagaccatgatgtgggtttgggtatattttttttttttttctaataataatatagttactaactttttatcaagtttcttttctgtgtttttttttttgaaaagctttatcaagtttctttattaaatttatatatatatatatataaatttgagaaaaatatatacatatttttaatatttaatcccttcccatttttcaaaaaatatatatatatttaatcctttttttattaatatattgagaactaattttttattttaaatttaattatatatatatatatatatattttggatggaattatatatatatattttaaaaatgatgtattttattaattttttttaggaagaaattaacagagtaattaaattgagtatatcaacatatatgttaaaagcataatagagtgctaaaaaaaagtagtgtaatgctatattttagcacacttagaaaaatactatttcaatggtgttctaatttggcacatgccaaaagtggcacaagatatagcattatatcaaatttggcttacaataaattctactttttttatttattatagtgcaactaattattatgattcattgacttttacgtaaatttatcttctttatttactatattaccattatttaagcaataaaaaaataaaaaataatgatgtttgtattttttcaatacaacattaatgatgattaacataattatatttcttacatctttacattggagtacaattgtaaatagtgggctaaatataacacaaactcaattcttgtgcaaaatttagcacaaattttacgttttgtattggaaatggtcttaagttataaagatttacatatttatgctgctatttttcgaatttgaagatttattagcaacaaacttaacaatttagatattcatgccacaaacttaacaatttagatattcatcaaattcattctgaatctggcaatccaactgtctttattacaacaccagaggccatcgatcatgatgcatggtttgtggatagtggagtaatcaaccaccttacttcagatccaaaccaactaactcaatgtgccctatatggtggtaatgagcgaatgactattggagatggaaacaccttgttaattgctcatactggaacaagttatttaccctttctatctctaaaaccacttattttaaaagatttattacatgtacctcagattgccaaaaacttaatcagtgtatcaaaacgtaatgttgataatcatgtcctaatggaatttcttctgatgtttgttatgttgatggtctttaccaacttcaactaccagccacacaatctgtcatcatctcagtcacttatctaatctactttagtttctcagtgttacactggtgagtctaatgtgtcacaaaataatgtaaattgacctgttaccgatgactctttcaattcaataaatgaggtttggcataggcaactaggccacccctctattggagtcctaaagcatgtttttgttttttgctaatgtaagagttccatctaatgaaaaacttcccttttgtgaaatgggaaaatcccattctcttcctttcattgtttccactaatagagcaataaaagtgcttgaactgatacacattgatctctggggcctggccctaatcatgtccaacaccaattatagttattacatacattttcttcatgattataaacgatatactccaggcgttttcacttaaatataagtcggatactttaaatgccttaacttaatttaaaaaccttgtagaaaactaatatgacacaaagataaaaactctaagattgaattggaggtgaatatgttccttttggtaaaagttttaaggatagtggcatcattttccaacattcttgactcattacctcaacacaaaatgggcatgtttagcataaacattcatacattgttgatatggaattcaccttgcttgctcaggctggtatgtccctaaaatattgggtagcggccttcattacctcagtctacctcattaatcatctaccctcctctgtgcttaatttttgatcaccatttgtggtatcatttcacaaaaaaaaaaaaaaaactaaattacaacaacttggaaacctttggtactacaggttttccatgtttctgctcctaccaaactcacaagttcaactttctatctctaaaatgtgttaagctaggatatagtaacatgttcaaaggctatataaatgccttagctctacatggagagtatatatctcttgccatgtcaccgtcaataaacaagaatttccattcttgggttcctaaacacttatcttcttgaggaaccaacccctacttcttggttatattttcctctctcaacagattaggcaagtcatagaccacacctagattcatctcatcttccatataacacttctccatctcttggtatagcattaccctgtcctgccttacctccaccaaatcctatgaggtaagttcttcatcttttgatcataactcacctgaccatgtttgcagaagcccctctcatgtttaatatccttcttcaccaggtcctccaccgtttcctccttgaccctctcaccccatgatgactcgttcaaagcctaacaactttaagtcgaaggtctatactggccaatctcggtagtcttctcactttgttattcctcaatctattgctgaagccctcctgattgatgagtggaaacaagacatggacactgaattctatgctcttaaaagaaataaaacatggacccttgttccattctctcatcacttttatttagttggaaacaaatgggttttcaatgccaaaacaaacttagatgggtccttccaacgttcaaagctcccatgttgccaagggattccatcaacgacccggtgttgattataatgagacctttagtctgattgttaaagcctctaatgtttaaatagttcttaccatagtcgtggctaagaattggcccatacaaaacctatttttaataacgcatttttgattggttatttgaaggatgatgtttacatgagccagctcgagggattcattaatccgaacaaaccaaaccatgtctgtaagctccagaagtccttttatggactcaaacaagctccaagagcttaattggttcgaattgttaaaagttgcaacaatgggaatttaaaaatttgaaagattaaaattcctcatttcatctacacagagaaaaagtaattattttagcgcttatatgcgtcatgacatcattgtaactggaaacaattttgtcaagctcccacagttcatagacatcttgaacaagaaaataatattaaaggatcttgggtcattgaattatttccaaggaattgaggttcttcgggatgaaataggtctatacctcactcataccaagtatattgaggaattgatgtacaaatataagacaatcaatctaaagccatgtcccaccaatggccgctagaaaaccttttgtctctctcaaatggtgaaagtctcaaacatccttccacttatagaagctttattggaaaacttcaacacctttgccatactcgactggatattgcatttgcagctaacaagttaagccaattccttcaaaaacccacaactacacattagagttgtactaaaagagtctcgagatatctaaaaggaacatcacgacatggtttacacattagcccaaatgatcagctacaaatagtggggtatttcgatgcagactgagcatgttgccctattgatagacgtctcaattgcagggcacaacatttatctcagagattcattggtgtcatggtcatcaaagaaataggtcattgtttctagatcaagtaccgagctagaatacagagcttcagctcacgttgcagccgacatatcatggattaaaacattcctcaaagaacttcaattttctatggtgaacaagtcgatcacatggtgtgataatgttagtgtagtagctctaacttcaaaccttttatatcacgccaagactaaacacatcaaaatcgatggtgctgaagaaagaacttagtattggatacattctatccacagaccaagttgcaaactgtcacacaaaagggctttcaaacgataggtttgagttactaacttccaaactcagggtacaagaggcaccctctcattcaagggttgttgtaaaggaatgaggtcataacaatctctgtagcatggaaaattattgtggtctcagtgtgatgattacacaatcaatctgttgtaatattctgtttttgttttaccttttttatgcaacatgtactggtccaagaggcctcttctgatgaaagcaatacaacaccttaacgtcgcagaaagagaaaaaaatcctgtttaaatactctgagaaacccctcataaatttttagtagttgtatgacaaaagataagtgactgttgaatttattgaaaatattcattcctttaggtgattaattactagatctttccaagaacatattaattatatatgagaaccaatatcaacactactacaatttaagaatttcttcactatcaagctcatgcctaaatttgtagtcacattaattagtagcttatctctcatagacacaagagcaaaatatgtggcttgtgtatctacctatccacaccttgctaaataaaatataagtatctaagctagaaattatgagatcgtgctcacaataaatttaattattttcatgagtaacagatcatactatgctaactatgctcatcgcaattcaattatctgctaataattgattatgccaaataaagcctttcacctccctcctaatatgctcatcattatggagaaaaatattctcttcaacagtttagaatgttgccactcacaccagagaaatgtgtaatattcaatcggtcctttctttttccgccttacttacccaaaacgacaaataaataaagataaatagtgaacagaacaatagcgcctaccgcatatcacaaacttagacttaaaccagattaaaagaaaaacatgaaaattaaatacatatgatagttgttaactaattaagcatacaagtatataataaattcatttggattgcaacccaataacacaaagtttaattcgattttttaaagagccaaatcccaatccaaatcatcacttgagattcacattatgtacatataacaagaaattaaaatttgctctagagtataaaagaggcgtacctttttttttttttttttttttgcagttgggtatggttcagtttggcaaattggagctttgaggagtggataagaaatgttagttgcagctctttgttatttgaagcccaataaaaacttgaataatcttcagttttccattcatatcatgctatagttttggttgagtataaaaaagtcaaccaaaatagtatacactgtatatacatcaatgatatgacccgagtagaagaagtctatgcagatatgacctgttttgaaatttgaaactattttaagagagctttggctcaagttttggatagccaaataaatgtaaatggaaaataaaatatatgattaaaaaagaagaaatagatcgaagaatagctgggtttccgaactatgcgcaaaaagggtacttgaacgtactctgaaatagagaaagagaaagaagtactttaacagaagtacaaaaatctggggtagcaaatggtggtgtatttttttttcctattttacttttgaaggagaacatgtgcttttatttatttaatatatatatatatatatatatatatatttgtagcttctttttgttatttttattaatttgtgtttgtgtagtgtagaactgtagatcatgagtaattaaagtataaagtaatgaaaaagactcaagatatacccaatattacatatctctaactttttatggagactaaagcaaaatttaaaaatgaacattttttaatactgatactgctttatttgttagtaatagtatatttggatatgactttcacaacacttcaaccttcctatttcttcatcgttgttcgtgatcgcatccccagtacttgcttctccatcg

SEQ ID NO: 161673 - DNA, 3106 bp, Cannabis sativa
agtaatgttcatcaccaactctggtttcagaaccacccttaaaagggtgctatcccactctgaaaagccaatcttttcagtcctctatcaaccccgaaatcctccttacaaatactcccagcactgcaattatgtagatgtgtatatgaaatggaagaaagatcattactatgacaacattgatcacattcacaagtccaaaattcttaagcctattgtttcactcaagaactgtattgccgaagaccctaatggttgcatcccaatctctgtcgtgtccaaaagaggagtcgagttagaggttcccatgaaagttgcaaggtttttgaggcgatacccttcgatctttgaggagtttaccggcccccaatacaatcttccttggttcaaactaacccctgaagctgctgaggttgacagagaagagaaaagggtttatgaggagtgtaggaaggacttgagggagaggttgaagagactgatattgatgagtacagggaaggttttgcctttgaagataatccagggaatgcagtggtatttgggtttgcccgatgattttctaagaaaccccgaaaagaatcttgatgagactttcaggtttgtggatatggaagatggtttaaagggtttggccgttgataatggggagaaggtcttgtcatctgttcagagtttcgcaatgaaacaaggggtttacactggagattcaatggagccaattgagtttcggcttttcccttcaaaagggttgaggttgaaggtgaagatcaagggctggttaaacgagtttcagaagcttccttacgtgtcaccatacgaggacatctcacatttggctcccgatagtgacattgctgaaaaacgactcgtgggattgctacacgagttgcttagtctctttgttgaacattcagctgagaggaggaagattctgtgtctcaagaaacatatgggattgcctcaaaaaatgcacaaagcattcgaaagacatccttatatgttttacttatcattgaagaacaagacatgtactgcaatccttaaagaggcttattgtgacccttctgctattgagagacatccaatattgaagattagaaaaaggtacataaacttgatgcagaagtcagactcgatcttgaagaaaaggcggttgagtagtcggttggatgatggcccgaaaatggatttggatttggattcagatgaagagacagatttggatttagattgtttaccaccctttttgatctcatgctacacaggtaagtaacattggcaaaatcaactagtgatcatttcaatatgaacactttgttttttattatgtcccccacataatataatttataatagggtaattagtataaataaacactattataatgtcaattcttttttatctctttgttattatttaaggggaaatgtaaatatggtgtaaaaacaaatttagaaattatactatactataacctcctaaagttacaaaaataggatttgccctaagaaaaacacttgaccccatcaccggtttgtcgtagatcttcaacatcggtctaaatatttgatactatcgtgtaatgattgcattgattaaatcatgaaaattagcaaataattaagaatttaattattattatatgattatgtctcttagtagaaattagggcttattgccagcagaagaaaaaataggctttttaggaaaatattttttcaattacggaaatatatttgaattttagatgcattatatatgttatatatgaaattttatgattttcatgttttatgcccggtaacagtggaatgcgacgaattggccaatagagtcatttagatacggtgtagtatcttttagttagcagggcagtatagttagacattaggaatgtcaggataatccgggattatggttttggattattttaaccttaagcctagaaatgacttaagcttgaaaaaaagagcaattttggaaatttgcccaaaaggtgaatcttgtcctttatggactttggtggaattgattagttaatcttttgctgattattttagtttaataaaggtatatttatctagggataagttagaaatgtatttagaaaacaaaactagattaatcaaccttgttcactctctctctcttcttgttcgaccaaaccaagaaaccaaggaaaaatcagattttcctcaccaatttcagaccaaacaataaggattccagcataggaattcaagggttttgttatccacggttaaggtaagttccttctcctttgtctcttcaattttcaagtgaaaaagttaggtttgattatgtaattttaagctgtaggttctgttgagtttggttgttgttagaattgacttctggggattaaattaagtttgtttgagctggtgttgggcagattgtttgttgttggcaaggtttgagctaggtttgagtttttgagctcaaacttagctcaacaataataatttttgattcagggctttatggttggaattgatggtcgaaatatgattattggacttaaattaggtgttttagaaagtttgggaaggtttgaagtcgatttgtggtagttttgggattttggggaaaacttgttgtaaaaacggcaaatcgtttctggtaaaacggcctactattattccaggcagaaaattcaaaaaaaaaaaacggcctactgttttttggggtacttttcctgaaatctcattttttagtattttctcgatgtgtaggtttagtcacactatttatcgacaaggaaacctttagtttcaagtctaagtccctgatagtgatttagctggtcacttactagttttacgtaaattatgacttagggccttaaatcatcgagcagcaatttccactcagagttaccggcacgcttgcattcggaatcaaaataagattagtggaatgatttgcatatatgtatacatgtttagtgtgcatgttaattgctgtgataataacatgtcagggtatcaatgatgtgtacatagaggttcaccgaggtactaataaataaatgttaggcaaatcaatggccatcatattagcatattaaggtatcagtga

SEQ ID NO: 161674 - DNA, 1762 bp, Cannabis sativa
  modified_base (1273)..(1274): a, c, t, g, unknown or other
  modified_base (1693)..(1693): a, c, t, g, unknown or other
ccatgtcatttagaagagtgctttgatatgttttgcaaaggaatccatgcatttggacccttttgggaccatattttgggattttggaaagcaagtttagagatgcctcgcaagatcttatttttgaaatacgaagagcttatgaaaaacgatattttttttattaaaaagatagctcattttttggggtttcatttttcgaaagaggaagaacattgcggagttccacaacaaattgagcaattatgtagctttgagaatttgaaaaatatcaatgtaaataagactgggaaacattctttagagatgtctaatagttcattctttagaaaaggtgagataggagattgggtaaattatttgacacctcaaatggcagaacatggaaagaaactcattcaagaaaagattggagagtccggtttaatgtttgattttctagattaatagttgttataatagtctttgtttgtttccattgtctttggtgtctatcttttttttttttcttaataaaatttataactttattaaagcatttaattcttgcgcaattacatcaaagatgttattcagatagaagtaattgaataattacgatcagcatttaaccatgaaactcgagttaagtcatgagcaacgcgattggcagtggtgttatctttttatgaatagatgtttgttgtataaatcataaatatattgtcaatatgcatatatggtttcatgtatgtatcaataattgaaatgttttttagtggaaacatatattggtttattttaatgtatcaactttaattcttgatttgctttgttaacttatttcgttttaagtgatattaacacctttcatacatgttaactcctcacccattaagtgtatgacaccttgtccatcctttctagttcatattaagagcatgggggattgtgtttttgatagtctgaaatgttggtcaatggggctgcaaactggtttcgctttactaaaatcaaacatgtccagaataatcttagagatgtatccttcttgagatatagtttttgcgttttcagctttctatctctaataatctcaattcctagaatcttctatgctgctccatgttccttccttttactctttacttaactgcttcttcacattgtcaatttgactgaagctcttacttccaatcagcatatcatcaacatacaaaaacaagtatactgtggcttttgcattgttcacatagacacaatggtcatatgaattcttttttttttttttttnntttaagcgtttatatattacaaccatgcataattaatttatttggtgggaaacccagaaccaacctccaacacacacgtacactcatatgaattccttttgaaacctgccttagtgaaaaaatcattaaaccttttataccattatcttggtgactacttcaagctgtacaaagaccttcagcagacacaaatggtcctccttgcttttttcttcaaacccttagggtcgctccgtaaaattttttgcttctaaatcttcatgaagaaaggctgttgtgaaatcgagttgttcaatctcaaggtcctcagttgcaacaaggctgagtaacattcttatgaatgtgcattttactatatataggggagaagaattcgttgtaatctataccctcactacaaaaaaatttacttttagtcncaacaaaatttgtgactaaaaatgtaaaaattgtgactaataattataaatcatgattcctatgttgtg

SEQ ID NO: 161675 - DNA, 1839 bp, Cannabis sativa
acttaaaccccagacccaaccctagccctagagccccatctgacctcagacccacactccagccccgaacctggccttagacctgcaccccggactcgaccccaaacccgcacccgtccttggaccaacaccccggtccagctccggccagctggacccaaatcccatacccaaaaccgaacccggtcccgacccagaccccggctcccaaacctgggtccgagcccaaacccgacctcggcctggccctggatttgactcagaccgaaaatgtggagagagaaagtgatgagagagaaaatgatgagagagaaagtgaggagagagaaaataatgtgtaaaaataatatgagaaaatgaaaagagagaaaataatgatatataaaataatgtgagaaagtaataagagagaaagtgtgagaaaataatgaaagagaaaataatgcgaacaaatgatgagtgagaaagcgatgagagagaaggataagagagaaagtgatatataatagggaaaataatataagaaaatgataagtataattatatgagataaagtggagaaaaaatattgaccaaatgaattgctttttaaaacatgaacaacattttgttgttattaaaattcttattttttataattttattttttcaaaatctcatgttttctaataacagttttcaaaagacaatatcaaacatgtttaattatttttagaaaataattttctattttgaaaaataaaaatttattttttaatataataccaaatgaacatttagtttctctttgtaaagtttgttcaaatgattataatattataagaattcaaagcttagatatagtgaaaataggagataaatttagtttaaataattatttggagattgagttgaaaatttacagctactcatgaaatagtagtttgatgatgcaatacaaagttcacttatttaccctcacccctaaaacaaaagtagcttaaataagctaagccaatccacatctacactatatgtatttactaagtccatgactttttgtcatcttcctttttttatataaatctaaaatattttgtccttattatcaaatatttatatttatatttaattatgtggaactcgattacataattatagtattaatagtatgacatatgaaatggtgttaaacagattgttatcttataacattcacctaatataaatgctcagaaactatataaactattattacttaataagactacatatagtataatttgctagtgcattaatgtatatgtaattatagtactatggaatatcaatagctaataacattatataaatatgatatataacaagaaaaaaaaaacaaaagagatgatttaattaatattacaaaaatatttatatatatttatatacctgttgtggatgagtagaagccttgccaagtcttagatatataatttggatgaaacacatatggtatcctacattcctatttatagtagttttcaaccaataaaaattctccaccttaaccaaacatcttagttcacataaactaaccttccaaaattgcttaactcaggttatgtttaactcaacatcatttcatgcatgtgtggtatcgtgtatcccaacagctggcaatgctgtccggttatcatcaatgtcataaattgcacaagcccaatatttaagaccgttattattgagtatcagtagtgtccagtgtagtattatacgattgtttgggtgcgtttggaaagctacaatgtaattgaatttatgtgtaattagaggtaattacacaatttggcatatttgtctgaccatgtaattacactg

SEQ ID NO: 161676 - DNA, 5195 bp, Cannabis sativa
  modified_base (2165)..(2165): a, c, t, g, unknown or other
aaaaaaaaaaaaaaggaccattttaagaagaacctcttttccggcttgagaaaggaagagccccacccaattttgaattcgctttctcaacttatcttttaaaaaattcagtcttctttcttctcattgtgtttggtgtgatcgttagctaaaaagaataatttaaaaacaagaagaatgtgaaaacatgctgtaaatctttgactttcaattttttaaatattattgtcattaattttttcaaccctctcaccttaccaaatactaatcatgaaacaacgacttgaacgaagtcaacataggcagccatgcgaaaacctgtttgtttctcttccaacttcaatttgtatctgaaacacagcacagttacaccttacaagcaatggccaaccttgcttttctccatatcattcttcttcttttcttctgtaaagattcaatagctcaacttaaaacgattactcaaaaccaatctctcaacgacgatggaaaatctctggtttctaaagaagaaaggtttgagcttggcttcttcagtccaggaaaatccagtaatcgttatctaggaatttggtacaaaaacatcccaagatctgtcactacggtttgggttgcaaatagatgcaaccccatcaacacttcatctgggaagctttctgtaaacaaccatggcggtattgagctttcagatggaaaaggaagtgtcttttggtcttttaacttaaccaaagaggccaagaaacccaaattagagcttctagattctgggaatcttgttgtgacagatgaggaagactccaacccagaaaattacttgtggcaaagctttgactatcctaccgatactttgttaccgggcatgaaattgggatgggacatgaaaacgggtagaaagtgggaattaagtgcatggaaaaacccagatgatccctgttctggagaattatctttggatattggtagggatgaaaaaaatagtaacaatgatgactacccagaattagtttttcataagaaaaaagctgtcttttttcgatctgggccatggaatggtttatatttcagtggtattccttattttcagtctaattcactttttaatttctctgtcacagacaaagatttggaagtttatttcagttacaacttaaagaatagttcaacaatatcaagcatagttttgaatgcagcaaaaagcaccttggcccatttaacatgggttgaaagtgagcaattatgggactcaaatttctcaattccttctgatgcttgtgacatttacaatgtgtgtggagctaatgctaattgcatcataaatagtgttccaatatgtggatgcctaaggggtttcaaacccaagaatgtgaaagaatgggatataatggattggtctaatggatgtgtaagatcaatatcaacagagtgtgacaccaagatggtaaatgggtttatgaaattatctggtttgaaattgccagatactagaaatgcatgggtggataaagatacaagtttgagggaatgtcaagggagatgtttcagcaattgttcttgtacggcttattcgaatttggatattagagaacaaggcagtgggtgtgttaattggtttggtgatataattggtattagacaaaatataggaggtgtggttagtggacttgatctttatgttcgtactgcggattcagaactagcaattgatcaatcaggagtagtaaaaagaggagggaaaggtggtaagaaaagggccttaattgttgcagtggttattggaggtagttgtttcggaataatattctttgttcttggttgttgcatttgctggaggagacacttattaaaaggtagtgtttccctaattacctactcaataatttattggttggctttaaccacaaccaacaaatatacattatttgatttttaattgataatgtagtttcaaatgataagatgatagaaaatcagtcaaatgatatatgttcaaacttcaatacattaagtctgagtttaaattaactacatgaaacttgtgtgtgttgaaggttctgggttcgagttgtaatatataaacacctaagtggcgtttggttggaggtaataaaatggaatggaatggaaaggaaaaattttcattctattcttttgtttggttgcatttnaaagtattggaatgacattccaatagaatgttctttccatcattttgggggaatgactattccattttaaaaaggaaagtaagaccattctaatataactagagaaaaaatttaatgattttttatcaaattttttatggattttaaattttattccattcctattcctattctcattcccattcctattctcatattttcatttctctcaatcaaacgccaccttaaatcaaaaaaagtctcaattcaaattaaccacatgagactagctcaagtgtctatagaaaggtgcatatgttgaaagtcttgaattcgagtcgaagttatgcattgtaatatataaacccatcagttcaaatttgattgattaggaaagtatatgttcaatatgtagtcgccaaataaaatacacatatccataatgtaataagtagtagctactcttgtcttcttctagctagcataattttattaaggttatacacttgtattttacacctgaattatgttgtgcttgaaatgaatcccaagtcctaacccaatttgtgctcatattttcatgtcaaaaacagacaaaaatgagacagttaagaataatggaagccatgaggaactggatcttcctttgttcaccttttcacaaataaccactgctactgataatttttcagagagaaataagctggggcaaggtggttttggatctgtatacaaagtaagcatgttacatataaacaatgtataatataaaggctttgcattgcaacagttttgttaatgagaaattttcagggtgagctagaagatgggcaccaaattgctgtgaaaaggctttcaatacgctctaaacaaggggttaatgagttcaagaatgaagtaaacctaattgctaagcttcaacatcgaaatcttgtaaagcttataggttgctgcattgaaagagaagagaaattgttagtctacgagtacatgtcgaacaaaagccttgatcgtttaatttttggttagaacaactttttaactgaataaaattttattagacacacaccattctgcaatattttaaagttattacatattttctagatcaaacacaaggtaaactattagaatggccaaagcgataccaaattatatgtggaatcgctagaggacttctttatctccatcacgattcgagactgagaattgttcatagagatctcaaagcaagtaatgtgttacttgatgatggaatggtgcctaaaatctcggactttggtatggctagaacttttggaggagatcaaattgagggaaacacaaacagagtagtaggaactttgtgagtattactattacataataagatcaaattgtacttacttctattccataaattacatttcacatgatgtgttccttgcagtggttatatggcgccagaatatgcttttagcggccaattctcaacaaagtctgatgtttttagtttcggtataatagtgttggagattgtaagtggcaagaaaagtaattcctttaagcaccagaagaacaaccataccctcattggacatgtaaagtctctatatctttgtataaatcacctcactatttggtctgttctccattgggagagcctattttaatagaacattgttattgggcaccagtggtgtctagcaccttctagacgtgttgctttgtgattagttagcgatactccctaaaagttgggacccggaagatgctgataccactactaccttttggtatttctcattttaatatgaaactataagacatgtttttggttttttctttgatcataggcatggagtttgctaaaagaaggaagggcctttgatttgatcgacgtgttgttaagggactcatgtgagaatcttgaggaagtggtgcgatgcatccatgttggtctcttatgtgttcaacaaaatcttatggatagacctagcatgtcatctgtggtttttatgttggaaaatgagaatgtaatattgcctcaacccaatccaccaggctacttcatggacacaaatttgcaagcaagagatgagctttcccttagtaatactactgactcagcatattcacaaaataccatgaccataacaacaatcattggccgataggtctataatgcagagcctatatattttacagaatggggctcactagtgatcattctggcatttattagtttgtaaagcaaaaacattcgcctgtctgtttgaatacctttattattgtaatgaaggaatttctttgacaattctcaaatacaatatccaacccatccatatgaatgtacaaagaaaactaaactttaagcaccactagtccctcttgctaccgctttagcatatgtttattacaattacaacaacctcgagtacatctattattatcattctttcatattttacttaagaaattattttaagactggttcactggatattacaaaatatcagaaaaggtgtggtatatttcctctaataaaaaagatctccaaaagttattctaattatgagaagttagatgtcatccagaaaggcgtttcttgaagtctatttttcattcggaagaagtctcgtagaatgatagatgctattcggatgggcgttctcggatgtctatcatgtccaccttaaaggagtcttcaagaaagttagttttcctccggaaaggagttccgaatggctaattgttcctcttagaagggagtttcggatagtcgactctagctgttgccttttttatttgggaagtccttcagcatacgcttcggtccttagtctcggaagcgtatgtctcatccgaaagtactttgacttgtactgacgtggagatattgttgtgaggagtttgttaagtcgtaactaacttaacaacttaacacttgtagccaccaactttagtatctatatcctgaacctatatataccagccacacttgtcatttcgaacatgatggatagatcaagtttcaagaggagatttcgagcttgagagagagagagagag

SEQ ID NO: 161677 - DNA, 5190 bp, Cannabis sativa
aatatttaaatttattaaatcatatttgactctaaacactttgaaatcccatgtcaaggattatcatcccgggatgatattttggtctgaaactcgcttaactagtgcccgtatggaatttgttcgaattcagttaggctttgatggttgttttacagtggatgctaaaggcaagagtggaggtttggctcttctttggtctaaggattatatggttcagataaagtcttataagggatctcatattgatgctcttgttgaaaataatcttggctttacttggcgctttactggtttctatggcagcccagatttgggaggaagattagaaagttggaagctattgaatcgtctcaaaaacatgttttcaggtgcttgggtttgcggtggagattttaatgagattatcagccataacgataaaaaaggaggaggtcccaaaccagattacttaatgagaaactttcgcctggccatttctaattgtctattacgggaaatacaagctgagggagatggatttacctggtgcaatggtcgggcagctaacttagtttttgaaaaacttgaccgaattttatgtaactcagcttggcataagaaatttaagaagaatacggtgtccctcctaaattggtggaattcgaatcataggcatttacttcttcatgctcaatttgaggataatggagaagatttcaataaaaaaaaatggggcggtagattttattttgaacaagcttgggcggataatgaagagtgccataagatcattgaggaggtttggggacaaaatgatacgagcaatcggattcaaaatctcacccggctgcttgctaattgtgggcaaaaactcaaattctggaacaaaaagcaaaaaagtgagttgatagcaagaactaaggagctaaaggagaaaattggaagcctggcaaattcagtaaaaatggaagattggctcactagaaatcggcttgaacatgaccttaattgtgtggagaaaaaacgagagatctattggagcaaagaagtagggccctttggttaaagcatggagatagaaatacaaagtattttcactttaaagccttttaccagacgaaagaagaacaccattgagggtctttttgatgctaatcagcaatggagaactaaggagaaggatattaagacaatttccatcacttattttcagcaactttttaccaaagcaaatagaggaattgatcttgatgatattctccgaaggtgtgtcccaaaccgcttaagtactgctgaaaatgaacttttactggagccttttactagagaagaagtgaagacggctatgttccaaatccatcccttaaaggcccccggaaaagatggtttgccgaggcattttttccacaaaaactgggacatagttggagcggaagtgactaaaacttgccttgaagtgctgaataataatgtcgactgccgactgttgaatgaaacaatgatctgccttataccgaaggttaaaaagcctacaaaattgtccgaatttttccctatcagcctttgcaatgtggtttataaggtggtgtctaaatttcttttgaatcgaatgaaacaaagtttaaattcagtgatttcagataatcaaagtgtttttattggtggtagaatcatccaggataatgcgatcattggttttgaaagtctccattgtatgaagaaaggtcggtttgaaaatggaaaaaaaatggcaaaagttagatatgtcgaaagcgtatgacagggttgaatggaactttttagaagcaatgatgtttcatttggggtatgattatcagtggattacaaagattatgaactgtgtgagatcaatttccctctcagttctaataaatggctcaatcaaaggtttctttcttcctgaacatgggttgcggcaaggtgatcccctatctccattcctctttcttttatgctctgaaggtctttcctgcttaatctttgaagctgaaagggctggtaaaattcatgggctgagatttggaactatggaacaaaggttgtctcatctcctctttgcggacgacaaccttgttttccttgatgcaaacctggatgatagcaatgccttaaaagaggtgcttggaacgtatgcaaagatgtctggtcaatgcataaattttgagaaaacagagatgtgtgtgggatgcaaagttcatgattctatggcgaattatttagattccaacttgggtgttactttagttaagactcataccaagtatttgggtatgcctacttttgttggtaaaaataagaagcaagtttttagaaagataagagagaaagttgaagccaagctccaaggttggaagatgggtctcttttctcaagccgggaaagagatcttaattaaagcggtaatccaagccttactttgctatgtcatgagttgttttcgaattactaaagggattctccatgagattgaaggtttgatagctcgtttttggtggggatcgacgaaggataaacataagttgcattggggtaattggaagaaactttgcaaattaaaagagaatggggaaatggggttccgtgatttggaagattttaatcaatcgcttttggctaaacaaggctggaagctcattaataatctggactgtttgcttgcaaaaattttaaaagccctctacttcccgctggaaagcttctttgaagctaaactgggacattatggatcatcggtttggagcggtattctatggggcagagatctcttaatgcagggctccagatggtgtgttggagatggtcgtcgtattcgaattaatgaagatccttggctcttaagaagctttcccttcaccctccgaaacaagattcaaattccttctgaggtaactattaatacactgctgcttcctaatgggaataggaaagaaaatgaagtaagaggttggttccaccaagatgatattccttgggcccttggaattaagttgtccctcaatagatcggattggattacttggagtatgacccctaacggtatctactcggttgcaagtggatacaagctgcgctttcaaaatccggatctagcagaatgctccaataagtctaaagttcaaacctggtggaaatttatttggggatcttgtcttactccgaaaatgaagaatgtcatatggcgggtgttcaatcactggattcccacaaaagtggagcttgtgaaaagaggtatggctttagatacttgctgtgatctgtgtaaatttcaggaagaagacatttgtcatgcattgtggttatgtctgaaggttcaaaacgtttggaagcaacttggtttcccaaaacttatacccctgaaaatacaaaaggctgctgatgtactatggtggcttcacgatcaccttcccaaagaggatttaatcaaatttatggggctttcctcgttggtttggcaaagaagaaattcttttgttttccagggttcccaagcccttggacattacaaaataaggcaatcattgctctcggcgacccggacccactgagttcgccgcttccaatttcatcgcaaggtcaaatcagaaacaactgaaatatcctttgcatcatccttcttccctgccatagtagagtccatcgagagtgccccattagaactatttccccttttattcttgcttcttttagggaccaccttcctccttttggattgtccttcaatctttttaagagaatcacagctattttcgtagtttatagggacatccaagagattcccagtatcaaatagaggtgtgtcaatcaatgacccctgtagaaaagaattgggcaggctagcagataaattatgctcataattagagatattcagcccctcatctctccaagaaccacttcttttagcagtacagagcctctcactcatcccttccataccaaatcgaccatcaggattgaaattccccttcttaacctgtttctcaacagttagcatacaagagggattggtcaaatcaattgccttacccttattcacggattcgagtcccgaaatcgtaggatttacaacaaagttcaccatattccttggaagcaattcagggttatcaatagaagaggagctacctgctgtaatcttctccggattaatggacaaaagatcaaattgggaggctcttttcacaggaaaaccagggggagtggctgtctgaactcgacaataggacccctaagatggtgaagcagataaacctcttctctcgtcaactttcaaccaagcaccatatcccagcagtgcgttccccaatccatcctcaatcaatttaattggctctgcacaaactcgagtatcatgtcccacaaaaccacatttaaaacacataaagggtagacgatcatacctgaatgggagccaaatcttccgaccctcgctcggaaaaagaaagcctgggcaaattggatcgaaaatatcgcaccaaagcttaaaggtgaaaaattccttagtcacgatcttggttacatcagctttttgaacttcaataacttcccctgcgaatcccgccagtcgctccaaatttccctgagttatcgaacgggtaggtaattgaaggattcgcccactgagagggaatcgagtaagaactttatcccaaataagagggataccttccagcctttccacaatcagaagtccattgttaagaaactaagggttcttggtcaaaatcctatccaaatcttgagaagatttgaaggagaagaccaagaaacttgattctttagtggtatgtttaatctctactccccaatccttttcggcaattccccaaacacgtcccataatcgttttcaatagagaacgactaatcggacggttggagcaaaatctccccatcgcacagagtgaggccacttcagtccctccggccgaatcaatttcccatccttcttcatctaaaactgttaggttattcgtcttagcaagcaggtcatccatggaggtatcaggcttttccagtatagagaaggctcttctcgagagagagagagcatgaactttcttggagcgatttgttttttcttatgtattataaattagtttttatgactatagattagcggaagcgtaccagagtccatagaatcgattttgtaataaccttagattggtatgatcttccaattttt

SEQ ID NO: 161678 - DNA, 15547 bp, Cannabis sativa
  modified_base (14924)..(14929): a, c, t, g, unknown or other
tctctctctctctctctctttggtgaaacagtagatagttttaagggtttttttttcttttttttcttatttttgcctttagtttgaaaaaagaatccatttttatgcttctatatcactcctcttgaagctttaaacctctctttcctcttctctctcatttttctaatgtcatctggacttgggaagagtcaaagctatctgggtcatcctcagctttgacaaaacaacaataaagattgaaactttattgaagaaagatatcaagaattaaaaacccaaaaatggagaaaaattcatcagttaagaagaaacccattatgagtatttcactcttcaccactttctctgaatctttctccataaccacagctaaatccccaagaaatttccaagctggtgttgtgggtttgggcatagtagctgccatgactgatttgacctcctccaattctcatggagctgaaccatttgtggtggtctcacctagatcaactactactcccactactcctccaatcccaattgtctcttctgcttctaaagccactgctaatttcagaggtggtggtggtggttttgataatcaaattcaccatgttgttgaagatgaagtggttgatgaattgtctgaaagttatacttgtgttatatctcaccatggcaacaatttgattaggaaacgtgtttattatgatgataagcttaatggtgttgttgataattcttatatggttgttacttctggtgttttctctgcttcacctgccaatattggagatgttgatagagagttttggaccccagattttttgaattcttgctttctttgcaagaagaatcttcaaggactggacattttcatgtacaggtacatacaaaaatcctattttcatttccttaatttgtgttaagtgacttttttcttgattattgttttaagcattaatagacttttcacctttgtttttcacatgcataatgcttattattgatatgttaaaggctttaccttttagttatctaagtttattaagtcttgaacttttcttgtttgatatcttgataatgcttgctaattgctatggtttaaaaatcctattttgatttccatattttgtgttaagtgatttttttctttattattgtttgaaccatgaataggcttttcacctttgtttttcacatgcatagtgcttattattgatatgttaaaaggctttaccttttagttatccaagtcttgaacttttttcttgcttgatatcttagtaatccttcctatagttttatgatctctaaggttatgttttggagttagattttgttgagaaaagaaagataaataaatttttcatatttgatatgaaaatttttcctatataagttttcttttcatatgaaatatgtgaatttataattctttattgagtaattggcgggtaaatatctaagtttaattctcaattttagataaatacttaagtttaatttttagcggtaataatatttaagttatatttctaaactttttgtgggtacctcaccgttaagtgtcaagtcattatatacgtgctatttttttattggtatacttaattaatttttaaataaaaattagtattcaataacttggaccaatcagaaataggggtcagcataaaatccagaaaatcgaaaaaaccgttcagactgacctaccgaacaccgttgaaaccgaaattgacgaaaccaaaaattgaaaaaatcactaacgattaaaaccgccattgaacggtcggtttttttgggtaataaactgaccgaaaaaatcgaaaccgaccgttatatatttattaatttattaagtttttttttgcatgtattatagttactaataatatatataaaaataatatattatttttttattaatattaaagttaaaagaataaaataattagtttttgaacaattaatttgtatgtttgtaattgtaaaatgtagattaatgtaattatagaataaattagatcgctttttttttaaaaaaaaaatgtttagttgggcggtttaaatcgaccaaattgaggtttaaaacggccggttttaaaataggttatggattggtcgatcggttttcggattgcaccaatccagaccgacaaccgaattttggatttttatattgaaaaaaaccgaccaaaccgaccgatgattagccctaatcagaaactgtcacgtatgacacttggcgaccatgtatttatagaaatttcagaaatataacttaggtattattactgtcaaaaattaaatttagtatttatttatatttaggaattaaacttaaatatttatgccgcaaattactcttttttttctcttaccaaaatccaatttccaaagcttaaatattagtgttaaaggtgggagctttagtttaaatataatggtgcagccttgtattggatttcaacaattgattgtatgtcaatttacttgagtttgagatattgcttacacaaaattgagattttggtatatgattgtttgtacgtttatcctttggcttaagttagcgtgtaatgacttcattacagctttgagatgttatgccaaattgcccattaaactatttatatatatatatatatagatacatatattatattttatattgtgaccataacccatcttccttaatctctactctaatcaaaacttcaattattgagcttgttataagtctaatcctcaactttgatatatacataaaaaaattgttcaagttggtcattattaagagacttttatctcaaaatttatggcggaaatacttaagttattacttcgttgtagatgaaaatttaagtttaatttttacagttataatatttaagttctattttctttaagtatttgtctgttaagtttcaagccattatttacatgttattttcttattgatatatttaaattaatttttaaataaaatataaaaatttaatgactcggactaattaaaaattatcacgtgaaaatttactttaacagctggatacttatagaagtttcaaaattataatttagatattattacagtcaaaaattaaactaagatatttatttgcaattgagaattaaatttaagtatttatgccgtaaaaaaacgagcagaaattttagaattttcatctaagttttgacttgtttgtttgtttgcatggttaagaagtaatgagaggcgtgttatatgctaatgcttctttataaaaatgtaccttactttgttaaggtgcaacacacactcttaaataaatgacaactaatttattcccttaatcattattcagtcctttcctttgttgatcaaaactattcacttccatataatataattgttctaccttttgacaactatgcttgagcttccttcatcatttttgtgagccactaatgcttagatttgtctctttttcaaaagaaaaactatgcttcccttaggaccggaaccaaaatcgtagcaattgttatgttggtacccgagaggaactcgaatctcagttttttcggggaagaaatcacctacttgaccattttagctactctttttcggcttctgcttaggagtttataatggttcatgctcttgttggtttacttgaccattttagctactcttttcgggttctttctttccccatttcgagtatgcatgttgtttcgaggaaaacttcactaagaaaagcgcgtcttagtggaagttcaaacttgcgaattgaagctaattcattcggttaggattcaaggcatatctatttttctatttgttgcgaagagtgatcgaaatacttgcctaagaaacctaactcaaaatcgttaggcatgttgtttgctcccacaaaacccgagatttttgtagaacaagttgttgattatgtaattagcgattaatcggggtttttcgggattgtattgcagaggagaaaaggcattttgcagcagtgattgtcgtgagaagcacatgagaagtgaggattacaaagacaaatgcagatcagaagcaaggaaaccatctcttgattacactgtctctccttgctcaagtcctcaggtgtttttggctggtgttgctgcagcttaatatagataaataaataaatatttttatttatttttacttaataaacattagttggagagtattagtaaataaatagggtgccaaaagggtatccaaaaataaataaaaattggttatatatatatgttataataatagactatacaacaaaagtagccttataaattattatatacattattattattatgtacactattatttttatgtccttatttagtaatgcatgaagcttatcttactttctattatgaattattaaataataaatatgtatttttgtattaattgatggaaccaaagacttcatattatttttgttagaaaaaaaaagacttaatcttatttaattatattaacataaatctctatatttttttagagagaaattctctttattattttaatagaatgaaatttagcacaaaaacaatttaagagccaaattacctactttttttatttgtttatgaagattgatatatgtcaaattaaattcattattcatataacaaagttaaggataaaagcaaaagaaagaaattacttgggaggaattatattttattatttaaattttttttgactaaattatttaaggtttttttaagcataaacactcttctgaaatatttgttaaattaagattttatattttattttttctttaaaaaaaaatctaaccttttcatggacaattttggtatatttaaattaattgcagattaaaaaaaattaaattttatttaatgctgctcatagaactaaaaaaaagaaatcccaaaaacgaaattgtcaagtagaaattaatacccttttcttatattattataaaataacaatagcaataaaaacaatccggatttgtatttttttttcactaaattttagggtcaatttttttagatgacaaataattatatatctgcatgaggaattaatttaataaactatataaagttatgatatgtatcattattctttttgctaaaatctaagaactctacattgttgactttttgaagaagttatattctgaccatgaccatgaaactcttgactaaggttgtagtttcctagaaccatagataggtttcataacattatcctttgaccactcccaaacaaaggaaaaataccatcttttttattttagcttgacaaaaaaaaaagaataatttcaaaacatgtcaaatactatttactttcctccttttcaccaaccaactaatcttaaaaaaatgactttaaaagtgtaataatttatataaaaaccaaaatttccttctcctaccttgtaactaatattgcccattggatattctcaaaaccatttgacaccaccaccaccaaccccaacatccttaatttttactctatataaagccttctcatttcccccttcttaatctcaaatctatatctattatctacttcattccataactacaacaaacttaaaaagatggcttctaattccaactccaaaccaatcattttcactcttcttcttgttgttcctatcataacaacacttgtcacaaccaacaacactaaattgcccatcttagtatccattcctataatcttgtttgccttgcaaaaattctttgcaagagactcctcgaaaaacctccctcctggtccaatttccctaccaatagtaggaaactggctccaggtgggaaatgatctaaatcatcgttttctcacatcactttctcaaaagtacggttctgttttcctactcaaactcggttccaagaacttaactgttgtctctgaccttgaactcgccaaccaagtcctacatgctcagggtgtcgagtttggttctcgccctagaaatgttgtctttgacatattcactggcaatggacaagacatggttttcactgtctacggtgatcattggcgcaagatgcgcagaatcatgactctcccgtttttcactaacaaagttgtccacttttatagtgctatgtgggagagggaaatggaccttgttgtggatgatcttagaagtgatttgaaggtgagaagtgaaggaattgtgattagaaggaggctgcagctcatgttgtacaatatcatgtatggaatgatgtttgacactaaatttgagtcacttgatgaccctttgttcattgaagctactaagtttaactctgaaagaagtagattggctcagagttttgagtataactatggtgatttcattcctttgttgagacctttcttgagaggttacttgaataaatgcaaggacttgcagagtagaaggctagcctttttcaacaactactatgtcagcaaaagaaggtaagaaaaacaatacatgcttatacatatacatatatatatatatacacacaccaaagtgtcttacttttcttttatagattctaaatggtgttgaataagtatgttttgagcctaaatgaaactagtgaccaactcaaaaattttattttgtgagagctcatttattattaaaaaatatttattactacattataatcactcttactaaatttatttaattttatgggtttttttactattttgatctatacttattaaattaaaaaaaattacatttaaattttcaaaagacaatatttttattagtaaaagctataatatttatagatttgtcccaaactacatacaatcttattctcaaaaccatatttaatatcaaaatgttttgaaagaattcatttttatagtttttaaggtgtaagttgtaataataatggtttttttatttttttgtcaaaaaaagttggtttataaaacttttttttataaaaataaaaaaaactttgcacacattctatttgtaatttcttcaacatttatagaatatgaatttggacaattgggttttaatgctgatcaatattgatcataataagaacattggtttttgaattccaacacaaaagactcaaatgcttacattgtgttgtttttagggagattatggctgcaaatggagacaagcacaagataacttgtgctatagaccacatattagatgctgagaagaaaggagaaatcagcaaagagaatgtactttacatagttgaaaacatcaatgttgcagccatagaaaccaccttatggtccatggaatgggcaatagccgagttagtcaacaatccaacggttcaaaccaaagttcgcgaagagatcagagcggttcttaaaggcgaaaatgtaacagaatcaaatctgaatcagttaccatatctacaagcaactgttaaggaaactttgaggctacacacaccaatacctcttttggtaccacatatgaatcttgaagaggcaaagctaggaggcttcacaattccaagagagtctaaggttgttgtcaatgcttggtggcttgccaacaaccccgaatggtggaagaaccccgaggagtttagaccagagcggttcttggaagaggaaggtagcattgaggctgtggcagcagggaaagttgattttcgattcttgcctttcggtgttgggaggagaagttgccctggaattatacttgctttgcctatattggcttctgttattgctaagttggtttcaagctttgaaatgaaagctcctaagggaatggaaaaggttgatgtgagtgagaaaggaggacagtttagtttgcatattgctaatcattctattgttgtgttcaatccaatcatgacatgatttaggttcaaaatcttgtgttgttaagtgtttgttttagtgttcttttcttccacaaaaactattgtaattcacattggttcaatgttcaaaatttggacaaaataaataataagagatgttttctgtttcaaagatttcttttcttcaacaaaaattaatataattaacattggttcaaaattccaccaattttgcaagtttacttaccaatttttcagagtgaataaaaaacttgattacatggttttttttctatcattcttgtactctctcattattttaataagagatacaattgggcaatataaataataagagatttcaaaagtttcaaagatttctcctttgactaaatttgacttgagaattttgtctctttactcaaaatgaagatgtaaaaagtacaagcaagaaaagggtcaacctcaacatcaaagcacttcatgtatgttgttgtgtctctaatctatacaacatggaataataataataataatgctaaagccccaaaaatacaaatcttagaatacaatgatacaatgccttcctagactcacaagcatttcactaacataaaattaatttcattcaagaaatctacaaatttacactcagaagaactatcacttataaaaaaaaaaaaattatacttttctactttctacaatgcacttgagtgagaaaacttcaaaaatttaccaaaagaaaaaaaaaagaactagaattagtataattttttcccttttacagtccaacaagaagacttagtcaaaaatccatagccagctctattagaacttttgttgccttggaatcacctctcatttcgctagtttttccgagcagaagcaaatttttatatttagtttgctcctgcaatcgacatcgatgactttatgatccatcgtcggtgttacaacatgctgaaagagatcacgagcggtttcacttcaaatgaagaaagttgttaactttatgcattcccgccatcagaactactgcaagcttgattttgaagtggaccgctgcctccaccgaaatttccatccaagctcatttgctcgacttcttgtggggagaggatcttaatgcagcgaacgcagttgacaaactccctaaagtacccgacaagacaatgtgagctaacagtgtgaaacaagagtaaatgtaaattcaaatgaaagagacttactgccaggggtcatctccgacgagaagaacatccttttcgtgatccacatacactagtttccaccctactctctgtctatcctctaattgtccctcgataccaaatctacgagcaagatcttgtttaagctcatcataacctgaatagcgagtaatatcgatagaccttcccacagctccacgtttgtaaacctttatgaagaaattaacaaagtcagaatcaaaagatggctcttttagttgaaatatatatagatataaaaaagaaaccttggtatatgttcgcattctttgaaatggcggtgctggtgcccatggccccctgttcaagaagctgccatcgttgattgtcgagtcaattgaattgaatgtcatatcaggaacaccgaatgactgagagaccatcgaagatgaaagctcctgctgagcatcttttgaattttcatagttgctcaacaggtctcccgttgaaagattattcgggaaatcttttcctaaccccaccaattcttttgtcaataaagcatcgggattcaaaggtgctggtaaatgatcgtcgatgggattaccataagaaccattgtttccttgatttgcctgaacttccttttcttgacttgcttctctaaaaagcattgactgtgtagtgaaaggaaaatgattattgtgatgattattttgctgtaaattcacatcattctgagaaaggcaaattgaagttgttgaagatgatgtatccaagtaatctgtttgagcagctccattcaggtatgtctgaggggtacagattccttgactttgacttcttgggatatttaatgaaggtttgacttcagacttttggtggtggaaatcttttacaaagttgacatttgaagacattgtttccaatccattgggactcaagatggtggcagcagactgagccatgtcttccaccacaattgtacttcggtgaactctactgttcataactggcggaactccatttgaacaattgtttgtagaaggagatgtggagcaagatggaacatcttcggttatcccagattgcccagctcccacaactcctgtcgctgcactgttaccacctgaagcaacatgatttgttaatgagttcgggggatgtcccatgttccctggcatttcagatagcatgccatgttgctgatgttgaagcttaggttgatggggtgtttgagagaatcgtgcattggtttgattgatgttattattctgagtcatctgttgtgtgactgtaatgttcggttgaggaagcgagcttgtcaccatttgtggcatctcagagatttggctaggagtcgaagacctggagaaactatgggaaccatccaaagtttgcctctgctgatcttggttttgagcatgttgagcgggtggatgcagcgacgactgttgtgctaaaattgactgttgttgctgctgaagcttctgtaacaactgaaaatggagctgattatccgaaatatgttgatactgttggttcatttgatcagtttgtagttgagactgcattagattttgctgttgcatttggctagtaatatgttgctgatgctgctgttgatgattttgagagaggtttctctgaatctgattgctttgcatggaattttgttgctgaagcatattgtttgtttgaacaagattttgagaatgcagagtctgagcttgaacttgactcgaaggtagagtttgattaaccatactttgtcttggttgttgccgagtagcatcgctcatctgttgctgtggctgcgtatgcataacagatcctatagagttcattgtgggaggtaaattcgggagttgatcgtgctgttgtgcttgctgaggtagtctttgggaaccgaactgtaagttgtttgcctgagatatttgaggtgctgacaagcccaactgcctagaaatatcagctccaggaagattttgcagaaccgagccagaaaacgaatgctgcatgtaatttggctggatggagttagccaaggatgcaggattttgctgcatgttcatccattggactaagcttaagccaggaaaaccttggttgtccttcatgccaatatcgtcaccgagccaaggcattgttctcttaaacaggttatctatgtccgatgaatcgtcatctacaaaatagataccgaataagtcaatcacttaaccaaactccacaaagtcaaagaacggttatattgtcaattctcttacctggcatccccgcttgccttggacgctttgacctgaaaaatggaggggggcagatgaaaaatggagctgtaacaggttcaatctcccagattgacaccctattacgcctttcgccagtagttgactcgtcccaaccaacctattcgagtacacaaaagaaattggcattagtacttttaaatagtaatcagaaaattttgtataattgcaaattcccatttagctaacctgtaaattccgccattgtgaattcttccatctagcaggatcaagatcactgatacccgtgattgtacccatatacctacaaaaggaattcatttttgctttcaatcagtattccgaaacattcatgatatacaaggcaatatgtaattggagattattcaagattcaacaaatgtacaactaccttcttgttcccgactcttcggtttcaaacatcatacggaaacgcatgccaagcgatatttgatttccacacactgccttgtagtacttggctaatggaataacaaattctgatggactagccctgcttaaatgtaataagatatcaaaatttgcattcatgaaaaccgagtaagaatttgcttttctgaaagaaaacgaaatgtagaatgccaacctaggattgtagaacactgtgaaaggactattgttggctgcagcgtgagcggcagctgccaaaattccgatatgcatactatcgcttgacagcacagatgatgataggttcgtaggttgcctgttagctcgtctaataccgagaagtagatgttgtttttcatccctgatgatcacaagcagtgaagttgaaaggtttaaacaaaaggtacttttgcacttcataaagaatataaacagcctcggttcatcatacctgataaatagaaccgagtcaccggcaaaaagcctcttcccgctgacaaatagactccatccagtggtaagcaagtggcgtttcggttgtcctagataaaggggccaaaaagtacaaaatcaacacccccgaaaatatgcacctaaaaagcctaatttggaagattttgttgagccgaaaggagaacataccacgatagatatggcggaaggtccaaacattatcatgcaaatccctggcaacaagttcttgagcgggtggttgcatagagaaatccttttacagaaaaaaaaaaaaaaaaaaagaacataagagtctgcattcatagtgggaaatctctaactaataccgaaaactgcttacaagaggtggaaaaatcttctcggctgcacgtcgaggcacagagaaacctccatgagtacttgtatcacttgctgtaagcgttttacagaaaaactcgggttggggtttatttgtcttgagagcaagatcagacctcaatagtgcatctttatcaacctaaaaacgaaagaattctgaatttgtattactctccaaactcaataagacaatcttcataatcttctaaatacaccaattaatatcttttagaagacaacaaaacaaagattgaaatgcttacggtttgaaccggttggagtgtcatctgagcatatacttcatctgtttctgggtcagcctaataaagaacacacaagaaaaaagataaaaactttaattagaaactattaaaaggaatctagtgtagatcaatataaaaggttagccatacatgaagggtgacactgtgaagaagacacaataacttcgatggaagattcgggtaattggggatttgagaatctacatctttcttcatggatgctgcaacctgagattggaagtttcagttataaaacatatgatctctttctctattcatttaataaaagatttgattttgtatgaagaaatggacattgattgaaaaccccacctacccatgaaaaccaaattaaagaaatcaaagaaaggacttttatattttagtagagcataaatgaagataaaaagggttcataataaaaatcaacaactttactaaactagtttcaaactctgaaatatgaatgaagacacattatatcaacaaaaatcaacatactattaaacttgtgatctttttttttaaaaaaattatatttctaataaaagacttgagtttatatgaacaaggatggacattgattgaaaacctacccatgaaaaccaaattaaagaaaggatttttacatttttatataacattactaataaaagatttgaaacttgtaatctttttttccttttcatctaataaaagatttgattttgtatgaacaaaatggacattgattgaaaaccccaactacccatgaaaaccaaattaagcaaatcaaagaaacaatttttatactttaagataaaactagcaaaatcaacatactacaaaacttgtcatcttttttctgttttcataaaataaaagatttgagttttcataaagaagatagacattgcttgaaatgaaaaccccaccaacccatgaaagccaaataaagaaaagcaaagttgggttttttagattttagcagagaagataatagggttgataaaaaagagacagaattagcagtagcagtagaacagacctgttcactgtgaccttgaggaaagtagacgacgtgggtcccagccggcggcaagttcaccagtggcccagcgcatgcctgccataactcctggtttatgctcttcttctctgctcctgcaaacaacaacaacaacaacacttgtttgtcagaatcaatgcttgcttattatgcttatacccttaatctcttctctttttaattcattaatttctactttctgtttgtttcccgagaaaataagacccaaaaaagaaaatacaaaactgaactcccacaattgagaaaaaattaaaaagactgaatctttattctcataaatcctcacccaattggaaaagttaagagagagagagagagagagagagtccgtacaaaaaagcttagaacgatcaaaacaaagccccagtaaagacaaatccattttcaactgttttaaccgattcaccggctcctatcaaagctagagagagagagagagagagagaaatctgaccttccaatggattaggagaagcagcaacagaagcaccagcaacaccgttcgccggagccttcattgctcgttccggcgactttgactttaaacaaaacacccaaaaatgtcactgactcatttcctccagcaatcagattgaagaaagaagcaatacccagatgccaaaattccacctttgagctcagatcagctcagctcagctcagtaaaatacaaaatcaatcgaaacccagaagagaaaagagaagaaagtaaaagactttgtttagatatgggttgacccaggttggaaaaatccggtgaggggttgccggagacagtggccggaagtggtggggagacaagggaggcagaaaaaaaggagggtttgctgagaaataaagagaccaaatgctgaaactttgccccctatctttcccaacactagctagacatatataatacaattactacatacaaatataaaaccttgttttctctctttctctctttgctattatgtgtatttgtgtttttgagttctttctttctcttccttactccttcccaatgaaaatgcccttttcttctctctctctctctnnnnnnctctctctctctcttctttttctctctctctattagtatagtttgacctcttgggtaaagtggggatagagattgtagttctctctctctatattcattgtttaaccatgagcactctcatagtttcactattctatcatttctccactatcaacaacatttttactctatcattcaaaataaattattaaaagactctttttttatttattttacaacacatttttacattacattatctatcaatttatttactctatcatttaacactttcaagagcttctttactttattatttaaaatacattattaaaactccacttcctctacaaatataaagcatgaagtaaattttaaaaaaactttaaaacaaaaaataagtttagaacatctactgtagtatatttttagtatagttctttaatttttttaaaataaattctctattttagagaaattattatgaatgctattttaaatatctcattctttattttacttagtacatttacattacattatatatcagctttttcatatattctttatttcatttataaattatttatttaatatattttattcatttttaaaaaaaatatatatataatatgaata

SEQ ID NO: 161679 - DNA, 2250 bp, Cannabis sativa
aaaaaaaaaaaaaaaagtaagtttattttatcataaaattcttaattaccataaatatattttgggagagcttttaaaaataaaaaattattaaaatatgattcatttaataaattttgggagtggaaatacaactcctatcttagcaaaccaaaattaccataatgagctttcccaaactaccggcacaacaattccttctttctcaaagtcacgattctgtgcacctatcaatactaaatctctgccacagccaccggaaccgcctctgctacaaccatcggaaccacaacaccgccaccgcctctgccaaaaacacaaccgctacggctccgccattttttgtacgtattcttctatttccctctttcaatttgtattgctttctccttttaactctagtatgtattttgtggtattccatcccccaatatctttttcaacagcgtgtgtggtgtgtctgttatgtcttggattttatgtatgtaaatacacctaaattgaaatgccccttctaactgtttgttgaaataattcatacaaatcaaagatattgtaattcaagttcttataataattttatatggatcgccaaattaggatagagaaaagatatcaaattcttagagggaaaagatactttgaaaattgtcaagtatgtatgtggacatggtttgaagtacatgtacaaccaatcttaagaggactgtattagatattgaagtcatgaatgcaaagcacactaactttcagtggagtataatttcaatcttgatgccaatatgttttactgtcatgttttggaacatggttgaattgactgttgaagtgttgtttattattaccctttattttaagccttaaagaagaaaatatgcctctcaaagtgactttagaactgaattcttggcttgagaaatttcagttgctttgtatccttctaatgccaaattatgttgtgctgggatgtatttgctggaaaggtggacaaaaaataagtgttaaaagaatcaccacttttattaaagaatcaactgtaaaaaccaccacagcaatagaaatgtatttgctttattttattctctgcctgtaataaacttttgttactatgatggacacaattggttcattcattatttagagaccaaaggaggacactttacgagaattgaattatttcttggcaagataacttaaggactcttttagtcttactaatctcatgtgctcattttacatatttcctatacagaattttcttaggttgctttactcattttgtaattaatctaatttgtttgttttgtggaagatatgaatatctgaacttatgtttgttttgttgtgctctgttttttcataatgaacctcatatgaggaagttagtcattttgttttcaatggaagcatatggaaagcgaggtcatacatatctgcgtgtattttttcgatgtaagcagctagcttaggtttagaatattgtatttttaaagggaaaaataactggggtgaagtcgtatgcttgtttaaagatacatcattgagaggaaaaaaagaactcctgaagtgtttggctcaccatcttgattgacatccgtttatttttaatgggcataagctggtttctcacctatatatgcagagtccgaatcagagctccaagaacagaacgtaaatggcagctccttcatcttcatcattgttatccaaggcaggaccggccttgcgccgtcaagtagtcaatttgacagctgctgccgctgatagaatacgccagctcctccagcagcgacaacgctcttatcttcgtctcggcgtcaaggctcgcggctgcaatggcttgtcctacaccctgaattatgctggttagcttttccctattatccttgtcctacaccttcaatcgaaaatttctctttgtgatatgatgtaattggaatttaattatcttaattagtttgataaaagaaacaatcattttttttcatctagaaatagaagaagaaagaaattaagtgatatttttttagaaatatttcttaggttttaaagatcgaggttgaccggatagttctttttttagaatatggaataatgtgttatttacaaattagtagacaacagttcaatttttcattctggtaagatttaatgaagctagtaactaacatagctttataagggtgtttgtacaagtcatttgtgatgaaagttgatttatatatatgttttttgtttttttttttgttt

SEQ ID NO: 161680 - DNA, 3623 bp, Cannabis sativa
  modified_base (1032)..(1043): a, c, t, g, unknown or other
aaaagtgagttttagaggcagagcaatctgccagtaataactgcaaattctgtcggtaaaagtattagcgttggaatctgccgcttatacttggttgttaatattaactattagtgacagatgtcagctctgtcgatagtaatcaattattagcagcggactacaacaatgggatccgccactatatttattaattattttttaaaaatgaatatattattaattgttatgattttttatataaatattacagtttaataacataaatactaaaaaaaccaacaaaatgaaaagatatatacatatagacaggggcggacccacatgtaggcgaggcggggcactcgcccttgaaaaaaattagaaaaaaagtgtatatgtaatttagttagttacgacatatatttgtaataaaaagtgatatttataaatgtaatattagttttagtgtaatggctaaattatattacatataaggatagaagtcaatggttcaattcccataaagagcattggtttttttttaagtttacttttgctcttatcttacaaaaaaaaaaaaaaattacgccccctcactttaaatattgagtctgccatatagatgttcattccaacaacgcagaagtaaaaaaattattattatttactcttcattaaattaaatttatacagaaactcaaactattgaatcacaaataaaagaacaaaacaaaataattctatatggtcttagatctaaagagaactccaaaaagaatttactattagaacacaaattattctttaaaaaataagaaaaatgaggtacccatcaatagttgttgaaaatgcatctgcatctttgctagaatctcaaatccaaggaaaaaaataagaaatatatttattaaaatgaatatatacttttattaaataagagcaacatacatacatcaaatgcaaacaaataaaaagagacagagttgttattttcttaatcaccacttgctcaatcaattcatggtagaaatactaataataataataatnnnnnnnnnnnnaataataataataataaccataactccaaataaaagtaccaataatagtaaaaattaacaacaagaacaacacacaagaacaataaaaatgaaccatatttgatagatattgaggtcctcttcgagacagaacaagtcttcaagttaaaactggctatttcatttcataaaaaaaaaatacataaaaattgtttatatagtatttcaaactaacaataacaaaattaacataataatcaagttcagctaatctttagccatacttcaacgcagctcaatcatcacaaaatcctagagcgatcttggcttcacaagaactcggctcacctactcaggaccctctcgaatgacacctggagcagctcctttgttgattgaagagcttggttgatttgggggtttttcctaggctgtatctttcatgacagattttactctttgtttccaaactcttgtgtcaatagctattgggctttttaaatgggtctcactaacactactccccaatattatagagttggacaaaagactcataatcttcctgagtagcatcttccggagtgcttaaagaccaatgcacgagaatttgctgaactacttttccattgaccatcttgagtcttgtagctaagatagctagaggaactattaacagtttgttggctatgcttgattccggtaatgggtagcatataggtgaattgctactataaaacgacttcaagagagacacatggaaagtaggataatgtggctgcttagaggaagttcaagagtataagttgctggtccccaatgagcaaggataggaaaaggcccaaaataacgtctacaaagcttattattaaggtgttgtccactattgattagcaataaggttttaacttgaccaatactaaatctcccagctgaaactcaatatgcttgcgtttcttgttagcttgttatgtcattctgtgttgagactattgtagattaacttttaactattgcaaaatagcatctcgtgacactaaatctttctccacagcttgaatggtggtagtgccccgagtgtaagctggaatagaaggtggaagtcagccatacatagattaaaatggtgtcatgccaatagcagaatggttgttagtattataatgatatttagcccaagcaagaaacttactccactattttggattgtcagctgtaaaagcacgaaggtactactccacatacttgttcgtaacttctgtttgaccatccgtttgtgggtgatacgcggaactcattttcaacttagtatacccatgagttcaaacaatttctttcaaaaggcactagtgaaaataaggtcacggtcagaaacaatagtgtgagggattccatggagacaaatcaccatgtttgtgaagagtttagccactttagtagcagagtattgagttggcaatgctccaaaatgagcatactttgtgaatctatcaatgaccactagaatgtttgtaacaccgttggagttaggaagtccaacgatgaaatccatagcgagatcttcccaaactctctttaataactcaagaggttgtaataaaccatatggagttgtgggtgaatacttcacggtttcacaaactaagcaagatcgaacatatttacatacatcttggcacatgccatgccaaaaaaaaattcactcaagcgaagaaaagtgcgaaccacccctgcgtgacttgctgctacgaagaaggctggaattgctactgtatagaaggctggaagtattgttgtgaagaaggttggtgttgatgttgtggaggagcagcataactctgagaagacgaaccaccaggcgactgcgattgaccatacatttgaataaagttttcaaatcgtgggttatataaattgcacgttgttcaggggtcagactacaccctaatattacatatagttgtaaacatatatgtcacagtgttaaacattttattaggaggcaaaggaggcccagttgactgactttgactgtatattttttcctttgcctttgaccctataactcacacttctttgatagtcacatctttttccaacaacttttcaaagtacgtcgaattgatagctagtatcaaattcagtaccagatgtatcgctctgagattgtcttttgaatcattttctattaagctccttacgcatgtcatcctatttaataaaacaattttagaacatataattaatataatattaaaatgttaataatacaatattttatttacttacataatcttctacagcgacttcgtcaacaaaaccaccagatgattgtttcgtttgagccaccctccatgcatcaaccacatgctcttcgggaagaccaccctatataaaaataaacaaataaaataatttataaagtattttaagataaattatattttaaaattaaaggataaatattattacttacaaagttgtgacatatagaagcctacgatcttgtgccttgcgtcgttggatatttcatcaagtatctatttggtttgttttttttttttttttttttttttgggcggccactttttttttttttttttt

SEQ ID NO: 161681 - DNA, 5352 bp, Cannabis sativa
actcgtagtgattcttaaacagttaagaaaaagaagagatagctagcggtggattctgctactctagcctacactggcgtttttttttaaaaaaactttctttttgatataaaaaaaatggagttacagaaaaagagaataaggaaactcatcagaaatagtagttacaacatcatatgtgtgtttgaattacttgagaaagagcattatttctagatgatactctactcggtgagatttatatgatataaagacatgatcttaaaatctgctgtcgatagggagtgttgtagcttgttcagtaatcatgagcttttgattttgcagggctctggaagattgggactcatcccctccttgcatggctgatatttttagatgcatggggaaggcttcacgtgctgctctttgtgcaatagcacgacatcttcgtttgcgaagcgagtaagtactaaatatattttgcttttttattattcttattttatttatttattcttttctaaaatactcaagtctatatatctacttacaggaattttatatttgcagtgtttttaaccacttacttgatgacatgccgttgcctgctaatgaggtgtcctcatcagtgcttgtcgcttcctactcaaattcttccatactgaatgtgaaaggtagcacaggtggagggaagcctggaataaatggagagattgaaaagggattgttgacattattttcatcggatagtcctggtgtgcaggtgcttttcatgtacttatgaacagttgtagcatgtatatatttatatgtttctgtcagtcgtatgtgctagttgaggacattttaagtgaaaaagaaccaggtgacttgtaatgtcttaactttaattttttggcattgaaactaatcatttatttttttaggtttgtgatcccaatggtcgctggtatttagcagacagcggattaagtcctggagatcttttacttcttacagggaaggcacttagccatactactgctggccttcgaccagctgcatcttatagagcttcttctgaatacttggccaataatggtggtggaaggtataattgcttttgtatgatttgaacattgtgatggatttattgcagcttgttcgaatttttggagtttttttctctcgaagttcattttgaattaccctatcaagctttgtgattgtagggcatcactagcatttagacttatgccacaaggcaatgcggtattagattgttctccaattgcagcggctggtcatatcattccacagagttatgtgccaatatctgttagccagtttatggacgatctttcagccgaggaagatattttgtgtagtcgatcagacaatgattatgtaagttattcataaatatatcctatatatgcctgtgcgatatatgtgtatgtatctacatgaactagaaaattactattaaagatgtgtggtagtggtagatgacaaaataatacatttttttttaacaaaacaagctattgatcgagaagaaaattacaagcgaaatattatttaagtgagaattatatgaaaaatggaagtaatatgcacacataagtcgtgatgttggttactagtgttttctgatgttttctttctgtacaattgcggaaaagtttgctgctactctgatacaactttagagcagagacaatcttcagcaatctggttgctttatttgcttttgtttataacatatgatatttgttgagaatattctacagagtaataggattagcagtatagtaatattggttcattaaataaagcgttctttttcctaatactattgatcatcaacctataaattaagccacagttcattaaatgttatgcggaaaaactaaaatctcatgtttgaaaacttttatcaattggggtttggttcaactcttcccttgtctagtggtatttttgtttagtctttttgtcttctatagacttcttgcctatgcaagttttatggtgagaaaagataaaagtgtagaaaaaaaatgtcataagaaaataatttttccattttttcttttttctttcttgaaaaagagaaagaggctacttgtcttagattgaaccctcccccgttaagtattgaagaccctcacttgtgccttgtggtggaggaaaaccttggttacagaagttttagcacaaaacttcaatttaaatgtggttaaattggaaaatattatattttccaatttaatgtttatgcagttttttttgggtgaaattatattgctattttatgtcttgtctgaattccttatcatgttttttaattcacagatagctcggaacaatttaaatacggaacaaccatcattaagaagtgttctctcagatccgttatcgtgagtgattttttttggttatttatctgttcaattaatatcttttttggggtggggtgtttcaaagctagttatattaaatattttgttttagaagcatatgcactaggcttttgatgactatttgtgcaaataataatcttttttttttttgcatttaattcatctactttgttctcatgaatgaacattcaagatgaaattgtttatttggatagcatgtctgagagatttttgtgtaattgttattattactaacattaatttatttcctttttgggggatcagtggtgcatttctcgaagatgctacatttgtttcgtgtggacattcatttggtggtctaatgttgagaagagttattgaaatggtaagtagatttaatccccctattttaatttagtggacttttaattactttatcacaattgcttaatgatattgttactacgtgaatacagtttctttccttttcacaaaatttgtatatttttcttaatttggcatgccaatactcttatgaatttctttttgttggtgtatttactttttactttgagtatctttacaatgcagatttttcgacactttgaactaagcctctattgtttttttgctaatcttgctttctgtctcccttatatgatgtttttattacctctagatgaataagatttgtttgaatcatgactagaaatgttgcttaactgatcagtccagatgtactctctgcagtcaagaaattgcgactggggcgatgatccctaatattggtatgttcctttttaatttaagtttttatgagtttattctatcatcacatttgattttcccctctgacatttcccaatgctactacacttctcttgttctaataaactctgtcattttcatcaacagtaccattattatttatttaatttagagttacttttggtattatatctttatattgtaaaactatttactccccagctctaagagctgcggctgcagctgtgaagcatgaggacaatcgcaggctttttcataatgctgctctcagaaagcgtcggaaagagttaggtgatcaaattgatccattgaggagaccaaccagggtatgtacacctagtactttttgattggtcgcttatttgggtgctggatattcaccaatttatttcaatgtataagtaatttttgttcagattggaatggaagaagatattaagaagttgacagatgatgtcgaaagattaatttaaaatagctggaaagctgttcatactttgtattttgaaaattcagtagttttaggagtctagcatatgaagatagaaatgatagtttttcaggcacttttatgttttaatgggagttcagtgttaaaagttaaaacacgggcttttatatattagaataggttgtttgtatctttcagagccgtactgaatgttatgcaactttgagtcactttcgtcactctaaaacagaaatatctcccttgatttgatacatttggtttagtgttagtacctggggtttgagtcaaggtgatttttcttccctatattttattgatagttgttgatggctttgggagactaatagatgatgctgaacaaagaaatagtttcttaggttaactattggaaagatgccatcaaagtccctcattttaagttttctgataatacatttggtttagctaatataaatcttttgattgatgaatgcatgaaatatgaagaaaattgtgttattgggtatctatattgatcttatcctaaaaagtctagcaaaagtgttatctgttctgttggaagttggccagttaaatgtttggaatcaaatcctcttggttatgtttttttggatttggttattattgaggtgctaggaggcttgacagatgaatatagaaatagaaccagaccattatgaaataaggttgatgtagttctatgtatgagttaccttaactgcagtaaaaggttgaggctgcaagtggggaagtcagtttactcagcagtttgttgatctgtgaccaagaagaattttaagataagcaagttttttttggttagatttaattacaccaatataagcaaggaaatattgagtttgtatgtggtagcagtaaatattgtggggctttggttgtttggaggacagaagaatctaggcattggaagagtcataatttcttaattcatgacgaagggccatgtgcttctttgaaagctgaagattttgactggttatcatctttggaaaggtactcacgaagtgagcaatactcagtttgtggatcattctcttaatattgcatttcatagttgggtcgaatttaatgttacggaatttaattttgtctgacagacattatggttagggaaacatagaatatttttataatgtacccacagtgttatgattatttctcgtagtatcttagtattggacactattatggttagttggtgcaaaagagttaagttttgtaaggatttgttaggggatttggcctctatttaatgttatttttttctgttgtccccagcacttgtgttttcatttcaatttttaccggtttgcttatgaaagaaaatggtttattttagtagtttagagcgatatgccaattgttttttcattttctttctttgttttggtcaattctttgctcgggttcaacaattttttatatgggtgtataagttgtttgcaggaaaatggagatattggtgaagacgggatgattcgtggtgtgcagtatccattttcagtaaatgaaaaagtggtaattaaggtatgttttgttttgaatgtgtatatttaagagttttcagttacgtttctatagtgattacattttcagtgaccccttattaagattttaatagttgtttagaattaagattatattttcaaataaataaactacattaatcatttattaaaataatattaaaatgagaaattg

SEQ ID NO: 161682 - DNA, 2159 bp, Cannabis sativa
taactgtaatttaggttttgttgttttctatatcgtgatatagatacatttgtgtatatatatgtccatggcgagatcgatgtttttgttttcttgtatgctttcttgatttttatgctgcttgatcagctgcatttcagtataacatggagaatgattcatttcctccttcatcggagaccaataccgcggctccgaactcaccacggttcgccatggcggttggctcagctagtaaccagactttcaccgatatatcgccagataccagagacttcggcacacatttcttctcaatgtaccgcgcaactgttcagccgcagtctccacagatcccgagttccctgtccctcactccatctaccaggtcctcctccatcggcgccgatggcgaggagaacgccactgagcgtcgcctaaatctagctcgactcatccttgaaagcaaagaaaacaattatgacctcatccaaaagcacctccaggaccttaacaaggaggtcgacttcctccgtcatgaaaacgccgagttacgatcgattaacagcgaacttctcgagctcatctcttcacgggcagctttccggagtttgctactctcgtctaccaatcaatccctaatcgaaaccttttgcagccttgatattggcggtctttgtagtaatactactactactaccaataataatactaatgatagctctggcttggatgatttctctgacatcagtccaaccagcgtgatggagaccaacagattcgaaaggcgaaatccagatcagcgagtcactctccctaaaagcatttctgttcgttccacaggctaccagaaggtcaatcctggttcgagcagagaaggtccaagtcgcgcttcaaccaaaccacgaacagtcccgactcaatcagtctctggaacggtgagtgagttacattcttccgagttatatatcatcattttttttagctaaatgactcacacacgtgaacatacacgcccaaggacgatttcgttttcaattgattaaacatattcttgtcggccttaattcgcttataaatcttgattttgtgatagtataattacaattgattaaatcttgattttgtgatagtataattacaatatattgcgtgtgcagcaaagggtgtatgtgcctggagtaaacggtactaatggtagcagcagcagtggtgggatccagaaggaggagcaagagaatctgtctgggttggaaatggaggtgtacaaccaagggatgttcaagacagagctctgcaacaagtggcagcagactggggcatgtccgtacggggagcattgccagtttgcccatggcttggacgagctccgacctgtgatcagacatcctcgttacaagactgagatttgcagaatggttctggctggcgatccctgcccttacggccacaggtgccatttccgtcactccctcactgagcaggagaagttgatgctgcctcattgatcaccatggaagtgaaattataccctttagcaggcagattaaggctctcattaatctcatcgtcatccctcccttttagtcttaatatcgaatgataaattgggttataattcattcaataatgctggtcaatctaatgaactgtgatgattggggaatatgtatatagaaacttaatgatcaaactgtgattaaaacaaacgtaagtacagacaatatgatgtggaaggataaaattgtaataaattgataagagagaacaaattaggatgataatatttttgttgaagtggggattctagatatatggagtgcgaacgaaaaagctgaatgttgtttttacatttctaggacatgatggagaaattaatcagaaatattattttgtttttctttttctttattttttttttttaatctttttgtataatttcttgattagctcattgttctcctttcggaaataatattggctttctgagcagacactttggttgaatgttgatgatgatgacatttctatatgtagttgcacgaaattgttttatttgggcttgttattacgtccatatttcatatttaagttggtctcaagcataatatataaatatatgttagtgtaatttaattaggttcaattagttattgttaagtgtaatacatatttaattt

SEQ ID NO: 161683 - DNA, 1476 bp, Cannabis sativa
gagctgcagttgtaagaatcacgaactgggtcggtactctcgttatagaagctgtaattatcgtacctaagaaaacaaccgtcgaggtaaattcgagccgagacggaaggcaagcaacgggggagcctggttcgactggcggcgtagcagaggagacaatccatatttgacaagtcttgatgacattgggctaatccgtacatgggcagtaacgcatttgtagtgttatcgaaatgagtggcccagtggcttgtgttgatggcttgagctaatccctcgaattctttgacgaaagtcggaaccacgctcacattcgccggaggttttccgacgccgcagtagagactggcttcggtgattctgggatccgagagacatgggcatgagagaaaagagatgattatggcgatcgaaaccaaggagatgaaatcccatgtcctgtttttcccatttgaattcaaaacttgcatggttctcatcatcaatttactggataatgtaagttgccaacaagaacatcaaaacagagagagttaaaaaagaaacaaaagagagagaaagagtaaaacaaaaaagctgccaaatttgactacaaatattactactgattcttctgattgttttcttttatgttttttttttttttttgggtgtcttatcactgaacgtaagtgaaagcaactgcatagaaaagctaattaaggtgaagattataaaactaattacttggatcacacttcaaatttcatattctttactttgtttattattttagagagagaaagaagactttagtctctttctttgctgtatcaaaattgactagtgtgatcttttgtaattaattgcactaaaaatgttgttcttttctttgtttctttctagaatatattattactatcgttagctcacgtagttggcatacctgcttcaacccatagtctcttttgacttcaattttttacaagtgttttttccatcaactaaagtttttttaataagaatgaaacttttgttataagtcgtttttttaatgttgaatttttcttcctttcaatttattatttgtttaatattttggaagctctcctgtctttttctccacgcattaacatcgcgtatatatagaaggtcatatagatagagcactccaaacagttttcctcgttgttcccaaataaaataaataaatagaaaaagttgttctattttttaattttccctcaatattatttaaaaattacatatataaattttttttaatgtgtcatggattcaatctttcaccactttttttttttttttttttttcagatcagtcactcacttaatataactcatttatttagtaaatttagactttcagaaacttatataatttatatttatgtggagcaatatattcacacagtgagtaataatttatatccatagtaaatattatatactcatgtgctaatattttatagttaagtt

SEQ ID NO: 161684 - DNA, 2836 bp, Cannabis sativa
  modified_base (687)..(700): a, c, t, g, unknown or other
  modified_base (2733)..(2739): a, c, t, g, unknown or other
  modified_base (2787)..(2798): a, c, t, g, unknown or other
ttttaaaatagaatgtaattattagggtcacttatctaataattacacactaatttctaaacacttcttgtggtgtggtaggaaactaacctacatataattgaagatgagtgtaatttagagtaattgttagttttggcatatgtatttcttgagaattacataccatgtaattggaggttttgttgggtgttttgagtttaaattttcacttccacagagctgctcacgaagcgggtgctgccactgcaattgttaatctaggtgagacgcgagctgatgatttggtgcctttgaaaatcaacgctcgcctgggagaggtatagtatgttgtgcagtaaatatttggaaaggaaatgcattctaattctaacacaatcttaatctttctagatcttgccgagagtgctcaactttggatccctcagcatcccatcccccaactaatgctacataagaaaatgttttcagagatgtaattatataaatatatttatatatatatggaggagcttttaatggttacatcaaatatgtaactatcgtggttatatttatttttaactattaaatcattgttgaatgattgtgattaatttaaaaattaaaagaaaaataaatgataaataacttgtaacttgatacttgattttttttaaataaaaatttaattaaaattaattatannnnnnnnnnnnnnactaataattattaattaattttatgcaatttattaataagtaaagatcttttagtaattatttttttttaacttaaataattaaaataattgtaacaaatttttttataatttacagttacacataattttaattaataaaaaatagtatgaatgacctctaattagaagtaattttatgcatatataactttgggctatttttctctcaatttttttcttactaacaacattttctcatacaaataataaatctttcaagtattgaagagtcgtatcccctgatacgttgttgtctctctgtttgttgagagttttgtttgtctgattttggctgttagtgctgctatggcttctagtagtggggtagggaatgatatggctacaagaggtaatcttgttatattggcagaggaagagaaagaggtactacgggccctagtgaataggacaggggaggtggtaatagacaccaggtggtgtttggtgggtaaacttttgacaggtcgggtttctgatttcaatgttttccagaatatgatggcatttctttggcaaccggggatgggaatgtatgttaaggaacttaactcgaatctatttttatccaattctatcacgagattgacatccaaagggtcatagatgggagtccgtggacctatgatcggaagccttttatcttcgcaagattgaaagaaggggacaatccaaggcttgtcaaaatcaaccatgtcgacatgtgggtccaacttcatgatttacaaaccgggaatatgactcttaatgtggtaacgactttaggaaatttcatcgacacatttcttgaatcggatcctaataacttcttgggagtttggagggattatctacgggtctgagtacggatcaatgttggcaaaccgatcaaacaaagaatgaaaatcatcaaggacgatgcatcatggtactgggtgaatttcaaatatgaaagattgcccactttttgttttatttgcgaaatcatcggacactcggagaggttttgtccaaggattttcttgaagccactacatctccaagaaaaaccatacagcttggaactgagagcttcgacacaaaggcgacaggtgacctttggggcacaatggctccaatcaagagcggcggtgcgtggggaaacacatcaagatcatcacggcagtaacccagatcacaacgttatcttgattcctaggaattcggaggtaattgggggattggttggcatgaatcatggtcatgatatttctcattatcagcctcttaatgagaatcgaagtagcaggttggagaatttggaagtcaatggtgaacatgtgtctttgaatgtccacgaaaatggggatttcttcgactctacttttactactgtgattgactcaaaaagaagaaggccaggtaatgggttggggggtatcgtgggcccagaggagaaaggttataatgatgtaatggatgtcatggagcaggacattgtggggactccaaaaaatggatttttggcgggctctggtttccagacccccccagagccatgagttgcataagttggaattgctgtgggcttgggaacccgcgggccagacaattcttagcggaccttgtgtcccaaaagaagcacaatttattatttctttgtgaaactttatgtagtaagggtagtttggagagaactagagcccaattgggttttgatagttgctttgtggctgacaatcggggacacagtggaggtttggcgttgatgtggaaggttgcgagcgaagtggtggtacagggattttcttttaatcatatcgatgctactgtccatcttcaaaactctcttccttggcgtttcacgggtgtttatggcgagccaaaacgagagctgcggttcaagtcctgggatcttcttcgctctcttaaaaacgatagcaaccttccatggtgcattatgggggacttgaacaacttgggttctcagcttgagaagaaaggtggtaggacttactgttggaatttattttacnnnnnnnttagatctactcacaagtaggttgattaacaccttaaatatgaacttnnnnnnnnnnnnaaataaacacatataaagttcaggaaaccttacattgg

SEQ ID NO: 161685 - DNA, 1049 bp, Cannabis sativa
gttagaggtaacaaagcggcttgtgaaaggagttgcagagtcatcgaagtataatggatacgggttaggagatgtagttttgtttggaaataagaagcgaatgaagattaaggatcataaagaactttatcatgtctttcttgatcatcgtgtcaaaatactttatcagtgttatgttggacaatctggatggaacaacaatttactttccatgatttctttgctagaggaccctgatgaacaatatcttctatacttgaaagcgaagcaatccgtgaagaatgaggaagcagagaaaaatcataagagcaagtcaaaatcaagaagtaaacagaaagaaaagcgatcaagcaaaaaagaaaaggagggtaatggccactctggaaataaagaagaggacaatgaggacaaggaagctcctttgactattgaggattttgtaagggaaaggttcaattgctttgcagaaaggctgtacttttgcgttgagaatttgtataaacacttacctacctctctaatttcacttgaagaattggagaagatgtttgaagcataccgctctctcaaatcttttcaaaatctggtacaaaatgtttcaggtgatgtattaaagaatatgaacaagtctacaatggatgaagattacaactttgtcaaattcaatttggcaagaacaaagaacctgcaaacactacaatcacttcctgaaaactttcctcctctatattctacagaggacttttctatggacattatgatgatgatcagaaaattctgcttgcaaaatgcatgcatggtgttctgtactgtttctagttctgctaagctggacagtacagaaatgttggtcatcgatgaagctgctcagctaaaagaatgcgagtcagccattcccttgcagcttcatggtttgcgtcatgctattctcattggagacgaaaggcaactccctgcaatggttagaagcgaggtaatttgagctttactaccatacttgtatttcctttgtatgttttttcacttcttggttaattgtttaatgtttt

SEQ ID NO: 161686 - DNA, 3091 bp, Cannabis sativa
acaaacaataaaatttcttcactttttgacagcaatgggaatgaagtcacctcaaaggaaggactcactgcaactatttctgcttattttacggatttatatactgcttcagcatctgatgccgaagctttggagtaggttattgcaacaattccaacaacaataagtcatgaaattaatgcctctcttcttcttccttttactattgccaaagttgtcactacgcttcaaaccatgagtcctgataagagttcggaaagcgatggaatgtcagctatgttttatcaaaacaattggcatgttgttggtaatgttgtcacggatgtggtcttgggaattttaaacgatggccaaagtatggaattgattaacactgctgtgatcactttaatccctaagattaaaaaaccataaggtattggtgattttcgtccaataagcttatgcaatgttatttacaagctcatatcaaagatgctggtcttaaggtttaaagaggctctacctttggtaatatttgaaacacaaagtgcatttctatccaataggctcatcaaagataatgtattagttgcttttgaacttgtccaccacatacaacataaaacaagaggaaggaaaagtttctcagcattgaagttggacatgagtaaggcatttgatagagtcgaatggacatatctttgggctgttatgagtaagatgggttttcacagtaactagattgctttcatacgaaattgtctatcgtcaacaagtttctcgttttcactaaatggtgaaattgttggtcatgttaaaccaacaagaggactaaggcaaggggatcctttgtccccatatcttttcttaatttgctctgagggactatcgaggatgttacaatatgaagaagctgctagaaatctacaaggcctacgacttactaagcatgctccatctgtctcacaccttttgtttgccgatgatagcctgttgttctgtgaaactaccaacgcatcggctctcacaatcaaaagagttttgaatctttgtcactgtgcttcgggaaaaatgctaaacaattagaaatttgtcatgtctttctccccaaacactcctgaggcggcaccacattttttcaaccaaatattgaacatgccgataagtgagtatcatgaacgatatcttggtctaccatcatactcaggaagagacaagaaggatttatttagcaacataaaagaacgtatttggaagcttatgcatacttggaacgaaaagttgttctctgttggaggcaaagaggttttacttaacgtggtcgtccagtcaattcaatcttatgctatgagttgtttccacttaacaaaaacttctatcaacaattaaaaagtatgatggccaacttcttgtggggatcaaataaagatggaacaaaaattcattggaaacgatggaagctactttgtaaatccaaatttgacggaggtatggaatttcgttcttttgtgcattataatcaagctctcttcgctaaacaagcttggagaatttttgaaatgccagactctttgttgagccaattattgaagtgtagatatttttcaaataactcatttttggaaacaagtttgggtcattcaccatccttaacttggcaaagtatacattggggttgagagttgttaattcaaggactacgtttcaagattggtaatggctataatgtacaaagtggtttggataagtggatttcaggattaacagagttcaagccattgacatatagaggtccgcccacacttccagtaacacacttcatcacagaggaaagagagtggaattcggagcttctaaatgagtttttttggacaaatagacaaagacaaaattattacaatcccattaagcttttttccatcaaatgacagattgattcggcatcatacaaccacaggtgtgtatactatgaaatctaggtttcatttggcagcaaatttagaagagcaacttcaatcttcctcttcgaacaaccatggaaattggtggaaaactttttggagtcttaatcttccctccaaaattaaaatttttgtttggaaaacaatgaataatgcactttcaacaactgctgctctccacagaagaaaagtcattaactcaactgcttgttctatatgtacgagttcatgggaatccattggacatgcactattctgttgttcacaagcaaaatctgtttggaagaagataacttttaacattgatttccaaaaagcttagcatatgaataatggggactacatcatccacctctccacactatataccaaggctaattttgaacatatcattagtatcttgtggacggtttggaaggaacgaaactaggtcttccatggtggaaaacagagtgatggcgatcatatttactcacaggctatgcaatacattcaaaagtttcaactggctgctacaaaaaccagtcacggtcaggctgcaaaaaataccacttctgctcaacaaccaacaacaacattcaggtgcaaaaaacagcaaatttcatggcagcctccacacaacaatggtttgaaacctaacgttgatcctaccttaaactccaccacaaaggtacttagtattggggcgataattagagatcacaatggccatgttatagcagcactttctaaaccagtacaaggttattttcgttctgacgaaatggaagcaaaaacactttttcacagccttaactgggtaatgcatatgcaagtgcaaattacacatattgaaactgatgcattacgtgttgctaatgctttaaactctccattgaaggatttatctagtttctatgatttaatctcaaatgttcattgtcttttatcctttttccctgaagctgttatttctcatactatgaggaatgctaaccatgatgctcatagtttggcaaaacatactttagtgttggatcaagacatgtcttggataggacaaattcctcatctggtttatgctattgttgtaaatgactattaatttataatgatagtttaaactattcaaaaaaaaaaattaatattttgtaatatgattttttttt

SEQ ID NO: 161687 - DNA, 2659 bp, Cannabis sativa
cagctcgagcccatgatgtagccgctctagccatcaaaggcgcctcagcttacctcaatttccctgaattgagcaatgatcttccacgccctgtctccacggctcccaaggacatccaagccgccgctgccaaggcggctgcagcctttgagggagccaagttaccatgtgcaacaattgaccatgacacacccgaggcagaagccgaagccgagcccagcccagccgagattcccacgtcgtttagtacaacttcgtcttcaactaccattgaaattggtagtactcaagaatcaactagttctccttcttcagctgataattatgaggatacattgttcgacttgcctgatcttttcatcggcggtacggagagcagcactgagttttgctattatcctccgtggtggcatttatgtgcagccgatacaggactccggctcgaggagccattcttatgggagtactagctcgctcgtaatgaaaccaaaggccacattggagcattttgtcaaacagattctgatcgaaattattaaccatcattactatgatctgttgttatcacaatcttccaggcaacaaaggccccagttctgaactcaaaaagggtccaatgattgaatcttcgaattgaggtttggcttttaggccaaaagaaaatatgggttgtgtttggtttgtttatgtatgtttggttcattcaggatcaactgctactacaagacaaccgagaacaaaggggtcaattagtttttttcttgtttgcttatatttgtccgtaaagagagaaagagagaataatcttcagtcccaagtcccgatgtatcataaatatatgagcaaaatacaaattataacaataattagtgtttttcaactttgtattactgtgattagtatgaacaattattgaaaagtactcaactctgcttttcctacagcatgattatgagcctttagactctagaaactgtatgatttattggcttgagaaaataataaaaagcaaaagtagtacggtaccttcgcctttactagataacgctcactcacactcgctctcccactcagctttgattaaaattagtttaaactgctataattttgactggtattaaaaaaacaacccacctagagaaatatctataccattttaagagctaaaattttcttttgcttttttatggaagaaggatttctattggctaatgcatgcatcactgagtggaatattttcttttcttccttgttctgtttccaacatgattaagctacggaattcaaactgattcccaatctgtgtggagtgcggacacaccccacgtaggtgatcaaaactaagtgacaattaagtgactaagcaaggccctttttttggttataagaaaattatacatataattatgtagtaggtgcttatttatgtatgtggtattacttataagcaatataatttaaaggcctattatccaaataacccttgttgatgccacgtactatacactagtggttagtgacctcaccatcattatctttgttcatattcaacttccccatgattagcacacacttcatttagttattgggccaggaacgcaagagagacaaactatagtagccaaacatgcgtaattgtagcacataatatactattaaaatactattaatttattttgttggtgacacactgtggatgaatatgtctaataattgagttcgcttcagtaaccaaaaacaaaattaaaaaattggacaatgggtctgctaatttgagcaatggaaaaaaaacaaaaaacaaaagattaaatttatgtcaatgatgcaatgaaatcaaaagtaaagacaaagggaaacagtagagttaggaatcttacaactgttgatggtactaaaaaaattcattgcaagtaactcttattttgtccgtatatattgtacaaccaaagtgataggttacagtataatgataatgactaatttagtaaatgtttaagctaataaaacttttggtaataaggaacactcataactgaattgatggctcgtttcgttagtaaatctcagaattaacaaggtccatttcacactctttcttcttaacctgttgcttttgttttgtttctagctcttctcctttattggattatgaaatgatgaggtatagtggagtagttttcatacaagctaagcaattaaagagcttttttgttttccttcttttaaaaaacttttgtctaataaattgcatgtgattacagcctctaggagtattcaaccactccaatcagcatgtcataagttataaccatttcaatatgcagtaatttagaatttcatatttttgcaatagtaactataattcattagttttttattaaattatcgtaactataatttttcactaaaatttatattaacataaatattaaaatataatatagaaaaattttaaaaaaatattataaaaatatgttaatataaaaaaaaaaaaaattacgctttaaatttttttatttacaaaatacctacagtaaaaataataaactattatttatataatttatttggaggaggtttcaataattacatttctattgtaaccatcatggttacatttttttagccattggatcactattaaatggttgtgattaat

SEQ ID NO: 161688 - DNA, 2275 bp, Cannabis sativa
  modified_base (1211)..(1222): a, c, t, g, unknown or other
aaaaaaaaaaagtaacttctccatctttaaaattaattcttctataaatagtattataaagacagatctacacatatgggagctttgcccccttaaatatattttttttaattttttaatttttttgcattgtatttttgtaattttcatgaaaaattaataaattgacccccttaattttatttttttacactttataaagttcaacctgtgcccctgattacaaacatacaactacaagtttcatttaataatactaaataattatttaaataaaagattatatgagtatcatgattattcatcatcaatatcgtaatagtgcacgtgtttaaaactccataaaaatttatgaaatttggttttgttattgatgggatgtgttatgtttatatactgtagatttcttttctctgagtttttatttatttatttatcttttttgtgaatcatacaaattcatcattattcactctaaatgtatacaaaataaattcataaattaaggatacatcaaaaatttaggcaataaacttcctaaacaagaatctgtcaaaaaaaaaaaaaaaattgtcagatgagattagattactagctagttctaaaatactggtcgtatcatataaagaactcttaaattgattaaatagttgttcatatagtgaaaactatttttttatctatcttctttcatctctcttgtaactttagatatgattcaataagaaaaaaaaattattgtgtctgtattcataccatatatatatataatatccatcttcatttaaatataggctttagctaaatattaagttacaaaattattacgttaaaggataaaagcattaagtaattaaaataataaaatatatgtgattttgctccctacttggatacacttgtatcccatttttaggaaaagaactgactttttctaataatagagggaatcaaaaaaagggagatttctataatcaatcaatcaaatcatttcaattttcatcttataatataattaaataaccaacctattcaatcatctaaacggttcatatcaaatcatatcatatcatatattttattggtgtattgataggataacccaatagagggaatatctcatcacaacttgctctttattctttctaatttaatttacaaaatccccaagaagtaattccacccacatactttattattattattattannnnnnnnnnnnttattattattattatttaaagtttcacctaggattctcaaaaagtttaaaacagtttttttttaggttgaaggaggaatttatagttctgtcaaaatttatccaaactatatcatacaacagattcttttcttatacactataaacagtacaactctacatgtgaaacattactattcactgctatacatttattttattacatttattatttattatatatgtgtagtgtatatattatatataaaataaataaaatatattaaaagatagaatacttatataaaaagatttggttatgtattttgaaagacaaaagaaaaagaaaattgttaagagtactgttctcagaataaccttactttcatttaaggcaagataaaattcaactcggaatatataatactcaagatttggtgtaaaatttatgattaaagtagtctctagaattacttattaaaaaaaataatattgttcacaagatcataatataattaattgtacatatatatatatatttcttggcattaatttctactttaataatggcatatgagtggaaagaaaagcatgtggtgttcactgtacgatgtttatttctcatgtacaacccttcttataaaaataatattatagtactagctagtacatccattttattttgatgaagaaagtgttatatattggtataagttaggtaaagtatatagtcttatataattgtttttttcatcttttaattaaatgatgtagtggaccatatattatatataatgcatttgaccttcttgatctgaccttgcaattatcctctctaccaacttaattaatcaactttgaaataattatattagtggaatctctaaggcaatctcctcacttagacagtctatacttggatatgaatatttttttagtgggggcaaagaaaatttcaggatatatatggaaatttacaaaggactgatatgtttaattaaataaatatttatatatataatttgattgaaggaaaaaaaattgtatgtgtactttctcatatatataaatata

SEQ ID NO: 161689 - DNA, 8571 bp, Cannabis sativa
gggcacaaaacccaacagtctgatggtcgtctcgtgggtatatgtgggttggggtctgatgggttacgtggggggtccgatggtccgatgggttatgtgggttggggtccgatgggttatgtgggttggggtctgatgggttatgtggggggtccgatggtccgattggttatgtgggttggggtccgatggtccgatgggttatgtgggtcggggtccgatgggttatgtgggttggggtctgatgggttatgtggggggtccgatggtccgatgggttatgtgggttgggtccgatggtgttgtgggttgaagtttgagattgaaggttgttcggttagtgggtgtccgtgggagtcgtctcggtcggatcggggttgtgggtctccgtcggagtcgtctcggtcgaagtgggggtgagggggctgggtcggctcgtacgatgtggtgagggggttgagggttcagttgggttgagagagaaggtagagagatataggaagagagagagagttgggttgtgtgttatgtgagggttattcttgagtttttttataaaagtgtcatatatgttttattttgaaatgtattggtttaagaataaaatattagggtttttaaagtatagtttttcaaatttccttaaaccaatatgaacacatccaaatcatcacaatcattattttaaatctattattcatgaaattaaatcattaccatggctctgaggccaattgctggagattattttaccaggatctagatttatcaacatgtatattgattaacaccataaatatgaattatctaaaataatagaattaaacacatataaagttaaaaaaccttagtggcagcgaaataatatgtctcattccgcttagatctctaacacttgttcctttctgtcgtaaagtattatcaagatttgaccccgattctccttcaggtgtaggattcttcgttggattcttcataatcttacacactatgacactaatatattaaaaaaaaaaatacaaacacattataaatatataaaatattaagcaaattcccatgagaatgagaatgtcatcttcattctcaccttgtttagtatttcgggagaagaaaaatacccgttcccaccacattcccctttgacgagaaatctctactctattggctttaggggtgggtccccatcccggggaaaatgtgcatgactagagtggagtggacttggagtggatcgtgggtgggctgtggagggagtaaaaagtgcgtaataaaataggaataattagatggtatacttcttttaagttgttatgtttaatttttacatgctctttctatatttttcatttttaccctttttttcaacaactctaccaattatgcccttatcatctaacgatactctgactctctatttaactctaacttatgtagctgtgaggaaataatttgtaatggagttagtaggcacatttcaattcaaatttaaaataaaactatttttggttaactcatcaaaaaacagtatatttaaacttaccccaataaaatacatggcggtttgctgctaaaagtaaagcgatgagtgggtggtttctccttttttttttacaatagaagaagcatcagtccaaatttaacccgcaaggcgtaaggtgctttaatctcttcttctttctcatcattattcatctatctatcaaaatatcatgtatttatttatatacatatattaatattaatgtactcaatttacgtcctttaaataatcgatttcattacccatttttctctgatcacatttttgctactccagcttttatggggaagcaagttttttttgttgtgaaaggcagggttttgaaaagtttaaagcatcattttattactgttattattgttagcctgaaatttatttatttgcatttgtaattagaactgaacttgggttatgggtgcatttttcttttttttgttattatttatatatttttatgattttttttatcccaagggatttgactgttcatacttcattctcactcttgtgtttattatttcacgcagaagtgactgcttcaaaatgatggagagttgtaatggttataatgaaatggtagttggaagcaaagacttgattgatttagttttctcttggtccatcgcagatgttatcaatggtgatctctataaagaacaggtatactctatttcatgcatttttgtttgggttaaaaaaaagacaaaaaaacatagtgggcggttgtaattcaatatgtaatatgcctgtactatttacattatttatttatatttaaacagaatactgaaatgaataagaattgtttattttctttctatcaatgtgtcactgaatactgtttagtaatacttaaaaaataatgtcagtggaaaagttgaagttagtttgacacaaaagttgcaatcatgaactaggttcttgtagtatggtgtttggttggaggtaataaaatggaatggaaaggaaaggaaacaatcttcattccattcctttgtttggttgcatactaaagtgttgggaatgtcattctaatggaatgagttttggtggaatgactattccattttgaagtggaaagaaagaccattctgacgtatgatgagaaaaaatttaataatttttttatcaatttttttaatgcattttaaattttattccattcctattcccatttttatgttttcattctttccaaccaatcgccacctaagttctttattcatttaaattgacactgatagtttgatagatgtgtttttaaacttatggactatatccttaacattttgttaattaggtgaagacgattccctatatcttctcatcaacaactgaatacttgagctcattcatcacccctctgatagaggaaacacatgctgaattgcttaaaagcttcaaagaattgtctgatgcaccttactctgaaataaaatctttgaagcggtctaaggattttaagcctcctaaagatttgctgtacaaaattgaagtggaaagaagcatggaaaatgagaatgatatgaatgcatttgagcctgaagttggagatctcattgccatcactagtgtaagacctacatgtgttgatgatcttgaccggcctgaaagatcctatctcattgctcatgtgaaaagggtgagggagagagatgatcattttaaacttttaatactatcttcaaagcctgccctggttgatgaagatcacatggaagagaatgggaagaggacaaagctttttgctgtaaagttgatcaatatgactacaaatgttcgtataatgactgccttaaactgcgatcagaaagcagtgaacatgaacatcattcaaaatgttctgcaagctggattttacgtaagatgtttttcatgttttgcctgcatctcagtatcataaatatgtgtacactaaatgcatgacttaacatatttaatattgaataaaatcacatgtaacagatatcatacttaaaagttataatgattctaaatcttgatagttaatttgtgttattgacacagaacaaaattatatctaactcttgcaggatgtagaaaattgtaccatctgccaatctgatagcatttgcagtgctatgaatccagatgtatgtgccagaatgcgcaagttgggtttggatgattcacaacaagatgcaattttaagctgtattagagctacaaagtgttaccatcaaaatactgtcaaaatgatatggggacctcctggaacagggaaaacaaagacagttggttttcttttaagtttgttgcttagggaggaatgcagaacactcacatgtgctccaacaaacactgcagttctggaggtgacaaatcaactcgtaaaaaatgttgtagcttcagctaatgatgagatgtatgggctaggagatatagttttggttgggaataagaaacgaatgaatattgatgattatgatgaactttatcgtgtttttcttgattatcgggcagacatacttgctgcgtgttttgatccaaatttcgggtggagagatactttacatgacatgattagtttgcttaaggaacctgacaaacagtacagattatacttgagaaagatgaaaggggaagacaaagacatcatgaagaatgataatagtaatttgataaaagaatgtgtgaatttgggaaataaagattttgaaagaaatacagaaaaagatgatagtgataaatctgttgaagtcaaaaaaggcaataaagatatgaagcagttcattttgaggttcttgaaagaaaacaagaccgataaaagaccgaacactatgctacatctactgagagaaaaagaatcaaagcaagagggacataataggaatgatgttcctgcaaagaagaaaggaagagaaggggaaaaagtacatgatattcctatgacttttggggagtttgtaaagaagaggtttgatattgttagacaatggatgtgctttcttattgagattttgcgtacacacctgcctacatctgttatttcaccagaagtggcaaagaatatgcttgaagctgagaaatctctaaaaaaatttcaacaagttttgcatggtgtttccaacgaagatttaaaggaagccttcagtagaggcagtcaatttacaaacctcaatcgtgaaaaggttaatagcctttttattctagaatcactgcctaccaagttttgctttccatatactcgtgataaaagggtaataagagaatactgcttgaaaaaggcatgcctcattttctgtactgcttcgggctctgctaaattgaacatcattgatatgaaacctttggaactattggttatagatgaagctgctcaacttaaagaatgtgaatcaactattcctttacaacttcatgggttccgtcatgctatactagtaggagatgagcagcaactacctgcaatggttacaagccaggttgttactgtgtgtgttatttaaagccttaaatatctatagaatcattgaatttaacaatagtaccattttcagatttctgaagaagctgattttggaagaagtttgttcgagaggttggcgtacctgggacacaagaaaaaccttcttaatgttcagtacaggatgcatccatccataagcctatttccaaataaggagttctataacaatcagattttgaatggacagaatgttaaagatagaagctataataagagtttcctacaaggaaaaatgtatggctcatattctttcataaatgtgtcacatggaaaggaggaatttgatgacaagcgtagtcgaaaaaacatagttgaggttgctgtaatcttggagatggtcgaaagccttcataaacgtacgtctaagttatatactaaactagttgaatattatttcataattctacatttttaatggaaatttctctgtgagatgatcttagaacatgtgataagataggactagggaataatatttattttctatttgctttttctagaaattattttgacaaagaagaaggtcagagtaggtgtgataacaccctacaaggcacaagttcatgcacttactgagaaaatgagaaagtatacttcagatccccacaatgccttctttgtaagtgtccgcacagttgatggattccaaggtggggaggaggatattataatcatatctactgtcaggtgtaatgggattggctcattaagtttcctatctagtaggcaaagagcaaatgtggcactaacacgagcaaggttaagacttggttataatttatgcaaaatgtttatagtgactttctgtagtttttcattatatccaatccatgatatatggtgcaggtattgcctttggatagtggggagtggagaaacattacgtaagagtggcaccttttggaaaaatttagtcattgatgcagaagaacgagggtgtttccatgatgcttgggaggacatgaacatggcacgtgctattacagttgcactgattggtcttaaccaaatctcaatgttacttggtctagatgcagttctgtttaagaaagcgagatggaaggtatgcctatcctttgcatcactttaattaagtaaatgcattttgcgaaaatgtaattcatttcatttttctctatgctctaaatttctaatttttttctatatatgtttttgtgtggctataaagttatgattcctgttgcagcagacaaatatcttgttttatacttgcatttgcatagcgagattcactcattttgcattatagtaactagaaaggcgggatttacaaaaaatcaaggtgctaaaggttggttttggtttgtcagtgtcaatcctttcttttttaacagaatgtcagtgagtgtcaatcttataatagcaacttaacccatgtggttgggtgggtgagttgtcctggctcaagcaccccctatagatgtatcttaaaaaaagaaagatcaatcttacggtaattgtttgttgctacattttgttgttagcaattaatcaaagaaaaaactggcttactggacagaagtacaatggtctagtaggaccattatctgcttttcttttctttttttttttttttaaatcaaactcattatgattcggcttcttactctgtgaaaggtaatggttgacctctggttttcattttaatgtaggtgtgcttcacttatttcttctggcaatcaatgacaagtgttaaaaataatttgttctacaagaaagtgcttattctactggagaagctttccggtggctggcgtgacatatacattgagagggaccatgctgaaatttcctcccaattattagagttctacttggttagcatggaattatatcttgtttggaccgtagatattgtgaaagatgactcgcactgcattcagattttacaggtttgggatattttgccactatccaaaataccagaactgtcaaagcagatagattttatacacagacgttattcagcagataagttgaatcggtgcaagtacaaatgctacgaggggtacacgcttttaattatacttcattctctgttgcattttctatttttcactagtagggtggtaatagtttttacttttttattactctttttttcctttggggtctgtttttctttcctttatgtcaagcttaatttccagtgtggtttaagtcatctaattgagtttctacagggatttggttgttccaatgacatggccaataaattccagttgtgctgaaactattcctgggaagttacttccaaagtcaatgcctttgtttctaaaggacatgccagaaacatcatcaacctatggaaggttagtagattgactaatacatgagatgaaggagaacgctactagtgtttatttttgcaataaatatctattaactttcctcaagagtcgttagacatggtgctttcactgatcaaattttgagaatatcttggtaataacttgaaagcctcgtgtattcaaaaggttgtaaagttagcaagggctctgctaagtggatcggatacctgacattttctattttcatcaaaatattaagctttgaatatctctacagggagttggttgctccagtgggacaggaagtggacacaagctgtgctgatactgatcctgggaaattatcatcaagatttgtggcttcattcagttcaaagcatgatctgaaaacatcattaccgactaacaggtgagtgctgaagctgcagaatgagttcatatgcgagcacaacacattttgcttcagcttttaatcatcttttttctctttcttttaggaatatggttgttccattgaaatgctcagtaggaagctcaagttgcaatgaagatgatcttatggagttagaaccagaaatatcagaaacagttgacaggtcagttttgccatctacttttcctgctgtacgttccatgacttttttgaaagttaattttggagcacaatgcataatttctttagcattaactaccatctaattaaattttccagatattttgttgttccaaagagatggccaatggacagaagttgcagtgtagctgatcccattgagtcactgtcaaaattaatggctttgctcagtctgaaagataatctttcctgctgtgaaatgacattaaattgaatttaaacaagaaaagataacagtcattttgttcccttcagaattaacccaacattagactcaaaggaattatagcttaggtagtcagattgacttttccaccatacattgaagttttgtatagatgaccagtattgctctttgaacaaagtaagtatataatgaaatacgctccgagttattggaggcttctttccttctatccttggtgtttggttcacatgaatgggcattggaatggacttgctattccttaaggtggtgttttgttcacatgaatgagcattggaatggacttgctattccttaagaaagctcaatcaagtgtttggtttctttattagaacttgaaagcccattccaaaggaattacaattc

SEQ ID NO: 161690 - DNA, 2087 bp, Cannabis sativa
aatccaatccaactgaagccatagaaaagtcaacctatagtcatgcactgaactgtacttacatatctacatagtttgaaaaaaaaagaacgataaggtcaacgcagatagctttaccttgaggaaacgacctcttctgttctcaccgacgtcgaagtagaaaacctgagaaaaagagagagaaatctatataaaaaaaaagagagaattcgaacaaagaacaaagctgaaaaagaagaaaaggtaaagataccttcgtatcgagctgcaattccttgctgaaaacatcctgatcgtcggaattgacatagtaattaaagagatctagaaaccaggagatgcctgagaaaggaacgatgatagtggagcgagtagcggaggttttctcggaaatcttgagatagcgacctcgaggattctctttcagatcgaagtagaacagcttgtgttcgacttgtagagttttgcagagtaactcgacgtcattccctcctcctcctccgccgccggtagaagtagacgccggaacaggcgtagtcggcggtggtgcgcctccggaattggcgtccattgaagaatgaaaagaattgtgtggaaatgagtgagtgaagtcagatctgagagagaaagaagaagaagaaggggtcagattgcaattaatgggaatttggaggacttgttatgataatattcaaataattgatatactagaagaactagaagaagaagaagaaaactaattaagagatagaaaattttgactaagtcactcaactgtatccgcaatctcttcttactcttttattttattttatcttttctataaattttgatttttttttaattaattatggaattttattcataacaattagctaaaataataatatacaattcaattagtatatatatttcagtcgaaaatacaattaagaatcgcctttcttaaattatttgataagaaaattaaaataaaatcagctgaaaaagatatagtataacaattaattttaaaaatacttatattatatttaaatttaattcattgctcagaagacacatgaatataaattattgcaataagttcattcactttataacttagatttattagtgatatttttaaaaaaaattattattttaaattatataaaatttaatatttaattggcaacaagataatcatattttaacatttctcttaatttcatggtaaagtaataagttttattttaaatttatttttgagttaataaaatgaggggtggtgtcatgtcacatcaaagtccaattgtgaaagaaggaaaaaaaagaaaaaagaaaaattgattggaatgtgattgtataagcaatatattttacaagttccaaagtctgagactaaaagacactaaaaagtaaagtgctctttgtgtgtatatatataacataactaactcaccaatcaaacccatctttcaaagatcatccttgggcattgtgctttctttctttctttcttctcttttttttactttctttttcactaaaatcaaatcattatttggttttggttcttattaggaatgagtatggtctgccctgcccatactattatctacttttcctataatttttttacattatttattgtccttcacttcactcctcttcaaaatggatcaaaattctttccttagtttccaattatctactataattgaaaatgatatagtaactaaactatgggggctattaaccatatgtcaccactttaatatccaaactataaattatttattttccattcatctttatgaatctatttgcttaaaattgacccatcattggaaacataagtaaaggtccaatttttgttttttaatagtaatgttatgggcaccattagtatatgttatcataactagtacaaaattagtacaaatatgacagttgcatattattaactttgaaaattggttagccattaatgcttctctccataattaacaaatagactttttacattgttctattgagattattctcaacttgcataaactaaaacaaccaatttttataaagaaaaacaaactaaataatttaaa

SEQ ID NO: 161691 - DNA, 2546 bp, Cannabis sativa
atatgaagctgcattggacatgctcaaacaacagtttcaactgccatatccagacattcaagtttcacatgtggaataacagttgagattttcaaagaattgctgaatattttgccaaattgtatattatatcaccaagttcttaaaagacaccaattaaagcaaaaactattaacgcaagtaattgataatccagcccaaggccccaagctaccttaccagcctcagctacagaattcgtaattttgcgctttataccaaatattttaataatgttcttttttttcttcttcttgagttcagcaaatatttcattattgtgaaataggaactcagatataaaatggctattgagccttctccactgaaatacaatctcagagaaatatgagggaagtgaaagatagaagggaaaattcaaggatcccttaagcccgaatgaattcaaaagaactcccaaagctacagaataattccacaccctactaacccttttctttctctatttatgcccctcaactcactagaacatacctaataattccatactccatgtcctaacattttttttcgagcaatgaactcctgtcctaacatattggttaccatttaaatcttaaaaattggtccgtggctcctatcgaaataccaagaaaccaatttaaagccttttccaaaattaatgcatcaaaagaaaactaaaaagtagtaagcatacctcaagcaccgaacgtgctaggtcatggtccccattagaatgaccaattgtgtttgtcagattttgagatgtaaaccaatcaggatcttctatttctggaaatatcaaattcacactattattattcacaattacataatggctcgagggagaataatacacaagcatatggaatggaacattcacacatataagtgtatacaaattgcttaaatgctagatgattaagtcatacccgcaacatcgtttccaagctggtctgcactgaagatccaattatggtcttcttcttctcctcctaaataaaagatatgcaaaaatttagtattgagttaagaaaacaaaaaccatatgattcagcatttctacaaaatatgctacaaaaccttcttgtgagtaatgagttgtgataaaaaaaaaaaagtgctcttaccttctatgggttctggattaagctctgcacactcacagaatatctcaaacagctggtccactaagacagaaatccactttttagctaaagaaaatacactagagaccaatgatgaaataagtatttacacaaacacacaagttgagagacagagagagagggaccatacattggttggggtctgaagggataagtctcatctctgtaatcttggataaatctaagatatcagcactttctgaatcagagtcctcagattcgtcttcatcagttcctgtttcaatcttttgcaaaggaaaaaaaaaaaacaaaagaacaaagaaaacataaattaaattgaaagagaagatcgacctaatatctgctgtatcaaaataatataactttcatttaaagttgatggtatcacacaatcaattaatgagcaaactggcactaccaaaatgagcagtacataaatatatacttgcatatacctttaaaattatgataacaaaccaaaaaataaaaaagaacacgcaataagtaaaataattattcaactcacagaaaattaacttagttcctttgatatatcatacaagtaggaactagtacaaatgacaaaagaaatcatagagttttctaagtttcagctatggtaaagtaactttctgtcctagttttcatttttgcagacaaagcataatgaaattgtagagaaaaggatttgcataaaattaaatagagagatgatacctgagcatatatacaaggagaagggtaagcttctggatccctggatacagcatgaagtgataaagacaagaaatccactgcataccctttttccctctcaacatcgctcaaccatacaattttcctgcaaaaccccatgcaatgcatttttcttccattaatgtcttactaaacagaaaatgtccgaatcatgtattgataatcaaatcaaagtgcacactggtatttcaatgtttcgaattgagcgaaaatgcattaaaaatatatgtatcgggtggtcgggaagaagataaggaaggaggatatagagtactttgatgaaatatagagagtgccgggggactgtggtgggtgattggcgagaacaatagaaacgccgggctgaacgtggatgagctcctcggcgttgtcggcatccagaactggttgtccagcaccctctcccactctctcactgaacaatctaattcctatcgccattttcaatttctttgctactctcgtatgggtttagggttttgactttggtaaaaaatttggtctataccatttttgtacacgtgatttccttctcctttaatcattttttgaaaaaattcattatctttattaattgcaatttatagtgattatatgattaaaatctggagtgacatt

SEQ ID NO: 161692 - DNA, 9329 bp, Cannabis sativa
gtagattgtaagcaactcatgattagagagacccatgtattatggaagcccatctttcgcataacctccgcaacatagagccactccaccctatcaaatgccttactcatgtctaatttgagagctgagtagcttctgttcccccttgttttatgctttaaatgatgtaccaactcaaaagctacaaggatattatccgtgatgatgcgattggtgagaaaagcgctttgtgtttcagagattacaaaaggaagaacctccttaaatctgatggccaatgtcttagatatgattttgtatataacattgcataagctaattggtctgaaatctcccatacctgatggaaccttaatcttaggaattaatgtgatgagtgaatggttaaaagattccataccatatccatcatttaagactcccaaagcaaccttcgtgacaacatccccaaaaatgtgccaatatttatgataaaacattgccgacattccatcactcccggggctcttgtttgggctaattgtcttgagggcagtgtacacttcactactggtaaatggcttaataagagaatcattcatctcagctgtaacagttgtgggaatggtagctagagtgtgattcaatgcatccaagttgactgttgtagcagtaaaaagttccccaaaataagatgtaatgatggatgtcataccaggctttgaactcacaacattaccattgtaatcgtgcaaagatttaatggtattatgttgtttacgggaagaagcataggcatgaaaaaattttgtattttggtctccattttgtaaccaatcaactcgcgaacgctgctgccaatacatctcttcttgtgctagcaaatcatccaaaacattttcttgaagcttcaaatcatccaacacagcaggggttcgattagttgtattgttcaagtctgatacttttttctgcactttggaaattttctttttaaaatttccaaacttttgtcgatgccacagctggagggaatttgcacagttttgaatgttctctgtgaaaattgcagttgcattttcagtagtagcacgtttccgatgttgctgaatgatgtttgtagcttcctcctcttgtaaccataacttttcaaacctgaatcttgttttcctttggtgttgctggtgtaccgaggagttctgcagcacttggaccgagattagtctatgatcagaaccataataatcgaggtgtttagtaatcacttgttgaaaagtatcacaccatatgctgtttacaaagcaccagtcaagcctctccttaattgcatcaggtacaagtcttcctttgatccatgtgaaaggatcaccctcaaacggttgctcatgtagttgacaacgatcaagtacatgtcgaaaattttccatttgtgtctcatttcgaagggcacctccagacttatttttattggacaatatttcattaaagtctccaataactagccatggtagcaatggagcaacatcttttaaacgttcgagaagagtccaagtgatatggcggttctgagtggcaggtgcaccataaaacgctgtaaagtgccaagtcgggccatttccacaagccatgtagcaatcaaatatatttgtattataatttaataaggttacatttacatcatctttccaaagtaacataagacctccactaagaccaacacgagggacttcaagtccattattaaaatgtaaaacattgcgaaaacgggaaatagaattaggacctaacttagtttccattaaaaataaaacagtcggggattgatctttcacaagcaatttgagatgacgaaaagcactcgggttccccaaaccacgagagttccaacttaagattttcatggctgcttgcggagctgaacttcagactccgcgttgttgtcattgacaccagtagaatccatttcctcaatggaaacatccaagtgtgaatcatttccctctgacataggagaaatgaaaagtggttgattacccctgcatcgctttagtgtttgtcgcagattaacaccttcagatgatcttttgatgattctatttggcgataaattttccttccccacttgttgtgcagaactggaactgacagttggctttggagttgtgtaaagtttggtaggaagtggagtgtgtatttgattgatcatagagtctgggcgagaaggacttggtgggtatgttgcaaagacatttggcctgatatccatgactgccaaaggtgtgaaaattcctgacagatcaaccacactatcagtagttagtggctttgaattatgagtatgctttgctgcagaaaattgcagctgctggtttctgtgttgatgtttagtgtcgataactggttttgggcaaagctttgctgaaaccaaagtctccatggttgaggaaactgggttggcaggcacaataaccgcatcagtaggcaaaatattagccattccagtatgcatagttgtagcaggttgtgtggatgtattggaatgattataaacaccagtagaaacaatagaggaagcagcagttaaatttgaggattcgcctttgagcaattgtcctggttgaggaggacttcggttctttaaagtgggaatggccgagattagagaggttttggccaatcgagtgagcaatggccaagcactccccttagagaagtcagtcctatatcggtcataatttgaaattgggagtggtgaacctttcaatgttggtctgtattctaagtctggttcttccccattgtccaacttttcaagatagatcaaacacttatcaaatggatgacccaatcgtccacattccatacagtattcaggtaatcgttcatacctgaattcaacccaaaattcctcttttgcttgcattaaagtgatcattcttcccctcaaaagtggcttactgatatcaattttcactcttacacgcaaaaaaggtccccatccttcattgagtgagtcctcaaatacatcaacatattctccaatgatgttgccaagggcaattgcaagccctttagtcttgcttaggaaaggcaaacgataaatctgtacccaaaatggtgtgtagatgagtgattctggttgaacactttgtccaggaataggggagtgtaacacaatgtgatggttttgaaagtggaaaggttcccgaagcagaactcgcgctttgtctcctgcacaaccaaaaccgattgagaacagatcagaagactccgtaattgttactggaaacctgccgttccagtgttgtgccatctggtttttgaaggttgaaagccagacttttttgtttgtgagcactttagcaaatagcacatgatcagaggcaacttgttgatcaggaattgccatatcagtgaggtcgaagacagactcctcatcctctgtaagtttcaagggttgtttcatcttttgcttatagggatccatggaaatgtaaataaagatcacttaggaatgaagtctgagtgaagggtaagtggttaatgttgcattgatgtttcagaaaatggaaaaaccagaagaaaaccatagaaaaaactgtcaaagacagttaaaatccataaactgccacagagcactcaggagggcagacgctcaaaattttttgacaatcaccaatgaccaatattcaatatgggttttggcgctactatcattataatgttttctcgatcaaactccgacaactatatttttttttttgtttttgccccaatttctttcataattttcaatatataatagtaatttagttattctaagtcacgtcacaggtgtcgtcatcaataattttattggctaggactaaaatgttttcggtgaaaatgatgcattattatccaaatagtaagaaaaaaattaaatcttacatatcaaagaaagtttgaagcctagcatcgaagctttgatctgagatttgttcccaaaactcgcgtaactcggctttgttcactgaagaagatgttatacccctccgtcgagccaacgcatcgaacaactcgtttgcgaactcattcgactcgttcatacctgtacaattttttttttttaaaaaataattatatatattatcatcaactttcttgcccattttcttaccacccaaacacagcaaaagagagcagaaagtaaaaagcaaaagaattaaattaataaacgtacctatgcattggccaaagagagatttggaaagtacaccatcgacggccaatttatcaaagcgcgtttcgatctgagcccagccttcgttcccaacattgttcttggtcatgaatttaagccccttgagagcgcgtgcggcaccggacttgttccgatcgatcttctgctgctgcaacctcttagaggaagtcattcgcctaagctcctgcgacacttggcggaacttaaacgaaagctgagaccccaatgaagaggagttgggcttcttctcgagctgagtcgccaagaaagaagtctcggagtcacctcccctgatgttctggaccatgaccgagtcatctcggacatcgagcgtgatctccacgtactcgtcttggtccttgaatctagtgctcttcttgctactgttcttcctcatcttactccctcccccgccaactaacggaccactcacactcagtggaccgctgtagccgactccagcagcactcccgccgctggtgcttccagtctccgaatacgaatcattatgaggactttgattctcttgaatctccatctttaattaatctaactatctggaacaaataaacaatactaatatatattataaatatatatttatataatttatgaaaatttaactgcacttaaccaaattcatgtgcaaataatatttaattttaactaaatcggtaactatctccatgcaaaccagctaataagtccaaaaaaaactacactacagcaaataatatattatatagaaaagaaaaaaaaaaatatgatggtgaattacatattataactgattttgaaaaaagggttgaaaaatatacgatcgtgaatcgtaatgctgaatttagagaaagaaaaaataattagagcttgaatatgttgatatatatcttaccagggcagcaggtatatgtatgtatgatatatacttatttttttctacttaggatgaggaaaattatatgtagtgattttgttgtagtgttttgggattatgttcgatgagagaaaattggagtagtggattatataataagatgaagatttaagatttaaagaataaggtggctaaaagaatagctagtcttaataaaatgattaaaatagtgttagtgtttagaaagagaaagtcaaaggaaaggaaacccatgggcgcatttgggatgaaaagttggagttttgtgagtggttgaattttcgggagttgttggaagaaggaagctttacaacgccaaccaactaattcatcgtaatccaaccccttaatgactggattagactgattttactagttcaggcaatacgaaagacgggatatataacactattttttatttttattttttattttgtaaacatattttatatttaaattgaatttaaatggaagaataaaaattttatttatagatttatcatcaaaattcatttatcaaaattagtaaaaatatataatattaaattatcatacataatcaattaaaatttattcttgaactcaaagcctgaaattaataaataaaaaatactttcattctaatagatataatatagtattagtattattatatatatcatatttctttaaagtactactattatatcaaaacttgaataaagtaatatatgtattcaattaataaaacatgatacattaattatttattgggtttttctttcataaatatacaacaaaaataacataattataaaaaaatatgtaaaaaataattattttaaaaacatattacatgaaactatacattttaattattaaataatataaatcattaatgattaaactaattaccataaataaattaatataattaatgtttgtgttattttgtaatatcttatggttattatattaatgttttaaaaattattaataataaaatatgtttatttaaactcaaaataaataattttataaaattaattaaataaataataaacagttttataaaaataaacagactaaatattttttattaaaaaataaatatttattatctattttagtatgaattattataacttgagaatttttttttaataaaatacaatatcaaaattataaatattaatgtatatagatttaaaatgtgtgtttatttaatattaaaaaacacaaaagtaaaaaaaattcaaatgtatgtttatttattatgttattataatcaatatttatagtaatacttttttaaaaaaaaatattatttataatattatgtgtttataaaaaataaaataattatctattttagtatgacttattatatattaaacaatataataaaatataatagtaaaaattataaagagtaatatgtataaaattcatatgtaactttattaattaatcttttaaatttttttttgatgaatcagatctttcattgcacaaacaaatatttacaatctaaaagcaccttactcaaagtctttgtatagtctatacaattatgtgtattatgacaaataatttttaaagattgctaaaccaaagtctatctttctcagctactttcttcggcattacacttgcaattctatgtttcaagatccatttatctgctgcagcagatgacctgttgtgtgcatgtttgagttcaagatttgatcatttctgttttgccaaacgaagtagaccgaggctgcaaatgcagcataaaaaacatgcttcctaaacttggagtatttccccctatcaactcttcggacaatggcctgcaaactgctcgaagtgaccctccaatcaagccatgtcttcacctgttgcagcacctcttatgagaacctgcaaccaaaaaatagaagatttgttgtctcagtagtcgagttgcagaaggaacaatttccatcatctattattcaaaatttagcaagcctatctttggttttcagtcggttttgcattattaaccagagaatgaaactgtgcttgggcacattaagtctactccagctacccttgcaccagaaatggtgttcaaattccccttgcagcagcttataacctgctgctattgaatactgttctgaggtgaaagtgttcatgttcatcagctgcttcactttatctcttgactcaattattttgcgccaataccaactgctattcaaaggagttttatgctcccaccactcctcattcttgatgtaaacactatggacccactttatccaaagattatcttttttattagcaatggaccatacatgtttgaaaagggctgcctcattccaatctgaagtgttcatgaagcataaaccacctgcagccttaggcttacacaaactcctccaagctacacttcccgacccttcacttcttccttgcctccacaagaagttcctgcacacactttcaatttctgagatgatcttctttggcaaaattaagagctgacaccagtaggtgtggacagtcaacaacacagagttaattagcacaactctccccgcaaaagagatgttcctcgagctccaaactttaattcttgcagtcattttctgtactagacctgtgcattcagcatctgatattctcttagcacatatgggaatgccaagatacttgaagggaacaggatgtcttgtgaaaacggacatgttgagtactctttgtatttctgtttcttgcatcccgctgcaatatatagcagttttttgaacatttggattcagacccgaggattgagagaatgttttcaaaccttatagcatgtagtatatactcttgtaatcaccattacagaagagtaatacatcatccgcaaagctaaggtgattaagctttaaatctttacatctgtcatgaaactgaaaactcattcttccccccaaccttagtcataattcgactaaagtactccattcctagaacaaatagcaacggggacatacgatcaccctgcctaagtcctcttttagcttcaaaaaggccatgaagagaaccattgaagagcaaagagaatcgagtagtggagacacaagtcataataagcttaatgatttttttttggaatttaaaagctactagaatttcctctaaaaattcccactccatagtatcatacgactttgaagatcaagtttaatcatacaactagacttgttcattttcctcccataatgcctaatgaggtcttgacatatcataatattgtgagcaatgtatcttcctttaacaaattctccttgattttgagaaacaatatcggggaggatttgttttaatctagcacagatcatcttagtttctattttgtaaataacattacaacaagcaatagggcgaaaatcactcacaatattggggcacttcacttttgggatgagggttagcccagtagagttgatctcctttaagaatgcaccagtatggagaaaagaaataactccccgatcaaatcccacttgtcttggtagaacgaacttccataaccatccggaccaggagctttgatactagggatgctgaatgctgctgctctaactttgtctcctgtatactctttcatcagcaattgaatatgttcttcagtaatcaatgatccctgctggacaactcttttgttcacaggctttcgattctgcattttagagcctaataattcttgataaaatgataaaaaagcatcaatgacttcagcttgtttctctactctaataccttctttgttgacaatagagcagatactgttttaatttcttctctgtttaagcgcctggtggaagattgatgaatttgagtctccttctttgatccaagtgatcttagttttttgctgcatgaaagagtagtatgcttgttgagtttcaataaccttatttcgggctttcagttcttcttcttggagagcttcattgagtgggtccttatgcagattatcctggcagatctccatgtgcttcttagccagcagatgaacattttgaaaatctataaaatccctctttgttgatacgcttaaacacctgtttcagggacttaatcttcgacacaacctggtacattttggtaccagtgattgagtgattccattcttattcgaccaactgcttgtattgtggatggcttctctgttggaaattattttac

SEQ ID NO: 161693 - DNA, 2346 bp, Cannabis sativa
gtcaataagattctccaacctccccttcataacagccctgctgatactctcatttcaggctttcatcattctggcatcctcactgtaaaatctgcttaccatctcgcttctgctacagccaatgtacactccccttcttcttccaatccaaaccctttcaaaaaatggttgaaaactctttggtcccttcccatccctccaaagatcaagcatttctcttggaaggctttcaattgcattctgccttgtgcctaaaatttgtttcacaagaaagttcttctgcaaccttcttgtaatttttgtggcaacactgtcgaatctgtctatcatgctcttgttgattgtgccagagctcgccacatttggaagcatacaaaattcaaagattttcatactcatcaccggaattataacatcaaggactattaccttcaggcccttcagcttatttctaaagaagatcttcctctttttgccagcataatctggcatatttggactaccaggaattcaattttgtttagaaactcctctgagcctaacaatgtgaaagaatttgtttgtaactatctgcaggaatatagggaggctcaagagctacattcccaagactcttttcactcagcatcacatcagcaccctcacgtatctcgtcaagaaatcattcaggaagacacccctgctttatatgttgatgctgctttagatcaagaccgttgtgttacaggtattggctgtgttttcaaggtaggttcaagtcgaattattgcttctacaaacatcctaaagcctggagctcccttgcccatttttgccaaagcacaagccctgttccatggtctctcctggtgtttttcttcgcagctcatgccaaggtttatcttcacggattgcctcaacttagtttcgaaggtcaatggcaagtggctggataactcggccctttcaatccttgtcgctcagattagacactcattctccaatttccctggtgtttcccttctgcacttaccgcgtcaactcaacacaactgctcattttcttgcaagggaggctattaggttgcgaggggatgccattgaggattcggtttagtctcttctgtttgctgctctctttgatttgtattgtttctctttgcagtttgttttatcttcaaaaaaaaaaaagaaaatactttcttattggcattaatgcactgatgaacttattattagtaattttgtacataatttatatctataccattatattataataaacaagttgtaataatatggacttaatttattaatttttacatcaccaaaatttttctttagaaaaatattatagtatgcattaacatttttatatttatgatgcatctttacttaaggcttcatgatcagaatgtagagctaatttttatattataattagttctcaaattaagagataattttcgatcaaatttagtttttcaattaagtctgaaataatatcttgaatttaattactgattagattaaacatgtgaatgtagacaatatcaaattgggataagaattgaacttagaaagaataaaaacaaataataaataataatgtgttttattaaataaaaaaagaatataatgaatgatatacaaaattacaacaaataataaaataatcaattatacaaagaaaaaaaaattaaggaattatatttgtcaattaattcgataagcaactttcaagtagaactcagccaaaagatttttaatttacattggcacaaaaggattgagttgaagttaaaggtatgttctctttgaattaatttgttcattggacttatatatttaggtatttgtgcgattattagttaaaatattttattcaattttatttctaggttttacatatatgacaataatatttggtttaatataagtcttatggtcaacaatacttagggagttgaactgaaatcaataaagaattaatctctgtgtttattattagtatgttaaacttatataaaataattttacaactgacacacataatgtacactattagtgaattataaagtgtgtgatacagagatgaacttccattcaaacttcaatagctaattgacacatgataatatattttcaaaaaaatatatttatatataccacaaaaaaattaacttaattaatctaacgttaatattacaaattctatttaacaaactttataataaattaaataattgcatttgtaagaccatggaagttgcctacaactagatgttagaatcctataccaacagaagagaatgtttgggtttgtgactttttttgtgcagttacaatgagcccattttagttcaca

SEQ ID NO: 161694 - DNA, 3352 bp, Cannabis sativa
caagcctagcaatgtgatcctctaaggctttagggcgccccctcacctcttgcatctagactatgtgttttagaatcctgaccaccattagaatgctgagaaaatcccaatcttgatctcaaggctccagtaagcctatcgacgtgaccctccaagactcgaaggagcttccttcacttcctgcatctcctgtgagtaggtggtggtagtagtgatggaagaaatgcggtgtcaacattcaaggaaatcctacgaccaagtctcggcagacggcctcgacaacacccaaagaccgactcaatgaggacaatgtcatccttgtctgccaggtcagtagtactcgaactcaaggaataatatcattgagagtgtaaaactaaacaaaatgacaaactcataaagtagagtacatacatttacttacattacacttatgtaaattatgtgtatatgtattttcattttttttatatcaatatacataccataaccattagaagaattgtttgttcaaggatcacacacagtaccaattcataggcattcgcgtcaaaagagtatttttgagaaaaactaggacaacttatctttctccaagctcacctaaagcatcttagaaagccacatgagagttcaatattttcctaaataagcgcatttgtcatcttaaataaggtgatgtaacatcctaaaatttttgaaatatgttttattttttttattattttaatttttatattcataaaaaatacttacagtaagaataatcaaaccaaaaggtatccaaatttattttcatttaagaataaaaacaaagaaataataataataaaaaatggttcgctataacatttttcttattatatatatatggaacaatatgaaaattaaataaaaatttgaatagatattagttttatcttattatgtctttacatcatatattaatcaactgaaagattagaaaaattattatttgtttaaaaaattaaattaaattaaaacttatgtcaatataaattattcttttttatcaataatttttttcccatataaaatcatcaacaaaccaaataagagagaataaaaataagaaaagtttaacatgagaaaataggagactatttggctgtgtttttagttattcagattttaaaattgcgtttttaaaagtaagaatagaaaacagttttttgtcattttaaaattttaatgttgtttggcttaggttttttaaaactatttttaaattctttttactaaaaaaaagtttcaatattctacagcataccatgagataaacccatcccacctctgaccggacctcatacctcagaccccagccccaacctggatccagacccaaacccaaacccaaactcggacctggactcgaatccagaccccgaacccaaacctgtacccgagttcgaacccaaaccctagacttggaactggaccacggacactgacccgaaccccagcctggaccaagaccccgaactcggaccccaaactcggggctgagtccaggttacggggtctgtctgggtctggggtcgtgttcgaggtccagggtcagggcagagtctgaggttgaaggccagggtcgggtacgacacctgggatctcaaggtccatctaggtccgtggtccaggtccaagtccggatccaggtctgggccagattcgggtctgagtccgggttcggtctagatccatgttcgggtttgggtccagggtctggattcaagatccaggtccaggtatgtgagcaaaaataaaaaaaaaattatgttagacaaaaaaatatttttgaaaatagttaataacattttgatgttttttattttctagttttttaaaactcagttttcaaaaaacagtttttaaatatttggccaaacgcctcttattagtttttgaaagttgttttctgtttttaaaaattaaaaacagtttttaagttatgaaaccaaataacccctagaattttttcctttctatattttttcctcacttttttctttccctatcaaattcttacttccaaacacagccttagtaattttggtcacaatctctctctcactcacttgtttcctcaacacttgtcctaatagcgttctagcttcatgttcacatgaattggataaagaagaatatgataactataaaaactgaatccaaacacaaataatttccaacacataatttacaaaagtgtaatgtaagtaaacgtatgtactgtactttatgagtttgtcattttgtttagttttacactctcaatgatattattccttgagtccgagtactattgacccagcagacaaggatgacactgtcctcttgagtcggtctttgggagtcgtcgaggccatctgccgggacttggtcataggatttgcttgaatgctgacaccgcatttcctccatcactactaccaccatctactatcacacaggagatgcatgaagtgaaggagctccttcgagtcttggagggtcacgtcgctaggcttattggagcctcgagatcaagattgaaattttctcagcaatccaatggtagtcaggattctaaaacacatagtctagatgcaggaggtgaggctgcgccctaaagccttagaggttcacattgctaggcttgacagagcctcaagagcagatcttctcaacaatccaatggtgaggattctacaacacttagtatgtaggattcttatctatgtattttaattttatgacaactctagtcccacattgactatctagagagaccttcttgtatgtgtgactaatttaagtgaagtgtgtttctattcaaagcatatgtttttcagttctttggctaagatcaaaagtattaattgtttctttcagcttattgtgccatcatgtgagaaaaagcacaagcaaaaaattgttgaaactcctttcaaaccacccaaaccatacacgactcacaaccaaaaacactaggagatatttctttatttacgataatatgaaaatgaaataaaaatttgaatatataggagttttatctcaaacaaaatatatgattgtgtacttcaaagactaaaaaaagaatttaatatgtaaatttgggtatgaaaaattattatttatttaaaaaataaaataaaattaaaaattatataagagaaagaaaaataaaatgtgaaaattaaaaattaaattaaattaaattaaataaatgtgtgtgatttaagtgaaatgtgttactattcaatgttatattattttataatataataagtgtagattaaaatgtagtaatatatattattatgtgaataatatgtattaagtgtttggtaaa

SEQ ID NO: 161695 - DNA, 6074 bp, Cannabis sativa
gctttcatgcatgcttggacaagtggcatgttttcatgcttgtttgagtgactcaagggtttatatgttgaacgggtcacctttgattagcttcaaaagacggctatactaatctcttggtttaatcatcggctaaacttggaaaatagccttgctaaatttttaggttagcacttccccctagtctacaagaattcttttatgcgttcttattgattgaaagaattggtgttttgtctttgttcatatttttgaattttgaactctatccttgactagtgaggcgcccgagaagcaacttcgataatctttctcataacacttcttcttttcgtggtaggtgccttgccctacactagttgagtttctcactccaactaatatccctcaccgccctgaggtatgtatctcacctcttttatcctttctactgtcctttccatatttgatttattggttttaagatgtaactcttgcgcgttgattttactctccttatcgcttgtgagtcattggatgtgcactcctcagggtgtataccaccatttttcttagctagaaacttagtacttttattttacctattaggtgagggtgtcgagttgttacgtctcattgacatggtccatctcactttgtgtctatggggaatcctaacaaagtgcccattaggccaactttgtctacatatcatcttcagattccaagttggacaaggtagtgccttaggtggtggacctaacttagcgacttcaaaccttgcttaccctttaagaagaggctactcgcgtggctcccaaactctaaacaagtaagatattttcaagaccaagaacgactggttgaagaaacatatcgtctctgtggagaaagaaaaagttttgagtgaaagggtgcaagatcgagcatttattgcttgttgtgtgggtgaagaatatcgatgcagacttggcagttttgacccctttacactcaatttgattgagcagttcaagaccgagcacgtggagaaaagaatggcgcgtgaagctaaacactgtcaggaggcagacattcccagtgatggtgatcggcagtagtgttctttcatgtaaacatgttgtcttgggctccataggacttgttaaaatgacgcttcctgttggctatgtttttattttggatgactgtaacgatctgctttctattccatgtgtctttgacgctgttttatttttggtatatgtgaccccatagggtccctacaaaggtaagttgacttttgttgagggggtattgattcttggagcagtctcaacctcttcttaattactgatccttatatttggatttgagggagcttattgttccttaatctcgcttcaaccttttaatttgtattttcattattgtgcatgcttgtaattatttgcttatgcatgagaagtgtcattctcttttcagcataaggtcgtgagcatctttcaaaacctcttttggctaaacggttcgatcgttcttgacttttctttcgaggagaagtattttaatgtgcatgttgattctttttattgttcaaggatagctaatccttgccaagttaattttttttacttttcctccttgccccaaagtgtgtagcattatttatggcactaaatacttatgttttattttcgatcttgttctttcttctaaagtggaagaatggtaaacattcacttaaaacacatataaagaaacaataaaacaaatccaatgtatcattaatttgtttaacctttgaaaggtcatcttggtggccttttaatcgattacattggaatttttgtttttttataaaaagtaaaactacactagtggggttgcctgaagggtcacctacttgattcatacagaaacttaaagcataaaggataccttggatgctcctctcaatgatagtacctcttaagatgtttcacacgaatttccccactaacctgggatttagttttgatgggcttcctcaaacatgctagttctcgccatgtataatcatagtcaagtgctctcaaggcttggtaacaatgcgaagggaagtgttatcacactccctggcttctctttgctttcctttcatggtggcaacccttccttgggtaggaaacttcttggctagataatatcatggttgcttttaaagttgtgcatttattcctggaatgttgatttctgataatatcatggttgcttttaaagttgtgcattatttgaagagaaaatcgtctgggaagttgggttatatggctttgaagttggatatgagtaaagcttatgacaggattgagtggatttatctctgtgctatgatggtgagcgttgcgaaaataaacagctattcaagtgaacacaatcataatttgtaataatcttggtaagaccaagtatcgtcccacaagaattaattatcaactatcaatcaactaattccttgtttctatttgatcaaataaatttttgagaattcttagcaaacaaaataacggtaaaataataataaaaatttaagaaataacaaggataaattgattaggacaattatgatcatcaactatcccctcttttacttcttaaggtaatttacccacttcctcttcattctattcaattaacaagttgataaaagtagttcataatcaagttaagacttacaaactcaatctaagtgataactcccaatatttctatggcaaagttaaatcataaagaaagcaatgaacatagaaactcaatttattcatacacacaacctagatactttcattcttaattaatttgtctccacaacaatcatagcataatcaaatcccacatttcaagttttgattcgaaatcataaacaacagttataaatgtccaataaatagttgctaaactaaaatagattgcatggaattgaataggagatgaagaagatattaaaaaactacattaatccataaaagaaatttaagtgattcacataatagtcgtaacaagaaaattagttcataatattcattctaaacatccaaagattcaatggaaaacataaaagattcaagatagaaatgaaagaacacacgttgttgaacccaattttgttctcctccttccaaccgtacttccagtccaaaattgctctccaaagtcaattccttacaaaacctaggctccacttgttataatgaagaaattggaaagtttcccaaaatacgcaagcgtcgtaacttttatcagagtcgcgactcttgatttttttacagaaaaatggttttgcaatttttcttgagcactgcaactttggttcaaaggtcacgagtcttgaattttcttccaaaataattttctctaaagattggagagccgcgactcttaggagaaggtcacgactcttaatgctaaaaataaaaaattacaattttcatgctttatgaaccccaccaagccatgaaatccaatcccaaggttccaattgcaaaatttgataacatttatcactaagaaacccaaaaaaacactattttcaccaaaaagtgaaaatctcctcatctaacatctgaaattcacataaactcaaaaacaagtgtagacccaaacaataacaaataaaataaatactaaaaatacccttaaaactatactctaaagaaaaataaaaatagacctaacaaattcccttaaacaagctcgtccccaagtaaagagcaagacaaaataacaaaaacaaaacaaacaacaaacaagttaagcatccattactgtctacactacattgtcattactcacaaaatttcaattacaatttttaaccataatttcaatccaaccgctccaaaatttaaccttaatgctcaattaggaaaattgacaatataattcacaaatgaccacaataattggaatccaccatatatactcaactccaaccaaatatttctacaaactaatttttcaatatgcttgcatcattgaacgttctccactaatgtcaccaacaatgctttaaaatcaaaaagactttaataaattttaacattagacttaagtaaatgtagatgaaaaaagtcatttaggctcaaccacatcgtaatatcttacattctcagtcaccccactatacattacaatacccccattctccttttttataacaaatgagagaactatttactaactctgcaacaacacaatttatttatttctatttctttattgctaaagacttagcctacatgagaagaaagaaatttgagatgttttctattattatttttgtcgtgaagttgcaactcataaaaccttttacattctctcatttttttttttaaagtttttagtccatgatttttaattacaataaatataaatacaaaaacttgaaaaataaaataaaatgaaaaagctataaacaaaattaaagctaaaatttttcaaaaataagaataaaactaaaaataaaggttaaggtgcctccctcaagtgttgtctttgacgtcttgtaatccgacgttgaacttctttctcatatggtcttcaaataaatccttgacttgacttgatcaaatggaccaccaaagtaaggcttcaatatttttccattcaccttaaaagaaccacctgaattgcttctaacttccacagaatcatatggaaaaattctaacaacaataaatggtcctggccaccttaactttagtttaccaagaaacaatctcaaccttaagttgaaaagaagtaccttttgtcctagttaaaattctatcttgatcaagtttttatcatgtcatgcattggttcgctctttgtaaatcttggcactcataggctacattcttaaattcatcaagtttattcaactgcaacatcctcttttcactagcaacattccaatcataattcaacttttctatggaccaaaataccttgagttctaactcaacaggtagatgacaagctttatcaaacactaatatgtaaagatacatatctattggtactttaaatataattctataagcccaacgcgcatcatctaactttttagaccaattctttctagatctgtccacagtcttctcaagaatccataacaagccacagtttatcaagatgcttgttcacaaaatgtttcccttcattgtcgagatgtactaaatctagtaaaaatatgtttataaaggaaattcaacacaactttaccatcattttctctaatagttgcagcatccacccatttagacacataatctactaccaatagaatgtattcattgttgatacatggtggacaagccccatgaagtctatacccaaaacatcaaaaagtcttaattcaagaatcccatgtgaaggtattttattccttcttgcgatattaccagttcagtgacaatgatcacaagccttgccaaaagtgttagcatttttaaacaatgaaggtaaatagaaaccactttgcaataccttagatgtttttctaaaggaaaaaaaatatctaccacattattgagcgcaacaatatgtgataacagagttcatctctttttcaagtacgcaatgtcagattgcttgatcaacacaatgcctatatagaataggctcctcccaataataatgctccacttcataataaaacttcatcagctattgtcttgtcatgtcaggcagtacaatctcgaaaactaaaaaattcacaaacttgttgaatacttcagctattgtcttgtcataaatgggttataaaagtgttaaatacttcataaacgtattattagttgacatgtttaaacaaaatatacttataaacgggttacacgggtcgtgtcgtgtcaacccgtttataaacggatcgtgtttgagttttgtattttgacacgattattaaacgagtcgtgttcgggtcaagcatgacctgttatacatgggtctcgacacgacacaaacacgaaccgcaaacacgaattgccaaccctactttcttgtatcataccatgtgaattataaaattaaataaacaagttcgattcatatccagttcctctatcactacaaagcatttttattttcttatt

SEQ ID NO: 161696 - DNA, 4485 bp, Cannabis sativa
ggcggtggcggtggaatcggcgacgccgcatctcggggaaatgatggtttcgatggtttcggagtcgagattaccagttaccggtaaacccaggtttctctggtaaaggattatggcggattgtagctgggaatcgaaggtgtcgtcgttacggtgtccagcgccggcgccggtagtagcggttaggtaaccgaaacggtggaagtaatttttgaggtgggagatgccgctgacgtggcttcccttttcagcgtcgaggaaccttgagaaatcgtgccacgtggcgttgttgtgtatatcggcggttattacggttacttgatcgggtataattctggcgggacaagaattagttatgaggaaagagaagatgaataataatatgtttaacagtttattataataactgaaaaacggaatcattttttttttttttttggattttagagttggcagttgcaaaatattgttggaatatatataaatatatatagtagtacgaaagagggagctaagggaacatatcaaacattcaattcaaactatatgtatgtatatatgagactatacatataattaatattatttattattattataattgaattgaaaataagaaggaagaaataagagtagtactataatggggagattattgatattatgaggaaagcaatgaagatattctggttctggcgtggttacctttcatttggggattctgtgacttaattatttggtcacctaagctaagctaataataatcatgtaataatattgtattaatgtttggtttatttggtgggcaaaccacttacttaacataaattaatatattatatatatgcaaatatatatggtttgtgttgtgtttcttctacttctatctaattatgaacaagaaaactatatatatatatatgtgtgtgtggtgtgtttcatatttgttgaccaaaaccaaagtttaattagtttttccacttaattgtgattagtaatacatatattaattaattctttgcaagtgtttaaaaatctccctatatacactccatttttctctttattaattggtttctttcttttaaatttagaatgtgtaaaaatgttatgtagaatgaaactattaaattaattttcatttcaacatcatcattattcatcatatagatataatatatatgtgtagctatagcgacctttaaggtccaattcatgtgtaatttcgctttagaatgacctcatgatcaacttaacattaattcatacatatatgagataataattatatatataacctcctccatacattttcattatatatagttccttgttaggcaaaaagacaggaatgaaagaatatgtgtgatcgttttgaatggggcagtttgaattttttgtgtgctaaaaaaataattagatgatgagaattatatattaattaattgtagggtttgggatattttagttgactgacaaattgacccgcttgtctttttgatttgctccaaactaataaataaataataaaagtcaagtaagttgtacttgtgctaacttctaaccaaataattaatatatatatatatatatatatatatatactaagatcctaagtaatttcatttcgttaattgaacaattactgcttctccaattaatattaagttatttgacctaagagaaaaatgaagttgaacatcttcaccaatatttgaagcaaactcctacttaataagctaataatgtttacatgtagttttttttttataggtatgtttacatatacttagtactcatgtgttttcggaacgtggaattcgaaatttgtttaatttaattattgtatgcttaaatgaaagtccaatcaagatacataataaaccttatttattagtgaagtcaaaccatctagataataaatagatgattcgtctaggcaaataaatattcaactaagcagatttttgaatagcatcaagcaacgctttcaaaatagtaattaatgagcctctaaatattaagcatagtgtctcactcaattagaactttatttctaagatcttgttcgagaatttgatatatattctgaaattaagtaggacacattttgataactatcaacatgacgtgacattcacgtcagcagaagatcaataatttatgggtcgggcttcaacaaatagatccaaaagcaataagtgatttgtatttagtcccatcagtgggtaaggtttccatacaagagccctaagtttataaatataagaaaactcattcatgaagaatctcaataagagttaaggcaaaactcaaggttcataaacttggcaaatacttctataattcaagtaggcctttttttttaaccacttgaggctagttcaagtggccataggtgggtgtgtgtgtgtgttggaggtcctgggttcgaatcccaagttaaaaatagttgtaatatataaacgtcttttttaatcatgataatattaactcaaatagttttttctaatctatttctttagctttaatataattatatttagtttcaaaaaattttaataaatattttagtgttttcattgagagctgaagaaagagttgatatcgagattgtatactgtaataattgtagccacaaaaatgacacgatcaggaaatttaacgttcgtgacagagacacttctaattatgacatgaatcctcctatactacacatgtaaaaataggcgttgtaagagatatatcaaaagtaactagctatatcctaaccatcctgctaataaaatttaacataatgagaaatatgttgatgataatgatgagaattcggtcagtaaaaaaggtgaccgaaaagatcaaaacaataattctaacgacgatggtgacaacaaagaagaggaagagtattattactatgagtaagatcccaaactcatttaagctaatgtatacatatacatactcattagtcattaatttgttgtgatataaatgggatggtacatatacacactacaaaaaattatttgtagtgataatattttaattataatataattctttttaatttaatgtaacttttagtcataataaaatattacttgtcactaaaacatattattaagttataagctatcactaatttagttttagtcataataagtattctgattaaaaatatatttagtcacaacaaattgtaatttttgtattgtaactaaatatctttagttgcgaatcttttagtcacaatatatgaatgatgatttataattagtcataatttttttacttttaattaaaaaatttgttgtgactaaaagtaaaattttgtatggtggcacgaatacatatgtacatatactcatataaatatttatataagtatacgtacgtacaactggtctcaatttcatgcatgagagatcgaatagaaataataataagcatgagattattaattatagaactgtaattaattattcatatatgtgcatgcttttaatgcccaaaacaactataaaagtataaaacgacaaaactgcatgctagggaaaaaaaacgacattaattaacaagcagcagtaatgtttgaaaactgaagtactgaactgtataaaacgacaataatgtcaaaaaactacgaaaatggtattagacgacaatactttaacaaacgagaaaaacaccagaaaacgacggctttatatcaaacgacaattattggagaaaacgacagtacaaaataatccgacaaaaattttagtaaacgacgatatagtatagaacaacagaattgatattgatggaaacttacgacaatgaattaaaacaaggaaagttctagccaccactttagaaatgataattaataatgaacatatctaagtctaactatgacatcgtgaaatcgatatcatctttataaggggttccttttttttttttttgcaaaatcttcttaattattactacatacttaattttttaaatttaaaatttaaccgtaaaatattttaaactactaaattattaaaatactattaaatttaatttaaaatatcatctattttttacagttaattattaatataaattatctatgtataatacacataacacatttatattgatacacatgatattattatttacacataataaaatatgtacaaaaatatgcacagaagcagttcataataacaataaaataacactttactagttcaataatttaaaaaaaaaattacagctaaaatttaagcttatcaaattaaatacaagtaaaacaacagttaaaaattttagtgatcaaaaactctctttatcataataattcattaccatttcttcaatgagagagggtaaaactatgataggacccagcaaaagttccctaccggtagggaactttttttgaccattgattttagatcatgtggttattatgatgtaaggtgtattgtaacgtccccgcttcaa

SEQ ID NO: 161697 - DNA, 9800 bp, Cannabis sativa
tagggcacaaaacccaacaagtgtaacaccttcggttgaaccttaattttccaaaaaaacttccaaaaaccagtgtccatatcagtcggcaatgaatcattttgtagccatctgtatgcactctttacaatgtatatagctgaggtttctttgttccatgtccaacaatcattatgcacagacaaaggcaaggggatattaagaatcaaagttcgatctcaagcatcaaacaaatcatcaataacctcaatatcccattgtttttttatccacatataataaagatgccacatactgatttttcaaactagggtggatagtatgtactaagggaaaaccatcatcagggagccaatgatcttcaatgattgatgtttgaattccactagcaatactcttcctagcactagctgtaataagatctttggcttcaaaaatgcttctccacacatagctaggactgtttcctaaagtggcagtcaataaagagccattaggaaaatatctagccttaaaaactctgctaaccaatgttgaatcattcactagcaatctccacgccttcttgctaagtaaagctaaattatactgcctcaaatctttaaaatcgagaccaccattattcttatgcttgcagagttttttccagctcatccaagtaactccacgactttgcttagatgactgccaccagtatttgctcatagtactctctaaggatttacaagtattactcattcaattggaagtattgatccaattttttaaaattatgtttcgtaattccacaatgacatagcatgatttggaagagcttgaactaccgtttttagaagaagctccttaccagctttcgataagaacctcccttcccaactttgaattcgtttgcataacttgtctttaaggaaacctaagatagcattcttgttcctaccaatgatacagagaagccccaaataaagacttgtatcttttgcttcgtggatacctattctttaacaaattagagaacgagtagaagagtgtttacactgaagaacacaaatgaatttgagaaattaaccatctagccagaagccatttcaaaatcctttagcaaattcaacacatttgtagtgtcattctcattggcacaacaaaataaatagctatcacccgcgaataacatgtacaaaatgaaaggagcacagttcgcaacctgaatgcctttaatttgatgtgaaacttcataatgcttaattaatgataaaaaagcttcaacacagattaaaaacaagtatgaagacaaagaatcaccttggaagattcctttagacaggaaaataagacctatttgtctcccactatgagtgatcatgtattaaatagatgtaatgcattgaagcacaagaaaaatcaactttggatcgaaccccattctttgaagtacaacttcaagaattgtccactcaactttgtcatatgctttgctaaaatcaagtttcaaagccatataaccttccttgccctctcttttacgctgaagataatgcatgacctcatatgaaatcatgatattatcagtgatgaatctccctggaataaaagcgctttgtgtatctgatatcagcttagaaagcaccaccttaagacgattggccatgactttggagatgatcttgtacaaaatattacacaaagagattagccttaattcccccatattagttggatttttcttcttcgggacaagaacaatatgtgtgtgattcagcctaggaggaagaaaaacatttgagaaatttttttgaactagaagtattacatcctacttcacaatgctccaatatttctgataaaatcctggtgtcatgccttcaatgcctagtgatttttcaggatgcatttgaaagggagcttttcgaatttcatcatccaagacagtggttaaaaggtcctcatctattgggtagttatcgtactaggaatattaccaagaacaccatcaacattggcattagaggaataatatagttgatcaaaatagcttttaataacctcagaaagtcctgggttccgtcaaaccaattaccagaagagtcttgtaacttggtaattacaatatgtcatttacgggttgttgcagcagcatggaaaaatcaactattgtgatcaccttcacgcaaccaaagttgcttagatcttttgcgccaaaatacctctctttgagcataaaccttaaataattccttctcagcttctttaaaggctgaaatggagttatcatctctgcctcctttgtactttgctatcttttttttttttttcaatattgaattctatttttgaagtttcgagtgtagctcttatcccaatcagcaaggtgctttccacatagagcaactttatccataatatccaaagaattaccaatatcccaactctccttaaccacttggatacacaatggatctctacgccaagaattttcaaatctaaaacacgtaacttcagaattaaaggtcttcacagttacttcaagaaggattggacagtggtcagagctagacacttccaaattaataagcttagttgagctaaaaatgtttaaccaactttgagatacaagggctctacccaaccttacttcaatccaattcaaagtccctctacccttctcctaagtgtatggataccctgagagatcaagatcacacaaactgctgtcctccaaggattgatggaagccatcgtttaaccagtcagggtatggaacctcccctttcttatcatcctgtgataatacgttattgaggtcaccaataacacaccaaggaagatttttgtcagcagaaagggtgcgcagtaagttccaagttcaaaaccgtaagctccgattaggctctccataatagcctgtaagtctccaattattaccgttagcattattgatttgtacatcaatataatcttgagagtaaccaagaagagaaacatcatctttattcctccataacagagcaattcccccacttcttccttgagcatcaatggataccgcaccgttgaacttcaactgaacacgaagtctatcaactttgtctttcttactcaaagtctcacaaaggaaaataaatttgggcctcttttggacataaggtcctataggaatcgtaaggcccgtgggttttcaagcccacgacaattccaactaaggacactcataatcctaggtgggcttgggaactaggacccaccaaagacccatttttcgactcaacaaaatttctattgattacttccgcctcatcctcatccattatttccctcccattcttatctgtccttatgcgttttgaatccataaccaccaagaattctgattaaaagttatctttatttctcaccttaggagtatttaatacactaattccctgatcagtgccaccttccttttcgaatccaatccccctgtcaatgtgattcatcatgaagaggtcaacctccgtatctttaccattaccattttttaattcctgattatgcgtggcaccattgactcctgaattaattgctttctcaccacagcttggaccatcatcaaaaaactggatatcagcaacagtccctgttctcagccacctggctccatcaagttgttcttcctctaaggttgagctttcatccataaatcatatggcttttctattacttccaggggtgtataatagatacgagagcaaaatctcttcgaatgaccaataatgccacagataaagcaaaatgtaggaacaaattcatacttgaaattagtccaaagccaatcaccattcgactttttcaacttcatcctctttttcaacagtttttcaacattgatgctggttctcacacgcaaatagtctctccatatgccgttaaaatttttcggacccgatttaacataagagccaatgtagttggcaacatttttgacaatagtatcagatatgaactcaggtctgagctatgcagttgcacccaaatatcaagatgataaagtttaactgctctaggctcctcaccctttttcaagcgttcaaaaatcaattcaaacttgttgaacgtctatggacttcctttgattaccctctgtatatcagcttcatggtagaattgaaagagatataaattcgtttgaagctccttcacgaacataccctttcctggttgccacaaagcagccatagtgtgctgcatcgaccaagaatcaatggccctacttgttagaaactttcccaccaaacaccatcgatcgtcaattggctacccaacatcttctataatatcgcataagaaggccccttcttcttcctcttacaactgaatattagaataattgtcctccaatttagtaaccatagtactgctggaggccatactgatacaaaaacaatcgaaaccaccacagaaaacaagcaattgacaacaacgctcacgaccaactcatgtcaaaggacaagactttttcttcaccttaataccttttgtttggttatatcataaaatgaaaaacagaaattagtttttttataagggtattttaggaagaaaaggaagagaaagagaaaatggtagaagtttgatatgggctgacggaatcccgaatttagtgagagagagcatttaagttgattagtactcttcaacttcaagggtctttttttcttttcttccggtgactgacagtgtcgttatatctttacttagtctacactttcccgccaaatttccagtgtctatgtcgttttaaaaccctagagttcgtctttcgttcttcaggactgtccagagtctataatcgggagctccgatgaccgcgattgtcacttccagagacgttcaggagatagtttcaaagctctcgtccgataaagccaaagctcgagaagtatctttctctctatcatcatttcgttctgttttactatccgtttggccgcctagaaaatgcagtaggaggaaaaggaaaacgaaaatgaaaatgaacttgatgaatataaaactctacatatatattatgtgtatttgataggattactaattagaaaaagtgacagttcaaattagctaatcgcaaatggctataaactgagagtaaagtttgagagagagtaaataatgtaaattgaatgaaccaaaagttgtgttaaaaaatattacataataagaactttgatgtcttgtttgttgtaaattttctcagcagcaaaacagatttcttatttttctggtattgatttatgttcataggaagggataaagttgttgaatacatggttggaaggagagagatcaatagctttctgcaaatttctcggacagcacacagcgaagcttaaaccgaatgaaattccacattgtgagcaaaccttttagatatggctctttcaatccatggaagtagaattggctttcctttggacttaacgagtagatacatttcttatattttttatcctttcctgcagctgaaacatggcctttcttgatatctttgctaatgcaatgtgtttcaatggagatttcgtcgagcaaacgaagattgccgaagttgcaatttgcgaagactctccgaattgtggtgcaacgagcacacgattctaagttgtctggtatttgtttgaaaatgtttttgagttggttattcttgtcaagtgaaccgtatgaaacaagatgtttatcatgtccatttttgtattcacttttttgagaacattgaattttttgtttttccaagaagcttttagtgtttgattgagacaaggaagattatgttcataatgtttgatgtgtgaaatggacctttgaaaacaaatagaacttagtaaggaagtggataggctcaattcaggaaatatgacaagtttgctttctacaatttcagggaagatgacacccttgctatctgtggttaaattgctttttaatcacatatgggatgtcttgagcagtgttccaagctttcaatcagaatacgaaagtattctccggcatcttttggctgttaaagattatcgttttcacatgaggaagcgtatctattcctgtaagattttcacttatttaggtttttgagcaaagtacttttcttcattgtaagctggtgcgaacactgatcacatttcctctgcatatgttatctttttgctaggtcttgtgcttctgtacatggaaaaggtggaatcaagcttgggtgggaaaaataacagtcagtataatcccagggaggagatctttcgttgcattctgactctccaatcaattctggagaatccccctggagatttaccaaacagtctaagagaagacattgttaaggggtttgcagggattttctctcatataaggttagtcataagtagtattatttgtcactttctacactgttatgcatatatgattgtttgtaattgtaattccaattgtcttcaataatggaaacgtaaatggtaatttttgctcagggatgaggacaagctttcacgcaaacttattgagtgtgttaataaatacttgttgaaagatggtcctaatttggggtgccattctatggagatccataatgctgtacaacaatttgtgtttcgctgttggttgacaacacatgaccgagctcttaaggtttccaagtcaagcttcaaagcaatttttttttttattatttttattatatgaataaaaattaaattactttcctactttcatgatgaatttgcaagtaactatattaagacttttctactttgttttttttttgttttgcaggatgcacttatattatatgcaagattacagctaaattgtactagagatgctactgatagtagtcttctggtagagcaacttcttgatatagtttgtaaggaactagatcaaagcttatctagttgcagtgtgccctggttagtgttttgtttttggttttctccctttttctttcccccctctcagtttatacttctgatcaggcattgaatctataactatattaatattcaacaataaggagtttaaggcattctctttctctttctcattctccactctcttttttgattgacatttatggctgtaatcttagaggtttatggaaaggtttctctgtctctgttttgtctttcactacgttttaggagtatttttgctaatacctagtttgtaatacaaaagatgactattgatgttttattaatatgatctgtttttatcaatagaaaaataatttatccatgaggttacttatggacatgtgatttgtctcaaaaaatatttataatgttaaatctatactgacttagggctgaggcaactaaagatgataaatttggagctttaagtaggtcacaatatggccttgtggaccttgcagctgctttgttctatcgggtaattatttccattcactttataaaagatgtgatttatgtgctttactgagataaagattcatgtaagaggtatctaatgtgatcttgcatcttaggcttgtgttaacagagctaaaccatcatcatcagagaagcgggtgaagagagagcatgctgatgcacgtttgagagaagagctcacgaaaggaaagtggctatggtaagtcctaatctgattgatttggaaatatctagtttccttttctgtaattgatatatctaaatatatatttagatatctttgtgtataaagaaaatacaaaaattcttccattctatatattaggagtcttgtaattgttgagctgtatttgtgaacattgtaaaatatatttgagggaaactaaatatataaataactaccctgattaacggttttagacaagctgtagcaaaattttgttcactttggatttggaggttaggcttcttagtgaggaagctttggttagaacagttattattgtcttatctatcttgatattcatctgctggaacaaggcccttctttatgtaggtttggaagtatttttgcttcatatgttcagagttgtatgttcagagttggctgcaggaattaatgtattagcagggtttttgatgtgtggaaagggtaggaaggagtccataaaaaacttggtaatgtacagatgtaagtagagggatggagtaagaaagcggtggttttaaaaaaaaaatttgcttagtaactcctggtgataatactacaaaagcatgtttaagtaacatagggactattctacaggaatgctgctttttgctgtctcactcacaactacaaaaggcgcatgagtaaagatctcttcatctactggtttgagggtatcatttcaagctttgaaaggtagttctctgtgttaagtcaaacatagtaaatagttatctcttgaatttatctgaacctaccatgttaaaaatttttgcttaagggacttcatactttatacagtcaaatttgttcatattattataaatcattgagattttctctctaataataatttttccttttctatctttcgatctatttctctctacggatacatctttatctgttcttctattttctccttaggtccataacaccctgggtttgttccttgctgttgatgtgtttcctatgctaattttctagtagaatttcatgactatgcaactgtttttcagatgcctttcatatttctataatcagcttacattgtcttatttgtgtttcaatgtaggcttgtataggaaattactttctatattgatgtttttgtacgttccttacataacatgataagataaaaatgataacaggatgttagtctttgaggcatatcttctttgatgacatgatttttttctaagacgcatcttctacatgcttttttatggatgctttaactagaaaatggttgttcattttaaaaattgaattgtgttgcagaattatgaacgatgcaaatatggggcacagttatgagggtttgctgtggactctgaggtattgaatagtttgtttcttttcaaattctctccatctccaattttctcttgtgagctcatatgtttctatatttttgcatgtaaaggagtttgcaagaactctcttttgtattactgctaccatcagaggttgcaattttgtctagttcttcctcatcaaatgaggtacatatttggattttttaccttttggttgttgctgttaaacatgattgtcctaaaaaagttgaatttctagcagtcaactggattattatttttttttttttaaaattattgtaaaaacaatattactttattattaaatggcgaaaataatattacagctaaaaaattgtaataaataagaccatgacaaactcaactaaaatttaagcatctgataactgggaacacaacaatgacaaatttcaaacagaaataagagcaagacctctcaatctctcaagaaaatagaaataatcaaaggtttaaagttcattttacatttttaaggcaaactgtaacccaaaatttgggttacagttttcatgtgctattgctggttctagtctggggtttggactgtcttctaggctccctttactttgtattattttttcataataccttatgtcagggttctaataacaattttgggtggcggtcagtcatagatatttgacccctgtccctttattcaaaaaaaaaaaaaaaaagagtatactcttttataattaatcgagagttttgtctctaaaagaaaaagtaacccaaaagtgaggcttccgaataaaatttgggagcgggtcagcctaagacaagcggcctctgtctcttttttcaaaaaaaaaaaaa

SEQ ID NO: 161698 - DNA, 3782 bp, Cannabis sativa
aagatcataacgaatgcagcggctactgaagagaagtcaaactttaatgcaagtgacaaaaccgaaactttcacccaagaccaggagagagctcctgttgcaaagctaagcgaaactgagccctcggcagatgatgataaccctgtggttgaagatcaaactcacccaacttccgcgccagaaccaagagcagcagtggaggtttgatgcaaaagagagggacacacttttgatgtacacatgtagagagctccgaatgaatgacgcctgtcatggaaataaaaaagggaatgaaacttcagtttattggggagggaagaaagcatgaaagaatttggcaattatggtttgtggtgtcatgttgtccataaacagcagcattggttgttttgtttgattgctataaaaggttgctggtctttgtcattggtattctgcattccagtttgcagcagtgtatgtaactatttgcaagttgtgatcgtattaatatgttgtcaaagtctgtcttttagccagaatattgaacatattgggaaattttggtcaaatctttagtagatagtgttcatggttggaagtgttattatgtcttctattattgtgttaaacaaattggaattgtcagtttaatggaaactgattctgtggaacgagcaacctcttctccccctattgagaaagacttatcctttttctttatatatatatatatatataacatttattatgtaatgcattcttattccttaaattaatgtgtttttttttttttaattagttgattattgagatgaattagtatttctaaaacaatcactaaattttcaactagttaaatgttgagatacattaacatttctaaaacagtagctgtagcccaaatctatccccaaagaagcaacatatttcaaagagaaaatgataaaaaaaaaagggctcattattttctttttgttgttgtaagttcttagtttattgtatccatttctaaaatagtttttttttcttttttttcgtcttgcaagcaataactaattagatagatcttgaatgatttgcgataattaaaatatttttctcgaactattcacgatattggaaagtaatatttctgttagattctatttaatgtagctaacataatactaacgtaatattttagatattggtgacaatgatacgtttagaataattaataattttgcaacttgaaatttgacgactacaaaattgtgtcttttatttcttaaaaataattatgtatatttttttaagaagaagaaaataattcaaatctattctttcatcaaataaaaaaatatatgttagaaaaatctattctttcattattgattcttaaaaaaatttgaacacaaaaaaattatatatttaaactattaaaaaaaattaaaaatactaaatttttttaaaattattaaaaaaaattcaaatattaaaaattaacaaaaaaaaaaatcagtacttttgtttaactttgtcttcattgtttccttttacaataaaaaataattttttttttttttttaaaaagaaaaaaaaaaaaaataataaatctcaaaaactataggtgcatctagtaacatttttttaaatagtattttatttttttagttagaaaatgaaaatattagaaaaaaaaagtgttctacaaaaatgttcactttttaattattaaatgaaaatctaattttgaaggaaaaaaatcattttcaaaatttatttaaacaactttttttcttaattataatttattcgtactttttttcactaatattttggacctcgaccctaaccctaactcggaccctcaacttggatttggatctggacccaaaccctaaaccttggcctcagctcagccctcagatttggacccagacccgaaccagcctcaaaccccaaaaaaaaaaaaattaggagaaaaattactagttattaatgtgtaatgccattaggcacaaagaacataaactaaggtagaatttaattagaaggaatgaaattataggataggaatagaaatggaaataggaataggaatagaatggaatcaaatttaaaacgcataaaaaattgataacaaaattattataatttttttcatcttgcattggaatgatatttcgttctatttcaaaatagaataaacattctaccaaaatgatggaaaagtttttccattagaatgatattctaatactttaaaaaaaatacaactaaataaaagaatagatttttttttttttttaatttcatccatttcatttcctctaaccaatcaccacctaacagaaatccatttgcggtccttgatgatatatttgtgatggtgccaaaacttttttgttttaagaaaaaaaatgggtgacgatgcattatgatggtatcgtaaaaactttaacttttggttgaaaagaatgatatgtaacgatacatttgtaatgatgtcatgataacttgattttggcatacaaaaaaaatgatatttaacgatgtatttacaatgattgcaatgatgccatgaaaagcttgatttttagcataaaaaacgtataacaatgtttttgtgatggtgccataaaaatttgatttttgataaaataaatactgtataacgaagcatttgtgatgatggcttaaaaacatgatttttgacgcaaagctatgtaaacattatttaacgatatatttataataatttgcagttaaatgtgatgatgtataattttgactcgaatatttaaagtgatttttctttattagagagtggaattatttaggggattaccgaatgttgtgagaatttgaaatatttaggcacacaagaaaatatcaaaatgtacccaaatcaaatgtgatctagttttggaagaagaatcacaattttggaattatggattagatttgacaattcatactaattaattttaataaaatacttagaaaatatatgttattgtattcataacacagttattcttacatttatattatactgtataattgtaacttttttcatttttactcttgttactatagtactactcctgaaggtgactttttcgtatttctaacatattgcattcttatttctaacataactacttttatttcccttttgaatttgttaaaaaaaatctgaaagtaattcaagttataaaattctgtcctgatccaataataaaaaatttaaacttaatatgtgttgttaaaaaaattattaaatttataccagttataaactcaaaacttttagtatttatggctaccttaaaaaacaatttatatattatatattattacaaaaatttctcctatttttcattctttattgttttttttttattttcccaattttgtttctctattctcattcatttatatcatcgttttctcttaatcacttgttctctttttatttttattttctctctaagaataatctctcataatttattttctctctcgctttatctctcctcatttttgtatcactttatttgtttattttactttctgttattatttattgtagaactttgacaatatttttcttttgaaaaatattctcattagtttttctgttgaaggttattttgaaaaaaaatcactaaacttatatgtaattttcttaaaaataataaaagttcttatatattattatttatagaaacacaactttaacaacaaatataaagtttttgaaagaactacttgtcaaattttcaagattcatattaccgaattgttcatgattg

SEQ ID NO: 161699 - DNA, 3686 bp, Cannabis sativa
aaccatgtgggtccaagcataaagacatagagttatgtctttgtactgaaaaagtttagttttaaaatattataattgagatggacagctgttggagttcatctattggccattgtttgctacgttttaacaaatgtggaaatgggtcccgcaagaatgttgataatgagaaagaaagattggatattcatagtcaaaatgtggggcagaatcaacggagactttcattccccaatatattccttcagcaaactctgcacttgaaaacaaatccatcacataaagaaactaaaacagcattgtatgatttggttttggacctcagtctatcatatatatacatgacctattaattaaaaaaaaacaataaatatagtatagttgtaatcatgtgtgaacacaaaccgagaatttagcttctcagctaatcttcattcccaatcaaaatttccataaaaatgtaaggtttgttttatcccttgatcaattatttccgttttattaataatattttttaattcaattatattattttgtatatatacattataaaccacacactttattcgttctaagcactactacttttcgtcattacatgtttatgttcaaacatgttcatttcttctctctcataagatcatataatccaaacagtttttaattcttaaatgtatttattttgactctcactaccatcattgcttcaataatttggcctagattagtatggtactgcaacctgcaaagttcaaatggaaacacgtggcaaacgtatggttggttgacttctctattacatactcactgtcagcttatttagtgtgcttcgtataaagtaaagtgactttaatctgactaatgtgagaggagtaaattatcaacgtgttatttcgcctttgcttcattttcctccatcaatattatatatatatatatatatgtctgtgtgtgtgtgcaaacgaaattttgtgaccaaagagacaaataaactaactgcattaaacccttttcttttgactagaggtaactgtgctatactcactgtagtgaagttaatttaattacatatgatagtttcttacgtcttcagacttaggcttttaacacgaaaatagtaatgactacattaagtacaagttcaaatactcttcctctgttgtatattcaaagaataagaatgaaataggatttgaatgtctggaacctagaaaaacaaaattgaacaacaagatctcatgattaatttgtctccataaggatcatcgaaatatatatatgtatgacaatccaaaacaatggttttatatattagaataaaaaacaaaactagactgaatttatcatgtatatatatctttattatatatatatgattgtaatattgagggcataatatagcaattatgaatgtgattataattgaaggcgaaaatgtcggcatgcagttgtgtatcatagggatgccaatatataaatatatattatatgaaattgaagttattaatttgtagccataaaacaatggaaaagaataattataaggttgttgaatgattggattagacgtttaaaataaagtgatggagcccagctgtggttgcatgacccattctttgacaggatgatattatcatttcagatctgttactcttttgtacatatacatacgtaataaatactattattattctttgaaaaaccaaatactattcttatttatttttttttttgaaaagaattaatagtattatgggtgacagggtgagtcagaatatggatattgtcatatttctcagttctcatttaaacattcattccctattgaccatgcaataatgcttttatttataatggaaaattttataattcatgcttaatttgtatcaaaaatattagtattttccatactacccaaaatacaattgttattcaatctccctcgcgctctgtttgtcttggaaaaccccaaccactgccgaaaactcaaacgaccattttcaatctattttcacttattctctctctctttctctctctctctctctctccattttcctcatgcgacccaaatatcgaccacgaccacgaccatgaaccgggttaccaccatcacgacaatgaccacgagctagctcgaaaccaccgcaggccaccaacgagagtagtacccacaacttaagattcaaaccttcgccgccaccaccgccaagctgaatcaaaagatatgttttttaaataaaaaaattagattttcaatagatttagatgtgaatttgtatattttcttgagattagttcaatttttatagattttgtgatctttcaaatgataggttgaagttttggatatatttcagttgtgtgtgtattttaatttacagtgttataataaaatatcgatagcatattgataggttatagacgaaaaatcaaatgggtagtgaattatttgagcataactatttttttttccatttttttaatgtgtatcgatatgctatcaatattttatcaatggtttctgaaaaattttagttaggctatatatttttagaatatcttgagtatgtcggtaaaatatcaatattttgttgataattttattgcattcttgatttattataattgtgatactgtcagtattttgtcaacaggatatcaacaattttcttgtaaaaagttatttttttaattgaaataatgtcgacgttattttgtcgataatttttcctccttctcttattatttaattgagataatgtcaataggatttcgacaattttcatgtattatgttattttgttaattaagataattcttaaaggatgtcgataatttggagatagtttaagaatattttgaattgtgtatctttgattttttcaagaattttaatttgttaatggtttatgtatgttttatcgatgattttttgatggtgtgcttactgcatgcttttgttatatcttttttcaaatggcttcacgactcatagttcaagcatctgaccattttatactggttgtgtgacatacagaggtatcagtacttttgtgaaaatgaagatgcggtttgaggaatacaatttgaatgagacgacgaaagcaagtagtttagataaattttagaatgtcgtacctttcaccttttcttcggtgttatttcaccaagtattgttgcagaagatgaaggttgatgttgaaaagacggaagagattccttctttctttgcctggaaggagatcagatttggagtggttgagtttgcactcattacaggcctgaacttcacctcaggggtattagaagaggagaaggctgtgcaggctgcctacttagggtcaaaccggttgatcaacaaatatttcaacttgtctgatagtgtgaagatagaagcactctcgaagcggttctcaaagtgtcagtatctagaagacgtgtacaagtttagcttgtgcatttttgttgagatagattatctcttacatacttagatatgtcaaagatctctagtttttcttctaaattccttggaggaagcactcatttgcaagatttatgcactcccttcaaaaggtgaactatgagaagatgctgaatttgtaagtgtttatcgagatttttagaaactaattaattagagcttaagaaaaatatataataataaataatagacaagtaat

SEQ ID NO: 161700 - DNA, 6278 bp, Cannabis sativa
tatctaaaaactaaaaccatacagcagtaatcaggtcagataagaacacatttattaccaagtccagtgatctatcattatagataagagaaaatgactgatactccttctccggccgtggatacctttgaaagattggctggaaaaggtgtagacagattaaattaaattactaccaaacaaaaaaaaaatcatcattcataagaagttgacatctgttaagggaagaatgaaattgtgacaatgtaacacctgtacaagcacatgctaaaagataagaaaagtatgcatacaaacatgattgctaaacacccaactacacaagccacaatatctgattagagcagctactagattgatgagagagcaaatgttgcaaacctagaaaaatagaagtgtccaaccaactcattgggcatattaaagatcttactcaaattagcattttgtatctgtcctcacctttctcagtacaaaatgatcatggttggtcaagtttccaaattttatcagatttcatatttaatggatgaacacaatagctaagcaatctgtatcacatactacaatgtagaggtgtaaagaagtttggtaacaggtcaccaacttctgttatttactagtacaatgaatgtcaatcttcatcctcatccacaaccataccaattcatttagaaataacagagaagaaccagatgctgttagcatccacaagtagacaaacctaaacaaaggattagaaaatgaagaaagatttgaagaataaaacatgtatccgataataacaaccagggtgtatttcaaatgtttctaccaattttaaagtatctgctatttttagagaggagaatataaataagaaaagactccaacattcataaattttgttgaaaacacattacttaataatgtagagataatcaaagcatatatatgaacaaatctctcctctttaagttactatcacccaagaaagacacttacggtgcgttgccctgatataattctagaaacatggctcagtttaagatgtttctcctccttcccagagaaccatattaaaacagactcatcctgaaagcaacaaaccccaaaaataagaattacaagttttagtggaacaatgtataaatcttgctctgcaactaaccacaatagcataattgcacacaaatttaatacagggtaaaatagcatgtcattgagctcaatagttattttcaaagtcatgatgtatttgtcctcaaattgtgtacgctctggcttttcatgtgctgaagtcagggtaatacaaatatcacgaatattggatagtattatgggaatagacaaaagactacaaatagaaacattttcacgtgtgtattgaggatgataattatcatttgaaatgaaatataattacaaacataatatgattataaactaatagaaatagtttataacaatatcctacgcatttttaagaaattctaaataatttattgtaccgaaatagggctcaaattgtttgttgcacatgtatccgtcatttttaacaagtaaattgtttgaatcctgattttggcacaataaattcttcaaaaaaaaaaaaattggaaaggtgcggaatatctattataatttatgtacacattcatatacaaagttgggattataactatcatggagcaaaaaatgaggggatgcaccagtagtgccattttcagaggaactactaaagaattttccaaaaatatataaaatagaggacctatatcagccaacctacataacatataacatacaatattaagtttgaaaatatctcataaacatatctttgaaaagagatccactgtaatatcacgtttttttttaatgttcaaatgtatattattttattgcatgagaagaaacagtaaaaaacatatatccaggatatataatggacacagtaaaattaacaaaatcatccaaacatttcttaatattttggagaaattttgaaggaaataattttacaccataataataattataataataaattatttttccttacatgagcaatatatcaatccattataccaatattttaattcgagcgatttgaggattatgacatttgtaatcttcttcggtggaagtgtaacctaggaagatgcatttgtggaatcaaagaacacacttagtacgatgaagacctagcttatgagcatagttccataggaggtacattcaaatgttttttagtagatttgagaaaagatgagtattatgataagaatgaagaagagagacaaggtgatgctttaatactcaaaaggcattcagctaataagatatgtcgcaattaggataactgcccccaggattgctttggaacataagttataaaaataaaggaccaggctacttcaaagtgtcaattttcccttagcattatggacgctgatcaaatgagataagtaacgatcattaatgggttcgaccaatcttagcttcctccaagtaacgatcattgaatttccaaaatcccatttggaataggcaaacactactgggaaaggcatcagtgaagtattacgggcatacttttccatgtagatacaaggtcattaaccgtgaccaatataggaaattaaggccatttagattgtgaatggtgatttgaagagaaggaatatcaatggataaagatgctgaaatagtgttgaaagagtatgagaaatagaagagttgtctactttggtggtttgttcactacttttggccattgttaaggaatgaagaaaaggattctccagctatgggttaaattaggaaaagtgctcatgcctatcagtaggccattctacaacacatctctgtagaggaaaaataagaactatctaaacctagacttaaggaatctaactaagaaacaagaagtaagaaattaaatttaaataataaaacagatttagttattttctttggaagatatttccgaaaatttaaattattaaaatacatatcttccaacacaaatcatagttgcaagaagagtcgttattgtattcgaggatacctatctcttctttctgatattcaaaataaaggcttgtttctatcaaataacaaatagcaaatagtaataatgactaaccaggggaaacaactcacgtatatacttactgctggaagaaaaaagaacgtaataaaacataacaaagaaaagttcagaaacatgatagcatttgaagtagaacatcaagaataaacttacattagaaagacgaaagggacaaaacttgggtttccctcttctcccatacttgagcaagcatgctcctttcttcaaggcagtaatggcctgtcgtatagaaaatcacattcgtaatttatgcatattcatcatttttgcacatggagaagaaactagaagcaaacatattagtgacgactaacgaagtaataatgacaatagcaagttatttgtactgcaaattaaatacaaatagtcaagatcactatgaaaacaaagagtattgcggagtattaccatgggcaagagctacaagagattcaacatattagaattattacatttaaatgttataccataaactttggctatttcttactcgttaaatgtctttttactattattatttgagctatttttgtggcaatactattgtataattggaacaaatttcctcttactcagtcttgtatcctgattaatgaaaactccatttggtgaaacaataacccataataggaaatcattttgattaaatatacaggtaggtagggagctatacaatatcactgatatcagattcctgaacaatcatgcatgagaaatataatttttaccaaataacgaaggcacaaaagtcagcacaaattaaaagaacaaaggtttaatatctaagagtggcctagcatcaagtattttcaggctcttgcaataacttaatctgtgtcaccgcactccctaataaacaaagaatcacaatttaattcttcaaacttaacatatcacagaaagcaatatagctaaccgccctagatggcaaccaaaggatagaatttatgtcaccagaatcaacaaaagttacatttggaaaagcgaaatgaccaattaaattgaggtttacagtatcttcttcactgatttaaacgatttctataatgtaaaatatcaagctaccgacatttgcatccaaacaggcaaagaacaaaaacaatccgtaaatgaatatgaatattacctgctcaatatccctctcaacgggaccagtcctgctaagatccgaagccattctatccgtccgcgacattacgcgataaagcgtgtttttcagtgaaaataaaaccctaaatctaaaaccgaatttgggaaagagacatgctcaatgccgaacaccgccatttaatcatcaatcactagctgaaactccaactcaaaccctgaattggcacacgcaaacggtccccaatcgtcaaaaacgcccgaatcagccaacataaccactcgtttcggactcgaattcgcccagctacagcttccaaaactgttctaacactgtaaagccgaaaaagacttcgaatcgctgaatgaaaaaggtaaagcctagtgcggctaaactgaagaaagaaaggaaaaaaaaaatatggaaaaccctgagctgaacgatcagtgaggcttccgaactgcgaaaatttcaaaagtggaagcgaaagagatgagattgagtgagtccactgattccgataattccggaaagcaagcacaaaatcgttgagttgttgagtcgccgagttaccgagtcactgagctcgagagcgagaatctgggcaagaaagtacgtgaaaaggtgggaaaatctaggaaaactatgatctgattatcagttgcagaagagagagagagaaagagaggtatttttttttccacctagagagtggtggaatttttttaatttttgtttttattgttattgtaaagagaaagaaagaaagaaagaaataaagcaaaaataaatggattttaataaaaaaaaacaattataaataataaataataatattaataataaatggttgtatcttcgtcgtttatggctgcgagctgaaaataaaaatataaaaggaaagcaaaagagaagaggaaaaggataatggccgtcgttttacgtttaatttccatattgacacttctcttttaaacccataataattcttcttcttcttcttcttcttctcccacttacatatttgctgtccattttctttttctttttctttttctttttcttttgtgtcctgtcagtgtcagcttcttaacaaaaattggaagaaaaaaaaataattagtttgataatgactttttatttatttatttatttattattaatttatggttagttttaattttaattttatccaggtgatttaagttgtatgaatcagtatcacactcaaaaaaaaaattatgaatcgaccattggctccatatttctttccttaaaaagaaggattgaattcatatttttttcctctcaaaacgaccttatttccttccttttcattaattagattcaatttttatttttaattcaattttagttattcccaaaaaaaaaaattacttcatattctatttttttaactttttttttttaatttacggtttgaatttttaaagtagttgcagcactagttgcaataggagtttctatacgaattatatacaatttagattgcagcgctggttgcaataggaatttctatgtacaattctgtaaaaataaaaaaaaataaaaaaaataaaaaaaacatattcacaaaataattaatttaaacttattgtacaatctaattgaatttctaaagtgcactatatgtaaaaatattcaaaataaatggtggctagttaaggcccttattaaagcttaatgaagagagtaattgtccctcaatagtaaagtgatgaagtattggcctttgacgcctaggtcacaagggacgtcgtggtggtcattgtttagcttgaacaggtttagaatgctccaaagtacctcattattctcgaatatccatgaattttaatgaatttctccaattattttccaatgaactaggaccttaattcatggataggttttattgctaggttttgatagatttattgctcttgatattcttgaataggttttattagggctgaacattttgaacgggtttgacccgaacccgagcaacccgcccgaacccgaactagtgaacccgcaaaaaattttttt

SEQ ID NO: 161701 - DNA, 4535 bp, Cannabis sativa
agatttaaagtcatcgaatcttctcgtggataagaactggactgtcaaagtacactcatatctcttatctttccatttaaattttcttccttagtttttccaaaggttttaaggaagcaaaaaagcttattaattttcatctgaaacaggttggtgatttcggtctttcacgtctgaagcatgaaacatatctcacgaccaagactgggaaaggaacggtactttaatcggcaaacatgatatcctcttctttctctatttgattttatgacttatgaagcgatttgtgcttaacaattttaccatttttctgttttatagcctcaatggatggcaccagaagttcttcgtaatgagccctcagatgagaagtatgttcttaactctagttagagattaacgacaataatgtagcagaatctttatgctcatgttatttctgccacgtttttataggatatacagaccatatgaagtaagcttatgttttttcttttcattgctggaaaacattaggtctgatgtatacagcttcggcgtgatactttgggagcttgctaccgagaagattccttgggataatctcaactcaatgcaggtaggtttttgcaatatgtactgcaataatatagtcaagaagcaattcagattcaatagttttctattaatcatatttaaaaataaatatccttgttgtttataagatccattaaatgaaatgtgtacttttagtcttatctctatgctgtttaaagggaatagccttgatgctacttcgtactacgtataacacacccatataaacctcaaatcaatatttgacattttcaggtaattggtgctgtggggtttatgaaccaaaggttggagataccaaaagatgtagatccacaatgggctgcagtaattgaaagctgctggcataggtatgtgtagacctctttttttcattcattcattttaatgaaatttgcaactgcaaccccctaagagtggtgttttgcattgtttaatacataattaatataatgcatagtttggaattcagttgatcaaaccatatgtatagtttattaaaatcacattatgttatgatttctatttggcaaaatggcttgaatcttaacccattaaaatgatcaaaacatcagtgatccaactcgtcgtccatcgttccaagaactgctggaaaggttcaaggaactgcagagacattacgcccttcaatctcaagcagcacgtaatgctgcgggagagagcactcaaagtcaaaaggaagggtagcctcggctttcaaatgattcacaacatggcaacagctgaagcagcctctttctttcgttgacagactttcaagggagacgggtgccattcatttagccacaaaaacattttgtggtaggtattgaatcgaaattcgtaactcaaaatctggctaaccatttggcagacaagaaaagggaaaaaggaaaaaaaaagattgaagaggaaagagtggttgtcattcattcatgtgtgctacctaactaactagaacgttgattggcttgggttgggattgtgtgatggttgttttttgtcactgaaatcatttaaaaaaaattcttcaaagtgggtcattggtgctctatgatttgggattaaagtcgaaatgtataatcacgtgccacctttttcttcattattatgagattttgtattagaagaatgggctgacgacttttgtacaaaagaagaaaagaaaaggagtcatagtcaatattgttagagattaaagttcttaattgagtcttctactgcatttttttttacttggtttatttttagatgaaatacactttagtggatcttctttgtttagatgaaatatactctatatagtggcactgactagtgctgtgcctggtccattttctgccaccataaaggcaatttgcatgtgcattgcctggcaacaaccaatataataacctatggtgataataacttgttatataatgatgcaatgacatcatcaaatctttgactgtgtttcacacattacacactttcttctcaaattttattaggcaaatactattttggccccatcgaaccttctattcaaaatggtaaaaatataccttagattaatcaatttcaagtggtttcgagcacattaaaaaaaatataatcaatctcatcataacacttttatattaattataacttttgcaatagatagactaaaattgtatttacccaattttatactactgttcattgacataattcaatgatgttaaagtggattaaaatgaaatcaagcccatttggcaatggtctaatttgccattaattaactacatgaagataacccctatatttatagatacacattcatcagaacaaaaagatgtcttgagttaataacacatgcaaagttcgatgaaacaaaactcgtacaatctttagataaaaacaataggatgtgatcattttttttaattgtaattagctgaaagcaaccatgttttttcttctaatggagtaagtgtctaatagcagcaacagcatcacctttgtgctcccttaaggttctctcagcgacctttttgtccatctgtaacccaaagaaaatgccaccacaagccttacataactagaaatctacacaaaaatggagattgtgtccacataagaagaaactaactcacctctagttcacttgcaattatgtccacatcagctgcattgatcttaacagcagccaattctttctctctaaaagaaatataatatatatatatatcagatcagtgatacacaatataaccaaaaaaccaggaaaaacatggaatgtagccaattaaaagtaacaaaaaccaactaatattccaaggaaagtgacatttaatatgaagatggtttgtgtttattttggaggatgtgaagaaaacaaatatcaagtttagatacaaacacaagcaaatatacaataacaatagataagttaagttataactcctacaatagaaaatgctaattacaatcaaaaccacaagactgaaaataaatccaaaggtagtaaataacacataagaatgcaaaaaaagtagatgataactacaccagccatcataacatgggaggtgtgtagagtctatagactaagcactgtcatcataatcttgctttaatgggatttagaaagtaaagaactttcttgtgaagaaaagccacaaagctagtgatacaacaacttcaccttacaaaaccaaatgaaatgcattatctcatattgcccagtagctctaagctctttagagctccaattcaattctaaagtaaaatatacattaatcacaacattgaataatttgaaagcatgagaatttttatacacctctaagtcacaataataaatccaaacttgaatttatccagtaaaaagagacagagatagaagagaggaaaggagtgtggtacctcatcttcatggcattccaatctgcatcagcagaggcagctatggacgccatagcctaacaaattgaacccaaaataacaataaaattatatattttttttttaaaaaaaaaaaaaagtaagaaaatcagaattaaaatatatataaaaaagtgtgaacccttctactgaaaaaattaaaaataaaaaaaaaaataggaataatatgaaataagagtacctcttgaacacgagttgagtcgagttgacgatcttcaactcggtcagtgagtttgtcgaaggctttactctgttgttgaaggtctctatcatcgaccattctgtcaatcgctccttcgtccacggctccttccattttcgatgagtttagcttgagcttctccactctctgccctctctgctctgtaatttggtttgtacagtcgtggaagatgaagatgaaggacacaactaaggctaaactaagccctaagaatactaccactcacttggcccataacaatagacccaatgctaagcccaaaattatatattccagcccagtattttcaaccaatccatttggaattactggaaattataattattttcataaatatacaaaaaaaaggcaaaaaattcacaaaaaactcagatttatttacatttttacggattttaaccttttttttttttttttaataaaaatatgggcgtttgtttttcgttactttccataaatctgtaaaaatatatatataaaaaaaatatgattttaagtatgttaaataactttttttatatataaaaaaaaatcacatttttgttaattttttccatcaaaattataaatagtggcctattaataaattatgttttgcatgttatatgtaggcctaaaaaatggaggaaattagactccatattctttcatttttattctcttttttaaagtgtatcatttttatatttttttttaaatactttactaattttgtctattctacttcaatatactctttaagtgactctctcatgtcagggttgttgaacgataaaaaaaaaaagaggaataaataaatttatta

SEQ ID NO: 161702 - DNA, 3766 bp, Cannabis sativa
tcacctacctctccctctttcttaggtgaacagaaccgaagatcactccagtctccatcaatataaaacataattcatgtatatatataaatatatatagatcatagatatggagagagagagtactactaattttaagagtaaattctaaacattgcttaaactttggatcatcttgggaggttggagcatgcaatcagaatgttttatgcttcttctatcgtcataatagatttgtcataaaatgcaccaaactataattgattaaacacatggagtaaaagaaaataacattgcaaaatgcaatcttccagagtacatgtggcgttgggaaaactagagatttacaatcaacctgaatcattacatttcatttcatctacaccatacaaagataatagttcccctttaccaataaaaactacaaaggaaaatattttgtagttatacacttactacataaagctttactccctcctagccttctcaatgcttgatttactaaggatgagaaccccaactacaataagcatagcccctgcaaaccactgttaaatcatacagcccttgtgaataaatttaccatacataaatttgcccaaaagaatctcaaatttggcgaaaaagataaaatcaaaccaacaaccatttgctatccacaaaaggatatgagagataatcaatgaatggtcactctatgcacaataaatgttaggggttgtggtaatcaacaacaatgggagattcacaaaatcaagggataaaaactcaagaacagtggaaatcaataaacaaagtcagcacaaaggcttgcacaagttgtcgaattttgtccaaaacctttattcaaattgctacaagagttgcttgaggtctctacaaaatggaataaggagtgtgatacaacaagtcgaggaaattcaacaagtcaaactgtattgatgaaagcttgtaagaacgaggtggtataaaaccccagaaattctattagaaaaagcttgtaaataagttaagccctgatattaaatcctacaaataggattaaacatttttaaaactcaatgtgaagccaaaatgcaagctttaagtgtcgcctacagtataatcgtacaaacttgcgtgacatgtcgcacgcaaccccttctaggtgacgcgtcacctctaagcctattgcacttttccaaaatgaacctaaacactttcaaatcttctcccaactttttgggtaagcttagaaacatgtaccactttagacccatttttttttaatgcctacaacaaaaaagtcaaaagttcaaatcgtttaagtgttttgcaccgctttgcgtaaatcacttaaccttatatttaacaaatcattaataacaaatcctcaagctccacaattttatacgatttagcactcttgctaacaattgaataattaatgtatattcacaagaactaacaaattgaactgcgattgcaaaagaggaagatgattacaagataggtcaaaacaaaacataactacacacatacacatgtacaaaaagggaatcaagattcaagaaaaaagctgtttcattttgcctcatctttaacataagaagtttgagacccttccatcaacttgagtcacaaaccaaacacacgtgtacccacttggcttactttcaaataggctaccaaaagagtggcttcacttaagaatgtttaattagaaatattttcctgattatttggttacacagctataagaagcacccggggaagcactctcctgaagtgagtccaataggtaatatcaatacctttgtgaacttgagtttcactcacatgccctctatcccaaccctttccccaaattcctaggcaactcaataatcaaaacaaacaccccctcaagggaatctgatgtccttaccaacccatcattatggaaactataagaagcttgcaaagcctattatttcatatccatctgaatggtgtgtaaaaaaaacgcatctcatcccatttaaccaatatcggtcaacaccaacatgataggccacctctgtacataaaacataggaagagaactaatgacatggatcgctaaatctattcagtttagtcacctaatgttcctattttctgttatgttctaattctgattgtaaagattactaacgtagctgtaatataaataggacaggagcaacttctggggattgttggataatttgtagagggaaattgggagagacaggctctcaaaacaaaaaccagaggtgttcttgtttcgattttcaaagcaaatcagaatcaaacagtgactattcttcctatctttctttgtgcgtaaccacctcagaaccagcaaaaatcccccctgtatagtgatagcactccggcactcagtaatgcaggaaacaaagcataatgaattaatgataacatttaccatttaaacatgacaatagtcagacttttaaattaacctataaagttttctcttcattttatttccatagaactactggaactactcatttatctattcttcctaatgatattaaaagaacagaaaattacttcagctaaacattagaatatagatcatagaaccttttttttttttttttgcaaaaataaagataaagaattggagaaggtatcaattggtttttacctgaaatgataatggttcttggaacaaaaaatatccagctagaccagaagtgaggaagttagtagcgaaattggtcaccgtagcttgaagagatgatagagctttaaggctatttacataacatccccacattgtcacattgaacagtattattaaaccatacctaattatctgtattaacattaccgaacaacaaattacaaactaccaaaacaagtaatttatgcaatgttgacaaagtaaagatgtatgttataaatccccaattgataacttatatatcttaaaattggaaacaagtttaatcgatttgggtataattctgacatgttgggaaggcgaacctgagtggtaaaaagctttgcggatatggcagctagagctgcgttgagtcccgctgatactgcccaggcgtaccctgctttgttgatacacctcatcctcaatccttaccaatctacaaaacgccgtcgtactcgattcggatctcaccaggagaatcccacctctctctctttctctttctctcttataatataagaaaatgaacttgcatcacgtatgtctttaatattttagttatttaagacatgttctcaaattttaaaaaaaattaacatataaaaattaaataattataattataactataaaaattattttaaatactgttataataatagtatcccaacttaaaaaaagttgtaattgtcgaaggtgtttgagctctaaatatgaatttagatacaatacgaatacgatacgacaaagtaaattaagacaacatgacacgtgactaataaatttaagcacgacacgatatttacaaattgacactatacgaaaagtataaagataaacacgtcatgacaagtccaaaaaaacgtaatcacaaatagactaacccaacaatatatcacattaaaagtttttataataataatacatatggatttattaataaatatttaaattttaatcattttaattaatattttatatgattatgtgtaaatattattaaaaaattatataaaataatttaaactataaaaaatatagaataattagcttttttagtccctgtacttatgacactatactatgatg

SEQ ID NO: 161703 - DNA, 2753 bp, Cannabis sativa
ggcggaggtggcggcgatgatcggcatgatacgaatagtagccaccactcatagatcgattggtgatcatgatgatgatgatgatgattacatgggcatggtcgtcctcgtcctcgtcctcgtcatttttctccacatgtgtagtagtttgatgtgtaacaccacacgtgaggtttgatattgcttctgaaaaaattgatgagttttctttttttttcgttttaattccaaatttttttgagtgtgattaatatggttggggggtttctaattaattttttttaaatataaatataaggatttgggaaagacatattatatttcactctagctacttgacatggctatttttggctgtcttttttttttcttttttcttttgggcactaataatatagtttcttatatttttgggatttacactgcatcttattacattattaatgtcatcattgtttgtgcaattctctctctatatataatatatgtagatatgtatatatagtttaatttgaattttcaaaagcaaacaaatacattgtaaataaaacataggctatatgtactgttaccatgtcacataactttattattatttgccatgcattgtgtataaatttcccacctacctaataattgagtatatttcattttcacacacacatatatatataattataattataaaatgttcctttttctcttgtccacaaagttcgtgtagcgtagtggaaactggaaagtgatgaaacagtattgttactgccacattagtatatgtattgaatttactctctctctctctctttttttttttcactcctgaatattcacaatccatttgtttttttcccttcctccttttgatacttaaaatctctgccatgaatctcaaggttttactgtgtcaatgattaagatttttgagaaagagagtgagagagagaaagctagggttaataagagggcgtgggatccatacccttatcagttccaggtgttggctcaggtggtgggaccaaaatgctggtcattgccctaaccaatgtacaatgtcactgacaaacaggtggatcattcctcttctttttttattttttatttttacttttaattttatatttaaaaagaaaaaaaaacaaaagaaaaaaaaaaattggtgcagttgctttggcaccatagagagaaggatcggtggtggtggtactggtgggtgttattgaccctaccggagggcagtaccctaccttgttctcataatttttatttctaatctgttaattaatattgaccgtccgtttgcatcttcttcatttgtggggtccatctactcttgatggtcacattgaataatgtttttgaggaggtgtgtgagtgacaatagattttattgggggaagttaaaagaagaaataaaataaatgatgttggattatggagtttcatgcctcaataaggttgttagttgttactgtgtctcccttctttccttctttctctaacttgttttttagttttttaattagattagacttgtagttgtgcatgtactttccacaatccaaactttctatttttggaataatacgtaagatattataatatgcttaattatagtcttatatttaaataacttcatgtttatttatatatatatacatgatcatgtttatttaattataaactttcaagtttattatgaaaggttgtatatcaaaatatatatatttctcaatctcaatttagagattaaattacaaaataaacatttagtgtgtactttgtttgtacttaatttttatataatgtatttttttttttttttatcatcttcatcttcttcttcttctttaaacataactcaatatttctaatttaataataaatattttattgtgaacttatggtcgaactttgtttatactgtcataaagaattttgtgaataactcagttcttaatttttttaatataaatatgttgtccatgtttaattcatagatattgaatatttatgtataattgtgtttctaaataactataatagaagaacatatctcacatcatatactcaaattatagcagcgataatttatatgatataatcatttttaaagccagaaagatccggtaattaaaagaagaagaaaaaaacaattcatgaatattcattcgctaaactatcatattattacaaatacccatcctaaatttatatatttatatttattaacttaatattaagtgcaatgtacgaatataatttatttattttttatttaaatttaattaagtgatgtaaagtgcactactgttcaatttttataattagttaatatatttttagtttttaatttttgaaataggatttgaaattttgatccttgaattttttttttaactattgtggcttggtgtgctttttaaatataattttatatatatacgtattttatatgtacaataaaaaaataaattttatattattatacatattttatacttattttaatgtctatatatataaattaagataattatattagaaaatattttgacaaaatttgagttcaattagataattaattactttcaaaacacattttatatattatgttgaaacatatattttaaaagaataatgatagtgatacatacattcttaatttgtagttacactacaacattcaacactaatagcggcggacccctccgccgctattagagtcatttttggccgctaaagggcaatag

SEQ ID NO: 161704 - DNA, 1603 bp, Cannabis sativa
tctgattgtaattaacggccctcctatgtaattgtaaataggggcgggatacactggaaaagggatggaaaatcctttagagaaagagtcatagttttgtattagaaaaatctaataagattgactcgtggactatgcagaattttaactgtaaaaccacgtaaaaaaaactttgtgttatttcttttccgtttactattattatttctgtgcaaatccatcaagaaaggctttaatttagttaacaaaaatctgcgttaacatgtagtttgtatgtatttcagtttttgttcattttcaatttatgtttatactttatcctaactaattagtgacaatacataaattattaaaaattaattaatgtagggaaaaaaaagaagatttttttctttttttctttttttttttttgcaacccaatgactggcgaaaattgtagctgaaaaatacaaaatttatatttaatctgaaaacattcctatatgtgacggtttaaaaccgtgtcctatactataggacacagtttgaaaccgtttatatagtgttcactataggcgatggttttaaactgtggcccatactatttccccgattgttttcaaccatcgtctattcatccagtatctacgacgttcgtataggcgacgattttatggactatcggaaaatcgatgggaatttagggttttttagtagtgtctttgtcttctagactaggcagcgtctctcggaccatagtgctccatccttgttatgtatataaccagacttacatccagattggaaacagtaacttgactccgtaaatgagttgacttaccttcatgattgggctcgtgaattggcctacttttgttgatggtggtctttggaaaatgtacacaacattagtctcaaaacgtggataatactatcaaatttgttttccagcgcatttgtatttttttagcgacacattcgagcattggcaaaagacctcaacatataggtctcatttattcccagtgcattacactatcaagcgaagggtgtttacacaacttgctatgctagcgcaaatatgggttgcacttgtaaatattattttaccagcgtaccttttaccagcacagtacaggaaatacactattaaaagtgagttatggtagcgcagtcgtaaactgcactggcaaaagtgacatttcttgtagtgactctttaaagcatatgaatgctggtggtcatcttttcagtatgtgcgtttatgcggacctagtggcttggtgtgttagcccagtgggcttgtcatcctcatttttgatcgagaagtgtccttattttacaactagttttgcaaatatcactatcttcaacactatttttagctagatatgattggatttctaaatttattgtgacgacacattgtataagcgtttgattaaagtcttgtgatttctctcagctaagcaactattcgaaatttctttaataagatattaatcatttccatatttatgaattggttatctaagttgtgctataaatttttgaaaaaattcaaaataatttaacatgctgaaaataaaattttaaataaaatattgtatgtatatatatat

SEQ ID NO: 161705 - DNA, 3655 bp, Cannabis sativa
agttgatgaactgattttggtttgaattgggttttgatctgatgaatctgttttgtttaatgatccattgtgttggaaatgtaaaagcagggaaaggaagaggcagtgtccatgaccattgacagcaaagcttgatgatgataatgatgatggtatattcttagcagttaatacaaaatttgtgcgtgtgggttcattgattggcatataatgaaatgaaatgagagtggtttaactgtaatgagtcaaagcttgagtttttagtgtttattttaagaggattagatgaacataaaattctctttttgcccaatactcattgtaatttttctataataataaataatatatagtaacttttgaattgttatgttttgatccattcacatttaaattttgacttataaaaattatatttatttttcattaaatagacacaagagaaagatggaactaactcttttaatgaaagatccaatcttatggaaagttggaagaaatatcttgcctataaaacagcttgaaggcgttgtcctaaagactccataagacactgccttcaagttgtcttttttggtaaatctccaacctttgttactcagaagaagattttatctagatcttttgcatttgggcaaggggttggtagagtttgtagtagaaggtcttaatgtgaaatttcatatttctgcgtagcctaagctgcagccgccgccggccattgccaaattgggtacattgtaaccatttacatattaaatgacagcaatggaatgtcaatcctcgaactttatctttcaagatagggcagtgtccgataataccactcgaaaaacaccaccacaacaaggctcgatgaaaaatgcttaattgatttcagcattgaatcttttaaaagcatttacaacaatcaaatttaagtgtagctttgttcattttcattttgttgagttttgaaagttgtgtaattgtataaacacattctccaatctaatgggaattaaagttcttgtacgaaaaactaataacatggtaatttagaataaataaatgatcaaacaagagactagcattttcaaattttcagcaattatgatttcaagacagtagaaaagaaaaccatcaaaacattgtaacataaacacaaaaacaaagtagtactattttagagcaaaaattacttctcagttcacagactagccaaacaaaatcttttcaaaagttgtttctatcagtggctcataacatgtcctagacagtagtagtaccgactggcgataactaaaacaaattaactcatataaggagaaggtgtaaaaagcaagtaacacactctttaagcagcagcaccagcagcctttcccttcttcctctgaagtttcttcacgtagaactcgagttcctttccttccaagatgtatctgtcaaggaaaagaattcccttgagaaaactcgaatccaacaagtgatttcaaatataagaaaataaataagcaaaaaagtacttacccatcagctctgccacattgtccagggcgagaagagatgcaagcatacaaccttccgctactgaattgttcttcaatatgggcgtcgagggtacgagcttcttgacgcttctcaatcttcctctgaacatggttgcttttctttgcttcctctgcagctggtgcagcggcttcaccctcctgcttatacaaaatatcgattagtactaatcaaattgtattactccaaccaattgcaaatttactcactagtttgtctaaaatatgttccaaaaagataaaatctcattccaaagtttgatcaatatgtaatctactgaccagcctttaataatgactatacataataatgccgatttaactaatttcaagaacaattaagcatacctcgggggtatccttcttggcagcagcagcagcagcaggtgtcttcttcttcctaccgatgtctacaccatagtgctgaaggtaccattgcttgaatggggcagcatcaacctggatgatagcacctttcacaagggtttgagttctcacaagctcattgtttgaggaattgtagacaacatcaaggagacgagttttgcgagtaacagcttcacttccccatgagaagttaccggtatccaacctgagagctctccacttaacatttccacctctaacacgaatacgcctcacagtcttgttgcttgaaagcttagtgttagctggctgacgaccgagctcatacctgcaaataagtaaaattagaaaacaaaataaccaactaatacaagttcacaagaaaattacagctgtacaagacatttaaacctaaacccatcaacatattagcaacaacaaatgcaatcaaaacaaagtttttcagaacaggaggtcttgagttcatagcccagttagttagaccgccagtttggtaaggaagagttcttgagttcaactctcaacgaaagcccaagaaatacaaaacaggaatcacactcttcgagtcagtgccaaactcctttatgaaactcctaattttctttcaattcattgacaaacctttggtgaaatggctttacatatttatagtaccctatgacaatactaacactactataatccccatagtgtaacagtttcactatgatcaacagaattaaggctccaaaaacatggcttgaacaaatctataaaacttgaactcaaaagggcagaacattatctctacataaactcattcatgaatatgacgactaaatgaatagatcttactaagtacataaacaaacatatatctattcaaaaaccactaaacacattaacaaatcacagatcttaaatcccatttcactaaaaacaaggtaaaaccagcgacttaataaactaacaagtaatcaaatcacaataaaagaaacaaactttctcccattaacattaaaaatactactaattatcaaagttaaggaagcaaaagcaataatctttaacaaaagaaaataaagataattacttcctcttcttcctccaggccttcttcttgcctccagtggcacgccttttgtgcatagaatcacgagaaatacctaatcaaaaaacatcaacagtacaaaaacccttaaagccaccattatagaataacagaaagaatacgaataagacgatgatgaagaagatgattatgattatgaatcgaaggattacccatggctgcagacggagcttgttcctgttgagcttcttcttcttcttctgctccgcttcggctaaaaccttaacgccactcctcacactcttcttaaaagatgaaaccctagcctataaaccaatcgaaattgggctaactgggccctttgttgggccttctcattggcccagtctaatacccatcgaaattgctttacagtaataccatttatttaaaaaaaacatgtgtacgataacaaataacttcaaattgattagtgaatgatatgtaatatgaattatttcataaatacccgtagacaactaaaaatttacgtttttacggaatcttgagttttttttttaccttggactttttgaaatttttaatttgttttaatttttatctctattttcatatatttttagatataccaacttttatggatgatgtctccattagaccccttaggtta

SEQ ID NO: 161706 - DNA, 4224 bp, Cannabis sativa
  modified_base (3563)..(3567): a, c, t, g, unknown or other
cgaagcattccataaaatagcttccattactgtttctgaagaatcttttgaaggcatccctttgctgtccaactttcttttcagttcctccagaattccaatcattcagtccgctgcatcaattgttacccctatctcgtacccaaaaagtcttgttttctcacaaattctaacagatcctccatcttttgacaaggtgatcataaacgccttgtgttttgtgcgaaactccaatatttatggagtttctgatcacgatttggatcagagaaattttcccagccgacacagtggggtgaaggccttttttcttcccaaaaccagtggggttttggtgttttccatggccagaagggccatggccacccccagtatgcatgaccacgtttctcagaaagaggagagagaagagagcatgggggagtcaaagagtcttttcttctttttttattgtcccctttttttactcttatttctttagccactctctctgatatgctttacatgatcaagtaaaaaaaatagttttcaaaacaaaaatttatataaaaatattttaaatctcaaaagaggtttattaaaattgcatttggtgtattttattttatttatttattttgaaaaagagacaggtcaatctctgattgacctccccaaaattcattagggaccctcacagagtcataatcgaaaatattttcaccaattggttgaaaagtataaatttaaactgatttatctatacaaggcattgtattacttacataataggggtactcttttggttccagaacaaacaagaagatattaaaattgtaacgctcgtgaaatttggtttctgtcttggtaatttctttcccggaaacagtataaccatagataattgtttgaaatgagcctggtgatatgaattgctttaggtgtttcgttgtgtttctgcaacttgtggccgattttaccatccacgctgtgttgcaaaattgctcaatccattcaatggagtttctgctgaagaccaagagaaaaagattatcaatggggaatctttcacatgtcctattcataagtgctgtgtttgcaaagaaggagagaataacaaagatccagatctgcaatttgctgtgtgccggcgttgtcctaagtcttaccataagaaatgcttgccaaggtgtgctgtatttgtagttagttatgtatgcttctgttttccctttttaactcacaattgtattatcatggtcctctatccatattgtagattgttgatgattgacttgcttgtattaggaaaatatcttctgaagacattgaagaggaaggcatagtaacaagggcctggacagatttactgcccaatcgtattcttatatattgcttgtaagtgttttttccattgggattcttttcttctttatgatattcttggaagtgacttgcaaactgatttcttctattttctgcacagaaagcatgagatcgatgaggatcttggtactccagtgaggaaccatgtcaagtttcctggtgttgaagaacaaaagagcactttcagaaaaaagagcactagtattggagaaaagaggcaaaagcagacagcagagttgctaacagatcggaagaaaactaagactagagttgctcccttggaaaaatcccatgaaggaagaacaactcatgctgaatccaaacagagtaagaagtcattttctgctgtaaaagtaggtggtaagaatactggaaaattacccgttggatcaagtatccataagaaagtaaaagtaaatgatgcatcaagagaggaaatgaattctcccatggctgaggaaaacaactcactgggtgataagctatacacgttatataataagaggtctggatcagtgaagtcaaggaagcgggatacatctgatgtcgacaaggcagcgatagttaatcctgctacaaaaagatcgagcagtgacttacctcccttagatgctgatagagaaaagaggtttctatatgtcccctaaagtcttacaatttctggttctaatattgtttgtgttgtcatcttgcactttttagttttttacatggaattttgtctattgcaaataatcattttagtatttgatgtaaatttactaatccagcaatgacttgatctaggttattagaattgatgaaggatgcagaatcaaaaataaatattgaaggtatcaaacaaaaatttaaagctccctctactcatgtagcctataaaaatttggcttcggaaaaagcagctattacgctgggaaaggtggaggtctcagtcgaggtacttgtgctgtcaaaattaaagttcaattggttgctgaaattttgttgattgttctgtcatttttctctatcttattacaagttttgttcgttcattatcatgcaggcaattcgagcagctttacggaaacttgaggaagggtccagtatcgaagatgcaaaagctgtttgttcatcggaggttcttgagcggatgtttaaatggaaggtctgttttcctgcaagtgtttcattcatttaatcatcttatttttttgtctttgtagtttttattatagtttttgatcttgtggctattattttgaatgctaaaatttctgcttcctgcttcctgcctgcttcttaaatatgctgcgtctaagatttgtcacattcttttagtggaaaatcatgcattcataattatgtaattacattactagtgttattttttggtacttcaggataggctgggagcatctctttcaccatttttacatggtatgcgctacacttcttttggtcggcattttactaaagtggagaaacttgaagaggtaatgtagtttcatttttctccatgccaaaattgagttcctagccaatttctattttttccacgtgactatcttgccatcttatcaatatggcttgctgtttacatggctgtacataattatgtgtgtcctacatttacttaaccactgaattgagaaaattggctgttattttctttagggttaaattgcggcataaatacctaatgtttcggattttatacacttaaatacctaatgtttatttttggtggcaaaaatacctaatgttacaattctcttctcctttttcaaaaaaaaaaaaaaaaagatctgtacctccgcaaatcacttctctaaactctttcacattcaaaaaccaaatatctaaaccattttctcactttattacataagctaaaccagtatctgcactatcttctaccccttcaagttcaaacaatctgttttttttttttttaccaaaattgcttacgaggcagccacagtccctctcatctaaagctctttttttagctctgtaccctgacataaattggatagtgaactcctcacatctattcaagatgcactactaagcatatctccatagctaacacatttgtaggaatacgtggcaagaagttccccactatttttgcataaaccacaccattctggggaaagtgtaacataaggcttccttcgttgaagagcatgaacacttaggtggcgtttggttgnnnnnaatgaaatggaatggaaaggaaaggaaagaaaacaatcttcattccattcttttgtttggttgcatgttaaagtgttgaaatgtcattccaatggaatggtctttccaccattttagtggaatgattattccattttgaaatggaaggaaaggccattccaatgcatgatgagaaaaaatttaataatttttttatcaatttttttaagcatttaaaattttattccattgctattcctattctcattcacattcctatgttttcattccttccaaccaaacgccaccttaattacttaaacggtctaaccacaacagccacagaaatcacggatctttgagggcacatggcatttccaaatcactgtagaccatacaactgtttattagggatgtctcctgtcagtatttaaagattatcttgcatgaaaaatctcacttacccaaccaaatcattctatcttccattcttgtgcaatttttttaatttctcagcctatgaatcgagttaaaacaaagagggacttctctatccctcaaattttgcttgaaatgaaaattccattcctctaacacacaaaattcagcaattattagagttagtcccacattgctaatgtgtggagataaattgtcatatataagatgaatgggcta

SEQ ID NO: 161707 - DNA, 1125 bp, Cannabis sativa
aataccctctctttctctctaactctcacttttgtctaacttcccactctctttttaagtctcacactcccaacagttcactgtccttgacccattccaaaaattcgaccaccctctcttttctcgcaagctcgaactgccacctaggagacacactggcattttgaacgttgccctcccacaaagctcagttcgcgatgacgaaccatgatagctacccttgaaaaatcactgtgacataccacgacaaccacccagacaacccacaagacctattttagtatgtatttaaaattttgtgtttttttgatatgttttggggtttgatttgtcttttgggattaaattttaaggaaatttgtttcaatttcgattatttgtgttttaaggttgattttttattgatggttgatgtttctctgaaattgtcaatgttttgtgatatttagcaaagactaacagtattaacaacatcaaaatggaaatggggttatttagtgtttttgtgatatctcgcgacttgtttgcgacattgcgatttcatgggctttatgccgcttggtttataagttaggacttttttcattgtctctttgcaattttagcaacatcttgcgatattcattgtgacatttcacgatattattgatgatggtgtattatcgttagacatcgttaaaaatatcataagacatcgataaatcaagcacactacaacaaaaattgttcaaacaaagaaattaaatatagatatcgtgacatgtcgcaaacatatcgtaagatgtctcaaatttctgttgctgctatcacaagcaagtttattttgtttgcaacattttgtgatttctactgctgatatcaagttgaaaccttcaacaactcaaacaccatcatataataaaatcacgagcacatttgaatctgcaaacaaaaatgaaacaaaaaaattaattcaaatttcactatcttatcgtgaaaaattgcattttatcgtgacatattgaaaaaatagccttacattgcattatatcacataatgtaagaaacaacatcgtgcgatatcgtgaaacatctgttgggttttatgccctaaataaaactcttcacaatctgattagttatcaa

SEQ ID NO: 161708 - DNA, 2864 bp, Cannabis sativa
aataataataataataataccattcagtgtagccataatgagagctgaaatcctagaaagcaaatttcttggtggagattcttggcaaagtctggtgacaaagtaatggaggaaagcaaaaggagtgactgaaggcaatttccaatcgaatgtgttcaacagcaaaagctccatcctgccaataactttactttcaactacattgttatattcgtatcgaaattttgatacagatggaatttttggctcttccatttttgcagccactctcagagctgcaaccgatagtaagccgatcaaccatatttgacgattctgcaaaaaacataatattaactaacaccaaacagcaagctttgaatatgattagatgaaaatactaataataataatatatataaaactcaacagtctctatgggcctcatccagagatatcgatcgaagtatatcatggataaatatgctgttttcttctgaaatccaaaagctgctccagtctagggtttgacaacaataacagaaaggggtgagttctaaaaaactgatgataaactcaagctgaacaaaatcaagtaatgaggggtttttttcgacttactttgacaatccagtttatagcttctaaacgagcgtattcaacttcgtctccaaacaccaaagattcatccttcttaaacacgaactcggtttcttcaatcagtaaatttattacatgctcttcctcttcggaaggactcatgtttctgaagttgataaatacgccttcatcatcttcaaacttttgctccaaaagggtctcactttctcgggaaaggtggctagaaaaggagtcattatccattttggatttctcttctctcctcttttttatccaaacagggaatttaaagaaaaagggtctcgtagagcagagggaaaagaggtggagatggggatatggtgaaagaaaatgaggacgacaattaccaaaatcttatactgaataaagggtcttagactgaaagaaggcaaatgggtatcaatttataagaaaatatatcgaaaagatggagtcacaacggatattttttttttttttgtccttaaaagaatgaatgaaaacttttttttgagtgagaaaagaaagggccaaaccaaagggttgtggtgtggctgtggctgagggcaggagctgcaatagtacgttggaggtggaaaatccaatagaacttttggtttgttggtacacgagtagttggcgcgtgcactagacagtccaatggaagcagaccatgcaattttctcgggcgggaaactgtacgttggatcgtacacccccctgtaaccgcacgaattagggtagaatgaatgaagatcatggtagcgcaccttggatcgtaccactgtaaccgtacgaattagggtgggatgaatgagcaaggtgtctctcctactttttctttttttttttaaaaaaaaaaaaatgaataacattcaacaggaaaagaaatgaaaagtcacgcgcgcaaacacaaatagcacatggagaattgttttcttcgcttaaatatcacatggacattgttgctaaatttaaatttatgtgccatgctagtaagtgcacaattcaataaataataatagtggttaagtgaccaatattatatcttaagtaattaaagtaattaattatatcaaataataaaacctaatttattttatataagtaactaataatttttaatgattacattaaatgggtgattacatttatttttgttattgaattattattaaataatttgtgattaatttaaaaattaaataaaaataattaataaattacatctaacctactaacctcattttatttattttcttgtaaataaaaaataaaaatatttataaatattagttatgaaaaatatcttattaaatattttgattaaaaaattaatttattttaagtatatagttaattgtaattatttgagtctaaaaacaagattttttacctattagtgatctattataacaggttatataaaaatatagtcaccatttttaataattcaataacagagtaaaataaaataagaacaaataaaaacaataaattaactagtaatttagtagagaaaaattaatataaaaaaattattaaagtttcaatttcactgtaatataaatacaaatttaaaatgtacttactttattctaatattttcaagaacataatacatcataaaaatatatatataagtgaccaattacatatatctctatacaattgttaaacctcacattcattcattaagtctcactccaaaaataatcctaaatattccatctgttgatttcacaatttaaaattactacgatacttagtaaatatttatctctcaatcttgcatcacctatgttaatctacccgatgtaattagattgtaaatttcacaattttaataataaccctaactataatcacataaagtaatatcatagatgcataatcatgacactactacaaaaaatattttttgtgtcggtcaacacgtctctctaaaatggttgaccgagaaaaaaaataagaggagattttttgcttgagtgtgtgattgaagctaaaaaataacgattagcgttgggttgtatcccgacgcaaaaattacaaccgaggtaaaatgtgacaatttaaacaattgtcttttacattttgcatcagtgcaaaattgaagcaaatttcttttgcttcagtttacaattgaggttaatatatttgccacggttgtgcaccgaagcaaataagataatgcatttgtaaaactcaaattttacaaacagttatttcattatttcacgcattgtccccccattcaaaac

SEQ ID NO: 161709 - DNA, 4070 bp, Cannabis sativa
tcatttttgtcatgtttatatatacatttatattatatcatcaattatttggtttctttcgttgattttttttctccttctctctttcataccgttattctcttgtgggtctcataatattctgaaacaaaagtaccaatatatacaccaaacataaatttctcattttaatcttttatttaattttcacccaccaaagaatatatcaaataaatttctcatatgatataaatctttgtaggtacccaagtgatgttgataaagttatcttagctcgccaaacaggcctttcaagaagccaggcacgtctacttaaacccatattattatatgaatattatgtacatgtatatatacctatcaacaaccaacgaatatatagtatatcaatgcatatcaaatatcttgatcttatgatattattatatattaatttcatgtaattgatgttacgtttatattattgttattaattaatatttttatacatttgaattactgcaggtatcaaattggttcattaacgcaagagtgagactgtggaagccaatggtggaagaaatgtacttagaagagacaaaggagagagaattagccaatatgggagcctcatcatcatcacctgatcatgatcaattggataatattctgggcgacccgatacgactatcgggtcggagtaacccacccgacacagaacagaaaccaacccacgaccaacttctccgcattgactcggaatgtctctcttctatagtcataaatccagaaaaatctccacaccacgggcacaacaacatgatccatcaaatacgacaccaaaactttggtggtggtagtcgttttggggaagtagtgtcgttcgggtcatcatcctcacagcaggagcttgacttttcttcgtataacaataataataataatcaacaacaacaacaacaaaggaatggtggtgggtcagttttatactctaatcatgatcatcagaaccctagtaatgtggccggattcaataatggaggaggagtgtctttaacattagggctacagcaacatgcaggaggaggaggaggagctggtcatggtggtggagttagcttagccttttctcatcctggttcgcaaagctctgtattttactcttcgagagatcataacattgatgatgatcagtgccaacaaggggttgttcagtactcgctcttagacggagaaggtcagaatttgccttacagaaatttgatgggggcacagttgctccacgatttggcatgatttttattactatctctcatgacatataatatatgctggtgatgatttatttagatatttaaaatcatcttcttcatctttttttttattaggtacatcatctttctatataaaatatagtcaaaatatactttcatataattatatatatatctagatacttacgtacatacaaggtatactgggggttcaattactagacatatgaacatgataatatatgtatatgatcatgttcaattttcttttcgctagctagctagtaattttggtacactatttatctatttatctgtttttatatattacgatcttaattttttaaattaaataattactatatggtatactaattaaagttggtgcagcaatatatatataaattaatgctagctagggtacaacaattcacaataaaatcattattagcattataatagataggctttgattattttccacacacacatgtttcgattaattagagccaatttgtgcgatggaatcatttgtggtggttcttgttcttgtatataaaggatggaaaaagattttcgcgggtgatatatacacatcatcattaattaatcaataataacaaatatattattaattattgcccctctcaatgaagaaaattcaaattgatataacagcagcataaatataatttaagaaaattgtttttcctttagttttgatgaagattaggacaagtctaacgaagctacaaaacatgggtttgctttgtttggtggtacttgtggtccctaattaatttcacacgacatttcaatatcgatccatatgccattaggaatcaacaagagagaggcagcctcttttttgttttgccctcacttgatcgaggtggttcattattatatgcttctgcttttgcatatcaaaaagctcactttataagcttcttttttgtcatgtatgctaaaagcatttaggcttctagggatcctttttttcttaacaattaacttccattatcctattgttctttcaacctttatgatatactaggtaataacaacataatgcacctattaatttgtttaattaggcttacattgtatattgctatatattacataattcttaattcaaattataataactaaaaatgttaaatctaattgaactaaacataaaaaaaaaaaaaaaagtcaattcaattgaactttaggctgataaaataataaataaataaataaaacattgttaataggcatctacacgttccatatggcaagttggcaagttgtaatggtgtttggtataagagtttctcacttggtgtgttttagttgagaggggatgacacccaactaagagtttgagatttattacccccaaaataaatttaaaactccattaaagttataccaaatgtaagtttagagttatattcttattctctagaactcaaactttattagagttattcccacattgttaatgcgtggaaataaattatcatatatgagacgaatgagctactcctctcattgctaattggttttgagatggaaccacattcaccttatcccaaattctaacatggtatcagagccacttgtgattcgttgtgctgaactaaaaagataaatctgctctctcccctttgaccttcatttgggacctttcggccaatgtgtgatagtttcagtgttagggtctttgacctgattcaaaatccacaaagttctcgacgtgtacacccaatttttttttgatatttggcttaatgggattctttcaaatgtcgcgttcggtctcgtgatctcttaaatgtcgttcattatacccacacttttcaggccgaaacgtgaggagggtgtattaaagtttgtcccacattgctaatgtgtgggaataaattatcatacataagatgaatgggccactcctctcattgccaattagttttgagatggaaccacaatcaccttatcccatattctaacaaaccctcatatcaaacaacccataagtagcaacaatgttccataatatttatttaattgaaatatgtgagtctcaataataaaattacaccaataacagtatgtcgcctcttgtggttcttcaaaatttaagttatcctttagcattttctcaaaacaaaatatctatatcattattttattttgaaaaattagaaagtgtattgcaaaaaataccaatttataacctaccagtacaaataaaggcatggaaaacaaaactctatacaatctttgccaatcattatcaacaaagattctcaaacaatttaatatcctatttacctgtatgttttggccataccattaaaacataattttatacactttaaattaccttcgtaataagagtatgtaatctaggtagtcatctttcgagtccacaaaacttcattcctttcatgccacaagtgatacaccagagtcgacaatgcaacagcgaagagtttccttcttaatttgctcaaattagaccaagcaatccacctaataagatgtaaaattgagctagaacaggattgccaacctacccggtcacgacccgagcccgaggccatggcaaatatgtaatatccataacctgagtcaaaggtcacactttgacccttgtaggaagataaagcttataaatgatcctttaatttatattacaaaatacaaattcaaaagtaatagattaactcctatattaataagaaaatattagtaacaaaatcaggaccactcatcaatataaaagaacaataatatccacatagttatgtaatcactaaatag

SEQ ID NO: 161710 - DNA, 3686 bp, Cannabis sativa
ctcgcatgcgagctgtgtgtgcatatgttgggtgttaggggctcgcatgtgagccattgtgtgtgttacgtgaatgtgtttcaggatttgtaagtataaagtgagaggtgaatgcacatcgacaagaatgacattggaggaggaattaaaatgacaaggtgtgtaagggaaaagcgtacaaccacacctcccgaagactttgaaagtgcgaaggtacgagtagcgatgacaacagacctacaaggtctgaaaaccctatcaagggtacgctacagccaccctcctgcaatctgtaactggggaccacatgcctgcaactatggaccaccctattgcaactcgggatcacatgcctgcaactggggatcaccctcctacaacctgtaaccagggatcacatgcctaaccagggatcacatgcttgcaaccgaggaccacctaacaccaggcaagggtacgaggtgcaaggccacatcctgcacctactgcatgcagcatgagagtgacgttttcccccttgggaccactttgtacctcaagccattagagcttataaatacccctttttttaaatgtgagagggagttgaaaaatcatacttgtaataccatattgagagtaatagaaatttctctattattctctccatttcaagatagcaatttgagtttacatttcatctttttcttcatttcatctccgatcttgaagcataagttgatttttcggccacaagttggttgacaagtcctcaccgtcaatagtttggcatcgtctatgggaacaataagcttgagccaagtcgttccttctcacagaatcgatataaaatgcctagatgctctcgttgcttaacgacaactagttggtcaatttggggcaagacctccctccacaagtcattggagaacaaggcgctaatggtccagccctcaggttagaggagaaaacgagagtattgtccagcctcaggtaggaggagagggtgcgagcaggtgggaatctcaagcaaagaaaggagaccgtcgccgtagaaagaccctagtggacaagctgcacgacaaagttactgcccccatcatgagcgaaggtaaatgtatgatacaaaggaaggaggtcccatcatcactgaggcaccctctgctactaacaccgcgagatctcggtacctcgcgacatcgccctggaaaggagaagtgagctaactctgtgagtccaaaatcccaaattttccactatgaagacaaagtaaataatctccacctggaagaaccaaagactagaaagtacagtggccgatgtgcaaaaagtattgagtaccattcttgaaggcaaaactccgactttgcactttttatacaaaggtcattgacaagagtgcgagatcttaactacccacgacaacggggagaactccatgtcatccactgatggcaccccaagggatgagagaggaaaggacctgtcgcaaaatgagagcccaagaggttgctcagagaaacatgaatctacccgttggggtaagactgcaatgggggcaacatcaggtagtcttacgaagggattttagccaaagaatctcatgctagaggacaccgcgcttgcaccccctattcaagagcaaagcaagcagaaggcgtcaccccttaaccatggtggagagccgcacgatgatgggatgagaggagtactacccacgggctccatgcaaaccatatggaaaacccaagctccattctctaactctcaagaaatgatgaaaaatagaatgaaagagctagaagcagagatgaaagatctacatcgaaggatggctacaacatcaacgggagatttagaggatgataaattcgatgaggaatccctttttcaagggaaattcaaatggaacaacttccacccaatttcaaagaacctcgcatgacgccatatgatggtacaagtgatctgaaataccatctaggagcttttaatgagctaatgaagataaaaaaaggtatcatgtaaggcaaggtgccaatgctttatggttacacttaaaggggtcgcatataaatggttcaagaggcttggaccagaagcaattacatcttggaaataatttttggaggaattccttcaacaacattaagcgacaagcgattacatcgtgcatgtaacgagtatcaccaatataaagcaacgggagaaagaagactcaaggaggtacatctaatgctttaatgccgaagctgacaaggtaggaaggatgaccaacgatgaacataagttagctatagctgctggaatacgtcctgggagtagactatagaggaatatgttgaaaagggaattggatggcattaaagacttctacgagagggtagaaaaatacatttggaccgagcaaggaaatgaagtcttagagacgaacacaagcaagtgtacttcaaaaagcttgccaaacccttacaaggtctattagatagtacccccaatgctcgtaagctaatacatccaagtgaagtctctgctatacaacccataaaaatgaatatctgaggtattcctctaagtaaagccctactatgcgagaagaagatcctagcaataaccattttgcttttaatgtgctgcagtaaattaaagaagacactcatgtaagcctccaagtcaaagtgaatgatgctacacacttggggagcacaaaaaaaaaaaagaagagagagaaagagagagggaaatttatcaaatcgacaaggactagccacccttagtcaataagagaaatgcacctacctctccccataagagatcttaaaagacactcatggcctaatgctaaaacaagggggacgcctctcaagagtaagcaaataattgcaagtcaaaagggtagcgcagtaaagtaccataaggttcctctcattcgagtaaaaggatgaagaaataataagaggttaagactacttaaagagccatactcccttaaatggatgcccacttagcacagtggaaaaatggcttggccatagagcgatccccagagtcactcgactaatgctatttatgaaaatggcttagccaaagagtgacccccaaagttgtttggccaatgccagttacaaaaatggattggccaaagaaagacccccaaagtcagccagcatcaattacgaaaattgtttaatgagtgatcctcagagtctttcagccaatgtcaagtaaaattgttgctcgatcgcatgggggatgaggtcactcagtaaaaaataagtgggaagagagaaaagagggccaactaaggtaagaaaaatccattacaccaacatattgccataaaataaggttcaagcaagggaagcccccagtgcaaatggggcacttcctcgaagaaaactaagagggtctcacacttcggcaaggtaacttccctaactcactcagtcgacaagcacctaaaggaattcttgtagacttgaggcaagtgttggttggttaactaatctcgaaacaattaacaaaatcgcattcaatgagcttacatactcggtatgtatttcataatgtcgccatcaatactcgcatttcccaagatgcacccatgcgatttgatgattggtcctgtggtgatctaacagcgaaagtgttaggttttatgccctaaataaaactttttacaatttgattagttatcaatataagaa

SEQ ID NO: 161711 - DNA, 1472 bp, Cannabis sativa
tatatatatatacacgtctgaaaaaaaaaacttctaatttatttagaataaagtactacatggaaaagttattttattttttttataaaaataataatgatatacaaacaattaataaattacacttaaatattacacttattttttaaattagcgaattcaatttgaataaatatgattgattttataaaaaaaaactacaacaacatttgtaatattttgatataatttatgtatgggatacatatcattagtctttaagaaaatatgagtcacttttttcttttcttttttaaacaaacatcattcttacagtaaaaaattataaaggattttacgagttccgttataaaccaagactcacacaaagaaaagaaacctcaatacacaaagtactaattttatttaacaaagtatatatgattgactaaaagataaattatctcatgagcttcatgatatacaaaagaaatcccagcaatattctgatttaacaataagttttaaatatgctccaatactccatctatatctctacaaccatcctctttattctagattaattgaataacttcaagattaattggaggcggtcgaggaggtcaaaatcccccacatccctgtggacgcaacaaaggttgtggaagatattaaaaaggtggttatgagaatccaccacaggctccttaggattgagagtaaaagtttgtagaaatgcaatcccaaattgatcaataggatgaggaggtctagagattgagacaacaaggtcctcctgctacgcctcctcaactggtgccagccgctctgggtccagtggttctagtaaaacaatttgttgctgataactgcatagagcctctgtatgaatggtttcgcaaacaaatgccttcaacctttttgaaaggttcaaatgtcatgaaggtcgagcagcgacacatagtgattgaaagaatcccaaattttacgagtaaaattggtaatgatagcgtgacttatcccacattacagttcaaggaggatgccctcgtgtggtggaaaatggtgtccttcactcgggacatcactacaatgacttgggaagagttctaggagttgtttaattctaagtactataatgaggtggttcgtagtactaagagaaaataattcactgacctggtttagggagagaacatgtcaataacaaagtatgctacaaaatttgaccgacttgctaagtgtctttgggtatagtacctatgatttcagtaagaagaaaaaatatttggcggttttgaatgcctagagtagacatgatttggtcattactaaaaataacacaacaacttttgctgagttggttgagaaggctcttcgagttgaaggtgcaattaaatttttgcaagagctctgatggactccaagtgttggtgggactaccactttttctgtaacgcccccgcttcaagcctccattgggtccttacacc

SEQ ID NO: 161712 - DNA, 1289 bp, Cannabis sativa
  modified_base (1228)..(1230): a, c, t, g, unknown or other
atttgagtcaaactctaacaaaagtaaaagttgtaataggcgtgcttattttattttaaatttaaatatataaaataaatgaatcttttttttttaaaaaaaaaaattctaaaacctttctaaaaatatatgttaaataattataatatatatcatcgtataaaaaaattaaaatattagaaacatgatagtgggtgcaccttatcttatcgaatttaaatttaaatataaattttattctattttaacatagataaaaatgaaaaactaattaaaagttattgtgttcatcaccattttcttccaaaagaataaatccattaccaaataatcaaaaccatcttcaaaccactgattaaaaaagtccagatatacgtagctacctcactgtatatttatcttccatagcccatcatgagttgatgaaggctgaagccatagcaaaacagagtaagtgaaagagaaagagaaaggcagagaaagagagagatctgaagattgaaagattaatcttattgatacgacagtacaagaatttatacacaagctgagaagaacagattacatccataacagaaagttgttacagcaaaaagaaagagagcagtagctcagctgaacaacaaaaaaacagttactaactgaaagttagttggtcatcatcagcttatcttgacacgtattattacaagagatttgaaattactttagaaaaacaattaaattatatatatagggacacgattttgtcccgtgattgtactttcacggaatgtatcccgtgatgtacggcagccgttggatgggagagttatttgatctgagggttgagattgatctaagggtaattagggttaaaaaatagtaacatacctgagactcatttaattttaatgtaccctgagactctaatgtactacggaatacattctgtgaaagtaaatcattgggacaaaatcgtgtcccatatagagacacgatgcacgattatagacatatataatcgtaatatactcctcactctaacctacgtacaattatgataaagccagccccactatgtatatatatgttaaattggacagataattacaaaaatagctagccacatttatctctaccagagtaccagttcatattatggtcactggttaaaccaagtcacacagtacaggaatcaactcaagattctgttagacatttatatatataaactgaaatgtatatnnntaagtattaagtgcggaattaatcaaacatatatacactatgaataaggatcgaaatac

SEQ ID NO: 161713 - DNA, 5294 bp, Cannabis sativa
aaaaaaaaaaaaaactcatctcatcgatcatcactcattaattggctatgtatagttgtgaaaacacacacacatatatatgttttatgattaattaataattattagtttataaattaacctttagctagtgcgaatgacacggctatagctagtaaaaaatttcaaggtttccctcttgatcagtccaaataattacggtacgtagtgcgttatatattatacatgtaaataaaggcatttagtttaagtttgtgaaaataacaatatttttcaaaataaagcatggctattaatattattaggatttagaatgaatactatcgatgtctatatacatttttcattcactataagaaatttaagttttaggagcaactaatttagagacgataaaaaattctttaataataggggtattagaggcgacaagtcgcttgttttaattttttttttactttgtatacttttagggtgactattgtcacccctaatagtattagaggtgacaatatcgtccctaataaatttgaattatatccgtagctttgggcaagatttttttcccttatagctttagatgcaatttttaggaacgacatttgtcgcccctaaaagtttgctttattaaaatcgatttctttttccttgacccccacttctgttatctctccaaaacctaaaaaatctttctgaaaaaaaatcccatccccatcgttctctctgtctcgactagtcttcccagtctaatctggcctcctcgttcggactgacattcgactgtcctcctccgggtccctccttccatctctttagttcaaaaattaatcacgataaagttcagaagtgcttcaggagttggtgttcctccatcttctctctatccctctctcttttggagtttatttgttttggttttttatttcaatttattgcattttctctgttcgtgcttggttattaagtacttcacaaagttcggtttttctggtaaatttttatctctcatataatttaagtattatatattttcatgtttttcttgcaaattatatatatatttctcatttttttttttgtgatttccttttttctttttcttcctctctccaatggcagctcctccaacggaaggcgcttctccaccttatattgacaattccttcagataattaagttctgagttttttcaagagagaattttggttgtttgttattattctctctcattctttttgtaaaaacttagaagcacaatgtaatttatgtaaatttaagtttaatctattcggtcttcttctaaagataaaagaatagtattaattttgttttagattaatttttgtattagtattatacaaaattacaccactaaaaaatagaattattttttggttttctttataaaatatatttaaatatttatgatataataatttatatattttttaatattgatacttttagaggtgacaaaagtcaaaaattgatttctgacaggcctttttaggggcgatttttaaacattagaaattcatggattacttttaagggcgctcctaactaaaggcgactttgtcgcccctaattgtattttttgacatgaactagtcacccctaataattattaggggcgaatttgcatggttttagaggcgacatatttgttgtatgattctggttaccttgtcaattagccagtaatttgaaaataaaatggcaatattatgtgcgtatacgcataatactaaggtcataattttttttttctttttcattctacagttcaaatagtttattttattattcaaaaaagcaggtgttgactgtggatttagccaatcgacacagagtctgactaagattggatctcgcctatgactgccacgtgtggaacgataataaatgtaaaaagaccaagatttatacagatgcgactccttttgtttaggtaatgacctactcctttttagttgtattcactcttgagataataccaagcagattacaggctatgatcttgtaatttatagctaggctctcttcaatattacaatatattttgcaggtgagaagtatgagaaaagagagaggacttattgctatagtgcttctgagcatgattgaaacttagaactgttagactttttatttgggcttacattaatttttattagttttattaaaacttgggttgattggatagttctttattgtgttagcccatattattagtgatcaatagttaatcggcttagtatttgtgtgtataaagtctagttgaagcaaaagtgtgggcttttctagttaactgaagccattgatgagaaagcctagtccaattaagattatgtagctaagtctcctccataactctataaatacatattgtctcatcataattgtatacttttgataatcagataaataaaattgcttctgatttagagacctagggagaaagatttagttgatagtattgcactttcgaattgcggtaattgatatggatcaatcatgtacgcatacctaattattatatattatcattgtgttctaaattatatacaaattagtatcatgaaattattaatttttctaacatgtggtattagattgccaattatatatgatttaggacttataatttatttaacgattgattgatatatgttaattttctcaaattatattgatttcattattattttgtgtttttcaattttaacattttaagaattttattttccattgaattctctttttaatggtgtattatatgaataaaattgttaaataaattgagaatatttgaagtttaaagatttagggtttatcttgaaaataattttctaaattttcaattcagttgttaataattttttattgataatgtatatattttctccattactttaccatatcatacaatgtataatttcgaatcaggtctatttaaactaataaaatcatttttttttcgttcttaatttttttgtgattaatttgcacagaaattatagacaataaaagaagaaaataaatcacgaagctttttacgtggttttgcagttaaaattctgcacagtctacgagtcaatcttattcaaattattcagattacaaactaggttattctcttaaggagttttttttcacttttttcagtacattttgcccctatttatagtaacacagggtcgtagttaattacaatcagatacgaatccctcaataatatttccccaaaattgtgggctttaattacgcaccgcgtaaataaatacggttataaattaaaaatcatacagttgtgatttattcacttttactgggtccatgctgacgtggatttagaaacactgcaaagtgtatctcgctggggcatcttgctgggaacttgaatagcaaaaataatcctcacagcgagctggaacttttcccttgtcttttcaagattgataatgtaaatctccatttctgcgattgatgacataatgctccctctgataatcgcagttcttggtgacaaggtgaacttcaatagtcaatatcatttgaatgtcagcttctatctgagagagctaactcgacggagcagtgaatctcattgaaagatgtctggagctgattagtgaaggtaccatgagtatgccttcctatagagagatggatgcctcgctattcgccacttaggttcttccagttgcgatacttagttagtacaatgtatattacacactaagtgttctaacaaccaacatgtctcgtcatcacctttttatacgtagcgaggttggtgcctcgctttgtattactgatgtcatccttatgattgtgtcttctgacgcgaaaagatttctcgtcaatgcatgatttaatagtttgtacatccttacctcgcttaagactttacactcaacgagttacagatatactctttcaacttcgcatttaatgagttattccattttaatatcctttaatataattgctataatatttgttgatttgtattctccaaggttgacgcgtgtcatcctctgaagtgctagccgaatttcaggtataacaattgccccttaaaaggttcttttgaatgaaaagtgctttttaaatgattacagagggtatttttgttataatccattttgaaaaaatgcatgtcctctaattttggcagttttgtggtttcgaagcacatcagcatttaataaccatcttttccactttcttttttaaattttacctgttggatcaattgtctccttaatctgacggagatcaacccaagagtataaaacaaaaaaaggaactaccttttcattacctttgccatttcaaaaactctgaaattttttcgagtttctctgcaaaaaaccatacttagattgttttgaaaccttgcatgccatctttgtctttagcattctttttgcgagtttcattcgatttactttttgacctcaagcattcagagggatcatcacaccgttcgttgttccgtcgatcgcaagaccattcattgctccaaaaaccaatttcaaacagtacgtgattcctctttctctgttttcttacatgcttttaatttcacaattctgggtttgatgaatagtttcttagttaacacctttatctccttttctagttttagcaattttagggttgaattgtatctggataaattttagggtttaggcagaacgtaggtttttgggtttctcaaatttaccaacttctggtttgataagtttcatccaggaattgggattgctttctctttgcagcagtgtactaatctggttcagaagtttatcgtccagaatatttagaaacagggtgtcccattgaactttccatcccacataaacccagaatttcagaacccaaatccaaattagagataaatgatgcaaaaattagggaacacttagtaaaaacctaccaagatggcattgcctgtcgccacatatgcttcttgcaagaaattacagaaggcaaatgtcgtttcttgcgagatgctgtttggcctgaaccctccaatttatcgtcaattcctctagctaggcctttatttttacccggagtcacgattgcttttgaaccaggtgacctggactttgaaatcatgacctccaagcctcaaaaatcaaagactccccaggatcctaacgttaccttcgaggctgaactaatagagtcgaaggtttgagacatcggagattacgtaggtaatatcctaagaacttgtggtattaaatataagtgagaatgtcgggttagatcggtgg

SEQ ID NO: 161714 - DNA, 3095 bp, Cannabis sativa
tcaattttatatttcttcaaatgtcaaatgaacttgattttttccttatgaaaaagtagagggttacattggattggactgtagtgtttgctcttgtttggagaggttgtagttcaaaacttagtggtgtgagtttgtatttagttgcggtaaatgtggcagatttacgacatatgagaaatccccaatcgaaatgtaccctgaaagggtttagaaggtaattaggattgatgctagtggattgagtcaaccttgattgctgggactgattggttattatggaatgtccttttaagattggggaggaacgtgagaagaaattatgcaatttggatagattatatcttgatggggatgatgatggatccctgatgtgatgtgatgtgatgttttgagtttttctttgtaataaaagattcccttcaatccaatgattgttccattgctaccacaggtcttggtaccaaaactgagccatgttatcatcttgtgtggatggcccaccttgcttccactatgcctttctgacactaacaccttttatggctttgttgaatttttgaacatgatcatttgttatcttaataataatatcgaatctgtttacctaaattttgttgcttgtgctgtacttgatgtgacctctgaagttatgtaattacaatttgaatttttcaggttggctcgtaccatgcctcttcactgttggtggcatctaggcctcctacccccggagttcttagtcgaggaattggtttggaaggtctttcaagtgtcttggctggtctatggggtaccggaactggatccactactttgactgaaaatgttcacactattgctgtgactaaaatgggaagtcgaagggctgttgaaataggtgcatgcattttgatagtcttatcccttgttggtaagttctgataaaaacagctttcatttcaatttttgttaatgatacaaccaaagcgtagaatctttatttaaaatgtttagattagaagtgtgcttaatgtttttcttatgcccgtttgctatgcaaacaaaacttagatttccttgttggacccgccaaaagagtaaatttaaacatgatctgaatggtcattgtaatttgacatatgaaaaaagttccccgcccccctaagttacaaactagatattatgctgtaacacatcgatttcaagttctattgcttggatcctgtgcttaattgaacaaaaacttggtgtatagtaatttctatattgaatatctctttagattgccaaggggaagagggcttatgttgtggtaaaacacggtgcaggtaattaacctttttgggtgctgaatttggtcatttgatcatgcttgtcccagccaaaataaaatagaatccgaaatcaccttgccttattaatttgcttcatattttttctggccatcaaccttcgaatcttcattttcaaggtcaacttcttttatgatgccttttctccttttcggggttggataatggtgttaatcttcaatactctttaggttcctactatttgaataatgtttaacttttgaatttactgttttttttttctttcttctaaaatagaatttcaactttacatgcaggtaaagtaggaggcttcattgcttcaatccctcaagtcatggttgctgctcttctatgcttcatgtgggcaatgcttgctgcattaggcttgtcaaatctacgatacagtgaggccgggagctctcgaaatattatcattgtcgggttatctttattcttctcactttcaataccagcgtactttcagcaatatggcatctctccaaattccaacatgtctgttccgagctattttcaaccttacattgttgcctctcatggacccttccgcaccaactttggaggggtacgtcttaactgacatttctctgattccaatgtttcataagaaattcttattctgttatttaccaagttaacgaattaaaatctcttacccaatttctcgttttggcaggtgaactacgtcatgaacacactgctatctttacacatggtggttgcatttcttgtggctgttattctagacaacacagtaccaggcagtcggcaagaacgcggggtgtacgtgtggtcagaatcagaggtagctcgaagagagcctgctgttaccaaggactacgagttacccttcagaattggtcgggttttcagatgggtgaaatgggttggcctataaaagagaagaatttttcttgttacatatcacattgtcaagtcaagcttcttcgattgcgattccactagaaggttagtacacactgtatgatgattgatgattgattatgaatgcaattcttggataaatattcgtccacccaccgaccgggaaaatcacgatttcgccttaggaagattataggttttgcagagatgttttttgtgtacatttgagaaaaggtctggctgtgttgtaatgtttagattatggagattgtagggtttagttatttggacattttatttaatatttaatatttgaaatgcagttggggggaagaagagagttttgattgatatctgtcctattaattaattaattaattaattaatgtatatgtaaaaatatttttgttggaattgttcatttgaggattgataattctcaaatggaaaacaaaggggtaagaaaaagattcattgtgagaatgagagtgaggactgtctgtcttgttgaaatgtgcttttgttttctttgtatatgattattgttgatggtgatgatacatttatatgtcatacatatatgtatatatatatttatttttctagatttacatttgtatataaatatatttatatacttttacttggatataataattgaatgatgcctcagaatttgaaaatataaacatttaagacaatctattaaattttatcatcttgaaaataagatttaaacagtttgttgtacgagtagctgagtaatatatattatttgaaacactattgtaaattattttaaatttattaaaattttataaaatatattaagggtgtgtttgaaagtaactctgtaattactaggtagggtaatta

SEQ ID NO: 161715 - DNA, 4385 bp, Cannabis sativa
tcttcatctttttcaaggcagtaagtctttgcacgctttttaaaaagttcttattaaatgaatattgttattttgaattttaatgaaattttataaaattactttttatgattttaaaaattcaattaaactaaatatgccaacagtgattacaaaacttaaaaattaaaacaaaaactataccaaatgagccttcttggtatctgcttccacaagtaatctggcatatgaatgatttgacatctttggatatacattcattggtgtggtcctaatatctgcttagtgtgctatttgcttgttcattattttgtaacttttaatatttgtgtcattttcttaaattaaaactctgttttcaggatggagcttctttagcttttaagaaacatttggaggaagaagctcgtgatcttagtggagaagccttttcacgtttcatggatcagttgtatgataggatttctgttcttttggaaagtaatgacgtggcagaaaatttgggagctttaagagctatagatgaactgatagatgttgctcttggagagaatgcttccaaggtctctaaattttctaattacatgcgaactgtgtttgaagtaaagcgtgatcctgataatctggaactagccagccgggttttgggtcatctagcaagggctggtggagcaatgactgcagatgaggtggaatatcaggtttgttttttcatttcacagttctcctttgatctagctgtgtgcttttaaagaagtgagcatctgacgagccttgtgtttttaggtaaaaaccgcacttgagtggctacgtggagatagggtagagtatcgtcgttttgctgctgtcttaatattaaaagtaagcctcactttttttttttttacttttttatttgtttaatgttgattacatggatttttgtttcaataaagagtaatttttgttgtaatctaagatgatcccatatcataattccatttcctacttcttcttcttcttcttctctttctcaaagatgatatctaatcgtcttttgttaaccttttgtatttcttggcccatctaatacaattcttatttcttatggagaaaagctactgaaattttatttatgagacctttagcctgcattaaaggtgatttaattttgtaagttctttttttgtttaaaatgaaatacattttctcaattaaggttaagtagcgggttgcaaaatgggtttataaagttaaaggctttgcaggtttatcttttcttgatctcaacagagattggggtagcttttggcacttaatgttttaactattaaatttatgctgttttatttgtacatatctggttttggctattctgagatcttttgatctcctttctttttaatcttttttatatgaaaacacaacggagtttctttttcgaaaaaagaaatcactttctcaatttacgtgtttttttttatgaactatttctcaatttacgtgttagaatactatagtgtacaacttatttgttttattgcatattaattttatgtggtataggcttagtttaatttggtctgaacctctcctcttaaagagaaggtcaagggtattgccctgcctccacccctttgtaataagaagaaagatgaaattgttaattgtatcatttaggtaattctcatcaacgttatcttttattcaggaaatggcagaaaatgcgtcaactgtcttcaatgttcatgttcctgaatttgtcgacgtgatatgggttgccttaagagatccaagattggatgttcgggagcgagctgttgaggcactgcgtgcttgtcttcgtgtcattgagaagcgtgagacacgatggcgtgtacaatggtttgtccatactcatatcttctactgcatgaatgcatatggggctgatttggcccacacaaatgaatgttaatataaagcttatgttcttattgtttattttggggttttgttttaagtaattttattgtttatgggcccaaattggttatacctgtttgttgacaccaaattttattcacaggtattatcgtatgtttgaggctacacaggatggattgggtagaaatgctcctgttcacagcatacatggttctttgcttgcagttggagagcttttaaggttggtagattacattgaatgtctggtgtttaccaaacaatgtttggaaatagtattcttgtttagtgttagaacaattgtcctgtctgagtatgttagttttgcaattaaaaaaaggcaatgcgggtagtggattataaacacttctgaaaatggttttattattattttcacttgatctatattaaagtttgggtggataacagcattaggcattgaaacgatcaataagattttcaagtagcatgaagttaatactaaagtgaggtatatacaagttgaggttttgtttccaaaagaaaaaaaaaaaaaacagaaaaacttaagtgtaccaatggtgtgggattcgagtatctacattgttgtggtacttttatgttggttcatgtattttcctaaaacaatttgagatggcttttcaaatgatgcttgtgctcattaggtttctcttcttattaactttttagtgaatagaacaggagctactcatatataatgatcctgattttttttctttattacaagaataaacattaatcacttcagtaataagggagcaatattcagcaatcttggattatttttggcatcattgaatgggagcaataatataatttttcaaagagtatttgtggttaaactatgttttggattgtttggttaatagagtaattgagttcagaaatttgttttgttcctataattaatcaattttatcatgtgtttggatgtagttcataaaatttgcactttttatattatatatattgacaggaatacaggggagttcatgatgtcaaggtacagagaagttgcggaaattgttcttagatacctagaacatcgagatcgtcttgttcgacggagcataacttcattgttacctcgaattgctcattttctacgggatagatttgttacaaactacttaacggtacttctgtggtgttttttgtttttccaaataatctgacattgtcatgtaattttgggagtgaaagtccatggtatgtttatttttttctacttcttgcagatttgcatgaatcatattctggcagttcttcgaatacctgctgaacgtgctagtgggtttattgcccttggagagatggctgaagctttggatggggaacttgtgaactatttgcctttgattatggctccactacgcgaagcagtatgccacattgtcttgtcaagcattgttctccatcactaatttagttgcactttctagctaccttgtggattctattcaaatgactatcaattttggaatcaacaaatttattcttaatgcttccttttattgatgtagattgcaccacgaaggggtaaacctttacttgaggctttagcttgtgttggaaacattgcaaaagcaatgggccctgcaatggaacctcatgttcgcggacttttggatattatgttctctgctggtctctcttcaacccttgttgaggcccttgatcaaatagctattaggtaaccattgttgtctagactttcttttatctcatttgaccgttatgttcttggcaacctttctctaacattatttgttatgccagtattccatcgctgttgcctaccattcaggatcggttacttgattgcatttctatggttctttcaaagtctcattattctcaagggaggtcagttgtaggcacaggtcgaggaaatttgatgaatattccccagcaagtttttgaccctagcagttcaggccttgtgcaacttgctctgcagactttggcttgtttcaattttaaggtttctctatgtgtaatatttaacttatgttatcctatattgacattttcattttaaatcttattcagaaactaatatttggttcagggtcatgaccttctcgagtttgcaagagaatcagttgttgtatatttagatgatgaggatggtgcaataagaaaggatgctgcattgtgctgttgtagattagttgcaaattccttctctggcatagcctgtacacaatttggtactagcagatcaaatcgaactgggggaaagcgtcgacgtgtggttgaagaggttggtttgcatcaacatgtttcatttgtttgcatttatatttgtgttttaaagacatattctcgtctttgtaatgatattagccttttttcttatcaaaacataaaaaaaaaaaaaaaagaagcaaaagaaaatttgtggattgtcaactcatcttcgccgcccaccccaccta

SEQ ID NO: 161716 - DNA, 3170 bp, Cannabis sativa
  modified_base (3142)..(3145): a, c, t, g, unknown or other
tatgttgttaagtgatttgattatagagaagaaagttggtaatgattggattgaagatggtggtgtcattcttgctttgtttaaccggttaggctctagtaaacccgaacaccgattgatcatcattcgtttgctgcgaaatcttgcattggacaatgtcgaaaacaaggtaaacaagcatgtcttttttcacttttgatactaaatttgatgtgaaattaactaaggttgtgtctggttagaggtaatgaaatggaaatgaatcaaagttcagtctattcctttgtttggttgcatttaaagtatttggaatgactaatctatttcgattagtaattcttttatcaattccttttatgcatgcattttaaattttatttcattcctattcctgttctgattctgtgttttcattccttccaaccaaacgtaccctaaggttcttgactattagttgtaatagctaacaatgtggaatagtgtgcaggagaagatggcagatgtggggtttttgtcaacattggtgaaatctttgattcgcgaagaggaggaaaggagggaagcagtcggcctcttgttgaatctgtctgaactctcatccgttcgaagacagattggtcgaattcaaggctgtatcgttatgttagttgcattgctaaatggtgatgatcctattgcttcaattgatgcaggaaagctgttaaatttattgtcaagtaacactcaaaatgcacttcatatggctgaagcaggctatttcaagccactagttaagcacttaaaagaaggtactaatttcggtttcaactgaaaatttcaattctattggccttgttgtgataatcaattgatgtcatacctttttgtaggctctgacatgagtaaaattctcatggcaacagcactttcgaggatagagctcaccgatcaaagtagagcctccctcggggaagatggggcgatcgaaccccttgtaagaatgtttacaactggaaaacttgaagccaagttatctgcactaaatgcattgcagaacttgtcaagcttagctgaaaatgtccaacgattaatccattcgagcattttatcgcctttacttcagcttctcttttctgttacctcagttctcatgacacttagagagcctgcatcagcaattctagctaagattgctgaatccgaatctattcttgttaatcaagatgtagctcagcaaatgctctcactcctaaacctttcgagtcctgtaatacagtttcacttgttacaagctctcaatagcattgcctctcaccaaaatgcatctaaagttcgaatcaaaatgaaagaaaatcgagctatgcaacttctcttgccctttttgacagaaaccaacttcaaaattagaagcaatgccttgaatttgcttcatactctttctaaagatttgtcacaagaattatcagaacatataggagaagcctacatcattataatcatcaacatcatctcatcctcatcaaccgagctcgaaaaagcttctgcattaggaatactaagcaattttccccttagtgataagaagtttacagagttgctcaagagacaatgcttagtaccactcattatctccacaatgacttcaaaccctgcaactaaaacacttgacacacaacacttggaagaaagtgtttcgagcttattagttcggtttactaatccttttgataagaaactacagctctattcagcacaacatggggtgatccctttacttgtgaagttgctttcgagtgaatcgtcaattgctaaacacaatgctgcaacttcactagctcaattgtcacaaaactcactctcattacgaaaacctaaagccccaagatggttttgcactcctccttccgcgagtgcatactgtgaagttcacgaaggattctgcgttgtaaaaaccacattgtgtttggtaaaagccggtgctatatcgcctttgcttaaagtattggaaggtaaagatagggaagcggacgaagctgtgctcggtgccttggcaactctacttcaagatgaaatttgggaaaatggaagcaattacatagcgaaaacattacaagttgaagccattgttagagttttggaatcgggtaacaataaggctaaagagaaagtgttatggatacttgaaaggatttttaggattgatgaatataaattacaatatggtgagtttgctcaagttttacttattgatttggctcaacaaggtgattctagattgaaaccggctattgctaaggtgttagcacaacttgagctattgcaggatcagtctagttacttttgatttgaacataaaatcattacatgtgtgtatagatattcattgaaaatatgataaaactttgtaaaggttttttttgacattagtacatatttcaattccaaattccttttactcaaaaatagtaacatgtatgaacttcttaaagaaaataaaccaggctaataatgctacaacatgatacattacaatatgattattcaaaccaaaacacagaaaattaggtagtaactacatggttttttcactctcaaagaagcatcaaaccaccagatttttcgcaacctttatccggcgacgacagtgacatcaaagcaagcatcacataaccaacagcagcatagagcaaagagactgcaaaaagaaaaaagaaaaggttaatctgtttgtgtcctaggaaaagtaaatgcatttggatcctaattcaagtaaaatatgataattttgaaaaacaccaacaaaaattgtatatttttgtaaatagcttttttttgagtgggccttaagtgtaagcttgctctgccttagcctagccttgcaccagtgtttacacgctgcgaaaatatattattatattatggcaacatgaaaacaatacttttttctctctaaataaccacaaatccatgtaaaaaaaaatccatgtaatataattttaagtgttttatgtaaatttttcaagaaattgtacatttttgtaaaaaaatttattttgtgggccttaagtgcagacatgctctaccttaatctacgatcggccctgatgtcacgtaacaaaaaaaaaaaaaaaaggaaattaaactctataccctttttatattnnnntcttttatttttaccctctttttta

SEQ ID NO: 161717 - DNA, 3026 bp, Cannabis sativa
tggctacaggaagaatgtgatggaaaactctccaagaaaaacttttaatcttgggaggaagactcaaattccaaagggttttccaccaagatgtaaagaaagacggattagaggaagaaggagggagggaggcactattagcaaggtggtaagcggattcgacagaaaagatacccgaagcttcatggttccaaactaaaatatcatccctttgcaggcccccaattgggactttaagaatagaagagactgaaaagtcatcgaaataatgagtaagtttgtctctattccaaaagccctgatcatcaataaagaaactaactgtaatcaacaagggacagatcattacttctaagacaagggaattttaactcagggatccaagggtcctgagagtcctaatagagcatccattaccaaccttccaccgcaaaccattttttaaaagatccctaccccataatagactagaccaggtgtaagaaggagagtgccccaatttagcttcgagaaagccattatgtcgaaagtatttagctttaagaacagtagcaagcagagaagtaggatttgaaaaaacacgccatgcttgattagcaagcatggcctggttatgggaaacaagagacctgaaaccgagtccaccaaaaaacttcgaagagcaaagcgtacgccaagatttccaatggattttagaacctttccccatcgaaccccaccaaaactgagccataagtctctcaattttatgacagactgaggtgggtagtttgaagcaagacatggtataagaaggaatagcttgaagacaacctttaaaagcacctctttaccagccttcgagaacaacttttcattccaaatagagagttgagaacccactctttggagaagaaaatcaaaactagatttttttgaacaaccaaagcatttaggaatcccaagatatttgctaatgaaaggccttggctcaagtcctaaggttttaaaaaaataggtagtgatagagggaggggtattaggtgaaaaaagaatggaggacttagcataatttactctttggccagtagctagattataaattgtgagagcttccttgagggcatcgcaagatgaaggagaagcaatggtgaataggagggtgtcgtcagcgaaaagaagatggaaaatggcaggagccgtacgagcaatggaaatacctctgaaagatcctctttgctcctgaagacgaagggcaggagtaaggccttctgaacacaacaagaagagatacggagataagggatccccttgcctaataccacgagagggaagaatagggtcagaaatttggccattaatgttaaaacggattgttacagaagagatacattggtgaattaagttgataaattttgcgggaaagttgaatttacgaagaatggccaaaagaaaatcccactcaacacgatcaaaagctttctccatatctagcttaagaccaacccaaccaagctttccttgctttctatggtttatagcatgaacaacctcctgagcgatatagatattatcaaacataatgcgctcagacaagaaagcactttgagaaggggaaataagactgccaagaacaagcttgagacgattggagagaatcttggcgacggttttataaagagtcgaacaaagactaattggtcgaaagtctttgagagtggaagcatttgattttttaggaatcaaaacaatgagagtgtcattaatggaagagagatttgtactattgttaagagtttcaaggaaaacagtggtaagatcatgcccaagaacatgccaattcttttggtaaaaagccggattaagaccatcaagccccggggctttatcactagaaagttgaaaaagagcttgttttacttcattggcatcgaaaggggaatcaaggaaatgaattaattgagtgtccagagacttgtcaagggttgagagaagatggttactagcatcgacatcaaaattttgggactgaaaaagatccccaaaatagctacgaacctcattgcaaatctccccaaacgaggtaacaattctcccattactacatttaagcttacgtatgtaattactcttcctcctaacagtagctttattgtggaaatatcttgtatttttatccccagcctgaagccagtgaattttagatcgctgcttccaaagaatttcattcttatagagaagggagtccagttgggattgaagagtagtcacaagcttgacattagcactggaaaggggaagatttgaattaatagcattgatagaattttctaaacacgaattctataagacaaactgttaaaccctgcattccaatttttaatgtcattaacacaggcctgctgcttaataagaaaagaattgagagtctttggagcaggggtagagtgagattgaagccagctagtcttgacagtatcaaaaaaggaaggctctgtgagccagaaattttcaaacatgaatcttttatgcctcgggagagccatgctatcatcatcaagaacaatccgaaggactctatggtctgaaccataaaatcctagatgataaagagtagtgttggaaaaagtttgttgccaacattggttaacaacactccaatccaacctttcacaaagagtaccatgtttccaagtgaacttggaaccaatcggatttaaaggaaaaagagagaatttacaaaggaaacgctgaaaatgaaccatagcataattaggaggattaatattgttggaacgatcacttattgataaataatcattaaaatcacctaatataatccaagaaagtaaaggagcattatcataaagcctatctaagagaatccaagattgatttttatcatgaatataaggggaactataaaaacaagaaacatgagtacttatattatcattaaaggttataatacaatcaacatgattagaagaggagttcaaaatattaacaactgttgggttttatgtcctaaataaaactccatttca

SEQ ID NO: 161718 - DNA, 5985 bp, Cannabis sativa
attttataaagatgcattcttctaagtatttagatagatatatagagagagtatacctagtacaaaattaaatgtaagaactcaacttttgatttttttctttttttgtttacaaaaatgtggaaacatatttaattataggattcaaacggagtgacagccaattaattccctattgttatatatttatggaaattacaataacttagtgaacctctccaatggcactgtccaaattcatgatcactaaggaaaattaaaatctataaaaatctatttatcattctctgttttttttcttctataatcactctaccaaattatttcttcccttcctacagtgagataaggtaatattgtttgttcttcaatcttttttttttattattattattatagacaattttagcagatttgatgaatattatttttatcttcttcttcttttaatacagattttagttccaaacattttcatatatatacatgcatgcagtttttgtattttgctttgctctgatttctactttttcaaaaaccaacccagcatttgtttcaatatatatatttgagtttcatcatcttataaaaaaattatatttttaattgactcaataacagagctgatagacacaaaaatcacttctaaatattaagacatggcgttcactgcaactcaaatgtctcttgttgtgagttcctttggtttagtatccttcattcttggtattgtggctgaaaacaaaaaggtatatatctaatcttttttttttatttatttatttattgttcataattataacttgtatatatatatatgttgattttttacaggctcaatcaggaaccccagttcacaagaaaggttcagtgatatgcatctacccttctgatccctcaatagctttgggttacctgtcctttatatttcttctggcaacaacagcagctggctattactcaatcttttatccatacaaaggaaaatttctttcacaatcaatcttctttaggagcaaaacatttattgcctttttcaacattgctttgtaagtattcttttttttttcctgaattaatacttattttttgaattaaaataaggacctttaatcttttatctattgctatagctaattgaaaattatggatgtgaaatgattttttttttttaattaggttaacaggcggtttaggtgcagcctttacattgtggcccacaattgaagaacaaaatttccataaacacaaagcttatcccattactactgaaaagtgccctacacctaagattggtcttctaggtggtggagctcttctttcccttgattcaaccctcttgtggttggttgctctaatgcttgcaatcaatgttagagaagatttcattgaatatggagatgaaggtgaaaaccacttggctagagctgaaattagtacaagtatttgattgttgtgatcatctatctatctatctatctatatgtttgagagtttttaattttattatctatgtctattttgtccacaagaagatgaactccaattgagatgaatcatatattgtttgttttagatggtactggtgtgagtgtcttgtataggtttggattgataaattgtgaaattagattggttttgtcatcattgtgctttgcttaaaacattacatttttctctcttgttatttctatgttcatctggatatcttttagttattttgaattgttgttcatactttaggtaaccgcgcttttcttgtcaactaaaatttcttgcaaaataacacaataaaacaaacagtagctaacttgttattggataatctaagaaaagaatatgaataacattatgtaaataatgaaataagaatagacaaaagaatgaatataaagaatcaaaatattatatttctttattcacacatatataattagtcgtagatgaatataatatataacatggtgtgtgtgtatatatatatatatgttgtaacaaagcaaaatagcagcaaatgttgtctaactttgcagtttcccgaatatagacatttctataactacaacggtaaataccaggctatcgttctatgaaaactattgggaaaattgggtgtcgtataatctaacttttcttttcttttttccactgaactgatatcatggtaggctctctttttttccttttctttcttttttcctgaagcttctcaagaactatctatcggacaaaacggattcactccaagaaagcatgagatctcgaacgacggtcgggaagtctgcaaagttaaaatcaaaataagaagtacaaaacttccacaatgtttatactaaatctactatagctttcattgttttacctcttacaacttccaaagctacagtttgtacgtctatctcatcttgaattagcctgtatacgtccacaagctatatagaacacagatttaacaaaaattattaatcccaattctctcctctatgtaataatatttaatattagagtgaccaagagcaaacgaattttagttagttatgcagcaaacctcctgtatgtgaagctttgagtcttcagtcaaggcaagaagaagttgtcgacgaattccttcatcaataatgaataaacgagctccatctttcatggtgtctgtgagatccaactttttttcaaatgtttgcctgccccggaaatggacaaagaacatagagattgttaattagtccagaaaggtagataataattaattacactaaattgaagttgagatgagttacacatacattcccttcacttgcaaggcagggttgctactcatcttggccacgttctcttttgcaagagtgatgaggttctcgagccgcttccactggaaaaggccatctttaaaaaggacctgaaataataagtaacttattgaccatacatgatgaaataacaaaagcatatagataatggccattagcttgtgtagcttttacaagattaatacaaagatgttgcagttggttggctatgaacagacctgtatgaggcgttctcgtagagctggatttggatctgttagaagccgctttgccacgtatggataggctacctatttgactaattatgttaattcttcatcataaagaaaccatatgatatagcacacatttcatcacaggacagctaacagatttatttttgagaaattcagaataaacatttttttctttatcaacatacagaattacagatcagtgaattctaaaataaaaaacaatgtattgtgaaaattttgcagaagtaattataaatattactcaagatcgagctaaatgaagaataagcacacaatatatgtccctacctcaagaaacttgaaattcggttccagagtgaagcagatgccttcttgagttaataaagaacggataacaagagaaaacctctctgggatgcggatgggataattataaactaattgattaaatttccctgcagcacagatgactaattttaacaagctgctcctcttaattaacataatatagaaaatgctattagcaatccacatcaaaacaaaaacaaaaacagaatgaagtgtaccagttaagaagaatatggcttcatagttagagtatgaaaaatagaaatgcattaatactgtgaaacatcaattaccagtaacacttcgaaaattaaagtcagagagtccttttccagaagagttctgccagattgcttctaaagctggaataatgggagcaacatcagttccaggagccaaaaagcctagcctggtgaaatcatttgccatctcagcatagtcctcgtttacagcatgaacaacagcatcaatcagaatctgtttattttgctgaaagaaataagacaccaaatatgaagtgtcagaaaggagaaagcaaaaaaagaatgtaattccatttaaaagcatgattaactggaagaaaaaataataataataattatattattgttgtgaatcaaagagatgaggtgtacctgactaagcacggcaacattcccaaagtccacatatgcaatacgcccatcttgcatcgcaaaaatatttccaggatgtggatctccatgaaatagtccaaactctaatagttgtcgcaaagcagcacttacaccaacagttaaaaacccatctaaatcaatgccagcttctttaatggcctgaaacacagataattttcattgaaaaatatgaaagctttgcagatatatagaaaactggatggccttgtcttaattgtctatcttggaaacaattacctgtggatcagtgcaacgaataccatcaatccattccatcactaaaactcgacgaccagataactctttgtaaaccagaggaattttgacagtaggatcatttttgaagttctcaagaaagtcttctatattacgagcttcctgagattaaaaaataatagtaataataaggtgaataccagaaagcaatgttatgaattcaatagcatacaattgctaataataatgacatacacatctaattagaagaacccaattgctcatattttgcaattaaaaattacaatatagccatgaaagcatcacgaattgcctttatcaacatgataaaacattattgtcttttttgatcaatgatagatcattactattcaattcaggctatgaagtaagtcagctttaaaacaaaagagaagatctgaaaagtaccaaagtataatcaagttcctccagaagcttctcaccaaattcatcaactatcagctcagcattgcagcccagtttttgtagactaaagccattcaagaatgaagccagagtacggaaaagaaaaagatctcgatatatgataggctctatccctggcctttgcacctgtaatatagcagcaatggttgtaaatatcctttcgagaggagtagtatttgaattggacagtgtacatcctttgactgccaacagattagctttcttaccttaatagcaacatcctgaccagtgctacgtaatgtagctcgataaacttgacccaaacttgctgctgctattgtctgagatgagattttactgaatatagcttcaagaggctgacccaattcctcttctattatgttgaaagcaacctagataatagccaagccatattttagtttggtccattttaagttcatcacaattaaaagttgaatcacaaaataataataagaagaacaagaacaagttagagttagagttagaattactattacctgattagggaaaggaggaacatcgtcttgaagaatgcaaagctcattcatgtaatcttctctaataatatctggtctatttgcaagaacctatcaaatttggtgaaaacccaaacataaggcaaacacaaaaaccaaaaaaaaaatagcacttcaaggtatgaaatgattcaaataacaaaaaaagttacaattgagtttagtgaaacacacacctgaccagctttgataaaagaaggacccaaatcacataggagattcctaagctgcctagcgcgaaatgggacaacctcttcatcccttccaaccaagaaatcatacatcaaagtagaccaataaaaacccaaactccacactatctccacacctcgaagaattaaagatacaacagctcctctagattccaacaccttattcctcacctgatcagacaccaccaacattattataacaaaatccaataaaagaaatcaacactacactactgtcttcctcctattatattatatatgttctaatacatagacacaaacctaataatcacttacaatttcaaaccaaatcaaatgaaaacactcagcaaaggcgaacaacatatgattgggttattaattctgtcctaagcttaaggcgaagccaaattcagaagaacataaataaatcaaagaatgaataagtgaaaattttaacagggcaactaaactaaattcaaaagagagagagagagaga

SEQ ID NO: 161719 - DNA, 4342 bp, Cannabis sativa
tcctcctcctcctcctccgcctccgcccccacccccacccccaccccttccatctattgcccagtcatgtgtggtgcctgatccgtacgcaaatggcatggactcatcaaagctctatcatgatgtatatttttgttcattggcctataattttaaagttttattgctttattatgttttctgttgttgctaagagtgaggttttgatgtaatcagaatgaagctcagttacaaattgctggttttaatcgcagaatatgcaggaaaccatggtccagccagttactcagcagtcaagtgctccaataattaatcaaccaatacctgattcagtgcactatcatacttctgattgtagagatcctcagaggcagatagctgattcttttcctggccataattatcatagcaagggctaccctttacggcctcctcaccccccgccatcaaatcagttttcttatgtcagtggtgaacaacacttcaagcctcggcgggaggctaccccacctcactcttactccaatagataccactttgcacagagttgggatcgtgagaacttttacaataatcatgagagaataaagcaagctccacatgagcttcatgacaactggagggtgcctccacattctttttctggtaagctatctgttacattagcagtaagacgtgatgttttttcaacttgagcttgtttgatactgtactatgtgttgatatttatattttgttttctggccttaggtcatcagtatcctggaaaagggaaatcttatggacctgttccttttggtcccccatctgaacctaaccaaggatggagatttcctccacggtcaatgaaccatagacattccatgccttacagaccacctcgagaagggccgatacctgttgcaggtccaggtctgtatatatataaatatattctttatattgttggttttaggggattacttttgtttagctaatctgatgttgtatttttattgtaatagctaatctctacaagatcttacaggcttaagaacattgtatgtgtttcaggtccgaacttctggcgacctagatgaacttgtgtaccaagttaccattgagtttctggtatgttatgatcaaaacttctacaggtttaaatatattgttttcttttgtttgagttttcagattaataattatatattttccgataattactaggtgtcacgaatgcatttttgatctggcttctgctgcttgttaagagtagttggttattttattttatataatccgagccattgtctttttatgcaacggggcacggatgttcagtaatttaattgactaagagggcatggcgaagaagaccgactctttcttgtcggagttgtacatatggatttctatcctgcttttctgcaaaaagcagagcaggaagccggtccttgtagagatggttgagagctcttattaactctagacttcaatgtataatttttcttcttttcaatttccaattggaaaattttaatataatttattttgtaagcctctcataggaatttaagcagcatatttatgtatatggtggaatttgttggaacttgtagagaattcaacaatatttaagtgcataatagttaccattttaaattttacagaattgatctttgctcgttagctaatttcagattggattaaaatgcagaatagttttgacttggcatggttccaaaaaagaaaaagcccataaaagaacatggcttgggtatcggtttgtgggtcatggtggagctcttcgaatgagaattatgttctttaacgtttgcaaagcttggctatagggggaggtaattgattgatttatagacgatggtatttttggcccatgttcttgatcattgtactaacctgtatattctcaattttttttcccatttttattttttataatactatatggttgatgtttgatggataatcccaccacccaaaacccacatgttaaaaaacatataacttgtatattctattgctaatttgctatcctgtatattctattttatttttccaatgtttcaatgttatcttgcactaatcttcgattcaacctaatggataccaaggcttgagtggacataaaaagctttgaaatgtgtgaaagcagtgaataaaaatgtgttttttttttttatttggaatgagtacaaaagagtactaattttataatatttagctgataaagtgagcttgatttcttccattttcctttaaaaacaaaaaaaaattcatcatcactgttgagttttatatgttcccattttctaacttagttaaaaaaatgttttaactcgagtggcttatttatttgatatttcggcataagctactacctacaccgttaactacttatttggcaagtgaaatgtcatgtgtatgtacagtattggctcatgtcttaaaaatcaagtaatgtttattttaattaattaataaagaaaaaaaatgtaaaaaaaatgttttaaaagattttaaattaaaaaataactcttttatttatcattgaaaaaaattattttatttttctaaacaaaaacattcattgaaaaaaaaaagaaaatcgtaattttttccttgcgatggtgtcaacgaagaaggcaatggggttctgaacaagggaaccatccgaacaactaactgcgtgtgtgagagggtggagaaaaagagagaacaactgctccgttttgctctgttttggtttcttctggtatcccttgttaatattaacaagaataatttcactcttttaccttggaatgtcttcagcctttgaaaaaataatgtttgtttattcaacaatgcaatgccaaaatttagaattgtttctagagtgtttagatgaaagaattgagagttgtgcaaaatatggtgggtggttgtggttgtctctttgtctcctcaacctcaatgctgttttcacttgctaaatcagtagtttacaagtgtaggtagtaacaaaactaataaagataaaatttgtggtatttaattcgtttttttttttgctaagggtggtatttaattcgttgaaaaaaaataatatataaatatatgaaaacaaaaatataaagtatttatagtacacatatcttttacatggttttttttttaagaataaaagatttttttttaatatgtaaatgaaagtttatacaatgaattgaattgtattaaagacaagggtgaaagagggcacaagcattcaaaagcacattaatatgacagttggcagtgactcataaatgatcatcatcttttatgtatgacactaaagtctaatctacttttttttttttttttttttgagataaagtctaatctacttaaacattgctgttataaaatgtgtcaaacttaacaaaaagtataaatgtagtttaaaataaatacataccacaataaattttattttatttatgtacttatttcccatcaattaacactttttataatttaaagtttacaaacatttcattcattcattcattcaaaaaaacattaatcctcataaatgatcgttttaataatctttaataaaaatttaatcactctgttgacctttcgagttaatttgtattggatcctgatttctttaatttttaaaattaaatatagcacaaaatttttattatttatactctttaacgttatacaaaagttagatatctcagcttttttaaaattaaagttagatatctcaacttgaagagaagatatggaaaaaatttatagtatacttttaaaatggttgtttttaatttttgagaaaatttttcatttttttttaataattatacataaaataaaatattaaaattttatttttcttaaaaattatttaattattttaaaaaaatttacattgattctaaattgttagagtatacacgtgaaaagtagagtaaaatgtttggctgaacgtgaaaataaataaataggtttagaattaagtgataatatttattgaaattattatatgtagcatagcacagtgcaactgcagctacatcagcttatcccacaatactcgtaaaaacacctccaatagtaacattttttaataatgttaaaaatttacacattatttaaaagtataatattttattttatttttcttacacatcatgtttgacactcttacttctaaaaacaatccaatatataacatctttaaaaatattataattataatctcacagattattattttatatatagagtaatttgcggcataaatacttaagtttaactcccagttgcaaataaatacccaagtttaatttttggcggtaat

SEQ ID NO: 161720 - DNA, 3106 bp, Cannabis sativa
  modified_base (1467)..(1477): a, c, t, g, unknown or other
  modified_base (3047)..(3054): a, c, t, g, unknown or other
ctcattacttgtttacttttcgtttgtttcctgggccttttctgattctcttcgattttttgctccctatggttggcatgtgatatatcatacacgttgcatgtgaattttatactcttcgacgtaagaattaacacacaaattgtgtaaatatacatgctttttttagtagcaattatatatatacacataaaattattcagtatgcatatttgtttaattttgtaaaatggaaaccgattacatttctttatctttatttaattttagttttatttttcacaaaaactgttacttatcccacatattagtttttaagttgtatatttatttgtgcatgatgattctagctataagatacttttgttgtggtggaaccatgataattagaatatgtttacattattagttgagagaacatttaataagttttcaaaataaaaattagcgcccctttttattaaattactaaaaaaatatatcacaaataatgcgttttgaagattttccaatatggggttcacattatctttgacgacaatcctaatttattagtataatgttctgccacattgccttgataagaattcatgattgttacttaattctactcaaatcacatgcacactacactactagtattttcaggagcgtttggtacgtagagtttaaaataatttatttaatttgaatattaaataaaagattaattcgtatctgtgtttggtttcattgtgtatgaaaatattttgttggattaatattaattgaattatatatatatatatatatattttttttttttgatttaagggttttatatattacaacatattttacctgggactcgaactcgggacttccaacacacacacctatttatggccacttgagctaacatcaagtggttgaattatatttttcgattacatgtagatctgataaattgttcgagagataggttttaaaattattaatatatttacatctattttaacattgaaggtaatatttaaaatctgcttttttaacattattctattataaagtaacattatttacacagtaataattttttcaacttaaaacataattgaaagtttaattatacaaaatgctcataaaaatatttctaacttaccaaacaactctctcaatcaaaagtatatactaaaaacaatttatctctctctcctaagacaaagtaattcgaattatatagcaacaaaataaattaaatgtgtattcttctaacatatatataatggagatttatattatataaggttatggtaagatttgatatatgatagtaattgattatatcatataatttcaatatattacaaaaagttttacttttagtcacaataaaatttgtaactaaaagttaaaaaaaattgtaactaattattaattatcattcttatgttgtaactaaaaggtccgtgactaaaagtattagtnnnnnnnnnnncaatttgttgtgactaaatgtataatcacaatacttattgtgactaaaaataaattagtgacaacttgtggctaaatactatgttttagtcacaagtagttttttgttatgaccaaaaatcacatttaatcacaaaaaatttatcttgtgactaaaaaattgttaataaaaatatctattttttgtagtgatataacgtaatttgttgtgaaacagaggatattaaaaaaaaacaatcaacaatctaaaatcattttctaaaaattcttaaatctacttaaaaatttagaataaatttcgtttatccaatttttattttgatccattttcttctattgtatacgaaaatatatagaattgctattttgatacgttgttgacaaatgagacctcattcattcctctaatttaattttctattatagttgttcataattcatccctatccacgaccatatattggtgcaaaccaatgaatatatgaagctagattagcctcaaacatgtactaactaaactaaggaatataaccataacagtatattaactaataaggacctcaaaataaatttgacaataagcgcctagatctgagtatctaatttttacatgcatgtacaaaaatcatcataattagctgattaaaaatctatcaatctatcatctctaaagtaaattagtgcatgtttgtcattataactaaaatattgttttttgtatttataaacaaaaaaattgtgttcttaaaaacagttaggcttgtttggccgtatttttcgaaaacagttttcgaaaaataaaattacaaaaaataagaattttgaaaacaacaaaatattattttctgttttgaaaaataatttacttttggtcaatattgtttttaaaaaatactaattaaccaaacacgacttgtgttttgaaaactttaaaaactattttttattctaatttctaaaaatattttttttaaaacaaaaaacaatactaaacatttcttagcttctttcaatttttaaaatccaaaaccaaagaagtggatcaatgtggctcgtttatttacaaaatggactcctccaaattcatattcatgagtattttatacttatcataatgtgtgatgagtatattattgacattgtaatgtgtgatgagtacaatagtcagttattaaaggcaggaaggagtatagcctccctcttgattttgaataaatatgagttaaatattttctgaataactgaggcactatttgtgtttattattatttttagtgtcataaaattattagtgtaattattagtgtaattatcgaattttatataacttaaaaaataatttttataaaatattaataaccaatcatagattattgtaaaaagtgtgtaaaaaaataatactctcatgcacataattttgatcataaacataaaataactaatgactactcactaataatgttttttatttaataattagaaattgtattgtttcaaaattacaacgggttaaaattacgttattttgtggaatattattagcttgtattataagggaaatttacatggtnnnnnnnnttttgtcatttttttacaaaaattctgcgagacggtattttttactttttta

SEQ ID NO: 161721 - DNA, 5421 bp, Cannabis sativa
  modified_base (52)..(73): a, c, t, g, unknown or other
ttttcttcaattctggttcttaaatatactctgttttctctctctctctctnnnnnnnnnnnnnnnnnnnnnnctctctctctctctctctcctctggtttatttcttcactggtttagtcattactgtcattggtttcctcaatatgccccctcaagctgcacgggaagagttccagttaaagcttgctacacaggaaattaaactttgggaaagtaaaggcttttgtgaacatgtatgttggttgttcctctgtgggaatataggagacattaagtttgttctgtagcattaattctcgaacataatggacatccacttcaatgtgctttgttctggagtgaaaaacaggattggaagctagtatttgagcaccttgattatcacaccatatcattggtttgctgaaaaatttaatgccaagttcttggagtacagaggttatccacacaatctctgtagctgtcgtggggagggctctatactcactctttgtactcgaacgtgacacagtcctttgttttcgagagctccgtgagactaaatttccaccaagcatgacacaaaatccagttatagattttcgatcatgaatgtcacaagcccagtcagcatctgaaaattcctcaagtagcaatctagatgctggtttaaatattaggcctcaattgagagtgcctttaacataccccaggacacgtttgcaggcacaccaatgagcaacaattggtgattgcatgaactggctcagtttattaacaacaaaagataggtctggtcttgtgagcgtgagatattgtagagaaccaatgatgctcctataaagagtggggtcttcaaacaactcactgtcagtagtgtataatttgtggacagggcaaattggagttgtacacggtttggaatccaccaagtttgttctttgtaggatgtccattgcatattttgtctgacagagagaaatgttcccaccactggtattagcttcaagaccaagaaagtaaccaattttactaagagtctttaaggcaaacttagtttgaagttgagagataatttgttgaacatccagtagttcagctccagtaactagaatattgtcaacgtagacaagaaccagaagaagattgccatttttgtgtctgaaaaagagagaagtatccaaagcagagttttggaaaccccaagacacaagagccaactttaacttgtcataccaagctcttggatcttgcttcagtccataaagagctttgtttaacttacacacatgattgggatagttaggatcctcaaacccttttggttggaccatgtagatatttcttttagatccccattcaagaaagcattatcaacatctattttttgaatttcccaaccaaaagtcagcaagtgttaacacaatttgaatggtagtggctttgacaactggactgaaagtgtcaaagtagtgaatacctggagtttgttgaaatcccttagccaccagtcgtgctttgtacttattaatggtacgatcagcattaagttttagtttgtagacccatttattttgcaccagaggcatgccatcaacataaggaaccattctccatgttttattttttacaagagctatacgttcagtgtccattgctgccctccatttgggatgtgcaagagcttgctgcaaattaagaggctcacaaaaatcattagatctagttagttctgctgctaacaattttggttttaaagacccaattttggaacgagtttgaatgggatgagtggacaccacgggaacatgtggattaatggtaataagggttggggatgctggccgtgtgggaagattggtggtgacaggggctggtgcagtaggggaaatagtgtgtgactcaagaactgacatagtaggactgttaggaaaaggagggtaaactggtattggaaaaccaggtggtggtgaatctgttgaggcagcaatagtatgtgagtgaactggggtcattgtgtgggttggagactcatttgaatgttgaataacatgtggaggagttgatgcagaaacagggtgtgaaaattgtggtacaggtatgtagtgacaggagggagaaggggtgttgtggtaatggttgagatgtagcaaacagtttggagtagggaaaattttgttcattaaaagacacactccgagctatgtaaatacggccagagggatgaagacatttgtaccatttgtgagagggattgtaccccagaaaaatgcaggtgctagttttgaagttaaacttctgagtctgatatggtttaagcaaaggaaaacacgcgcacccaaacacttttagaaagatatagtcaggtttcttaggaaacaacagctcaaagggagtgatgtaattttatttttgagcaggtaacctattaatcaaatatgttcagtcacatgtatatgcatccgttcaacccttccttattgttgatgagtatgggggcagggatgtcgaaaaacaatcccaagttttgcaagaattagtgcaaggagacgatattcccctccctaatataactgaatacacttaattttagtggaaaagtgtctttcaacataggagttgaactgaagaaaggtggaagtggtatcaaatttgactttcaagggaaaaatccaagtgtactttgtaaaatcatcaagaaaatgtatgtagtacttgtacccttcagtggatacatgaggtgaggggccccataagtcagtgtggatgatttcaaatggagagattgttttgtatctggataaaggaaaatgaatttgatctagtttgtcgaattgacatgcatgacaaaaggagggatcagtaggagaaacatgtaaatcatgcaaaacttttttcaacacaactttattagggtggccaagtcttttatgccacaaatttacaacaagttagtttttagtaaaatctttatgtgcacactgatgtacatactcaaaaacactagcagtattggcataagattgaaaagaagaattatgctgagatctggtgttggaaacagagatgggtggaatctggtacaagccttctttatcaattccttgaagaagaggcttcttcgtgatctgatctttgacagaacaagaattaggggtaaattctattgtcacaacattatctttagttagcttggatatactaattagattcttggtaatagagggaacatgaagaatattattaaggtgtaatggtctgttagcagcaataccactagaaccaatattggaaatagaaagttttgagccattaccaacaacaactttttccttgactttgtaggaatgtttatgagtcatttgagttgagtcaaaggtcatgtgattggttggcccactatccatgtaccaagcattgtcctggacagttgaaggagtggcaatgtaagcctgtgaattagatcttgtgggcaagcagatgactcctctggacctgtatagctgacatcgaatcttttgtaacatttgagagcagtgtgccctggacgcccacaaagttgacagatcacatggttgccattgttgtaaccacgtccacggctggaaggatttcctctcccacgacctctgttttggttgggagggaagggtggtcgactatttaaggaggatgttggcttcttggattgagcaagattggccattggttgactgagttcaagaagtgaggcagattgggtgagctctagacgcatcttgtgattttgaagcatatactgaacttcttgaagactcagttgatcacgagacgagagattcaccacgacagagtcatattcagagccaacaccagtaagaatatacaagatcagctaatcttcagagataggatttccagcaacacgcaagccatccacaaatcctttcatctttaacatatattcatcaatggtcatggaccctttcttggtgttctgtaacaaggacatgaggtgaatcatccgagcttttgagcgtgtagtgaagagttgctccagtgtgaacaatatctcagtagaagattcacaattaacaacatgccctcattgatttagatatggaagatagtaaccaggaaataagaaattggtctagtctcatccaacggacaaagttagggttacgtaccatggtggtagatccctctgtttcagggaagagaggagcagggcgaggaagacgatgaagaagaatgtcttccaaatcatgagctctaatggcgggaagcacttgtgacccccaaaaaaattagttgttctgatctaaacgtagaggaggtaaaagcatagtcgtgggaacacgccagaggagctccagagtcacctggaggtcgccatgaacgacttgctctgataccaagttgaaattttaaacacaaagaaagaactaaaagaaacacaatagagattttgagtgaatgattttcattgatacaaagagaaccagcaaaggaggtatatatagtacctcgatataaaagcaagaaacaagaaacaaataacagaaaaatagttagaactaataacaaattgtaacaaataaaggttgctactggtttagtcattgctgtcattggtttcctcaatactctttagtgtggtgtatttatttctcatatttttctttatttgtaaccaaaatcttactcaaccacggatgaattaggcttcttcttctattagaaaaaacaggggactgaatatactctattttgttttattatttgtaaaactatgtattacaaaggagaaagagctctatacatataggctcattgatagaggtaatacaatgtaacaaactctctgactaataagagaacctaactagctaaactctaatagcccccttcaagttggagtgtaaaagttctttacacctaacttggatacaacttcattgaaatgagctgggaagagcggctttgtgaagatttcagctaagttcatcttggaagggacatggttgagatttaaggttccatttgtgatcttctcgcatactatgtgaccgtcaatcttgacgtgtttggtgcgctcatgaaacacaagatcattgataggagatcattgattatttagatttaaataataaataactaaaagtgtatctattcttggagaatagagcgttctacactactacaaaattgggctttagaggcggtttttaaggggttttgacgtcgattttggcgaaattcgctaccgacgttgttccaggtgacgctatagggtttaaaacaaccgacgcaatatttaattaacaatgagaaaagttatgaaaaaaccgacgccatagggaccctttggcgtcggttcttatgaaaaaaccgacgccatagggtcttggtatttactagctttacaatttcttcttttagcataatttatatatat

SEQ ID NO: 161722 - DNA, 2417 bp, Cannabis sativa
tttagtgcaattgtgaaaatttccttttatttatacactagtatatatatatatatatatatatatatatatcttgttctttatatccttaattacttgaatttaataccataatgatactaataataataattaataggcttgatttaattgatgatcgattagatttagggatggcaataattattatggtggcacaaaaactttggtttgtaactgataggctttggtgaagaaagaaggccaacatagataggtagacaaaacactactaacggtacaagcaccaatcataaagttcatgactataatctgaagttgaatagcctctaatggagaggctcctcccataataagcccagtcattgccccaggaagcgagataagccccactgtcttcgtgttgtctattactggcgacagagatatcacaagagccctctttacctgctgaaccgtcgcttgccgcggtgtcgccccaagagccagtgctgtctccacctacatatatatatatatatataattaattacagatattaattcatcatgtgtaaaacacaatttttctctgtttttataataatcaccctgcaataatttctcttttttattatataattttttttaaaagaaaagaaaagctaaaataatactatataatacatatatgtatagttataccagattgatctgagttctgatatcgtctctgagtcttttcatggtgaccccagttacagtcattgaattcccaaccatcattcctgcaacagggataatatagcgtggagtgaacggaaatactctcagaacaaccagaaagaacatcgtcaatgaggtgcccgccaggatcgacactcctgccactaatttccctctgggaacgtgttttgcccgttgaccagcggtgtaaccggccactgtcacctgcaccaggcttattaattctcatcaatgaatcaacatatttagaactattacatctacagattacgcatatatatatatatatatatatatatatattaaattaatatgactctatttcggtctaactggtcctgttgaattcgaagacaagagtttgatcattataagtaccctgtttattcaattttacatgcatttatatatcatttatggcttagtagattgaatatgtatgtataaaatcaggtaaaaggtctaaaatgatgaaaaaggaaatagacaaccttttcaatgattctcactacaaataactttttgaatcgaatataatcgcgtataactcacgagagagaaagacaaacacacacataatagtagacaatgataagtaaagacgaaccatgaaaaggtaagcgagaagaatccaaccaacattgtgttgagtgaaaatgaactgaagaacaaacccaattacagagagctgaacaaaggctctgacaatggaataaaccatctcactctccattccgagtttctgtaagaaggacaacgctacagccaagagaaccagcacggtggcagccagtggcttcaccatgccctttaaaaactcccccatgaacgaccagtccatgtcaacgacggcgaacagggccgcggacgaggaaaacgacgagtggttctgtgtcgtttgagtgaacgccattataattagttagtttagtgaagaaagaatgagaagaggataggattatatatacctaaaggaaaggattatactgttttcagaatcagaaagtgcctacccctcagaccgaaccatctcgtggagttaacttctttggggactattctgcagatagctactgattgggggatgctttagcaaataatatagtacataaaattgatgagctcattgaaatgattgcgcagtaacttattggaaaatcaacgtgtcgtacgacgtacgaaattgttacggtgaggcaaaattgatttgacctgcacgcgcgccaagtgtggggaggagtgacttgataataatctacgtgggacaactcatttttgaacattattatgagccgtccgtgctgccttgtatcacgattaactgttgtttaataattggtttgtgatttttataatatttattaaaataaaacaaacagaattcgatatgagttgcactaataataataataatagggaaatttgaattttcatacctacataactttataatttttttcttaaatgcatacttattaaaatttgtaatgtatgactattttaccaattcttcaaaactaccccttctatttgaaatcctaattttttaaagctcagccgactctcacccacgatcaatcccaacctaaaccaccttcacccacgaaaatcctcacccacgatcaaccccaacccgaaccaccctcacccacagcgtcgaccaccctcacccacgatcaaccccaacccgaa

SEQ ID NO: 161723 - DNA, 1633 bp, Cannabis sativa
  modified_base (1592)..(1601): a, c, t, g, unknown or other
ttaattctgtagtattgtatatatggatacgattttgttatgtgagtagatgggtctcggggtacattaaataagtgtcagggtacgtttctaatttttaaccctaattatccttagatcaatctcagccgtcagattaaataagtccctcatctgacggctgccgtacatcacggaatgcattccgtgaaagtacaatcacgggacaaaatcatacctatatatatatttagtggggattggagaacaaaccatagatggttctggggctttagggctagctatttgttatctgtttgtttgtgtgtgatgtatatatattatgtgttataattaaattttcttatatttccgagcacaaaattaataaggatcgaagaccactgaaaaaaaaatgaatatatattagttttggtgtcagcatactataagccaccggtgatattttgtaattggttatctatatttatatcatatccgatatttagttgtataacaatatggtatatgttagaagtgttagatactaataatctcttttaacattttacttttagtgtttgccaaagaaaacaaaaaggcatatatagtgttagttaaagtaattagttaacttttattcttctgagctagtcagctagctttggcttggtcttaggcagttaaaaaaagttaattatgacaataatgtcattccaacaaccttgtacaagtttatatatacaatactaactagctagttgatctcattaattactaatcctaattcgcctctcaaagaactcgatcctcaatgtaagttcctaggttttctacaccattgtaactccaagaatttgattaataaaaattaaagccaaaggctcttcctccggagagtagacaattgtcactgtcagtaattgatcgaatcttgtaatatcttggttgtttctttgtctgaatttatgtttaatgtttctttgattattttgatcttggtattgcattaatccatctttattcttgtgtcttttggggtaataattaccacaagtggtatcagagccaaaagttcaaaatttgtgatagtgggttgcatttggaatgtgtagaagaagccctcaatgtgatgaccttgttatagaagatctatacggtgccttgcaaagtctatctaatattgtgatggtcagacaacatgtcctggtagagattacggcagtacaagatggagatctgtgtttggtaccatgtattgaaagtcttcctgacaatgttgaaggttagatgatgagttctgtttggtgatagcagcattacaaggcagtttcactagaggagaggccacgagtatgcgatccttagtttaaggagaggttttagggtatcaatccaagtcccatgtcgaaagaataggtaagagttgtcttgaatataagtgttccacatactccattagtatgaggcctttcgccaaaaataaaattatgaagggcactacaacaaatgtcacttttaccagcacaactcgctactgcgctggtaaaagtcattttgcaaactgcgttggcaaagaggtcaaagttttaccagcgtacatttgcagtggnnnnnnnnnnacttttaccagcgcatttacgcgctggaaaaa

SEQ ID NO: 161724 - DNA, 1587 bp, Cannabis sativa
aactagagagaaaatcctattttccttcaaaagactgttgcatgcccaacttgtgtttgacttattttttcgtgtaatttcgaactataaatggacatccttttcataagaaaaagaagatatttataagggattctgaaactttgaaaaataattaaaattcagggaaggaactttctaaaatttaaactaccaaattacttcagaataaaattcacacatgaacatttaaaagaaacaaacagaaaataaaaagaaaagaaaggaaaatgaaggcttacaagcttcttggtttctctgatagcattgatagtttctcgtggaaatctttggcactagaggtctgagatataacaagagcgtaatgaggaagataattattattgtttgggactcgattatgatcgagataacgttttctattatttatgacttgattataatcgaggtaaaagatacggttattaccgttagtgtgaatcagtaattacttgcttgaaaccgtaaataggtttcttacttatcgattgttgtatcgggcattgatagtgacatatatagctcgtggatgacgagtggtaaggatgttttatgaggcatcaagaacagtttgtcttattagacaaataataagggaagatgaagacaactgaggagacaaagaatgcctcttctgctatgaatatagccgaagggaagatgaagacctttatggttatggccaaggaagaaatggaggtcgcacctacgatcacttcaaggtgcgaccaagtcaggaagacatcactcctatcttggatatattaattcatgagttggtcatatcctcaattgaccaaagaacgaccaacgcctgctataacacttcgttgatagtcgtcaagaagaccccttctactgtatagccgaggagatgatgaagacctcttccactgtaaagtagaggagatgacaaagaccttctccactgtaaagccaaggtgatgatgaaggcctcctccactttaatgcctagaacatgatgaaggcctcttccaccaaaaatttgaagagatgacgaaggcctcctccactgtgaagctaaggagatgacaaaggcctcctccactgtgaggctaaggagataatgaaggcctcttctgcttcaaatctaaatcgatgacgaaggcctcctttgctataaagccaaggagatgaacaagattgcctccactgtgaacacaatcgagggaacattaaaaacctccaagttcacaactcaagagagaataaagactgcatctatatcaacttgaacacgtagtgtgacaagatagccaatgttaagaaaatagctgaagatcaaagttggttatgatattttggtgttaacatatttcaaaagtctcccaaatgaaaggaaattgtttaagacaatcagaaaaaaaaatttgcagagattgtcaaaattgatgcccacctggtagtttcgcatgaaacgggctcaacccgcatcatgaagtttgcctcgcacatgtgcaaagctaacttggggggggggaatgtttatatgaaaagtagccctaatgacatggacatcaatgtttg

SEQ ID NO: 161725 - DNA, 7926 bp, Cannabis sativa
  modified_base (7879)..(7885): a, c, t, g, unknown or other
atgtcaacttgggtgctgggacctaaataaccttcagtaaaatatccataactcactcaattttgatctgattgatgcaattcaacttgaattttaaagctaattcaatacaatatcaagccttgtcttacactccatatgtaattcttaagctatcatcgtcaaaattcacctcaagggagttacaaaaataagctcagggttacccacagtgggacctattgggcacaaaaattggccatcgccaccagaagctaattttcaccgttagatcatcaccaattgtcaaaaacatcttatttgtatttttccctatttttgtggcctccttcacctataaaaggagagctcccttagcttatttttcacatttagaaaactacccacaaggttagtgcttctctctttagagtttgaaatttctgatacttagtctattgctatagttaccatctcctgagaaataaaaacttcaagtagacgtagacccattactatcgcgatataggaggtgaattactataaattggctatctctcttaaattacttaactacttttctcattcttcccaatctaacaagcgagtgtggcttagaagtctagtccaaatttctaagtcaacatctagtatgaaatgcaatctttggaatgccttcctctcgaattctcaactgatgacaacctaagcataagtcaatcttggagaaaactgttttcccttgaagctgaccgaacaagccatcaattctaggcaatggataattgttcttgatcaccagcttattcgattcctgatagtaaattcaaatctaacgggatccatccttatttttcacgaataaaaactggagctccccagggcgacactctaggtcggataaatcctagatcaagcatcccctaaagttgtagtttaagatcttttatgttttgccaaagccaccagataaggtgccttagaaacaggctctgcttcaggtgccaagtaaatgacaacatcaatttcccgctgcggtggaaatctcagtaactcttcaagaaacacatccaagaactttcttacaattctaacatcctcaagcccaaatgttttgggtctgttggagtcaatcacaactgctagaaacccaacacatccatcgtgcataaaatctctagcttttcatattgaaataattagaatcagagaaccatgagcatatcctacaaacacaaatggttccttatcatctggctgaaaagtcaccatcttttggttgcaatcaatgttggtcgtgtacttagacagaaaatccatcccaagtatgatatcaaactcaattaagtccaactccactagatcatcacttaactccctattctcaattctaattgtcataaacctaatccaccttttggagataactaattctctgctaggtaataaggttccaaaccctatctcactaaaatcacaaggcttacccaattcatcaattactcttgacgacacatattagtgtgtagttctagagttaaacaatacagtataataggaatcgttgataggaagctaacctattactatataaggagtagctgcaacattcgcttatgtaatggaaaatactcgtgctagtgtgggtttcaactcttgagtcaattcctctttcttcagttgagggaaatcttcttaaagtgtcccaccattccatcctgaaatcatgtcgttctgttacactccccgggatgatatttcttgcatcaaggacattcaagataagtataagtttgacaaccccctctgcttaccatgaccccagcaacttggtgccaaaaaagtttttcgtttctgatcgatgttggaatccccacaatccctaccataaccaaaagtacaaaaagtggtgatcccaccaacacttggagtccctcggagttcttgtgaaaagtctaccgcacctttggctcaaagtgccttttccaccatctcagcatacatcttagtgtcattagtagtaatcgccaaatcgtgcctaatcttggaatacagtctagcaaattatttttcctttctacagaagtctgtgggtactatacctaaagccaactaatcgagtcagtcaaattgagatgtatattcaatcactgacatgttctctccctaaaccagtttggtgagctcttttctcttggtactacaaactgcttggttgtagtacttggctttaaaaaatcttagaattcctcccaagtaattctaataacatctcgagtaatggacaccatttcccaccatgcgtgtgcattatcatggaattaaaaagtggcacacgtcaccttatcattgcttgtgacaccaataaaattaaagattctatatagatcatagttagccattgtttggctttcataacatcagggcctcccaaaaatactagaggtgcttgcttgcgaaactgctcatacaaggtctccatgcggttaccaacaataaattgttctactggtagcaccagagcaagagcagttggaacttgctgttaaggcataataggaggaccttgctgccttagcctctagatctcttcatcttattggataattgggtttgcatttttgcaaacctttgcttccaatccaaaggagcctatggtggattttcatgaccatttttgcacccacggggatcatgtggaggattttggcctcccaaaccatcttcgatctcaaccatattgcactgactccttgtgtttcgtcaggcttccatatcaaaggaattagccttcagacccaaaagtcaagcaggtcagacagcgatcacatacaatccaattaccgtatacatggattttaggcaatgcattactcaacctatatattgctatcatgcttactatcatgctttgctaatcaaataaattactaaacaagtaaaggcttactgaaccatgagtcgagcatgtcttagatgatgatttatcttgatggtcttcggtaaacaacctggtggttttgataccaaattgtaacggcctaatagcttaggcccgctatagtgattttctaattactctgcatggctttgctaattaaaggatttttaaaatcgtgcctaattcaaacttttatttaaaacttttaaacttttgtaaatatataacattataaaaaatttgggatcccattttaaaagttaacaacatcattcaaaatacattttacaaaagtctccctccacaactacaaaatgaaggcccatgttgtcctgagaccaaacactccaagtttagccatctagatatgtacaatcctcctcaagctctggactcactggtgctcagccttcaccttttctttacctacacatgtaaatatatttgtgagttgatggacccagtaagaaaagtataaaacatataacatattattgacttgcatctaggtgcccatacacctatttacaatgcttaatagatgattaagaaggtttttaacagaagtttgacctctgtaccacatgcactaagtactcatctcgtagtaatgttggtagggctggatcacaccttgagtataactgagtgttgtatcacatgcactctgtacttgtcttgtactagtgtttgtaatgctgtatcataccccttaacatcatgtactgtacttatgcactctatactgtaaccgtactagtgttggtagtatataaatatgataatacgacatgtatataacatacatacacatattatactaatcttaccttgtttcctaatttaagtgagccgatcaaccttaatggaaatttttctttctaaatggaggccctatgtcacaatcatacaaaatgggtaaacaacctgctaaaactatttcggtgaattaaactcaaaatgataagtttccctatcaataaatagtgaggcaattccctaaatatcgaggaaatataaaatttaaggctcccaaaactacccaaactggtaaactagattcccaaaacggtaaaccaattttggatcctgcctgggaaaatagttcaccgtttctggaacaatggtggattgttttctgcataaattccaaagagcttcgaatctcactcaattttactctaaatttcacactaagctccaaaacacctaattaaacaataataaacataactcaagcaataacaacatccacaactcatagaatcaaaatttaccactgctcaaaaactcaaccagcccccaaattctaactaaacaagcttaaaacaatttaaaactaacccaaaaaacaaaccccaatcccttaaggtttggacagatcctctcctcaaactttgcacgtttaaactttaagaaaaaccttcaatacccaaatagaaaggtgttaaagctttatctcttgtttgtaccacttctataaccttaattgaagctcaaatccacaaaaattaaggaagaaattataggtgcttgctggttcttttagctgaaggatagagagactaagggataagtttatttctttggtatttaatttaacttagaaatgaagtaaagtcattaattgattaattgtaatatattaataataagcttaaatcacctagaaaacttatagggtttccactataagtttaaaaataacattaaggaaaattaccattttgtccttacttcacccttaagcaacctaaaggcttagaggtaaaatggtccaaaatcacaaccaccttaaatcttgacattccaaatatcacttatggttatcccactacaaaaagattctaaatcttacccatgtgactctaatggccaaatcatcgcatttttatccttattgagcaaaaatcatgaaagtataagttttcacatatagcataaataatacagttggagtttaataaaatctctaaaatttagaaattataaccctaatgtctatttattaacatagggctcaaataataattaatcacatataattatgaattatgcttaattaatgttaattgtcgtactaattcatattctaagtatgcagtcattatagggtcggtatgatgaaaatatgaagctagttttagtaccacagtattagaatggtgaacatctaagaaaatactaccaataaatgcaaagatgtgaagaccacataattgcataatacttaaacatcactcttaggtgatggcttctaaacgattaccattcaagggtttggaaaaatactaatgctaagatccgaatgactacttccaaagtatagcctatctagacaatcgtttcccttaaggaatatattgttcaaagattttttctattttaattagctaagatccgaacagatcatgtaatagctttttattattcaataaatgtatgctacttgggtaacaacacatatcaaccaataaataaataaagctattaattatcgttcaaattgtgtcaatttataaattattactttcaaacttttgttgatttattcttaagtcatagaactacctaacatgcttgtaaaaaaggtccatctaggtacaaggaccgaacgaacatatacgaatactttagtcaattgtaagtgagcaagagtctaaagtctgcttcgtcacttgggggcacctacactgcacaacattggtaagaagcatggtaaacacttgagaaaaaattcttgaaagaaaaaagaaaaatgaagtgtacatgcgtgaaaataaggaaaaaaaagctagataaaagttcgagcttaaaggttgaccgattagccatttgacaaaataataaaaataaaccaagtttaaaagcttcttggttgactaaatggtcttaaataaaaggccataggcgaaactgatataaaagaaggagactttggaaatcatcccatgggagctttaggttcttagtattcaccgaacaaagtttctgaattctaggcggtagaggaatgattggtattcttggtcttttcatcagtattgtactcaaatccttttgcgtcatcctcagccttccttatctcgcaatatctgatcatgggatcgtgtatgtccacctcaaggtaacaaaggttggccttgggattgacctcctaaaatttatagaatacctctgcgatggtggttttgtggtactcgacatctttggcatgagcctccgctcagcagcaagcacttccttaaagtcagacttcaccttcagagaggattattctttttgcctaagagctttgttcagctcgttgaccttagtttcttagctctaaagaagtgttgggagtcctttcctctcatcagtgagttcctaaactctctttgattcttgctccaggtctgcttccaactaagtagtggatgacatgtcagccagatggtgcttcaactctttgatagtgttatttgcagcaacgagttgtttattcacttccccaaatcttagtgcccttctcctcgacattactcttggcctcttccaaagccattatcagctcattagttgtaatattggttttgagagctatagacttagctcagaaataaggatatgtgagctttagtttgttttgggaaatgaaacaataaagcaagttagaaaatttaagcgttaattagtgaagaagcctcaaagacaacaattataaaacataccctagtaatttccttcaaaacgcccttgagcagaagttctacagataaagcctcgacactagccagctgctcgttcacctcgagcattgcacactcttggtagaaactcatcatctctttagccattttagtttcaggttgcacggcagctgcagtagagttggcttgggcaaatgatgccattcaacatcggtgatatcgacaccaaccgagcccttagaagatttagggtgtttaggcatggtggttggggggaaagccttggaagacttcttggccgaaagaggagaatctgggatgtttatggcagcaacttctttcatcccaggagtcagagtcatggaagtctcttcaacatcgtatcaagatgttttggagcttggggatatgctaacaggaaggttatctcaaactttttgctttttaacaggagatttctacttaaaactatcaacgaccttcctttttagcatgttcttcaacctggttgacatagctgcatagaagagaaaacttaataagtatttatgaaaggcaaaaggaaaataaagaaaaatattaaagtagctaccttgaacatccaaatgggcaccctccgaaacaagcaaagatggagcatcctcatctgaggagtccccttaatatggcacctcaactaccaccttcccttttccaattgttgctttggcagccggttgaactacttctttggtgtcattctaatcataatagaccgctatacttggttttgactttgtttctttcacttcttcttctttttcttctctggaatctcccgctcaagagtgggatccttggctactagtttgtttcttgttcgtctttagaaggataaattctatacttgaaaagtttttagtagtagctagaagagaaatgttttgagcaaatgatgtaagttgaaaaactgccttcacccttgacctcaatcctaatgaaaaaggggggcgacaataacttggagctaactagaatgaaagattgtcagcatccatgaccctcatgatctagtaatcttggatgaactccccaatctccaagacatccttatctgttgtgtcactcaaccaatgatactcattcttcgagaaatagaagtttccatttttatttcgggcaagacttcaagtcaaagatccttttcatattatgagcagacagttggccccaaccttgtttgtcgtacaacgtgaatagtgcaactgtaaagaccgcttagctttannnnnnnaattagcagataattagggttaattatgaaaattatttatt

SEQ ID NO: 161726 - DNA, 2639 bp, Cannabis sativa
accccaaccctggcctcagaccccaaaccctgacattggaccccggcctcggcccaagaccccagccccagaccccgaccccgactcggatcccgaacccagacttgacttaaataaaatcaacaaataaaaatgaaaataatattcataaagcacacttttatttttgtgattaaataatatttaaaaaaaaaaatattaccaaacacaaccttaagctaaataatcataaatattttacctctaagtttaagaatggcacttttgactacacgttcacagccagtgcaacacattctcactttaagatccacagtctgcaatgaacataaaatttaaaataataaaaaataaaatacacacaaaatttacacggctaagtttgaaaaaaaagttaaattttaaataaagaaatcttaaaaaatgattcttctaaaatatatgtgtttatatttagtctttcatcatattcttcttttgaagatacctttatgctttctacactaggcaaattatcataaaaggggattaagaaaaggcatatgtttcggatcaatattgtagcttattatacttaaactttagttaattaatttaataacacgtcatgacataattaaagatctctaattatatgatatatatgttatccaagagcgcggatccatagaatttgattttaattaattttgagtttatggtacagtactgctactaacttgattcaaattaaaaaaagagattatagtaaaatattaatacatatatatacacaaaaaagaagattctatataggcaaaacatgcattaatatgtatccaactttttataaaaataatatgcttaagcctgaaaggccacatttactttcatactagcgacctttttctcgattttagctcttcaaataactcacgatctaaataattaaagttctttttttttttttgttataacatgtacaagaaaaataaaaaagagcgcgcacacgtacagttgattaatttaacatggtcgcatgcatattaattaatataagaagttttcttggggagaaagcaaaaaggaaaacttttcttgttggtcagtattgcttaatttttcattcttatatattttcaaattgaaaaagaaaaaaaaaacgtatatttattctaaggtaacattaataatattgcatggtactagtttaaatatttgtcaaagtatttaccatgtatgaaaacttatgatttattacaaaagaaggggagatgaggagttcatgcttgttgtgagaaggatggaccatagagatattaataaaattaaaaaaagaaacatatatacatatatatatatattggatattgtaatgaaataagtgatatatgtatatatatatgtgtgtgtgtgtgtggggtacctgcaaagaaagaggacgacccttcttgggcattttgttgtggtggtgatggtgttggtggtgggtgtgggggtgatggccgacgcttttgtagtgaacactattggtatctcgaaagagatagaagcaataagcaagtgaagatatgataggaccaaaggttttttctagtaccgatgttgccataacccaaaccccctcttcaactatttatactactactatactataattaatattatacaacacaaaacaacaaaagaaagatagggggaaaaccaaaccctcttcccttagctaatattacttagcttaatcacaacatattccactgtggtgggtggcttatccttgaggtttatctctttctaatatatattccaaaagtatatataaaaattcaaataatgagagaaagagagagctaactttggttatttcttaatgtgaatatggtttgaattaatttggatatatagtgattattagctagagagtaccctttggacagggaatggtatcaaaacttgtattctcacaaaatttaatgcttgaaacgtgggtcaagataaatggactcttgctgacaaaagggaatataagcttcattagaggatttggttttggatgggcttaaggaagaaaattaatatggacagaagaaatatatataaatatatatatattatttataatatatataataaaagctgggtttgatgcaaagtaagggaagaacatatattctgaaaatcttccctcctccccttttttttttctcttctctatcttatgagagaatcagtaacatgtatccacagatatatgtgtcatactgtcatatatgtatatagatagaacattagacgctatattatttttatatatacaaaagttatattctcatgatgctattatatattagttaggcttgtttatatatgttattattttatgctaggcattaaaaaagggaatcattaggtttggccatatactaataataataataataataataataataatttgtatatagagcaattaagttctaaagagaatatatataatcaactagctagctaggatttttgtgaaaattaaacataaaactaagggctcgttttctacgccgtattgtaatgtattgtattgtattgtattgagttggattgtgttgtattgtattattgtattgtattagtattatttaatataatacaatgtttggtat

SEQ ID NO: 161727 - DNA, 3521 bp, Cannabis sativa
ttttttttttttttttgatttacttgaagtacgggatataatcacttaatatgtgtgtgttggctgtgaaattcttactttgctggtactaggttaaaaattggtgatggttttcattacaacttgaatgccgatggctctacacccgctgaggtcatgggaattgactacaaatcaacagtaaagcctgcacttgaatcttttgctgaggatataaagaaaagttcgttgacgaaattggaagagttgatctctattcagcagcagtcaagtgatattgctgcaaagatcgaggaaaaaagaaagactctggcaaggcttgaatcacaaatcaatgaagtaagtgcaccagaactacaaataacactttagggttttgataatcacatgttcttgctgttgttgcataccagcttcagtattaaaacatgaaaaagaacatgtgacaagtagcactcagtgttacttcgtattgttcaatcatctatttattattattgtatatatatgactgttgtatttgaaacttgcagtgaacctagtcttttcggttgttttctcttccaagttttttactaattggaacagtttattttcacccaaaggatttcgttatgttttgttaagctctcttcaaatacttatctttgatcatggcataaatgatgtattttcagatggaaggtcaacatcgtttgttggagaatgaaacagacaagtacacgtttgaatgtgccacagaagccaaaagaatggtggaagatttaaagatggaggctcataacttggatgttgtggaaagagaagcagccgatattcttaaggtactgccacatttctatgctaaagtttaaaactgcgcttttgatttagctttaaaatgtcaaaatatttgtgattgaacatgtgttggactgactggaatggaatggaagacatgttttaaacagaatattacattaaatgtatcatatttcatatgttttctccctgcacttcttatctttcttcttatctctttggagagtgggggtcggtggggagggggcaatatgtgctctatgggtgtcatttgagtattgaggatttgccttcttatgggtttgtctacaaggtttgttactgtgaatttggtggtttgcatagcaacagtctcggcttgtttgtttatagttagaaagaagtaatgtatttcttgatttgggttggagcttgtaattaatattctcatatctttcaactttcttgattaatgcttactcattcacaagtttacgacatttttcgtgttttggtttcgtgtgttcgcttacttctgctgtatttaaaatatcaatttaactattatttttgtgtagacctcaaaacagaagttggaggaagcaataaaacaaagtgaagcagaaattcagatgtgtgcttgtgaactcataacactagttgatacagtttcaaagttcaaagagtatatgcggtccaagcttctggaaattaagaccgatgtctcggaaactgccactgctttatcggatacttacagaggttcctggccaccccaatttgctgttgttcttgatgcaaacaagtaacttaaaagaatgggaatacatttgtaaggtaaacaaaaaagtggaaaatttatcattctacaattcatggaatgtgttttttgcctggtgtactatctttatttgtatataaatgtttttattgaattagttgagtgatgaatttgatttcaagtactgtctttgccccctatctgtgaaaattgacttatataattccagcattatggcatatttaccatgtgtttcttctggtgtctatcggcctttttatttttttatatatgaaaaaaaaaagttattgtaagctaaaagaaggtttgctaggacagagaagattcattctgtattgtacattttggttttttctttttgaataaatgaggaattttcaaaaaagagccaaagatttaaaatgatatattttagcatatgatatccgtgtatacttatcaactaaagaggaggaagttaaatagagaaaattacattttacaacgtcaatttaaaattaaatacataaagactagacttttagtgatggtagaaaaatatatatttttcacttattaaaataattagggaaccaagccgcgctatgtgcggtgtttgtcctatttttataattttttatattttgtttttttttttttttatactgattatatgatataatcggatataaaatattttgaaatgcgtattatgagcaaaatgttgatcctttcggatccaattatagctccgggaagagccctttgattatatccacttaattcataagcctgcttaaaatatctttgagcacctttgaatcttaagctttaattgccacgtgtccagtcataaagttaccatgtatattagaaaaaaaaaagtagaacaacaatatacaatatatatagggacatgattttattccgtgatgtactttcacggaacgtattctgtggtacattagatggatttcagtgtacattagatgagtctcagactcagggtacgttactatttttttaaccttaattacccctagatcaacccaggccctcagatcaaataactctccccatctaacggctatcgtacatcacgggacaaaatcgtgtccctatatataattaagttaattatattataagtgaaaatcaaatagtatatattttcaataagggtaaattgcggtataaatatttaatgtttcagattttatacacttaaataccttatttttatttttagaggcaaaaatacctaatgttacaattctcttacacctgttactatcactttcgttaagtcataaatatggacacatagatgatccagatacattacatttatttttgtttattattttaaaacttaatgttcttaatatcaaaaactaaatgctacttgtttcaaaaaaaaaaaaaaaccagttctcataataattttcacatataatacactggttcactcaattatgataatttgatatttcatctctctcttactatcaaaaactaaatgctacttgtatcaaaaaatcacataaaaggtgatagtgtataaaacgtctgattgtgtaagaggtgttttagtaattaaaatcacataaaaagtataaatgttggtcacaccttatggaggtattttgtaaataaagtgtcaatttatattttctatgcaataattccataataaaaataaatgtaataaaaaatataaattttcctattttttatgtatctaatagaaatttgtaattaaccctcataatattaattaataacattagctaaattatatatattttttcaattcttatgttattaatttatattattttactgtaataataataagagttatttgcagcataacctcctaaagtggtcaggtttttgcaactaatctcctaatttaaaattttggtggtaaaatttcctaaacccaagttctgttagc

SEQ ID NO: 161728 - DNA, 6670 bp, Cannabis sativa
  modified_base (6644)..(6645): a, c, t, g, unknown or other
ttttttttttttgttaaaaatgaaaaaatccctagtaaatattagtgttatattattttatatactataaatataatatttagattaaataatatataaataataaataatatttatcaaattgtaacatacaaatacaaataatatttgtcaaattgtaaacttttcccgagagcattgcaaaatcattggcaatgcataattttttttaaccttaaaaaccatgaaaagttctgagagcatcgttagataatatcgtaaaagtattataaatgcatcgttttgttcaaaagtttgcaaattttcaaaagtttaggagtgaaaaaacaaatgcgaagaaaaccaataaatcatacatatatttatttgaaacatttaaattcctgatgtaattaagtgaacattcttagaattttatgtttttaaatttgattttgatgaattaaagcattacaaaaattaaattggtgcttccatgcgtatttcaatggtgataggagttgttgatggggcgattagtgtagtcaaaattttacaaaagaaatatatttttgtaatcaacatatttttttagcttacgggataataagataatgaagttttccaatataatttgtctctaaataaacaaattaattaaatctctctagatatgttggacggtgctctaatcacatgaaattatttttttttccttttagaaaaacttacaaatagtgctataaatatgggtcatgttttttttttgacatgacacaaaacgacacgagtttgggtggcacgcatatgatcaggcacggaaaaatataaacttgagcacaatacgatacgacacgatggtataattggcacggtacaacacaaaaattgtgtttaagcacaacatgacgcttaagcacaacacaaatagactagaataaaagacaaaatacgacaaacccgatagttatgcaacgacacgttaaaagataatgataataaaatttaaacataacactaaaaattataattctatagttaaaactattaacaaatatagaattaaaactatatattaattttttttagagtatggcttaaaaatttaaatatagtttagtaaatttttaaattctaattttaataatattttcatttgtgtatacaatattattcaaaaattatataaaaataattaaaactataagaatagtttagcaattagctcagtaattataaaaagatgtggaagataaaaatataaattcaagctcaaatatgaaaacgagatgaccaacatgtttaagaaaaacagacagatttgagtaaatcaccgcacgaaaatactgaattttttttttcttatgatatgcgtatttgatttattatttaaataaattaatgtaaatgagacaaaaaatattgatcacatctggtctccaaactctccatgccaaattaggtaattccatataagtgctaacttgggcagaaaaatggatcaattagaggcccattattgagggtggcccacaagaatgagtccaagaagtattacatatttttctttgaattgaaagttgaaactcaaaccaacggcgccgtttaaataatggtttgttatttataagagaattgagatctaaatcaaaaacactttgtttgtgctgcctgtcacctccaaaatcgaaaatgggtcatgtgcatgtcacatgtaaaacaatttcattatatcgaataggttaaggtagagtaacatgtgatgttcaacgatataatgattcaaaccaaaaatattccatcaacacattaaattatacaactttatcttcaaataggaacaattaacagcttttttttttttttttttaagaaattgaacatttttgtgattgtggttatggatgggtttatgatttattcacggctctttcattgcggaaaatgcatgtgggtgtgggtgagaaagagcaagagaacgtgggaataattgaatcaagactcagaacaacccctcatacgtacagactttcaaagacaaattcacattattattttatatatttctattttagttctctttagtttcagagctcacatgctacaccttgttgtattacttgtcctggtcccttatttaaagctgaacctctggttggaaatgacaataaatgtaaacaaaagtacattaattctcaactctcataatcactcacttaccttctctttttcttctctctttgctctctcatccaattaataataatggccaaactcatttttgcattggcaatcttggttggactagtactcaatatttctaccaaagtgggtgcatttgccgcatctggatggactccagctcatgctacattctatggtggaagtgatgcctcgggcactatgggtaaaatagggaaattaatgaagccatgcatagtcatagtcatagcattgtatatgtaattatggagttttaataaatttgtttttgtttttttttttccaggtggggcttgtggatatggtaatttgtatcaagcagggtatggtactaggactgctgcattaagcacagctttgttcaacgatggagcttcatgtgggcaatgctataagatcatgtgtgactataaaacagatccaagatggtgtgtcaaaggatcttctatcactatcacagccaccaatttttgcccaccaaactttgctcttccaaataacaatggaggctggtgcaacccaccactcaagcattttgacatggctcaacctgcttgggaaaaaattggtatttacaggggaggcatcatacctgttgtgttccaaaggtaactattctcaactctcttttttttttgttcagaaaaaaaaaatgaaaaatagcattattacaaagacttttgaaaaatatcacttaaaaacaaaaattatctgcattggtacggtggttggtaattacacaaacgaatggtttctctcaggcaaattttcattttttatggtttttaaagtataaaattataaaagtatggctttttcaccaataaaaaaagttattttataaaaaaaatttaaaaaaaagttaacaaatatagaaaaaaaatagcataaagtaattagttacctctttatggtaactgattaacccctcaagttatcataagaatatttatccttacttgatttttttttatattttttaatttttttcgtcaatttttttataaaatacttttttttttgaaataaaagttttacttttgcaaaaaaatataaaaatccataaaatttgtaatttactttaataataataataataataataaatgtggggatttggttttatggtgcagggttccatgcaacaagaagggtggagttagattcagcatcaatgggaggaactactttgagcttgttttgataagcaatgtaggaggggctggatctattcaatctgtttctattaaaggctcaaaaacctctggatggatgtccatgtcaaggaattggggagctaattggcagtctaattcctttctcaatggtcaatctctatcctttaaggtcaccactactgatggtgtaactagacaattcctaaatgttgttccagcaaattggtcatttggccaaacatttgcaagtcgagtccagttctaaaagctcaagaatagcttagggttcaaggtttagggttttgatcggataggccgaggcgtgcttggtattttcatgaagcagcccgccgctattttctggtcatccaatcagattgaatgaatatattttggggagcaaaaacctgtgaactcaaagctaggctagctactaccttttcaattattcttcctttccttttgtttctctaatttagcaagagaaatggaacaggcatatggccaaggatgtttctccttcctttatgtgtggattttgtatttgttatagtactcaaataaagagtgtattatttgaaggtgcaatttcgtcatgtagaaatattacttttcgcaatttacaatcctttgtagaatgaaatcttgttgtaatattcatattatttaaacttgaatgtgctcttttctttatgaagtaatttggttttactgttattatgttgtgaactatatggtgtttgtacatttaaatactttgcattgaggtgataatttacatacaaacaaaattataagaccaaatagactctataattgattggaaatagggttgtgcatgcaatttaataataaccgatcgattcaattataatcgactgtcaaatatcggatatttaattgtgatcggattagattaaattttatttttgaatatccaattgaatcggattggatgttggatagggtgtccaaaaatttaatacatccaatatctaatcgaattaattagtatttttatttattttgaataagtaattagattttacgttttttatacgtaaaatatatatgtgtatacaaaaatttaacattaaaattttatatatacaaaaatttaacattaaaattttactttattttcttagattagatgaatcttatccaatccaataaatattagatctaaaatattagatagattcaatcccatctaagaaatactaagtttaaaatattagataaatctgaattaaactaatagatatacatgaaatatatcaaatagataaaattgattcaattagatgactaaaactaattgaattggatgcataataaaatttaacatctaatatataattaagacttaaaactttgaatgttccagaacattcctaattggaaagtcaatcttattgcataggttaagggcggatcataggccctttacaagttgagtttcattcacaattaccagctcaatgtgagacctagatgggccatagcccaatttattagttttaaaagtaaatgggctaagcatgacactcggcccatttaagttacagtgaccgttaggcaggcagtcacattagtcaggcgagggaagatttattgactctgtatttatacttttttttcttcctaattagaaaattgactaacactcaaaagtcgttaagttgtcatgttagagacccaacagcacagaggttggtctttaaccaattttcaaacgacatcaataggataaaacgacaagcgtttcaaccaatctcttatccggaaaaggaataaacaaaaggaaagtccataacaaaagctacaataattttgtgcatgtttttattatgatcttaattatgagctgttgactatgacatgtgaagaaccgttgaattggaaactcttaaattattactctaaactaactaaagaagctttattatattcatttcaactccatccaccaacttgtttttgtttaattagttgggtcactttgttaattgatgggaggcaaatattgtgcttaaattttaagttcattattcaattaaggaaaaaaagccaccgaaatttcctgatttgctatctacatatataatcgacaaagcttatttggattcgttaagctttttatcttaaatcattcttcattacctaataccttaattatattactcaaccgagctttactcatgggatatgttgaccgattaacaaatgctaccaagttttgtatatataacatgagaaatatcaaaaggtactatagtatccttctcggtgttatatttttattggtgtaattaattattttatcttatataatttaagaaaataacttttaaaaaatatcgttaactaatcatacgatgttacttataaaaaattaaacactactaatgcacaataataatgctaatataatatatatatacaaacacatcaagtaagtgtatttgttcttttggtcatagaactaattacttaatgtccttttaggagaaatttggttctgtacgtagtacattttatgagtttaaaatatatatatttctaccttgtctaaaattagttttaagaaagtagtaactaccaatgtgttagaataatgattttggttattaattataagaaattttgataaagatgataactttatttttatgatttatagataatattttagttacaactcgcgatattacaattcaaaaataacatgaaattattaggttcacatttaacatacgtatatgggttaaaatataggttaagcttgattagatggacatgattaaattaattgcataaataaaaattaagtagacccactaaaataaaaaattaacacgttaatttaacacaattaactgtacatattaataaacaaagcataaatatgttaatataaaaataaccactttatattaatctattaatgaaattatgatatatatatatacatatttactacatttatttactaatataaaaaattaaaataatgaaacattagtttattttggagatttgataactaacgttttattttggagtattatattttgaatttagaaaatgcgcttcaattttgagtttactctgtaaaatgaacttattgaacatataaataggcattataaatgtcaaaatgacctgtttatttattttttttatggctacttagtaattttccctcccgaactttgacatatactaaatcgtgttccttgaatttttttggccgttaannattccccctgaactattgagattgt

SEQ ID NO: 161729 - DNA, 2103 bp, Cannabis sativa
ataccttaaaacaactgtgtcaagtttctattacagcagatactagtcaaaatctcaaattttgagtgtcataaatatattgtctaacaattgaatattatattgtcttgactttgatagaaaagtctactattattgtatatgcattatagtttattattattaatttatctggagctttaattcattgtaaatttttaatattatagtatatattagaaacatggtttagttagattatttactcttaagacaaagataagttgatgaatttatataaatacatatatactttgaaaaaccgaagtcttccaattaatgaatgatcaattaattgttgttaataattaattgtaacaggtaatagcaagcaacaacaatttatcagcatatcttcttttcatcacttttatatataaatgtggaaaaattaaatcataaatattttaattgtttcaaaaaaaaaaataaagacgaacttttgctgaaatattaatggtcgaagtaatgatgatgtttttgctcttttccctgctagcaatggaatcagaagaataattaataacaataataattcaagtattatcagaagaagaaattaataaaaccacagtaataataactccccacgtgactgacaataatagcctttagtaaattattactactgcatgaagacttgtgtagccaaagtctaaaaaataaatacatatatacagtatatatatttgtacatatatgtcagtgtcacccctcaattatttatttatttttggggttgtcggcgttttattaatttatttttattaaaaatgatcttttaattaaaatttgaattaattaaaagtgttgtgttgagaatatgggaagaaatgaagcgtggaggtgtggcaaatgtaagctgacaatgcttagatatatggaaattaattattattaatttaacttaattattattaattccttattaatatttacaacatgggacactacttttcaagggaaccttccctttaaacagtcattttcaggccgtgaatctcgttcttttgcttcctctttagggtttattttttttttatgtattatcagtttattgtactcaatatatttgtagataattttttatagtacttgttatatatactaattcggtaacaagaggggtactatatataaatatatatgatcatattcttcaggagctaaaactactttttttatccaaatttgtagttgtactatagagaattaatatatggattagtacataaatatatattgagggtaggcaaaggtgggggtaatttgatcaattattatattaatgattatgacttattgctgttgtcttattgaaagggatagaattgatttgtaggaaaaataaaaaaagctaaatatataacattgatgattgaaacaagagatgattgcattattaagtttattagtccaagcaatatatttcaaagccccatatatatatgaaaacagtgcatgtgcgccttctctcaatgagttttgatgctgatttttttaccatgcatgaatatatgcaaattgaaaacccaattctcatttaatatacatatatatatttattatccatatatatatataccttcttatatatcactccattaaaaacgtaaataatatttacatttttagtggtaattttttaattattgtgactacatatgtcattttatagttataataaaacaattattttttcatattaataaatggataatatttaaattcaaattgttgtttagctgtaattaatattttttcgaaattaacatcttcttgataatacatatctaactattattaatttttcactaaaaaaaacattacttttaataataactgtttagtcacaacataattttttttataattaaatttaatttttattcacaataaaaagttacttgagattaaaatataatatttagacacaaattgtcatctgtcttaattacaataaattatattttttttatgattaatacttttggctatgaattttttaattagtcaagaataataatttataattagtcacaattttttttttatttttaatca

SEQ ID NO: 161730 - DNA, 1920 bp, Cannabis sativa
tattttattttaatttgaaggaacaaactgaagaataaatgtatttttatataagttgttatctcaatttttatccactcgacgtggcatgttctcatagtcaaaacaaaagacgcgtggaatacagactgtcaataatcagacaaatgcactctatgcagtcccaagtcaagaacaagacagaggtgcacaagtattggcagaaccctagcaggatgtccaacaggttggacagtttacaacctgtagaaggtcgggcagcctgcctttcgaaggccagacaacttacagcttgcaaaaggctatatagcatacagcccacaagagacaagtgtaagacaactcaccatgaactggccagggtagtgttgtacggttcatgaactctaaagatgtcaagatcacaagataaagtcaaacaagacaagtctttagatcctggtcggaccatagctagacgcccaaggaggtttgtccaaccaaggatgtttgtctgactaaggaggtttggccgaccaaggaatattggctggccaagctggacagcaaagctatatggagaagctgcacgacaaagttgtacaaagaagctgaacaataaagttgtatagaggagtccgaataacccccaaaattagagttggccggccaaaatgtgcagacagctcctaatagactaaacaagttgcggggtccacaacaagccttctaaaagattatcaagctgacctactattgcgagacaggtccaacaacccatgaagatagggatattccctcaagatattaaaactatattgtagggatttagttatcttttttttttttttgtaattcaaatataagataaaaaagatgttattttctctattttaaatagatatccttacctatttgaattgagatattttgtaagccctacaaatataaaggacatgagatcacatgaaaagggacctcaatttgaagctacacgcctatagcctctctccctcgaacatcacatgccatttatgcttcctagacactaagtcaagtttctccataagttcttctcaagatctcatcaattcttgatttctaacacattgttgtcacaattgtaatactaaagagagtcatagttagaaattacaaggttttaacctgtgatctgcatggtattatctcaagagtgaatacaactaaaagaggagtaggtcattacccgttcattaagggggtcgaacctcgataaattcatgtgttatttttaccattttatattcttatttacacgtggtgataatcagcaattaataaggatccgttgttagttgactaaatttcaagtcaacatttcggtactttcattgagagctgcaatccaagtttcatccatctctttttgattaatcatcatggttctaaccagaagaactactccttcagatacccctcaggatcctatggttgtggatttggtgtgcgtggtcctcctagtacagataacccgtcaaccctaccaactctaccaatcctacaaatcgtactaatcctgttgatcttgctaattcgacaaatcccaatgatcaagtttttccgcttaggaccaaaccactagcagcatcccagacagaagaccctgtccacccggaatagcctccacataatgcaactgagactgttccacgattctacgcaagagaaacaggactaggatttggcgaaccatctattggcaagcctcgcttggacttgtaggatgattttgagctggctagtcttagagaagtggtaggccagatttagggtcatgccaactagcttcatcatgacccataacaaacacgcgctgttatttttaatgctttcgtccagtagagacgagaattcctaaagtcgatggatgaccaagaggccatcctctaggcccatcag

SEQ ID NO: 161731 - DNA, 4338 bp, Cannabis sativa
gagccgctgatcacataattagacacgctggccaagcacattactgcgtgggtgtgaccctggagggctccaccgtattgtagctgacccgagtaccaccccttgagccagaagtgtatgtacccatcggtgcatcccccgtagaggattccaccatcctgggtcaacgtcaaggctttgaccggagagtacttggctgggagggttactgtaagagagtgtggctggtctccggggcaaaagttgcggcgccagactttgacggttgcgacgtcggaggctgtgaagagaactccgtcatcggcgacgatgatggcgttgatgggctccgggtgggcttggatggtctcgatgcatttgaggtctgagattcgccatacttttacggttttgtccactgatgcagagtatagtatgtcgtctgatacgttaatggctaatgatgttataggacccatgtgcttcatctgttaatttggttcatcatataatgattaatattgtatatatgatcataattaattaaaaatatttataataaatgtatacatgcatatacaaatggttgatacaaatgtcataataattaaatggtgtgttgaattttacaggtataacggatgtgctgactatatatatattaatatgtatgacatgacattaaatatggatcaaaatgttaggcttatactcaataaagatcaactatatatatacactgcaacaacagtagtttcgtgtgtctattatatagaagcgatcataaatatgtattacaactgtcttatgtaataactaattaatggccattcataaagagcacaaccaatatttctgattccataactatgcctttccatgcagtactatataatatatatacatatttcctaattaatataaaaaaagaaattatttaaaccaacaaaccacatgtatgagggaaagctagatatatagtcttcttattaattatgttcatcaacttactcccttaattaataaatataccaaatgcagacttaattaacaagatttggttgttcaatatcaataacatttttattaatcttatcaatttatagccgcgcactcagcttaaatattggagtcaaatattttgttaaaattaatctcataagctgagcataaatgcaaataataaattaattttcagaagagttgattgatgtatttattaccatcttatccttgccggaaatatagctccggacatagtttccagtcctgggaatagtagctaggcgaacatgcttcaatccatcgtcccaagttctctgccaaaccctaatcttggcatcaccataagcagcgtaaaccctatcatgggacacctctaaggctaccaccatgaaagcccttgtcttaagctgcccgcactcggagaactccggaatcctccacacccttatgacgttggtatcggagcccgtgtaaacgaggccgttggatgcggcaatggacaagatctggccgtccttttttaggacagaggagatgcaacggtaggcagcggcgtgtgggtccccaacggccacacccacggccaatccaacagtggtcgtctggtggttctgattattattttgtttggaagagtgagggcgcggagagagagagtgaagaggggaggagacaggggaggcatggaggctttgggagacggaaggtgagctccggcgcggcggcgtgtaaggaaactcggagaaggaggcttctttggaggaagtgcttctaaggaacttgttgttttgggttgtcgttggtcttagtgtgaaagacgactggtttgaattaggagagttggaagactctaacgatgccatttgccactacgttgcttttctttattacgttttctttttcttttagctttttggtcttgcttcgcctccatccatcggtcgttatgaaaacttatatatgcttatttgagtattgctattgggtagtggttaacgatactctttaaaaattattatgttaaattatatatgagatccgatatttatttagaccaataaaaatatatattgacacaccactagtcctctttaatatttgtgatgcttatattattattggagcattggcatcttcccaatgctttctctaccaaaaaactcaatctgttcattgggccgattaaaaataagtctaactcaccaaattaaacctaaataaaccgctcaacctgactagtggttttttattttatttttcacatttcacttctattatatataatatattgatctatctttgcatatatgtaccattgtagcttgtagtactaattgtatttatttatggatttatataatttgttttgacatatataaatatataggtataataaactataaaacttaagctttcattatttttgttacaagtatatatatttcattatttatatatttacttatatgtatacataatatgtatgaataaaaatgataagtgatacaatttatgagtttttttttatttttgattttataacttttttttttaaaaaaaaaaaaaccatttttttgttggattggtggagttaacccgacaaatccatcggtcggtttaatattttattttttctttatttggggttgtacttaaaattttataattcgacctttacattaggttaaaaaaatatatataccaaatctacgcacattgctatcttttacattcctcataataattattacgatagtgggagttgtgttggtagggtggggaattaattataaacaataaatttttagaactgattcaatgtaatttatcgatctctatatagtttcctatgatatttttattgtatatattaaattaaatttagtgactgatgtaaaagtaaagggagctgttgtgattttgtgtcttgagagatctaaagtactaatttccaatccccatcaccatatcaccatattagaccaaacctctaattatgtttggcactcaagctagacataagtaaggcgtatgattacattgaatgagactttttgagagttgttctcctgaagatggatttccatgaaagatgggtgcatttattgttgagatgagtcagtttagctcgttgtacaattattaaatatggtaaagagattggccctataatcttgactcgtggtattcactaaggtcatcttatttctctctacctttttctattgtgcgttgatggtttgtgctcttcttataattaaagtatgaaggaaggggttggattcacagttgcaacattgctaatggagcacctcgaatttcccatttgttattcgtggacgacaagtattgtaaagcaactgaattcgaagcgataaaaattcgtgagcttttgcttaaatttgaaacagttgtaggcgagaaggtgaatctgtgaattttttttacttttttagcactaattgccagtcccacatgaagttgcacttgtctcaagttctccaaatgttagtgcaacgatattcatggaggaccattattctgggtttgagattgtagcccgtgatgataggggtgctttgattggcaattgcactaagcgagctcaaggtcaaattgatcctcaggtggtcgaagctatgggggttcgagaagctttaagctggattaaaggcaaaacattagttaaagacagattgtttggttgtagttgaagcttttcagagtgatatttattgggtttctttgtttagcttggtcattgaagattgcaaaaaacttcttactgaattacaatggttatttcttttattaagcaatcaactaatttggtagctcatagatttgcaaacgcttcttttttaatgcttagttgtaacttctattcaagggatgtctcaactgagtttgtattaggggtgagcaaaaaatttaagaaaccgaccaaaccgagtagaccgaccgcccgaatattgaaaaaactaaaaataaaaaaaaaatcgccttcgattaatactacctttgcacggtcagttttagtgtcaatggcaaactgaccgattaaaccgacaaccgaccgaacatatatattatacactatacatatataatataattatttttatacatatttaatatacaattttattaaactaattttacttcttatttttttatttaaagtctcaattattcattgctttattttattataatttgatgtatttacgtattatatacacatattcataaaatagtacgagtttttcatataacttattaccatattagtagcacaaataatttgagcaaattctaaaaagtttatttacattatttatttaactaagaaag

SEQ ID NO: 161732 - DNA, 3089 bp, Cannabis sativa
ttttttttttaagtttatataaatactaatttgttcaaatcttgaccattggatccttttaatgtgtaaaacttgagtataaaaaattatgttataaaatctgtcccaaattaataatttcaataatatattgaatataaataaattatttaacttaatccaatccaaataataatcatgttattcaaattcaacccaacccccaataatacgtactaagttcgtgtcgtgtaatcgcgtcatgatctgaattgccaccctcatccatatgaatagtttttcttttttggcacaaatacgtggagtaaagctttactaatttatgatgattattctcgttaaaacagatacaatgtaatgacttaattttttttttcacttgacatgacaaggagatagagaatgggatcagccatatcatattctcttttctactaatatttagaaagacagtacgcctcattcagaaatcagtttgaccatggtgaaaaaaagtcatttcataccgtaaaacattagaatattgtgatcctaagagtccaaaatctttttctctccccaaatctcgttaccttcaccaactaaggtttaattaattcacaactcatccttgctggtagtatcttcccccatgagctcttcgagggagaactcgtcctcttcaatgacctctccatctttgccatcccatgcttctgtcttgacaattacaggggcaccttcaagaggtaagtttccttttcctccacgaccagcatccctcacaaattctctggtaaaccaaattgagtagtttaaaatgttatgataattgctaccgtggtattcgaaattcttagtacaaaagaagacttacatgatatgctcaagctcaaaagcactcttaagtggggcataaacacttttctttacgtttagagcaaccaaagctggataaccataaccaccaactccgacacgcttttcaaggtctggctgcttaccagcagctgcccatacataactgcaaacaatataagatgttgactcttcagcatatagtaatgtaagatgtttctttaagttaaatgcaatggttaatgcagataacttaaaatgacattgtaagacgaaatgggacagaatacaaaaagaattgaatgtgtccttgcctatagggactcttcttgaacttctctgcaaccgacaataactgctgaacgtacttgttcctcccttcggctttggaatctaagatgtctggcaggaaagccacgaaacatattgcagctgagccacatttttcttccattacatcctacacaagaagattacatcactttttaagttaccaaagtaccgattttggactgaagaaacagaaaggagacttgtgcctacctggccagttagctcagtcacttcaggaggtgcaatatttgtttccaactgttcaagagcaaatgattcaattgctgaagcagttcttgcaccttcaaaaggtgtgggactatctttatcagcaccaaacactaagatagtgggaaatccttgaacattgaatctgctcatcagagactggaaaaatgatcccgttagaatcaaatggtttcaaagtttcataccaaaagagcaacataagttccaaggaaaaccgacagcttttcaagtaaaaagagaattaaaatgaaacaacactaaggaaattatttgcatctttgcagcatttccttgcaaaaggacacggcgaaagatataatatcagaattcagccaaagaaaaagaaactaggacaagagatagcaaaacaatgtgctggaaaagataatttgatttgaattatgtaatcgtcgatagaaatccaacattaccttttctgaatcacagtcaacatgacctaacttgacctttccctttaagttattagcagccttcttccactcaggggccaaccttttgcagtgtccacacctaaaaaggagaagatttaaatagagttaacaatattgcttgattagctgtatctaatcctcagagatggacagtcaaagctgttaaccgatatatagatgatagggatcctaccaaggtgcaaagaactctacaatccagagatctttacttttaagtacttgttcgtcaaaattgcgagaatttaattctactgaggcactggcttcagaattttcattcgatccacttgatccgcttgatccccctgttgctttaccatctaaccgttcctttagaagtccctttatctgttgcaggcaatagaatagtcaacacatactgattacttttatatataaatatatatatatatataaatattttctcccctttaccatcagtagtttctaatacattacaagttatgagagttgttaactaaacgttacaaagccaagttaaatgagagttattattacacataaaacactttagacattgtacaaaagtatgaaatctatcataccaaaagctttcacattttggtcgattaaattccaatggaacatcagtgattagaaacaagaaaggaacagatcacaatatgaattaacaaacctgggagagagcgaagtttgcgatggatttgacatcccttgctccttgatagtcgacaggaggttttccaggtacaaataccttgattgttggaaaccctctaataccatattcctataaaaaaaattaaattatcatcctcaaaaacattaacagagggtcaatctactattaattacattcacataaacaggacatagtagcttttacattaactttttagatgtacttcatttagaagaactctgaaatagagctgcagtttgactcatgggactatgaaaaaagcataacattacattttgaataagctgcgttctcgcctatacactattactatcccaagaataaaataacaattctcctttatttcgaaaggttgcccgggaagaaagtaaggtcaaatcaaggcaaagttacattattttctaaaaagtcaaaacttagtgacaatttataggctagtagtagaatacctgagcaagggacttgtgttcatcagcatcaagagctgccacaccaaccacacccttcaagac

SEQ ID NO: 161733 - DNA, 3041 bp, Cannabis sativa
atttattacgtggactaattaaatagtgtcacgtgtactgtacacgtagacattccaacctggcacttaacacccaaaaatggatggaaagggctaagtgctaacagaacttgcatttaggaggttttaccaccaaaattttagaattgggggttagaggaaaaaaccttgctactttatcttcaaaaataattatgtctcttcaaaaaaacattctttactttatcttccccttcaaatacaatatccgcaagaagtctcgcatttctcgtctcaaaaaaggacttggttaaggatcataaaacataaaacccctcgacctttcaagatacctaacaaaatagtagttaaatattcttatgtcgagtttattttcatgtggcctaaaaagccttggctcaacttgacaaccacaaatgtgcaagtgtttaatactaggcttttttcctatccaaagttcataaggggttatagatactaaatttctaggtactctatttacaatgtcgattgtagtcttaagtgcttttacccaaagtgatttaggtaaagaagaatgattaatcatgcttcttaccatgtccttaagaattctatttcgtctctcatcaataccattcatgtgaggttaccctagtattgtgtattgcaggacgattatgcattcctctaagaattggcaaaaggtcatgaatgtttctcacttgatctgtcatacctacaatagaattcactgccacagttagacttgacaactttaattttcttacctagatgattttcaacttcatctttgaaggccttaaaaaacgtccaagtcttgtgacttttcatgtatcaagtataagtaccaataacaagaatagttgtatataaaggtgataaaatattgtttgtctttccaagaagttgtagggaatagaccacatatatcagtatgtatcaattataagacgctagaactcatattggcacctaactttcctaacgtttatatgtttccctttgatacattcgacacacacatatcaaggtcaatgtaatcaaggggtgcaagtattctgtctaacacaaatctccctattctctttttagaaatttttcctaagcgtttgtaccataaagtgatagaattttcatttgataatttttgttttgtacatcttgatgttgtttgcaaggttttatcaaatgaagcaatcatattaagcatgtgtaatttatcaattaaagaactagtcacaactgagtagaattaaaaagagactaaattattatcccaaaataaacaagaataacaattgttgtccaaaacaaaaataaaaaaaatcaaattttttctaaatgacaatactacataagtctcctccaattcaataaaatgatcagtcttaaaagataatctaattgtaataattgcttcaactaaaactgatttgcgctcacccacaaggatgaatctttcagtatcatttggcaatcgactccaaatgtaatcttgcatagaaacacttgtgagagtagtagcactaaaatctacccaccaagtattaccaggtacaaaagttaaattaactttaatacaaacaaatgtgaaaagtctacctttcttcatacgccatgagacatatttgggacattccttcttcacatgcccagatttcttgcaaaagaagcaagcctagtccttcatcttgagtcttttgtttcttgggttgtgaagttcccactgcagtttccttatcctgagtcctctttcgcttgtttccttttgaggtagatgaatgatgagcactttcagtcttttctcgcttcactctatcctcttcttgcacacaatgtgaaatgagctcatcaagagtccattttttcttttgaatattataactcactataaactggccataatgtgcaggaagagatatgagtactaaatgtacaagcaagtcatcagagagatcaagctttagtgcctgaagtttggaagcgatgttagacatctccataatatactccataatgtttcattttcctttatacctcatatggacaggatcagctaaaagcttgcttgtcttagcctttgcgttctttgcaaagcgtttttcaatctctttcagtaaaccctttacagatacctcatcgaatagcccctgaatgcttctagaatgatgcgctttagcatcattagacttaagtgattagaacgttcccacttctcaaagtttgttttttcttcagttgaactttctctataagagacgttggttgttcttttttaaaagcatagtctaaatccatgcactcgagaaccaacaaaatattctcgtttgagctcttaaattttgtactattaagcatagatattgagttcatgttggtagtaatattagtagcagaaatagtaactagcaattttagaacaaataactacataagctcacataataaaaattcatgtcataacatactaaaaataatataataaaatatttatataagacaatttttttttaattgtagtggtgggcccattgaaacaagatacctagcacaatattgatgtttatttggacagaaacatcatcttgtaagtggtactctcaacgtagaaatcaaatgctaataataaatcctaacaacaacctttctttgggaagatatattgttcacataaaaactttataattattactcattcattcttgcatgtacatttgttgtttggtcaatcaataaccttcttttgggccgattattgaccacataaataagaaatacacacatcatattatctcaaaataaataaatttagacaaaagaggttactttgacaatattttacttcaattagtttatttcaaaatatgagacatagaaaattaaacaagtacccaattcaaaatcaatgcataaatatataagtaatatatagtatgttactgttgacttcgcttttagccaacaataatgagtctttttgataagcgataaacgatatgttgtaatgagaataggtaataaagcaataataagacaca

SEQ ID NO: 161734 - DNA, 2173 bp, Cannabis sativa
gatgacaactctctgcaccaaaagctctcataaataatggcagcagaaataacattcaaaattaacaaatagcagagtgctcacctttggctcgtctggactgctcggttcatgactgctgtaagtcaccaagtagttctccccaggggagaaatcaattagtccaacctgcagtttacaactaaattataaagactaaaatataatatattagagaaaaaaatagaaaccaagagccaaaaacaaacctggggatgtgcataacgcatcaacctattaaaagtagaggctccaccccaaactgcggcaccttgtctgtgcacagttgctaagtaagtccccaatggggaccactggacaaaactttccgtccagtactgtaacaaaatgaaatttaatatttaagggttataaacaataaatggtaagtgcatagccaaaagtatagataatcctgtcctaatagatcgaagtttattgtccatttggaaatttgcataaatagtaagattgaccaagagctaatttcctacaacactgactaacaggtcacttaaatcaggagggaagaaaagagtaaatatcaaattaatcactcacagcacgcttgtaaacaggatcgggcttcatttgtcgggcatcattccatagaacttcagtatccgtaccagcacggataacaaactggtctctggctttttcatctgtaagccatttttgaagattttcctgcaaaaatataacagcagacacaagaacaatcaacaatcaacgagacataacggcccaacttttaacacttatgactgttcgtttcaacttgctataatccaagagtacagataaaaatcttaccccaggagtataaggcacaacttccggaggggcccactcatccggaactttcatatatttctcaaaatcatcaaacaggttgacagcaaaaatatgtgatctgtccaacttgtacccattcgttttcagggctagttcagcttcctacaaaggtaacaataacaaagagaagtgaatgagaaacaacaattacctgattcttttaagccaattttacaattagcagttcactacctagccacaaaagtaaaacaaactagcagttccatcatcattgatttttaccaaatgctacaagtaacaacataagtcctcttagaatgacttgtagaacataagttaagtctttagaaattgaatattgtagcctcttttaaaacatccagcttttactatagaacaaataaaacatatatctaaaaaagaaaagaaataagtcatttactgaagtgatgttcacaaaattcaattttaatatcatgagttggtaaagtcttaaattcgtacatacaaaatcaaaattcttccaagcaatatcttaaaaaaataaaaaaaataaacaaagagagtgagttcacctgaggagtattgaattcaacaaaacaaaaccctaaggttttatgagtttctggatcagttggcatccaaaaaccatcttccttgattacaccaatctgactgtaaattttacgaattacaccctccaatttctcaaacttctctcgaggaacaaccggaatattatctacaactataatattaccaaacccagaatcgaactccatattttcatcccggaatacatcttcatcgtcactaaaaatccaagttcacattaagtaacaaacaagccagctaaatatacatatatatcttcaaaatcgaaacgtacagcattaattaaatcctaatacgatcaaaaatgaattgcaaagcaaatgtttaccttttgatgccgaaatcttctccaggaggaagacgaatagagtccagatctatctcggataaatctatacctaatcgcgccgccgtggtctcaacctcgttgagtagcatgacgtccgccatggttgtggtacagcttctctctctcagagccaagtagaaggctagggttttgaggagttatccggagagctctctccactgacgatacgtagattttagttacagaggaatatggtgaaaatgttcgtagggtttcaatgaaaacgagatcgaatcttgggcctcaagtttatacacaagcccaggcccagcccagacccattaacttatttccgtcaataattaagggaaatttaaaaaaaaaaaaaaa

SEQ ID NO: 161735 - DNA, 8329 bp, Cannabis sativa
  modified_base (8304)..(8304): a, c, t, g, unknown or other
taaaataaaacataaggtgggaatgagagattgagagaggaggggtaaaatgggtattattgaaaatgtaagatatttggtggcttgccttattgaaacttctttagtatagctagcttgtggttgtggtagacatgggaagagacaaaactccataaaaagacttgtttgatagtggcaaaggcaaatggatttgatgaccaattattatgaggttaacaaagattccatcccacattggttgagattcctagtggtttcaaatcaataggagaagaaaacaatacaaaatatgaacaaagtttcttttaactaattaaacactagtttgaaatccaacggttgatgttaatgggccaaaaaaccaattgcttgtgttgagtggacaaactttgtatgtcacacccaaattaacttattaataacttaaattatatatgtaatacaatcacgtgtaaatgcttcaccataatcacaactgtattaaaaattcaaaaaggtaaaatttttgtgaaaaacttaattgtttaatatctataaaaagaaaaaaaaaacttattctcaattaactttctatttctcataacgaaaaaatccttaaataatattaatcaattattaattaaattttgtacaatttgacagttgtaacataatagatgttgtaataagttctttgtgtaaaaatcttaacatagtgacacgaatgttcctaatttggttaccaatattaacttttcttctatttatttaaacattccaaataaataatagaaatattatgtctttaaaagaaaaaataatagaaatatttgatcgagttaattacaatttgacatttgtatttttgagaagaaataaaatcttaacgactagaactaattttcgcctcaaactaaggaacggtgaaaagaaaagcagaagccgaatcaaagtcaaaatcgtcagtcactcactcatagttgttgagctccacggctccacccatatattactagctcatccttactagtcttctccggcgacccaatacccaattgccctatttgctcacataacccgaccctttccgctgctggttccgttcctgcctcaatggttctataatgaccgtaactcgttcccggcggactcattccactgaacgtcacgaacccaccaaccccaaaaccagttctggcggcggcggtggcggagggaccgccatgagagttatcgttcctcttcagggtgtggttcaaggtagaggtggccttgttcttggctcgcttattccttgtgctctttactatttcttgcaactctacctcaaacaaagacgtcgtcctgacccacctcctccgtcttcttcttcgtcgtcttcggagggtcggttgtctcctgggtcttctccgtcgacgtcgatggggcaattggccgaatttcctttcttgccacggaccttttctcggtccctgctctcccccaggggttacggaggaccggttcacgtatcgggccgagccaattccatttccaaaagcggtgattcaccctactatgttgggtcgaggaaggtctcggatgatccgtatgacgggttggataatccgggtggtgttattcagcttggtttggcagaaaacaaggtgggatttttcttcttctttctttttgagaagttgggtttgatatctgagtgttgaggattgatgggttgtttgttttataactttggtttggtttggtgtgtgtagttatcattggacttggttcaagattggcttgtggagaacgcaagggaagctatattgggtcatggaagaggaagtgtttctgagctgagtattagcaggattgcaagttatcaaccttttgatgggttaatggatttgaaagtggtatattctcttgtcatttctttttctttgttttgtctttctccggttttcatggataatgcatggaattctctctgtttcgtggcaggaatattattgtgccttgtttttaattctgtcattagagctttatgtgacatgaaatctctctttatgtatgcctagttttgagtgttagttgttaatggttcaattcaactattcaagtcaaatgttttgttatttgagaatggtgggaaagcgagtgtatttgcaaacatgaaacatttaataaaaggccgttataacttcaggttacaattttgtggttgcccaataggtctggtctctctggttaagagttcgtctctaatgatatgatggaattggtttttggtatgcatttcatctcaaatcgttctggatttggagttcaattactgtttgctcctttttttttctcctttttgtgtaatgattaaaatgaaaaaaggtatcctatttggttcattcaatttttatcttctcaatttcgttggcttttcattattaacacttaaaatttccacaggctgtggcaggtttcatgacgcaagttatgggaaattcagtttctttcaacccctctaagatagtattgacagctggtgcatcccctgcaatagaaattctaagcttttgcttagcagatagtggaaatgcatttcttgttccaacaccatgttacccagggtagtcactagtcaccattgtctccattcaaaaatgtctatgcaggtaaaccatttgtactacaagaaagctaaagtttgtaaacatgtttttgcagtttagacagagatgtaaaatggcgaactggtgtagagataatacctgttccatgccgtagtacagacaacttcagcctaagcataactgctttggaattagcattcaaccaggcgaaaaaacgtggtataaaagttcgggggattataatttcgaatccttcaaatcctgtcggcagtcttcttagcagggaaacactttacagcctggtggactttgcaagagaaaagaacatacatatagtatcaaatgaaatatttgctggttctacttgtggaagtgcagagtttataagcatggccgaaattgttgattcagaagatctcgaccgtgacagggttcatgtagtgtatggtctatcaaaagatctctctcttccgggttttagagttggtgtcatctactcccataatgagcatatcttgactgctgctaagaagttgactaggttctcatccatatcggctccatcacaacagttgcttatatccatgctttcggatgcaaaatttgttcagaagtttgtgaagatcaacagagagaggctgagaagaatgtaccataactttgctgcagggttggaacaagtgggtattgaatgcactaagagcagtggaggtttctactgttgggccgatatgagtaggttaatctcttcatacagtgagaaaggtgagcttgagctctgggaaaggctgttgagtgtagctaaggtcaatgtaactcctggatcttcttgtcattgtattgagcctggatggtttcgtttctgtttcactaccttgaccgaagaagatattcctgttgtcatgaaacgaattcgtaaaatatctgggatctgtaaatctcatagttaaaaatttttgttggttcattgtgtacatggttagggtgattataaattcttttgaagaaacaactcttgcaataattgggagagaactggtttggtatgggggatattgtgaactgaaacaaatcaaaagcgagtaataaagtaagaactaacagcactatgaactaaaaaaaaaaaaaacttaaatagttaatggaactcttgatttcattgcagtgaatctctctgttcacatgaaaccataaaaggctttgattccatttcatttttgtttaagaatgagatacaataataaacaaatgatttttattgtaagactaagaatcacaaatattgaaagaaaaaaagaaaaagaacaaatgacttttggtaatctcaattgaatacaaaagaattttctatttgtttcctatctaggagttgcagggttttgctccataaatgattcactggtttaaatactgagaaaacaaaagttacccgtctaattggttttggtaactatgattctgaaccatttctaatagactcaagaacctgaacgacctcagccatgcttggccttcttgaaggaacatcagaggtacagataagccccaacttcatgacctgaataagctcattctctacaatacccctcaagcttctatcaaagcaatctgaagccgagccacttcccaacaatacccttacatattcacatagaaccacaacctcattagcccttggactctcaaccggttttctacctgttacaagctccaaaagaatgactccaaaactataaacatcgcatttttcgctcaatcttaaactctgagccaactctggagctacgtatcctacagaagtgtggaatctggttaggctataattgtccaaaataggaagcaactttcccaaaccataatcagacaactttccattgtagttttcatctaagagaatgtttgtagacttaatgttgagatggagaatagaaggtctacaatcatggtgaaggtaggcaaggcctctagctgttccaagagcaatcttaaacctcctggtccaatccagatcacgattgccacctccattgctggttcctggatagtggagaccgtgtagattgtcgtacaagttcccatttgagaggaactcagatagaatgagctgcattgtggaggaccagtagtagccttgaaaggctactaaattgggatgtaacaggttgcctagccgtcctatttcctgctcgaattcatcttggtttctgattcttcccaaagtctcgagctttttcacagctattgatactcctccctcaaaagtagttttgtagactgtcccaattgatccaccacctatcatacactccttgtcaagtaaagctttcgtgccagattcccagtcttcgtactttgagggcaaactcttactgaaaagaacaagttttccaataataacattagagtcagttgaagcaagtggggtgctctcaacaaccattgcctcatcctcatctttcttcctcctctgggccatgatgttcataatacatactagacaaacaccagaaagtatgactgcagcagcaacaatagcaacaattgcagaaacactcaaaactttatttttcttttgcttggaagtgtttgtgctattgccattagccgagcaagacttgtccaaaggtgcaccacaaagaaagggattgttggaaaacgctgaggcaccataatgctgaatggttgcaggaatggtgcctgaaaggttattataagagatgttaaggttggttaaagtagttagatttccaagagaagaagggattggccccaaaagcgaatttcttgacaaatcaagaatatctaatcttggcaagtttcccagggttgatgggatggttccattgagctggttttgatgtaggtcaaggatttccaggttagtcatgttgtacagagtggttggaagttctccccctaagaaattgccggaaacatccctgcaaaaaaacagaggatattagaagtttagtatgtcggaaaaagcataattgagatgaattttattaggtaacatagtatagatttagaattaaaaactcacagctctcgaagaaataagcagttgcttatctcagtaggtatttcaccaatgaggttgagattgtgcaaatccaaaatctgaagcagctgaatgctagctaactccttaggaatcgtcccagttattgagttattacccaactgaatcaccagaagcctctctagctcagcaagctcagttggtatactcccaatcagcttgttaaatcccaggtttagaaccttgagatttctacagttcgttatgcccaaaggaacctccccatctaaaccattgcctgaagcatcaaaaatctccaatatgtcactacaagttgtcatatcaggaatcttcccagtaaacccattatatgatacattgaaacgagttagatttaccaatccaagaaccccaaaaggagccgagccagtgaacaagttgctgccaagatccaacacttttaagctctggcatgccgaaagcaacttttcaacacttcctgataaagcattgcttcttactgacacataatccagccttggaatatcacacagtcgcaagggaatgtcaccacttagattgttaaatgagaaatcaaagccctcaaggttggagcatttggccaatgattcaggaaccaaaccagaaagtgtgttatgagacaaagaaatgaacttggtcttataacagtacttgaacaaggctgatggaatttgtccagtgaaaccgttccttgacaaatctaaaagtctaatgtttggtaaatcaccaataaactcagggatcgatccagatagagcattggagctcaagttcatcttccacaaagtttgaatatcaacatattcttctgggatatttcccttgaagagatttccaaacaacgtaagaaccctcaaatattttagccctgacagagctgaaggcagaattccatccaagctagtgttccaaagaacgatcttgtcaacaaacccctctgggttacagaacacaccactgaaatcttggcaaagattgccactaagaacccacgagctcaagctattgtaaggatcatttgtgacattccctttgaattgaagcagaatctctttctcagttgcagcaaaaaccgattgaattccgagaaaaaaccaaagaaagcagcacggaacaagagcatgagaaaaacgaaaatggtggacttttctcatgctcgaaaacaaagtttttgcagcaaaaatgaacaagatgcctacctatccgtttggcattgtgacagttgaatgcgattaagagtagatccaacctctgcctctactctaaagctcaaaactattgccattgttgccgtttccgattcttggattttcgaatataacgaccaaaacaactcgatcgaaaccacttaacaacatttttcaccaaatgggtctcactcaaaaaacaaaaaaatggagaaaaaacactaaaaaaaattcagcacatacccaattcatatctacttgttttagcaactgggtgtttctcaaacaaggttaaaataccaaaaaaaagaaaaaaaaattgaactttagagcaagaaagaagaaaaatggtgggtgatagagtcggaaggtgtgggctttaattgctaatgagaaatagtaaaaagaaaacaaaaatggtggccttttgggttggcttggctacaaagagaaggtaacagggtcagagaccgtgagaagcaaatttaatataaactgctttttggagaaagaaaaaaaaaaaacacagcgcaacatttagccacgaccactagccaagtaagaaaactcactcaaccacgtgcatgtccattttctttctttctcttcatccatttatttcttctttttttaacagacaaaatacttctactactatagccagtaccaccactcactcgatcgtctctaatgatatgaaattaaaacaatgatgaacccctctctctctctctctcagcagagtcagcaccatgtaggacttgtctctctctctctctctctcatagcatttactctctctcacctaccaggaccaatacctctaccatcaccattatgatgagaatcaaaaaccatccccacatagacattaacgctaaaaaagagacgatgaaattatgaaattagaaggaagaagttctcattaagaaacagaattgttctaattgttcttctctctctctctctataattttctggtttgaaagtttcttctatctgtgcagatggagactttgagaggacattcgttggtttgcttttattattattaattaatcaattaattaattaatgaaggcagcagcatacaaatcacgtcattctattgtcttcttaatttgattaattaacattaattaagtccttaattgatgtacatttttttaatgctgaatgatgagacctcttttttgttccttttctacttcttttctctttcttttggttgattaatctctatttaattaataaccatacaaacaaaacaagaagtgtataagacacaactaaaaaatgtattattttattgtgtgggccaaatctgttatactccctttcttttgccacattttcatctgttgagtttgcaattgtctctataaagttaataaaataagagtaattttatttacattctaaaaaatttataaagacactctattttaataatttttantttatataaaatatatatttttaat

SEQ ID NO: 161736 - DNA, 5583 bp, Cannabis sativa
caaagagacaaccaacaaatttattaattcaaatctaggttccccaactatccctacctacaatattcgtgaatcataaagctatagcaattactgtgtaggtgtccaaaaggactggaacctcaatcatagtcaaagcagactacatgtcagatcattcagctaccccctcttgaaaacaaaaaccacattcataaatataaaaacaacatcattttaataaaaaacaatacttacttgcttgaggttgcaggcttcgagtctgaagcaacaccaaagttaacattctcagatccactcgcagaagatgaggaaaacaaaaatggtgaatttgaaactttatcagcacttttgaggccaaagttgaaggatggagcggcagcgtctgtatctcttgatgatgcaatcttacccccaaagttaaacatggaagtagaaacgtttgattccatcagcggagcagcaccatcagttattaagaatggcacagctttagaatcagcaggtggggctgttgtgcagggagatgtacttgggagcacaatgttggcactcttttcagcagtcatggacccagcaagagttcctttatcagttttcttattaaattcaggtcctgcaggtttactttcagtcaaagctgaagttttctcaggtatagcatcttcagttgcaatgcttgtcctctctatcaaagaggaattctcctttactctaccctcacccaatgaattagatgtacacccattcgaatggatatcatcatccaagtcaacaaaatcctgcaaaaagtattcataaagttcaataaaactttaagccatttaaaggtaaaaatgtacatgcatatcacaagaaaaatgcaatccatattataagcatgtggttgataaagaaaaggagccatagtaaaaattggcgagtatatatatgcttgcaactaggctcctcggttaaccctataatatttgggggactgattactatagtgattgctttgtaggtttctgagagaaactcgaacctcaaaaactatgggagcaaaccacaaagtagggggaaaaacacagattttttttaataaaagattaaataccaagaatcaaataaagtataaacaagataatacctcatgggcactcatccgaaatgtctttctcttatgttgaggatatgcagcggagtttaatgcagcaggtactgaagttacactactaggcacagaatcttttctaggcacaatagaatttgcaccattaacttctgaggcagtacaaactctatcattcattttagaagtggattggccataaggaaaatcatgcttaaaaccattttctttagccttgtctagcctttgagaagtaaactcctgagcatcaggtattctcatatcatgtgaattatccaaagacttgttattttggataccactgaaaatttttgatgagtctacatcatcaaggcttttcaaagcctgtccacgtagcatagatggtgacagtttactaggtaatttatccattgaagcatgtaccttggactgagatgatttttccttaggtgagaccaacttatcaatttgctgcaatatttttgaggccatctcactggatttaaagggaacagttgtattagacacaacattttccccattatcagttgatggtttaaagaagttacgcctaggttcaccaaatgatggcttcagtgctgaagatgatgagttttgacttccagctgaaccaaaagggctaccggagacaggtaaactcaagcctcttggagataaaaggtttggcttctgacgaattttacgtatagcaccataggatccaatgtcattgtccaaaactgaacttctgcgttttgaagactgcatagaatttaatttaaaaaataagtatcttcttaaaactgtaaacaaaagacataatcgtaattaagtcaagaaatggtaccccctgtttggatctagaaagtagattttgatcaggagcaacttgagaagatgatgacggaccagtataaacatcaactgcattctcgacattctggtatgcaaacagactggtgtaaggtcctcaatcacaagtatttgtaaatttcaaaaacaatatttacaaaaaatatactaaccttgaggctagtggtctgataaatccgagaataaggcgtccgggccatactataaatagcagatcttcctctagaccttggggttataaaaccattttcccgagcttcaacatggcctgaagttcttgggacaagcggtgtaacaggtaatttcataggagaagttagattacgggtgtacatagcagatgaattctcctttcctgcttgactttgaaatcctgacattaatggagatattggccttttatgcatgtaagactttgcaagctctaccacatcagtaggagaagtagcatccccttcaaggacctgtcaacattattacatctaacgcaataagggtgatgtaaaaaaataaatttagatgttttctaaattgcacaaaagaaaaaattaaacataatttaattatcatacagttgaattgacaacaggagttgaaacaaactggcttcctgtcatattttcgagcaaagtagtttttggcaatccctcgctctctatcatatttcctcggacagaagttgtagtaaatgcctcctgtctatcagcagatcccacttctttcaaaggaatcacttctggctttttctccttattttcaactgccaaaccaacagttcttgaatgtagtagagctgtcagatgatcaatctcagatctgcatggcaattaacatttaatgacgtcaacatcacaataaggtcagttcaagtgaaaataaatacaaaaataagcactcgtggtagtggaaaaggaggcaataacaatatcctaacaacaagacatactgttaaccaaggcatgcaatagtataataaaagaaacaataaagataagaagtcacaacattaaacgctactaataaattgataatataaaaggtgtcgtcaagtgaggctgtattgtacaaggtaaaaaaacagtacatttagcacaatagtaacaacaattttacaaatttattaatttaataagaggaaaataaaaaagtaaatgtgtgccacagaacacaacacaacaaacttgcctggtaaaggttttttgctgtagaatttgctcaagctcagtcaactcctctctactagagttattacttggtccatcgctttggtcaatggctcctttttgtgctccagaagaatcctgttctcaattgaaaaaaaaaaaacagactatgaacaaaaactaatcaaaacaataatcaaaatgagattacccagcagtctgatgtcttgagtaaattacagtaaagtgtctaatgatatgaaacaagaagtcttttaaaacttgtcactgaccaggagatgaaatgagaaaacaaacttaataatatgctcatgttattttggaacaactttctataaacatcttacagaatgttctgtttactagtaagaaagcagataagaaaacatatcaagaccacatcctctcaagtctcaagagatacgtactctcaagtcacgatttcaaacagataatcaataaagagctttcaagatagttctgccccttttcttatgtcctgtctctgactcagacctaactcaataagcactagataaaataaatgaaaataccatggtaagaatggtaatttgaacatacaaaaggctaaagaaaatgctggacctacctaacctaagcttaagtgaagaaaaaacatacccaaataatggaatataaactaactgaacttcataggcatacttactatactgctttgtttagattatagaaatttcacatatgcataactatagatgttaacaaattgcataagtattcaaacttactgtggcaaccgtttcttgttgcgtattccgtgcttcacagtttgcctctgtataatttcgtttgaagtaaatagaaagtggttagaaatcagtgactaatccaagcacgcaaaattatgcctgcagcaaactctactgctaaaagaggaataacttggacacaagcactaagcagaatgcaaataaagtaatttttatatgaaaattactgtgaatgcaaaatatcttgctacttgctattcaagatggtaattagacaatagcctggctgtagatttgtgaagtgcgtaaactttcttttctctaaactaggctccccacacctaactctacaaactcaaacctcaaaacttgtgcgagcaaaccatattccaaaccatttgacatttgacccattcctcttgagtcaggcagcaataaactttaatttactacaaagccagttgaaaaattacaaccgaacaaatcaaagtattttgacttcacgaacaaattttctaaattttttactaccaatataatttcatacataattggcatttgataataattaaaaatgcagttctcctgagcaaaagacttagctcctacaattgtatcgccaaacagatttggctcaatttaatcagcctgcctccgcaacatattaatgtaaagtgtttttctttttttttgttttaacaatatattaatgtaaggtaagccaatccgtcaagaaagaatcatctttctacaaccacccatcttttagaccaaaaatccccaaaaccctaatctcaaattaaaccctaaaatcaccaacaaagatatagacaaacacacacaccgctcaagattacattacccacataaagaaatataaataaataacctggccgtaacggggatgatggaggctgaggctgcggctgcggctgagtaatgcgttttctgaaaacagtggagaaaaggcggtgggcgctagaactaatgaggcggtgagccggatcgacgagcttcgagagccaacctcctccattgttagggttacgaaacaccgtgggagggcgatcgtatggcgtcgaatgagtggtcttcctaaaaggcttcttccgaaacttacctcctgcccctaatcctccgccttcgtacggttgctgctgctgctgctcccgccccgtcgccatgagagtgataaagatagcaaatttgaaagctttagggtttgagttccgaggggtagagagagaaaacggtgcagagagagagagaaagtgcggcaataacaaaattagggtttttaattacagaaagagaaggggggaaatgaaaaatataataataaaatatttggaaatgaagatggaaaaacaaaacacgtgcgaatggggggtgagacaaaagaaaatattctcaatatcatgttctacctttgcttaaaattaaaaattaaaaatctatcagtttcaaaaatatatatttttctaaaaaatttctaaagtatattaattagttaggtgaaaccaaataaaatactttttaacattttgtcccatttagggtctgtttagaaacagctgtgtaattactatgcagtataattactagggtagtaattacactgtatagtaattacaaggtgtgtttggatgtcaagtggtaa

SEQ ID NO: 161737 - DNA, 1328 bp, Cannabis sativa
taaaaagaatagacttgatctgattacaattttctttgaaaaaaaaaggtcttatctcatttttgcatattttgtgaaaaaaaacctaatttctatataacaaaatgcataaagaaaacaaaaatattataaaaacaaataaaaactcaaagaaatatcacaacaaaaatataataacaaatatttaaaattaaatcacattagaaatttttcataaaaataatatacaacagattatcataaactatatatcactcataatatattttgtttgatttatcactcaaaaaaacaataataaaaaataaatatcactatcatagattataaatcatcataaatatcattatatcaaaatataaaaaactgttattctaccaacaaacttaagaaaacttagaactaggaatatatctcattaagactgaacgattcagcaaaggaaaataaaaaaaaatagtaaaaattaccttacctctaacgaatgcaaggtcgtgtacgacagttcggagcaacgaacttgtttgattttcttcttgcataaataataataagaacaaataacactataatgaaacctctgagttttgcaaaaaaaaaaaaaaagaagaaaacataaatgagggaatctaaagagcttacaggttgatcgtgtgtttcatcaccgattgtgtgccgtcgtcggtcgtataaggtaggccaagaagagagttcgattgtggctttagctcagacctcaggcgagagaatggagggatcactcggtcgtggctgagacctcagacgagagaggttcttagagttcagatgaaaaaagaaatgaaagttttgtgtttttggctcatacaagagagaggagcaaaggagactgatgtcaatgagatgtgtgtgcgtgagagactttagggttgcttagggtttttttgtttgttttatgtataaaatataatatttatacatgtattataatttgaaaaaaattattaattttacataagtaaatttataaaacatatgtatatattttttttcagatgtaattattcttatatagagtttattttattaatacgggacttaaaaaatgtataactaattacaatatagaggttattcttatttataactagcctggacttgatttttttataacaaattagaggttattgttgaatagagtattcttgaatagaggttctactgtatatagtaagtcatagcacatgggttgggttgggttcattgggtcagcccaacccatttccaacccatatcatgcggcctgttaattttttaacccaatataatttgggaaatttacatggtat

SEQ ID NO: 161738 - DNA, 3153 bp, Cannabis sativa
aaaaaaaaaaaaagaattagttcctaaaaatttaagtttttgacgaattccaaaaattgaatagttcacggatcaatttcaagaaaactatgtagtatgaccgtcacaaaaggacatttggttttatttttgcattgtcaaaatgtaattattattattactttaaagtgtttagttaatgagggtagggtttgtgacattattaattaattatttcaatgttgaaacagtgttcaaatggaggggtagtaaccataacgtggccgaagtatcaaaggcagattatgatagctgcaacataagaaaccctatcaatggaacaatctacaagaccagcccagtaaatattcccttgacaagtaacaacacaactcgctacttcatttccaccatcgctgatgactgcaccaacttcggtcaaaaggtaaccattagcatggacaatcaatggttggacgatgatcaccacaactctgctccttctttcccactcaacaacatcttcctcactcccttttttgccttttttctcaacattttgttattatttttttctccctaaataaataatattagtatactaattatatattgttcatccatgatttcatttttgaattatttcaattagtgtaacaattattattttattttaccttgtatctgtgacaaattttaatatactaggttgtataattaattttctttgtaatgaggtttaattaagtgatgttaagtacaatacatatatgttaatttttttttttaattagataatgtatttttattttttaatttttaaaataggagatttgagattttaatttttcagaattttttttagctattacggctacatttatgtgctctttaaatgtaacgatatatatatacgtattttatatatacaataaaagaacgaattttattgttatacttattttatacgtattttatattaatctatctatgtataaggattatattaaaaatatttttacaaaatttaaatttgattggagaattaattactttcaaaatatattttatatattatgtctaaatatatattttaaaaaaataatgatagtgatagatacaatattcttaatttatagttatctgagtgtggttataataaattgtaagtgaaattaaggtttaaatatgggtaaatactatttaggatcatgtattttgcaaaaattactaattggaccatctgtttcgttaaatgacaaaatggatcctatattttttaaaatggtaaaaataggaccctgaactgattttttttttcaaaataaaatttgataataatccaatctaaatgtgttatatgacaaaactgtatatattttctgtattattagttcgtgttaggaattgtgttcaagttggttatattaaaaaaaagttgtccaaaattaagcttagaatcctatttttactattttagaaaacacacactcaattttgccatttaataaaacaaatggtctaatctataatttttggaaaaacaaagggtccaaaatggtatttatcctttaaatagatatatattttatatataaatgtgattatataatatttatttttaaatatatataattaaaataaatttttttatataaaatatctaaataatttttatttttaaatacatataatatatactattataaaattaataaagaatattttgttaaataattaagatattctgttaaaattaacgtaggaactaaaacacttcgttaaaccaagaattccgttacatagccacactttatatagaatagatatgaaattcaaatttttatcatcaccaacttaattatatataaaaaaaaagtattaaatgtagaattgtgaataaattgtttaatcaaaaccgaaaaataaaaaaaataaattgtggagttttaacataagtcatattgtgtgaacactcggtcaaaccgagtataaaaaaagattaataaaagaagtgggtgagacccacataattattgttaatttattcaaacctcccaccgaccttctctctatcttctctctttccttcattctcttcaaaacaccaaagacaaacccctcataaccaccacttgtggaacatcgacgacccacctccagtcaccgtccgatcacagagccaaagttgcagaccactgactgatgctgatctctcatgcacctcaagtttggtggcaaacggagcaaggacgcaaccatacgaaagcttcaaagttttgccgtcaaagctttgaggggttattgtgattaactctggtcaccatttgcaaaatggttgatataattgaaatcagcatcgcgaggggaagaccccccaattaaatcatctcactcaactcattactttgacccaatgagatttgggtatctccaaccctttgtaagtaattttcagtgcttttggtgtttgtttcgactaacgggttgtacatttgtgatctacgcatcaagacaattgttttgatatatactacttctatttttgataatatttctggtacaccaatctctattgccaccgatagctaatgtgcaccgcttaggtgaggttttggaacttcaaatttcagatatggtcatgttatatgtcgtcgtaatcggtttgaagagtacattataatgatgataattatttattttattggacaatgtaggactaagtgacatttggagtgtctaagctatttgaacttaagaatcggggggcttaggaacgtgtcttttggagaaagcttgacgatcctaaggaggtagggactcaacttgtttattgaacatgattttatatgtgttgacactactacaaataatcaaattcgcgacggtcttgagaacgatttttttttttaggaccgttgctaaaaatattaaacaacagtttaagactgtcgggaaaaatgagtatttccgacagttttttaacaatagcttaaaaactaggcgacgatttttattaaaaacaggatttattttttttaaaaaaaaaattaacccctatacccgacgatttaaaatcgtcaggtataccctttattattattatctttttttttatatatatattacttataatatatccctctcattttttcagcaaacccttctccctcc

SEQ ID NO: 161739 - DNA, 2887 bp, Cannabis sativa
accatcttcacgaaataggggtgaagtggtaggagagccccatgcttggcatgtgggccggaccatgcacatataccctcgcctgggtcattagcaagtttcccttcaaaaggaagacttgcacatccctaaggacaccatcgttgtccaagttcctaaggcgcctttcagtaagtttagacagtgggaaatccacattggactgtcaggtaactacaatttagatggcttggcctccttgaactcttggttggtatagtcaacacccaaaactaaggggcagtcgcagaagtcgtaaggtttctcatcttctaaccaccatccaacctcgtggaaaagcacaagggcgtacctttgacaatcaacttggtcctctacttcctaaacttctagatccccattcggcaacacatcttctccctcaaagttcgacttgaatcattcacgatgcatggccatgagtcaggcaaattttgtgttgcccgggccaattttacaaaaagtttatttagtacgagccaggttccttgaacggaatggatagctctacgcgagatgatctgctatagtaacaacaatctcagccttgactttagggtgaagcgacagttcaggatccgctttaggtagggttataggaatgtttggtcaaactttgtatgtccaattagaaggtaaatactccttccaaccaaagttgtactctctgatgtacctactatacacgtcacctccaatttggtctaggtaaaagtgactttggatggtcaaagtggtttgtttggattcctcactcgatacgtcccactcctcaaagctagatgaggatttgttagaggaggatgaaggcgatgctcagagttttggctgatcattgaaaagtaattgtagcaagtcgtcatcaattcagtttttacctcctcaaaagttgtatggattcatctacaaatgaaggaaggggaggtaaataccagacatagtgaaaagaaggttttttagaaacaacctatatataccgactaaaggaacatacagatcaaaaagaaaggattttgtccgaatgacgaagagcccaattcaaagatgatcaagaacgagtttgaaccctaaaaaaaactaaacttacgtgttatgcaagtgctggtttaaccaagtttttcaaggaaaatgtacgttggctaatgatttagtagattaactctgtgcaaaaaagtttatcaacgtatatcagaataaattcaatcatatacccaaacaacgaagaacattcatggcataaacttagatttttgcagaaaaaagaaagcacataacatcaaatgtaagaaaatgaacgaaaatgtatttgaattcaagatacttactcgctagagaaatggttgtttgaagttctttggttaggatgcttgaagatcaccaggcgcgttcttgcaattcaaggatgaaaataatagctctctagttcttgaaaaagttaaaagtaccaaatgaggttttcattttcattttataaaacatttgatgggtacgggggtaatttgggcacccaaaccaaattttcatttccccccaaaaaattgataatgagtaccttatggaagtacaaccgtcagtacaactacctagggcacgaaatcccatatgagagcattaagtacctcacatgattgaaggtataacaaacgacaacctattattacttactccaccacgtgtcacattatttatgtaggtcgtgagccgagcaagtcctcacaccaaccagaaggttcctatgtagacttgggggtaaatgtaattctgaattttggtcgaatgacgtggtagatccctttaggtgacacgtatcttcacctcgaggccaaggcggatgaaagagtctcatggatcgactgcccaagatgtattcaagatcagtagaaacaatagagaaatcaagtgtaacttgtcgcacaacattatagacctgatcggaaagaagcggtccaaattgtgcacgatccaaccaatgggaaacgcgtgacataaatgtatttaataaagttcctattttatatgtaatcaagacctagttaaaggaaaattccattcatatttccagtattttaggaaaatcagtttattccctaaattggtgggttgacaattgaggaaacccaattctattttaaacatctcctataaatagtggaccaattctactgtaaaggggatcgatttttgagaaagcatatacactactcatttttcttgtaaagctttcgagagagaacaatctctctttgtttctttactcataagttaaatacaataataaggggagtaggccattaccagaataatagggctgaacctctataacatatcgtgttcttagttaaactcatatcattcatatatttcttaaatctcatatatcttttgtcgctttaaagattcagtatcattgaccaaaaacaatgtcaacatatatttttcaagaactattaagaaacttacctgaccgaaccgaatgctattgataattcttcatagtaataaaaaaaaaagaagagaaggctattacaataattagaggccaaacatgtattgtttattgttcttgttttattattaattactctaaaatattacaactttaaggattcaatgtcattggctaaattgagttcaacattaatgtttctaattaaagatatacatatttgatattgtattgttgtctattttattgtaaaataaaaataaaaaaaaatgtgatggttagatttgtaaataaaatgtaggctaattaggatttttgctccctgaactttgacatgtaccaaattatgccccttgaacttttaaggtcgttaaaaatgtcccctgaactattgagattgtt

SEQ ID NO: 161740 - DNA, 1808 bp, Cannabis sativa
  modified_base (1094)..(1099): a, c, t, g, unknown or other
aaatgacttgagataaaaaaaaaacaaaaaagaaagtgatgtgagagagtgaaaaattatttttaaagtagaaaacaatattttaatcttaatattttgttttttttaaaaaaaaaactattatcaaaaaacaatgtcaaatgcacttatttattatttgggataagttgagaaatacaatgagctatcctagttcgaggaggtaccgtcgccaattgtggattgctgctttgataatcttgtgtgattttgatcaccgtatcagaaaaaaaaacatgaaagagaaactatttaaaacaaagtaactaaattttaacctaatttcaaatatttgatgaggttttgttttagaaaaattaaaaataagtaatacaaggatttaatataaaatatgagtagaataaaataattagcaaataagatgtgtaaaggaaaattattaagatattagaatttacaaaattcaagttcaataatatttataaatatattgattcttaagttttagttataattaaaataaatcacattatattttctaaaatatattttttatttaagcacaagtttctttcaaaaaagtgagatttttctttacttataaaatgtataatttctaagcatcagttgtgtaacaacctaatgaaactacaagaaataaaagaaattatgtgttaggcacaatataatatttatactctaaggattagatgtgaacaatttaataaaaaacattcaatcaaaaaatattatatttttgcacaataaaaagctaagtaaaaatatgctcaaacaatcaagaatatatacatgatattaaatatgaaaaatacacattcataaaagaaatcaatagacaatattgcacaaaatgaaaaatcggttatattatttattaaataatataatatttaagattaaaattgtgatatattatatatattattatgagtataatatataaatatgattgggagtaattacatacatgtaataattacaatataatatgattgggagatacatacatgtaatattcataaaaattgtaacataagatgtgaagttactaatattttgtaacttccacatgnnnnnnaattaagtgtgtaaaaagtggttaaacaacttaatcttttgaaattcaaagctacaatgcaaatatagctgttggggatttaattttgtcatttataatgtgtataagtgatattaaataaagtgataatgatttggaatggtttggagaattatttacaaaagctcaaaaatttagtaacaagtaattagttattattttttttcagttttaatgttgattttttttttactatggggtgacttttaataactctcgtaaccttcaaatcatctatttaatttcatttatacccaattaagaaatgttaacagtcattgggtgtaggatgtttgaatttcaaagtgtgtgatcataaacactacaaatagagatcattttgttcatcctttaagacacacttatatcttctatctttcaaacacaaagctagttctaagtattgataattcttagaagtattttcacaaagccctaagtattttataaagagagaaataatcttaaccttgttcaaggttttggtgattcccatctccactttgggtgtttgttcttctattctctagttttatattgttccattcttctcctctaaatacttttatagggatataattttgtcccgttattgtactttcacggattgtaatccgtgatgtacgacagccgtcagatgaatgagttatttgatctgacgactgagatt

SEQ ID NO: 161741 - DNA, 10176 bp, Cannabis sativa
  modified_base (1370)..(1375): a, c, t, g, unknown or other
  modified_base (10071)..(10075): a, c, t, g, unknown or other
tctgtattactgtttccacagttttgcttctataataattaaaccctgctagttttttgttttttcttgtttgtcctatagttgtttacgacctgcccttttgaaattccatccggtttagtactgattaatccatagtatatgcaaaaacttcaaaaagggaattataccaataagctgtgtatgatgatgtgattaatttatgtgagagtaggtccataaattttgttagaatgtgtcacccactgttgtcaaggtttttgtaaaacgagtctacacagcaacagcatgatgaaaacactgtaaatagaattatgacgattgtttgtagaattatggaaaagatttctaaaaagtaactttattctgatctgtggaaggttcaatctgcaactgcatactgcctgaagcccttaagatacctgcggtgcaacacgaccctaattgcgaaccattcgacatcgacagtgagaaaaggagcctgagaagtagtgccttcagttgtttgtcatcgatatcaatgcggcagaagcaattatcaacttcctcactgtttctgcagtcacccttaagaggttgtttacctccgtgggaattgaaaaggtcaaacaatggttccttgaaggaaaggtaaaaaaacgaaaccacatcaaatcaatggtttctctagcatcgttagatgtttcttcttttgtgaccagactccgtaaaaaaaatgcctagcaggaaggagaacttgtaaagaactttgatctgaagccaccactataaggctgtcatcattatgattgtgttgttctcatggaattctgggggttatggccgaggcttgtcaactatttagctctagttttctactgtcaattttaagtagttttttttcttctttgttttagtttagcacgtacggcatgccttaagccgtctcccttgagtgtaaatcttgttatgagcagtgttgttccaatatgattctagctatcttggaatgaaagctatgattccactttagtttgaaaatgagttaaatgttacaacaaggtgacgaagagaaggaagatcttaaccaccaccattcccaaccccacaataaaattaaaagaaaaattccataaccagattacattttccaattgatgtaagcaaaaataattactttgtcctgaacatgattttcctggtatatatattatcatatttccaatctaaaatagtagaagcatacaatgaatttacagatggcgaatccgaaattagctttgggataacatacctgcagggacacgaaagagatcattcagatttacatatgcaaacatttctccggaagggttgaaaaacattaacttggagagagagagagagagagnnnnnnagagagagagagagagaggacaatgtattaaacgtgagcttcaattataattaaaaccattattcttcttcattggtcgtgcatttccataaataagttacacgtcaataatggcacacacacttaataatgcccagttaaattaaaggggtggtgatagtgtgattgtgcatcatgaacaatgtaccactaaaaactaagaaactcaaccgcgactacataacatttggggaggcctggcctctaatttatcaatcgtctttctgatgcaaaacagtaggcaggctattattaccattgagagcagcatgataaattctcttttcagccagtccaatatccgacattaccaaattaccctgcaaccgaagtaatacaaaggtatataaagcattactataagctatataacattcttaagaaagtaacataattcccatgtgaaatttataaaagaaaaaactaggaagttacaaatactctctcaggcaatgaattgcatacctctttagccataaatcttctgacattatcagcaaaaagttttggatcattcttctcctgctcatttggatagtagatgggtaatcgagtcacgtccaggtgattaacaaattgacagagaagcaaaaacacgtggcggacctgtaaatatagattaacgagtaagcataaatcaaatggacaaaagcaattattaatgtcgtatggaatacagaagacaaaggacaaatgataatacattaatgagttttgactatcgatttaattttcaagaaacacataccccagatatcgagtcccatgcaggactaaatctctgataaggatatctcaggattactggaagaactggagcttttgccagaaaagcacctgtcttgaatgggagaagaaagtctccatttgtagttgtgccttctgtactaaaagcaagatgagttaaacatcaaacaaaatgacttggtcaaagtacacaacaggtcaaaatgctttgccggccaacaattgaaataaaaatgagtccactatggttaatcaaaaagagagaagaaaaaaagacctggaaaaagcatcattagaggtgcagactcatcctgataagattgggaaactctttcagtaacaacagctgcaaaatgaccaaggatacatatcaaacaaagaaatacacataatttctttttgtatgcatgtaatcaagcttgaataaagctcaaaagaacccttgacaatgtacctgcaacacccttgaaatcagaggaccttgactcccgctggacaaagacacaaccgaggcatttgctgagagaataagaaagagaatcacaaaatctgagtattctttcgtacaattcatgaaattatgacaggataaaaatctacaaaaattatgggaaacgaaatgtgagaaataaaagaacaatgtcatacaagcttacctgataagcccaactagaggaagcctagccactgatctcttcaccaattacaaatccaggcgtacaagtattgaagggtcagaacagaattgggtcagtaaaacatcagacagtttatacaaagaaaatggtgacatatacaacagcagcccagcccagcaaactctcgcctaaactacatgttaaaataaaatattctcaaacaatgggtaagtgaacaaaccttggcaacgaagcttggaaatgaagaagacatgtgatacaagatatctacatatgagacatggttagatataatagccccaggcctttcaagctcttcagactcgtctttgctttcattctgagaaattaaacatgcttttgaaagtcaaaatagatgaataaggtgtactcgttctttcattaaaataaaataaagatgcactcattctcttctgaatacagagagaaagtcactatagaattcacttaatgctattgcaaattccatttaaacattgtattgaaatatgatatacctcggtgtttgacttgggatcagtagtgagaatccgataagtctcattgatccaataaaacccaaacactaaaagcataaccctagagaggattcgcccacagctaacgatgacggccctcctccacccacccatgtgagcgtaatcctcttcctcttcaaggtcctcttctcgattcgaagaccaaaacagagtacaaatcctacaaatcaagtaatatagcaccaaaacggccataccagccaccaatcgaatcggcaccaaagtaaccatagctaaaccgagtagaaccttctcttgcaacggcaactcgccgcgtcccatgggtccgtacacatcattgcgtacatacgccgcaaatttcttctccatctcctcgaggctgtctccggagacagcggaggaggagggttccggcttgagaagaggacggtcgtccttggcaaaggaaccatcgtcggggatcgactcggccgatttgggttccggcgaatgtacggcggaactcatgtctttgagctcggactccatttattctttttagggaagtgtttttctcgtcaaacgagctctttcaaattttcattattatttttattttctttctaatgcctcggattttgtgtttatagcttagcttagcttagatctgccaaaatctgaaaaagtgggtaatggtcccgggaagcttgcggagacacgccccagtgtggattccaaactaaaattaaataataataatatattttcgtccaatccttgaacgacgtgtacggaaataagataaaatttcctatgggagtctctacgtgtttaccatagactctgatgttgaaaccgttggatctgataaaccttaccatttagagtagatttagcaacccagcccagccgtccgattgaatagctcgatgagaacgcacacgagagaaaatggctttctactgttaggataaacataaacttcattttccttttatcttttaaaatttgacattacattggtgaggaaaattggtcggtgtgaaaacttctacaatttaaataaatgattgagataatccagtaaaaatgctataaggcataactttaattcaccttatacttttagaaaatattattgttcatatttttttagggtagaatgcacacggtccggaaaattagtgggaagaggtctcttgttccattccattagtattggtaatgcaagaactaagacccaaatcatatccacttctagagccaccatcgtcttcgtaccccacgaccaacgagaaggcctgttgcgacacacgatggccactgaaaaaagaaaaggaatcgagagccacaaatcgcaagaaccaccgaaaagagaaaagggaatcgaagctcggccacttacgaatcgcgaaccccaattcgtgtaccataaacccaataaatcgaagaaaccatcgagaccattttttgctattgttgtttagatgttcgatctgtggtttctttgtattttttgcttatttctttgtattttttgcgataggttacgatggtgggtacaatagtagtgtaatcttgaagttatggatgaaagtttgatatggtacgatgtgttatgatatttgataaagtatgatagtggtacgatagggtttaacttgttgcttaaaattgatgccataaattttaagcacttatcgtaccactatcgtaatattgtacttttatcagccatcatatcatcatcgtaccctatcaaacttcaaccttatcatacagattacacaactataccctcgagcattcacaaaaattcaataaactttatcatgccatcaattttatcatgtcataaattttaagcaatgttaggcttattttttaggttgttttaagagtctagttttagggttatttttattgtttttatgttttattattcgggtttacgtttatttttgcttttatgttaattttaggttttaaatgaagagagtttcactttttggtgaaaaaatggtatttctcgagtttcttggtgatgaaaatgatcaaattttacaaaaaggaatcttaagattgaatttcttaacttggtgcattccagaagatttaaaaagtcaagttttcaagagtcagcatcaaaggtcgcagctctctaatctatacagggagcatttttgggagaaaaggcaagagtcgagactttcgaagcaaggtcacgacgcttggaggaattgaaaaatcgtgtctctataagaaaactcaagagtcgcgactctctaccaaaggttgcgacacttgacttttttttttggcaactttcaaattttgataaaataacaaaatggggctacatttgagggttcctttcaatttttttgagtattggggactaggagtggaagctggaaagaggaggacacaattggagattccactttgtgttttatctcttttatctcaatcttttatgttcttgattgaatcgttagatgtttagaatgactattatgagctaattttagttttagggctattatgtgactcacttgaatcttttttatcaattaatgtagtttttcaatttcttcttcttcttttattcaatttcatgcaatctatgttaatttagcaattatttataggtcatttataattattttttatgatttcgaatcaaaatctgaaaagtgtaatttgattatgctatggttgttatgggtgcaatttgtcgatctcgcttttagccaacgatgctcggttcttaaagtgatcgaattgaatgattaattaatagaataataatgaagtaaaacaataagaacacaaagaatttaaagaggttcggcaccgtgataatggtaatagtccgcccccttttagttgtattacttagaaaattattaagatcacaagggtcgggccaagtgagtttcttaacaatcacgagaaagcttacaaatattttggcaacaggataactcttttgaaagttcagaaaaggatcccttctcagtgaaatgactccactatttatagaaaaaatacaagatgtaatgtcttgaaaaaataagagaagaatttgggaaactgaatatcaaatctcatcattatctcaatcaagtaaaatcagtcccataaaaataggaattctaattaagctataattctagagatatttgaggagtatatctttggagatctttaattatcgcttccctctatacggagaatgaaacttagttaggcatatctgatttgcttggagaaatgcaaggcatggaacttgctcggataatacttgctgaagaactagacttaagttgttcgactctgaatcatcctagatggaacccttaactagtatattccaggtaggtgcaagcattacttgatgtgtgttaccctgttgaatgccacaccatattgtaaaaaaaattgggataacatttttccccaagttcgtgtggcaaatgttggtcacatggagacttccaaggtctgctcatagcttagattggtaatacatgttagaattcacatgttgtaccggagataacgtttgccctgcccgagacgagtgtatcttctttagtctcttcgaatctcaacatttaatactttaaaacgagaaataggggaacgtgttttgacggttccacacccccactcctttaatgattgtacattttggcatttttagggggaaacccaatttcaatttcataagaagactaccctttagtgggtctataagagaaatttccaaatccatttagaacttttactagttcttcaatttccaaagcttagaaaaaaggaagagtcgttcttcaagttgcgtaagcttcgcttttcatccagaccttttccatgaggaaaatcaactctcgacgcaatagtgagtaagttatttccttttgaacttttttttctttacttacacatgcctaaaactactggaatggatgtgtattttgttgtggcttgctagattctaggttttcttcgattttttttttttaaaaaaaaaaagaaacaaaagaataaacccaagaattgtgcaccctagcttgaaaatgtctggtgttgaactttcactagaaaaattgtccctttttctctattttttttttctcttcaaagcttttgggttttgaaaaccctcaagagtgattttttattcaggatcttcgttattaggatgtttttcccttatcttgtttcgttttttttccttctagttggagtatttgggatgttattctcttttaaggatgttctaaacttgttcagatactcacctctctattcttcttctttgtagatgaacccaagtgacttctagggaggtaatttttgaatagacgataacctgctcaaacttcttcatgagaatcaacccagactccaagcagacgaatcaccctcatctctgagcaattcttcctccacttcaagtttctctgagtgggaagtcagtagtgattcttgagaactagaaatacaacactgccactactttgaccagattggtagagaagtgtacggatgtttcgtgtgggagctgaactaaggttggaggcaatttcttctagcctcgtggacatacagagtctgagaggacgtataggatacactgcctattggtcaactaggacctttgaagagaaactctgtgcaagttgaaatggtagtcacgattgctagtcacaaccaataaccaattttgaggtcaagtcgaaactggctagtgcaaagaaactcgttcgtgcaataccaaccaatgatacccacattgtgaagaatatggctactgcagggcaagtcgcggtgcctatggagcacgaggaacacgagaacccagaggctcccaaaggggaggtggaactcaatgccgatgaagaatttccttatgggggattcgacgaggtaggtcaacgcagttactcatccttggcgaggattatattgatgtggagttagtggaggcattataaattctgtccaaatctaagccacagctacgctgggaatcaccgccatccaagcttaccgtcaaaaggctgaacaacatctacaccaaaggcctggttggagatgttgtgacatttttaccgagggagggccagttagctcacaactttggtgaagggatttgtgcctagtcagggccccatgctgagcaggacgctctcctaccccttcaccccttattaccagagggtggctaactactacaggatatgccagacacaaattagtccgaagaatatctagtcgcactatttgtacgagtagggatggggagtgtcttctcttcatgacgttaactggttttttgacctcaagtcaaacccccatcacaacgagtctgagtatttttatttttctcagatggaattcacatggcttatcgacaccaccgacaagaaggtttccaagattggtggatattgtgtttattattacatcgttgaaggggttgaggcggaccatctttcctttaagcatgttgagcccttctagcgcctctattcactttggcactcaagattagggcccatacaatcttggggctttctggagaagcttggggcataattatgcttgccaccgaggcaaatttttagaggcaaagtccaagaaaaagtcttatgtgcctaatgatcaaccttctgattgggatattcaaggccaggaaacacctgcccgacatgttgcttctccctatgaagcccctgtgagcattcgagaaccaattgtagaacttcccctggcactacaatgatttgacacatactccacaatgccacctttcatacatagcagagggctttaacgtcgaggtacatcttagttgctcctgggtgtaaaaagtatggtgtaatatgagactcatctagaatcttctatccgatatccttactgaccggtacacaaatcctatctttatatcataaaattttgtcagacaaaattgaaaagtcctttgccgatctggttccaagtctttctttgtacccctgtagctcggagtcaccctgctgggccgttttaattctttataatagattagactacaatgtgatattaacaagttctccaatcacgaactcaatccccgttcaggttatgtctccagcaaactttggtgaaatctttttcaattcacaaacttgtcctggacctcttcgacttacaacatacactaccgatttactttcccagggtggtaaagagtctcgcagttataatctttaatcagttctacccatcgtcgctgcctcatgtttaaatccttccaagtgaagaagtatttaaggctcttgtgatccgtatagacttcacactttttgctagacatgtaatggtgccaaacttccaaggcggaagccactgctatcaattcaatatcatgactggaataccactgctcacactccttcaattgtttaggtgctcaggcaataactctactagactgtatccaaacacaagctattccttgtttagaagcgtcacaataaatcacaaattactcctcactgactggcaatgttaacattggtgcaataattaacctctatttcaattctttcgacttaatttccgctaagggtgtagaaatcttttcaacaaatattccgtagcatcctgttaatcacaaaaaacctctaaccacaattgcagacatgggttgaagctaattctaaactgctttatgttgggctttgtgccctannnnnaactctatttcaatgtaatcttttctattcaattatcaataaagaaacatatttattctcattacttgtttagtatgacttttggttcatgtgatcattta

SEQ ID NO: 161742 - DNA, 3111 bp, Cannabis sativa
taagttcctgaaattaacataatctccacaaaagttaaggctgttcaacaaacaaacgattccttcccctgcctcttcttgtgctaacaatattagtaatcaaagaattacaaaaatttcctacagcactaggccccatcagcttcaatccaagactgtttaccatgtatgacaacctacattcatctcctcctgtgacttgttcaagttcatgtgcctgttcacgagatattgtagtgtaaagtggcaatggcaagtcaaaggaatcccggaaactagttcccaagtcttcttggccactgccttcgctagtgtcaaaagtaactctcaaaagccccattgatcttgtgtcttctactaaagaatcaaacacaaatgagaattttccaaattctagatcgggcttcttaaagaaatatgccagcatatcattgttgggtccaacatttttttgaacaaattttctatgatagttttgacgaacccttacagcttggtatatgcgtgcagcttctctcaatccacttaagaaggccccatgcatggtggctggatattgccgagttgtggcctcaccagcaaaaaacagcctagtacccacactttctgcaagtaaatcataatcggagccagatgaccgtactctgacatgagagtacgaaccataggagagaggatcactgccccaccttgtacatattgactgaatgggattaggcacagtaacacctttaggactatatatacctgaaagggaagaaaaaatattacatatgtacacattagatgatggatgccatggaagctatatgaaatgaagtaacaaatttgaattatattaactacctctgaggacacttaaaacacgattgagcaaactggagggatcactgcattcaaatgtttctgcagcttctccagcaacaagtgcaataagaaccggcccaccagaaacagtatggtaaccataaaacaaaaagaactctccacgtttatggctttgttcattgagacatccaaatgtgtccaggtcttctccccagaaaacatgaggaaataacattgcaactttatttagcagcccaaaccccaatctgtcaattgctgcaagcttcctttggggtaactcaggttcaaatttaatagcctttttctttagaactccaagaggaacagtgcataacaccatatctgcatgaaaagcttgatccccagcaattacttcaacaccttcgtttccatatcgaatagtgttgacagttttcccatagaatatgggaagcccttcacacaatgcttttatcaatctccaattacctccggcaagaaaacagtggtccccacccatttcataagggtcatcttgatcccaataggcagcagaaagttctgaaagacatccagcatttgcatattctaaatttgcatggtgccaatcaagaagctgcctctcctcatcatttctagctacagcatacaacttccgtagtctctccaaaacagaacccaaggaaatatcgtatgcaaatccacccataatctgtctcagttccatgactttgtcaagcaacttattgaagataacttcaaccttggaatcgagttccttatcaactggcgacccatctggcttgtataaaggacaattatctcttactttatgaagtggaatggtaagttgtctagctagaactccaagaggattagcatggataccagtaataacactgccaccaagttccacggcaacatatttaccttcctgcccgatcctttgagtataaactcttccaccaggtcgatttctaccttccagaataataaccttgaatccaaacgacaagagttgccttgctgctgctaacccagccagtccagcaccaatgataataacagatccttcatttgcctcatctggcacatgagacgtgaacgatggtgaaaccccaaaattaatgtatccattatgcaataaaaaatcataggctgatgatatcaaatgttcgtactcattactcacagtttctttaatttgtccctttgatagccacattcgaacattacccctccaccttgctaatatatgattcctcacaacaatataatcattctgttctttaccacccaattttttcactaccccagctcgaatttcttcctcaagaagtgcatcaattgggaaaccaagagacacagctatcatagcttcagtttcagtttctttctccaaatcctcctttgttctactctttctcttcaatgtagcacccagatgcttctcaatgacctcatccatcaaattctcatcatagttccgtaaacctgatttctttctcaaagaacgcttcaaaacagaactgtttgaaaccggagttcccattgtcctgtactgggtgaattaaccaaaaggtttccaaccaatcaatcagttaactcacaaaccaaccaggaaaccactctacaattctagggcatcacactcatgataatcttgtaactacaaatacaaccaaatgggcattcacttcatcaaagacatttaaaaacaggctctgaatttctgcacatcttccacaaaccacaggccatctattactactatgaaaacagataaaccagaaaattcacacgtatctattcaacatttcctataaagcattctttatcataagtgagtcaaaacccaacaaagatatctgaggtgccagccctaatgtgtagagtatttaacttaaaccataaatgttcctacacgttgacaatttttgacacaaaattgcatgtaaaactgtacaaaagaatgttcatgcatgaacgttctcgacgaaaagaaaggacactggtaactcacctggttggtccgagtggattcgctgaaccgcgaatttgagtgaagttgaaaaatggggaattagggtttttgggctgcaatctaagaaaacgctttcagcgcgtcaactcactgaattagaaatttgatgggagggagggaaatcaaagcggtgcgcgtttttcgggtttctagcatgggccacacctatatgatttgtatccaacgatgagcccaatggatgtgatttattattgaggctacttttttttttttttttt

SEQ ID NO: 161743 - DNA, 2773 bp, Cannabis sativa
tgaaaatcaaaccactgtggtagctaatgaccttttgaactccattcagtgtatgagaggaagccacactttgcttgccattctctagtggctgagcctgacaggaactacgaaatagaaatcaaaagaaatgggacaagtgagcaattgcgaaagatgtgaagaacttgtaaggtatacacagtcggaatcacaaaatactaaactaataaacatctgtgccaagaaatcccagaaaagcattaacacctgaattcattcccccatgtctcatttaatattagtaaaagtgacaataacagcaatgcaaaaatacctatagaatatataagatttcgtttatcatcttatagtaaaaaatactgaaaactaccttggtttgcttggagtaaattccatgatgctatcagccttttcatcaattttttgggtacttgaatcatcagattcactgtccatatcagatgacttgtctttcttgacaggactcttctccggaagactatcttgctgagaactttcattctcctcaggctgcacatcacttggaacatcttctacattcacaagtttatgtctcttccttctgtcactgaaaaacaacaaatgaattataacgtcttctttcttttttttcctttttttagactgaaaaattgaattataacttgagtaggtgaagcaaacactttgctaacataaaacagaaaacatgcttatataattgactgtaaatccttactctaagaaaggaaaagcaaatcagaatgaagtataaaatgtttaatccaccaccgcacacacatatcatataaattgtaagagaagattattaagacacataataactaacaagttgtcttacatactttgacctcttaagtttctttgaagctttccttttcttggagactgctttcttctttggggtatcatctacaggtaatttatcttccaacatgtcaggttcatcttcttcagcttcactgcggtaacctccactctccctttcaaactcctcattagctaaaagcttcatgccgcccgtacgcaagggttgcttcaccactacttcttctaccactagagacttctctccatcacgaactctttggatatcagtagacaaaccccgtttcttttttatactatggaataaaattatcagtctctactaaactaatatagcaatatagctaaagcaacatttaaagagtatgaagtaggaacacacttacctaataacatcttcttccttcaaaatacatgtagactcaaacggtggtaatgcaaagccttcaatctacaagaaccaataacaaactcccaagttaaaaaaagccaggaaattgtggcagtcttatgattttttcacataatattgaacaatcaatacatttacataaaattgccacccaaaaagaaaaaattgcatttacattaacataaaatttgcataatagtagccactcatcattgatacaagtagagtttcactacagacagaaattactatagtgctttgttaatgaaggaaaaaaagaggaaatgcttgcatgtaacctaaaccgaccgaactctagggctctaaccctcaaagcttgcatcctattccgatcgtcattattcgttacagagtagttcattttgggagtgagaacagttctagaaatgaaaatcaaaagaacaacaagcttaccgaaagaacgaggccatttggacaagcttcatcgaggtcaaaaacatggaggatataatcagaaaggtcggagatggtgtggtgatttggctggagaagaatccagcttcgttttagtccctcattcttctgtgacttgcttagaagttgacggtcgtcgaacactagacgaagcctcacgccctccattatcttcgagcttcaacagacactcaagcataggtaatggcgtttcgaatgaatgcgaatttcgaaacgcagtttcagaggagtgttttctcttcttcctctatgcccttaaacctttactcctctcgtcctgaagttggggttttcgctgatgattttcccctccctcccgctacgtgtttttttgcaattgggccgtaatgggcccattgttcactggacctggtctgcattcggtccaaaacttggctgaaataacactttacataaattttaggataaatatgatatttatcaaaatgttacttcattagagccagggtcaaataccaggaggaacacctctcaataataaagccatctgagctaaattatattcaatggagttaatagaccaattacaataaaaaaaaaatatatatatataatcattaatggcatatggtgtgttagggcatctccaagaaacccgaatttagtgttaaattaacaccaaaaaactactatttcaacactattttttttttcaattccaaccacaacaccaaaaaattacaccaaatattatattcttcattattttattattttattaatataataagaatattttaatactaaatatttgttaaatccaataaattatattagtaaataatctattaattgcggtgcggttttcatagttttttagtttcgcggtgcgtatgtggtttgagaaattaaaaaaaccgcatatgtggattggtttaaaaaaaattgtcaaagaccgcaatacctgtcccgcgaacacccctaaattatttttttagcacacttaaaaatataaaaatacaaacaaatacatttataaaagttttgattaatatttatttataattattt

SEQ ID NO: 161744 - DNA, 2074 bp, Cannabis sativa
attggagaataagattatattctcaaaacttgctttctctaaaagtcaagaaagtttaaattgtaataattaattgcaattaaaagtccctaaagtgattaaactgctatgttttattttttcctatgaacttaaatataatatagcttatggcgtacttaagttctcaagcatgcctataatgttaaagtgaaacaagattatattgttgtatagtggggaccataaattaaagagcttgagaattttcctttaattaccattattattttggtagaattcaagatatttatataattttaaattttttatgtattatatgaccttatttccactcattaacacttttttttttctttttttcttttttttttggtttgagctaaaaaaaagagattaggtggtgtaaattctttcttcacccattcggttgataattttggacatcacataccgagtcacgaagtatagaagcattataatttatcctctctaaagtttaaaaacacaaagagcacctccaaaaacagactcacccacttatatcacaatgggtttatatagctgccattgatcaacaaaaacttatacttaaaaaaattagttttattttattttatttaataattaaaggccaaaaaaaatatatattttataataattaagttcttataaaattaaataaatttaataaaggttattataattcttgtttaatataggtataattaaatatgtaatttctcaaattaaaaattttataattttacgacttacaaagtcgctaaatggatatttgctcacaagctaaatggtatggtaaagacctttactataccgattaacattatttgtaataaccgttaagtctaagtttatttatctattgactagccttttttaaaaaaaaaaaaaaaaaatactcccataaagtaaaaattttgggtcattactggtcccctcatctgaaaatctagctcatcccttttaatacatcaatatatatgatattatttaatcacatatttttatctcataattttatagttaaatgtgttttttatcgactatttctcaataactttgtaatttcaagttacggaaaatttataaaagtaacaaattttgtaacatatttgaaacttggttgaacattcacatttttaaaatgtcatgttaaaaagtcttacattgctaatgtgtggaaagataatagaatatataagagaaatgagctacctctcattgccaattagttttgagataaaacctcattcattttattccaaaactttaacatggtattagagcaaaacaaaccaaacaaacaaaaaatctctaacgactatccaacaacaaaaaaaaataaaccaatcaagtagagccgaaaaaaagagctatcgaaaatccattaccaattaattttaaaataaaactccattcattttattctcaaattctaacatttcaaaaagtgataatataaaaagcatatctgtttctcccatctaaattctttattaattttccctctccatatctagctatctgtttaaattgcttttctagatcaggttggattgtacagagagatttgatcgtctatagtacaaattcttttctgtctttttttttttttttttttttggtgagtagaatatatagtctatagtacaaagtcaataacaataaggtcaaatataacagtaaaaagaaaatgcatagaaagttaatactcatcattgtacccaaaatgattacactaccagtaccactagtccactatacgtccgaacacactagcttggagtatttttctatatataaatacttattattattagattagaatagcgatcattaattttacgtaactatgctcactcctaattatgaagctactcataaaatttatacatatataaagtatacttctttaatcttaatttattttttggaaagacttaaaattaagtatgacctaaaaaatattaagagaatacacaaaatacttaaaattaattttttttttttttttttttatttttttgcaatttttttttaaaaaaataca

SEQ ID NO: 161745 - DNA, 2292 bp, Cannabis sativa
  modified_base (106)..(109): a, c, t, g, unknown or other
taatataatttagaaaaattctatggtgtcaagtacctttatctatttcgtcatttagtataattttttagttaatttttttatgattgtgtacgttatagttatnnnngatattttataaaattttgagaaactaattagaaaatttaacactctaaaaaataaggttcaaatattctgttgcatgcgtaactcttttattttacacacgtgtaaaatagattgtttgaacattactttatatactgtaaattattctaaattttacagtacgtcttaaataactttaacatatacatccatgaaaataaattagactaaataaaatttctagttgctgaaacagtaagagatgcatcaatgcatcattttttaagaggtgtattgtcgaattaccctataatttatatacatatttaaaatatatacatataaactttaaattatgtttctctcatggaattaagttttttcttgaaaaaaaataatttaatagaaattaaaaagaaaaattagggtcttcaagaaaaaaataagttttttcttggttttattttatgtattctttacgagattttttatttgtattgaatttttaagattttgtaagagaatttcacaagtttacttactaatttttttaaggcctcctaattcatattcttaattataaattattagtgcatacacttaagtttgatagtgaattagtttaaatgatttctccatcatttttttatgacatattactctcatgttatttttcaataaaatatatgttcattattctaaaaaaaacatagcctttgttcttggcaactcaaatctcttggtgaggatccattgacaaccatggataccaattccaaaggagatgatgtgagaaggagagatagagatgaatgaaatatagtatttttttaatgaagttttattttattatttgttgtcatagttttttaataatcaattaattaattaattaattgtattttgtttaaaatataataaattaattgatataaattgaattgagtgtagttttgatgagagaattatattgtatactcactttattttacttgttttaatattcacctccatttttatatttttttagatatacccacttttatagataatgtattcattagacctcttaggttaatataaattatatacaagacttaagtacagagcagggtatattgggtaactcacttataaaagtggatatgctataatcaaatataatatgaaagtatttttgattaatagatataaaaaaaaaaaaaaaagtatctttcaatttattcatatagtatttaaaagagattgaattcataaatacctaattttatgtatgtattgcacttaaatatcttttaagttttaattttatcagcataaatacttaaaacttttaatttttacaatataaatacactaactttaattttttgttgcaaccttatttgacttaattttatactccaaaacttaaaagtcatgtattttttaaacttaagtatttaattttatgctaccaatatatatctctaattaaaaattaagtattaatgctgtcaaaattaaaagctaagtatttaagtacaaaaaaaagtataaatttatgtatttatgcccttaatatctctatttaaaatactaaaatcaaattaaattatacctatttttatgctaaataatgtgtaaagttttcttagtatattatatcattttggttacttttcagtcacctcttgtaccatgttagttatttcttaattataaattaaaactttacttattgttttttctttaatgtataattttgtgttgtttatttattaaaacataattacttagatattgtgtttgttattgtattgtaaattattattttagttacttttttatattagttactttttagtagcaaaaacataagaaaaataatacttaatatatcatcgtgggcttgaggaccatgaagttgataatattaaaatcatcataaatattaaatccatgttaattaatacatgtttattaaattggacagtaattaaaaatagtaaaaaatacataaattattattttttgtaaaaatattcacacttttaaattcaaaaaagcttttttttttttttttttttacatttttacagcattttataaaaacagaagaaaactatacaatataaaaaatacacaaaaaataccatattttatgtagataaaatctttaaaactgtaaaaatatttaaaattccgtataactgtattttt

SEQ ID NO: 161746 - DNA, 3204 bp, Cannabis sativa
tttttttttttttttttcataatgctggtaagatatttgttgtttatttttacaaggatactagccaactagtgtgccttttaacaaatgtcttaccataatcctttgaatgaatatatttgctagacattatttagttggaaagataattttcatgaaatgcgttatgggttcaagatgggagttttattagttatttttggaaggttttaatctcatgtatacaagcacataaatttagtatctgatcattcaattcgttagtgaactctttttccttgctatgtgggtttgagttgtggatagggtatgctagtagctattgcctaaaatctcaaagtataaatatagtttcttcatttagttagaaaatgataagcaaaaattgaacttagtgcaatgttttcaccgtactcaatttatgtaattctattataaattttctcttgtatctatgttatgctctctttctaaggtttgatatttgtaatgcacttgatatttgtatacatgattagtggacttagttggaaagataagtgtgtgtgtgcctttttaatttttacttctaaataagtaatgatccgcagataacaatatttacaataagtaacatgatgtctttttaatgaaaaagtataccattagattgtgtggaagtttggtgtgctttattatttttttttttttggatgatctagttgaaaaagagagtaatggagaattgctatggaacacttaggtgacgtttggttggaaggaatgaaaacataggaataagaataagaaagaaaataagaaataggaatcaaatttaaaatacagaaaattgatgaaaaaattattaatttttattctcatcttgcgcattggaatgcacaatgatttatccaaaggtgcataatggctttaacttctgaccattcactttgaaaacctttcccgtagttggactcacaacctccaccgcaccatgacgaaaaactttggtgactacaaagggtcctatccactgagacttcaactttcctggaaagagtttgagtcgagagtgatacatcaaaactttttgaccttctacaaatttttttcgataaatgttcttgtcatgaaaggcctttgtcttgtctttgtagattctcgagctttcataggcttcagttctactaaaatgatggaaaaattattccattagaatgacattcaaatactttaaaatgcaactaaacaaataaatggaataaaaactatttttttttttcattctatttcattacctctaaccaaacaccaccttagtgttgagtactgtgctttattgtaggtggggttttacgtcattaagtttgacaattctattcatgggtatctaataccatgtgtgctttttaacattagtatttactaattagttcgtggtgtctaatacatatatgtttagatattttggcattgcttgcattagtagtatgtggtgtcgaacagatgcatctcttaacaattgttaatgctcctattgaaagtttgggttttctcaaaccaagtgagagccacatgaaaacattgtaaaccaagctagatagagcatattgaactcgaaaaataatgatgtgtttttatgtaccctttgtgttattatttttttaggggataggggggacaatattgatatgtgcataaaaaaattgcattaaatttttacacatacaaagtacaaacctgtccttttaatgagtttttttttttttttgagggaatcatgtcatattggaaattatgtcatattgtctaaaagtttggtcattttgtgtactttcactaacatactggtgaactttacatttgtaatagtgtggtgtctaacccaataagtgtcttagtgggtatcatactaatacaagtatgaggttcatatgtcaatttaatgttgtggaacccactcttattagtgtgcggtgtttaacaacacatgggtcctttagtaatgttcttagtgatggtataatttaggtaactaatggttttcctaaactaacgttgtagaccaaaacaaagcagactaattcgatcagtaatgatagggttatttgtgaagcaggacaatatatgtaacaaaagatgttcaacttgtagagtttgtataaacaaaatgtgaagtgtgaacaaggcatttggacttataatcagcacacctaattagctctctcttttcctattataaatccgtgaagatatgtgtgttttttttttttttgagggaagtgaagatatgtgtttgtgtatgtatatttatagttatgacttaaaaaaagccatgaaaggtagaagaacaaagaaagaggcttatcaaataatgctaaagaaagaaagagatgagaagaattttcattaccagattgtcacacttatttcttttactttttttttagcaccaatatgtgaatatatagattgaagaggtatcagtggcattttatacaaggggaaattatgttgaactacatgatgaatggtgatggtggtgcataacagttatgtccccttatttgatgctaacttatttttcatattttattagcttttataacgtgttataatgaaaaaaattgtttaacttgaactaattacacttgcttttaaaatataaataaataaaatgcgagttctagaaatctatttgactttgatgttgagaagcttatcatttgagcatgaaaaatgctattaatcacgaccgagccatttggcggcgaacctagaaaaaattgtagtagtttcttttatttggggtacaattttaattaagcggagagaattgggtttcacaggatacattacctagaatggttttttgcttctcaaatctgaagatttttttcttttcttttcttaagattaattaattgagctagtatttattttataatatataatatttttttgtttttctttttctctacattacaatcttcatcaaattgtattaaattatttagttttagagtaatagttatatataacttgtgaaaaagtaaaaaaaaaacattataaacaatgtgggactaagcatgattttatttactcttacaaatatacctagtattgctattaggggtgttcattagatcacatccaatgtttttaggcccatccagatccgatctaattatgtattggatgttagattttaccatccgattcgat

SEQ ID NO: 161747 - DNA, 1213 bp, Cannabis sativa
ggcataaaacccaacataaacctcactataaccctattgaatacactttttggaattttgctttatttcacataccagtaaatgagaggttttatctctaatagatatcttttttattctttagaaaaaataatatataatttatttaaaataatataactgtaattttaataatattaaaataatacttgttttactttttattcttcaaacttcatttttagaagaatgctaatgacataactattgtttatttgtactataagttatagtattataatttttagacaattcttttataggggctttggaaaagatgtcatgagtggggtcttctttagtttatgagaaaacaacacatgagctaatgaaatttggttttgtacgttggagacacattattgagttatataatttaaagtattattaatggacactaatagtgtctatcatgttttatgggtggcgcctcataattggttagaaattttacttaaaagttattttcttaaactatatgagatttaatatttacttataccaaattagcaatagtgatatgacaccgatgaagatgtaagataccaataaatacatgagactacggtggaaagctaatacttttctcacacagaattaaattcattatttttacaaacacttgattatttatttttatgttattttattattctttctattttctatagtaaatgtatgcttttgaatatctcacttttttgagcaaaaaataaatattttccattttttaaaattgtgagttttgcttcacatatggtatatgtcttgtgaaatttgtcatctcaatttctttttttcttctctcaatctctttctaaaattgaaaaaaaaaaattaaaacctaaaatataaatggctcttttttcctcctctccaccttcttcttcttctttacagtagctcaataggtacttcacaaaagaatcttagttgtattatttgagatgaaagcttaaccattttttgagttaaaagcttcaccttcttggatctcactcttaagactagcgtttcaaagattcactaaacctaaatttggtcagataaggatcgtcaatgtctccaaacccataacccatgccagcttcgactttcttttctcactgatgaatgcacatttgtgcactcattcctaatcaattattagatgaattagtatttatttttgtat

SEQ ID NO: 161748 - DNA, 3046 bp, Cannabis sativa
atatatatattacttaagggcaacctacttttggtgacttttttctggcgatagtgactttcctgtgacttttccggcgacggtaacttttccggtgactttgccagtaccatcaatttttccagtgacttttccggcgaaatttattattgtttataaatatgggatttctatttttttaaaaaaatatatggcataaaacaatccatataaatgtaaaaaaaattaaaaaaacaaaaactcataactccatgccctatagtattatttatttatgctataaaaaaaagtaaattatactacattttcccatatttatataaaaactccttaaattaaaaccaataaaaaaaatttaagtaaatatttaaaatcaaatgaattattaaatcatatttacttatttgaataaatatttataactaattttgttatagatatttaggtttgaattatatatctaataatcgattgagagaatctctcaaccacttagagaagatctctcaactactttgagaaaatatcttaaccaatttcaatatctataaatacttttcaaattcaaatttaaataaatatttatcttttgaactaattaattaacctaaaaataattatgttactcatattttgagcaacaaatatgatcacgacacgtgtaaaaaggcagtaaaacaaaccagctcggatattaaagaattaaatatgttgagtaacccgcctcgaagaatagtaattgcggacgtatttaagtctctccttattcaattaaggatgagtcataaatactgtcatttagtaagacaagcgagaaaaataactaacacaaaagttcatctcgagaagtacaaagtaaagaataaacgagacaagatgatatatgagatagacgaggcagtgtaaagactctctaacctaaggagcacacaagatgcaatttgaaaagcttatcataaatttttataaagattatataaatatttcattataagcggctaacgtgagaaggtcaaagagggcacgtcaacgtcacttcctttacaatgtatactgcaaggtatagaccaagatgtaataccacgtcacaacaaaatttagttagcacaaccgttttagataaagataagggcagtttgtacgtagcagttatttattttatcaatgtgctgtaaatataaaatatggagttgtccatgtttcatgaacaattataaaaataagatcaggggaaataaatgccactcccaaacacctataaataggagaagaattcccagaccaagggatgaccaatcttgaaagactataaaaagaatattgtctcccccattgtattatgtaaactcatcaaatctcgataataagatgaactcgtgaactatgaagaattaatttcaaaatcacgtaaaaaccttcttatttattattattaaaactattatcattctgaaatattatttattaagtttaggctcttttattggttaaacaaaaattggcgttaacagtttggtgctttcattaagagtctgttttttttaaagaaaaaaaaaactcagaagacacatccctaaatatcactcgtcttttatttttttaagcatggaaaatactccttataatgacaatgatcaacaaagagagacatctcagtgtcttggaaaagaaccctagggatctcaaggagtgaagaccattgagaaccaacactctaggagaagaaatgatgaatggggtttcaaacgaactaataacgagatccctgaaaggtggtgtgaagatgcatacgatccaatgaaataggttcctttggtggaattaaaaaacagacaactttagcagagactagcgaaattgaaccgaagaaatgcttagttggagcgcgaggctgcgacctccataacatcacgtggtgatgcacctcccactcaaccaaacatatccacgaggtagcctcggggaaggctcagaggattgagaactaagagaaatgaggaagcccttactggagaaaatgtttggaaaatcccacaaatccccaggatgaccaaccagggagtacaagggatattccagtaaatatggaaaatccacaagatccaagaaacataaatacaagacaaactcgacccgaagatcttgagcattctcgcagtaatatgaattgtaggaatatgtgacctgacaacctaaagtcgtctcgtgggaatgcagatgtcagataagcgtgacatggcaaccaaggattcactcaaagaaatgcaagaaatccaggggaataaactagatcaggacatcctccatgacatccacaagtacaaaattagaatgaaagagataacatgtacatctacttaagtagggaccatgtcgcaaatctctttaaaactactcaagaagattcccaagagacagaatcaagtattggcccaagtgggtcgaggacacgtggtcaaagcagatcgaccaggtcatgtaccagggaatggcgactagaaagagaaagaaatgcctagtgtcgttaccaagatgaataagaaagcatgagtaactcgaagagttaccaatctgaaagtatctcgccaatgagatcagtaagtaattatgacctaagaaatgtaggcgctgtgaacttgatctccgtgagcatttgaaccatagacaccccgaattacatgagtaactaaaccaaaatgctccagacctccgagaacgattaaatcagaacatggaaaatcagtaagaacaagtcgaataacctattgtggatccattttaactaatggtcatacaattggaggataagttcaggcaatatcaggatggagtatatgggaagttgtcagggcatgacttgacgaggagacatatcatttcaccctaacatactcaattctcactttacataagaattcaagaatccacatgtcgattaatacgatggaaccaccgacccagtgacacatttgaacaattttaacaccataatgcaagtaatttttcaaagggtaaatggaggcaaaacccccaatactttggtttt

SEQ ID NO: 161749 - DNA, 5265 bp, Cannabis sativa
  modified_base (2090)..(2096): a, c, t, g, unknown or other
attttggtagaaaacaatagaagtcaggaagctcggtttgactaaactgaacataattacaaattttgacagctttaaaggcataactgaactttgagttcatcataaaaaatgtagatctcattctgaaatttcaggatcatcttgagccattcaattttgatttgtattgaataagttatgaccaaaatactgatataagtgagcaacacaatttcctaggaaccaccgccctcacggtacttaagcaccgttgggacagctagaggggtaaacacattcgtacagttcgtaaaaaatcaaattttaagctaaatttaaatgagcttttagggttatataaataagtcttttacggttcatttttagtacttttagactgcatttttaaaggagagaactcaagagaagaggagaatctacatctagttttgttcctaaactcttctaatttttaattataattatgcttttgattatggagtagtcctctaggttaagagttatttcaaaacccaatacatgatatcttaaatgctttgattaatgttattagtttattcattctcattgatttgcttatattcttcaatactttaatttttatgattaatattttgaatcttgtttagacgactgttaaattaggctttacatttttctattattatttttagaatttctattcacgtaatagtctaggattttagctttaagtgataaattacttttaagggtattgtgacaagtattgttaattgtgataaaaaaaatacaaactagattaaatgaattatatgcttcattaatttgttacctaaattaatctattttttatataatttaatgatttttctcgtttaaataggttgtatgtttcacgaatcaattgcctaataaaaagatttaattatttagcactttgtcgtaattaattataataaggagactaagataagtgattattttctgggttaatagttcaaattaggaataagaaataatatttattatcgttgttcttaattgattgttgaatatggagaataattcttaattgctttcaaaaccataattataattatcatttgttattagttttgcttttaattacaaactcaaaattcacttttaactttctgttacgcaatgaataataaaataatcataatttttataaattcgacccgtatttattattatactgaagtatatttaatttattgtaataaactaaatgcattattaataatgatagctacataatataaaaaaaatactaattactcacataatacctaatagaaatgctctaacacaaaaatgaggagtttggtaatttgacacaaataccatggtcataatagtcattaaatcaagtttttttttttaaaaaaaaaataataataatatattttattacattatattttggttagtcttcttaatttcattttcttagatatattaattatcaatcattttcagtgatagcactatcttgggtcacatgaagttgaccctaaaaataggtcattatcatatatgcacttataggtggaacttttattaatgctttgatattacgtgtaactataatacttataatgccaagtactacataccctttttgtgttgtgttctataaatatatagaaaaattaaaataataattaatagacttattggttgactaataataggattgtagaacacccttattgttattttattaattaattaattaatatattttttttgttttgcggtgaacattcagccatttgtttattctttaatcaatcatatatgtgtgacttaaaagccaagaaaaaaagtgtttggattaaagtacttgattaatgattgataacactttttagtacaattcattctcaaattctttcaattttatgagagaaaatagcaaaatgtaattaatgtattttgaataagggtaaaaattattttagaccttgaattttgcaaaagttattaattagaccatctattttgttaaataaaaaaatagaccttgtattttctaaaattgtacaaataagaacttgaactaattttttgtcaaaatnnnnnnnaataataatccgatctaaatatgttatgacaaaactgtttagattttctgtgtctgttcatgttaggaattgtcttcaagtttgttatattaaaaaaagttgtcaaaaattaagctcaaagtcttatttttaccattttaaaaaatacagggtctattttgttatttaacaatacaaaaaatcaaattggtaacttttacaaaacatataatctaaaatagtatttaccctttaaataacatataatcggtaactttaaataacacggtgttttgaaacctatatgaaaaattgcaatagccattttttttggtatttatatatatgcaagactgaagttaaggttagattaggtaaggccatcaccttagctaaaacattatagaatcagtactatttgccatttggagcttaagtctaaataattttttttagcctttatacaaaaaattttcttcttaagtaatattatgtaagattgttgatgtaatggtaaatgatttttaaaaatttaagaaagatctcaagttcaacaactattataaggtgaaaatatgaaatgtcattctataaaaattgctttaacataattaaatacattttattatatcttattatataattcttattaaaattttagagtctcgacataatataaaaatatgtaatcatactaaaaaaatattttgtaaaatatagtcttcacaacatactttacataatgtagaatttactagacatactaaaaaaatattttgcaaaataactataaaaaaaattaaaagacatataatgttcctaattcacgtttattggtcggtcattatgattgtacatgaattaactcgacatgctctttgagtagataaagaatttatgtggttatagctagatgagatatccctgattcttattctatacaatattattttttattttcaataaatttgttcattaaaagaaatccaattattttttttttttgaaagaactcattgttcattaactagaaaacaggatgggaataacagggggtattccctcctgttgatacaaaacatcatgaacactagaaactctagcattcttggctacaccatccgccaccacatttaaactacgattaatctagataaacttactcactaacaaccttcttgataaattaacaactgaaaaaaaaaaatggcaatcttccaatcagggcacccaacatttgaatctaaagaagtcacggcagtcttcgagtctgagagaataagaacttctttacaattatctgcaactgcccactgcagagccatttctatgtctttgaattcagcatccaaggcacatgcagcttttgatctttgagctttgacataccagattccattaaggatgtttatcctaatagctgcaaggccggcatctcccttgtcccaagaagcatcagtgaaaattacatactgaactttctcattacatatccgatatgctaagtcctgttgatgatttgcctcaggaaaaggggttgattcatggttctccacaatagggttaacttccagcaccttataatccattaaagcctttccaacatttaagagagctaatgaaggatctgctgtaacagaccgcatgcaataggcatttctctggttccaaatctcagtgcagatgcatccaaagagattaacaaattcatctctatagatactagggattattgagattaaattctccaaaaaacgtaccattgagtcccctggaatactgtctatcctcaaaggatacaaacttcccaaccacaaaacctttgcaaaacaacagtttcaaaaaagatgcagagcagattcaccttccattccacaaagactgcaatctttgttggtaacaaaaggcagcctattctttgttggaattgcttcattcaaaattctccaaaggaaaatcgatattctaggatgaatcctcccgttccagatccattccaaatgctttgggctgatccaaatctccaattctgatccacaacataagcagacttgactgaaaactttccattctggtttttcttccaaaaaacttggtcagggaacgacctgggaattcttggaatctggagtatccgatctcccaagtcttgaccaaaaatctgaatgaccatctctacattccattcgtttcccttcgagatatctgccagaattcttatggtatatcttcgattctgaagctgttgcatcaactcttggaattcaccatactccatccaaggaatccaagactgcttccaaaagtttatagaattccctgaagcagcaactgccatagagccttgaagaatcacctctctcgttcccaaaacactcttccaaagaaaagaatcactgttcctttgattcacacaccaaaaactttcatgtttgaaatattttttcagtgaacaggtgacccatggtctcttcatgttggttgcaagacaccaagccaactttgagagtaacgccctgttcatgtcttgagagtaaaatccaattgtttagagattcaagatttggtctcttctcattttctaaataaatccatcacctatatgattttctcactaaattatcttctcattacctatatgattttctcactaaattatcttctcatttttcgaaactcctcgccatggttttcttagttttaagaagtaaattgccgtgatttatttagtaaagaaaagtaatttattaaaattgtttaaacttttatgctgtatacaatgtgtcatatgtagtttatgaaaaaatataataagagaaaataggaatgacttatattaatttgtaaaatgtgagttgaattgaaatgaagggttatgatatgtatgtatcacaccacattattaaaatgagattttcttttttcaacacattttacacattcataaattaataaaccaaagatgcatgtaaaaattcatatcttatccatctaataacaatatatctagtcaaatatataagtacacaatgattattatatatcatccttaacatcataaattacatgtgcttttgttttattcttcttctttagatatataatttgaatttgaaactaaaatcaaagcatatacatagcagccatttgaatagtaaatatatataaatttttctcaaaaaaaaaaaaa

SEQ ID NO: 161750 - DNA, 4387 bp, Cannabis sativa
acagcagaatcccaatccctaccagagacatcacacccttaaattatttaacattgtaaatccataaagctagccagtatcttatcttctctcataccgactcaactgtgatgacaaaaattctttataaattcacatttactgttctttcccctcccaaaatctctcaaaatcactcctgctggaacctgatacaactactgctagccagtattccaatggcagcctagcatattgttagagcaagttagaaagggaaggggacggtgagcacaagaggcatggaagattctgtagggcccttaggtgttttaagttcagggaataagagaatgaagaagtgtgggagggatttgtaccgctgagattttgtgtgagggtacagcgtacccttgtgggaatattaggcctctttctctttttcaaaaaaaaaagtacagtagagccaatttggccatatttctcttcgatgtactgatactttctgtgtagtgaaataatatcacaacctcgcccgtcataaacaggttatgaagaatatgccttacagaacaataaactaggaggggagaggagaattgttttttaacacaaacaaaaacacatctaaagttgacattgcccgataagatgaactggaagaccattggctattttctcagcccccaaatccagttcctttaccgaaatcccttgtttacgaaagtagacatattatagtgtaaaagaaattgccagtagtttttttcttgttttattttggcacttttcaatctgttaaataaataatacttctttctaaataactgactaatagttcttcaaccagccaaagagcaactttttaatagaaaacttacaacactaaccgttaatcataagaaaaattgtttacttttcaggtaaaatcgattgtctctcatcagacgtttcaattcatgccaaaaaaatacatagaactcacaagataaaagtaatgcacatagcaactaactatatatctttagtatactaaaggtgaagaagaaaactcttactggataccattctcctgtaactggatctggccggtccctgcccccactaggagcaatccatacaatttgagacccacccctgcattgatcttgtttagtcagaagaacccactaatgtaaaatcacaagcaatgagaataaggttgacttaactgactcaaacagatgattgaaacaagacaatccatgatatacttcagccaatcatgaatacacagcaaaaaaaaaaaccaagacaagacaagtcattgtaatggttgaaagcagcagctatattattgggcaagctctccactatgaaacaactcttcagtatatttcaatcacttgaagtgtttctcctgttttattgtcattcactgtcttatgtttctagtcaccagtttaaccaccattcaaagagaccaattttcttccttttcttattcgttaaacccaaaaatcaagcaccttccttacccatttacacccaaacaccagtattttaaacaattgcatccttcttgcagcatttttatatagccttcaaaaccccaaagaaaatagggttaattgctcaaaattgttttatacaaggaacagttgggccaaaagcaccccacagtgaacataaataagagtagccctcaagcattacagattgtatgttcagatatttacataacaaagaatggaaaaaaatgaaaaataaagatacctcaaaagcaaagccatttccttcaagcttcgtgtattcgcctttcttttcatctcagcaagctcaggaacatcaaacatgtgcttttttgagtacacacataataaattcctgagagccataacattttttttaccttatcagaacatcaagaaacaaggaagccacaataattatttttaacatatcaaggaacatcagaagcacctccccatgctgaatggcttgcaaagcggatctgtcacaaccctatctccagcaacatatgtctacagtacaaaacctagagtttggttatgtcaaagacaaagcttttatagacagaaaaaggtagaactatagaggggggagggggtgggggggaaggaaaaggaaaatagctcacaatcttttcagcaaaatgtggatttgttgattcgagcaacaatgcaattactgctggatccgcctcagtttggtgatttgacatcagaacaatgttgtgaccctgcaatcagtagtccaatgtcaaaactatactgcagaagtcgcctataatttttctgttttctctcatttagcacacatgagcattttaactttgtcattacgttactgaccacatgatcaggcattggtactgtggggaagagctaaactcaacaaaagaacatggcatctgcatattacaaaacacggaaacatctagatctcactatccaaatctcaggcagtcaatgataaaccacaagataattaactgtgaggaggacttgaaaacccagataaaatcccaggatagtggttgtgacagcaataacctaattccataccggttaagaatggcttaaaatttcataacccaagctaagaacgtactggcagattaaaattgaatcaacttatgtatctacaacactgttcataactttctacactacatgcagtataacaaaaacagcatttgcttaatctcacaaccttgtcttgcacttcctaggttcagttatccagaaatatttacaaaaaatcaccctgaagctatcaaaattgcacggactgtacatatgcaagtatacaagtaccagaagtattttgtgaagtcttgaataaaactctttaaggaagttttgaaatgaactctttacagaagtttagcacaaaggtaaaagttcttcttgaaaagataactcatcagaacaacaaaatattcaacatttacgaacactacacctccataaagtaaagtttgcaatcagaataagcacctgctttaacttttcttccatttcactgaagatggaaatattgccaacatatgagttactgcatcagggtcaaactttagtttcaggaaagggtaaaacatgaagaaaccaacattatcaaagtagaaggcagatcaaataaatctcatgtacacatagtattcttaaaacaatatatgattagaaacaaattagaaacaaagtgaatctgattatcaaaaaagtcctcatacaaatcaaggaacaaagatttaaaaaatggttaaactattgctcttggtgatgcatgacacatgagtaaaaaaatctattaaaatattgtgaaaatatcataaattttacaatattgtagatatgctcattagtttagcaatttattacaaatgtacttagaaaaattcttaagtaggaataggacatcatattaccccataggggccttttctgttttagcacctataaaaattataactcaactattttaaattgattgcatatattataatatatattataattctaactgacatccagtcaatcttttagaaattctaaaaattttcccgggccaaaatatttttgttagaatattaattgtatattagttgtaaaaattaaggtaaattgtatttagtaatttgctagagtagttttccatttaatctcctacttttgtatataaatatatactattctataaaatacaatacacaattctattcaccattctctacatggtatcaaagcaatacttaaaattgtgattcaaaattcgaaattagagtttataaaaacataataatagaataaaaaaaataaataagattaggatttgagtttaaggttccttattcgaaaaccctagttggagagcgagttctctcaccacccacatagacaaattccgaagttcaacagcttggatcaccgcaggtgggccccacacgtcgccctgactcccacgcgacgacacgtgagcccgcgtccgacctcctttttggtgacgataaacttctgtcacgctcccagcccttccctgtcctccttgcatcagtctccgacggttcttctcattttgtggtttaatatttctgctttcctcatgtttgggcgttcattctttggtgttcgcttttttctttttccctttcaattgtttttgctttcgagatcatggcaaagataaaattaaattcgaaatcagtagttgtttttgatgtggttcccgtgatgtctaaaattacagaccataaattgattggttcaaattatttggagtaaagtaagaccattcgactgtatctgagaaatattgacaaagatgattatttgactgatgatcctccaagaaaaaagacaattcaagaaaaatatggctccatgaggatgctcgcttgttccttcaa

SEQ ID NO: 161751 - DNA, 2882 bp, Cannabis sativa
aagtgggaacaataaataattgcttaacaattgaactagaatagagaaaactactataaacatttgagtcaagtaactagtgtgatttactactaatgagtaacccaaaaaggagtccaacaaactttgacctttaatttattgatgcattataaagtaaggatggattttttaatggtgaacaaagtcaacagacaccccagatgtcaggataagcattgccttgagaaaaataatgatttctacttttgtaagctcaaataatagagtataacaaccaaattccaaatagagctactactaccttagtggtttgacaagttaggtggggttcagtacccaaaagttagtgaatgcatatcatatgaaagctttttgagcgacttcaccagaagcaaaaggaaaagaatgcatgaacatcattagtttcaattcaaccaggggaaaaagcaattacaggatgattgatttgaacgacaagggctcaaagtttagataccatttcaccaaattgcaaattccaaagtgaagtaaagggctttctaaaacataatggggcctaaaacaatgcatctttcagtctcatctcgttccagccttgtaatgaaagccatatataaaaattcattaaaaaaaaattaaaaaaatcaatgagagcaattcagagaaacatgtactttataaaaagtatatattagccatttccaactggaaggaactcaaaacgagaccacttagttaaaaatactcttctaaccacttaacctaacctagctccaagtagctaaggcacttttactatatcagcaaagaaaagggttttcaaaagtgaatacaagtaggatcaaaaaatcatcttttcattcctcaattttgctaatttgtttaatgaaagtttggtcatagttaaatctagctctagaaatttcagataagcaatgaagaaaaataaaagcatataaaacaatctcttacattggtatcagtcagctccagattatagaaatccatagactcagccttgaaaattggcccagcatgccaagtcccacgattgagcttaatgaacttggaacctgagattttgaaaacacgaatctcctcaacacgaggaggctcatacaaatggccactcgaagccttcacaccgttcttggccaaatcactctccgattcatttaaattttccgacagagatggcctagccaccccaagataccattcatggcccccaatcgaacctagacactgggtcactctcgcatggtgtgtaattgacgcaaattccagtggtcttttctcaattttcataatgtataacctgttcgatacgaaatcctaaaattaacaatcatcaattaacattcaattgatttggtagtggataatgcttgaatgaaaaccctaagtatgaattgagatcaaaaccttggaattccatgggtgagatcgagttgagcatctttagagctgaaaagatctccgtcgtcagaggcctcgacgacctgaccgaactcttggaaggtctccggagtggcttcgatcggcttcagcttgatcgtcgctggcttcggtttcgatccgaaacgattttccatttttaccctttgcccgtagtaaggagagtttcgcggataagaagacaatggtggaggaaatagaatcatcgtcccatgagcagaacgtcgtcgtttctttctctattattcaaaataacaataggggaggattatccttttttttagaggttaaatatagtgtgttatcataaataaaaggataaatgacttacaataactgagtaaattgggggagggatatttttcaattaaaaataagctttatctgtaaagtatatcgaaacaacccatgagcatccatattgacattatgctttacttgagaaatagacacactaaggagagatgataaaagataagagatatttaataatgcatctgtttcaatatgtgtaatcgacacatccacttatagaatccaattcaaactatgaaacaaagttttggcctccatttcacgcgatgcaaaatttcaaaataattggctttgataagacagcaacaacttggccaagagaatcacgagccaccgactccaatgcagcatccacattaagttttatggcgttcattggtggaggctgccatggaattggttcagtggagcgatgaggctgttgtcgagcactgctagcagcagattgctgttgaggagggcgagtagcagctagtctgaacttagtttgagcaaagatatagttctgcaagtagttggttgcgaaggaggctaacatcttgactggttgggcaatgtgaccatgaacaatacgatttcgctcattccagatacaccatagtgtgcaaatgatttgatccatttctggtttagtgtaaatagttgacatataagctaagtaatcacccttgtgcaatattgttgacaatttattccaatcaaaaaccagtttcaaagagcgccaaactgctcgcgcatatttgcagccaaataaagcatgtcctatggtctcctaagcccgatgaaagatggagcaatttgagtttttaatgatctttcttctcacaaatgatgtggccacatgtgctacattataaagaattctccatgcaaaattttttaactttttgtgggagattcaaagaccagaaatagttccaccaatttattgttgatgaagatgtcgaggaatgagcaatatcatcaagagcaacaacaaggtggtaacctgattgtattgtgtaatccctatgttgttgtgatgccaaatcaaagtatcattgctggggaaataactgatagagatgggaaatttgaatttctatacttacaaaatcccattattt

SEQ ID NO: 161752 - DNA, 1245 bp, Cannabis sativa
ttaaagtcaagtctagcaattataaatgttaaaaacatttgtggcaaatatcctttatcattggaacttttgtgcacaacacgcaacgcaaaggcacattacaatatgaaatatcacataagctatcagtggtccctacattcagtcaactatcccatgactgaacaaaattttataatttcaaaaatataaattaaaaataaataaataaaaacaaatacctgaattcaaggactaatatgacacacgtagagtgagaagcagaggataacagctcttcagttctgattatagtatcggttaactgaaagaaccaaaagacaaaaacaattattatcatccaaagatataatatatgttgccataattacccctaacgtttaaggcaaaatatttgccgtttttctcagcaatcataaggactaattagtcctttaacaaaaaacaaaaactttgttgtcttcttcctaatatcttaatctatttataatataattttttcataaaataaatcattttttaataaatttaactctttttctatggtaactaaataaaaagatttgggaactgataatgaacagagatctttctttcaactaatcagcactcacaatagaacaatagagtagcaaaaggccttaatttaatctttcttcattcattttaaattaatttctttttcattattttgttttttgaaatgttctttttttttcatttaatttctttttcattaattgcatgttaaaaaaacatttttttttttttttaaatattcttcaaagttcttatttaaatttattatcgaataattttacaatacaccccactaaatcaggtgtcttgatgtaatgttaactgtttcgacatgtagaagaattttttagtccaaagtcatgtgcactctttgaattttatttttgacgtgttaaattttttaaatttctcaaaattttataaataattacaacatatacaaccataaaaaaattcgtctaattttttctagataacgaaacagatggtgcatcggtgcactcttttcaagcagtgtattgtaaaattttactttattatatataaaaaacttattttttttatttcggagaagtctaccatgcatcctttaaaaggaatgtactaatatattttttagtattcgaaataattttttagtcaaattttttcatatggttatttaggttatagttatttaagatattctgtaaaatttgaaaaaaa

SEQ ID NO: 161753 - DNA, 3411 bp, Cannabis sativa
aattgatttaatatatttttggtacataaattaatattaaaaaattgtaaacaaaattaatattttgtttattgatatatttttaatcgtgatttatgtttcacagttaatatatatcaattgtgattttaagagagcagtaactaatttacgtatttttgaaatataaattttatcagttgtttctcatttgtttaaataatttttttaacaattttaataaattatttgttaaaattcaaatgttaattataaaatcgaaatttcattaattttattaagttcttttgttataataaaaagtaattaattctttaaattgttttaggtgtgcctttaatttcaattaccttagaagttaggaccattagtatgcaaattaaaggactcatctcaccaacctcaaaataaatctttaagttgaattgtgccattaaaactaaataccaacttatatactcaaaaaaaccattttcttgtttaatttaaggttttttttaatatatatatatatatatatataaatatgtatgggcctataaactaatttgggctaatatcctatatttttttggcccactctagacattaataaagcaagaagcttttattttaacttgttctcaatgtttggtttaggccaagaaatgacataatgcattttgaccaaatgagaaagaaattaattttatgttttttttaaacatgatataatcacatgagcaatacaatgtgtatttttaatttggttcaaaagattgggtgtgtactagttaattattaagtgaggtttaagaataaaaagaagtttaaacaaagtttcaaaatattatatagggttgcataccatctaaattaattcaattacatcaaaatttatacaaattgtgtatctaattacaattagattggattaaattagatatacaatgttgtggtgaatcctcacccttaaaacaagttgttacaacagtaacaatgtccaaagaatacaatttaaaactaaaaccaatcacaaaatcaaaacttaaacttaattgaaaatagacaattgtatgaaaatcaatatcatactattaattctcattcctttaagtaaacatgtcataaaatcttttatcaaaattttatttgatttaacctcacacatttacattacaccataaattagattatttgcaatatacataattatttagagaaatattaaaagatactactggtgtctagtaattttttgagtgtcatatcgctattaatgtgcaattaaatattgagttccatataatttaatttaataatttttaaaaaaatatcgctaactaattgtaaaatatctctagatggtgctagacatcactgatgtccaatagcaatgctcgtaattttacactcaaaaattaacagaatacactatgaaaataataaacaattataatatgcactataatttaggagtattagagctacatttagctaagcaatattcattaggtaaatttttgagtactgataactcatctattggatgggtattttaattgttttttttttttgttagtttttaactaaaattttacatttatagctattttacattagctattatgagtgttctaacattaggtacaatcaatatttaatattattatgaagtgattttaaataattagtaatatttaataataattattattttaaaatatataaaatctaatatttaattatattaataatattatgacccgacaatgttcaaaataactcattaaactttttttttctgttctgaacaaaattatctttgctcaatataacagacaacaaatcagacaaaatagaatcttctataaccacacaatcagctagccgtcaagagtttctggtaacataatgcacaactcaattcacaagccacttgacaaaaaataaagaaacattaactaaaccacccaacaaacgtttacattcctcgattaaaatcccaaacacatgacacatctgaattgtgcttcagttagcttccaccaccaccaagtcgcccgtttcaatcacaacaggcgcaacatggtggagctttaacaaactcagcacctctttaatgtccatagcctctgccacattttgagtcacacaaccatggaagctttttccctgaactaccacaaataatccagcgacgtctctaacaataaagccaatgccgaatcttccatcaccatcaaaaatagttacattgatgttaactttgatgccttgtacgggtttagactagagctctttatcatcccctccaagcaggagacacaacatagtaatgtttcatctttcttgagccttcaaccattgatcaagagacttaactgcaaacgcaacaactccctccactttcctccttcaatttttccatatcagctcgttatgagctttccacagagaccaacacaccataaaactgtgactaagatgaaaagaatcaacaatcttcataacgtcttccaaccatccttagaccgagctaaacgttcttcctatggtatcaataccaactaacttccaataatcccaagcaaagttacacgagccaaaacaatgaatatcagattcctcaaacaaatcacacacgggacaaactgtttgtaatgagacatatgtaatacaaaggtaaacaccgctccccacatgaattctttaacttttgttgggactgaaagctgccataatgctttccaaaaaccaaagttaacatcaatcagatatgcacctttaagaacttgtaagcgttgataggcactacgaatggaataatgcccactcttctcatgaaatcaatacctagaatctttagttgaggaagagcataaaagaattcccaagataacatcaacatcagaatcagagaacaaatccttaacaacctcatagtccaaagctcgcctttgaacctctaacaaattgctcaccataaaaattttcaagccaagaaaaataagaagggaatagacaaactcaccacctgaagccaagggtcatgcatgatccgaattgaagtaccaagtctcacccttcttctaagcctatccttgaatatctttcgaagcaaaaatacttctccaaataaaactcgagttagcacctagattcgaagaaagaaaatcccatcgagaataataacaagcacgaaagactttactaaccaaagaatcaggcctaattaataatcaacatagctagattaaaacctcttaagcttcgaaagtctaaccctctaacatatttatgtctcatcataaaatcctaactcattcaaaaaatactcttttcatgatgcagactttcatcatggccattagttactcaatttagaggaaattatactctataccctttttatattgtcctcttttagtt

SEQ ID NO: 161754 - DNA, 4586 bp, Cannabis sativa
  modified_base (4538)..(4551): a, c, t, g, unknown or other
tttttatgagggaaaaatcaaccaaaccgaccaatgcttagtcctatttggacctcaacctcttccttcctgaccccgaccttgactctgatcccgacctgtaccccgccccagaatcgtggtctaccctggacccggacctggacctagccttaatcccggcttcagatccagatctggacccgacttaaatagaatcaacaaatgaaaataaaaataaaatttacacaacacacttttatttttaaaatttaaaaataaatgtggttatagaatatatttttattttttaaaaataaagatttttttttttttttttgagaaaaaagaaacctgagctttactaagaagagatcaagactacaaaacgcttaggctaaaatggaaggtaaggaaccattcgaacacactcattatttaaccctaaagctgctttagcataattatgagctaatttgttatactcccttggaacatgagttataagcaggtttggactgaacaacaatggtatcttaatacatttgataatatcactaagaacagaattattacaataaaaattattaattttatccacaacactcttacaatttgattcaacaatagagattgggagcttggctgcttgaatccagtaaatagcagcaagaattgctttagctttagcaacttcaggagaaatcacacctgcaactggaataactaacccagcctttatgttgtcacagtcatccctagccataactccaaagctatgttttttttgaagcaatgtcaatggcagcatctgtgtcgattctccaatgtccagaagcaagccaaggtacctattcacctatttcttgcccttcaggatgcaatttaaaatcaagatgatgagcattttcatattcatttaaatagttaacaacatgatcaaaaagctccaaaggggaaatggttcttttattgtgaaaaaggttgttacgttgattccatatcaaccaaattagacataataacacaaccaaattatgtttattatacagttcaaatgctttggcaatgtacatatcaatatcatgatctttattttccatataaaaggtggagaaacagagtgtttccaagctttttcttttttttttttggcatttgaacattccagggtagcatgtttcactgtctccaatttcagttggcaaagaggacaggtaggcgaggggatgatgtgtcaagagaacatagaagaggaacctgggatggaatgagaaagtacacaccacaccaaatgcttaactttaggtggtgtagtgaacatctaaattttttactagaattgtttacttacattaaatgaagaagaagagggcagaccctagacttgagtgcaagatgataaactgttttaacattaaagagacctgagaggtcatgaccccaaattaactcatccttacagctattacctgaaattggcacattaaggatgttatctacaacttgaacatcaaagtagtgatgaagcttagttggatctgaggcactagacggggagataaaaaaagataaattgggttcaagagggggaagagatgagtacgatttgagcctaaaatcaggaagccaatgatactctatggtttgaatttccttgccatcacccaccttccatataagtccctgtttcatcaaatttcagccccaaagaatgcttcgccaagagaatgaaggactatggccaggagcagcctcaaggatcgaagtgttagggaagtatcaggctttaagagttagactgagcaaagaatcaggacacttaaaaattctccaggcttgtttagcaagcatggcttgattgaagtgggttaaagatctaaaacctaaactgcccacaaacttggattgacaaatagagctccaatttttccaatggattttacgagtgggttaaagattcaattcttttacaaatctttgtaggtatacgaaaataagccatagcacaagaagggataacttacaggacaaccttgataagagtttttttgcccgctttagaaaaccatttatggttccaagagtggatgattgaggaaattctatccttgagaaaggtaaaagtaggatatttggcacgagagagacattgtggtagaccaatatatttggtgataaaaggtctattttcgaattgaaaggtatgaaagaaaaggtccctgatagtagtttgagtgttaagagaaaacaaaatagaggacttggtaaaattaataacctgtcctaatgcttttgaataaatagtaagtgcatgatttaaagcttcacatgagttgtgatcagcaaaacaaaacaaaatgctctcatcaacaaagaggagatgagatatgggaggggaatttttagcaatggcaatacctcgaagaagacccttgtcttgataattcataagaattgttgaaagaccttcagatcaaagaatgaacaaatagggagagaggggatcgccctgcctaaggcttctagtgggtttcacagcacctcggacatggccattgatggagaaagagatggatgctgtagagaggaatttcaggatgagagtacaaagcgaacaaggaagttgaagtgaaacatgagattcctaagaaagtcccattcaacacgaccgaaagcttcagccatgtcaagctttagaacagtccaccctctcttaccaatttttctactggtaatggcatgaacaagctcattagcaatgataatattatcataaatgacaagacccaagacatacgcactcttaatgggagagataattttatccagaatcaatttgagcctattagcaagggtctttcagatgaatttataaaatgtagtacaaacgttgataggtcaaaaatccattagcatattaacatgctgctttttgggaattgaaacaattagggtagaattaacatcagtgaaatcaatttccttatagagacaatctaaaactgcattagtaaaatccctacccaaaataacctaggtttttatataaaaataggcattaagcccacctaagcctacaaccttgtcccaagaaagctgaaagacatctttccttacttcattagcagtgaaatcctaatctaaagccctaatatcttgttcctcaagaccaggtcccatgaaatcaaagattgaagtaggagcttcaatatcactcccctaagaagaaaagatgtcagaaagataggaggttatcaaatcaacaatgtcatcctgtgtgttaatcacagtacaatcctcagtcttaagatacttaatactattagattgcttacgaaaaaaagcatgcttgtggaaaaattttgtattcttatctccagccttaagccattaaactctagcccgttatttccaataaatttcctcttttacaacatcgcatctagcatagattgcagctgagagaggccatttttatcattatcactgattataaccttattctggatattattaatatcatgagtaaggtattgaattctagttttaaagagatggttgttgcttttattccaagtcgtgagagaagagatacattgatttttcttagagatgaaactatgaaaatggttattaggctgactcgaggcaggacaagtattccaggctatatcaacaagcctgtaaaaattagggtcttcaagtcaattattttcaaatctaaatctcttattcactaaattaacaggattgagacttgtagaagctaaatttaaagtacgatgatctgaaccatagaaccataaatggcgaagactattattaggatagagatcacactaagactccaaaactacagcccagtctaatcgctcactgatagttttattagtccaggtgtacttatttccaacataaggaagagagaacatcacaaactcactgagaaaattggcaaaaaaaaagtaagttagtcagggagattcccaccaaacttatcactattgaaaagaaaactattaaaattgcccacaatcaaccaaagcagattaggagcattataaaagagatcatgtaataacttccaagtaaaatgccatgagaattaacaggagaaccataaaaacaagtaaaatgacgcatatcattaacattaaagccaacagtacaatctatatgattagaggaataatttaaattattaacataaacatcagtcctccacaaaataagaagtcccccaccaaaatgctgcctatagggacctcaaaaccacattcaaaacctaaagacctcttaaacctatctacaaagtgaggcttaagcctggttttcatcaaaaaagaagagtgggcctatgagtcttaacaaggagggaaagctgatcgaatgctaaggattccctagacctcaaccattctaactcagaagactcattattctgggctggtgtgctcagcatcactcgcatgttcaagatcatcatcagaaggtggagcatcaaagtctctgtcgccagccctagcacgcttgagctgttggaaatattttaccannnnnnnnnnnnnntaacaagtatgtttcattaacaacctaatatgaat

SEQ ID NO: 161755 - DNA, 2464 bp, Cannabis sativa
gatccattagaactccttacaatacctggtaagttatcattgtccctaacacagaaaagcctccccgattttctacccctggtggagcttatgttaggtgcagaaattgtagattgaatgaagaactagtaaaatataaaggaaagaaagaaaaaaccgaaagaactcatctattgcgaaatgagtcttctggggattgaaacatcagttgccactgtaaagatggtctggtggattggtttgcaacaagaatttagcaagagagttttgtagtaaattatgcatacatttttttatcagcagttgttggttggtctcttcttagaatcataattaaaggagcagaagagatcaaatctgtagtcatgcattaaatttagggatatttacagcaaaactctcttaacatttataattgttacacatatgactttaataaaaaaagtagtagcaaaagtaccttatcttgtgactttgttgcgattgtacccttttttggccattaagtgtcagctcagaaacaagtgacaatatattattagaccacgtattgtataagctaaaatatatatcgccacatatttctgagctgacacttaacgagtttaataggcacttacttaacaaccaaaaaagaatgcaactgtaataaaatcataaaataaaatacttttcacactacttttttttattaaggtcataaatgtaacaattgcaaatattaaaagggtttcaccgtaaatatcccttaaatttacaattgattaagttacttgtagtaggtttagtgattagtttaaagggatacaacaattttaggattaatcaccaaaaataggctcagaaacaaggtgatattattttattattttgtttcatttttttggtaaaattgttgaaatctccattttcacctcattccgaatgcgaagcaccagagccggcgcacccccgaatgttgtaaatcgcagccgttaaagccgtagcagccaccttgcccctccctttaatcttgtttattattcttaatattacattttgttggataattatattttctttgagaaattatttttggaattatttcgctttcaactattgatgacggataaaagagtaatgatatatgtacacaaattatgcaccaaaatatcatcataattttgtgtaggtatatttattactctataaatagaccaatttttgcaatttgtttgatgtgattgtatcattataaaatgatttttgttatatttttccacgttataatgatcaaaattcaaaataatttagttgaagagataatgacatgatgggaggatatttggctttgataaaacctcataaatatcatattgtaacatgtattgttacatatggttcttgtgtagaacctatgactttcacttatctaaattcttgactagggtgacgtggcatttcttatacatgaaaatgacacaaaaattatatgaattatgaatgtctttttttttctttctaatttatataatatatatgagaaaaagagaatcacgtgatgcagatttttttctcactttttcggtagcttaaacaatctcgtagaccttatagcaaccactacctataagagttcccattccaataatgccccttttaagaattaagcataattcctcacaatagattgtataaattatggatgttgatataggcattatatattctaacatacatatttaattttttaaaattaatggtagggactgggagtgtacattctgtaataattaattatgtacatatatatatatatatatatttttttttaattacaaagtgattttttttgtttgaaaaaatatatatttgacttacatgagcccagactattagaccactactataattaattcatagttttaaaaataacagaatgagagtagctagcaaggttaattaataataatatattacataattaaaaagaaaaagaaaacgatgtatctaatatatagtaagttctagttgatgttgaccagaaatataaaataattaaacattaaatttttatttttcttttatttatagtgattaaaaaaatggatatatttattttaacgttttctgtaagtggaaacatcaactcagctgtagataaacactatattgggtcgtcaaaaagatataagagaatatttggtataagtaattttttagtttacaatattgatttaataatttttttttgacccaattataatttttatttaattttatcactacataatctcttaatattttaattttgtaactagacttaatttttaaattaattgtaaataaatttttaattaactgtaactacatattttggtttatgtttctataacatccccacttcaagcttctattgggccattacacggactaatggctcttatacacgggtacgccactctagctgcttcatggactgacg

SEQ ID NO: 161756 - DNA, 3149 bp, Cannabis sativa
gaaatgaaaattgtttttcttagagaaagggggatttgacaaaagatgttatggtatcatcgtcaaatacatagatgataagaaatcatacagccagaccattttttttttcggtagattgaaaaggggaaaacagtgaaatccatattgttaaaaaacaccaacagtcacctgaaattaaaattttccctaatgtgcataatttccttgccacctttgtcattttgacaaggaatttttacattaatgttcagtgcactggtgcctagccaaggagagaaagttgttaattatcctactcgtccagtagacacaactacggactttgaagggacaacgagtctccagccttcacaaccggtaagtcctatggtctcctacatatatttgtatacatttcttagttatttgtagaggagggggggaacgattgttgagaggcatattgataaattcccaaagttcttcccaagacaatttatttcggtaaagatctttaaaggttctttttgtggctaatcacatttgagttgtactcctttccgaatgttgaaatgttttaaaggttatgcttctaatgaatttaataattgcaacatgagtctagacaaggtaaggacaaacgaattatactttaatggactgccataaagatagtattttagggaaaaaagacatggaaaaatgcattaaataacacaaataagaactagcaacaaatatctgataaaatcagttaagaataagtgtgcaataatattagtctattttttataaatgaccaaatttttctgaagcaaaatctctatttttttttcttttatattcatcataatatttaccctgccccctttcatttttaaccataatgattaataaatgctttttaagcaagctcatgtgaacacatgtattctattttgtaatcgggtagattacttggttaagctccgactgaaagtagatgccttatattagtttgcaattttctatttctgaagtgggctgctacatgcatcaactatattttagttaaagcactcatgtatttaatttacttaatctttctcactcattttcactgggaacatctaattgtttgtttaggatggcaagcttttccattctctatttgatttgcttatgctctgagtgtttggaccaggtttcttctggcaatgcagtagctggaaacatggctggtgttcatggagttccaaatagaggtgtcgctcggcctattattggtgttcggatgcagtctcagggcatagcaggttataatcttggttctcaggctggaatgggtggtggaatgaacccaggtggtatcccaatgcagcgtggtgttaatccacaggctcatcagcaacaggtatttttgttgagtattgatgtacttgtggaaatgttgtttcattttgctgatgcatatgcccgacttattcttagcagttgagaagaaaagacccaggaatggggatgagtgggtatcctcaacagaaacaaagacgcatgtgaagtaaaacatctgctataattcttcaggttgttctaacaattttgcactttatacgggtgtgttttctacgtgctgcttctcaggaaactagtattaaattattatgtacaatatagccaaaggaggttctgcattggtttagacttgtctaagaattctgtggttcaattattctagttatttgtacttgaaacaaaataagaaaaccaacacatttaaaatggagtaaacttctataaataatcctaatcttgaacgaaaaatcaaatgtctaatttcaattattgttaagaactccttggttctggttatttgtgaaagtgtttttagtttgttatgatattgattgatgtaggattggcatagataagagagaaataaatagatgatgtatagaaggtctgagtaattgctttcataataaatgagccatattatatactttcataatctaaatttcaaattctgttgcaatccatccaacttacctctaaaaacaaaataaggaaaccaactcatttgaagatatagagcaaacttccataaataatcctgataaatctttaaggaaaattaagtgcaaaacttgaatgcatctccattccccagttttaacttatttcattgaatagtttttttccacccctttttcagtaagtggcttgtgatgttttgtcatggattctttatttagataattcaggtttcaattgttttcatggaggtaaaaataggtgcagcatgtttgccttctaaaatatgaaatttgaaattgcagtggtcatagcatccactgaagtttccatgtattttcatcaaatattcaccttatattgtttagtgcaggggatttatgggagaagttgtagataaacttagatggagaacttgcatggagacctgaaactcatccaccatgatgccgcagactcgaaagtggagaaggttttctgtccaatttgacaatttaattttcagctacaagaaggtggtggagcttagtaatgatattagagcctgagtatgaaaagcttcagttccttcgtgttggaattgtggttggtagaacaggactacagttttggccgaagttgagcactctggttggagttcatcatgcttgtcctgttttcatattcaacatgtattataattaccacacaagttttgatttttctctgtaagcttgccattagctaacattcccaatttgtagagaaaaagtggaatgttgtatcaaaattgctttgatgattctcagctactggaactttgttatttatgctaactaaacctgacaagagatctacattgctgaagtggcatgctagtctattttattttatgctttagaaaaaggacttttctctatttaaaaaatagaagaaatttttttcttttgtaattccttttttaataatgatatgtatacacattaatttcaaacaagtttttttcaatctaatcaaaaattacatacaaatttgacacacttgtgtgtcagtttagaaatataagctaatcatctttatgtaaagtggtcccacttgtaaaaatggacttgttatgtaaatgttaggggtgttcgcggtgcgggtggtgcggtttttaaccattttttcaaacc

SEQ ID NO: 161757 - DNA, 2252 bp, Cannabis sativa
aaaaaaaaaaaaaactgactgttaaaaaaaattaactgaaattaattactatttacaagcctgcaaaggtctcaattgaattgattatcgttcatcaaaataatttaacaaaccatgggtagttagaataataaaacacttgaacatattccaaagagaaaacaattcactaaacacaacgttcaagtttctacatataaggtaattaattatacactccttcaaacagaaaaataaattacactacttcacaatcttattcaattaagattattaattgttgtgggacacaaatatatctagcaccactataaggtggtgttctataatttattagcggttaataataatttttattaaaataaaataaatgaaacccgatattaaattacatcaatcgtttctcattattcacaatagcttttcaccaatcatttgtggcttggtaggccaataatctctcaaaaaacaataattgcatctctaaacgagaattgctaaaagacatttttagaacatgtttgactatgttttcagtttttaatttttaaaattgtatttttaaaagtaagaataaaaaattgtttttttgttattttaaaaatttaatgatgtttggcacaaattttttagaactatttttaaagttttttcttgaaaaaaaaaaactaatattttaacaccatactataacatgaacccatccgaatcccagttcgggtttagtttcgggtttaggatccgagtatgtgagcaaaaatgtaaagtataatatgttagacaaaaaaattatttttgaaaattaaaaacaacattttaatgttttctgttttttaattttttaaaaaagttttgtcaaacgattcctataagtaatttttaaaaactgttttcagtttttttaaaaaaaaaaaaaaacaaaaaacattttttaagatatgaagctaaataggctctcctttattagtggtaattaagtattaagtctcatataatttaaaaaaaaataacttttagagaatatcgttaaccaatcatagagtgttacctataaaaagtgttgaacaccacggagatgcttgatagcaatactctttataaatatataaactccatctctgttggtgctggtgtggtagtgtttttctgtaatggtgcctttttcaaactcttaataacatacaaattaacagtcaacagattctaggagtgttgttgtattttaactgttgaaatatgagttatgttgatttaaatttcatattattaatatatttttgtgctataattgtcaataattattgtgtaatgtaccatattaccaatatattattgtgtgccaaaaacaaagaaatagaaaaaagaagaacaaaaaattatgtctaaaagcatcaaaacttaactcaaaaaactccttaaaacaacgaattatatataactaaattacatgactaatccttacaaataataataataaataacatgactaataaacacgtttgaatatatttccattattaatatatatatagtgatatgcattcattttttcacggtttaaaaaaattgttttagtatatttatatttttgtgtacatatatatttatttaattattttgatacgtaacatgtaattttgtcaacatatatacaaagcctatattatgtgtataaggtaaaatgtgagattgtaattataatttgagcataccaaactttaatttgaagtaattagataaatactatatttagtgtgattttattaaaaaataatttgaaagtacatatatacattattaggtcgttagatttcacagtgacactattggaaaaattatcaagtgatgagatgatgagcatggagcaagctgtggaagaggcttataatattaccttaaaaccatggcatagatggatatcttcagctgcctttaaggtatatattatctttttaattttgtttaatttgatacatagtagctaataaaatatataatataatattatattacaattatatttacaggtagctctgaaattagtaccagatcgtgaatacttcattagtcttattttggccaaagatgaaaattatgctactcttaaggaggagatgcacactttgattctattacttactccattactcgctcacattcattctattctggtaattaaccaaataattaattagttatatgtatagaacatgttgtttataagcatctattaatataagtttttttttttt

SEQ ID NO: 161758 - DNA, 2534 bp, Cannabis sativa
  modified_base (1868)..(1876): a, c, t, g, unknown or other
ggttcgcggagagacaatgagaagaacggttcgtggaggtcgaaaaatgtggtgagcttcgtctgcgatgttcatagaggtccgacaatggagtttgggcagattctgggttttcggtttggtgaagatggagctatatttttgttttattaaaaaagttttaattaatttcactatattactttaatgatttttgtattttaacgattatatttcttttaaaaaacatatttagttttctttaatttttttatatatttaaatggcttttcaatatttttaaataattttttattaaaaaattaaaataaatgatttagaccaatgaaaagatgacaagtgggcacttacctggcacttaacggccaggtacctacggaagttccagaactctaacagaaggtatttttaccgcaaaaaatatgacttaggtatttatctgctacttagagtaaaacttaagtatttttaccgcaaattactctcttttacattgtttgccccatatatttatctcacaataaactagagatgcaagctgctagctaggagcttaggattccaatatttgataaccaaatttgtgttaaaattttttagagtcatttgtctcttggttagttaagtttgtgtgtgtgttttttttcttcattattaggcaagtggttaagttgttagttaattgtgattgccttgatcagcttgatcatatctcgtaatatttgatggcacacaagatgaccctgtttaccacacatatatcgtgcaaataggtcggttgcctcagccctcttctaagcatgtctaaaatattcatttagttggaatgggttagagttctgatcctacgaataatttttaatctgaaacattcagatacttattggatctcagattagatctactttgccccgcctaattttttttttccgaatcaaatctgatccgattttgtttcaatatattaataaaaaacttaattcaagaatcgaatcctgaagccagacccggaccccttaggacctaagacctgaaccggacccaccaaggattcaaacccagacccgcgattggacccgaacccgaactcgaacccgaatacccggaactggcttcgagaccggactcggacccaaacccagaactcaagctcgggaactgagcctggacctaggacccaaacctagaccctgacccgaacccgggttttgggaccaaacccgaactcggacccaaactcgcgacccaggctcgagactcgggcctggaaacgggacacagacctagacccttacccaaacccaagaccagacccgagtttgaagacccaaatacccaaacctggacccgaactcgagatccagtttggggcccctaacctaggacctggacccaggaccgtacccaaactcagactcaaattctgagactaggacccgaactcgagattggacccgaaactaggaccgaacctaggactagactcgaacccaagaccaaacctagactcaggacccgaacctagaccgacacttgggactcgaaactgggatcgggacccgaattagaactcgaattcgaatcaaaacctgagacccaaacccgaacccaaacctaggacccaaagccagactcaagcctggaccctgacctgaacccaaacctaggactcgaacccagtctcggacctggaccctgaccttgacccgagcccaagatcggacctggcgaacctagacctagaactgggactcgaacttgggacctagattccagacccaaacccgaactcaaactcggacccgacccgtagttggtgttggggtcaattttattaaaaatgtattataactttacacaatctattnnnnnnnnncaataccaaacataatattgtattaaatattataaaattataagtttagatataaagttaaaattctttaaaaaagagttaggtcggatcagatccgatctgagtaacgggtcagactcgatctgatctgagtatctgatctagcggggtgaggagaggcgaatccttacataatctagatctggttagatcatactcggatcagatccgacccgatctatttagactcctaacctcttctagtgaagttgcctcttccatggttaatccacaatttgagttgttcctctataatttcctctatttaataatccactaacttataaaaaaatgaaccacttaatgtagagttgagagaaattttcttgagtagtatcaagattcgatgtagaaatttgtttaaagttttattttttattttgaacatattgattgaacttcctataatgtgagagcattaccacaagttaagaaaacaatagaatacttgtaattcatttcaagtccgccaaaaacgtagagacacgattcttaattagagaagcattatccaattgctgccagagcatcaccaagactcttcatttttaagatgtatgtaacgccccaatatttttccttattttacaaaatactaattttgatgcattaattaaaa

SEQ ID NO: 161759 - DNA, 2548 bp, Cannabis sativa
tttaaatttaagattctaaacagttaaatgctaatctcccaccatatggctataaattaaaataactagactttgctaatgtagctaagtttctttacatttaatatataatagagaaattttaatttacatgtttttaattggatagttgaattaatgcctcctcgaatatatatatatatatataaatatattttgactttattgtcaagtccctaactacagaatttataccttgtagatcacattttacaggactacgtaagagtatacctggacattgggcaaaccacatataatatataataaggaaaagagagaaaaagtagtccaaacgtacttgagctaggaagcttcagtgcatgtgccattcaaaaatatcattttttttttccagttaattcgatccttggaggtgatacataaattaatttgattcaaatggtaacgaggttggaccaaattggatgtagatagctaaccgtattatttaattataaataacgtataccaaatttcaagatcgacttggaaattttacacactaaaaaaaacaaaaagataaatcgtctctttcataataaatgataacgaattcatatcaaaattgactctgcgttacttattttaattaatatcataataaaaaccgatgcaggtcaaagattttggtggacataagccactagccacaatagatgatatattttttttttttttggctttttgagatggattgtgttggaattgaagaacataacagcgcaatctatcatctattagaataggtttttttcctcctattatatggacaataaaacagcctagttaatagttgttcccattctaaaatacataaattaatctcctctcttcatatttaatgctcaaacaaataattacaataaaaactcattacatttttttggggtctatttcattttccgttatcaattaatttccataaatataattatatatgttacaagatttcaataatggaaggtacatcttcacgttgacaatattgttattggaaaagatggtcacatgtgtttataggctctttggggtcgtatatacacagaaagggacgaatcatcaaaatatatttaaacttaaattgcacttttcgtaaagaaaatttagccaattcactattaattatatatcgagcaagaaacttaagtcagagactaattaattgccaaaaaaatatagataacttttattggtcattcatattgagcctcccacttgcatgagtcattgatatcgactccacctaattaacgaattagcgccaaatattacaataaaattaattgaaaagcctaaatatataatctaaagactataatcacctagtaaagtataattaggcgtataaaaaactcttaaaaaatatataatttagaaaatattttaatgcaaagaaattaattactttgtctgccatgcatgcatgattaagcaatcatcatatagtttgtctccattcatcacttgcaacaaatatatattgacatgactgatcaattataaattcaccactagaaatctgtaggtgtcggcattagattcttgcaacaacaaattcactagtttaattcttagtatcatgatttataaacgttcacatatttagcttttgtactaattttgtctcccttcaaatttttgttggcaagcacatataattcccatgtccgacatatgtgagagaatccaaaggaaggtttccagttgtggaaaaaatttaaaattcacgcaaatttttgaaactttttttttttttttgtaaaaaaaaggaaatttcattaaggttaaaatggaaacaaagcccaaagagtcaggcataagcaaagacgtatacaaatctcataaagagttaccaaacaaacaattaaccacaccaattagaaaggtgcaaaagctcacaatacaccaaacacaaacggcaaaagctataatgacacaagggatataatcacaaagcaaatagggtatacaaaaataaataaataaataaataagaaataaacaaaaagatacacatcccttgttaggattaggaggactttacaaaatttaacaaggaatttagcaagataaaagaaatgtgtgaaattttaaccaaaacatgtagaatcaaatcaattaaactttaaacaataaaaaattagtcgtgacaagattaacaaatcacacttaataattggaagaacacagagataaacagagtaaggaaaaatcaaaaaacaattaagacagaaaacaacatcaagatatatactagttcaagtccaatagatcgatgtgatctatgactctgctccagttttggaacaccactaaattatctttattaattgagcaagaacaagtataatacagattgattctttgatgagttctctcaaagtgtttcaacattcacactcttacccatgaattaatcttcttcatttacagaagattcttcttacaaaactcaaacccaatcactctcttttctttgtacctctccccccccctctctctctct

SEQ ID NO: 161760 - DNA, 2047 bp, Cannabis sativa
tgggctctttcgatcctcgctgccagtcttgggaagctcatgtgaatctagaattggtgttatcttcttgggaggagctgatgatagggaagcactagctataggggcacgaatggctgaccatccaaacatcaccttgacgatgactagacttgttgccgatggaaattttacaggtaatgatccggaagaaagaaggatggataatgagtccttgagcgagtttagacaagccatgacagataactaccgggttacctacatagaagaagtcataagggacggaagagggacggctgcagttatttgttccatggaaaacagttatgaaataatcttggtgggaagaaatcatgataagcagtcaccattaatgtcaggtttcgacgactgtgttgatcacgcagagttgggagccattggtgagattttggcttcatcacattttaagggcaacaccacaattttagtggtacaacaacgccccatagtagtgaatgagcatgagtgtagtagacaggaccgtggagtcccatattcgataactgatgaagaagagatgccaatccaagggagatctccaccgtgatagtatcagaagaatgtaacctgaaaagcagaatagatctttaacatctaattaggttcacagaaccccaaataaatacccccttagcatgaacttactacaaatagaatagaaacttcatcttcatttcaagaaccagcatgtccaattgcattgatgaccaacactgtgtaagaaattgacatttcattgcttcttatttccatgctaacaagtcaacgtcaaacttcttaactgcagaatcatgtactatctacttatgaaaagttcacctaggtggaaatgatctactacataacttatttccagaaatgttgccaagacataaattttgctccattgcttcaagtaactgaagaattgcctctggttttgaggaagatgaaactgatgctgaaagtgcagaagatatgacttgcagaaatgaggatgaagcttgttgaacccatttcatgtgtttaatagcaattggaacttcttcagcatcaactaaacatttaagcaaaatgacatgggagtctgaatgcacttgatgacattcgagacggcaaagtaactcagatgcagcaaggaaaagacctgctcaagagtacggagatttatatcacaaaagccattataggaaagcaaaaatccaaaacaatgtagagaactccagagattacaatataccacgaagtgtgaaattttgtaatgttttaaaaagaaaatgaataaagcacacacctttttggcatagataaagaatatatgtgtccaatacattttttgcaagcatcaagtcctgtttcacagacatgttcaagatttgaaaagcagcttctagttttgtttcgtcacaaagtccttgaaccagagatgtgtaagttgtggcatcaggtgccacccctctttccaacatgtggtcaaagagactttgagcctcttcaacttgaccaacttctgaaagttttcgaataagggtgttgtacgttttcaaatttccactacaaccactggtaaacatctcatcccacagtcttttagcaggccgcaataaatcttccctacagcatgcttccatgagagaattataaaatgatatgtctgggttcaaccctttctttttcatatcctgaagaactctatatgcttcttttactttcccagctttgcacaaaaatgataccatcacattgtaactctccatatctttgaagtaattatgacaggacaaaacttcaaacatttctaacagttcatcaatcttttcatacttacataggttcctactcaagttgctcaaagttaatagagttggcaatcgccctttcccaaccatgaaattgaaaaacactagcgcagaatcagaatcaatggtggacactgatccaatcagagcattgagaacatcatcctcaattggaaagtttccactaacaattacttcacccaactcttttgcttcatataatctcc

SEQ ID NO: 161761 - DNA, 3020 bp, Cannabis sativa
taggcgttgatcctccatatatggtgatagctcccagagacctagacaaggaaatgcttgaaaaactaaagttagtggtgattgaggaagaggaagaggaaattcatacaattgattggaaacgaaagggtgcagccactgattttgattcttctaagaagaccaagtcatttgggactcctatgcaaagtaccgactttggaatcacgtctgaggctgaagccttccctatcattccctcgatcattttggcccccactgaccctgatgatgagcatgttcaactcaagattcctaagcataattatgtcattgatgagaaaacaaaggggtaagcggaggtggaggctttgaagaaatggttcaagcagatccaagatggtccaatctggggggattttgctggacaagttttggacttaagccttgatcctatgactgattagttcacgagcttcctagggtcctctttggcactatttgcctctaagatggtgaaccactttgttgctgacctgacacaacttccaacaaggaggtttgccatttgcgcttcttccaacctgatctaccaaatttaagatatgagtctggcacttaccttggtaagcccatacttaatagttttaaatttttcgtgctcgctaaattttgctaattcttgtaatgttttgaatcgattgttgctgaagcaggctgcctatccaagacattgatcaatcagggtttctctatcgtgtagcgcggtggcattggggagttgctgaagaagctccaagaggcaaaagatcagatggagaccctctcgaatgaagcactggtaaagaagtcctttagggaatgggatcagcaggcagcggagaaaactctgaaggctaaggatgacaatttgacctcagttcaagcaaagctaaccaaagcagaggtagacatgcttagtgtccgagaggaaaatcaaggactggtgccaagcttaaaatccttgaagacctataccaagctgatatgcaaatgacgacaagcatgtctgtcgaatttaaggagcttttcgagttccgagaccaggcaaaggaggcttcaaaagctacaagagaatccttgatggctctggtgacctgtaacaattgtgtcaaatgctttgaggacaaagttttcatgtgctagaaaactaacaagttcgagccttgtctcactttcttgctagatcctgaggctgccttggcccaattccatgagaagaacaagaaggttaaacagatgctggatgagagattgggtccccgtctttctctgagagaagattgattatcaaccacttttttaactccttcctttatttttcctcatgccagaataatattgttttttttctttatattttgcttttgtttctttgttttttcaagttggggacacatttaatagcctctccccaggcttctattatccttttttccttctctcttttttttgacatactttggtaagtacgttttatgggcacttgtgagtacatatgtttaatcatgctttactatttttgcttatgcatatatgcctcactacccccctaagtgacttaaaataatttttgggtcttttagtctgaattcaaaaggataatatgttacatttaggttcttagtttgcaaaaggtattcttaacttgaaaatttaaagatgaaattaaatgccaagctcctaactactgatagtacttacggaggtgattgacattcaatgctcttgggattagagatctgtccatgcgctttagcttgtaggtccgagagcctatttcatcttcaatttcgtatggtccttcctaatttgggcctagtattcccactcccaaatcttaggaagtagagaatactctccttatgaaaagttctccaattgaaaacttccggtcttcgagttttaagttaaaatgttttaccaccttcgtctggtatgtttccatgcgtatttgggactcctcccaaagttatttttttagattcagtgacttttgtagcagtgcttagttcattgttggatcataagtcgttcttctatgggaggggactatactttccgctgggaccatagcttcacatccatacaccattgagaatggagaatgtccgatggttgtatgggacagtggttgtgtatgcccaaagtacttgtggcaactcctctagccaattgatttgcaatccaagagttttttctttagggtgacttttaatattttgttcacaacttctgcttgactattctcttggggtcttgccattgtgcggaaacttttaataactctatatttattgcagaattcaatgaatgcaacatagtcaaatttcttgccattgtccaagactatcttatggggtagtccataccaacagaaattatttattattacaaaatccaaggctttcttggagattattgatttcatcggcttagcttccgtccattttttgaagtaatctactacaaataattcatacttgactctgccctttcccgttgggagagaacctataagggcaatgccccatattgcgaagagccaagggctcgtcatcaagatgatttggtttggaggagcccttgggatgtttccaaacttttgagacgggtcacatttttgggcgtagtccatgcaatctttcgtcatagtgggccagatgtagcttgtcttaaaacttttttagagaggcttggacccccagtgtgatctccacaaaatccttcatagatctcatgtatgatttttttagcttcaaagttcgagacacatcttgggtatggcatgcttaaatatttatagtaaaggatgccttcgatcatgaggtaatagtgggattgatactggatcctcctagaggccgcccgatcttggggaaactctccttttatcaaatagatgataattagatccatgcagcctgacactagatcagttacaacttcagacttgaatgtgatactaggctccatgaggtactcgataggaactaccccca

SEQ ID NO: 161762 - DNA, 1117 bp, Cannabis sativa
  modified_base (1076)..(1080): a, c, t, g, unknown or other
ttattaatatttataacaatacagttataaaaagaaattatagtaagaagttcacccatatactaaaggaaatagaaagtatgtcaaataatcttttgagggtgccctataaatttttccaatatatcatatataactaaatatgacacacataagactaaattaaataatctatatgatgctgataaaaaaaattatatcaaaattagtataatgtattaaaaatattccaataataaaaaaaaaattatgttaaactaatcatttagattataatacaagtattaaaattttaatataaattctgtaactatttaaacagaatatgaaactcaaatactatattttttttcctattaaaataaattaacctattttattaacatcattttaaattgggtaaaatatattattaaaccctgtattttgcaaaagttatcgattggactttctattttgttaaatgacacaataaactctgtatttttcaaaatagtaaaaatagaaccctgaactgatttttcgtcaaaataaaatttaataataatctgatctaaaggagttatgataaaactgtttacattttccgtatctactcgtattttcaagttggttatattaaaaaaaaaaagttgtgaaaaattaagctcagtgtcttatttgtactattttggaaaaaaaaaaaaaaaaaatagggttcattttatcatttaacaaaacagatggttcaattaataacttttgcaaaacacagggtctaaaatagtatttatgcttttaaagtttttataattatctattatttcttaaagtaactaacgaatatttgtccctccgaactatgacatcggtacagttttactcattttttttttaaattattcttcttgaactattaataccattgcaaatatttcattttccattacattttgatcatcatttttaaccaatctgcttatgtagtactaatgtgacactagataaattatgtcaaattaacaaatttttcacatcaggcattagagataattttatgttggaattattttatcaagatctagatttactaacannnnngtttcattaacaccctaatatgaatttctaaaacaat

SEQ ID NO: 161763 - DNA, 2497 bp, Cannabis sativa
  modified_base (2446)..(2454): a, c, t, g, unknown or other
aaaatagtatttaccctttttaaattatcaagagtttttatatatgtgttttttaagtccatataattacattgtacactaaatgatgttacaatttattcaaatgtttaataaaaaataaaaacattggtatataaacagggacgaatgcagctaccgtcaacattcaaaacaactgcggaagaaccatctggccagcaacccaatccggcagcggaagttcacaactctcaaccactggtttcgagttagcatcaggagccagccagtccatcgaaatcccagccggaccatggtcggggcgcttctggggtcgagatggttgctccactgactcatccggcaggttcgcgtgcgctagcggagactgtgcctctggtacggtggagtgtaatggtgcaggcggagtccctccaacaactctggtcgaaataaccgttgcagaaaacggtggacaagatttctacgacgtcagcaacgtggacgggttcaacttaccggtttcggttaggccagaaggtggtaatggggattgccaggagtcaacgtgcccaaacaacctaaacgacggttgcccagctgatctacagtacaaatccggagacgacgtcgttgggtgcctcagctcttgcgccaagtataatatggaccaagactgttgtagaggagcttatgattctccagacacgtgtactcctagtgagtccgctaactacttcgagcaacaatgccctcaggcttacagctatgcttatgatgataagaccagcacttttacttgctccggtggacctaactatcttatcactttctgcccatgatgtgagaaatacactctatatcatatgtattattaaataaaaatgacaagaaaaaaagggaagaataaaaaaaataagctataggaaatgttgttgaggatgctccacattcaaaagccttgtaataatatcaataaagtttctctttttttgtttgttctataaactagaaagacgtgatgtttgattgtaaaattagtattgaatacaacaaattacaaaagtcttacttaaatgctttattttttttttcttaattacaaacacttgaagaaaagagagagttgccgaatctctatttgttttttttttctttcattttagtaattaattaaaaactcgaaagtgttggcggccaaaaaaatcctacatttctgttgaagaaacttaggtggggagagggttgatttgtttcgttgtcaccagatttctatagcagagtgtatcctgagcttatggatttgaattaagtgtatcgattgacggtagttattatacttaattttggcaaaaaaataaaatagctactcccctaaaagagtctacaagctaagagtaccttaaaatacaaagagatcgaccaaaacttgaacatagagtcaaaacacaaaagtatcccccaagaatgctatgtgagaaaactgccatctttttcactaaaaagatgcatgcatgcattgcttgcccaagaagagtggcaaaaggaaaactggcaaagtgtgtttctccaacatcaaaaaacataaaaatgtgaaagaagtcactcaaaggtggagatgtatgtcacacaagcagtgccattcttttttggcaaaaataattacattgctcccctaaagagaaagagagaaaggaagttggtcaaatatgtttttacaacatgagacataaccaagtggtggatgagtgctataggcaaccaatgccatctttttggccactattcccatattagagttttacaatgttttgaggcccaaaaccaagaaaatatgtatcacgattagaaacttgttaaaatatacccatggtgttaagaaccaagtattcatgagcagtgtcatatttttagtgaagaagatggtaatgcgcgcatagaacaagaatttgtaaacactgcttgcaacccttcagtaaaatagtcataactcacttaattattatccaaataacgtgattcaaattgcattcaaaagatcttttcaagacagatataagtttgtttaatagtcatatgacaactctgatatttttagtcataaaattaggttacaagattgactgcctgattaggcttccaatttcaaggttcgtcaaagttccgccaaaagggagctacatagagttgacacatgagttgtgcctcttcactagtggcaagactcccccaaatacaccatatgttagtagtaaccacttctcatggtcattgctcacccctttcattatcctccaaaaagagaagctcactgacacatgtcatgaagatatgtttctagaagacatctgtttctttccaagaatagaatatttttggatagtttcttcaaatgcaattgaatataaataattactgttattcaaggagagaatcaaggtgtataataatgtaacaccctaactannnnnnnnntattacgtgatttttaaacatgtgcagctcgttgctaatcaac

SEQ ID NO: 161764 - DNA, 1108 bp, Cannabis sativa
tctctctctctctctctattttccactctcatcagtactaaagaaaaagctttaaatgcaccaacttttattttcattgttgttgatgttgtttgtacggtgaatcttctgactgcatgagtagatgagtttgtctgttttaacttatagggttaaattaaaaaacaaaaggaaaaagtatttattgggggtgcgtaggttaagagcatagcgcatcttagaaaaagtgtagctggtaggaaattaacaaagtttggtgagagagatatattaaaaaataaatgcattatataatttcattaaaaattagaaaagtggaagataagaacaagcattggatatatgatatgatagtgtgtgtggctaagatgtatgggagggttcaagtggttaggtggtggtcgcttggttgatagcgatggatcccaaagtcatcgtcacccttaacccagtcaactatatgtctctttcaccacacttaacctcacttcgtttttaaattcaaatgtctacttcctcttcttcttcttcttctcttctattttgtgtggcaagtataataattattattatggggacctctcaaattggctcttgcatttaactatcttaataaaaacctcatctattggtatccttaatttcttcacttaaatctccctacctgcccagcatctcctaccctttatatctatctaccatactattttaacaattttcgcatttaaatccttcttatcacgagaactgttttttgtgtttttccttgtttgacaattttattttacaatcaaattattgaacttggcactgaaaagtaattatttaacacaatgtaattatatgactggaagcaaaataaaaaaaaaataagaaatgataaaaagtattataggtcaactaagtattagattttatgtaccgtattaactttatcacaagacgacacatctaaaaagtagtatgcaccactgatagctaacaacaatgctctttaaaaatatatagaagtataaatggatgcttgaataaaacaaagtgaaaccacttatctttattgtttgtggatttttttttatactttaaaatagtttttttttgttgcatt

SEQ ID NO: 161765 - DNA, 5222 bp, Cannabis sativa
tcattctcggaattatcctaaatacaagagcacaaatagattagtgaaaatgcatatgaagctttattacaaggtagcttgttgaataatgcaagatagtaaacaagataataatttgcaaagctcttctgttcttggaggacttacctctgaatccagagcctcaaacactgcttcaggaatggggttcggacagaactcatctggaacaaaattgtagaggaccatcttgatcaatggtgcactaagtgtagggcatacctttaaaaattaattgaacagtgttaaattaaaaggaaatgattagataactcactaaattaactgtgaaattaatatacagcacaaatttgcaactatacctcttttctaattgacttatctgctagcatttcaaatggaatcatcatgaggtcgctcagagaatttagaagacggaatgccttgaaggatgtttgaaactccggtctttcttcatcatcgtgcacctccttatcgtctaaagcatcatcaatgtcaaatatatcagtgaggcacctggaccaacttccgatctggggataaaaatataagaaatcagtgctgccaatgataataaagcaatcagaataatgctgtcaaatttttctttctttattagattataataagggggaagaattagatgttgaacattgtgaaatgaaaaagaagacaaagagacatattatattttaaaagacaatcctggaatcaaacatataaatccacaaaacaaggcacttatactcactgcatttttaagctgtgccccagccccaaagcttgaccttccagctggaatgggaagaaccttggaatcacttattgggtcagatacaggatccgttggcatctcttcagcattttcacgaagaatcgcattgaacattgccacatctagtctatcaaccaactgctccataacctgaaaggtaggtaaaaaaaatgtctttcatatgtgcagaatgaaaacctgaagcaaatatctagattttggtacattatgaagctaaggaattgagctgtttagtgcgtgtttttctcagagatgtcagaaaattataattcaatatacacaccaagcgaggaagtatgggcaagcagccacattcatgtccaccagctcgagcaggacaaagcctttggcaagcatctttgaaagccttcttccagagatctatagagaaattaccctgctcgtgatcactagaaccatactttcttccagaaactttctttgagctggaacccttagtagctgctggctgcatatgtggagtcaaagtctgaagaaaaaacacaagatatggtatcaaccttgatgggaacaattaaatttgggctaaatcatcctaccaataactaatacatatatcaattaattttaagaaagaaagggcttgacctgccaccacacagactctacgattcgggagaagatccatgattcaaacttttccaaggcaatcacaaatgtctgtgggtcatcccaattatcaaaactttctttgttgtcgctttgtttcaatgtagatcccttcactgagctctttccaccaccattactactaatgcaaggtccaccagaatgctgtacttttactacaatctggctgataatagctcttaaaacgattgaatttgataaccaaaaagtcagcctgtttatgaacattcaacaaaatgtcaaacaatatggtgcttttagcaagctattgattttgataaccaaagattcaacatgtttatgaacatttaacaaaatgtgaacaatatcattttcttcagacacttttcttttttcaaatcccagtccacagattcatatgctaagtagaataaataataacaataaaaagttaatggctcaaagcccatgtatgacatatcctaatctgtaaacaagtgatttgtaattcaattgagtcagtgttcttaaaggactgaattacaggccttctggttgacgaatatgataagaaagttgagtggatttttaacttcctatacgtgtcatgtacaaatcttggcataccttggaacatcatttccacatgctttagaaaccaaaataaatccagaaatagcagctctagctgcatttgccttcctagcctgtaaaccttccttgcaagcatgaagatagaatctagaaagtcgtcgagcaggtgcatgtattttacttgtggagcttccatgctcagcagcaactgaataaagaccaacctcaactgctgcagcttcccttaactcttccttgagcatattaatttgggagtctagtccagctttgttatcagacaggccttttgaagcttctttttctacacctgtagcattagtcatcctaccagcttgagcacctttgattattttggctttgtttgccttttcaataaaatctgtattctctaacgatctattgttgttatctgtgtcaaaaggtaactgtacagaattaacatgcttcacttgattatttttaacagtactatgagagattccaatatctctactgctgcttgtagaagaatcacttgtactaacatcctctgagaacctagaaatttgttttacatcaaaagaatgttctttcaccttaaagacataatctttccgtccatgttcttctctgtgttctttgttcccattattccctgaataaccagaatctgcaggtgtagtctcttcttggccatttttcgtatgtctccaaacttttctgtcaccctcctgagtggtttgagaatcaatatagtttcctttcactgattccttaacatacatacttgatgagccaactttatttttaagagcactagcaacgatgacattgtctcttgtagcctcttgagaatattctggcatctggactctgctgtcaacagcccttctactatcagactttacggaagaagaagaagaaggctgcacaccatgagttacagattttttcagaactggcatggaggatctatcttgtggaatattgggaaaggcgtcatcgtttatagaatcaacattggaggagtagcctattgaagacaaagcagatgaagtttcttttggttggttgaagtttgtagctagatcacttgacactatgtttgcagactcagctcttgaagccccctcaccaacattcctttcaacattattccttgacatttctggttgaatctgcaattaaatggcagatagcttttaaacaagtattcaactgaattgttccaaataatacaccaattagagtggacatacttcagctttaccattcttcctacatgataactgtgaagcatttcattggtgcaaaagttacctataaatagtaagtcctaaaagaaatggctagactattgccgctgcattatatggttcaaccaaaatatacgcatcctagtaatgaaatggtggattgtactcaaggaaggagaagactaaaaatagatttcttggacaacttttaagtgcattgtcttgaactaagatcagaacaaacatatagtgttaaaacgagggaaatgtctcataatagatttgacaccatacctttccactatatggtgctgaactgactgttctctcaacactagaagagtttaaagtgtgagatgagtgtgaagaagcaccatcatcgtcgtcgtcgtcagtaaaagaggcaatctcagcttcttcatcattctcctcaaccactgattcagtttcagcaatttctgtagaagcttgttttgacaagctgctttttggtgaagggctggagctattatcaccaaatggttgaatattaacataaagaagtggttgacccgaatttttaaaactcttcttacagtttactggagtgcttaaaattgttgtttccctgattactccacaatctgcaagattaattaaagccgatcccaagagttgacccttcattgccttgtctttccgggattcaaacaagtaaaattctaagttattcttctggtaactatcataggcctggcctttctttgatgcttccttgcataacaagactggaagcctgaaagactcattgaactcaatctttccatctccaacaccacaagagaaggacccagaagcttgatcaccattttcccaatgaagcaacacggattgaaccgatttaggagactgagacaagggccatggcttaatctcctggacatggatgatataatcaacttggacttgaacacttttccggttctttgatcttaagccaagaaccatggtttgacgacccttttgggaaaaacacttggtattgctcttaatgggtacgatcaattacagtgcctctatccatgaatctaaatactcaagaaaaaaactaaatcagcaaatcagatgacaaaatcttttgaatgcatgatggtatacagaaattaaaaaaaaatactttttttctaatgcaatccattgagttgagtagaacgtgagggtggtattatgcacatccaaatttataataattgaattctttttagctttgtgtgtgacccacttcacgccacccactgattccgctcattttgtctccacaaaattcaaaccaattacacactagaagtcaccataagcgacaagctaattaaaaattaaaataaattgattaattaattagtttatagaaaagaatcacctcctaactcattattataatctaaatgagagagagatagtcaatcaaacttactagacattaaaaagctgagatttagatctctcacagagttcaaccataaatcagaacacaaatacaaaaagcaaaacaagctagaagaaacggaaaacgacaataaggatttgcattatccagaagtcaatccaaaacaaaaaaaaaaaaatgaaagaggtatatagctttaagatccgaatcagagcaataaaattcaactgaaacagtgaacttagcaattattatccaaaaagcgaaatgatcagagctccaccgataaatgtacctgcctgtactgagaaagaagtaatcgcttccgtgagagataattctgtgcatgtacgtatctgtatgtgtgcgtatacaaatatatgtatatatatacagaaaaatagctaggaataaaggatttgcagctgtgtgtgtatgtatgcagttgtgtctttcagggtgtttcttcagtttttcggtaaaatgaaagttcgtttcttggttgggtcaaagatgt

SEQ ID NO: 161766 - DNA, 1193 bp, Cannabis sativa
gctaactgtgcaatattaggcagaagaaacgcaactaaaagtattattgattcgtgtcaaagggtgtcgtgcctgcccccctcccccaattttttttttaaaaaatacttaaaaataaaaataaataaatttaattttgttatatgtattgactcccataaatttttgagctggtttggtcattgcttatgttatccacatttcgggaaaggaacacatgtcgttcccaattcctatatcagtcaattatggcctgattagaggtcccaccaagaggacatgcccaacatgtatggaatgatggatctaagcccatctgaggccgaagatatacaccctagaccggctctatacggatccagaagggcctctcgctctcatgataagaagtgattgaaactctctgaataagcatctaggacgcatccggagaaagcatttcaagaggcaccgcagagacctagtacaggatgacgtggcaaagtcctttgacaccaaatcccatagatacagggtattatcccctatgttagaccttaagaatgcacacactatcaaaagaaaacaatctctttgtccaacgacataaatttgacactacaatacttaaaacgatgcacccatgacacctgttgaagattgcgtgctcctcaagcatagggattgtatactaaaacaggagataggtaaagaagaagtgttgaagctcaaattaattaattgctgcttaatattattatttctaattgatcatttgctgcaataaattaatatgtcaataattataatacttgttgttcattgaatgaaagcatgattaattaatgaaattgtaaattgaaacatgagatgggtaaagaagaagtgttgaagctcaaagagcttgaggtgttaccatcccccattgttcaagagagattgtactcagaagagaagtttttggttctaaaaggatttgtcggacgatctacccataatcaaaccaatattaccatatcatgatgagagattgcattccgaacaaatcaatctacctacctagttaagataatatttccctgtattttttattagtccttatctagaggtatctaatttgttaagcaaaacaaaaattgatgatctaatttattttatattttattgggctttttttttttagttttaactaaaaaaagtaacaatattacaaa

SEQ ID NO: 161767 - DNA, 1285 bp, Cannabis sativa
tctaggaatatattctcaagttatgcaatgtcaaatcacccaagggaacaagctcaaaggccacacaagatctgaggttcaactccctcttacaaacttacataacaattgctatagttttatgttcctcaaaatttgcagggttagacaaggaggctagctaaaagaaaaaacacattttccaacataacatgtgcaaaataaacagttctttcaaccccaaatgcttaatgaaggcactaccctccaaagtttttcaatgcacttccttattactcttcttcagatggccaccaaattcccgatctcgacggagtttcttctcaagaacaaatttaaccatttataaaaatgaattactacactcatcactaattggttttgcgatacaatcccatgcttcttaccatactattcatcctagtagcagctatccttactctccaaatataatgtcttaacttccattcaatgtcttctaacatttccaactttaaaaaactatgaaccaataaggaatactcaccttattcactacaagtaaaaaaaaaagctataaaaaaatataaacttgaacaaaaactacaaacaatttcagccaatcaaacattatttacaatattatcttctcttctctcaaaatggctcaaagttaaataatcttaaacaaaaaccacatcaattttatataatcaaaatttatatatatccgattgaacttgaaaaagagtcttaccgtatcagggtcagaaggaatttgagcacccaagctgcaattaatgaaaaagaaaagaaattacacgaaatgggtatgcaataatgagctaaaaaaagaagaaaaaagtaaactttatacctctgaagataggatttgaagaaagcgagagaagggttatggagtaatgaagggtttgatttgcagcgagtgatgaattgctccaattctgccaatttcacagaatccatattaatcgcttcgcttgtaattgtaaaccaatctactctcactcctttggattagtctttcacctcttttcgaattcgaattcgaagtgtccagaaattttcgagggaattagatccaacgaatcatttgctacgtaatagtgtgtcttttgtcgaaattattaggctaattaaaattttggctaatttgtatttatgctttctgaatttatttgtaaggttgttaaaaatgcttttaaattattgacatggttagatttaagaaattttgtccaattttaataaaaaagtttaacatgaataaaagttctagaagcat

SEQ ID NO: 161768 - DNA, 4629 bp, Cannabis sativa
ccccccccccaaaaaaaaaaaacaaaattaaatcctgatgactgatgcaattcaatcttcaagcacatatctatttcttctagcaccaaaagcaaatctctgtgcatttatgaggaaagaataattgggggcatattagaattttatgagtaacaaaaattatttgaaaagacaatgaagaaagaaaaagaaacttaactgaaaatatctgagagtaagctttcaacccagtgaggaaacgaatataagttggcttcatagatccattggcaatgatggaccttatgtttggaacaaggtattctgcaacctgaacaaaccccaagctccaattcaaaacaaagaattatataacaaatcatctgagattttgcattaatataattctttaagaatctgtattttgaacaaacaatgaaagctattattttgatacaactagatcaactttggtaactcactagatagcataaactaaccaatttggatggcaaccaacatagttactcacgttactaaggtgatgccaccccatgatattacctttttatccattttaaaatagtataatttaaaaatctattcagaaaaacaccaacaagaattgtaaattcttttgtgagggacatccatggtaaatttcaaactaaccaagaatccaagagcatgatctgactttgcatacattttaattattattattattatgtcctgaccaacagaatttagctgtaatatcctaactctgtctaatcttgatagtccatctaccagcttaatgtcattacatctacatgaatggtgcaaagttgagcttgaatatcgaaaactaaggttccataactgaatgttcatctgctaaaaactattacttttagcaagatgatggagagttcaacatgggagtctgtacttaaagaaacttagaagacatgagttgtgataatgattagttatagagttatatggaatttataaatgccagaagaaaatctttgaaaatcaacgataaactatggactattctacggctttgattatgactacataatgaaatgatcatatcatatatcacctttgaacaaatcaaagaacaaaaaacttaccacttcagctggttctgccaaaacattgatgaaaaacttggcctgaaagaatcaaaatagtcagttgttcctccacgaggtatggaaaagagatgtgtgacaacaagaacagtattattttttatttaacctgttttgtagtagcaccagacatgagaagatcagtggtcaccattcctggctggaaaacacagcaacaaaataagtgattccaggatataactgctgtagcagataataaattttcccaaaagaaataaccatatataggctggaaaccccatggaaaaattacaagggggacaaaataaagttcagaatggcatataggactgctaaacaaaaacatgtaaccctccacatgggcccatgtcctgctcaaccagattggttcacagcatgtctgaaaatgtggagtccagagctaactggccgagaatatccagacgaattttgcttgatttattagattcttatcattttatgtcttcttttgaaaaaagaaaagaaaagaaaaatctgtaacctttcccaagtacaatgaatcaacaaaggaacctcaaatgcattcataatatcaccctagcattgatataaggtttatagtttggccttatcacctaacattcacataaaacccggccaagatttttctctcttctaccactggaaatacttaacatatctatgttggatattctgacttcctttctttaggagagaacacctccaagcttggtgtgtgtctacaaggaaaaaaggttgttttctgttttaaacactgtacgactgccttgatttattcgttatttcgagttgggaaagaaaacaccaagcgttcccttctcaaatgccagggtgtcattatgttacaccaacaacagttactctggagatgtacttcctggataacctttccagatgtttgttatgagagcctatactgtaattccctctgaagtttctgcaacagtgtgacctcttacagatcagtactaattccactccagatcaatccaaagttggattttcccttttttgtcttcacttattttgccatttttcttgtatccaagaacccataccatagtgaaagggggaaatagaaaggcaagctatagttgctattcaattatagacaaatatatgatgtacatccaatggtgaaattcaactagatggcctttaacccttttgcattcatggttggtatttttttaccaaacgtaaggatcaaaatatacatttcaccaatgataaatttacagaaatgcagaggaagattagtccccatcttgaaggccatggtcaacattgtcaattactttatggttttcataacatcttctccttttatgtgttcaattaccaattatttttccttatctaaagaaaacactaaaagaggcatctaaataaatgagcattaaccacttctcaatatgacatgattatttaattcctatatttgtttctaactatgaccgacgatataaaacatagtatcaagatttattatactttagaaaatgcccaatccaatacttttgtttatctgatgaaaggagaacaataatataggaatggtggaagaacataccgacaaattatgtaccaccacatttttgacatcttgcatctgcaattctgactgcaaattgaaagaaaatttcagatcataggcaaattaggtggatctctatgaattgtatcacatcataggttcaatcccaagaaaaattatgtagcagacggagctcatacggtaaaaaaaatggaaattacagttgtttaaacgaaaatgctatgctatcaagttaaagcaacattataacattctacatacataacttttgatcaaaggtggcacattttaaagaagttcagaaagcacctgtaatgatttcgttaaatgtaccacactgcgttttgttgccccatatgcagcaaatctataaggaaaagaacgaaagaatgtgaccacctcaagttgcaagatagtatgtcacatcccttggcaggtgaagttcactttaaatgcaatatagtactagataaatgaaacccaattttggtcatacagcttaggaaaattaaaatggtaccttggagttggtcttccatctgaacctgctccatcaatgttgaagatatgcccgcctcgaggctggttcaacatcatctttattgcctaaacttattaaatttacatgcataagaatcatcctataaagaaactgaggaagaaaaagcaagtcaaaggaagaaattcttctacctctcggcaacagagcatcaaaccaagggtgttggtattgacaacttcactgcatgtaatgaatccagaacacaaacaatcagacaatggtgaaaaacagacacgggacatttattattacagatacagaaagatgagaagtttacatgaggtcttcatctgatgcctcagccagtggtttataactatatgcatttgatcctgcattatttatctgcacgtatcatcaacatggattaagaatattaacacagcagcaaaactctaggcatagcaaatgaatatcttaaagtttgtctaacaataatatacccaaatatcaatgtagcctaaatttcttttggcaaatgaaactagatctttgacatcctgtccttctttaacatcacatcgagtaccctgtaaaagataaatttggactattggcatgaaaatatactacagactatcttaaaaaaaggaaagaaatgagaaaaaatatatcataattaaaatgaaaaaataagttgtaaaggaggtacccacacatgctgctccccaaattcttctcttaagctctgtacagtagattccactctctctgctgcaatacagaatatttacattcaaaatatatataattttgatggatatcaccaattatactaaaaattctttattgtagtgacttcataaactacaccacttataatatgtgatgatacataatagaaatgtgcaactccattgatcatgaaaataaccagagataaggaaaattgaagaagataacagattattcagaggaaaaatgtaaattagggagagaaggcaagaagtgaaaagctactgttgagattagtataatagacaaaagaatttcaaaacaagaacaaaggaggataagatttacaccgtaaacaacaacagcagcacatgaaaacacatgataagtagttgaattgaacactggaattgaagctatagatacaatatcaccagtacttagtaagtaaatacctgatcttgagcaaatcaaaacattatcacctgcttttaaaaactctttcgcaagagcatatcctataccttaacgaataaaccataaacaaagttagaacagttccaaaagagcccaaaaatcataaaagtgagccaagtgaaaaagggctaacacattaagagtagtgatgaattagaacatggattaatgataaataataacgtaaacccaacatgaattagaaatgagagagagagagagag

SEQ ID NO: 161769 - DNA, 1716 bp, Cannabis sativa
tggattgactatgaattttccttaccatatttaatttcttgttttttttctttttcttcttgaacaagaataagaaagtattattgggagtacaagtcaagtatgcttgccaatatttctcatattattctttaacaaaataaattaacattaaaatatactaatctttattaattataaattttcaacaataaatggtcttggattgtcttaaatatggatttgctgaccaactaaatatttggtttaactattgtccataccataaatactacttaatttgtgcatgtgtttttggttactaaataataagaaagatagaaaaaaaaaatagtacaacaaagtggttcaattaattagctttagaaaaagaagactctactaaaatcatttatagaaaattaaaaatttcatatagttctataataaaagaaaaatgttgcattttgagaaccatgtgtataatgctaaatttaatataattaagtattaaatctcacatttttagtgtaatatatagtacttcaaactcttaatattttatcaataaaaaataatattttaagtgtatatgcatgcaaaatatatttatctacatataaaccgctataatcttataacaaaaattcaaattattaatcacataaatgataaaatcaattcattattttagcctttttacttgaaaataacatttccaactcaagtgtgttagcaacaaaaaaaattgaaaagtgaacattaatatgaaatattttagcttttttttaatcaataatttcataaattaagaacaaaaaaatataaaaataacttttgtagatcactatttgatgtagcccacataactcgcacatcatattattgttgcttgtaatcaaagcctctaaattactaaaccaactaaatctctttgtttgataagaagttaatattggttgttatgactatgagttatgacaagtttgtggacttttgtatttttttgtagggtgagaatataaaaagaacaaaaataataaaatactaaaataataattatttatcataaaaatattttactttcaattgagttatttttaattgaatttaattgttcacatgaattaattaaaaggtatttctctatattaattaaatagttatgccttttggactttgttatgttttaataattaaaatttataaaaatagattttaaagtattatgatttcagaactaagagcactatatatattttactatataatagtttttaaatattatttgttaatgagaaaaattaagagttagttttagcttttttgagtatgcatgcattaaatattattgtttttaattagatcaatttttaaagtttattatttcagaataattaaatagaagatgtttatatgtcaattatttaagaagtagaggataatgatagcaatttttgctaatgtatataaacaattatgtgcaaaattgtaaataaatggaaaggataattaatctgtaatgattgtgataaaaactaaaaaggaaaatattatttaagaattatttttttttttgaataattaacattatttatgaattattaagtataaatataatagaaaatatttggcacaccaatgagcacatataaaccatagtttttacaatcaaagtattatgtgtagcaatatttatataaatattttatattttatataaaaaaattaaactaa

SEQ ID NO: 161770 - DNA, 3320 bp, Cannabis sativa
aataaaaaaaataaaaaaagaactgctgagacagttaaattataaggctttcatttgatgcagaaactaaaatttgtaaattaaattaaattttcaatattattttgtttttttcaatgcttgtccttcagctgagccgtacaatattcagaagcttgaaactcttaacaaattgctaaaaaagttgccataactatagccattattttgttacaagaaagtgatttttaaacctcattgaggcaaaccaagaaactgtcataggtcactaaaaaattaaataaaagctaatcgtcatcaactccaggttcagataacaaagtctccagctgtttcactttctcatcgttgaagccaagagtagccaatattttgtgaccaggggaattggcttctaaccaaatgccaagaagcaaataagacgtcgtagtttctccaccatcgcctgcaatcaaaatcagagaatcaaccataaagattctaaaataaagaataacagttgagaaatcatgcaacaaaagtgcttagcacgatttgcactacatcagaaaagatgaactttaacaaccctgaaaaaagttggagtgtctaggatcatcacagcatagacacaaccttttaatagattaaacttcactattaagaattattgattataacccatgcagaacttaagattttgttcacaaatatgtacaaaaaaaggcctgtatccagaaaccttaccagaccaaccaaaacgaattccagaaaagcaattgaaaacttaccagatttaattttttggtcttagataattttagcatgaaatgattatgttatcaattgtctcatccacttagcttgaagtgtcatgatatattaattaattttggaaaatggccatcagagtcttgcgctctaccaactgagctagacgggcatttgatcagttcaccaaataaagatttaaagtaaaggatagtcatcacttaaaactccaaatgagccatcttaagcttatttagcgaaaacaagttgatataatatcaattgtgttggtacgcactcttcgagtcagtgccaagctccaaatgcactcttcaagacagtgtcaatctcccaataagaatattcctaattgtaattcattttaattccttgacctatgaattgccattacatatttatacaagttaagtaatactaacaaatactaattagtccccatactttcatgtaacacaagtcccgtctaatatctatataaccaattagccaggataatccaaatttttttcttgggatgatcatgatgaaaaaatcccttagaaccatgtctgctagtaccattacatataataaatgctaacccatttgactttgaaaactatcttaatacttaccaacatgattaattagcttcaattgaatataacagatcagtcaaatgttaacatcctggctactgttagttcacaaggaaaattatgaaaatgttcactttttcccattgattttctttttaaggtgagatttacattattagaaaggatggagttgaaggaaaaacccaacatatggcacaaaataacttgtcatgagcaataaatcataacaaccctgaaaaagcttagggcttgggatcatctcaatatggacaatcttttgaaagattaaattcagcttaagttttaagaactattgatattaacccatgcagaacttttaaatttgcgttcacaaatcgaagaaaactcctatatacagggaccctaacggaccaacaaaaacagattccgaaaagacaagtgaaaatttaccagatttaattttttggtcaatagcccaatcaagtactctttgagcttcttcagtcaaaggaggatgctcaggactgaaatagaacatgtctgccttcccaactaacttgatagcttcttcccgaactttagtaagtgttattccacttgctctcaaaaatttagcagccagactagtacctgaagttgatcacctaattattcagtacagtacattacataaacaacacagactcaatcaacaagtatctcatttgtcaaaaaagtaagatacattcctggatgtagacatgtaagaaaggcgattctcaatacatttacccgcacaggttgtagtaattttcatcttcaagcaccatacaatctatatcactaagaatcccaatactaaaaattataatctatatcactatatgaacagaaaacatgacataaataacctaaagctattaagaaagacattcctttactatcaggccatatgagccgaaaaaatgagatataactaaagacttcaagcatgaaagcataagactccagctcaaccataactataaacttaaaagcctaaaatgattgcaatttcagttttagacaaatagcattttcagggtcagctcataatcatattattattttatttttcttttgctggaaaaggcagttcgtaattttgaagaattattacaataaaaattggagaggtttaaccaagtattaccctcaacaaggatccccatgagaagggcttcagtccctgtagttgaaaactttagcttcctagcttccaattcagacataccaaatgactttatagccctcgaagaccatctgcttcaatttcaaaatacccaattcaaaaaaccttaatcccaacagaacaaaacccagaaaccaaaccacaagcccaacaccacaaaacccctaaaaaaacaaagaaggctacactcacttgggaatgctctcaggagaagaaaccgtctctggttttctgcaattgccaaatcagaagcatctgaaacaataacgtgtccatctaaaacggagaagaaagcaaaaaagaaacagaatttcgaagaagattcagaaattagaatcttacgctgttggtaggcttagtgaaactgtggcggcggcgagtcggacctttagcgggcggggccggagactggaggactgaagcgataaacctttggtgcctagccatgaactcagcagagttctgggtctgaatgttacattcggagatggtgagtaggtttcgggtgttcttccaatggccgccgtaggaagctttgagagaagactggcattaacagcggccatttctccggaaaaaggataacagtcttaacttcgagtctcttactgatatctctctgagtggataggaaagaaacgacgtcgtttaagcctttttttttcgaatatttacttctcaaatgccacctattatctttttcagttttaacaaaaaaagaaaaataataataatacaaaaatacttttagctagcca

SEQ ID NO: 161771 - DNA, 1417 bp, Cannabis sativa
agatggattattatggctgtcgggtgggggggggggtggttgagaatcttcaataatcgcatttactactgggaccccgtcgtcgagaggagaccccacttccataccttcatgtgaactctcaactctgtctcccatgctaagaccaacacacttaactaacaaaaggaataaactttaatacagtaaagacaactgaaagatgcaacctttaagagtagaaaagtgaaaaatggattaaggagaagacatattgtcaagttggacttccaaccctctcaaggatacgagagaaaaaccaaagaggctatagtttgaagcagtgaacctactaaggataaagatgaattaaagagctttccaccttaaggtcaagttggtcttcgtttggcaaagtcgaattcgattgatcacttgaaattcgttcacttgtcagagagccaccttagcattcttacatgtatctcatctctttagctttgacattagtgaatgtaaaaaaaaaaattaattaaatttattatgatctctatgaaagattaatgcgaagataattcattgagagtatttatcgaaaaatttacataaaatattatttttgacaaaattttaatatttttatagtcaaatatttttttcgcacatttttacaattttacggttttttaattttttaattacaattttatgttgttttataaaaataagaaaaaatatgaaaataataaaaaaataacaataaacaacatacaaataataagaaaacataaaattactatggaaaaataacaagaatatcccctaaactcacaagaacaaatactatcgtaccaaagtgggactccaaactaattttggagacaaaacttctaaacttcaattctgttgtggtttctaaactttctactattttgttaggggacatgtgctaaatgtcaacttgtcttactaatgtgtacattaacgtatacatgagatatttttattgatccacatctttttaattatttaaatattataaaaataaaaaaatatatataaaattaatattttttatttattttttcttttttatttttctttttgtttctcttttcttcccgaaattgatggtgttttttcttttttcgttcatttttcttccataccttacttgttgtcatccttattattctaatttgttttgggatttttacaaaaatactaaattttaggtaaaaatttataattttattgtcacacggatttttttttacaaaaataccgtatttttataaaacaacaaaacagaataatagatacaatagttgaacaactaaaaaacaaccgtggaacaaccataaaaacttaacacagtacacagtataaaacttacacattattttttaaaaataattctgcctcacagtaaaaaaaa

SEQ ID NO: 161772 - DNA, 2781 bp, Cannabis sativa
ttgaagaaacttttcaaaaaatcacttattttaaaattacactaaattaactacatttgattttaaaatttttaagtaaagagttactaaaaaccattaatccatttaaatttttttcaacttgattacacaatcttataatcatcacactcatagcttttcttaggttttgatgtgaaattgcaatatgcataaattaacctaatttcctttctatcctaaaatattccctcacaaaaaacttcctctttctcgttataaaaaattaaaatattaaaaatgataaaatgcttggaatgaaaaaagaaaagaaaaaagaggacgaagacttttggtgcaaaaaaggtagcgtgaaattttgcagtagactacagtagcaggggagagagagagagagaggaccttccaatttttaacttctttctcaaagctaaaagacaaaaagtattcattattggaatcctaacccaaaacccaaacccaaatccataaccgaacccgaatccgaacccagtcactaaagaaataaagatatttatacattattattattttttttaaatagataaatcaaaccaatcagaaacgtgaaaaatatttaataattatatataaaaaaaaggaggcgacgacgctatatcatcctcctcctcaaatggaagcttttgtaaattagggaccgagaaagagagaaaaccagacaaatcttctctgcccctacccaccttcaaaatttctacttcaattttcttctcattttgggattttcggatattctaacattgatataactatgtctcagactaactgggaagccgataaaatgtaagtcatatacacatacccatacccatgcccatacacactattttctattttttttttgcactttctaaaattgttctcgttgttttctttctgggtttctttgtccatggtctcttctacctacacttggggctttgggttgagtatgtttttgggttttttagggttttcagttcaatgttatctcccactccttttctctttgaatgggtatgcaaggtttatttgagcttcgtcttttattttccgtttttgcttgtgttaattccttttttcggtggggtcggggaggagagaagggagagagtggagagggtttacttctttcgcaagattctgcccttcgatgatgaagttttttgtgttgttgttttgggtttctcttattttcgtttgctatttttggcatctgggttaacgtttttctcaaatgggtttactgttttatatgttttcgtattggtatgctaatatttcatcaggagggtatatctatgcttctttcacgtggattttcacatatgctttttttttttgataagagttatcaagtctatgttctgggtttttatctgtgaacttttgtgtttatttttgtatatgcggttttctgggttttcttggttgactggatgttataattgagagtggagtggagaattggtaattgtctcccattcactttccacatgccttttgagaacagacaaatagaaaatgaagtcatagttttgttcttttgtactttcgcaatgcccttttgcattttatttttcctttatactctaccaagttataagcctcgtaggtgtggctaagtggatgttcttcatatcttacagattattgagtctatgaacgcttttgttttaaaaaaaccatagattattgagtctagttttctcattttcctttttataagttgcaatgctcttattcctacgtattcatttttaagctgttttggatgaaaggacaggcaaggacgttgagtcttttgttatgtgtgtttgagtgtcatacgactggtgcgtaagtagtgagggaggctgtaaggtttagtttaaaaaacacctatatgctctgatttatatatgtacatatattatatatttgcggaatttggttcctagattggttttcatttggattttggattacctgtaactgttaattagttatcaagatttttcccaatgaataaatatgaggttgatcaagcatttctgtttatttttgttgataggctggatgtgtatatctatgattaccttatgaaaaggaaattacatgcatctgcaaaggcttttcaagatgaagggaaagtttctacagatcctgttggtaagaataagtagagatgttgttgaattaatattgggttttcagtttctgtagtttgtcatagcttatttgagtagtgatttgtatatttggattttgatgtaacctacagctattgatgcacctggtggctttctatttgaatggtggtctgttttttgggacatttttattgctaggacaaatgaaaaacactcagaaccagccgcatcttacattgaggttggtttgtacctttttgtatatttgattttttttttttcctgacaagggaaaggaaggtggtggagagattttggtctctagatttctttgcttgttattgccttgactaacttgatgtcatacattttattttgatgggacatgagaattggactccacagctagaaataacacaagaaatgtatatgtagaggaccttttttgacccacctttttgtcttcccaatgtctctttgaaaaatgtcagacccaattgatcaaggctcaagagcagcagcagttgcagcacaaacctcagcagcttcagcagatgcaaatgcagcaacttttgctccagaggcatgttcaacaacaacagcagcagcagcagcagcaacaacaaca

SEQ ID NO: 161773 - DNA, 1467 bp, Cannabis sativa
gttgttgatttgtacaagtgcaagtacaaaattcaggaataatatatataataaggatgtgaaacccatatcatatgatcattgactttgatgattagtaattttttaacaattaatagaaatttttaaatgagtgaatttgatgacctaactatatatcttctactgctccagcagagctgactaaggtgagagttttcttttttaatataccatttcccaagaaagaaaaatatatttatatatataattacagtaataaaaaagtgatgagttattatcatgaattgtatatagatctgatgatgaagtatagtagtagtaacagtagtaggaaagtggtactttgaatcttaataacagccagcgaatgcctctattttgtgcccaggtttgtttggaattatttgtaatatagtattattattatttttattggatatagtacatttccaaagggagacaaaatgccactgcttctattttctaccttccaaatgttttcttcttgtccctgaacaacaatcaccatttaataattaattcaactcttttttttgatcaataatatgcagaaaataaaatttttagggaaaccaattgaaatgttagaagccaaaattttggcataaataattaggacatagtaaataacctaattaattatagttgagttaattttgaagaagaatttcaacttttgcatatgttattggagttgacataatctgcactatactgtacattgtctggtaaagtcttctcccaataaaactaataaacagtaaatttatttatgatgtaattgtaatgtttgactgagagatcgaatattgatcgttgtgcatgcatatcatctgttctgtgatctgtattcttctgagtctcaatacttacctagttcaactttattctaacgacccaggctatatcttcatgataagacaagtaaataatataaagctagtttggcggctaaaaagaagataaaagaactcttttttatatgtacaaaattatatatgcaataaaaaatatatagtaaatacacaaaaaaaataaattaaaaaagtaaagaatttatgtagaagttaagtatatataccccatcttaagatttacaggaaattccaagttatgaaatgcaactcctcttcgctctacctgaacaataatacaacattctttatgccatgtaaatcaatcaacagaatgacaagtgcttttctttttgaaaagtaagaccagagtatttgatatttcattttctatgaaaaaaaaaagggaatagaaaggtgtttggtggaagtgtacaagtgtaagtagcccaatgagaatgagaatgtaaaagggcttttttttataaaacataatgataatgacggggtaagttgaaaaacaccacttttattaatcaattaatcaaatttacctctaattttatttttttattgaaacatacctctt

SEQ ID NO: 161774 - DNA, 7384 bp, Cannabis sativa
tgagttgttagtttgtgcttgacggtgaaattttgaataaaaataagtgtctacacgaaagctgaaggagcttgttcgtgttaggatgattattaataatataataaagtcttgtgactgacataaaaatatccttattggtaatgccttgaaggaatacattatcgacatcaaaatcaaatcagcaaaacgagcacgaaaccacttctatgctttgtgcaccattgattccactccatccaaaatgtgttaacattatagccttcttcacaaattcaactactgacagaataaaataaaccaatttcatttctacataaactagatctccctattggtatcttacaataataaaaagataatttagtccacccatgttactcttccaagctaatccactcctaactgtttttttttcaaatgtgtaattcccaagctcccaaaactccattagctaaaagcaggcttcagtttatttccccaactattaacagcattacagagatggaaacgtaataagaagaaagtctcttagtgatgcaaggagcaaaattatttggaacagaccaaggcaccaccatgattggattgctacaaaggattaaacttgaacaaaaaagaaaaaaaaaacatgggttgtaaaaagccttcaaatgccaatataacatacacagctaacatctcactcttaactctcctctcactgtttcataggatatatccctaaagacgtaactaataacagaagtaatataacagaggtataaacctacagatctctctccatctctctctttatcattatggggaagccggaatagggtcggtgcctgaaacatgggaggcagcatcttcttttgacattgacacgtagttcacaggagcactaagcctattttctctctttgcatctttagttgtggacctagctccgttttgattaagtgatagccttctgtttggtgttccattggcacctccattcgcacgtggacctgccaccttctttgcactaactggtcgagcaggactaggcttggagccaaatatggcttcctgttctgagtgctgcagctcttggtacttcttctgatcctgataagtccacgaattcagtcaagtacacgaataaaagaagaatgaaatccgagtatcaataccaaacacaaactatttaagtgaagatcgaggttaatatgaggtcgtgtcaagagtaatttgtccttgttaggcagatagagaagtataattttatgagcaaagcatcactagttagctaatcaaccagtctattgatacattacacaaataataaaagttaatcgatacttactctcatcctcctcttctcttcttctctttcctgcctgagcattgcatattcatctagcatagcaaggaggggaacaccatcataagtaaatgacatgccatgatcctcctcccaagcacgagttttggcaaccaaagtctcaacaagagctgtatggcaaagaaaaccaaataaataaaataaaatttggaaattaacatacaaattaaatcacaacatacctcaagctcaaagaactaaaaagctgtttatggaagacaaaatgctagaaatgtttttagtataaacagagcaaatatgttcaacaagtattcaaagtacatttctgcagtatataagcacccacatttatgtccaactacaagaattatgcttccaaattttatgcatacctggaattttattaaccagaatccgggctctctctgcacgcttgagattgagatgtgcacctctacttgcattatacctgttctcatcctgattgagcaagaaaatcttggtaagattcaattatttaaggactgaaaagctttctatgcccatttgaaaatataaaagtgagttacccataatccatatgaaaagccttgaatgtaccataacagtgccatcccacaagatatctttttattatttatctttggtgatgttaaaattctcgaccagggtgttttatagattagatggaaatccacaataaaacaatacaaattgattgaaaattcacgagttccattccgtgtaaagtacagatataaatgcatcggcatagacaataataatgacaaatacccgattgtagtcttcaagccaactttcttcctcacaggctgacatccatttttcaactttgtccaatatgtcctttctactgagagattcgtcttttgcttttgctatctgattgtccatgtcagccagcaactcagcaggctcaacatccccagaatcaatcattgccattattttttcccttgcagcttctggatctatttctatatgagcacgagcaaatatctcttcaagttctgattgctttttaaaggcaatttccttcatcctgctcgatttgagctgatcaagcctatccacttccacctcagcctagacaaaaaaaaaatatatataaacctaatgacaataaaaaataaaagccaccatttattttaaattgcaaataagttgtaactttaagtcagtacctgctcgatcaaatccaaagcgagagccccgggaacagtcacctcatcaactgatgctgaaatgttgcaggtaacatggtcaaatagttccctttcctcctcaggagtatccatcagattccataaatcaataagttgagaagctagctcttggagctgcagaagaagatacaggtcaacttattattacacaagacagtataaataaaacatataatgaaatatattttagtgatttgagtgtaaagtgagaaaatgaaaaatggtatactttttgaagcctctgcttcttatcttcttttagtgctatgactgtcttagccagcctagatagggtatcattactaatgctcttggactgcacgccagttgagtcatttaagctaggatgaacctcagtaacggtactgaagaagtccattccaaggacagcacacaaatcatgcacagagctaacaaattccagcaccttctgcaacctatcactctgccagatcaaacaagtaatttgcagtgatcaatccacagatagcacaagctagggtcaatctcactcattagtcaaaaaaggaccctcggtataacacttaccttctccttttgaagttcttgaagctgcgcatgatattcgtctaacttcttcagagttaggtcagactcatcaacagaaggtgttcctacttggtcattcaggttcaagctcccagcaatttccccacaaatcttttggatctgcgattgaacgtcagaaaagtccttaactctctcctctttctgtttccatagctgatcaagcgctggtgcaatagctgcaagctgttccttgattgttcctgaacttttatctggctgtaaacaaacaaatattgtattatcatccgtgtttacttaataagaatgagttcacatcatatgggtggtgggaaaaccaaacccaggtaataacttactattccagtagaactcttatctccaagagcagataggagactagaaagttcaagtttggcatcagacaatgcctgaagcagcagtgcccttgactttgcagcctgctcaaccttccttttgtacacatccaagcaatcttgctctaactgaagaagcatcttgtcacgttcctcgtcattctctccaacttcatcccaaatttcctacaatacaaaatgaatttttcaagagtcatagaaatatgaattatacggaatagaagattataagtaaatatggatggtacctgaagtttctggagtaaagaaccacaagtggtctctccaacaagaggattgtgagcgtctgtcactgccatgcccgtcaaaaccacaaattaaactgcatcataggaagccattaaaaatcattcaaggatttcgtgagattaagattctccttctctaaaagtgcacaaggtacaatgtgaatatatttaccttactgatcagcaagaaggatcacttgaccaatcaagtgaaacataaaaatctgtatagaaaaagggaaaacaagaaaactttttagtcaaaatatcaaaaataaagtgaacagcaagcaagcaacaaactaaaggaagaaataaaaagcagaggagagaactatgatcaacgtcttgcagttgcaaataattaggcatcaatcaaaatcactaacatataatgaaaatatgagacacctgtaaatgtgtgtaagatgacgaaacaaatcaatcagaagcgttcttgaacttgttcaattagaagaatctttttatcaagaactgtcaacatataaatacaattttatatatttcaatttggtactgaacaccacatttaacataagtttggaaccaaaaatcatcctacagcttttaaacaaaaaaaataaaaactaaaccttgtttaatgcgttagaaaaaagggaaatgagttctacatcttaaacacccaaataacaatggataaaacaaaaggtaacccttattcactaacattttctaattaaccaatcaaagtgtcaaacactgactatttctagcagaacccagaaacaccaatcaccacacattgcaacatttttctcaaataaataattagacagaacttgagtaggtcattcaactaaaccctttcgtcgagtcaaattcaccgcaaaatcagacactgctagagcaagatctcgagcttaacaactctcataaaccccaacagacaacaaattcacataaatttcacttcacatcacagtcaaacaaaaacttccacttccgcccaaaaagagctccatccacaaaaacccactaaccccatttgggaagaaacgaagagaacaagctcaaaaacctcagatcagatccctcccctattcttgatcaaaccaaaaccagtagaaatgaaaaaacaaaattggtagcgccaaggaacgcaatgcttacccagatcgtcctcggagttaaggataccttcttggtctgtgtgggtttcagatctacgcaagctttaagctcactgagtgttccaatgtagtgagagaaagtggtaaagactagagagagagagttgtagaagctaacaagagaacacagaaagaaagagaaagtgatgcacacaaacacaagttcaacaacagagtatgagtatccacaggcggagactgaggtgggtcccactatatacgaccaccccataataagctaagctatgtccgaaaacgtattgattttccttgattctcacccatgttttttactattatttacgaatatgacactatcgtgattgagttctgaatttacctttctatccctctcatcggctgataatcacttcttcactattgacccatcatcaaccaacaatcataataagtgtggaaagttttgtaggcctactgttaccagttcgggcccaggtaagaaagttttatcattattaccataatctggaaatttacgaccaacttagtctaatttgcttgcagttacaattattacccccttaatctaattgattgaaattaactaaatttatgtcattgatggtaggacacttacacaatatacacaaaactcacacaaagtattgttagcttttattacaattatcatcaatatcggatatttatctatataataaattgtggggtgtcaaatataaacacttttgattttgaaagggataaaataaaataggtgattgacaacaacaagttgttaagacagtaagaccaaccaactatttgaactgtccaagctcccaactgaaaatagaattgattattctatttaccactcatgtcaagcaccaactataacctaaattattcctaaattgatcaactaagtgttagacactattgtacaaagctagttatgaaccaagcttagagaaagttggtgagatgagaggatgggagaatgatacagttgtaaactcgagagagagtttgaaaccagattgttctatatgtgtttgactgtgtaatcttgttcaagatcatagtggattgattctcaggtattgtcggcctttggagtaggactatctcacattgagattagatttgaattatcttgactattgtttctataatttgagtatgtttatctatgattcgatcttaacaaattggtatcagagttaggatacaatcacagagcctatctttatttcataatcgatctgttgtaatcttcaagaagactcgaagacaatttcagaagttcatcatttcaagactatttgctggccaggaacaaagtctcaacattatggcaacttcgaagtttgaggtggagaagtttgatgggaagaatgacttctgtttatggaaagcaaagatgatggtacacatggagaatcttggactcgaagaagttttgaaagataagcaagatctcaaaaaaaaaaaatggaaaacaaagaacatatactcaagaaagccaaaaatacaatcattcttaacttgagtgatcaggtattgaagaaagttatcaatgaagggactgcacatgagatgtgggtcaaactcgagcaattgtacatgtcaaagaccctgcctaataggattaatctgaagcaaaggttttatggtttcaagatagatgaatcaaagtctattgatgaaaacatagatgaattcaccaagctggtattagatttcgaatccatcaaggtggaggttgaggaagaagatcatgcaatcttcttgttgaactccctccctagagcctacgagagcttgagagatacactcaagatgggaaagagacattatctctagaagagttgattggagatgcataatccaagatattggacctgaaagaaaataaaaaatctagaaagaatcttgcacaaggactcaatgtaagagtaagatcagagaagagagaatccaacaaaaaaggtgaaaagggaagaggaaaatctagatccaaatctagaggaatgatagcatgttgtacctgcaatcaagaatgacacttcaaaaaagattgtccttagaggaaaaataatggactgaaaacaaatacaaattccaataataattctgttaatatttctgattattttgataatgcagaagccttcaatgtttattttgactatgctaatgctcttaatgtttctgacagattctcaagatgaataggtcatggattctggttgcacatttcacatgtcaccaagaacggagtgttagttttatggtactaaattaggtatgcagtggaagagtttcatattatttaattatcatcgtattatagcccaaaggatcttcagatgtgtgtacattaaatcaaaacaataaaattaataagtttagagtagacctcttgaatcctatcagggtatccttgaaactt

SEQ ID NO: 161775 - DNA, 1194 bp, Cannabis sativa
aacataaaagatatctctacaaagtataactcttactaaaaagaattatttctatatatttatacaacaaaaattaaccggcctcaaaaacccatttgtgaagttgtgatatttaatccaccaaatgggaaaacaaccacgaaaatggtacatacataaccctgcatgtgacttcaaatatatcattagaccatgggtaccacattttcacttttagagcctcccgtgacgttttcttttctcttacttttacttgatcttcaactacttttttcgtttataccatatattttcgaattctttaaaaaaaaaaaaaactggttcttgtatttttggtattagtagtggtgtaattagtgtttcagttcccaacaattaattggtagtagttttcatagaaaaaggaccacaagtgtacaaaatgggggtgagtgtgtgctttttattttggcagtataataattgtaaggacagggacaagatagtgtggggctgtgggctatctctatactcctattgccaacacacatatactatatacattaataattaatttagttaattttaatatgttagatttaagaaatgtttatactatttaaagctaactttcattaataaaattttatcaatatgactaaattactattagtcattacaaaaaaaaaaaaaattaaatttcaatttaaaatctatattattaaaaataacttgattgtattgataaaaatttatttgcaccgaaatgtagacttaaactaattatttgaatcacttattgattaataatatagttaactaagttaaggggataattcgatataaataattaaactcctattttagatgcctttaaattaaggtagtcctaagaaaagttgaatattaatttttcacaaggggtgaatcttactttttcaatgcatacatacttacagtgtttggaatgggttaatgttaacaagagaatggtaatgtgaaacattatcttgtttgttttgagtgtttagctttagaatgttattcccttagtaatataactacccttgaggaaggtaatgttgatactttaaaaaagggtaaaattgaatcattcccttctattatattaatttgaatagtatttttgaattaataaataaatttaaatactaataatattatcatttattataaataaaatattacaatata

SEQ ID NO: 161776 - DNA, 2136 bp, Cannabis sativa
agttcatatttaggttgttaaagctagctgataggttatctggcctacttactctagtataaaaaggtctaaggaatctagggtttaacttccctttctacgtatctctctcataggggatacctggagaaaaatagaatctcccatttagaacttgatattcatacgctttgaatcagcgtagcttttctatgtactcaaggaggcaagcatacaactcgaattcattctatatccttataagttccttggatctttctggttcatcgtaatcttttctcacctgcttcattccagtgaacaggtgtcccatatttctcttgtaccacacttattaaagtgcctaagcaatggtatatttaattattagttttaaacaaacactctatcaaaggaagagattatttcaagataatctaacctttatcaaatatgtctgcaacatattttctaatattccattaatcctctcaaattgctcatccttcaagaatgaaacattgcactattttcatttcaatctctatagttctcattaaccttctttaactctatatatcatagtcaaagatattaactttagaatgtcacaagtttaaactattctcttatataaactctacatcctcatttactgtataatttgtgtgcaatgatagacaacatattaacttagtatgttcaaccgctattactcggtcgaaatcataagatcccacagtacataatttataattatgtctttctattcctcttatgggatctcctaagctgatgtactgatttaacttattaacaagctaaatatttatttctaatagatatccaattatagcatttcttacttccatcaactaatattacactcatctcgataccttgtaaatctttacttattaacacatcccttcctcttgataatatctagaacgactaatgattctacttcctaatacgaatctttccaacatactttattctctctcatacgcttttcgagatgactccccaaaagatttctcatcttgagattactctaagttaagtatgattaactctatggtaagttcatggtgtgttatctgaaagtagatgcgtcattgtcgttcctaattgtatttcctactttcatcccttcgttaatcatatctaatttccatcatttgtttttatcgatctcttacaattccttatcggtattgttcacttaaccttgaggagttcctattttaatgtcaatttgaattttgttcatctcaatttatttcaacttgtatcgattctcttaaactagtataacttaaattttccaatcatttacacataactactgctataaaattaactaatttaatacatatgataaaagcaatactactcataccaagtatacagagttaaactaggagtactcatttcttgattcctcaaccaacaataattaaaccaaagatcataccttgatcctaaaatcatcccattctttcttcattagggatcttaataatcttcctaaatatatttagaaatatacacacctcaagtatattctcaattttactgacaattcttttatgtaaattaccacacaaacttatagtgagtcttccgttgacaatgttaattcatcgaaatctaagattcttgtattcctttcccataattaccaccaaggtttcacttcctgattcatgtgctaccatcgttcccttgcaattaatggtatcttcatacttggaaaattgttctaaacctcatattataattaattatatagctcgttgcttaataaaacaacctattctattatctaataagataaccgataatcaatgttacttgatcaagtaaccgatttcttttgttgcccaattaagacaaccatattaaccctaaaacaggtttatagagtaatagttctatcactctcactgttacttaacaaagtaacctaaaacttctggtcgtccaataaaacaacctgtatatatacattttattctctacattcacaaaaagaaatctaccttgcgtacaggagataatcagttctgttgaccgagattttcggcaactactcaaatatgattatattaaagagctgtaagaaagtgagatgaagatttttacgtggtt

SEQ ID NO: 161777 - DNA, 3183 bp, Cannabis sativa
gagagagagagagtaagaaagagagaggcgaagagacttgtagagtcaaaggaaggagaagaaagggctcgtgcaggtatatatgcaaaaaaattttaccggcgcagttcactttgccttgcaaaactttttaaaaccctacttaattgaaaaacatcgataaattttcaattttttcagtgcataatatcaccgacaaaatctttcccaccaaattaatattacacgttttcctcgctcgaaaaatttctcacctatttttttttatcacttttaccaacaattatattcaacaacaaaactagttaaagcgtcggcaaaagatgttaaaaggcgccataaatttaccaccttttggtagttggatatacacgttttccaacaaaattatattatttcgctggtataaattgtctttgctggcaagtataagcgctagcaaagtaaacttcttaagccaatttgttgggttagttatgttgacagaatttggttgtttcgccgagaaaatttagcttttgtcagcacacttcatgaatttcgctggcaaaactcttaattcttgtagtgtattaatcttgtattctcattttctaatcttccactgtcacctataaatatggtagtgagggttctttgtaaatacaacaattcaggtgcaaagtctaagttcttctcatttttgtaactctaaaaaaaattgagctatcttgcaagtttttaatgtgaaatacagtgactagtgaatcgaactttcttaacattccaacaatgtaaaaactctatttctgtcatttttttattttgaatttctcaaattatctgcatcaacaacaacattttaaacatttaccaaatacatgagcatatatttttcttacagttgaaaccgattgtggttgcataaaccctactataccaaattgacccatatcatataataagatgaataaaaataattctttaaaccacactacaccaaattggcccatcaatatcatataataacaagaaaatagttctttgcctcccaatccattagcatggtactaactgcatcataaatgtaccaaattaattcatctcattttttctagaggaaatatttcatctcacttttttaccgactagttaaacttgtaaacattttattcaatggtaccaaattgatttgccatcttaattaataaaaaaggtcattaatgccatgcactaattgcaaagtactattactatatcaagtcaactttaacaaattaagataaatcaaattaataatttggtacatttagacaaagtaataatagcattgattatactaattaattatccattagtagcctatatatatagtgggatatattggcaactctaccaaacatcttctatatataataattaattgtagtagtaagtacacatgtaaaaccattctatatataaagaataaagatactaagcgcttgggacttatgattaatgttcattcaatacccatgtatatatataggccaacccatcatcattattattattattattaatacagcttagtaaatttaatttgatcctatggatatatttatgaagaagacaaaattctaactagtggatcaatttgattttcatcataaaactatatcagtactactttattatggtaattagtttcccaaatcttaatatgaaagggtactatttactatttagccacatcaaagagtcacagacagctagcgtaaggacttgtttgtcttttcgtttgttgggggtaaccatactgagttgagcaataatagcaatctatttcttttttaaaaaaaaaaacaaagaaaatgttaatattgaaggggtacactaattttagaaatatataataattttatttgtttgacgaggtgaataaagttatttatgattaataatgcaatacattataatcggcggtgaaattttttaaattataatagctcatcgtctaatcgaaaaatatgttttgttaaactatgagctgcaaaaattaaatcgcgaactacatgagacaaaactgttccgaaaatatataataattaaaatatgaattattatgattaaagtggggtagcaaagatggtgtaggctgaaaaggaggtaggcgccatgtcatttgcacaactcaaggtttaggtgctatcgttctcaattcagtccccactcctgtcctaatcattgtacacgtgtcgtttcatatgacccctgactccaagtctctcaactttattgtatatatactattacttcttaacatttacgaaaataaaacattattattattattgtaggatccacaaaaaccaaatcaaactgaggaccagtccttgtatatgttgtgtattgggagaaattgagatgaaaatatataaggttaatattattgtaggatccaaacaagttaaattaaacacgataacacgatttgaaatccgcacaagaattagtgggtttaggtttattttaaataggttcgggtcgtgttcgggttgacttgtctaacccgtttaataaacggatcgtattcaggttgacacgactaatacgatattgacccgttaatgactccttcaaagttattttagtactttaatatatcataaatgaattataaacatgttgaatacttcttaatcgtgttattggttgacatgtttaaataaaatatatttataaacgatttacacgggtcgtgtcgaatcaacccgtttataaacgggttgtgttcaggttttattttttgacacgattattaaatgaatcgtgttcgggtcaagtatgtacctgttatacatacatggatcacgacacgacacgaacacgaaccgcgaacacaaattgccaccactatatctatgcatgcagcagtattatttaatctaattggatttcggttttttatttgtagtacactaattaataaataatatcatgcaaatgtacaactaataattaattttcatgtgttattaattagtatttactacaaacaaattacaccaaaattcatttatactaaatattactaattggattttggtgttttatttgtacactacaggaaaaggactttttaccggcgcagttcgtcaaatgcgccggtaaaagttgtcgaggtaaagcaaaaactgaaatcccatttgcatttatgct

SEQ ID NO: 161778 - DNA, 7191 bp, Cannabis sativa
  modified_base (1078)..(1078): a, c, t, g, unknown or other
  modified_base (5703)..(5709): a, c, t, g, unknown or other
tttttttttaattaattaattatagataactagtaattaatgaattaagttataattaatgtcatacatactttagaaataatattaaacttccctataaactacacttaaatattaaaatgcgctccaatgtccggaagatacgcagaatataataaatcatgttattagtcttatctatttttttctttatatttttttttcccttttttctgtacgatatgatatttttaaatactgagaaaaaaagaaaaaacattatgagatgtaaagtgttagatgaagagccaattaaaagggttttgtaatgaattatgatcttaggattaaaatgggaaggaaaagttggaggagctggagtttcttaaatcttaataaatagatctttatatcataaaatcttaaaaggagtactaggttgttggccacatgtggaacatgtcatatctcacctctgaaaatttaaattataatataattatttgaaaggaagaaaggttcttattatttatatatattttttattattcaccacaactccacatggtttcttcaatatatattttgtatatataaagctataatggtgtatatagaaaaggccttatatatagtcttacatttaaggatgaatatatcagctatatggtccctacaaaaaaaaaatgaatatatatggtagttacatttaaaaaataaaataaaactatattgttatattgtggttgagtacttgagtgtcatatttaattaataaatacgtttattagtaaattaaattattcaactgatttcaatcattgaataatatctaacaagtattattataacctatcatgtaatagggaaagagttacagtaaattattaaattgaacacaatcattgaataaaatttaacaattaaaacttatgtaatacataaaaaggaattgttttaacagttaattaattagttatatttaaaaaaagtgaaaaaaatttatatagatatactatttgagatgttgagtttttatgaaggtttttggtaaactatttctgaaggttatcaggagatatatatatataaatatatntatataaattatatattatatatagatataaagattattgttctaaataataataacaatatgtaatagttgggcatgtggtctaccgaaataaaagacaaagaaatttaagtaaggtccatatatattaagtgggaaatcatatttaacttatcatatgatcatacttatatatattattatatgtaataatgcaatatgaataatatttggctctgtgggtattttgagaggcaagtacgtataagaaaaaacaaaatgtatataatgataataagaccaatcgtatatagatcatagagaagtgtacaacagaaaatataattaggagtcagaacaggttaattaatatacattgagaatcgatagtggacaaagaaatattaaaaaataaattaaaaaattgaaagaaactttgctttggcctcattaaaagtttaaaagttatatgtgttcatcttttcattattatcaattattataatttcaaagcatattgaattattgagtactgatgcccccacaaaaaaataattattgaatttaagttgttcttttattattttctatttatttataagtttggttattaagttgtaaaattttatttacatataattatttttctcatagaattgcattttggtacgtattttattccaattgaatatttatatctgtaaatttttgtgtgccccggactcagaatatactttagggtgtattaactaaaatttgtactaaaataatatatatatttttaaaaaaatatatattacattttttcaaaattttagatgaagttatgatataagttgaaacaaattttaacatctaaatattataataatatgagattttatatttcttatttttttttaatgtaggaacttgtattaattatataatttattaataataattttttttcaattgaaaaagttatttgtagtttgaatgctttatattaataatttatagtttttttatatatataaaaatagaagattgaattgaatggaattagattcaaagtcaaatttactaaccaatgaataaatacttaaaccaattatgctctaataattatatatttcttctatttttaattttatataatatgttttgaaatttgagggtgaacttaagccctttatgagttctatgtaggtccgtctatgccataatggctcaacctatattttttcatgctttttaaaatatgaattgtgttgtaaaaaatatgagtagtatcgtgtcgtgccaacatttttaaatgataggcccgatagggttggcacaacacagtccgtaagctcgatattttcttttccgtgctgatccatttttcttaaacaaacaagcctattttcaatctaagatcaaatatgcttttctattttttttttttttacaattatgaattaaatactaaattatatatacaattatagttttaaatattatatttacgtaattttgtaataatatagataatcatataaaaataattattaaaattattaaaatttaaatatttacttatgaatattcaaaatttttatatcactctataaataaatatataattttaggtttatattttttaataattttaattatttatatataattataatattgtaagttttattattaatttaacttatttataattgataaatacaaatgcattattataattattaaattataggatttttaatatttcatgccgtactttccaagtttgttacgtgtcgtatttttcagatttttattcgtgtttatatgtcgtgttatatcgtgcttaagtatatatttttcgtaccgtgtcaatttatagcattaatcgtgtcaagttgtgtccgaacctatatttttcgtacttgatcatgttcatgacgatttcataccgtttcaaaaacccaacccttatttacaacactaattcacattatcaattgatcataaattaaataacaaattaaatcttaccatgggatcgatgcgcattaatgtaatattttagtgagtgagaacttttgtttccatataataatatagtcatcatcccatatatttatataataaattttaccatgggttatgtctcatcttttatagatctaaattaagttttgttggttaggctaggcttggcttatttaatgtatttttgtttgcctcagatctaacctttataatttcaagatatatatggaagaaatttcaacataaaagtgttgctttgcttactaactaagatcaatattaacgagagttaaaaaataatatcttttcataatatgaaagtatcttttatattttactctcaatatatttatatttatatatatatatttatatcttttatatatatttggtactcatcattttcattaatttttcaccgttatatatattaaaatataaaatatatacttcaagatatgtcatatttttctgacctcccataaaaataatacgatatcataacatactattaatatgtatatattttttaactattaggaagaaaatgtgtccacagttttattcatattataattgtttattgtataataatataattgtatggcagagagtgatattattttacatttgtttaattattataaattcaataataattaaccattttaattataaaaaagaaagagaattcgttgaataactatatatgtgagtgatatgctaattaattaaattataaactgtccattaattgttttctttacactcaataatttaattaatgccatctcaaaaaataatttaattaatgcaataataacaccaagatagaattccaagtgatatactgtcacttgcagcatagcatattcttttgtttccttctctttcgaatcttcttagtttttttttggtcatgcagtaaaaacctccaaaaacattaaatccatctttttttattcattgaatatattttagaccaatattgctatgatacactaaaaattctctaattactactataaatatttatagtacacatatttctaaaagattattttagtacattccttaattgttttggtaacatgaaattttactttttttttttatttttttttattgcctattttgttgtttataagattatttataatttttaaaaaaattctgaataatatttacacagttatttatgcctataaaaaaaatggtcacatgtgcgtaaaatatttaaattttatttttaacacagtaattttctttttaaaaaaaaaattacgagtaattttaattaaataaaacatatataattataaaaaaatatatagtaaaaaactgtaatacatatactgatacagataaaaaaaaaagtgatgaattgattattttataaaaggtgtatgatatagaatttctcacatgtatatcactaatatatatgtataaatatacatatttatatattctttaggttaacgtgaatgaaacacccatatgattcttttattaaaatacaataataataataataattagcaacattaattaaaagattcacacatgctttggctcttatgtataggctttttgtgggaagagggccggggcggtgcggacccatctgcgaggccataattcagggacattattaggatattatttatttattttttattaattttgctatataatatgcttttatttacatattcacttaatataaattaaaattccaaacttaggatcgaacccaaaaataaaaggattaacctcaacctaatgggactattggagtgagactaggttgaattaattattggtccaacctaatgattacattcctaggagaaaacttgaccattttagttgacacataattttctccacaaccacattttcttttgacctcttattaaatataaatcacaactattgaaaaaaaaaataatataatattattagtgagatgacataacataattaatattgaataatgaatcacatatttatcttattattgatggtctctttcttattcaaatcaaagaaatatagatggaaaaaatatccaacagactagatctacttctatatatacaatagaatttttattatttaaaaatattctattaaaaataacttttaatttattataaaaaatataaattctaatttaaataaattataaataaaaataacatctaaattataattaattatattttttaaaatatataaattataaattcatatatgtaaattaaataatttcattttaaattttaatatatgtataaatattatatctattaaaaaataatcattacaaaaaactgctactcttagtgacaactttttagtcataacataaatttattgtgactaaatgtgacttttagtcacaacaaaaaattatttgtgactaaaacataccatttagacacaaattgttactaatttagttttagttacaacaagtattgtgattaaaaacacatttggtcacaacaaattgtaatttttgtgactaataattttaaccacagaccttttagtcacaacataagaataataaattataattagtcacaactttttaacttttaatcacaaattttgttgtnnnnnnnagtaagattttttgtagtgaattttattatgatatattattattattaattattattgttgttatatttgatactttttggtgttttgatttttttagtgtactcctatttagttataacctctcaataagaatataacctctcaaagcttgcctaagtgatacccaaacaagtactcgatgggcctatcacggatgttgaccgcccaaaagaaatatagacatctaccttggggataaacttgaatcgctcatcgacggttatgtttttttgacacaagatcagatattatcccctgtgccagaacatggtagtgcgacatcccatacaccttttttccagacaaatctatttttattccacaaatagctcatattacattcacacatgctatataaatttccataattaataaattacgcttatttacccacttatagcatatttaaaatttatgctaagatatacttgtaggatcataatcctacttataacctgattaatccataatataaacataaaccctaattatttagcattaggcttgttgggatattacaaaatccctaatcgagttcatgacaacggaacaggcctttattaatttagaagatgcctatcagcaagctttcagagtccctccggtacgaaccccttctgcatctattctagggtttgttccacaagtccctgtttcctagactcggtatacttcaactgtctacagaccttctgcatccgtgcaggcacctacataaatccatttttctgggtatggagcggtacaaactaaatgtagtatctctcttggatagttgaagcctcaaatggaaattttggaacagaatgtaagtcactcctaaagtaagagaagtgagaagaaccaaggtcggagtgaaaatttgaagaagctaaagaaggattatgagtcaaaatatacagagtacaccagcttggtggacactcgagaaaatgtgtataaggaaacctgcaaatatggtccattatatggatgcctcaagagggaaaattaaaagagatcagaacaaaaggtgtgagtatcatagaaacatgggacagacaaccaatggatgtggctacttaaatgatgagatgtagatcttgggaggagccgaagacttgggggtcaatgggtccgtattcccattatttatcccaaacagggggttgttcacggaccattagttgttctaggatagcagggtaccataaattctccgcaaggagtaagtcaccctcaagctcttagatcacaacttctgaccctacctgctctgccagcttacgctacagtagcagtacttactccaggatggggaacccatactcttcaagctctgctactagtggatggacatgcaaccacaatctttggaggaccacatattgcaggaagtgttggattatttattttaccaggatcttagatctactcagaagtatgttgtttaaacaccctaa

SEQ ID NO: 161779 - DNA, 4243 bp, Cannabis sativa
  modified_base (2678)..(2687): a, c, t, g, unknown or other
  modified_base (3744)..(3754): a, c, t, g, unknown or other
aaaaaaaaaaaagaaaactctagaaagtgatattctttcacggacaaaggaaaagggattctgaagagtgaagagcctcgtctccaatatattcaaccctatgttgaaccagaagtctgcaatcacagtataaagaaaaacctatgagaaatcaatagtaaaaaagaaaagattaaaaaccacgcagaaaatttttctctgggtctgtgagaaaatttcagagagtgagcgaccgtttatgtgttcgataaaaaatcagctgagtcaagttgaaaatctccataaatggaccacacaaaacaaaacccagaacttcaaatagcggtatttcttcttcttctccaacaattttgaaagaagaaaaaaaaaataaaaaacacagactactctggcatcatttcttaccgtgaagaagctcaaaagtctcagatccactgcgattttgtgtcgatcacaacacgaaaaaactgcagagaacagaatcacacctcttgatgaattagtttcgatgacccagtacgtcattcatggtcactagaagtgcctactcagtaatgaatctggaaaatgtcagtatctatttactcaaaataggaagaagacgatgaagatgacgatgatggtgacaattgataatgaagaccaacttgtaaactctatcgtagcttacagctacccataacgcgctttgggtcggtttgtgattctaaaattttgaatttacaaagaaaaaagttaaagagaaattgggtttcgagcaaactcaactttattattatacaaaaattcttcactctcagtgggtttgggtgtggattatgtacggacttttagagagagagagggaggaaaatgggagagtgattggctcatgcgactgatattatagtgagacagattagagtaacccaaaaaacaatttattttttttaatttttttttaggttggtgcttttttgggagaggttttaccggaaaactggtggaacaagtcacttgatgactttctttgagagaatggagagttggtcgttagttagactcaaatgggaaatcttaaattaaaactttgacagaatatatatagaaaaatcaaaatcaatgggaatgcgtatacaatatgcaatatatacacatattttatatctatgtttataaattttatggtgtatatcttctttcttttcatcgagatatattgtataatctatttgtcttttaatcggaatttttaaagggtttacttttacggaatatattgcgtggtacattagatgagtcttagggtacattaaatgaatgtcagaatacgtttctactttttaactctaattacccctagatcaatctcagccgtcagatcaaataactctctcatctgacggctgctgtatatcacggattacaatccgtgaaagtacaataacagaacaaaatcatatccctataattttatatcttgttacgacatcatatttatagccaatactcgtgtcttagctcgtgtgggagttaaatttacctcaattatttgtttcttgcctttagttttactcaagttaacttccactatttcaagagtttgctaagtgcttgtcaaaagggttttgacggtttgaagatggcaatggtgattgagccggtgctgaagttgcttgggtttgataagccatttttggttgaaacttttgcttctggcagagaccttgacaggttgagcactctttgcgcttctttaccaattttattatattttaaaaaaccccaaaaagtcttaaatatttgggcctccctcccgaatgctctcttttacgtgaggttctttcagagcatagtagttgaaaattttattttgttaaatgataaaaaaattcttgtaatttttaaaatagtacaaatagaattttgaacttaatttttgattttttttttaatataactaacttgaacaaaatttttaacatgaacaatgtagaaaacgtaacaagttttctcataacacctctatatcagattactattaagttttattttgacaaaaaataaatttagagtgctatttagtgcgattttaaaaaatacaagatctaatttatcaatttacaaaataaatagtctaatttataatttttacaaaacattaaatccaaaataatatttaccaaatttttaaaatgtaattttgggtttgcctaaagggaaaaagtgcttttcaaatgttaaataaagaagtaactgtagctgtatttgtctatttgaaactacaaattcattgtatttacagattgctgtttttgaaagagaaattttgtgatatttgcaacatttaatgcatttgttgacatttattttttattgaaaacttgttttgttatgtaattagtgacattagcaaaaaaaaaatgttggtggaattggaaaacaatgactagaagtagtcagcagagataggaatgggcaaaaccacacaaggtcttgtaattaaagtgattaagtattaaaatagaatctttagccaattttaattggaatttgagaagttgtatgtgttacttgtgacataagtgaatttacttatatgcatgttgggttataaataaatttagaaaaaaattaaattataaaacgaagaattaattatacaaacatgttggcttgaatatatatatatatatatnnnnnnnnnnatatatatatattaaaaattataagaaaacttatacttgtaatttcgtataaggccaaatcaaagtatcaaaatacttccccactccaaccaattctggtctaacatattagtcatcattagataagttaagctaccgaattattagttttataccttcaacattttatcaaacataaatatcatcaatgatcaattctttaaattaatggcaattagcattgacaaatctccgaataaaattataagaacacttaaacaagtgtttttataagttacaaaaatgaacaaaagaaaacgagttattgtttgttttaagtgcagattttatagtgagacaaaattcgaggggaagtttcgatcatgtgaaagctcatgcaaatgtctccctcaattcagaaattttaatatacaaatatataatttatacatattataaactctttctagtgtacttcattacttgcataatattaattctgctaaaggatgaatgatgtgtaatagcactctatatatgtttatacattaaaatacacataaaaagtatatattaaagcaaactcaatgattcaaagtacatatattagatctcataaaatctcataccagtttgcttcttgtttaagcattactatattttgtttattattggttttttttttttttttccccttcttctctctcttttctttttggtattttataaccttattatggacaaagaacaattggtgtttaggtatatagtatatagtttcttagtctaagcatccaaagttgtattcaatataaaacttattagtagctccaaaggcattatcatcaaactacaaatccaactacaaactctctaaacaaccctttaaataggggtgttctcggtgtaggtgatgcgacttttgactattttttaaaactaacccgcatatacgatttttctaatttaaatttctcaaactgcacctgcaccgtgaaactaaaaaatcgcagaaactgcaccgcaaaaaatgatgcggtacagtacgatttttgcggtttttgcagtttggactatnnnnnnnnnnntaaactatcacaaatacaacaaaacttgagcaacacttatcaaaaataccataaagcttgaaagtaaatatgaaaaataaattaagtttcaacaatacaataattagtggactttgggctggacattcacatatggggaattttcataaaatgagaattgagggtatagtttacttttttatggcataaataaataacactatagggttatgagtttttttttatttttttttttttacatttatatgggtttttttatgccatatttttgtaaaaaagaatagaaatcccatatttgtaaaacaacaataagttttgccgaaaaagtattcggaaaagtcaccgggaccggaaaagtcgccggaaaaatcatggtcgccgaaaaagtcaacggaaaagtcaacaccgctggaagagtcaccaaagtaaatgtctcatatataactaaaaatataaccggttatatgaataaaaactaataactcaaac

SEQ ID NO: 161780 - DNA, 5710 bp, Cannabis sativa
gagagagagagtgagtaggtatcccatgctggataggacaacaccgacggcaggtaaagcccccccttcgtggggtcccaccaatgataaattccggactaccgttacgttcacatctacgttactttttttttttttgggtattgttgccgaaacgtgaaattactggattgtccttttttcagttttcttacttaaaccaagttctgttcaaaaaagagacagccacttccgttcaaacacactttttttttttttatttaattattattttttattaattgtagttcattgaagggtggtttatttattatttaaaagagaaattgtataaatagaatttgaaatattgcagtgcagacctaactacatctactacacaagttaatagtggtccccatattttaaaaagacagctaagtcgtgctttaatgattttccattttgacaaatgaaattttctttattcaaatttaaaaataggattacaaaattttctcacttgcatttatcaaacttgaaatttgaattagataaagtggaggggtattttggtcagttaaaagtaatcagtcaaacggtcaacatccagttactcaactccgattaaaaaattgaagaaaaaaaaaagaaaaaaaccgctagtggtattacatcacaaccgtagttaatacgtggcggtaaataattggtccatttggggtcgtcgggattcatagctacacaccaattaaaaaatacaagtcactctcatcctcttttatttttttcctctcacacagacacacacacacacacacaagttctctttctacttcctcagtttattatctgtcttttccattcccctatctgttttctctctctctctctctctctctctctctctctttaactctgtgttttttctctgcaacgaaacctcagaattacccaccgttttcttgtcaatttcgctctgaaattcccagaaccttactcggcaatgcgtgatctttcacccaaaagcaattttgagctctgatacccaagctttcattgaatattgaattcgcttaaatagaaaaaattaattttttttttatttgggttcggaaatgcttgaagctgtggagagttctgtcaatggcggtttctcgcagttgcagagctgtggtgatagcagcgaggaagagctctctgtactccctcgtcataccaaagtggtagtgacggggaataacaggactaagtccgttcttgtgggtctacaaggtgtggtcaagaaggctgtaggtttaggcggatggcattggctggtaattttcgatgtcttttcagattattgggaagattaataatgggtgttgtggataatctaggattgaattttaaacttttattgcagttatgcttattttattttaaacatgatatgcttctgaagcttttttgaatctgagttatttcaaacaatgtggttaaatttcgctgttttcttactcaataatattctacgtctaattaatttatcaaaagattgggattttgttatcttttctgcctcattttatgtttcttatgatgaaactgagttcaatttttgagttttataaatggtaattttgattgcatgtttaaattatcgatggatctgttaaattgattaaatctctttgtaatgtacgtttaaaatttgctttattagtattgtattttcaagaaatttagtctcttctccttagatttatttccttttagggtttgggggtattgttggcattttattggctaccaaaagttgaatttttatttttacttttattatttttttttttataatcgtcactgattattaattttgggcgttgattcaacctggtcttcctactagttaaataaattagattttttttgaatactattaaattggaatttgataaacaataattcttttaactttccagcaaaaaaaaattctattaacttttaattgtttgcatgcatgaattttctgcacttcagctttgtttttttttttttttttttaattttttaaacacaacagtttgaattggtctcaactctcaattcccgtgatattgcattatcctggaatctcatctagaaactttcttattttttttagtttgggtgaaatgactctcattcgatctggtggtttaggtactacatcttcttatcaaagaaaaatcccaaattgtattcttcaatttatttttattaacggaaggggttcaaatttttgcttaaattattttatttttaatcgagttgttgttgaacttctgtcgtaagtggggtttatgctttctagtttctttctttctttccctctgtttgtttttttttttttaaataaaaaaagattcttgtaaagatgcctctgttagcagctaaccttcatttgactatacattttcatagcttttttaatattggaatttggaagccatattccattttactttcactttatcaactttaattctggaaaatttcttctgggttggatcaggtcacttcctgactcacgtatattatacttttactgtttaaagtttgatattggggtctgctataatatttaactttgcaggttcttactaatggcatagaagtaaagcttcaaaggaatgcccttagtgtcattgaagctcccactggtaacgaggaagatgatgatcttgatttcgatagcattccctggcacggatcagatttgagtgagtcttgtactctacttgtgaaaagaaaagcctaaatatgatttttaagataattgtttttctttactgaggattgtctttttttttcttaatgattgtggaatagataatttattttaatttgctgagctagaaaaaaaaaacaaaaaaagagagaaaatttgttttataatttggagatacaagattaagctattaactgggtggatatgtctggagttggtagttggactcctcttttttgtgttttaaacagtaatgaccccttgagataagttggtttggtgggcacattggatccgttgtgcctttagtgtttacctttaacttttactaaccatctctaaacctaaacttagttgtcttactcttattactgctttatcttctttttcggcgccatacttttcttatcatgttttcttttgccttcactccatctatttacagcatccgatgacactcaaaagtcccatagatcaagacatagagtgcataagtcatcagggtcatctcacaagactatgtgcagatctctgtcctgtgactctcaatcgaagggctctatcattacttctcgtgggcccatggtacctaacttcattagactagtcttgtttaccttttcctttatttgtttttttttcttttttttttttctttttttttcaaatatatatatttctcaagacaaattaccaatgccgtttgtctattgtgatttaagatacctcctgcacagaaagttgatctcagtaaactggaaatggctgctttgtggagatatttgcgacattttaatcttgtaagtgattttcttagagtgtatggttgaataaattcatatcttcttccctttatgttatgttgcactaactaaatggattgattatataggttgatgctattcccaacccatcaaaggagcaactagtagatgttgtgcagaggcatttcatgtcacaggtacccattccggtcttcatcatttcacataaaaaaattgttaatttgtgctgaatctactgatgttttgaaaacatggttgtagcaaatcgacgagttgcaggtgattgtggggtttgttcaggctgcaaaacgactgaagacagtttgcaaatgaggtttgaagagagagggagagagagaatatcggagtttggttgccgatgctaacaaatacttgatccaaatggccagtcccctgtagtaatatctgtaacatatctatccaggcttgtttatgtttatggtgtcgattagtagattggcattagttaactccttttgaaatatagaggatcttactttttggtagtgtagttatgtagatatttgtaaacttgtgaccaaaacagacttctaagaacctgtgcttcttcctaaagcttggttttaatgtattgctgacatggggaagtaggctttttccaaaaaaaaaaaaacatgtatatatcctttagttatcagcttatcatctttgccaaactttagcaaaccttcttgttaaattatagtacactagccccaaacaacttagaattaatcatttttgtttttctcttctttattttaacttttttattttttttacgtgctcgagtcccagatagatttaattttatttataaaattatcttgtcatcttcttcctcagctccaaataaatataactatttggtaggagctttgtggaacttaataaatttcgctttttcttaactttcaacaatattccctccataatttttcatattcatctcttctctttctttcatctttccatcagccaagccaaaacactactaacaaaatgacattattgtgaaaaaaaatatagaaaattatccgttattcttcaacataagaaagagctttaacattaaccttctctaatgattttatgtttaaactcaaaaataaaataaaatagtatgatagtaatattatttgtaaattaataaaataataatattaaaattaaattgtgatatataatatattattaagagaatatcatatatagtgtgcattacatattttgtaacatgtggtgtaataaacataaagttgtaatatttaaggagttacaatttgaaataggaatgcaacatatgaaccaaacttaaaagcatgtggaggaagttttcagttattagaaattgatgaaattaacaattatttcatatgtgaatgttggaattggagttgtccccttcaggagattcaaagctccagatttgagctgaagaaatgtttcaggcgacgtgtcgccttttattgggcaacatatcgcctaaatagtgcataacatggttttcgacgttaaacgtcatatttcaaagggttcaaaggtttttcttcaagcaacatgtcactttgagttatttttgagataaacgttgcaaaacgttgtacattcaatggcggacatttcctatttttttgctaacgtttttctactcctcaaatccatcttagacgactggtaattcatgtcatttggtgcatgagatttgatttcaaagtttggctcttcctacaatataaatacaaggctaaggttcactcatttgagacttgtttattccaataagcattttcatgaatctctaagtatttgatagtatgggaaagtaaatttttttggataaaggtatagaaatcttgttcaagttttttgatgataccccttcaatcattttgtgttctccttcatcttattctgtacactatgataaatcaagtttttgtaaatgttaatgttgcccttcaatttgcccaaaataagtggaccaatgcgactgtgacacgtggatttgagaaatatggttctgagataatttgactaagtctttttggatcaagagtatcagtaagaagatacctcccggagaagatatgaggggtccacgtactcccggagaatagggctatagcaaagcacctccgggaggtaccagaccccatttgaacagtca

SEQ ID NO: 161781 - DNA, 1564 bp, Cannabis sativa
tcttcaccctctgaatctcatacttttcactttcttggtagtgattccaggttctttccctaaggctaactgtaggtccctttcctttgcagggtcacaaggtggcctagactcatttgacttgtgaagagaatcctccagagaagattggtttcccaccttgttcaaattgctttgagcaaagccgtagttgttcctatcaactatgtgtggtggacctgtaggtctacaatctcgagtctaagttctttcaaacgttcgcttccctatggggaatctcagtgcctactgatcgctaagtagtggtatggataccaagagtagtagtgttgctttgtgtatttgtagacattagtaatagttcttgagctcttgaataattgcttccttgaacttataaattcctttcgaaacaaagttcttagcagaaatattgaatgggaactaagaactcaagttgtgtctctcaatgaaagtacaaaaatgttgatgctaaaaagtggccaacactcacttgctagattggtgtaatgaagtaagagatttgtagagtcaatagagagacatgcagtatttatagtagttcactccccatgtcacaatggtaatagagctacgtctacttcgagtttctatttctcgcgagaattacaagagaatagactaagtgtgaaagctctaaatttctaaagagaaaaactagagagagatgctctgaccttatgggcacttttctgaatgtgaaaaatgagctagaggagctctccttttataggcaaggaaatcctattaaaatattcaaaaaatgtgaaaaaatacatttaagctattttcatgtgttgatgatgatctaatggtaaaattgaatccagaggtctatcgtcaatttttggagcttaaatcccatctacaagacctttttcgggttagttgtagtcaaaattcgtaactctcttgtagatgaaatttgtacctgaaatctatagaattacgatttgagtgtgaggcataatttaatagagcatttaaataacatcaaaagtaaagttgaattgcattaatcaaatcaattttgagtgagttatgtctattttcctaaaggttgctctaataccgatgcccaggttgacagcccaacgcctaggttgacatttaccgtgcaggttgacatatgatgtcaacctaaatgctaggtgtgtgagaaaacatgttatgggtgtattttttgatgcctaagtgatattttgacattacttagtcgttcaccagttctcggatatgttgttgtttcgcaaaattgagagactcgaaaatactcaatttgtgactagttcactttgcccagaaaaggaaaaatatgaatttgtgaatttgacttttctaagttcatagatctaatttaccgtgaaaaactagacaaatacttgacaagaaatcaaaataaattagcagaatccatcgcaccaggtcattcgtcaacttgggcgctaagtgccctttttggagcttccaagatgtcgttctgatgcttccaatgtcttaaaaattgaggacaaggtctctt

SEQ ID NO: 161782 - DNA, 5784 bp, Cannabis sativa
  modified_base (1377)..(1379): a, c, t, g, unknown or other
cggccatggggccgacaggggtggccagtcagcttctatgaggaagcttttcttacgttcgatgcccgtttgagtgccagggtctctatttctcaagtactgacttggttttcttactggtgagttgtattgccacgtggcactaattctatccatgtaagcactgccatgtcaggaggacaaaaattgggataatatttgcctcccaagtccttgtgcgtacgtctatacagatagggactttcctgctatgttggtgcagttggggttgcagtagcctttattgaaaaaaagttgttgtgctcttagtcttttgaaacattttaccttgactatttgatctcatttgttgtagaaagataactgcttcagttgtttctttgttgtgtagttgaagtaagtgaagaaagggtcccacatgcattacataagtgccttttggagggaaaacctttgacttctcactttttttttcttttcactttatctcactagaaatttgcattagaaaaagctcctccttctctctagaggtccgaaccaaccaagcatcatctttcagggatttttgagtcgtttcgacgatttgggcttcccaccttcttcctcaacgacatcttgaagtggataagctttctattttagctattttacttgatttggttgatttggccatggatgcaggaacattattccttactttcaacatgctttaattcttacattagattgttatcctttcgatattttaatctgcatgatggccttaggatacataatatgtgatttctagacgaaaaagatctgaatttgacatttgttgtgattcttggcacttttagtcacgaagaacatgtttgagttcttgaaaaaacacgagtttctgatccatgcagatcctgggcggccaaggaggtcttgtttaagacctggccgaccaagggaggctattaaggggtgtggccagccaaggcgttgtgccccataggttggacggcctatgcctagaactagggttcttggttggccactaggctaggtcttggggtttggccagttactaaatcctaaaaccttagccggccaaggccaaggctctaattgggcagccaatttttttccctcgtttgacctcgactaaggtcttgtgatagccttagaggcatgtacaactatagccttatgcgtggtttctcttgaaaactctctataaggctaggcagttagtcaattatagtcaactatacaacttaggacttaatatatgtctcattaagtgtacttaaaacggtacttggtcgtgattgaccttgtacattgtgttgtgccaggaagttacatttgggtactgctgacttgaatgtgtttgtagctttnnnaggttgctcacctccccttatttcctccatgcaggtcgcactgggtgttgaataaggtaggtgacagtcgcataggtcctttatttacttcgtatttatgaccagaacgaaacacacccttcgtaaggcacctccatatgatcctcatgtggccagggttgccacaaggggccaagttaggatggcagaggagactactcagccccgtgctaatgttgagcaagagattgaccaaggggctgagagtcctgataccgaatttaatcttgaagaggtcgctccggtgaggaggaagaggtacatgacttgttttgtcctccaaaattgtcccttggctcactatgacaccaatggtcacctactacaagcttggtaagccttcagaccttggtctggatcatgtcatggaacaatcgtttatgcctgagatactagatgaaaaatctcagggaggcaggtggatctcccctatatttcctatctccgttgacatatttgagaggttataggccaatggaccagtaggtgacattcattacaagatgcccctatgggatcaactagcacatagattggccctcaactggatggcgtggtttgagtaccacattgaacatggagctattttaccttgccactcatacttccgtgatgttgctgcttatttcaagatatgtccaacgcaaatcaccccgaaaggtatcaagtacatgtcagtgatgtttgttttgtgtaaggagctaggctggcctcagcctactccttatgagatcatatattactttgatttggggtctgttttccagcaacatcggtttggatatttatactttagccaagttggccactagtggttaggtgatacccacagttcacctatgtcaaaggccaatgagtatgcaaaaaaatacttcattgcttgggatgtcaagggggtctgacatcggtgattccaaagggttccattcttcaagtgctccatccccacattgcaaataagggatagggcaaaccacaacttatctctctcaaaagagactagaaacatatttaggttgaccagtgaggctaacttccagaaatatggcttgtatcctcctgttcctagagttgtaggagcatcagctgtagataggccctaccttggtgatgggcaggctcttgaccccaatgatgaggtacctttttatcgcattgcacagaatctggagcagaaggagatggtcctcctcctgggcttggttagttgaggtttagttagtgatgcttctctctagatcgggtctagagtccaggctcctaagggacctactcgccccttgcctacatctaaaggcaagggtaaggcatttgtggaggatccagacaattctcctctaatgacagcggtatttgatagttgataacaccatactctagtcttgagctgaaaatttggctaaaatattacaattgagatttcatgggaaaggcaatgtattatagatagcaattgtggcttactttgtgtgttcgttgttgttttttttcgttagtttaacttggtcttcatacgagggcgagtaaaggttaagtttagggaaatttgtcagatttatttttatgcattttcagagtcaattttattatgtgtttagtatttttattactttactttttagttttatgcttggttttgtttttgttatgtttttcaagagaaatatttggatatctctgttatttgtaattttagtgttcttcaagcctttttgagacaaaaattgagtaattttaaggagaaaggaaccttctagaagcttagttgggtttcttatagcctcaaatgggtcaaagtttacattttcaactcaaaaattcatggtctaaagtcaagagtgggcactttctaaaaataaaatgaaaaatgaacaaaaaaagaggaatatgctcatcaaggttgcgacttagcaaggaaggccgcgacattgcttgttttctgaagaagaaaaaaaatgggaaaccaagaatctgcagagaaaatggaaactaggaaaatcgcttggaaagacgtggcttttaaagcaatgctgcgactttggtgaaaaaagggcaactcgaattttttcagcatttaaagggggctaatggttaagttttgataccattgaaaaatataaaccaatttgaagcataaaaggaaggctaagagcagaagataccattggaggactccaaacagtgttctatctcctttatctttatcttttatgtttttaattgaatttctattattttagaatgacttctagtagttaattttcttttaagaattattatgtgaaccatttaaatttattttatcgattaatgtagttattcaattgcttctttttctcttaattcaattccatacaatctattttaattttgtaattattgactggtcatctataattgttatctatgcattcaaatcaaaattttgaaaagtaaaattagaatatgctatgattatttgtatgattttatgagttgcttcgcttaatactttttttttgtgattaaactttaccataggaatatatagagttttcacatagattgggtttgtaactcttaaccagattatagactacttaattcatcttgtcaattgaacaagaagaagagaaattgggtaattacattaggaagcaaaataaaggatagttggggatcataataatccttctctttattaaaaaaaattattaatcgaatagaagcaaagaattaattaattagtaatttataatcaattctcgtagaaacgatactctgtttcatcattttattacttgattcgattgtgtatacttgcatactaaaattattaaacatattggtcttttagactttgaaatgtattacaaatgagtttcacaataaggaaccctaaccctggctataaggtagtttctctaggtttcgtttggtgaagaagaaagcttagagtaaaaatagtagagcttctactgaaattccatcccctttgcatgaagggatagtagggtttatatcgaattcgagcatacacgcgacccattcgggttttattgtaaaagccaacccactaatgaggtaaaatatacaaatacatgactacgaggctcgctaaggatatctagctcatggggcgatagttacgtactgatgagaagctcgtttggtgcaggacatgtgttgcacggagatcacgcctgacagacaaagatttcaggggagccatcaaacaaaaggggtgtatggtgatgcgcgcactactatgctatgacacgggagacaatatctgatcacgtgtcagaatggtggacacgccatcttaggggagacatccacctcttgtttggcggtacacattcggtactcaccctgcagtagacatctggctcctggtccgtggtaggattttgagagtcatcatgtggtaggcttccaggagcatctcgtgtggtctgcctccaggtgtacccttatcttcattcgaaggcctttgttccttccatgtcccggaagactagggcggtttttgagtcttgaaagaatgttacatctcagaggagaagctcttagtcttcattgggcttgggcccattccaagtttggcttgggcttccacaagcgggaaggcgtaggcccagttttagatggtgattaccttctggttatgccatgtgtctaccttcgagagacacggataaaacttgtatagagcttaaaggtgatatcacacaactttaatggtgagtttttttttttctttcagaattctgtgattaatcgaatgatgaatgtttaagagtagattgaatggtgaattgtatcaggaactttaatcaattattttagagatctttaatctaatgatgaatgtttttgagtagattgaatggtgaattgtatcaggagcttcaatcgattattttggagagcttgattggtgaaacttcaaacgatcgaaggaaatataggaaatctttttgttctctattcgaaagttttttttttctttgtgaggagcgattgagtttattctgaatctcatgatcgatggtttgagtagcttgagtaacttcaatggtgatttggcttagtaatttcaagtcacaattttggacaacatcaatggtggagcttggaacgatccaaagtaatgttctctgatagaagatttttttttcttcaagcaacgatagtgtttgttttgaattttgatgatcgaagctttgaatagcttcaatggtgaattatctcaacaactttgatcgacatttttgagagttttaatggcagaactcggaacaattgaaggtttcttttgattttttttgttcttagatgattatttatagttcgataggggtgtgatgtgtatcgttttaag

SEQ ID NO: 161783 - DNA, 3115 bp, Cannabis sativa
cccctccccctcttattattaagaaaaggaaagcaattaaaatgaaaagacacaacaatgttcataatcatatctttgcaagcgaagtcaatgtcttttctttctaaaattcaagtatcagcatatatgacagggtctcttcatagagagcactccctgtacttctaccatcctagtatgcaagcaaaacaattgagtgctagtcctttttcatctcataaataacatgacaaaaaaagttactcactggaacattggaattgagaaaaagttcatcatcttcactacaaaatgctccaattgctcgcacatcaacaaggttcccagaatcccgaatttggagaatatgaattgtttgataccgaagtgacacaactgctaaaagatcgtcatgcatgaagacacccatattatgggctaaattgataaaatcatcattaaagaccttttcatccagtacgacaccatcttctagcctaagtcaaataaaaatagacagaatataagaatcttttggaagaaagaaaagagaaaacaaaaaaaaacttagtaacttatgcacatacaatatgtcttattaggcttgaaaagaaatgtataaagctaagagcacgcacctcaagagatgaaaagttatcttttctattgatggaactccctgaatggctccaccaacagcaggtgcatcgtgaatttgagtagttgaggtggcaaagagtccatattggttactctccatgtaaaggaagaaatccttgcatataagctcattgctggaagcaagtgatacacagtaaagctgtgtaaagaaactatcaaacttctttgcttggggaggaagatcatggatatcacaatcttcgtccttgcacgaaaaagaaagccatgagggtctgtatacaatcaactcctgatggtttctactaaagcatacgagatattggccatcttctgtgaatttccggaacaaatgatctgggcactcaatatcatatatggtatggctaggaactaaattctcgtaaaatcgtctggcgcaatgaacctgaaagcatttaagtaagattaagaattctaagtttcccctaatgtgctttcaattcattcctatcattttcccaagttatcagcttcagggttatttcatctgtaatcattgatcatctttgatagtactagctttggcacatgtgagaggtgcaatatagaatctagagaccactgtaccaattggatacataaaaatagtactaaagagcagaatctcaaaagacaagaaacacatacaatcgtgccaggaggaggagtgcaaatttggcgttggaatagtctggcaacgacattgttgcttctaaacattagttagcgcccgtcgaaaaacctaaagtgatgttcctttggaagccaaaccaaacccttaatggaaaaagttaaattaaataaataaaaaactgtcagagagttttagacagcgaactactcatgagctgcttcactcaacaagctcaaatccagtgttgttttcgtaaagttaagctaaaattaagttcaacatgaatttctaaacataaaagtacaatcaagttaagcggcaggtagagctgtagttgatgaatgagttgagcaaaatagttagtctgaattaggaagcataaatgcgtatactgtatgcatgtgtataaaactggttatggataaatcaagagcaaaaaaagaaggtacctgatgaatgcggaagaagaagagagtgatgatgatcttgatgatcgaatggaattgagggaagcgatggaaggtcgccggagtacgaaggtccggcatccgtatggctatgacttggatatggatattggtctggaaatgaccacgtttcaccaccaaattattcgttatgggccaacatctgacccatacacaacaactcttttttcctttttaattggcccaatagtttcaactcacataaacaagtcaaaattacacattatatttgtttttagggattttttcaataatatacacaattaacaatctatttacataaatgactttatacaaataattaagaaacaaaccgcgctttgcgttcggttattttttgtttagtgataataaagttatataacgattttggaatgtttttaaattgatgcatcactatctcactttttcattctaaaaattaaaattgataaataagactatttgaatattatattttgatcaatatatctaaaaaaatattttcaagattgtatttgatcaaaatattaaaattatttataagaaaaatctatatttattgaaaaaaattatgtttttaagtaaagataaatattattttgaaccctaatttttagcctttattcttttagagtctttatttatatatataaatatatatatatataaattaaattttggacattatgttttgtgaagttaaaattttaaccatatattttaggaaacttacaaaaatactggaattttgttaacttttacaaaaatactgtcacacggaaatcttttcaaaaatactgtgttttataaaacaccagtaaaatacaaagcagaacaattcaaaacaacagtagaacaccagtaaaaaactagtagaacaccagtgaaaacttaatacagtatactgtagtatgaaacttataaaagaacacagtaaaaaagtcaaaaatactgcctggcagtatttttgtaaaaaaataacaaaagttagtatactatgtaaatttctctatatttttgttaaaaataacaaaaaatcaaaattatattcagaccctttatattttaaaactcttaattgtaattttcacttggaccctttactataaaaaattaagatttttaaaaagttaaaaaataagaatatatatcaggagtgacgcttagtctacccaactcaactatttttaactataaatttattcgaactatctttaatgaagtcagttataaaccaatacctaattctttttttttagtagtaggaaaaaaaataaaatagataaaaaataataattttttgtttaataatattcatctatacgatcatgatagataaaaaatgatgaatgagagtgaaaaaaatagtgta

SEQ ID NO: 161784 - DNA, 7180 bp, Cannabis sativa
aagccacgaaagctgaactcgacctcgttaatcaagatctcgccgtctaccgcgctgccgccgcagccgccggcgtgccaccaccgccgcaggttcagcacgtggttgatcagaatttagttttgtataacgatgataattccatgtctaatttgcaacttcataatcatcatcaatttcttcattcgcacgttatgggtatggatgggtcagatcaattgcaggcttcacaatatgatcttgttcaggatgatgttagttcgtgggtcgtacaagattccggcattgatatgaagccttctactgaagaagcaggtcttgttgatgatcaagatcttcatcatcatgtcaaacctcttcttcaaattccatctgatgagaagattaatattgataatggggcagtacttgctgaacaccatcatcatcatgacccacggttggttttttcttcacattacatgttattagttttatatatatatatatatatatatgaatgaaaattgaaatgagcaatttttatttttgaaaatttcagagttgatgatgaaaccatgctaataaggacaaatgtggatgatgataatgtgacattgaaggaagagaatgagaatgatcattacactattcaacaaaatgttaataatggcgatggtgaagatctaagagatgcagctactttgtttacccttaaaaattctaccacttaaaaaggggtaggaataataataacactatgttattatattcctccccttctatattactttcttattttctttgtttttgtttgtttcttctttctccttttttgtttttttttttcaattatttaggcttaggaagaacataagaattttacatatttatgcatatatattagcaatataatgtagcaagtttttttttttcttgacaaaattttgaacctttattttctgtcattttggagtgtctccaattgtgttcgttttacattatacatggtggtggtattggagttctcctcgcaattaaaatcacaaacccatcaatcttttctctatgaaatgcatagaatcacacatgtgatagtatgataaatttaatatcttcaaagtaaatgatctctttgtaaacagttccaatgagtccatttcattttctaagagcaataatgtacaaatgacaaaaattagtattcccaaactaagagttgtcaggaattgaattgatacttccttatctctcattgtacctcatcatttacattcaattctctaccaacaagattttggagattaatgcttccatttgggtatatagtatatatatccctcacattccaaatgaagcgccaagacatgaaggactcatatactaactccaaatttgcttgcccttctgagaacatataaacattcttattcaccacaatccaactttgcccaggaatttacttcaaaccctttcttttctctgagatcatcactttagcaaattcctcccacttcccaattgcagcataaatatttgacagcagcatcgactccaagttgatctgatggaaaatgtggtctgcaatttcctctgtgacaggatgtgtgttcttgtacattctacacgagttcaaaagaccattccaaacgcaagcatttggtatcaattgaatgtttttaatgatgtttcttgcttcttgaagtagcccggcacggccaagaggaaagaagatccaacatgcaagaatagtgctccatctggggttctattccataaactttactcatccgactgaagagagaacggccctcattgatgagccctgcatgactacatgcagaaaggatagccacaaaggtgacattatctggcttgaatacagagttatttatctgatcaaaaactgtcagagcattctgacagattccataaattccataaccggtgatcatagaattccatgaaatcaagtcttgtgtatctaaattctcaaatattagctgcccttctttaaaaatcttccattgtgcatgtcgatcaatccgattacaattacaaattcaaattgacacacaaaccggcaattgataaatggaaaaattgagtcatttttatttatattgaacaataaattgtagcttcaaaaagttgttttgtccattcaaagtgttgttttatcagcagaacaaattagattgctcaatcccatttgtgatcagatcctttaaggctctctggtggtcaatgtgtaatgaccaaagtgacaacaaaagctttcaatggatcttttacatgtcatatgattccttaatcgaacactaaaaagaattacatgtgttacacttaatggaacttccatgtcctgttgaaactaatctcagctttcaaagccttaaaaaagaaaatccgcaagctctgtctttgcaacagagcaatacatgatgagacttccaatttcagtcattttagtagtccatatcacccatgtccggcatacggcttggaggtttcttctggtctgtattttccactacagctgcctcagttgttgtcaaaagcaatgagacgctgtcaaattcaagagaacacattttggtcagaaataacaggacatttccaactatgcacatcacaagttacgttccaacgaaaccaaaaaagaaagaagagaatttcacctggcagcatctgacaatgctgttcgcacaactttgagaggatcaattatgccagcctttaccatgtcgacatagtcacctacttagtcaaaaccatacttgttaatgttattgaaaactaactttaaatatgtgaagggagaactcttgaaaaaatgtatttttggtttttgaatgattgaaagaacaaacctttcgcagcatcataaccaagatttggatcattttgttccaatagtttgccaagaatcaacgcaccgtcaaaacctgcgttttggactattgtgaatgtgggtgcctgcaggaagtaaaccaaaaactaccatcaggaaataccgagccacggctaaaaccccacatgaaatgttaacaaatctactcaaacaaaaccttgagagcactctggattatttgtacgcctcttttctggtcttcattttgagtctggaggttttctaaagctttggatgcgtataaaagagcaacaccaccacctaatacaatcaatgaaaatatgattagttgaaggatatagatatacttaaaactgatagatggaaagaatgaaataaacaactaacctgggacgataccctcttccacagctgcccttgtagcatttaaggcatctgttaccctgtctttcctttccccaacctctgcctcacttgcccctccaacctttaaggattatgctgtcaaaaagagcttaagaaatacaaaacatgagatagaatttaccaagtagaaataccttaaaaactgctacacccccagatagctttgcaagacgttcctgcgatttctccttgtcaaacaaggcagtactcttctccatcgcagctcttaactggataatcaggacaaagttagaaaataatttttaaaaccaaaaaaaatgaaaatatatcaataaataattacatgtgaactccactatccacacacctcctcacatctttcttctatcagcttcttatgcccacctccatgtagaatgattgtgtcatcaagagaaacagtcacctgttgtaattttatatcaccattagccagaataatacacatctaggcagagtattgactaaaatacaaaccttctttgcagtaccaagcatttcaagttggactttatcaagagttagaccacgatcttcactgataacctgtatataaaaaagcataagtcgacaagaacaaatgcatgttacatgcaattcgaaaatagcttttttacctctccgccagtgaggatggcaagatcgtctaaattcgcttttctgttatccccaaaaccaggagctttgatagcacaaacctaaaatataaaggtacccctagttaaagtacaaaattctcacgccacatacaccaattagagacagaaaagacacctatttactgtaaaaaataaattacagacagagatgtgcatgtgcatatttacatgcatcaaacgcaataatgcatatattgcatgtgagcatatacatatattcgttgcaaataatatcttcataagagcacaaattccaacaagaaactaatttgttcatatctatcatttaaataccttctctacacaagaaaaacacttgaaatatacagaatgtttaggagtggcacattaaaaggggtggggaggtggatatcacagaaatatgtacaaataaatacccggacgtttataaaacaaagtattgttagggacaaataaactctgaaatttccctgaaatggtttcaactattactggtactgttgaagacctggtggaatttattctcaatagatttaaaatttaaaaataataaaaaaaaaagtccacacaaattattttaatcaacaaacatataccattcaagaaaacaacgattctaacaatattttgaagcatagccaaatactcaccttaagcccagcatgatgcttgttgagtataagcatagacagtgcatcgctttcaatgtcctcggccacaacaagaagtggtctgtttttctattcaaaatgaaatgaaaaatgaacaaggaataagtccaaccaccaaatcacataaacaattacctatctagagcagaaaaagatcaattacctttactgtatgctccagaattctcacgagcaaattcatgtctgaaattttcttctcatgaatgaggatatatggattatcaagttcctgccagtatgatagtattgcaaattacagtgcattagatcaacaaaaatatactagtataaaataataagagatttaatgtcccaaacaaaaatatattcaacaatacaagaccaaactcaacagaattacacaacttttttttttttgaaaagagcagaattacacaacttgcataagtaaataagttgggacgattgcacttaatcttaagttataagaagaggcaaaagaaaaagtaaaatgaactatagtaaagggtaggcacaggaacaatttcacaatattttaaatttatatagcgaattcttagagctggcctagttatagactcagtcacagggtatacatcaaaatgactattcacttgtgtcaaacagaaactatttacaaacaataaaatatctaaacttacacatttctgagtcttctgatcagtgacaaagtaaggagaaatataacctctggcaagcttcattccttccaccacttctaactcattgtctaaggtattaccatcctatcaatatcccaatcacagaagattaagcacttgctgagttggccaaatatataacctgggaagagagagaaggaaagatgctcacagcgacagtgatgactccttcctttccaactttttccattgctttggctatcaattctccaatctcacgttcaccatttgcagaaatagtggcaacctatattgtatcagtattaatttaattatcatcattactaaaacacacacatgattaaagagaatttaaattgacaatgattccatcatatccatagacatgtaacccagcattacaatcttgacaacacttcaatctgaaaattatttgctaatatttgaatacataataaataaactctctgcaggtttgcaaaaattaattgctcctatgtcaaattagtgcaaaaatgctccgcctaattttcatttatatacaaaagtaaattccatgaaattatgtaaaatcaaatccaataattcacctgagtaatttcttctggtgtacttatcatcagtgccctgcttttcagatctgcaataacagcactaacagccatattgataccactgcgcaaatccatcacatttgtccctgcagctatcgacttgcaaccttctgtcagtattgcttgggtaagaacagtagcacaagtggtacctgcaaagaaatataaacaccttttcctgaatcttgccatatgaatatcgtcttaaaagtagagggaaaaaaccaagttcgtgccttgaacttcgtggacagaactagaggcacatattgggtttatcaataatgtaggtgtagcccatttaaaataaataaatgtccaaatctaatatgtatgctacatttcatataactacagaaaatagtagactataagaaatttcatttcatttcactatgtacgactaaaaaaccaaaattaagaaaggatgattaccatcgcctgcaacattattggtagctctggcaacctgttttacaagatcagcgcctacattcttatacttatccttaaaattgatgcttttggcaacggtaacaccatcctttgtaatcttaggtgccccatgacttttctcaataatcacatgacgaccctgaaacaaatcaagcaatcaaacataataaagagactaaaagatggaatggaatttcttattagaaaaagaataagtaatattcaggtaaattaaggatatcaattatttggttgaaaagaaaacaaaattttcaagcatgtaattgtaataccttaggtcccattgtaactttcacggcctcagcgacctcagagacacctcccagcattgctgcacgagccccaaccccaaaattgatatctttggccacataatttctgttgcaagtaaccctgctatatagctttacaaacaaatgaaagtaaaaattagtgattcgtccatatggattattaatgtctcagaaagtaacataattgcctcctaagttccaccaaggtatcgaaattgacaatctttgtgaaatgcccaaatgccccggtaagttaaacgaatagaataaatagaaaaatccaaaattttcctcataatagagctctaagaccttagtgaagctaatattcattctactttgataaatatatacatagcaagtgtataaatccagaaattcgacgctgaaaagtggagcaagtgttttaccagcttcttatagttagaggaattaatggatgaggccaattttgaagctattcgatacatgagcccactgattagtcgaggtcggaaatggtgtgagcgatggagacagtagagagagaagaagaa

SEQ ID NO: 161785 - DNA, 2437 bp, Cannabis sativa
ttcgtataaaagttgttttaaattcaacatttttgtatgcagacttagttccttttgttgcaattaaacattagcctgctttcgattaattcttaatgatggtttaatttgtataacgatttcaggaggagcaagaagaagcactcagacagcttaggaggaacttggtgatcaaagcaaatccagtacctaacttttactatgagggccctccgcccaaggcagagctcaagaaggtactctatcgaaatttcttctgggattatccttatgactttcaaagcaacatttccacctaatatttctgaaactgtaaaataaagtcttaaaccataaaataatttgagtaatatttaattgtctaatactttgagctttgtaatatcaaacctgacggtttacatatgagtgcagctgccattgacccggcctaagtcgcccaagctgaacaaaactaaccggagaaagagctgtggtgatgcaatcgttgcttcacacgaggaaaaggaaaggtctgctcggatgcaacgtcacagcatcggaagtaacaaagaaggcaccgcctcctccattactcccaaaagtaaggctccgatcagtagacggagcagtagtgactccaacggtacctggaaagtcaaagaccgatacaaacaggaaaatgatgatacgaagacagctccttctaagattgccgaccaggcgaatgtagacatcgcggttcattcatgaacttgtaggtttttatcttctaattcatgcgaggaagaatataagaaaaaggaaaaacaaaagaaaagaaaaaaggtcttgaatttgcctagttatcttattatggactctgaatgaaaatagctttattttcacgttaaatgactatttcatgtgattttgtgttgtgaattgtatatgttttgtaatcgacattggcactagtacatatgttgtcatatataagaagagtcgtccattttagtatggaccaaaaatgtaatctttcatctaatcttcatgttaggaggagaacttgtttgcttactattctgcttcatttacttagtgttcatccattaaagttttcaggatatttccattattattatgaatgctttatagaacaatattcgatattacaatttatgatttgtgacttgagaattgagataacatggtctttccttgtgtttgtcatatagcattctctaccagattcaactattcaaggcagaactgttgaacaagaaagggcccaatgacatgggctttcgcccattatccaaattcagttcatgtcaagacttttttttttgataaacacgcgttcaagattttgaggcatgaattcatattatggtaaaatctaacactatcacatgcatgctcacactttagcagtcccattaactattgagtaactatgttaaaagcaacctttggaagtttcaactcacaatgagttttattggaatgaattatgaataataaaatatccatgtaaaacaaattggtaaccgttcatattctaaccaattgctttctcttgttcaagaaagagatagacataagaggactagaaccctggcaaatttgaccatggacctatctctagtgactttatcaatcataatgggtttacctaaggtgccaacaagagcactaaggtagtttctaccacaatattacaaacctagaccattaaaacgaacctaaataggaacaatctgaccatttttacagtgtccaaatcagtagtctagggacgaagcaccatcgacttttttatcaaagtggattacacctgtttccgaaaccaaatcacgagtagcttcatcgcggaagttaactagagtgaacccagagtgcattcacactatacgatcaattcccagactaccccaaactcatttaatgaaaccttcgaatacacgaaatgggagattggcccttagaacaacacaaatgatcaaggtttgccagaaagaagcttcggtttccacttcatcaatgtcaatcttagtaattaattaatccccctctttgataggttccatgaaagtcaatttagtagaaggagtttgtacctgattatttttgaatctgccccaaatatctttagcagaactttggtagtgaaccttctctacctcttccacccaagatcgagaactagcaggaggagagggacctacaggtagatcactcgccggaacccttaaattcgtaatcgggtcgtcattcgagtcatgaaattcctcgcccaaactcgcaatctcgatgtcatcctcgtttacaggtagctcctcttcattcacttccttcccagcagaagttgatgtcgttgtaaagtctttttttggcaagttaaatgccaaaatattttttactttatggtaagatttatttgcattcataaccgattttcttaccttgtttattc

SEQ ID NO: 161786 - DNA, 1417 bp, Cannabis sativa
gggcataaaacccaacacataattactctcggatctgttattgatcattgttatgatattaattaggtctttatgataaatagtaagcttgataaagacaactttattcatatttgtcattgtgatatataatctctattatatacgacatcttcacttagatatcatgctacatcagtaattcaaattaagattacttgcaccgaataacatgtatcagtaaactgtactagcaactgttgattaaagatttctaaaatttaatatgttgttgattgttttacttatgtctacatgatcttaatctctgtacaatacaagtcataacctcatgtatgaataatgatttttttcgatatttatatataaattatttaatatgaaacattaataatttaacaaacaggtacataagaatatgttcaactcttatttttaatcaaaaatatttttacaggtttttcaagacataaaacctaacaaatttttttggggccaggttggggttcggatccggggtctaggtttggggtcagggttggcgtctgggtctgggtctgggtctgggttaagggctgagtcagggtcggggttagggttaaggtctaagtccgggtctaggtctagatttgggtctaggttcgggatccgagtcctggcctaggaactgggtctggggcaaattctaggtttgggtttggggtttggagccgtgtttgggtccagggccaagtcggggtcgaggtccgggtctgagtccaggttggggtcgtccgagtttgaggtttggggctgggttggggtctagagccgggtcggggtcggggtcgggggcgggtctgggtctcgagatgggtcggggtcagagttggggtcgggtttagggtcagggtcagaattgggtctgggtctgggtctcggcctaggtcggggttcgagttcgaatccgagtcggggtcggggtttgggaccgagttgggttcaagttcgggtcaggggtccagatctaggtccgggatttgaaactagagtccccaatctcagaccctttgtaaatattataatataagctaatacaaatcattttatatttattaaataatacaattcacattttattaaaatttatgatcgtaataattaatacgatacaatatattatccaaactgtgttatttattatttaatacaatacgaccattatatgacctatcaaatgagctcacaaagtgtaaattaatagtaattataaaaattaacacaatacttgaatttgattgaaatacatataatctattttcgaaaagaaaaaaagaaaagaatgaataaataaaatgtgagaaactttcaattaacaaaaaagtaaatgagtttttttatttttatacttcaaaacagttttttttttttttgtatt

SEQ ID NO: 161787 - DNA, 1375 bp, Cannabis sativa
aaacatggataacatttaccccaaccttttgagactcttcgagttgtgagaacttgcagtcttctttcaaatcttaaagataaatttacaacacatggtgatttttgggatcacagatgtattccttaagttgtcatcaattaaaggaccaagaaccaaaggtgccacggacgtggcacgcatgttgcgtatttaatacatttgttgataacacgcgcgtgcagggggcgcatctttcaaaagaagttgtaatgatggcaggtcgattgaaataacccttcttgaatgcatgcgggacttgaggcaggcaatgatgaaaatcgaatgccctgagcaagttttagatgtcatatttttcaacttcccatctgacaataagatgaaacacatacctgattcatgatgttggatacgagattagattgtgggtatattgtcttccacaaactaatccttctctctataggttctcactcgtgaagagtgattgagattagtcttgggaaccaaactctaatgttctttatatagcaaactaattagagcctcataaattctaattaggtttactattgtgtattacacattatacaaagctcataccaaataagatgtttattgagttcattttattagatcacttatttaacctaatttaaaaaagtagctcaaataaattatcttaatttgtgagccaacatattaaattattaaaaataatccaaaaacatatagaaaaaaaatgacactaataagagtatctccaatgataacattttagagaatgcttgatgaagtagaaagtttgtaaaatataaggatgctatatcattgaagataaaagaatattattcttgaaatctgtattgatgtcacacaataacattgatgttatatttttttttaaatataaaattaatggtgcaatatatatattatatatataatagtttaatatagaaaaatatttttatatatataataacgtatgagatcataattatagtatttttaaaatatattatactattagagcgtttttaaaagtaaagttgccaataattatattatatctttggatgatacgaagatatataacacctttaaaaaaaatactaccatcgaaaatgctgtaatgcgttttatcgcccctgtaaaaacccgagagagaaaaatgctaattgagattaacttagcaaaagctaatcaaacaattagaacaatcctttattaatattgattagagagtttgttacaatacaacaaaagaaccaaaattataactaacaactacctaaacaacactaacaactttaactaacaaaacagaaaagtatttagtattagaatatttctaattaaggaaataaaataa

SEQ ID NO: 161788 - DNA, 5309 bp, Cannabis sativa
  modified_base (4554)..(4558): a, c, t, g, unknown or other
  modified_base (5252)..(5254): a, c, t, g, unknown or other
tctaacaaaacgaatactaacatttttacggactttgtttcacatttttataattttttttatttatatttttacgaaacctaacaggtatttttttagaaaaaaaatccaatttaatgaaaaaatcaatataattgaaaacttcatgctatcttcagctgtacatatatttttataaatcatccaaactaaataacttgatataaatgtatatattatcttacttattatataaatgcttatttaatagattttattgtgtttaacaattttttttttttttttttgaaataattaaatttagtatattctgttaacttctcaactcatatttttaaactaaaaaacaatatatccatttagtaaaacaattaaaacaatatatactaatataatattataaaactaaatgacagctttttcaaaccattgcattactttaaaactataaaattatgtctcatctttattataacatctacaaagcaaatcaacaaatttcaaattgaaaaattgtttcagcaccaatatttcatattgttatggaattcgttctatagagttggagattatgcagaaattttctatctaaaaatataagcattgctatcggagaccagtagtgtttagtactttttataagtggcgttttacgattatttaacgatattttcaaaaaattattttcataaatcgagactcagtatgacaccaaaaaagatactaaacaccactggtttcttttgagatttctcaaaaaatatataaacaaagcctcatcactcatggcagctatagcccagaatctaaaacactataaacaagagaaactgatttattttattttatttataaattcattttttttatggagtaaaaacagagagaaatgacaacaactaacaagaaatcaaaaaggaaaagaacataattgtaatgtatatatatatatatatatttacataatatacatataaaaatggacaagtggggaagtgaaaaaaatgaaaggcttggcttaaatatctgatgcaaaagaaataaatggaccatgtcaaaacgtaagaaaagggttcattttttttttcttttggtgttacttttttgtaaaacagctttcaatgttactattattaggtataacagttacaacatagaatgttttggcagttaggcttttttttttttttttttttttctcttttgttttttccaatgccatcaaaacttttgttcatcaccatcatcacaacccttcttcttctcttttcttcaaagcttttgttttttttttttcactcatttctctcctcagtttcagcaccataagcaacagtgtacggccactaccactacaaccattgccaatggcaatggcaatggcaatggcaatggcacaacctcatcaacattatcatatgattaggctaatgtttttcttacatttctttttccttgttgttttcggctattcggaaatcgaccctcttttaacattcaaggaatctttacatttagagaacaattccaaatttttggccacttggagtgcctcaaccgcgccctgctcggggcgcgatgctaattgggaaggcattctttgtagccaacatggtaatgtatggggtttgaagcttgagaatatgggactaaagggtgttattgatgttaatgctcttaaacaattggttgatttgagaaccattagttttatgaacaatggttttgatggaccaatgcctaatcttggtgaacttagtgctcttaaatcagtttacttatctaataatcatttctttggtgagattgactctgttatgttctcaaaaatgctttctttgaaaaaagcagatctttctaacaatcattttgtgggtgttattccttctggattgacacttttgcctaagcttgttttgcttaggcttgagggtaatcattttcaaggccaaataccacttttcccaaacataaaatgggcttcttttaatgtctctaataatgaattgagtggtgaaatcccaccaacacttagtaatttggatccatcctcatttcaaggtaagagttttatacacaaaaagagcatttcttttttgtcttttattccatgtatgatcctattttttgatgtatatgattttgatgatgatgaatagggaatgatgatttatgtgggcaacctttgaaaccatgtggttttggaaaaccatcattactaagcatagtggtggtaattgtagtggttgtaattgcactagctgcaatagttcttgtcattatcatcctaagccggcgcagcaacagcatcagccgtcgtgagccagctacttctatagaggccccgccttcgcctgcaccaatatcagtgcaggcgaaagcagggcctagtaatagtttaaatgcttgtgtggaagatcaagcaggcggcgatgaactgcctcagagttcatcgccgcttggaagtagcgcgagtagcaagaagaaagttgctgacaagtttaaggtgacatttgtgagagatgatagggagaagtttgacatgcaagacttgcttagagcttcggcggagatgttgggtggcgggcaattcggttctgcctataaggctgctctgttgagtggtcctgttatggttgtgaagaggtttaagcaaatgaacaatgtaggaagagaggagtttcaacaacatatgaggagattaggaaggttgagacaccctaatttgcttcctcttgtggcttattactataacaaggatgaaaagctcttgctttttgactacattgacaatactacaaccttggcttttcaccttcaaggtacacacaacaattgatcattaatttttttaccaattaatattgagtttgttggaaaagtttgaatcttttggcaaaattacattagaagaagagaaattcattcaatgtacacacaattgatcattttttttttaccaactactagtattgagtttgttggtaaagttaaaatcttttgacaaaatgacattaagagaagagaaatttcattacatggtaaatattgaaacaatgcacataagaagtaaacatgtcgtcttaccataaattttaattattttattccattccattctataaactgatataattgtaacaacagttgatcatcgtccacttgattggaaaacgcggttaaagattgtaaaagggatagctagaggcattttacatctccacaatgagcttccaagcctaatctcgagtcacggacacctcaacacctcaaacattcttctcaaagaagattttgagccaatactttgtgactatggcctaatcccgttgatgaatcaagaagacgcccatcaattaatgtcggcttacaaatcgccagagtacctccaacacgggcgaatcaccaagaaaacagacgtgtggagcctcggcatattgatactccaaatagtgaccggaagagaagaagtagaggaattggtgaagagctcaaatatcccaccggacgagttagtgatcgaaaagcatgaaggttgggaggaagaagagatggtgaagctattgaagataggaatgaagtgttgcaccggcgatttggagaagagattggatatcaaagaagcaagtgagaaaattgaagaattgaaagaagttgttagtacaagtagtgatcatcaaaatcaccatgagattactactactagtgctagaaatagtacagctatgcatgatttaaatgatgaagatttttactcatcttgtgctagtgatgttgatatgagatcttcaagagcaatgtctgatgaatttatcaatatcaacttcaaaggttgaatttttcctcatatacattactcacattgtacacacatgacatgtatttataagtaacactatatatatgtgccaacaaacgtttcttttagataatagaaatgcttaaatcttcatttgtttttgtttcatacaagttgttgtcttaatttcatacaagaaccaaaaaaacaattttgtttttgtttttagaggacaagatgattttctagaagtacaatagcaagaaaagctcaacaagtatccgatttttctaaacacattaccttttgatcatttttttttttgaaaataagaagaataatttcattgatgaagaggtaaaaactttaataaccaaagggtcaaacaacatacattttgtattcttaatagtaaagcatggtgggtatcaacatttatcacatgaatgagccactaaaactagtgacaaaaaatatcacactattaaagatagacagtagataagaccatttttaatgagagatgtaaaaattgtactatatttaacactaatagtaattttgtagtaaatttacaccaaattttaactttgtgcttcaatatacaattacaaaattttgatgtaaactttaatatctaattaatgttttattaaaaaaataaaatctaataactttataattaattttattattattttaatatgttagacaataaaaaaatataaatgtttcataatttaatgtgatagttnnnnntactaataaaataataaaaatatcataaatgtaaatgaaaaaatagtacatttattgtggtgtaaattttacattatagcaaatgttgtgccaaatttagcacaaaatttattatgtgctaaatttacatcatcttttggcacaccattagagcatactttttgttaaataaactatatttaattttcaccacttatttacacctctattgaagatgctctaagatattttataaataaccttaattaatatttaaattacaactttatcttgggcttattgggtgtaaaagcccaataaggtgtgattatgtgttacaagatccgcaagtttttcttttgttgttgcttcaatattggtttaatagcacaattaagagaatgattcattaacaaattactgcattgacaaattaagcattagagttagcatttttataaaataagataatattaacaattacttttccaacactctttcccttttcatacacaatacaatgttgaagctgtctcctttatttacaaaaacaaatatttattgctttgagaaatgtatgtttttcttttactctccatctattaaaagggcatttacttagtcccaaaggttactaagagagattcaatttgctcaaaagctaaagaaatcaaagattaaagaattaagattttttctcctgaactttaacatnnnccaaatcatgtccctgaactttttcggccgttaaaaattcttcctgaactattga

SEQ ID NO: 161789 - DNA, 8676 bp, Cannabis sativa
tagggaatcctatagaaattgctaattcttttcttccaaataatattatatatttatttatagtttactttactaaactatgtgttcactatcatttcatgcactcttgtacgtagagctatagtcagcaattgcaattgaatactagagttgaatatatacaatattcaaccactccaagattatataacataataattactattatgttcgagctcaaatggttagacatgtgatttgttcttacaaaatttaaggttgaaattacctacatagtgcatagtaattattcttttggtatcctagagttggatgaggatcgatatttaataattagaagatttcgagtataattgttaaattatttagtacaatcgaaataagtaagaaatgtcttcatttgtcacacttttaggcgtgtttttagaaatttaccatgtaattagcgattatttaaaaaaaaaatataaaaaacagcattttaaacaatttttttattgtttttatgattttatttacatgaatattgtattttgatgttatactcttgttattttttgttattttgacttattttcttgttacttgtaggtagttgttttgttgttttcttgtgtctttataaaatactgtaaaatattaaaaaaaaaactttaaacataaaaatgtaaaagttttgccaaaaatagtaatttatgtaatttgtaattacacaataaccacataattggagtactctctaattctcatggatgtaattacattgtataattacaaaatgttaccattttttgctaattaacgttattaaattatgtaattactaacttatttgccaacacataaaaataagaattcgtataaaattactactcaatatttaaatacattttgcattttaaaatagaatgtaattactaaaataatataattacacagttatttttaaacgttggttaacaaattttgttagttacacaaaatgttgaagaaggagcttgtgtagtgcagtgtgaaaacaagttttattaattataaattaaaacattatagtatttaaaaatcccatatggtcataaattataaacaaaatttatatatgtggtagtcaaacttatttttatattcatatgattaaatatttcaaactcagtaaatataaaaagtgaagtgattgggtttaattagaattcttggactatttttttccaacttaaacaacatatttttatatagttgtttttttgttaacaaaagtggttgatatatagaatgagacacacacaaaagtgattatctaagattacaaaaataccaaactaagacttgcccacactcacttgtttttatttaaaacaattaaaaagaaaaaagaacaacctgagtgagatttgtatgtttgtgataaatttttagttgtgaaattggaatcactagacaactttaccttgtaaagttccaaaaaaagacaagaagaaagaaaagaagagaatatatagcaattatttttgagtgtggtacatttaatatcaaagtgtatatgaaatgaaaggggggcacaatccctctctcccaacacaataagaatcataaaaagaaaaacatgccaaagcataagatcacatctttcaaattctacaacataactacaaaatggtaatgacaaaagtatgtgtttctttatctcgagcattgttttgggtatcagtggcgttggatggtgatacttaacaaatgattagcgatattacttaacaattgttaaattaaaatatataagacacgttatttaattacatatatgtcaatgttaaatatggaagtcttaagtaaatctaaaaaaaaataaggtaaatattatattaaactgtacgttttgaaaaattattgattagtcgtattattttataaatgacaatttaaattctatattatgcaaaaggaacataatggtaccctatgctcggttttggtcgaactatttttttttatcataacttcataaattcatattcctattccctaattcaatagctttaagttcattttctatcctactcctaactcaattttatattttactaaaatcatattcaaagtatagtctgaattgtcagttaacaaaactattaaattcatggtatttttaatagttggtgtagaaagaaaattagtttgattgttggtatttgttgggcaatttagaaagctcgtaataatgtgacatgtctagtatggaaagtagggaagagttgagaacctgtgacattgacagaagtaaacctattaacggaggaaggctcgtgaaattgatattgtaccatctctagtagtgggagaacacagagatggaagtgaatcctatgtgaaaccaaacaaaaatagtattaaggtaaatattggcattgatttgtttgagggagaagggaagcaaggaatgcgttgtgtagctcggaaccaccgtagaattattataagggtgtttactagatgcacaacaagaagggtgatgatagaaatggccaaaatccttggtatcaagaaagctcttagttagataaaacaaaagagataaggccatgttaaattggagtctaattgcttagttactatctaagcaatttgtagccattaatacaattgacttctagattaagagatgtctttatagtttttattaaacattctacaaatatattagttcacaaatttactagaacctcacatttctattcatatagtttgttcattgggtgtgatctactctcttgtttgtcgagagagtctaaaataatatttacctaaaaaaatatgtttcaaatacaaaaattgtaacagcatacatccattcaagcatcattacatggtaccttgatatttaacaagtaaatcaagttgattctaaacttttaacattcaataaccaaatcaaacccctcttaaacctttgggaaaacatatagtaatgattataacaaacatatatttacatacacatatattgagagcttgaaatttacatttacattgacaagaatgggataggaagattaatttttaacaattcttatgaaaaaaaattcatctgttcaattcaaaatgtaatttttatactcaagaaatgataaatgaactaattttcttttcttcttattcgactatgctataacgaaatagttagtcactcattcacgcatccaaccacttaagttagattcaaaaacgcgatctataaagtcaaaactttgtacaaaatcctcaatcagaaaaaacactttcatcaattgtttattctgatcatgctgcaaccacccgatgatcacgtggcaattttctttcataaacctcaaatttcgaagacgaaaacgagcttgatggataggaaacaaaacataaatttgaaagaaagaaagaaaaaaatgttagtagtgattagtgatgactgtccatgagatctgcaagagtaatctttccgcagtttccggtatcgagcatatcaaacttgttgcagatcaacaagatatctttctctgatatcttccccatttccttcagtttgtatatgacaaattctgatttactgcaatacaaaacaaaccaacatatgataaggcaaaatggaaatttttatagcataattagattcatatggtaaaaatttttaagaacttgctgagttcatataaagaaaaatacataagcattttcacaaggactctttcgggaagagcaggaaaagtgtcttttttagcttttactagatcgttcactcctttattctcaatctatagaattacttaggcttttcgaagaaaagaaaaccaatctactatggttttctatcctggacttaatgcaaaccgaattaagaatttccctataaaagtgcttaacggtaactaaatatcgattacaggtaaatattctttcctaacactatcaaagatagcattgtgcataattaatcactttcttaagcatttcaactcgatacaagctaaccaatatgaatcgcatgcgctcacgcatatgtttataacgtttattcctcctatgtagatcgaaatcaatatttcaaacataataatatgttaatctgttctaacaacattacagaaacagcagaaaaatctccttcctaactacaaatgttttaaacaaaatcacaagtttttcaacatcaacatcttttgtgaaactattcgacgtcttgagataacctttcataaacaacttattcgagaaaatatttaaaaattgaaatttttggtcaaaaccttaaagggtatgtttagttgggggtaattgaatggaaaaggaaccgattttcatttcattcctttgtaaagtcattctttctaatcgaaagaggaaaggtcattccaatgttattccattctattcttattacctttcctaaggcaccttgaagatctaatatacaaacatgagaaattattatgaacaaactaagcaccttactcaaaccgagtgctttagtcgttagtcgtttcttaagaaaaaaaaaacaaactagactctctgcctaaccctacaatatttggttaccaaaaatctatgctatagcaattactatatagatacctagaaggactcgaacctcaaccagaaaactataacttatttaaaagtaaattatcgctctgtttggcttaacttctataagttttttttagcttttaaaattaaaaaagttttttcatgggtgtttggataaaaaatgaaaagtcaatttttaattttaaagtcctaacttcttgcaaaaagacttttgaaagttatttttaaaattaaaataatttacatattttctaatttactcataaaaattctttttcttaatgatatccagacattgaaaagtactttttattaaaaaaaatatctgcatataatagttatctagtaaaaataacacaaagtttatacttattttatatttctaactataagcaaaagtagaaacttagccaaacagaaccttagcactgagaatttacatttggttgtcaactgcataatgaagtcaaacaagaaaccaaatgtcctagtaaatttgaatatttcattttcatttcactccttttttttgttaatatttaacattgactttcccaacaattttggaagggaaatgaatagtattctcacacacaatttcatttcttgatgtcttaaaaatcatgatactttttccctatgaaaacttctttgttaaagaactaagatagtgataactaacatctcaagtcaagcctaaacaacaaaaaagtaataagcactatataataccaaaagaaaaattttcaaacaagtttaccaaattatcaaacatttgagagtctatagaaacatccaaacacatacctaacaaaaccattgttgtcaatatcagcagcaagaaactcagagatagtcatgtcttgaccaagaatccactttgccattctcctatgtcttttatccactcttgcttcagccaaataaagaaaagctctagcaacggcgagcgtcgagacaagcaaccaaaccgaggcgaaaattcgaccagtcattgagttgaatgccctatctccatacccaacagtagtaactgacataactgaaagataaaaagaatccaaccacccaagtttctccacaaaatgcataacaccaactcctaaaccaatacaaagaacaacaacacctaatgctaaagcaactttcattctaatcctcattctccctttcttgaaatcaattatatatgatctagcattctcttttttcttctcaccaacacctttaacacccttaacacttttaagtaaataaccctcttgtaaatcaagaacataactaaccatcccactaagcaaaatatcaacaaaaccaaaaccaaccaacacaaaaagaacagaaaaaagcttagttgcagtactattaggagtgatatcaccataaccaattgtacacattgttacaatacaaaagtacaaagcatccacaacagggtgagtttctttagccacaaatttttccttattcaaagagtaaatcaaaaccccaaaagataaatacactaatagaagaatgaaaccttgtcttacaatagatggggtaccaaattgaggcttggaaactacagggtggtgattgttgtcatttatgacagccatagctggtgctgttcttgatctatgaagattggttttgttccaagatgggtaatttgggtctataagccaagaagatgaaggtgggctagttgggtcaagagagagagttgtggaagaagaagaaggagaggtttttgatgagtttaaggaaaggtttaaagcatcaagtattggggatgattcttgtggagaagaaggtggaccaaagattaaacggtctttaagctcagaaggggttaatgggagatggatttcattgttttcagggagagtacataaatgggtcagcggtggtggtggtggtggtggtggccacctcctcacataaggcaacaatggctctttctccatctgggtatgccggaaaaataaaaaagtaaggatttttactaacaccccttttcttcaatggtcaatgtgattatcagaatttgaaagaaatggcttaaagattgaatctttatcggttttcaatcgagtagccgagaggtctgagaaagaaagagagagtgattgaatcaaatgtgttgattgattagtgttatggtatgattgaatcgaatgtggactaaaatcatggtaaaggagaaaactttggtttatttttgggtttggagaatcagatgattattttgtatggttcttatatgttcgtgaaaatttagattcggctgttctttaggagtatcctagatcacgcgcatttgaagcgcgtggggttttgaatttgattatacaataggttaattaataccttatccaaaccttccatgttgggtttagttttagtccttgctattattttgtgtttgttttagtcttttactattaaataatataggattgtagttcactggttgtttcggtagattttttatctgtttttagtatttgagagagttttttaatgtaatttgtttcacctattgtagctatttagaatcatttgtaaatttttaaataattctgattctgaatagcttactgtaccgaaaataaagttcagataattatttactacaagtataaaaaaaaaaattacgcttgcaacaaaatattattattattattattattattgacatacattccttcttatttttaactcaagaagggaacgaaatcaatgtcatcttcaaaaatagaatttttcatttaattttggtatggtgaataaaataatatataaatatatatttaatgagataaaataataacaaagatatatcattaaaatattgtttttaagacaaacttaatccaaaaaaaatcatttaaacttttaaataaataaaaaaaatcaagtggattctttctttcacaactgctattaaattttgaaaatgagtgatatgcttaaatattaagtatatatagctcaatttaatgtaggacaatgactagaaaaatcaaaatatcctcataatttttcattttgacacttagagtttatttatttgtttattgaattgagtatattttactagccaatataattgaattttgagagatagggttggaatttagtatgttcaaccataattagtagatagatatatttcatactaataatgcaaatttgtgacatcatgtaatgctaattgacaaaatgaatttttaattgatagtgattgacataggataggagtatttacctcatttttagtctctttaatattttatcatttgttaacttagtttataatttgttaaggtattttttgtgtagttttaatagagtggttataaatatatttttgggtgattgtgtagagtcatagacatagtataattattttttaaagtaatttatggcataaatatttaaatttaatttttgattacagataaactcttaaatttaatttttaacggtaataatacataaattatatttttagaacttccataagtacttggccgttaagtgtcaagttattattgacatgttatttttttattggtatatttaaatttatttttaaataaaaataaaaatataataacatggaccaatcaaagattaccacgtgaaaatttacttgacacttaacaacctgatacaaataaaagtttcagaattataacttatgtattattatcatattaccgccaaaaattaaacttaatatttatttacaactggaagtaaaatttatgtatttctgtctcaaattactctatttttttattgatgctaattaatatagagatttgtgaaatatatattaaaatttgggaaagttctttctttatatttattcttattaattggggtattttattcttagtatttaaaaaaaattataatttaaattatttatataataaagtatattatagttatacgagatattttatttattttaataatttatattgctgaaaataaaatgtaattttcaacattcgattgcacacatacttatttttttatagggccttttttttatttttacacttcaaaacagttttttttacatttttacggaat

SEQ ID NO: 161790 - DNA, 3052 bp, Cannabis sativa
tttttgtaaaaggataagtgttttatttgtccctatgagtgaaagtaaagttgattgtattgtatgcatgtgactaaacattcaaaagtttttgttataaaatagactcaaaaatattaacatattgtatagagatacctcaaatgtccatattataaaaatatatactagtgaagggccaatgcaagcatttggctgcccttacaaaaaataatccattcatgctaagaataaacactatcacaataaaattacatgataaaaaagcaagattatttgttttttaactagatatttattgtaaatacaattaaatattgttctatttaatttaataattctagctataaaaacatattgagataagctttgtgataaataatactattttaataaatttgaaatgaaaaaaattaaatatatataatttattgatataaggtatgaaaaaattaaaaaatttcatttatattaattaactttttttattatgttattttaatacttatgtaccaatacagaaaaattgatatgaacaaatatttgttctaaagatatatgggctcttacatgtttgatataaggtatatgtgctacaattgaaatttaaatccattatcatttcataaaaatcacaagtattaaacttaaattatattttttatttgaataaactgattgattttatttaaccaaattagcgataaaatagcttgtaaatcaatagggagaagcccccatcatgactacgatctggttaagtacaagcaacacgagttaaaaaattgatcgccttgattaagctaaattaattttaatttgagaaaatatcactaaatttgtattgatttatttaatttttattttcttttttagttatattgatcataaaatataaataaatcacacaaaattctatatcttgcttttaaaaaaaaaattatgaagagtttggttaattttttttatagtctttggttaaaattaatttaaataaagaattactttatcactttatatataaaaaaaatgatacaattatggacagatccatatagaagcgaggcgagacagtcgttcctcctaaaaaactcgtgaaaaaaagtgtatatgcattttagttagttacaataaatatttgtaataaaaaatgatgtttataggcataatatatactttggtgtaatagttaaattacttagcgtaggataagggttcctaatcccaacaaaagtattttttttttttaaatttactttagtctcctctcatttatcaaaaaaaattacgctgtctcactttaaattctagattcatcacacactagatacaactctaaacaaatcaattatatatgctgaacccaaaaaaaaaaaaaaagatatattgccaagtaaaaaagaaagataaagaaggtcaaaattaaattccctaaaagagaagatatgaataaaataaatagtgtaataaaagtaatatgtttgatatatgttagaatttgaggataagataaatgaggtttcatctcaaaatcaattggcaataggaggagtagcccattcatcttatatatcacaatttatttctacacattagcaatgtgggactaactctaataatatatattagagagaaaatttttttgctgaatatattgtataaaatagttgtttgttacaaaatagaatataaatgagaaaatgatattgcttcgaaaaaaaaagtatatatgagtggaattattacatgaaatgatcatacaattttttagaaataattatataaatattattttctataaagttttatatttttacatttaagatttttttcatatatatttttacgatattttataaaaataatacgaaaacaacaaaaaaaaaaactacataaaaataatataaaaaataatattcaaaacaacaacaataaaataacatataaataataaaaaatcaacaataaattaacaaaagtataacataaaaatatataaaaaatactaaattttctgtaaataaaattataaaaattataaaatcatttacaatttcgtttaactatatttttgtaatttttgaaataatcccttttttaaaaccaaaatggtatataccctcataatatatagtaagatataaggctgattaatgtaatattatttctagattatttcaattatatgtatattttctgctctctctacttcaccttagttaaaattcaattcaaaaacgagttgaacatgttattcttctttgtgtgtttgtttttcctaaatgtgatattataatcttaaagattctttcttatgatttgattgtttttttttttttttgatgggcaaagataaaaagatacttatcaagatgaacttgattctattccacttggtttgtgaaaatgctagttgtgtagacattaaattatagtatatatgaagatatacatgtatatatctacaagaccaatttaattagaataattcaataacataatgttaagaaaacatggtgacatggtttgttggtaagctccatcaatgttcaaatccttatatttatataatatcatttaaaatcaccaacaaaatcactaactatttattatttgggatcttcaagaattattacattaccaaaaaaaaaaaaaaactatcaattacagataaactataattacatagaattatataggggtaaattaaaaaaatatctcttttattttattaattaactaatttatctctaatttatatttgattgaaacatacttttttctatatatattgtacctaaaataccctgacataaaagaatcacatagagagtaatatatcttgaagtgacagggacaaaattagttaagtgcttaaaagaagaggtaaaaataatagactttaaaaaagaggataaaaatataagagaacaatataaaaaacaaaaagtatagagtctaagaggctgtttggctttacagtttaaaaactgttttctgttttttaaaattgaaaacagtttttaataactattaggagtcgtttggcaaa

SEQ ID NO: 161791 - DNA, 1458 bp, Cannabis sativa
  modified_base (1392)..(1415): a, c, t, g, unknown or other
cactagtgactgtaactgctccaattaccacatcaattccatgctccgaaagtccttccagagcattgtaagagtttgcaatgtgagtttcagccaagacctcttttcctctaactttactccctttcataacttccttaaaaccctcatttcccccaacaaccggttgtactgacgcctctccttccttaaaatctgcttctctattcacctcagaattctcttctaatctctctgtaacagccgaatcttgattccctttagatcctttaatcacccatttttgttctttcactgtctttttcttacaatccaccgtagcatgtcctaatcctttgcagtattgacaaagaataggtttccattcataggtaattgaggcataaacatcataaccatactcatcttcaaaaggtattcttgctggaaaatcttgctgaatatcgacttcaactagcaccctcggataattgagtttattcctcgccttagtcatttcatcaacttgaagaagcttccccaactgcccaacaattttaaacagagatttttctccccaatacttcagttctaaatctggcaattgtatccaaatcggaaccaacctgatatcttctttcttgaagcttgtttcagaatcccaagccttcattacaaccggtctattgttgaagaaaacatatcccccattaagtatttcatctctagtttcaatagaatcaaaccggactaggaacaccccataagacaacgcaccaaccttatcaactttccctttccaaaccctcctaataaatccttcaatcacagacaaaggaggattggaacctagaacgtagcatactatagaaggactccaataatgaacctcatcctcaatgtcctctaaggttatcttcaccttgctagagctaccagtattcttaaaggtattttctaaattcctcactacatttccagaacgcagaataggaggagtaataggattaccttcttttagagcagtcgcacaggatcggttagcttgaaggaagaattgaaaatccctgctgatttcatcttgtctcctgattgattgcagagaagatctaggtgataaagccggcaccatatcgatatcctccctcccatcgtcattcacctgctcagaatcatcgttttcttcctcctctgaaaattccactggttcaataccaataattgcatccatggtcttcgttttacgaaccttatcagatgatgaaggccctcgcttctttggtttcttgatcgcagaactcaatttcccctgcctcgccctagttttcgccatagcaccagcccagcaagagctgaacgagagagagaaagggaaaaagtttctagaagatagatattaaacacttgagaaannnnnnnnnnnnnnnnnnnnnnnntagaaatataagaaaatttcagtttggattctaaaattaaagt

SEQ ID NO: 161792 - DNA, 5523 bp, Cannabis sativa
attgaagtctaaacttccatcccagagatccttgagtcaacctgggcgcagggctaggtctctcccaggttgactgctctgactcgggtttgctcaactctttcacatcatccttcatgccacatgtcaaaaatttatggctatgtcaccaagaaaagtttatgggttaacattttccccaattaattttacacttctgtggagttgacttaatgacgtgaaccaagtccgttttgctcgaaactaccaaatggacatcaactttggattcttaggcacttgtatatgttcttcaagcattcccaaatgaattaggactttgaacacttttgattagtctttaggaattttgaaaatcaattatgaaaaaaaaagaggaaaaatcttatctcttatcaatctctttctttgaaaatttgagattttcttaatttttgttatggaatttggattaattggattgaaattctaattctagttaaacatgccattcgaaattagagagagaagggagaaagagaaaagacttttgccttttgcttatcatttatctttttcctttgatttctctaatttttctataatcctaatagcattaggaattgttgttaccttttaaatttgtattcctattcctagttgtataggaattcaaaatactatgagaagggaaaagatataattatatcttttaattatcatttacctcttacttagaaagttttaaatttaaaagagtccaagtagcttttggattaggatattggactcaactataaataagtgagttgagaaccaattttttcactcttcttattccattccacacgcccatatcactttgagagcacctcgggatttcatcttcatcaagcatttcaagccttcttcacttgaagttagaaaacctctttttttacgctgatttttttttttgacttcttcttcttctcttccttttttgatcttaatctaagggctccttaactccaaaaaaccttagaaattattttcccaagcctctcaaaaacccaaaacacctctcttttgccttgaagaattcctccaagccaattagactttttgcaaccaagtttgactttccttgagttgtaagtagcctaaattattgaacttgagaaggctagggtgaagagtagcagaaggttacctggctgtgactcgtctcaacggagaactcttcatcagagtaagctttaatcgttggaaaatctagtaacaatgttggaagcaaaaatgaggtttctggttcagagaagtgtgtaagggctaatgttcttctgggtcgagggttttctaaggaagttctatgggataaagcttgaagtttaaagtgaggaaggaaaaaatcaacttcttcgccaagttttccatttatatgcgtgggaacaacttagtaagttttgaaatgaacggtctagatcgtactgatcaaaagctgcttcatccaacggttggggactcgaagagtttgcatttgatgctcctggggagagagaatgtggcattcattacttatcttttcacggtagcatgaaccagtcgtcttttcaagtcctgcagccattcgttttccaagaaaaatgcgcctgagccaggcgcataagccccacgacttcacaaaatggacaccatatttcaacaaaacgacagttgtaccacgagaaatattaatccttcagttgtccaaagtaatgcagaaggttgctccaatatttcaagatataaataccatataataataagaaatcaagcattcaaaaggaagttgtaagctcccatcactcaagagtcccaggagcttaagggtaaatgttatttgtattctcagatgcctgatacatgtagtcatggaagagtgccactcttgaccgtccatgatcagtatatgcttgccgcttggatacgttgaaggttattatatttagaaagccaatcaaaggtccacaatgttagtgagtacggataatgctctaggacctttactattcatcaaaaactgggaatgatcaaagttatctagagcttcaagtattttagaaaggtaataggttagtgtaatttgagaaggctttagcttgatgatcccagagcttattcgacagtgccctatccagaactcggagcgacgattacttatcctctgacacggaatcatatcttgtcccctaagtcagaccatggtagtgcatttacgtacctctgaagttttctttttgtccaatggcttgtctaggcaaaaacttttcatggtgaaacctttgaatgacgcgtatccctgtccatacaaaatccttcactatagtcgtacaccacacgatggggaagtttcctacctactaatggtcagatcgtcatgttgtagtgatagcctctgtaacgtgctaaatacgaaaccctaggtggataaagggaacacccttatacacatataagcctataaatactctcatttttttgtacaaggtgtgaataattttatactagctgaacttttgctgaaattcctactagctttcttcttcttcaagagaaacaaaaatgagtgcaaaactagggtttatactgtaaacatttgtattattaaaacatttacctataaggccaatacaactgactcgtggactagggattattaatgctcgaaccacgtaaaaatcacctgtctattattttcttactttatttgtttcttaagctctatttttattagtttttgaaaattttggtaaacaatattaatacataaattgggcatatttataagacaaaatatcgacttatcaattgtagacatgttcttagccatccacattattatatttccaaaatagaagttgtaagaataatcttctctgataaactttaatgagtgaatcaaagaaactaataacatgaaagggagttcatgattactcagaatttaggctgatctgctattgatcatcattatgatatgaattaggtctttatagtaaatgacacgttagataaagaaatcttcattcatatcggtccttgtcatttataatttctattatatacaataccttcactttgatgtcatacaacgttcgtaatctaaaccgagattacttgcactgaagaatgggtattactgaaccgtactagaaccaattgattaaagattctataaatttaatatgttgctgactgttttactcatggctaagtgatcttagttctctgtacagctacaagtcacaacctcatatatgaattaggaatttttcaatatttaatataaattattcaataatttatactaataatttaaccttgatgcatatatcaaaatgttcaactctttattaacaatcaaaaatgtatttataggcttttcagggcataaaccctaataaacaaaacatcaagattttcaaccaataccaatatccataggtccttaactgctgaccttaaccccaatagttccaagataaactctcacgagtcttggggaatcacaagcaaaacaaactccttcgtagactcgaccaacccacaaaaggacaaagccaggaataaatgcccaacatagggacgacctcaccaaaggagggactcactagagccaagcatgcttctccgagctaggggtgagcaagatccaatccaatccaattgaaccaaattgatctaattaaatccaatgacaaaaaattggatatccaattacaattagattgaattggatgttaaatattggattttaattggattggatcaattattgtatggacatgttaatctcgaaatccaataacaatccaattacatttaatatatattaaaattatttatacataataaaaaatactggaaaaataacaaatatatactttagttacatctttattattttatttatttttttataacacttggttgttttgtgtatttctcttatttactttaacaatatttttattacttttttattctattttattacttggcagtcttgttgttttagttattttaaacttttagttgcattaaacttgtaagtatgatatctctaaacttaaatgaaatatgatatttagtttttacgtatttttcttcatgtttttaagttaatattaaaaattaagcctgtaatcggatatccaattaaaataactgatccaatctaattagtatttggatagtattggcttcgattttgaggtctaattggatataccagaagatgactttccaaatccacttactaatgggattggatcaaactagtagaaaaatattagattggattagatgccctgtcctaccctgagccaccaaaaatcaaattcaagggaatcaatatacataagcgacatgacaacaattttgaaaacccctgctaacaaaaagagcaatccaaccagcacaaccaacaatataaggaaaccagacctacgaaaatgcaagagaagaagatcgaaggagcataccaaatcaagatgcaaacgagggccaccaaaaggacccctaaagacctaccacggaaaatactcgagatactggaggcaaccaaaaatgacctagtccagacctaaaccaagtgctactctaaagttaaacccaaccaggagactgggagaaaccagtgaaccacccgaagccaccaaccccacccaatcaaaaaccctaatctctagaaaacccaaattagtgagactatacgaggctgaaaacagccctgggagggggaaaacacaaccaaagaatagaggcttattaatggaaatttgacatgcggggacaagtacccacgggtactcaccccgtatggggtggggatcacctgccttaatgggtaatggggtgggggtggggtgaacttttatacactcgaagcgggttcaagatgggattaggggtaatactacccacctcaattcgacctagatattttaaaatagaagaaaattaaaaaaatatcaacgaaaaaaagaaaaaaaaaaagataaaagatcgcataaaatatcactatgcaaaatcggatcctgcctagcaaaaaaaaaaaaaagattgcacgccttgaaaacgtgggggaattgaacacgggtcgcggctcaggaatgggcataccgcaacccgcatcgtaaaaagcaggcatcatcattgcacacgggccatggcccaggaaaggtatgtcgcggcccgcccccattctgaagcagaaaaagatttcttttctcaacgtgggcttattgtggttgcctaattcaaagttgaataggacttttagcatgtgtaatttttctatctttttagtccctcaatggctatataaggagcaaacttcaattgatttcgtcaagcaattcagaaagaaattaaaggtagaaaaggggagtacaaatttcagggaccgaattcaatattggaggcattcttcagagggttttcaatattttcttctcttttcttaagttaatatgtgtgattttactataatgacattgagtagctaaacaattaattagg

SEQ ID NO: 161793 - DNA, 3980 bp, Cannabis sativa
ctcctttataatgcaacaggtgtaatgcgcacaactctaaagtattacggaattctttaatttgtgtttcatttctatgtccccttttattttaatcattttgacttaaaatctcattaaaatctccaatcaccaaccatggtccttcttacactattcgtaaatgttctaacatatcccatgttagtcgtctctttgatacattaggcttcccataaaaatcgtagaaatgccaagttattggattattctctatcttcataaaataaacaataatagaaaatatactcaaagagaatgggagaaactttattatgttgctcactaaaacaaacttttcaagatattcaaaaggcatggtttctctcctgaactaaggctagatttacatgaaatctctctttctgacccctttgatttcattccctttaaaccttatagttttctcaaaataaataaggaaacaactcaaatacaaaaataaagtgattgcataatattatatatactaataataatattactaaaaatttctcaaaccattattttgaccagcccttcatttatctcggttcctcctcaagttggacctcagggaactgctgcaatgagtgatcatagtttcccaagtggcttcaaacattggtaaatctctccatttaatcaaaacctccaaatcacctcctccatcaagttggcttttacgtactcccattaacttatctatttcaactaccaatttgaaattaggagtcagttgagaaggtagagttgctaatgctggagcaccccatgagctcgacgaagtggagaaatatgaaaaatataatgaatggatgaagtgacgggtagttgcaacttgtaagcgacttctttgatacgggcaagcacctcacaaggcacgtagtagtgtggggagatcttctcattcctccgagcagcaagggtcttctggcgataaggtatcagctttacaaacatcctttccccaatgtgaaattgttcatcttgttgtcttttgttttctgaacctttcatcttttgctgagctcgaatcgaatgcatcttaagctcatctatttgaaaatcctgctcctccaatatctcctcaattgttgataccagagtcatgcctttcttatactgaatcagggctagggggacccgaccatataagatcctaaaaggtgtgtgctttgtggctttatgaacgaagtattatacccatacagaacccatgccaatcactgaccccaagtacgcaattttttttgaagtgtaacaccgtaaataagtctccaaacaacgattcaccacctctaattaaccatccatgagtggatgatacacaatgctatggcggagttcaataccctagagcttgaatagatcttgccagaaatgacttatgaaaatcttatccttgttggatatgatagacctcagaacaccatggagtcgaacctcttccttcaaaaatacttcatctatcgatcgagcagtaaaatggtgctttaatgaaatgaaatgagcatgtttactgagtcaattaacaactactaaaatggtgtccataccatgagactttgggagtccctctatgaaatccatggttaaatcttcctaaactaaggttggcaaggcaatgggttgtaacaacccagctggagacacactcgtgtggactagttcttttgacaagcatcatattcttacacccactctgcaatacttttcttcattcccaaccaataaaattctgatgtgattctcttaaatgttttgtcctcgccaaaatgtctgcccataagtgagttgtggtattctcgcaaaataataggaagaatagagcaattctttcgtagcatcagtcaccctttataaaataattgcccatgttccaacaagaatcatgttgtcctatgcctcccttattacaaatcaggaataattttggaaaggcaaatatctttgtcaatttcttgtttctcaacaccacaatcaatcccttaagataccagtagattttttatttccacaggttgattgactcttgacaaagcatctgcaactcgatttccagcccccaatttgtactaaatgtcaaaattaactaagtttcccccaagctgattaacttattcttcttcctcctgtttttattgaagaaggaacaacgtgagagttataattttcacagatgagaggaaataggtttccaagtgtcctctcgtgtttggtgacaatccaatctgttctattctatgctcttgtgaagaagtagaaatagattgggactatgtcacatgcggaggggaggattttcggtaatccatgtatctgcctcacttttatgtttatatccagttattggagagtgagaagagaaatcttgagcttcaccaatagtttgaatcggctgtaattgacctttcgttggtttgcttgattttttatttctcttcatttaattaaagacatgaacattcttcgactgttgttctcaccaaccttcattgtaaatctaatgctttcaattttcaacctaacatactctttttttaggagatgttggttttcatgaggttgagggaataatttcgatgaaccttgggcgctaaagtacatgcttagccctgatcgatcctcatggccttttgcttagccctgattaattcttcaagagcacattgttgtttttgagtttcaagtgttttggcttttgagtcagatgaaaaaattagaagcttaaggtgtttgaattttttttattatggttcttcatttttgaagagatttttttttttgaaagtatttgatgaaaggatattactttttgatccaagcttattccataatcccaaggtagagtcttcatcaacaacttctctaagtacttaatctctcaatcttaaaagaatagcactacgtgctttcacctcgatctcttgagaaactttcttaacatcttcttcttgatgcacaaggagcgctttgatcttaatccaccacaatccaaagtcattcagacttatgagcttgtctattttatatttgacagtagccattcttgatgagttcatgaatccttataagttcttgaaactccaaaacttgattcttgaatctttgatctaaccgtgttgctctgataccattagtggtgaattaacacctaccaaaaataaaataaaacaagaactaaagaactagaatggcagaattaattaatgacataaatcagaaataaatgcagaattaactaaaggaaatagagacaaagtttaacaaggttcatcaccctttttgtggtgatcaattcccgagacgaatagtcctttggccaagctttatttgtcttaaacaatggaggaataaagaggagagtacagagtttaatcttaacaacaagggtgtcttgcacctcactctaatggtgtcttgcacattacaaattaactcacttgagagagatgtgatcaaacacacacatcctctttaacaaccctcctcactcattgcaaacttcattgtcatctaaattcctctccaaattgtcacctaaagaagtagaactcaaagccttacatatataggaaactaataagaggggtacccaagttagtaaactgaaataactaacttttgtgagttgactggacagacatggaacatttaacaagtcacataaatgagactaacagtagcagtataccaagttactaaaatctctcacacaaatgtttattttataacttccaataaccaagacaagagggagagaattaatgggtagtttcagcaaaaatagagtatttgaaaccttctagtgagagacatgagatataatgggaaaatggagatgaaacatggaaagaaagagagaaagaaagaagacactaaggaggcatttggttgggaggaatgaaaatataggaatatgaataggaatgggaataggaatagaatggaataaaatt

SEQ ID NO: 161794 - DNA, 2180 bp, Cannabis sativa
tttcccttgccaactttcctagatactgaatctctctttcctttgggtacagactcttcacatatacatgtcgaggggttttcatgaaactcacccctacctggtctcacctcattgggttctcccataaaacctcgctggaaagtacggactcttgaagaaaaagcttcccaagtcatgttgttcttgttcaagaacaaacggtatagttttttagcattaggacgaatagttggtttgtgcccaaaatatctccttctaccagctaatattttggccatgttaccattgttgttggtaacaaaaacatcactttcatcacaaactataaaatcaagagctgccatacgagaagaaaatgaagaaaacaactccaattcctctttcattgctatagtctctttggaatagaaatttgggaataatgcctttaatggtgctaatgtctcctcacctccatatacatctccagatgcaacatagatatgaacatcactaccatagcccaatgctctcagcatcagaccaacttcttctggagtaagtgggcatttaccatgccttctttccttatcaggattgcttatatgcaaagttttccacctctttcttattgcacccaaatccttcctttccttgtctccaccaccataataacaccccgaaaacgcaagcatatcgggttcgaatctaaggtgcaatgcaatgtaatgcttgcttcttttcctcattcgttgcaccagtttttcacccatctttcttattggatctgtaaactttaaagcatggtaattaactctacatctcaatttctgtaactctgtatctaaccggtttgcgagtctgtaatcgaatttggtgagctgaacaacatgccttttcacaagaacaggaagaacacgattgttgtaacatctttcactacatttccttggaacacgcattgtatgaggactccacgttttccctctttttcttgggagttcctttatgattttaacatcttctgctaaagttgatataaaccaattaacatcaaagatctgagaaaagttactagcatctttccaaaaagatttctgatcaagcttaggaacaacgagagtggaatttaatatacgtgcagcaacaacagcatctgtaataccagttctttgttgattcaaacctccgcttgttgcaattgccaagtacctattaggatgcgtaatagcttcagctttcaaaaattttgcgcttgaattgcagcatccatggaagtacttagaattcctcgaagtccaaagatcacgatccgatctcattccattgttcggaactcgaaaaaccggcactccaaatggagagactcctccaacaatcgcatcgtccgtagcatcgattgaggaagagtagtcgcggtgaacgcgatgagcaggattatcggtttcgacaggataaggagaaaggaaggagataatcccgagaagaacaagaagcgcgccggagacgacagagagggcttgaagcaaatacctaaagcggtggtagtaatggttacgccgccgttgaaatgccatttgtggtcggcggaacgggaggaagaggcgaggctactgagtgagctacctagggtttgttagcatagtgatggggattggatagatctgagttacaaataaatccaacaatggctgagacagagaagagaagggaaggaaggaagtagatcttgtgtccaactcactcactatctaatatctatccaataaagcattgccatatcaattcattattcacatcatgttaactctcttatgccatctctcatatggtaacttttttttttctttttatcataataaccaattttattcttgatagtcaaacaatatattgggcattataggaggagaatttcttccaatcaaaaaactttattttgtttagctgtagtatatgttttagtattataaccactcgaggctaacttaagtggccataagaagatgtgtgtattggaggtcttgaattcgagttccaagttatacgtagttgtaatatataaacgcttaaataaaaaaatatatactatagtattaccattttgcatcacatattgaagacataccctctgaaagatagataataaagacctaataaatctaagagcattgttattaggcaccagtggtgtataa

SEQ ID NO: 161795 - DNA, 1836 bp, Cannabis sativa
atcagcattgactaatctaaatgttggtttcaaccaattcaatggatctttgcctgaaagttttggatctctctctgccttggaaacacttgatatttctcataatcttttggaaggtgttgtttctgaaattcacttggccaatctcacaaacttgaaatatttatatgcttcaggaaattcattaacactaagagtaagtccttattggattccaccatttacccttaggtacatagaattatcatcttggaacttgggtccccaatttccaaattggctcaaatcacaaaatcttttatcatcgatggacctgtctcaaactagaatttcagatgcaattcccaattggttttggaaattatccaccaattttgaatacctgaatctatctcacaaccaaataagcgggggtgttcccgatatgcagtttcattctagatttttctgcatgatatacctgagttccaataaattacaaggtcctttacctcgtatatcttcttttgtaacagagctagatctttccaacaatttgttttctggtgatatttctcatgctctttgtgatcaaaaaattcatcatgttgaaaataaattagaaattcttcatctgggggacaataatggtttatcaggaaatatttctgattgttggatgtactggccatcactgaaggtgataaatttgaataatgcaaatttgattgggcaaattccaaactccatgggaactttatataaattggagtcattgcatcttggtaataatggcctttctggacacatacctgtctcccttcagaattgtacaatgttaagtgttatggatcttggtctaaataacattgtggggagtttacccaaatggatgggaactagactttccaatttgatgtttctcggttttcgttctaacaaactaagtggaaagattccacatgagctttgctatcttgatcgacttcaaattttggacattgctcataacaatttgtttggaacaataccaagatgttttggaaagcttaaaggcatgatcactaaaccaagttcgaataacatcatctcttattccttttatttgggtgtgttcattgaaaatgcatttgtggtgagaaaaggaagggaggatgaatacagtacaatcttgacattggtgactggcttagacctttcaaacaacaacctatctggagaattcccactacagcttacaaatctccaagcattacagtctctcaatctatcaacaaattctctcaaaggaagtattcctaaccaaatcgaaaatatgacgatgttggaatcttttgatctctcaatgaaccaattatcagggaatatacctcaaggtatgtcaagtttaactttcttaaatcacttgaacttgtcatacaacaacttttcaggtaaaattcccacaagcactcaactacagagcatggaagcctctagcttcataggcaaccaactttgtggacttccacttcccaaaaaatgcatagaagatgaagagacaatgcataaaggtactacaagttataatactaaagaagatgatgatgatgaagaagaaaagtattggtttcgattgggcatagctgttggattcggagttgggtttgtaggtgtcattggccctttgttggtgtgtggtttctggagacgtgcgtacttttggttcttcaatgagtacatgtggtataagattgaagattgttttttcaaagtaaggtactgttggattaaaaatcctttgtgggcacatatgtataatgtatatgctattataaagtgtgatacaaaattaagtgaccaattatgttatgggta

SEQ ID NO: 161796 - DNA, 3193 bp, Cannabis sativa
ataggaatatgttaattaattaaaaaattaaatcataaacactttggaaaaatgctattttaaattcctagttgacatcatcaatttacaacaatacgcatttgcaccattatatcaactttgtatttttaggccaatttagtaattctagcttattttttttctcatagtttgtgtttgttaacttttacatattctcatcactttattttattttgttgaaactaatttgtgagtaattagttttataaattaatttctaattttcaatccctgtggagatgatactcaatttatcactttattacttgttgacgatagcgtgcacttgcgtatacaatttttacaataagtttttggcgccgttgtcgggaattgatttagtgaaattttatttgtggaacttaattactatcaatttggtttttttttttcatttgtttaagtttagttttttgttctattttacgctttgtttgtcttgttttggtttcacttgcaaggtacttgaaatgtcgcatcgacaagtcctaatgaattttattcaacatgaattggagcccttgtatgaagcatggtggagatacaaggcatttctaatgaggtttccatatcgtgggctgtccaaagagtgtcaattataaatcttcctaaattggttgaatccaagcacacgagaatgggtagaaagaggaaatggtaccaccaatttctaccaactatcaatcaatgaagcccattggatattagaagacatggcggagtataatgagcggtgttgtaattgtccaaacaatgaccatgtttgggaggacaactacaactacattaatgatcctaccaatcttaaccacagaaccaatcacatcagttatgaatctttacaagattctaatgcctcggatcaaatacctcagtctccccaactcactccttcccccaataacactatctctactcaatcgagttccagtcacacttcttctactgattcttctcttccatatcccctgccccaagaatccacatcctccacacagtccttccctgctcaaccaaatgcccccaatatcaacaatcacaccatggttacacggtctaaggcaggaatattcaaaccaaaatcctacctaactcacatccataatcctttagaacaaacaagtgtaaaacaagcccttgttgatagaaaatggaaccaagccatgaatcaagaattacaagctcttaaaaagaagaaaacttggatcttggttcctcccactaatgacatgaaaattatcactaataaatggttgtttagaataaaatataatgtagatgggtcggttaacaagctcaaagctcgtcttgttgcaaggggatttcaagaaacagttggtctggattttcttgaaactttcagccctgtaataaagccatgcactatcaggattatattctcccttgctgcaacgaatggatgggatattcaacagttagatgtgaacaatgcgttcctaaatggagaattaaaagaagaagtgttcatgcaccaacctcaaggcttcatagaccctgaatttccccatcatgtatgcaagctcaacaaagtaatttacggattaaaacaagccccccgtgcctggtttgatactctaaaattcaccctagttcaatggggatttaccaactctacagctaatacaagcctatttttctctgaaaaactcaacaagctgctcattttacttgtttatgtggatgacatcctcacaacaggagaatgtccagaccaaattcaaagcatcatcactgctcttcacagcaagtttgctttaaaaatgcttgtaactgtgcactacttccttggttttgaagttctccgtgacactaaagcaatatatttgactaaaactaagtacattcatgatttattagccaaaacaaatatggtggatgctaaaccacaatcaactcctatgtgtgccactgccaaattaactcagtcctcgggatcccctcttgcagatccaaaacagtatcgaagtgttattggggcctctcaatacttactcatgactcgaccggacatagcttttgctgtcaataagctaagccaatacttgcaagctccttccactgatcattagggtgcttgtaaaagaattcttcgctacttagctggtacttccacagttggtttgactttcacagcatcatcaaacttggatctgcagggctatacggatgttaattgggcaggttgtagtgatgatcaaaaatcaacttcgggctattgtatgttcctgggcaataatctaatcagttggtgttccgagaaacaaagtgttgttgctcgatccagcactgaatttaactatcgtgcccttgctttggccacatccgaattgatctggctacaatctatcctcactgaactatttatacctctgtcatcaattcctatattgtagtgaaacaacttgggagcaggatcattggcttcaaacccagtttatcatgctcaaacgaagcatatagaaattgatgtccactttgttcgaaacagagttctggaaaacaagatggaagttcgctatgttgactctccatatcaaattgttgatatcttaactaaaccgctgcatagctctcagtttgtgtatctaagagacaagttaacactcaagtcaaatgagtgtaacttgaggggggatgttagagacaattcagattaactctctctctccttaagttagttagtctgttatttctctttctgttattacagttggtatgccaactgtctttctttgttttcttattttttcagttgtaacaaactcttggcctatatattgtgtttggccttattttcaatgcagagcttctttcacttttccactcattcatttctttcatttctctttctttacattcaaacaatgaagacgaaggacacataaaatgagcattgatattgagtattagtagtgtctaatattttttaaatgtaacgccttacaattagttagtgacatactttataagttattattacattaaattaaatgagactcaatacttaattacactatcacacctgagaaaagggtagacaccaagatgttgtttggctttacagtttaaaaactgttttctgttttttaaaactgaaaacagtttttaaaaactaataagggttgtttgg

SEQ ID NO: 161797 - DNA, 6747 bp, Cannabis sativa
aaaaaaaaaaaagaaagaaaacaaccaaccttagaacatatcgcatacacaaaaagaaaggttcatttattaacaaattactatgtccaacaaagaaaaaagatttacctgcccatgatgtgttatttctagacatccaggttgttgtataaatggttcaccatctatttgaactgggaacggactggaagcatgaattcttatgactttcccttgggctagccttctagcgtgtgaaagaccaacctgtaaaataatagaagcataagctaacaaattttatagcatatttatcttgtagagagcacatagtgcaaaaaataatttcatcattcaaattataatttctaatagaagacatgtacatccaagcaattgatttagcttcttttcaacttttcatccaaactagttagcataaaagaaaacttttcttataaactaaaggcttgaggaaatcagaagcacatgacttctttttaacaatttaaatctgaaaagcaaacaacaatacagctacgttctaatcataagcaggcaaaaataataaataataataaaggttaccgagttagttagtaaaactatagttttattaatcttggaggataagggtttgtggttaaaaaaacatgtacggcgaactagtaacaaaacaagataagaattttacaagaaacattttcatttacacaaatcagaaaacagtacacctctagggccttactgtcattcgtatgcatgattggatagaatttgcattcaattaaggataaagggttattttgagttgagtttagtttaaaacattacattattcaaatactaatattttagtttacatttgcatgaatttcaattaaaatatatatgggtagagttaatttgcaattagagttacattggtagtaagtgggatccattactttgtaataattaaacaatcagttttagttgggataaattataccacacaaatagaataattacttcagtttaaataattcactttagtcccaagttagtaataaacataaaacaaggatagataatcttaatcccattcctagttccttaaatttaagttaacctacgactatttacaataattttacgtcagttaaaggtcacataaatataaatatttctacattggtgtaaatataaaatgctgaatacaaatattgctacataaaatataattacccataatttttagataagacccaatgaaaaaaattacaagccaagcaattacataagagagatgcatgtaaattgagaaagtaaacatgctaatataaatatatatatatatatatatgtatgtatgtacataattcatatacctgaagtttgccgaggtgccatgcaccacaaacacatacaacctcaagcactttatcatgcatggactgaagactaaaatcatcatcgtgctcaaagtcattctgccaaagatctacgccgcccatgtagctgccaatattgagcacaattaaaccctctgaatcctaggtgagagaaatagaaaagaaacatcagcattttacaagcaactatcaactgaaaaaagtattttaagcttaatgtgaacctttggaatatcaatgtctttcccatcaacttcaagccaaacttgccatggtaagtcagcacaagttctgtccattatatcccttgcaccttctttcgcatatcttaatttatttacaaactgttgaaaaaaagaaaatataagccaacatgactataaatctagattcgttatcactatcagtatcagatattctcctcattacaaattcaatatccttctaatgaattgcttggtaatggtattgacacaaattcaacaagcttatttatcagctgttctgccacctactttgtaaagtccagggaagatccaaagtcataactcattgtaagaaaaacatatccagtatgtagatctaccaattgacagcaattctatgatttatttattttcataaaacaaaccaattatatgttatattttttttgttgagaattctcaagaccaactgaagtgaagtaaatcagaactggatagtgcagaatgaacaatgataacaagagatgagaaaaaaaattaactggaaaacaaaaccaataatcatgtgacaaaggcaaacatggtatggaaaatatagctacctggctacaaaacttctcaggatttatttcccgagtcatatgaaattcatatgcaacctttgcatcacaaccaataccttgaaaaaaaaaaaccaataggtcaagcaggttgcagaaacaatcaacaaagaaaaaacattcaaacaaatacctaaatagttcatcatgaacttggactgcactttatttggttcaccatctgtactttcttccctaatatttactttccagcgatctagcattgtaacagctgcattgcagatgtcgtgcaaaagcatggataagccaccatgtgcatcaatcatagaaaatccccctccccaatgcagaactctagacaaatcatttcctgttccaagtggaagaatagaaacaggtggaggtgactcaaaattgtgcttttcaattgcatcaaggacccatgcaacagtgccatctccaccgcagactagaactctaaaatactgtacattcctaaacaactccaaaccaatctcaggtccatgagaagaactcagttcaaaaacctgaaatagataaaacaagtatattaataaaaaaaaactttaccaatagtgtatacaaagtaatacttctaaaaactttttaattaagttgtacgtcacttactaagaaaatattgaattacaataattatgcatagcacagagatttgcatttgagtgaacagccctacaacaaataaatattcaatcttgctgcaatcttatcttatcagactacttctagaaaaagaatatcctatttgcttctttatttgttaaatgtacaacctaacaactatgatacatcaaacaatacatacatgatctactatttgctcatttccaacaatattgcagtattataatttataaagcatcaaaataataagaaaatatcataattacctgcacaggattcaacaatacattcagtctcctccttagagaagacccatgttgaccaccactcctggaattaataaaaaccaaaagaggtctagcatcctgaggtaaatcaaccagtgtatacttctttatctggctagtaaatccataattctttttcatcgttaatccgttacgaatacccttggtattgtgtatcttcccatccttctttgtgctgttaatatttttctcactacgtgacttctttagaccaccaatcccattgatcaaatattccagagctgtaccattagtaaaggcatcctgtagcttaacattattaactgagtgaccgcctacatgtttagcacggtgttgccttcttctaaactgaccatatagagaagaggctagagaatcctcactggcagagcttggcaaaccacttttactgtagctatcaatttctttcacacagagaggggaaagaattatccttctaagaggccccaaatcacagacgttaccggattcttttgacattttagtgtaacatttcacatgtatgagacgttgacaccataaacaatgccaggttggagaagcatcaagaaaaggtacaccacatggttcatcacagtgaaaacagaaagcagacatttcaggattatcatccacattaacccatctttccgaccattgatgttgaacatgactaaaaccagcttgtgccacacacttacagtccttcactgccgacggagaacaatagaaatgggcagccacaccacaaacagagcaacgatggacaggagtgattgatagggcttttgtacctaggttttgtggggacacaagggaagacaagcaaacacagcatgtggatggctgctcatcgtatgtataatcttcaatccatacatgatgtgaaaaaggaactttaagcttcttccaaacttgcttcttagctcttgcagcagctttaacccaattaagagacgctcttctctgccatttaagaaatgcaaagacgatgactaaaagcccaaatgatccagtgaccagccatccaagaaaatatggaccataaacctcggatctcatcagaaaccatatgactgacatcccatctgtcatttcctttagaatgttttagttttaaggctcatgtgccttcaagaagataagcttgatgaaatcagacaccataacctgattattatgagctaaatgtgaacacgatatgaagaataaataggatagatgagtttatatagtaagacttagcatgctaaactagcagactgggattaatcctggctatagtaaagtctaaattattacaaagtgagagtaaaaaccagcagcgaccaaaatagatagaaagaagaacagaaaagaatatacaagcagggaaaatgttactctgtttcttctattaagaaaaccaatacgtcatttgaaaggggaaacaaaaaggggaaattcgtgtatttcaaataacgatcataaactcaagaaaatgctgtactttcttgtttaagaaaaaaaaacaaagtttaattagcataacaatgtttaagaaaaacaattaagaattataaacaataggaaaaacttcgggaccctaacatgaaaaacagtgaaccaaaacaaaaaagaagacaggaaagtaaagcacaatttgaactctgaagctcaagtaagctttcaaataaattaacgaagaagaaaaacacaggcaacgggcaaaaacaattcccaaataaacagcctcatctccattaaagccctaacatatactcttttcaattagggtaacgtattaaaaaagaaacagtcgtgaaaaacaaccaaagataaaaaaaaaaataaaaaaaatgaaatatgaaatattccaattttacattaacgtagaagttgcatgcacgatcggttcatcaatcggtgaatcgatccaagagtgaatcgtaaaatcgaaaaccatgagaagaattcaagggaaaaaaagaaaataaccttaggtctggatctgaagcttttgatcggaagcttcgagaatggcggtggagcaagtgagaaagtgccgaaacgattgaaagaatggaaataaaaatcggaaaagaattcgaattagaaaagggaatatatatgtgtgtgtacgtataggtgtataggaagaaattgaaaaaggaaaaggagagcggaaagaagaaaagaaaaagaaaagaaaagggcgggatttgcttgtgcatcaaacacggtgaataataccgagggagatgtacgagtacgtgttgagaacgtgtgatgaagttacgaaaatacccttaagatatcgttagattagagagagattctaatctagtttggacattatcgatccgcccatagtggagattctccccattctcattttcttgtggagattccattaacgacattctcatcccagtaaaactaaaaactaaaaattcttacttttaacactattctaattaatttctaccaatattttactgttggctgcttccagattaatgtaatccattttgacaccaaaccggaattagttattttattattattattatttttgaaagaacaatttcatagaactagagaaaggaagagggaatcaaaagggaaaatccctccccaatcacaatcacggaaggctaagtcaccattacaaccaactctggtcttataggctaggctaagtcatcaaccaaagagataaactctctttttacaaacctgaaattacaaccaacaaaaaaaacaaaagacttaaattaataatatccgtaaacagaccaagtagctaccaattagggggacattttctgttaagagcactgattgcaatctggcaatcagaaaaaaatgtcaatatcattaagggcagaaaatctcatcccttttccgatttcagccactacttctggcagctgtaactccaaaggccccatccttatcagagccatccaccatacagtatttccccaacacaaaggagctagaaacttcaagtcgatgaaggcccggaggatcaagagtaacctcgaagaacttgtggaaccactcccaaaccgcttcaaacacctgatttgcctctttctcaactttcccaaacaaacaacctcttgtttctgtatttccaaatttcatccaaaaccagagcagagctaattaagcaagtcctagacttttcacaagggtatccaaaatatttcgaaacacatcttgaagagagtgttggggattattttatcaaatctagatttattatgttgtttagcatcctaaatatgaatttctaaaataatggaatttaagcacatataaagttcaagaaaccttacattggttgcagcagaaaccttatattggttgcagcagaattaaatgattccttccgctcagatctctaactcttgtatcctttctgtagcagagtatcatcaagatctgagtccggttctccttaagttgaatggatttttcacagtcttacacactatgattgagtatcaacttgctatgcgtgggcatgtactcaatcactaaagctcgaattttgatcgtgaagaacactaagaatccatcactagttagatttttggctcttgtggctgcccctataaggatccatcactagttagatttt

SEQ ID NO: 161798 - DNA, 1794 bp, Cannabis sativa
  modified_base (1469)..(1478): a, c, t, g, unknown or other
acaacatggtcagatgttaaggttcacatttgaagctggaacattctttcttgatatacatacaatttatgtattttcccttatatggtttagtttttggaaaagacatcttacgctggaattactttccatgctaaaattgcaggtccttaattcttttgttagcctgaaaaatctgaatttgcaagggaattctattgctgacaatgagaaatcagtgaaaaaggtctagtcattattttatttttactatttcatctctttttcaacgtactatgcctgccttgtcaacttgattcttacaaaaacaactctattgcagatcaaaaaactttcccaaacttgcatgtgttcaatgcgaaaccaacgaacaaatgcaccaagaatgaattggatttttctgttgctgctgacaaagatccggaaactcaaacagaagaaatgagagatcatgtcaaccgcaagaactctaaagattcggtcttggatcaagatagtccaagtgattttgttagaaagtgaaggggaaaaaagatggaacaagagacgataatgcagccgaagttccttctcacaattatgagaagagacatcacgtcaaggctaagaaatcgaaacaccaaaatcctgagctggaaagaaagtcgaaacaggaaagtgaagaacagatcgacaagctgcaaaatagagaaagatgatgccaaggtgaagaaactaccaaaaaaatcaaagacaaaagggagtgacctggatgttattgatgacagtgaggcttcattcttggagcttcatatttttacccttttatggtatatattgcaattaatttttttattcattttttttatcaaatcaataagtagatctaaatcattatttaccaatattataatgctttaaattacttaaaattcaatgagtttccagagagtgaggatctgatttagattcattgtggtgctccatatgtgtcgtgagctctatatcgttaccggattgttttcttttagtatagacttgaatttgtttttctttattctcaggtatttgtcatgtgttttatttcattacccgatcatttccttttcttatagagttgaatttctttgttctgtgtatttacaaaattgtactagtggtttggtcataaatttcgatttaggaattgattttgatgaatgggatattattgacaaattaattaaaaactctaagggagagtttggtacgaggtattcaagataatttaattataggaaatataataaagaagaacatgattgtatgaaaatgtgtaaattgtatttggttgtgtaggataatatgtaatcatattatggtaaattgaattgtttggttgttttaaaataaaaaatatttttttatatgtatttaatgctaattatacataaaaatcaaatatttattgttaaagaaatatatctattaattagtaaatattaaatttnnnnnnnnnntttattaattaaaatgaacatttgcatatattttattagtatgtcattttttgtatttgctatgttatttatgtacaccatctacataaaatttatgtgtaaaatatatatattattgcaataacataaaaataattcaatttttttttttttaaaacaatctcacaaactaaagatatatctttttttttttaaaaaaaaaaaactgaagatatattataacatttttttataataaataatagggtaattagcaattttctcactgaactttgacatataccaaatcatattctctgaatttttttggccgtta

SEQ ID NO: 161799 - DNA, 4351 bp, Cannabis sativa
ccagcaccagcaccagtccccgcacccgcacccgcacaagcacctgctcccacactcgcacactcacccgatgaaatagagatgaatcagtattataaattcttaagtccgataagagatcaaaaacaaaaacgtaagtattaatacaattcaatttatatacatatatatgctttgtatttcaacactaattttctttcttttttctttaatttcagcttattgtgctgcatttgctgtagttgcatgcattgaggctttgatagcacaaagatatggtatcaggaaaaagttatcaatacaatatttggttgattactgctacgatagaaaaaggaaattaggacttaaaactgatattttacttaattttatcataaaatatgggatatatactgaatctgattatccatatgatggagaaattaattatccacgtccgaaaaaggtaaatttatttatttgtttaaagcagtacttaattttttattattattattataataaattttaataatatgctaatatagtaatacatgctttatatatataggataaaatgattaagagaatatttcccatcaatgggtatacaatggtagtgaaagaaaaagacatcaagcattggctgaaaatagctccaatgttaatatcagttgaaacaaatggtgatattaatcatagttgggtaagaaacaaatttattcatttatttatttttatttgagtttttttatgattaaaccctcttaatctttattctacttgcatataacttttcgagctcaaattttttagtggtaaaatcttccaaattactcaactcttagtaaatttaagatgttatctatttctcaccgtttactgccaacaagaattgtttgtgtgtatactcttgtacatgtcgcacgtttacattggtactcttaaaattattatttaaaatttataatatttttaatttttataatgttatttaatttaaaaataaattttgaaataataatattaggtgtactaatataaacgtgtcatgtatacaaaagtgtacattaagtaatatatatttacagttaagcgaacgacaccttaaatttattttggaagtttttactatcaaaagttaaagattgaaaaattaagtacaagtaaaataatatttagaagggtttgattgtcaaaaattcttttcattatatattataaataaaattaaattaaattcaaataatttatattgaatcaacatgtttatttaggatatttattgtcgaaataagtcacaaggaaatgataaacgtagtggtcatctcatggtacttattggatgtggagaacaagagcgtccttattggctttgccaaaactcacatggagagaattatggtaaaaaaggctttggaaggttcttaatgaatagtacagataattacgttcaagtatattccctacatctttcaaaaggtaatttaaaattaatcaatttattgatttgttggcgtttaaaatttaattagtcattttgtatgtgtatgtgtgtctattttgaaatttaattaaatttgtgagctagataaaatatttctactaaaagtctcatgcattcttttatgtttatttgtttctttaaattgtattattatttgtgaaatttcaacactctttttttgtttttctttgccagattattacacagaagtgttatctaagagcctaactcataataagatagagatcaatcattgcaaatacttaagtccgataagagaccataatacttttaactgtacggtaaaacattaattacatatacatataatttgagtgttacaattattattattattattttgttaatattattttaggtcttatattttttgtaaaaattattgattagatcttttattttgttgaatgacgaaacagacccagtcttatctaaaatagtataaataggatcctaaactcaaattttgataattttttaaaatataatcaacttgaagacaattcctaatacgaatagatgcactaaatgtaattagttttgtcataactctagattaagttattattaaattttattttgattaaaaattagttaagaatactattttggaaaataaaggtccaatatgtcatttatcaaaatagatggtccaatcaatatcttttataaacacagtatttatttatttttttcttctaaaaacttttaattttttcttgtttgtaatttcagcttattttagtgtattcgctgtagttgcatgcattgaagcactgagagcacaattctatggtattgaagaaaaattatcagtacaatacttaattgatcacttatataatcaaagcaacaatattggagctcgttgtgaaactttccttgaattcatcataagaaatggaatatataccgaatctgattacccttatgaaggaataattaattgtcctcctcccaaaaaggtattttattttatttataatgtataaactatataattataataattattaagctgcttttataatgcactcttttaaaaatgatgtattgatgtactatctatctaaatttttgtggccattattttttcatattcatgtgcggtagttatttaaaatatactacataattttgagaaattcagaatatcttacaatatagaaaagtcacgcgtacaatataatatttgaactctgcttttggtatgttaaattttttcgaatttcttaaaagtttgcatgatgtcttaaataattaatgtatatgaccataaaaaaaaatttagctaaacaattatttcggacactaaaatagataaaaatacattgatacattttttttttttaaaagagtacattataaaatattcttaaatattataatattactaacatattatttgtatatatatatatttataggaaagaatgattgaaaaaatatttcctatcagtggctatactgtggttgtgagagaagaagatatcaagcattggctgaatattgctccaatgttgatagcaactgatttagataatgattttaattctttggtaagaaaaaagagaatatttatttatttgattattgttaatcaatttttgcaattttcttatataacttttataatgaatctaacatatttattgtttttaatgttttttaggataattacagtccgaaatttcataccatggtactcatcggatgtgaaaaacatgaatggctttgccaaaacttcaatggacagaattatgacgaaaaaggatttgaaagattattaattggtcatgaaaagaatctcattaaagcatattctttacatcttccaaaaggttaatttaaaatttaatcatattttaaaataacttattttttatttaaaatttttaaaatgcatacaattaacttattgattttgtgtgcttctattaaatttagttattttgtatgtttgctaatctaaaattaaatcaatgacttaatagcaacttattaatttttggcgtgttaatttaatatttaaaattattgagctagaataaatctctatctgttaatatttatttgtttctttaacttgtattattattttttttcttcaacatgtattattatatagagtgcttttacaatgcacttctttaaaagaggtccaccgataatctctctatctgtttcgacatttgagaaaaatatttagtttaatttttgtatggtcgtctatgttgaaattattgaagacattctttaaaattttgagaaatttaaaaaaatttaacacgttgaaaactgggtagcacacgagactcttttattttatacgcgtgtgaaatagaatgtttgaactctattttcggcgtgataatttttttttttgaatttcttaaaattttacaaaatctcataaataactataacgtaaacgactataaaaaaaaaattagactcaaaatttataaaagtgcatcggtaaaggtgcactctaacatttttctattatatattttgaaatttcaaatactaagagcttgtttggctgtgtttcaatttttagtttttaaaattgtatttttaaaagtgagaatagaaaacaggtttttgtcattttaaaaatttaatggtgtttgacacaaatttttaaaaactgtttttagattttttttttacgaaaaaaatcaatattttagcaccataccatgacattaacccatccggatttaggttcgggtatagtttcagggctaaaatctgagtatgtgagcaaaatataaaatataatatgttagacaaaaaaagtatttttgaaaattgaaaatagcattttgatgtttt

SEQ ID NO: 161800 - DNA, 2202 bp, Cannabis sativa
gtaaggccagctgagcgccttgctcgattgggattcaaggtgtcattgtatcttgaaatgcagttgattgcatcaaaatcagatatctttgaagataaaggacttcagagtgtttttacatcaaatggtaatctcttgaaggcaggtgatatttgccgtaataagaaactagctcaaacactaagaaagattgcagattttggcatagaggccttttataatggatcaataggattaaatctagttagagatattcaaaaggctggagggatagtgaaaatgaaagacttgcaaagttatcaagttaaggtgaaaaggccaatttctgttgatgttatggggaccaaattacttgccatgcctcctccttctgggggtcctccaatgatactagtaaagatcttctctctcttctctgtttatgttatgttatgttatgttattgtttcatttcatttaattttctcttgtttacagatagaaatttttcttgtaataaattacaacagtgtctttgcccttaacagatgctgaacattctttcccaatatggatttccttctggaatctctggctctcttggggtccatagagaaattgaagctctaaaacatacatttgctgtgagaatgaacatgggtgatccagactttgttaatgtgtctagtgttatatctgatatgctttctcctaagtttgctgcaaaactaaggaaagacataaatgacaacagaacttttaatcctaaccattatggtggcaagtaagttggtttcatttgctaatcttatgctgaattgtaagctttagttgggatttgtaaggttactttttcattggattgggaatgttttgttgtccaacaggtggaatcagatccatgatcatggtaccagtcatctatctatcattgattatcaaagaaatgcaatctcaatgactaccacagtgaatgcatattttggctcaaaaatactatcaccaagtacaggaataatcttaaacaatgaaatggatgatttctccatcccaacaaatgtcactaaaggtgtccgaccacccgctccggctaattttatcaggccaggaaaaagacccttgtcatccatgtcacctactataattgtaaaggtatgtctctaaaaatttgggacagatcccattaagaatgcttcattattagttagcagaatgatgaatagcttttggttatttagtagttcattgagaaaattttacatgaaagaaaaatatgtggtgacttaacacttatcaagaatcataaacaaacaagaaatgtagtagtagaaaccaaataaaggcaatgatcaagaatgaattgaaacagaattacaaaacattaactaaagaaatgatcaagaaattgcacctttcaaaatcagcacacttgagagagttgtgatcaaacacacaaagcaagattatacactttttatttgttttgacaggataataaacttaaagcagcattaggtgccagtggtggagcctttatatttgcagcagttggtgaggttcttttgaatcattttgtcaagagaatgaaccctctgtcctctgtcatggctccaaggatctatcatcaggttttcattaaaacttgtattgattagttgttatgtatactaatccattggactttcaaccccattaccatgcattgatgaaatacgattatttatgtttgagcagctgatacccaatgttgttagctatgagaattggacaactgtgattggagaccactttgaagttcctgcaaatataagagaagcccttaagaagaagggtcatgtcttacaaggccttggtggtgggactatctgccagctcatagctcaagatcttggaaagcttgtggcagtgagtgatcccagaaagggtgggattcctgctgctttttgagattgtagacagtggcataatatggtattgaaaccgattgtttgggtcaagtttcatagtatgctaaaatcaataatcttttcctcaatttcattacttcactagttataatgtaatcatagtaactttattataacttgataactaaagataataaattatatagaaattttcaaatactaataccatctattctatttatctatatttatatttatatatatactagatcagagttacgtggcgagccacgtaaatattagttttatataagtt

SEQ ID NO: 161801 - DNA, 5293 bp, Cannabis sativa
gtgaaggttcttacagattggtttcattagacaatgcacttgtgcacttattcattttgtgcacattaacttatataacaatgggttagaagttttagttagttagcaaggaccaacaatatagtagccaatgaaatgggtaagagcgaatccgtgtagtttttgtacagaatgctactatctgagaacaacaaccgtgattagtccagtctgcataaatctataatctgtctctcaatgttttcatcaattaaaattttatctaaatgtctaatggaaaagtttccataaattctattttttttttcactctacaacagagacagaacctcagccagtaagaatggtgagtgaatctcttatttctgattcacaactcgcaagtgtcaagcaagcctccaaaagctgggttattagagtcttccaccatattaaaaatggaagaaacttaaggaagtctagtgaaaccagtattattgagaaaaccgacgacctatcgacgtccatgtccccaatgtcgattatggttaccaggtttaacgagtggatttctgtgcacaattccctgcttagggagatcatgcaattccataacctgtatcgtccgttgcctcttggctgtcaaacagggagaattatgatccatgagatgaattcatttgtactggaagaagtttctattcaaaacatatgttacttattttgagaattagtacataaaagagacgtaccattctcagcttgttgataccgctcctggagtttccttttagtggcttcaagtttcacatcttcatcagaagacttgaatttctagtagataaagaaaaaaaatcaaaagaaagttgaaatgtatactttaatgcatgctcctcttaattgaacttacatcttgtggagcaataaccggtggcctcttctgaagagtaggcttatcagttcttttctggaacttcaagtcgttgctgtccttgtgctcattacaaatgtttggaggtctcccaggtccagattcagtgtttaaaggtctagttggtttggtgaccatttcttgtttcttcatttgttggtttttattttccacacgaagcacatttagctctgaaggaaatttctgctttcgctttggaacatttttattctccatggatgactttcttccgttctcacggtccttgttgaattccccactggtcctaggatctgaaacaacattccccaaatttagttataaatctaggtagtggggaattcaaataccgaacaacaaaatctatcaaatacaggcagaaaattgcaacgttaactcacttccatcatcatccatgccgtcgaagaacttcatttgttgcaataagtagacccaagaattaaagttagtttacaatataaacagaaagaaaacatgtcaattgaaaaggcaaattaaagagcaccattacccctgatagttccattgcagatggttgagcagcaaagaaaaatcctacatccaaaggaggagatgggagcccttcttcttcttcatcatcaacaacggatggatttacagaatctggggtaccttctgtgcctgaaaacgcattaataaaatcatgatgattaactagactcaattgagattaaatcagaattggatgcattgttgatagacaaaaagaatacatacagttctggtttgtaatagctgcagcagcactaacccattcatcaaccatgcctttccatacactgcaatcattaaagttgggctaagctaatcttcattgcaatcttacaagcatgttaacatagtagaagcaagcaaaaacgtagacaatgaaaattaaaacttaatctccagctgtagacaatgaaaataacactgaaagcagttcaggaagccaaaggttattgatgcatactcaataagagttcgtgcaagaaggcaaatatcctttgatgtgtgctttcgaagaccattaaccgcctttccaatctcagttgcctggcaaacaagaactctatcaagccaaaacaactttagagagcaaaccaactaaaaagccactcagtgaccatcccagatttagatattaagtatctaagacaaactgtaagaagattgagtcagaccttcaaagtatccacagttagacacattaattgaagcttcctcaaagaatcgtacagcactgattcagactgcacaacaagaatcagatcatcaaaagtgatgaatcagattacaaataatcagcaacattctcataggacctaattaaaccaatataatctcccaacacagcagaagaatccttaaaattagactaaacaaatgaagccccattttaggaacactacaaaattcagtaatggaaagatcaatggacaaaacccttttaagatatcacatcacacaaacaacaggacaagaatagatagatatgaaactttgataaacataaaacttggacaatttatagaggatgtgtaagcaaatatatacctcttctttacaattctgaagaatctctttgatcctaaatacttcctcaacaatttgggactcttcttcaatctcatcagtcaatgcctcagcatctccatagctgaaattgctaacttggttcctattcatctcagcttgatcatctctagtgctattcaccttgctctctttactagctccagcctcaaattcacctccatttctatcaaaatcactcttaaaacctccatcatcggagtcatcaccttcatcaccaccaggcacagctaactctacgtggtcacagccagaacaccttgttaatctacaactgaacaacctctcagcaattcgatctctcctcaatctaaactctttcgggcaatccgaagcggccaccatgatcgcatggtcaattatatcaaaaatatcagaattcgcagtcctgaagtaattcctccaatattctagagaccctgactttctggccatggttggccgctccacaaatgaaatccgggaaccagaatcgacaaaatctgcttctaatcaacacccagacatcaaaaattggtttccatcggattttaatgaaacacagatgagaaagagatttctcatataattttgatcaatacccagaattcaaagaccggactttgtaagttttgaagccaaaaatataggaccaagaatcgattcccacgtaactttgataaagacacagaataggaaaaaaaaaaaaatagattttggtacaaacttgaaattcggcacagaatatcaataatcaaaacctgatatggttgatttctttttctttactttttttttaaaaaaaattatattggaagaagaacacgaagaacacgcctgtgatggtaacgaaatggaatacacgtaacaggatttaggataagtagaaaagcacaaaaacgttgaaaccaataatggattttgaagatgatgatcggttcagcccaaaatttcctgagaaaggaaaagaaaaaactggaaaaccaaaaccaaaaaaaattgtggggatttcttacttcctttgtttctctttctctctcctctgcccgggtctctacaaataccaggtgctacgaaaagccacaaagaatttagtttcacaaaacaaaaaccagtgcttagaataaagagtaagttttaaaataaataaaatattattttaaaaaaatgtacattttacgaaaatgaaaataaaattattggattttttttttaattattaataaaaataataataactattgttttctttccttccttttatctacttttttttgtagctgtatttgactttgatttggaaacattggctagagagatagagatgtggaaagtgccttttctggtattttaatttaattattaaatatatttttttataatgatgaagataattaccttattgccacgctagagtttcggaccaagtcagttcattttctctcatagtcgagttgtaaaaactcggatgttttttcaatttctcgtcagaagaagtccaaattatctcatttgattttataaacttgtctcgtgcgaccctaatggatcatgtttgtgattgttgatacgtaaggctaaggccacataagtaattgtgtatttgtttatgcaatataaataatactccaatttatgttaagcattttttgtagattaaaaacagaatctctattcatatttcatttcaataatttgattcaccctataccttataaatttataattattttataaatcattggtcagattggaattgtgtttttgtaaaagagaatggaaatttgtttccctaaaaaaaacattattatggaattatgatttttttttgggcaatgaacattatggaagtattatgtttttattttcaaatactttttttttttttaattttgtgtagaatggagataatattacattggtggtaatttatattgctccaacatgctcaattgagactctatattttgatcaattatggttttaaaacaaaaggttaaaattaaggctcaaaaaccagatttaattagtagaaatatttttatatatgattaaaatatttgtatttcttataaaacaaaaataacatttgcagattataaaattaaaaaaatatatatcttttcaattattagaaatatatataagttttgaaaatgtgagttctaaatgtgtaatagacaaatatagggtttataacaaaagataaataaaaagaagacaaatatagggctaaataaatatcacccgtattacaatcgtattgtagtcatattaaatatattttgaatttaaagttctaattttagtagcttagaaaataccggatccaatttttcaaaatatacgacccaaatcaataattggttaaagcatggaataaaaaaaagtgtaaaaccctttgataaaaaatataagataagatgcataatgataatcaagtaacaaaatgtatgtgattaatgctaagattttgtttctttattcaaattatttttagttgaacttcaatctcaatttcgacttttaattttatatttgttaaaactctatacgtatagtgtctttatataggaataatataaataactgtaaattgttattttttgagatgaagaataattcttcaaattctgtaaaacgttctacaaacaagataatttatgtattagtaataactgtttattttaaagttgattgtgcttatgatagaaggaatgctccgttagtttatttttattattggatgatattttggtttaatgaagttgctacttgctactttat

SEQ ID NO: 161802 - DNA, 4288 bp, Cannabis sativa
  modified_base (3387)..(3400): a, c, t, g, unknown or other
  modified_base (4147)..(4156): a, c, t, g, unknown or other
atatgtagatatggagatatatttaagacacacatattgggatgcccatgtgtgatgatatctaggcccgaagcagcgagaactattctggtgagccgtgcacatctgtttaggccaacttatccgacgagtaaaatgaaaattatagggccagcggccgtgtttttccacacaggggcctaccattccagggtaaagaaactggttcaagcttcccttttgccctctgccataaaacggtcagtctcagaaattgaaaatattgctctgaaacttcttgccacatggaaggatacctctctcaacaccttgcaagaaatgaagaaggtgtatattcattcccttatcatatacgtgtgtatattaataatatatgtgtcactttaaagaatatatcactttgtcatatatttttgtatttcctttacccttttttggaattaatgcatgatgactgtacaataagttattggaatcgaattaggattctataagttaaaattattaattaaataatttgtggcagtacgcttttgatgtggcactcatttctgtgtttggcgacaatagtaaagaggacctagaattggaattggaaggtattaaacatctttatcattgccttgagaagggttataattccatgcctctagatctacccggaactctcttccacaaagccatcaaggatatttttatttatatatatacaattatagtgcttcctttctcaataaataaaagactaaatactattcgatgatgtgaaattaaataggcaaggaagatactaaacgagacacttatgaaattgatagagaagagaagagaaagtggagaacaaagtggtgggttgttgggagttttgttaggtgcaaatgagaataatattaagcttaagcaagaggttataattagtgataaacaaattgtggataatataattggagttatctttgcggctcatgataccacagctagtgtcctcacttggatcctcaagtacttgcacgataatgcagaactcttagaagctgtcacggtacataaaatatttttggatttttttttaacaattaaaaattgaattttcccaatcattagttgcaattatataattcaaagagtaattatatatatacaaaataaataaaaaaatgaaagttggggtatcttttccgtttcagagggaacaagaagagattcgaggcatgttgctggagggcaatcgagggcttacgtgggaggatactaggcgcatgtcgttgactagtcgggtattataaggatcaattttaaaaaataattattattaattatttatttttaaataataaaaaaagaaatagataaagataaatattgttgatcaggtgattcaagagactctaagaagagcaagtattctatcttttacattcagagaagcagtggaggacgtggaatttgagggctacttaatccctaaaggctggaaagttcttccactctttagaaccattcatcactcttctgatatcttccctcaacctgacaagttcgacccttcaagatttgaggtattaatttaattataataataaattaaattaataagttaattgaataaattgttaaaaactaacaaagtatatttaattgttattagacatcattatgtctaacatcatttagagattatacatttaattgattagcaatatttcaaaaaaaaacattaaaatatgaaattggatatttaattaattgcctaatattaacgaaatattagactgccttttaccatttttctatttatatcattttggtggtgtcattttcaaagcccttgtgtgaatcttcctcaatagaaatgagcctgatcatggaaatctttcgagtgtcaggatcacgtgagctggttttgtagggtagtagaacagaacgaagtaaaaaagtttgaaaacaaattatcattattataataataattaatgtcaatagttattatttgcatgtcatctttaattaaatattaataatgtgtaacagcttagttatataggttaatcaaagaattactatcattagtaaaaagaaaggtgcttgatagtgtaaccaactatatacgtttgcttggccagtagtgatttaattaaattgtaataatttttgtttatatggactcttattaatttgtttatttttttggaattttgttattaataataattttcaggttccaccaaagccaaacacgtacatgccgtttggtaacggcgtgcattcttgtccaggcagtgagttggcgaagcttgagattctcatcctcctccatcatatcacaaccacttacaggtttaattctcctccataatattcctattatattataaagtagtttcattttcacgtatgttaattaattgttatgtcatatacataattttgactatattgaccaccatgttcggtcacttaccaattacagtggtatttggattttctatgatgaaagcttataggtatctgcatgcatatatgaatttataaagatatagatttgtcaagtctattagtatttgactaaagaaaaggaaaagctggggtagcttggggatttgaattggtggtcctcttgcggtgttccatagctaggctgtggagcgttgctaaaagtggtcctcagcatatatatatttatatatatagaggatgggttataaacttgcctttcgtctagatatcatatggatatagttacttattattaagtgtttattttttttaaacttagtattaataataataataataataatatgaagaaaaactaaagaataaaataaaataagatatagtttagttacgtgttattttacagttggcatgcatgcaccactatgaagaacccatcaatcatgcatagatttcattgaatcattcatttatacatatataaatatctattcagtttcgtgtaactaatatttcataaaatataaaatataatatttaattatataaataataatattacattttaaatagtattaaaaattattagtgtcttttaacaattttttaaatgtagatcattattgttagacactactaatttaatattattttagagtattacttttatatgagtagtgtctagcaacacttaaaatttacactttacaattggttaacgtatctatataaaagttgttacattaaattatatgggacttgatacttaatttatacatgtaatattaaggtacgtagtgtgatagaacatctctaagggtagtttttatattttttttagctaaaattgagctaaaatagctaaaaacttaaaatagagtcatttttattgtccttactttatactttagttagtatttaattattttnnnnnnnnnnnnnnatttaaatttgttaaatataaattaatttaataaagtaatcaaaaagtaataatgttttcattaaaatattattaaaaagattagagaaaaaaggtaggagctccctatccattttatagtgacccattttttgtatggtttaaaacttatttttttaaagtactctctattttagctaagaatgtttagagaaaatggttaaaaattcttttatacacgtatatattatatattataatagttttaaaattaaattatgtgagtttttattaatatttaattgtaaataagtaacaccataactttcagcaattctcaaaatataatattgtattgatggatctgtaatgtttaaattaatcacgtgcatttgtaagtagtcttcttgatgaatatatatgcctcaagtagcttacaaataataatgagaagtctacttccaaaatgatccgagtctcacatatctgatcatcacttctttactttgaaagatattataaatgtatattaataaggccaagataatatgaccaccattataagagttatggaatggatccgttgcttttttggacttgggatgtaaccttttccagtgcatgttcatctttatttttataagtctacttttctggccaacaatgtcaaacatttcgtaccgaccggtgggaccataaccatgcatatatgatccatactagagctattgacgtctaaaaatttcccttgaactattgagattgttnnnnnnnnnnacttttgtctaattttagtaaaaagattcttgcatggatgaaagtttaggaggcatgatttagtacatattaaagtttgaggggtatgatttggtagatattaaaatttgggaaacatggtttagtacataa

SEQ ID NO: 161803 - DNA, 1802 bp, Cannabis sativa
gtaaaataatttccaacaggatctctcctacatttgttatcaacgtcgagactctcgataagataagagagaatggactagcgagaggattcaagtgtgaggtgccatcgaaggaccaacgagcgcactagttggccctcacttggatatcattgtcggagtgccacattcagcagtggtagtgctacctttgcacccctactttagagacattgcagcatacttcagaatgtgcccaacacaaatcaccccgaaaggtatcaagtacttttcagcgatgtttattctttatgtagagctagacttgcctcaacctactccttatgagattggatactattttgccttgaagtctgctctgaagtagaatcggatagggtacttctactctagccagattggctattagtggttgggagacaccaatagtatgcctttgtcgaaggtggggggatatgcctgaaactacttcattccatgagatatctagcaagtttggcaccattgtttttagagagtgcgcatttacaaatgctctattcctgctcttcagataagggattaagcgaaccacattttgtccctcctagtagagaagacgaatatactaaggtttctaattttcactcaattaattgtattcttcatggtattactaatactatatcttcttctcagttttagtttcttagtcagcctttcacttcagatgaggacaggttggctcattttcaattatctagtgttaaagttcttggttttgatggtttgaatccttatttttactagaagaactggtctattatgggtaatttatgtacttctgttcttgttgttttgaataatcatgctgatttctctactattaatgaaactattttagttcttacacttaaaaagaataaggcctcttccattagagattttaggcctattagtctttgttctactatttataaagtgattgcaaagactattgctaacagacttaaaatgattttaagtgatcttatctctaataatcaaagtgctttcttttgtgatatagaatcattttttattatgtcctaattactaatgaagttattattgctattcaacaataagaaatggggtaaagttggttgggcagctctcaaacttaacatgaaaaaaagcttttgatagagttgattgaagctttattaagggcatccttaataattttggctttccctgtagttgtttccctgattattaagtgtatattctctgtgtctttcaagttatctattaacaatgtcttactcccctcatcttctccttctaggggaattagacagggtgatcctttatcaccctatctttttctacttatagcaaaaggtctctctactgtaatttgtcttagaactagagctggtcttttttgtggtatttctatttgtagatctgctccaccaatttctcacctcctttttgtggatgataatcttttgtttactattgttactcccaataattgtagggcaattcaggacatcgtatccctttataataaagccactggtcagtctgtgaatttttctaagtcttttattctctttcccctaacactagtttccctgataagaaccttttctatacttctcttaaccttaataataagccttttttttttctaaatacctaggtgttctccaatgctttagaaagtccaagaagtcttctttctttttccttcttcagaaagctagtgctaaattaaatattgttggaaattattttaccaggatctgagatctactcacaagtatgtttat

SEQ ID NO: 161804 - DNA, 3562 bp, Cannabis sativa
  modified_base (3510)..(3523): a, c, t, g, unknown or other
tttttttttttttttcagtttcatcgtgtaaactccattaaacagaatctatgtaaaaaactaatattctaaattatttgatattgaagtatcaattaatttcaaatcttctttcaacaaattctaaaactaagcctagcactaaatttatgacactaaaaatatctatattaactaactgaataagaaaaatactaatatttggtatttatatatccagctaaaaatagtccataagtttatgagcggcttataaatttaaaagttttttataatcaattatgtcacaaatatgtcttagttttataatatcctatggccaaattctgaagtgaataaaaatgaaatgtgtattagtgatttgtgagcagtacggactattactccattttgtattcattcactttttcagtctcctttatttattacccaataaataattttcaatgtaattgattagacgccacggttaaaagaaaaactcccacccttcttttgaaatatgcattcagaagtgatcaaaacttgcttatgccaaccataagcatcgtgtcacttactctgtgaattaattagttccggaatattaatgtattatacatacagttatgatggaaatcaagctataaaatatgttctcatcaaatagtttgttttcatcttatgcataacaaaaagttaaatagacctttcttttcaaaaaacaaaaaaaaaaaactaataaaatctcacctgagctgaggtgacaaacattttatggatttttcttcttctataaaaccgacattttatgaactattgtatttattaatcttattattacaaattacaatttgtaaatctggatttaaaattgaaccaattatagtatagcagctctctatgagcgactcatcaacatattttaaatatgttttacaatctgtttcaatgataaataagtacccattacaccaacaaagaaacctgttaccacaattcctcctatcatcaccaattcgaaactaagagtcctagcaactttgttaatcttgaggtagaacatgcatggaaacaacatagaaacagtgacacttaaaaaggcaccgatgaatgccataacgtagccgaaaaagggaacaagtacagccacaagcatagtgctaagcacaataagacttctaacgagaatgctgatcactctgtttttttgaaaagagtatttttcctcaatagcagtggctataggagtgactatgacggcatactttgtaagtgggttaattagtgctgtgtaaattgctatttgtgaactaatcttccttatgggaaggttaagtgtaacttgggatttcaagttgtttccgaacatcaagtaccctagtatggccattgttccatagttgattgtgcttgtgataaagcatacgagtagtacctgccataattaattattaggattaatatacaaatataatgaattagtcatcactctaattattgttgttatagtactactttatttgcaatttttaaataaaaagaatctgcttttttgtgttgttagctcaaaaaaaagctaaagctacacaaaattatctatactgattagcaaccaaacatttacaatatagtacatgacttttaatgatgttgttatcttatatgagtaacctagtatatatacagtagactataaagaaagtgtatgtataaatttaaactattacaatgtgacgatatgtgggaacaaattagttaaggtgtctaatgtgtggcatgtatatccaaaaaattgacatgcatatgtggtattgaaatttgcatgctcacacacttatttatatatatatatatatatgtgtgtgtgtgtgtgcgcttatcaagctaattatgtacgtaccttggaaaattgacttctatctttcatggaattggataaagtgggaaaaacagcatgaccacaataacaaaacacaatcaaacttatagtagtggggagccctccaactttcaaaagctgaccctcttcatggaatccaactccatcaactgcaccagcccaaaacacacacaccaccatgagtgctgacgccaaaacacctccggccgacacataggccagaattcccaaactcttaagccatgtagttggcaatattgcaagcccagtcagcaccacaaaacctctctcacctctaattttgaagcttcctattctgaaacttgtgttgggaaacaacttatccaaactgtcacctcctaagattagaaactcaacagccactaagtacaactccatgtacatgaacaaggatataagggctcttcctttggacccaaaagcaacatctccaatatctggataggtcttgataagtgggtttgcatccatgcatcgttggagaagtagccctgtgtaccagcagaggatggccactaagaaaagtagtatgagacttagccatcctccttcagaaagtgcatatggaattgacagtattccaacacctaaacaacaaaacaaaacgtatataacttttactacatatgtgcatgtactaatgttacaaagtttgataataatactaacaacaatatgatagttatgttacttatgtatccatgttaacttaatcatatcatatatttcatcaaaaaaaaaatcatatcatatatttgggacctacaatatttactacgtacataaatttagatttcaaactatacgtacgtattatgttatgttgttactaaaggtttactaagagacgtagatatatacgagggacataataacccaccagataatgcattaattccattgaaacaagttctaagaacggtagtgcctttggctggttccaatatctgtgggagatgattttggctttccattctctctgcctccggttcttggtaattcacgagcatgatgactctaatttttgttgcccactccgaggactagtacgtatagacttacaaatgcacacacacttatatatatatatatatatattatataatttgattgcatatatatgatctaagtgggtacatggaatctccataaaagaatacattttatgaatataataatattttcttttccaagtaaagcaactgtatgagtagtctagtgagatgagtagataacccattaatattgcaacataatttcaacgtagcaaaagtagtgttatctgctatttactaaaaaaatagcacactccatttcaaaattaaaataaaaatacaagtcaatttgttttagaaaggagatccactaactcaccaccacataacatatataattgctttagtttgttgggccagtatctcctttctttctttcattctcaatcactttacactacttaaaaatatatgtataaatgtgtgtgttagtctagagatgtgtgcctgatcaatttcgctccaatctcaagcaacatataatacatatgatgattgacccttataattaagtgtaatatgtggtactaattgttaattccatttttggcnnnnnnnnnnnnnnaaaatattttattatttattgtattttcggctggtatgt

SEQ ID NO: 161805 - DNA, 5699 bp, Cannabis sativa
  modified_base (5640)..(5646): a, c, t, g, unknown or other
cagactttgattttatcgaatctgttttaatatcaggtcaagtgtgctcaagctcttctcgaggctggggcgaaggtggatgctttggataagaacaaaaatacggcactacattatgcagctggttatggaaggaaggagtgtgtggcacttctacttgagaatggcgccgctgtgtaagtagagtcaaatctaatttttgttgttgtgtgcgacaccatttaagatatactcactcattttggcttgtttgtgatgacagtactcttcagaacttagatgggaagactcctatcgatgttgcgaagctcaacgatcagcaagatgtactaaagttgcttgagaaggatgccttcctgtaagtttggagacgagaggaggtggcatgttcatgcgttcgggttcgggttcgggttctatgtgtcggaccaattttcggtttgaaattgtagtgggtcttgatgatttttccatctggtattttatctgctttcttattgatacgttgcatgaatttgatagcagcataatcacttttttcttctttttaatttaattttatgggacacgatgtgaagtgtagtgtgtgccattatcacagttagtcaatttattatttcgtgttcaataattaattcactaatatatataatatatatatatatgagtgcaatattacccatgggtaatattataaaaatttaagtttttatgtttagtttaaaaaaaatctctcatttttatacaatataagtttgggattgttccatccgacaaaaaaagaagttaagtttggtttaagtattttgtatagaaataaatttttaatataatgtaaaacgtgatattttttttatatttaagtagttaaattaagtatagaaattcaaaattttcttttattatttgttattggattaaaatttaataatttaatatttttaaaattaatatttttagttaaattgtttagtaatgatatcatagtaatatccgtacaattaaaattaaaatgtgaattgattccaatatgaattaagttgatatagggatagaaattcaagccacaatttgtttgtccattaattcgaaagtaaaaagaacacgcaacctattagtggataatatataataggaaattattgaatagtgattgttgttatttagtagtggtatttatggattggtttagtttgaatttttaatttttttttaaaaaaatcaagtaagtattattatggttttttaaaaaaatttaaaactaagccaattaaataattaaatcaatttaatagagtagttaatctttttagaaatttttctacttttaataagtttatactatataaataataattaaaaatattctcattacaatattaaattaaaatcaatattttacaagttgttctcaaatattagtattttattcaaaaaaatatattaagtatatataaaataattatataaattggtttgatttgatctattatgttaccgatcaaactagagaattataaacagtttagattgatcaaaccattcacaataaattagtttagtttggtcttaaatagtttgattcgaataaattgaggctcggaaccacatgttgcgaattatatgaacacattttttttagtagtataatttgcatagatttattacaaatttataaaaaatttcaaacaattttgaatgctaaaattaagatttaaacaatttattacacataaatttttttaaaatatatttgaatcttattaatacaaaattaaattttagagttcctacataaatattttttttagtaaactaatattgaatgaagtttggtgtagaaactctagttcattcatttaatatcaatgtaatggtgtaggttcccactacattagctagtgatattatcataaatttatatttaaactgcattattccatttccatgtcatgaaattattagtagagtaagtgtttaaaatagctatattttatcagaattagtggattacttcttaaaaagaaatatctttttatataaatttatagtagattaatttagtaggtttcttcaaatgttgcataatattttataataggagattacgtctaatttacttcactaacaattttacattatctctttatataagagataggttgcccaatcaaattcctttctttggctttcgaaaatgtgcaacttgctaagatttgaaaactgacatcttcatcaaattttacaccagaccatttgtgaaagttttggtctcagataatgctttcaattttactaaaaatttatacacttcctatttgtatgactcataatgttgccaaaagaaccttgatggtaaataatttatttgtttttttttttgcaaaactcttactttttttttctacaaatttgaggtactatttgtatattactgtttaataccaactagattattactttattgattttgaaattttactttcaccttggtcatctatttagtatttaacagtatatttaactaaagactcaaatttgtaaaaaaaaaaaaaaaaacttgaatcccaaaaaataaaacttagctgtgtagaaattaaaatataaacgagtttcacagtctattactctgcaaaattaaatctaaaatcccacattgctaactactctagagactcttcatacatatatatatatatataaatctttccattgatgaacaaggttgtgcttgtttgttcttaaaaaatgtctacaattatttttacatttttctcactctttttcattacttgccccacaattttctccaatgctctcactaatgacgacccaactccatatctctcacccttgacatttttcccaaactataaaacaatgctcaacactttcaaaattttcatataccaaccaaacacagccttagcttacaactcaaacacccaatcactcttctatgcttctcttcaaaagagtcccttcgccaccattaatggcgaacaagctcacctcttcttcatccctttcagtacctctgatctctccagaatcatcagagatatacgtaagaaatttccttactggaatcgcactctcggcgccgatcacttttacctctcatgcggtgacaatactactactaccgattcagatcgtaacgttctcgagttgaggaagaattcaattcagatctcatgcttccctacttcttcctacactaaattcattcctcacaaggacattactctccctcctctcccaaccactgcaacagacacgatcatcaaccaactgtcaaacgtgaatcagagctatctaggttattttagatacgacggagaaggcaaggatggttcacattctgttttggtgaatcaattggctgttgatcctgattttttggttgattttgaaccattcgacgagattagagcttcgagaagtaaattctgcttgtttgagtatggctcctctgatatgtcgaggatcggagtggctttgggattagggtgtgtgccggtggtgatcagtgaccgtctgattaaggatctgccgttcgtggatgtggtgaggtggcaagagattgcaatatttgtcaggtttgggggaggagtggatgaggtgaaacacgtgttggttcgcacgagtggagaactttacacacgtatgagaggaatgggcgtgaaagcgagcaaacatttcgtgtggcatgtgtcacctcagccgttcgattgttttaatacgttgatttatcaactctggttaaggcgacacacgattagatacgcgcttaggactagggagtaatataattaataaaattaaaatataaatagggatgacaacggtaaagtatgggtagagtatgtgtatgtattgctctatcaaatataaaatacaattgctaataattaaaataatagtattaaaaatattaaatatttattttagaattttatatttttataataattaatataaaagtaatttttgtgtgtattctttaaatatgaaataaatatatagtatttaaatatatataaatataaatatatatatgattgagttggataatatggcaatattagggccaatcctgacatatagtgggccataaaaaaatttgggtctttatttagaaaaaatgtggtttttttaaaattagtaaaaaaatgtataattttaaaaggaagaaatattttttgagctcttaggctaggtgggctctaggcactggcctagcctgcctatgcctatgggcgggcctgaaagggtacacctatacccataccttattctacatccacatcgagcacgtgttttcataccctcatcttactctacacgctaattcaacgagtaaatgtgttttcggataaaattgtcatcacaaaatataaaacgtcatattagcaaaatatcattgtacattaaatattaattagaaaaatatatttcttaaaattaattacagaaatgaaatttctcgaggacactcattttgatcaaaggaatggtgaaaaatgaaaatgattgtaaaaggaaagtgaatgatctactattttcttgttgattatatatgactttgctggttgcttattatacacaacatggtcttcaataaggtttattctaatgagaaaatattaagatttaatttcagatcaagatgttgttttgagcgaaaattaattaaacacataattgtgtttaagccattttttaattaattattttattaaaatataatttagttttacttattaaaccttactccctcataagaatgaattattctaactctaaggatatactttgtagtttgtacaattaagacaaagagtgtgtttggtaggtcgtataaggatcgtattgtattaaataataaataacacaatatttagataaaacattgtattattatattaattattatgaccataaattttaatacaatgtgagtcgtattatttaatacataacaaattactaaaattataattaataatatttacaaaggttctcaggtaaaccccgaccctagctctggacctcgaactcgaacccataccctgatcatggacccgaactcggaccccgatctcgactcgaacccagacccagttcagaatccagagtccaagttcaggttcaggtccaaatctagggtttgggtccaagttcaggttcggggcccgagttcgagattgggtctggattcgggtccgagtttggattcaagtttaggtttgggtttgaatcatagttcaggtccgtggttcggtctaagtctcggttcgagtccagattcgaggtctaagtcgagatccgaatcaaggtctgagtccaagtccgagtgtaggccgtgatcggagttggggttaagtttattgtaaataatttataatttcaaatatcctattaatacatttaccaaaaaaaaaatacattctattaatacaagtcaatattaaacatattgtattaaatcatgttaatacaatgtaatattatctaacacaatataatataatataatataatgtgtaaaagagtttcaaaatataagaaatatctttgttacaaatttatagtggattaaacattctttctaactaggggtgtgcagaaagtcannnnnnncaattctaaccgaccgatccaatcccaaccgatccaatagaatcggatatcca

SEQ ID NO: 161806 - DNA, 2137 bp, Cannabis sativa
ctacggttagctccttgatcctattgacgccttggtgggaggtttgattcctcatcttataattattatttgtacttaataattaaacaaagtttagaaccaataatgcacatataattaagttatatgatgatcagtatatataatgtatcgttctaatttgatatttgttgtcatcttttttaatgcatgggtgagcaggcaaagcagcccaacaagtgagtgttcctgtggccgaaggttgtactgatcccaatgctgagaacttcgaccctactgctaggagtgatgatggtagctgcctctatactttctaaggcgttttctatcgctttttactttttcctttttcgtttttttttttttttacctttgatttatgtggaggagcttcttttgtaaggatgatcgataataagtaaaacaatattattgtttatgttgtttttaccttcggtttgatgggttatacgttgaacaaattaaaataatttcattttggtgttgtacttgtagggtaatgctactgaatttcttattttctacatcaacgttagtgtataacgctaaattactgttgtaaatttttacgtttattatgggctaacaaccaaaagtgggcttcacaaatacttgaggaatttacaaaaaaaatatagaaaattcaaacttcaattaaaaaaaaataaataaaataaaaatatgatacaatcttttatagatatatttttatgagggaaaattatgtaccgggacagatttacttgtagtggtaagctctaataaattaatggtaaatcttggctcaacaattaatttattaattatgatgttattccactaataattaaattataattatactttcaacacatacgatctattattatttagaagattaatcacattaatttatttctattgatatattcattatatgagttatatgattctccattaaatatttcataattagagttaagtatttttgtacggtaatctctctaattatatgttcaacaaatagtgttattgatattttaatgaacgtttctataaatcaaatacaaatgaaatttttattctctaatataaattgactgctttatgttcaagtaccgctatcaatactcaaagaaatatttaatctggccaattaaggaaagagtttattccatatctgtgcaatatgttcttggcaacctataatcctataactcaagcatatcaggaattaagtctctgttttcattcataaactttacccgataagtcaaaaattataagactatatatatgtgtcacttcaggactaagatcaagtctcgtaggacgtctattgtgtgatgaatgataaatttctataaataaagattgttaaaagttctaatcattcatcgtgtctctaatcttatacaatcttgtattgtatgttaacattgtatctagtcatagtttagttatctgttactgtgattaggtgttagttagtttgttatttctgttactagttagttgtattgccttgtctgtttgtatttttcatctgtataaatactggtgcataatcaataataaagtgagctctttctttaaattctttagttcttctctgcttttctctcctctacattgtatacgatacgtctaatacattgtcaactacacttaacaatccagatagattattctgtctaaggcagtagatagattgtgctcataatcttaattaatatcaaagctcctatttttaatattaacgattacagacattttttctatgttattctcctgagttaaattctcgtgtataggtaatattatatatatgtatacttaacttaagattacatttaataacaaaagattttttgttataaattattatccatgattcaagaaagagggcacatggcatattccactaagatgcaaccaacgtaactgaaattcaagacagtcccaactaaggtaactggttagatccacgcagagagataggccaagagtacatcgagactatgggtcactaacactactacaatgttagcctttagaggttgttttttcacctccatttataaaaagggaaactaaagggtgtgaaaatacccgctttgttcgaaattgacattta

SEQ ID NO: 161807 - DNA, 4486 bp, Cannabis sativa
aaaaaaaaaaaaaactttatttaataggaaggtgtaaaaaaattaacaaaaatattaaaattttattgaaagaatataaaaattatattgaatatataaataaaaataaaaaaaaatctaattatattaatgagtggtaaaaatataaataaaaaagtgatatttattgtggtgtaaaatttagtctatgcaatattttgtgataaattttgaacaacttttagcatgtgcatgtttgaatgtaaggagacaaaagagaagacaaatggaatgagaacgaaatgaatgaagatctacaaagaaaagcaggctaagaacaatatatatatgccaagagtttgttacaacagaaactacaaaaacaaaagaacacctggcagaccaactgaaataatagaaatgtaataacaaactaactgaaaaggagagagagaccctagtcttgattgtctctaacatccccccttaagttacactcatttgacttgagtgttaacttatctcttaggtacatgaattgaggattgcgcagtggtttggttagaatctgcaatttgataaggggaatcaatatattgaacctccaacttgttgtcaagcactctgttttgaacaaaatgaacatctatctcgatatgcttagttcgagcatggtatacatggtttgaagccaaagaccctgctcctaagttgtcacaccataagacaggattgttgacaaaggaatggacagttcagtgaggattgattctaaccaaaccaattcagatgtggcaagggcaagtgctcaatattcaaattcagtatggatcgagcaactaaactttgcttcttagagcactagctaataagattgttttcaaggaacatacaatagcttgatgtcgactttctatcatcactgcatcctgcccaattagcatttgagtagccttgaagattcaaatttgatgcagtagtgaaggagagaccaagggttgaagtcccaactaagtacattaatattcttttgtaagcaccccaatgatcaattgtaggagcttaaagatattggcttagcttattcactgcaaaggttatatcaaatctggtcatgagtaagtattgaagggccctattacacttcgatattattttggatctgcaatgggagttcctaagacagagatagcttagcagcagcacacattggtgttggttgaggttttgcatcaagcatgtttgttttggccaatagaatatgtatgtacttactttgagtcaagtagatagctttagtgtctcaaagtacctcaaaactaagaaagtagtgaacagagccaagttttttaagggtggacttttggtgaaaggcaatgatgatgctttgtatttgatcttgccattcctctgttataaggatatcatccacataaatcagtagtaggagaagcttgttattttccttgtaaaaaagagacttgtatcagctgttgaattgttgaatccccactgaaccaaagtgactttaagagtgtcaaaccaggcacgagaggcctatttcaagccataaatggctttgtttagcttgcaaacatgctgagcaaacacggggtcaacaaatccttatggttgttgcataaacacattcctttttaattcaccattaaggaatgcattattaacatccacttgtggaatgtcccatccatttgttaccgcaagagagaatataatctttattatgcaaggctttataacaggactcaatgtttcaaggaaatgcacgcctagttttgttgaaaaccccttgcaactagtcgagctttaaacttgttgatagtcccatctacattgtattttattctatacagtcatttgttagttatgattttcatgtcctgtgtaaggggaacaagaacctaagtgttcttctttttgagagcttgaaactcctgattcatggctttattccattgactgttagcaagatctttttttccatttgttggttctaaagtattatttatttgtgtcaaaaaagtttttggtttaaacactccagcttagaccttgtgaccatagaatgattattgactctgggggcaagtgggggtggagttgacacagattttgtagattgagaagactcttgtggtagaggatagggtagggaggaatctgtggatggtgagtgactcgagctttaactgagtagtgtgaagactattattgggagagtagttgatgtgtagagattgaggaatctgaacagattcattggaatcttgagaagattgagagttggtgggggtgctactttgattggtagtatgtgagacatagttattctctggaataggaaaactatgagtatggacaatattagggacaagttaagattgtgttgggttagagaataggtcattgtaagggaacttagactcactgaatgtgacacttcaagcaacatagactcttccactaggatgaaggcaccagtatcctttttgagtgttgttatagcctaagaacagacatttactagacctgaaggcaactttgtgagtattgtaaggagttaggaaaggaaaacaagaacatccaaagactttgagatgattatagtcaggtttttgtttgtaaagcttctcaaaaggtgacacattttgaagtataaaggtaggaagcctgttaattaagtaggctgcagaagcataggcttcccactagaagctaagaggcattttagcctgacccaacaaggttaggcccatatcaacatgtttatgctttctctccacacgaccctgttgttggtgtgtgtgcacaagattgcctaagggttatgccaagatcttgaaagtgtttgtacagaggcaaatatttcttgctaagatctgtctgcacactttttaattttgtttcaaacgttctctcaaccaagtttttaagtgagtaaagagacctgtaacttcatatttagattgtatgggatagatccaaacaagcctagtgtagtcatcaacacaacaaaagtaatatttataaccacccttgaagtatagaaagatggaccccaaacattagtatgaataatttcaaatggatcaacaattttatttacattagacttaaaagtaaattgatgcattttgcctaattggcaagcatcacagaagttgtagtctttacatttgagttgaggacatacatgatctaagaccttggacataacttgtttggctggatgtccaagactagggctgtacataaatttttttaaaccgcccaacccgaataacccgtccagaccaaactgaaaaaatcgacaaaaaatacaaaccgaaaaactcgacaaaaatttaaactgcccaatttatatattgggcgggttgaaaaaaagtataacccgcccaattaaaccgatttaaaccatttaacccgattaaggggttttttctccaaattatttttaatatatctatacattaaacttaacaaataaaaaccctaaatctaaggtgcctttttatcttctctcaaatcaatctccttaaattaaagcatctctcccctagtcttttgtctgagttgtttctcctccctctaatctgagtcttccttggttcaagcttctatttttctcagcaatgtcaaaaggcacaagctgccatttttctcagcaacggcgcaaatgcagacttcttggcaatgacggtgcagcaatcttcgtagtttgtactcctctaatgtttattcaatttgttctctgttatttggctatggatatatgttgttctttgttcagttcttatttttactttattttgaataagatttatatatataaatttatctattctctatttttattctataagattgttcttaaaggtaatttatatataatttaataaatcaataagtttaactgaaacctgtctttcgtaatttcaagaagaaaattttatttttcatttttttcaatggtggagttaatctaatcccatatgtccattgtttacttatcatttgagtgtttcacagactaggtaattcaaaaataaaaaaatttatacctggttaagtcaaagaaatcatagtcaaaaaggttcattatcaagagcgaacgaaaaaaaaagttaagctcggtttgggcgggttaacccgcccaaactgccaaaatcattggacaggttgatatatatacttttcttatttgggcaagttatacttaaatcattggccttgcatttgtagtcagctgtgttgttgagttgttgactgtctgatgtaggggtgaaaatcggtcggttatggtcagtttttacaattttataaccgatcggtcgattacggtttttattttacgaaaactgtaaccgaccgtttagaaattataaccgtataaaaccgaccgtacggtttttggcaattttttgatttggcgattttggacagtttttggcggttttgggcagtttattgcggtttttggcagttt

SEQ ID NO: 161808 - DNA, 2358 bp, Cannabis sativa
acttccattactgcattgacaatgtaatatccatcacttaaaactacttgcaatacataattggtaggcacttaatcatcttttggacaaaatgaagcaataacactataaatttctctaaaagaaatgaacttgtatatatagctgacttaaaaaccaaataaaaaattcttagataattatttttgtaggaacattgcctgtttgtccacaatgtcaaatgacgatctagaataaaaaaagaatgtgaaaaactaattactattatgtttatttttttttataattgtcctattaaaagactattatatttttttttttcttgaaactgttatagtatttttctttattcaaaatattttaatattttcttttcatacatttattaaagaaataataattatttaattaaaaatcatattataattaaaaaaaaatattaagtattcgtgcatttgcacgtaaatttaatctagtatatatatatatttttatatatattttatatatatattatatatatatatatgatatccataaatgtatactatggatataacatacatacatacatatgagaggtagctcctaatttttccttgctggggaacaaaaaagataaataagagtattcaagggaccaatagaccatactgtatgctctagtctgactttttggattccacagaaatgcaatttattgcatcttattctatatatttgaatgtatgtacaaagaaatgatatccggtgttgaattttcgtaatcttgtttaattaatattcctcttaacaaaactatacaaaattgcaactcgactagcttcctctcccgtgtcaaaattgagctaactatgagagacgagagaccagctagaaatcaacctagcagcacttgtggtcgatcaccattacccgtgtgcatacccagatgctcaggctagaatccttctcaacgagtgatgctccctccagcctactcctatctggaaaacaaaattaaattaacctcttttacttgggtggaatcgggtttagagagctcgagtttgttcctcacttccatactcgaagatgcttgtctagtcatgaaaatcctcatatggcgaggttccacttgaagaatcactttcaaatggggtggtctctcttggtgatgagggaagtgattctttctgttgggaggaggaagctgaaacagaacaaggtatgcacaaaatcaactcaatgtaggtatggaggtatattaggacacaatcttgctttacattggaaacatcatatgcttggccattacaaacctttttgtgctctagagtggaacttttttgtgtggcgcctgataagcctcttaacctttgttattgtgagttgcctagcaaagggagacaactctacatcacttccactccaatcaccttgtaaatcagtgtctgcttcacccctcatcttcctcaggacaaatgcctttgctttgcgtcgttgagtattaaatagacctctaattgaagtgacaaagccatcacctgatccatcacttggacgcttaagccaagtcaatgggtactgatcagatttgcctgcctgaccttcattgtcactgaaattaagatcactatcggctacattagacccagtgggttctcttctctctgactatgtgctttgtctttaaacttcttgccctgtaaaaatatagtaacaattacggatttaacttgctcaattaaaattgaagttttatacttgtaagtgcgcccttaaaattcataatatattataacatactgaacagtcatatatgatgatcataggcttaacagcaaatcattaactgctggggattacattatacagaaatatcccttggaatttccattatgaattcatttcatcccatagtaacataccaagaagaaacaacaacctagccaagtactctggcattaactctgagtagaaggccatgaatgataacaagatcattatacgaacaaaaatgtatctatctcgacattaaagtttagtacctgatcctaagagttgatttaagcataaaaaaaaggtttttggcccccgaactctattgtgcccctgaatttttttaaccttgagcccttaactattcacaatgttgtaaattggtcattccgtcaagatttgtcacacgtggcaaacaaaatgatggcatggctgctttgctagttaccacccaactccacgtgtataatttaaaattaaaaaaaatatgagtagaacttctatgcaagaatacacttgggaccaaataaattatattctaattgagaggttataactaaataaagttacactagaaaaaaaaattaaaaaaccaaa

SEQ ID NO: 161809 - DNA, 4735 bp, Cannabis sativa
ttttttttttttttttgttaagtgctagtagaaatatgttgtgtgatgttgccgatgtctttggctaaggagactaagtttgtgtttaattggaggtaatgaaatagaatggaatgaaaaagaatcaagttttagtttatttctttatttggttacattttaaaatattgcaatgtcattctaatagagttgacttttttacatttgggtggagttactattcaagaaaaggtcattccaatatttatgagaaataatttattaatttttttaatgtattttgaattcaatttcttcctacttatattctcatttctattccttttgatactattttttctaaccaaatgcaacctaagtgtgcttgcaaatttgcaatatcttgcttttatgttttagttgtactttttggaaaacctgaaatggcatgcatctgaagctccaatccatcttttaacctttgtacttgctcaggggcattggtggcttattacagtcttcttcattacataactgtgatttaaatgtgatacaactcgattcaagttttgcattcttaattgtttttgtaaggcgtctggctagctctttgatgcagttaggtgtaggccaaagtcctgtcttaattcttaactgcttatttgtcttaatgaaaattctatggggagatatttttgtttattacttagacaatattgttgttgagatgtttttaacgaaaaaaagatctaaaaggtttcttgttgagatcaaggtttggggagcttgtcctgtttatttttaaggcgagccatcattggtaaactttaattgctggtagtaaatctccccgacacttcttttccttgcaactaaaatacaagctagatatacttctaaataattgagcttaaactcagccaatgatgtggaacctgttgaaaaaagttgttgtagaaaaataaaagacacgaatttaccgaattaaaatttaggttgagttgcggattaggttgccctttttaagatgctcagggcattgtacaaaattgtgcaagtagactataacctcaccgttctcaagataaaacaactcagtcgagaacattgtatcagtattttattgcacgataaagaattgtcaaaatgcaacacccaataattatactatatctcggaacacatttttttttttgaaaaaaaaaggatgtctttctcttgttggttttgatgcatcatatggagtaacgggaagaaaattatttttttgattgtggggatcgtgtgaacaatcatacgagtgttactgaaaatacgtagtgagaaattgtctttgcttattaattaattaaacacgtttaaagactgttttaattaattaaataaaaataataatttcataaataaattttctccaaaaagatatagtgacacacgtcctccaggtcgacacggtcagatggatggcggcagcgcacgcgtgtgtggtggtctaatgtgtgaatccttacccatgcgcacaaaactaagtaccccttggggacctaatccaagttccaaatttgcacattatatacacttcttgtgaagtgtttctattacatgtgggactctattcactcacacaccacttctcatttttgtaaaatttcacaaagtttcaacaatttcccacttaaaatttttaaaaatattttctcgagcagtagtctaagcaataagattgagcatagacaatcgtatctttcaatttgaaccttgtgggaatgcacaactaaccccttacagatcacgagactattgattgtcatatttaagtttggttctaagcaatatgaacctagtattggagagtgctttggtgagtatgtctgtagtttggtcattggctggggtgtagtaagagattttttcaaaacgttttccctcacaaaataaagatcaataaaactatacagaggttgtcacaccatatagttgggagtcttggaattggcaccttgagttctgataaaaggccttgaattaggcaagttcagctgttatactggcaaggctcctattcttagcctcaatattggatcttgagacagtttgttatttctttaatgtccatgtgactaagtttgagccaaagtagacacagaaaccaatggttaaatgcctatcatcaatataggatgcccaatatgcatcactgatgtgctccatagtctaaagtcccttttaagtacttgagaatgtgtttcattgttctccagtgtgcttacagtggagaatgcatgaactgacacactttactcacttcatataagatctcaggcctggtgacagttgcatattggagaactcccactagacttttgtaatggtgagggtctttcacacggtcactaccaatggcagacagtttttcccatgtcagttgagtaggtaaactattggcaaattggagtttggctttgtagagcacatttgtaatgtatttagtttgagaaaggtggacgcctatttttgtatgtgtcacttaaatggcgagaaaatagcttatgtcaccaaagtcttttcgtgcaaacatgttgttcagttgagagataaggcttggaaaattctaagaatttctacttgtgattataatatcatcgacatacacaaggatgaaggtggtgtgaacactaagattcctcacaaaaagagaattgttagctctagaaaaccaagttgcaacagagactgtttaagtttatcaaaccaagctctaagggactgtttgagaccatagaaggccttgtgaagcttgcatactagagttggatcttgttgttcaaagccaggtggttgttgcatgaagacctccctaaccaaatctcaatttaagaaggcattattgacatcaagtttctcgattggtcaattcctggataaggcaatagtgagaatgattctgatggtaggggatttcacaacaggactaagggtttatgtgaagtcaaatccatgctactgatgaaaccccttaggaaccagtcgagctttgtacttggaaacatcagggttctctttgattttataaacccatctacaacctatttcttttcttttaggaggatgtcacataaaagtatatgtaccatttcttattagagttataatccctgcattccacttaggatcaacaagggcatcaacaagtattagtggggtttatgagatgatgtaaacctttgatttatagacacctgctttggctcttgtagtcattggatggatattggttggtggtacaggtgttagtgctgcaacagggtgtttagtggagtaggaaggtgatgaagggtgagctggagaggacacaaaatctaaagcaagtatggaagatgtgattgtgttttctagagcagagaaaggttgaaagcagggcaatgtagtgggaactggtattgtagggtttgcctcagtgtcagtggctggtaaaggttctgagggagctagtgtgaggtgtttgtcatagggaaaactgagctcattgaagatgacaactttaaaaataaagattctaccactagtagataagcacttatatcctttatgttttaggctatatccaaggaaggtgcactcttctgacctcaagggtaattcatgtctactataagacctaatattagggtagaatgagcagccaaacacacaaagttgggtgtaatcaatctgtattttgaagagttttgtgagaggtgttagtcctttaagaattgatgaagggagaggatttattagaaaagcatatgctcttactacctcattccaaaattttaagggaagggaggcatgggacaataaagttaaggatgtttgaggagatagacccaagtgaatttagaatatgcatatgtaaaatggacataataatagtaaccattagaagagatcattggggaaggtccccaaagatcggaatgaataagttgcaatggttgagtatattctgtctcagatataggaaaaggaaatttgtggatttttccaaaacaacatgatgaaccaaaattaggttcacttttattgctattaggaacattacaatagttcactacatgtgtgacagtcttgacagcagggtgtcgaagacgagagtgccacaactaaaacaaagaattattaacaatatttgtttgagcagtattacaagaaatattaggcaattttttggatagagaaaagctttatggagattgactaggtggttgagaggggacttagaatgttggaaatacataaaggccagctctaagagtaccctacagcagcaccttgtgagtcccctgatccttaacaagacaaagttagggtgaaatttaaagaaaacattattgtcaaaggtaaattgagggacactaatcaagttttgggtaatttgaggaacgtgtagaagattattgagggtaagaatctttgatttatttattagcaaaaaggaagtgtgcctatccaatgttttcaatagtcaaacatgtaccattttccatgaaaacctgatcttgaccatggaattcatttttctgagagagatttcctccattcaaggtgcagtcatgggttgccctagagcatgggtacgaagaatcatcatagacaatttcaataatgactatctgtagggctttgtgccctaaataaaactctatttcagtgtaatcttttctattcatatcaataaagaaacgaattcaatttcattacttgtttaatgtgt

SEQ ID NO: 161810 - DNA, 1732 bp, Cannabis sativa
gtgggttcgccaggaagattgtgttccaacaggttacgatggtggacgttgagaatccgatcgtgattgaccagaagtactgccccagaaacgaggggtgcccggggaaggtgtctggggtgagagtgagcgatgtgacttaccaagacatacgagggacttcggccactgaggtggcagttaagttcgattgcagcgctgccaatccttgtaacagaattcggttacaagatgtgaaactcagttacaataagaagaagaagaataataaggatgggattattaatactagtgcccaagcttcttgttctaatgccaaaggaagcgcttctgggataatccagccttcaagttgtttgtaattattataataatatttgtaatttgtaatttaagttgcttgagcctgtggcgtctgtgattaattattatgatcataatcatgatcagggttctcttcttactgttgattccaccctcccctgctctggcctggccttgcactttaattacttcattaattaataattagcctatctaatttgatttagtactaccattttcttattaattttatgtttattctatatctttatattgtaaatgttttcatttcctagagggatatgtagctagctagcctagctgcagaatcaattaacaacgaagtgcgatagcaatggttgcgattggaaattaataatatatttatataacaaattagtagaagttgggcagttttaatatcaaattcattaattaattaggtaattttagtatttcggagaatatactatttcggtcttttctgtacaagcttttttttacacatgaaggtgttgagacataatcgaatcccaaattaaaagaagtcactatccacttacttatgttattttttgttgaagctatacattgtaatatcccaattctaaaacaagttggaaataaataaatgtcacagtgttcatcttcagttttaagttaatcccatttagccttcagtcagtataaagagtcccaacgtatgtagtatgtactaatctttgaatagatttggaagattttgttacaaaaggaactgttgtgtcactggtttccccttagtctttctctctcttttcaactgaaaattagattaaaaaaaagtaataacatgctaacttccttgaaggaaagcaatttagacttagaaaagttcaaagtcaagattcattgttatttccttggaaaattgaatctttcttttttttttttttgaaagagtggaaaattgaatcgtatagacttgtaagtctaggtctagcccaaaaactacgttagaattgtttaattagtaacttgatcaattaattaaacctttttgaattatcaaaggcatttgtttattgacttacaaaagtaataattacgtacaacttactagttcagatcacaaaaccttttcgtgcttttcatcaaactcatcacttcttcagttatagatgaagatgttaaagtatttgaaagagggtgttgttagaggaaaataaacagcaccgaagtgaatattcaagctacacaagaacacctgcaactaggactgcgaatatttgtttagattggcaaatactcaaagtaaaatagggattaataatgtaaacaacatatatgtaagacaaaaaaaaaaaaaggctaattaggatttttttcccccgaactttgacagatactaaatcatgtcctttgaact

SEQ ID NO: 161811 - DNA, 1043 bp, Cannabis sativa
  modified_base (973)..(992): a, c, t, g, unknown or other
aacacttattttgcaacaaaaggtacttaaccgtaacaaactctatattaacatgactatcacttttgttgagctaaaagacaagaatataccacactcaattaactttatcatcaccagttttatgagcaaagatctatacaatatattcaaagatttgttattaagggattttacgactcatatcagcttatcgatcagaattagatcacaaattttcaccctacttacttcatcaacccctatattttatactaatgcaacataatcaggggacaaattaaaaatgtaaccgatataatttcctattttctctaatgttcaaacattttctttgaagccaaacagacacaatcattcacaatctagatctaagagaaaataaaaattactgggtcaatccgtaacaaacaaacaaaaaaaacgttacctatacatgaaagtatggtcacgcttgtctaattcctttttgcagtagctacatttatcaagaaaataatcacccttctccttatagccggcgccatccctggtcaccacctccagcggctctatcatcataatcggcctcgactccgatgatggcggcggctgaggctgcgagggctgggacaagctgctggtggcagaatcagatgtcaccacatgagctgatgagtgcttggaagtgttttcatcggccaaattggaatcgactccttcgatggatgagtgcacatcatcatcagtagtaggcatgaaaagccctctcttcctggctgtctcctcatcatcatcatcgccgaaggtttcggagcgcagttttctagctcgtttggctctgagtgacaccattgttgttgaaggcggagagagaagagaatgttaggtcttaattaatatgattgaaagagtgagagtgagagtgtacagcctactaaggtagggagtagctggattgtttccacagttatatatatatatatagagagannnnnnnnnnnnnnnnnnnngagagagagagagagagaggtcttttcatgaaatctcaccccttcgtttat

SEQ ID NO: 161812 - DNA, 4181 bp, Cannabis sativa
aaattaagaactgagatgtttgaagggccagagcaggcccatccccatgaacttcaagggcattcaaatcactaaaaattaacataacttccagaaaaaacaaagtgcaagggagactcgaaaagagactatagcaaatggcaggtactcgagagggactcaaaacccagaacttgtggtagcaaatcatatgcatgaccgtttgagctatctgggtacaaagattaagactactgaaaaaggcatcacaagttcactagacccataaatatatgcaatctttactaatgatggttacaaaaaaccaacttaactaaagcaaacaaacatacaaaaattatatggagaagaactgaacttacttttttaagatactctgtaggtcgcattcgagtttccaaatatcattcacattcaaatatttttttatgttcaatatacccaacttggataaaagccgagcaaacattttcactgcgttaggcttctccattacattttctttatcagaaatgctagcacccagcaagtcatatacatctgcaggcttattaatctcgtgtccctaatggtattgaaaagaacaaacatttcaaattatatcattacatgttatgaaaataaattataatagaaaataaatggcaacattgaaactctattgacatattaagattatttgtgaataaaaattgagtttgaaagttaaaaaaaaaaaataaaaaattagcatgtacgcattggagcacaattcgaaaagagtgacttgcgtgtgaataactaaacatgtctttttgcattggacatgttcggaaaccttgttatccatgacagacaaatatgtttgctataaaatatttggttgtaaatgcaggatacactaagacgaagagtcagactataccttctccgagtatataagctcaaactgtccgccagttccaaaaggaggagtctttccccatgccaaagcatcaagactccctttaagtccatctgtgacttcggcttttgccgctttaataatgcaaccagcaggattctgcaacatattccagaaaattataagaatataccatttcctgtagcatttatctaaaacagaaatgtttaaaaataatggctgaaaactgaactaatataaaaatgagaactaacagaaaagcaggcttgtgtaaagggtgacggagcagatgcatttcccctctgctgagcgaggcctttaggagtcaacccaacaaaatatcctgtagttgataaagagttcgcaaccataagtaagtgctcggggagtatgctcttgccaacatcacatactgctgactccaaattctgcactcgaaaaatccaatattgattatcattgttaaagagagcaattcatgagaaatcttgtaaatcagcaccaatgcccaccaccccttgagatctcaaaagaaaaagaaaaacaattaaatggggtgggaagagggcaaaggataggtagcataaagccaagtgaacttacattgagaaaatacttccatcctgcatctactccatagactgaacagaattcattcatgttatctggatgactgcgtgaccaatcaattaaatccatgattttgagacaatgatccatgagtgtaccccaaagtcttcttttacaaacacgtgtcatagacactctgaggtagagttctccaggagaactagaccgatcattccatagaatgtctatgcttttaatttcttggaagcctaaagaatcaattggcaacaaaagggtaatgagtaaccatctcaaacaagggtttaaaccgcagacctcttacacacaaaaccacttgagctagactcgtggtgataaggggtaatactaacttctactaattcaagatcccaataaccaatttcttgcaaaaacctcttacgtcacattccagtcttggggcatattaccatgattcttttctcaatgtcaccctaatatataactataaaatgaggaaaaaaattcacatgcgatgtttaaaagattcttcaaaaaagactcgaaagataccatctttacgaaatccccataaaacaaatgtcaataaagcattagttcaccaccacgaaccttttacaactatctccagcatggcaggcaacactttttcctgaaccttttccaactctatgtaagaattctggaaattttcagctctcacaacaatgcaatatgaatccttttctttatccatagtagaacaaccactgatataaaacagatgactacaatcaggaacgtaagaatatgtgcacatggcacaatggtgcctttgatatgagcatgcaaattatgaaagttcgaaatcaataatttgagcatcatgtgatgttaaacaaagtggacttgaaagtataagttgtgaagaaagcaaaaccaatagagaatagcagaaaatagtttaaactctaaggtggtgtttggtttgatgtaatgtaatgctaatggtaatagtaatggtaatgtaatggaagaagaatggtaataggaattgattacaatgtttgatttgtaattagaatgaatattgtaatcaaaattattgtgtttggtttggtatgagaatgtaatggaataaaatgtgtattgactaaaataaccttattgctacaattataaaattataaaatattaaaaaaaaaaagggtaatatagacttttactttttttactatatttttttcttctttgtaatggagtgtaattgtaatggggattacattggttttggtatgtaatcatcattacaatactcaatgtaataagcattacattgtaatggattacaaaagttaaaaagggaaaagcaaacaatgtaatcaacctattcattaccattacgattaccattacaataaaccaaacatcacctaagatctttccgtttattttgaaacaggaaaccacctatccttcaacaaagttgctccatctgctttattatgtatgaagaaactacttggcattactccttcaggagaatacgaaataccatttattaatcaatcaacagaatttggaaagcctataagccactgaaactagctcatcagaggtgtgaaggaaggcttgaggtggaggaattggaagaagagaggaccaatgaagaagcaagagaaatctagtgttcccgcattattgtgtttaatacatatgacaatttaataatgtaaagaaagaaagatagaaaagtcatgtagaaaaattggtgaatagtagaaaaacaagttaagaaagtgacaggaagagaaagtagagaatagaatttagggtaacccttggtaagaaaaaggaaaaaaaaaatggcatcacaattaaatctacacaaaagcaataaacaaatacagacaattttttttattataggattatactgaaaaagaaaaaagaaaaatataaagaaagaggaatagtttacctgctctttatctgacaatttggtaggttgtctttggatctatttaagatttcataccacccttgacgaagattattgattacagtgtgcaaattcagttttctttttctcaaaatttcctgaaagataacaataaattaataccagagaccaagattaatatgaacagagaatttctgagttccttaacgtaataccttgttgatatgaaaatggcaaacccaaggactgaattgtctctggctaccggccgtcgaggtgtagctaaagtaaaaataatcaaagcaataagaagagcaaaagaaggtaaatgtgcatgtaaagaacaaaaatgcaaagtacataagagggtagaaaccaacattatcatgactgtagaaacaatgcttgaaaacttcagtctctgcaaataattttttatttctaaggctccatactcaaaaccatgcatctgtctcccaagcttcttggacaaatatagtgacatagtttgactagctttgctttttcttgagccacactccaaagcattctgtatgataaaaacaatttatagaattgttgtgggaaaatccaataccaagcatctatcaagtaggcaaatattccataaatgcacaaaaacatatagagatcactttgatacggtatcttaattacttttttggaacaaaaaacataatttattaaatgatgcaacataaaaaggagagagagagagagaga

SEQ ID NO: 161813 - DNA, 5834 bp, Cannabis sativa
ttaatcatatgtctcttgtctgtgcgatggaagagttaattcaactggcaagggttatggccagttgcagttttggccattatttgatgtgactagaagacctccaggagtaatactagccaggctcctttggcttattcgaggaattttttcatagtgtccttaagagtcttgtttactgattctacttaaccattggcttaggaatgtgcgactgataaaaagctctttgtaatttcatgtcttggaaaaaagtcaacgaatgtgccactatcgaattgagtcccgttatctaagactattttctttagtaagccaaaacgacaaatgattcttttaccacaaactctaagactttctttgaggtgaccaaaggtcgatggctcagcttcaatctatttggtgaaatagtccacaactattacaacaaactggactcctcctctacctgtgggtagtttcccaataaaattgatcccccatacagcaaaagaccaaggactttgcatttgatttaatgtgtttggtgcgcgtatcattgaaaatatctgacatatgtggcattttttaacatactccatagaatttttgttcatcattggccagaagtatccttgcattaatattttttttgacaagattttctctcccaacgcgatcttgacaaaacccttcatgtactttgatcattaataatattgattgatatggagtaacgcacattagcaatggtagggattatcctcgttggtaaaattcattcgactattatgtactatcccttggttaagatatttaatgatcaaattcatccccatatctcctaatgcaacagataatacttcctggttggttgtgctcctttctgctaagtattcaatgggagcaatgttcaaggtatcattgtcttttgcactggcaagcttggctaaagcatcgacattagcattttgttccttcgggacttgtgtgattgagtattttttgaactgtaataagtcttttattttgttgaggtattgcaacattctaagtcccttcttctggtactctcctgggacttggtataccacaacctggaaatcactaaatatctccagagatatcgcatgcacgcctcgagatatttgtaatcctgctagtagtgcttcatactcagctttgttattttaagtgttaaacccaagcccgggagcacaatggatacaatgattcttcagggtgatcaatatgatccttgcgcctgagcgatgttcattggatgctccatcaacatatagctttgatatagggatatcttcttcctttttggcttttccatttttggtttgtttttaagggtcttcaaggtttgtgccctcagctataaagtctaccaatgcttgtcctttgatcgctgtccttggttgataagtgatataaaatttcctagctccactgcacattagagtaatcaactagatgtttctggtttttggaggacttgcagtaacacttgatcagttaggacttggattgagtgagactagaagtatgaactcaactttagagattcggtgactaaatagtaggctattttttcaagaggaggatacctcgactccgtacctactagccttttactgatatagtatatagggtgcttaacattgtcattctctttcactaaagcatcgctaatagcatattcagtcactaccaagtagatgaataagacctacaaatcttcctcccactcttcggtccattggttgttcttcttgctacctcttagtagattaaagaaggggacacacttgtatgtcgactttgatatgaatttacttaaagcaaccatcatccccattaagatttgtacttatttgatcatggtgggtgacttcacgttgatcaatgctttgatcttcttagagttagccttgattactcacgagttgactattaatctatgaaacttaccagaaccaactccaaaaaaaaaatacttgagaggatttaacttcatgcgatactttatgagtactacaaagcattcctccaagtcttgaatgtgtcctccagcttctttggacttgaccaatacatcatcggcagatacctccatattttttccaatcaagtcttagaacatgcaattcactaaatactggtaggtggctcctgtgttcttcaagacaaatggcatcaccttataacaatataatctcatgtatgcttgaaagctggtatgctcctcttcgggagggtgcatacttatctaattgtacccagagtaggcatccatgaatgtgagcacttcgtggcccatagtagcatcaactagtaggtatatcctaggtagcaaaaaataatttttaggacatgccttgtttagatttgtgaattccacacatgccattcacttcccatttggctttggaaccaaaacggggttcgatacccaaaaacctcccttataaaaccatttcttttgagttaattgacctccttcttcaaggcttgagatcggtctcggtcaagaattctccttttttgttgtactagtggataattcttgtcaatatttaagacatggcttatgacggatgaagaaattccaaccttatctttctatgaccaagcaaagatgtcctagtttttcttacagaatttcatgagttgtgccttaatttccctatttaattctttcccaactttgattactcttgttgggtcttctttatctaatatgacttcatcgagatcttcgattggtcctaccctcgatatatgctcagaattcttaccagatgctcatgtcttggatctatattttgagtgttttcctggccataagagaaactctatttcatcctttatctgattgcacttgtttgtgtcatgtccatgatcattatgaaattaacaactttttcttgtctatctttctcttagagtgaatgggtggtggcttttggtatggtacttcctggtatgtagccaagtaaattttagcactatttattgttagaatggtctaattagtgaatctttgttagtaaggttggtgtttaggctatgttgacttggctttcatcttgccgttttgctccaatattgaggcattcctcttctttccattgcccccattatcttgaggtttgaagtactcctgcttgctttagtggtggtcgggtgatttatgcccttttcttctttcatgatagcatcatctagcttcatgtatttatctgccaagtctaagaactcttgtaggttgttgatgggattcttatggatgttgtgccataaaggacttcgatatacaatccttgttgaaatggctacaaacttcccttcatctcctttcgtagatgcttggtttgcttcccttatgaacctttcgatgtagtcctttataaattcatccttcccttgtttgatatctgctagctgattggcataaactggttggatccgttccgcactaaagactttgcaaaactcctttctaaactgctcccatgaagtgattgatgcttgtttgaacttccaataccactcatgtgctgagtctaagagggtggtaggaaatatatattcatggtcaactatgagtaattccatctgatcttaaaattttccaatgtattgtacattgtcttccttcccattatataatggaagtttttgggacttgtattttggtggtgttgtgcagcttggatactaatgctaaaagggcttccactcctatgtgccaactctatgtaaaaaggtttctttgtctagccttggactactatggtaagtgcatctatctaagcttgtacctctggtgggatcactgccccaagtgaggtagaggtctcgagtgtatctccttgagtgctagtccttcggttaatgaattctcttaggtccttgggtcctgcgttgttcccaagcctatcaaacacattgttagtattattcattggttcctatcccttctgatggtgcagtggcgatagatcattagggtactccttccttcaggcttctctccctacgtgactttgaaattttgtctgaccattcccgtcacgtctctcaaaaatctatccatcctccccatgccattgtttccatttttatgggaaggtgccttaatagcaatattacgtcggggtgtagtgttactcttcctgggtgtagaggaagttgtcttggattacacctcctcatcttgcctctgggaagtggctcagagagagttttagggcttcaaatcctcccctaggactcactgtaactttgtgttgtcctagtttgggcctcctgccttacttaagcagtagcttgtgctttatctcaggctagctgggtggcccttttagggccacagtcgcctcttggtgtcttcagtcagcctcctactctcgttgaggcattccccagacttgctcatcattctctcacatttgttcctccatgggcgcccttcgaagggcaattttgataggaaaggcctcatgccttgccagaaatttccccatctcctcttggtgaacgtaatgtggattctctaattttgtacggtcatcaacatccaactgaggttcgttcatgggatcaacacgatcatcggcggttgaatcctttgaagtagtcttcctcgtttaatcaggttttggaggtcttgttaaactagtgaaatgtgtttattgacttcatactcttaataaaagcaacaaaatattgacctgtgaaattggccaacagtcatatgtataaaatacgacaccttttgaacaataattaataaacagaaaagagtactaagtaataattataaaaaacacagaattatagtggttcgaccttgaccagaagtacagtaacaacctaccccacttaaaatttcttattgaaacaattaagttagcctaagtaatcttggttaccacagtgctaaggtcactgtaaaagtatttaatacaagagtcagagaataaaagttatttcttttatataaaaatctcgatcctcttaaatgaagtgatgggtccttgatttatagtacctaggaaccgttacaagtttcaacgataaagaatcgtggcccactatcttttgtggtggatgtgtgtgtcaagtccttttcgattaggagatcacgggtaaaactgttgtcatctctagatcgtgggatcttatgatcatggttgatgtttcatgatcgattgcttcataaaaagatgctaagagtatttatatagtgtgtgattataggtcatgcaccttaggccctaggtgggttacctataatatctcaatgctaggacctgttttctcttcaaagtgcatatagatttccggagtgttttccccagcttacacgagcgtgaatccacatccattggagtaatgagtgttgagtcttggggacatccagactgcctcctttaaccactttggtcatagggccaagcacctaaggcataaggccaactgcttgagatatagggccaaccgcttggggcataagtccaaacaccatagggccaagcacttagagcatagggccaatcacctagggtatagggccaaccaagtaagtccacttctaccttccaatttgtttttctttctgatttgtaaggccaactccaatgggcctgcaaaaacttaattatagtgtaatattacaccaaaagaaatccaaccgcacgacatttgtataatcatttttgggtttgtctacagtgtcccattatatttaggtgggcactgtagacaacactaatttttgtttttaataattatataatacttaaaaaaaactaaataattataaataaatattaatcaaa

SEQ ID NO: 161814 - DNA, 6969 bp, Cannabis sativa
  modified_base (6929)..(6936): a, c, t, g, unknown or other
cgaactggtcgggatgataaccagccacacttctgttatggatctttctacaaagatgtctgcgaatctgacttttggatcaagatctagatcgaatagaccagacttgcggtctagaagaggcattccctctgaccatcagtcccgatttaatcctcgaagctcgaatcgacctcccaatatgaacaggcctctttgtcaagtttgtatgagttttggccatactgcaccaacctgtcattacaagttcgatcgtaattgggtgactccgaagcattcttcttccccttctcaagctcatctcattgagttgtctcaagaatatgaatctcaggcctttgttactcaatcagttcttgattttggtgatgatgttgggtggtatgtggatactggtgccacgaatcatcttgctttcagtcatgccaaccttgatttaactactccatacaatggtcaagaaactcttgctgttggcaatggtaagaagctttttatctctcatcttggtcatgccaccattccttctaattccactaaatctttagaactaaaaactgttttgcaagtgccctcaattacaaaaaacttcattagtgtttctaagttgattgaaaataataatgttttcttgaaatttcacatcttgctgctttggtaaggacaagcaaacaggtgctgttctgatcacagggaagaataaagatggtctgtatcttctaggtgatggtagctcgaatatctctccaacatttctggattgcaatcttgtcacttctagtgctatgtctcaattcaaaaatgattgtaattctcattgtacttgcactgctactgcaatgtcaaataaataaagcttcttttcctgttcttgaatcacctagtgttcatttatctatagcttcttgtgatataaatttgtggcatatcaaattgggtcatcctgcacctactatattgattaagatgttgtctcgtgccaatattcctcattcacttaaaaatctcagcttttgtactgcttgtcaacttggtaaaagccataaacttccttactctttgtcctctagtagagcttcacaacctctagaacatattcatagcgacttatggggtccttcccatgtcgcgtctaaagataattacaaatactatattgtatttgttgatgattatagtcagttttcttggatatttcctcataaagtcaagtctcaagcgtttgaattatttgttcaattcaaaagcttcgttgacaaataatttaatcttcccataaaagatgtccaagctgatggtagtggtgggtatagactaccatttgagagatttttaagtgatcaaggctttaaaaaccaaaagccttgtccccattcccatgagcaaaatgaaagggtggaacgtaaacatcgacatataacagagactggtttaactttgcttgccaaattaggtttagatatgtcatgttggtggtatgctttccacacagcagcttactctattaatcggatgcctactgctatcaatggcaacattagtccttttgactgcttatttggacagcaaccagattatactatcatgaaaccttttgagtgttcttgttttcctcacttgcgcccttataatcatcataagatagaattcaagttagaagaatgcatttttctaggatactcttctaagcacaaaggttacttgtgtgggaatgctgcaagtcaagtttttatagctcgaaatgtgatttttaatgagtcacattatccagcttctatctcttcatcaacatctgcctctcaagtaccttcttttctggattcttgtcccactgcttcatttcatactagtccagtatatttcaatactaatataccttctgcatcttctcctaatgatggtatccccgagtctcactctcgtgttgctgctgttgacatgactattgttgttcgctcaaatgttgctgatgttgaatgttgttgatgcctcttcctctaagtcagttcctggtctcaggcagttcatcttgaagctcctaccttgcattctagtcaggacaattcaccaagttcatcagcaacatccgttcatgagttagcaactcttggtggtcaagaggtttctttttcttctgcatctaagtcagcttcacctgcctcctctgaacaagctacaactcagagaatacatcctatgcgcactagagctcaaaatgggattcataaaccaaaggcgtatcttgccatgaagcataaacttcctgaatctctgttgccaactgagcctaaatccacagttgttgctcttaaggatcctgcttggaatgctactacgagtcatgaatttcgtgctttaattgctaatcatacctaaacatcagtctcttatgagcctcatatgcagctcatcagcaacaaaagggttcatcgagtgaaattaatgctaacggacctgttgatggttttaaatttcgacttgtggcacgaggatatctgcagcagccaggtatcgattatgaagatactttcagccctgtagttaaaccaatcactgtttgaatggtcttaactcttgttgtatcttccaactaggaagttagataactggatgtctctaatgcttttctgaatggcaattcacaagagaccatttatatgactcaacctcaaggttgtgaagatccatctaaacctaatcatgtttgtcattttcacaaagctttatatggcctcgaacaagctcctcgagcttggaatgacaagttaaagcaaactttgttgagttgggatttcaccacttctaaggctaatacttcgttgtttatttttgggactactgtgactatggtcattctactaatttatgtagatgacattctcataactggaccaaattctcagttgatttgcaagcttattgctgacttgaacaactttcttgccttaaaagatttgggacaggttcattattttcttggtgtagagatttatatagactcgaatggcatgtatctttcccaaagcaagtatattactaatttacgtgtcaaagttcatttggaaggagccaaaagctgttctagtcctactagtagtgctcacaaactttcacttactgaagggtctccttttgaagacaaaactctctatcgaagtaccttaggagccttgcaatatttgactctcactaggccagatatggctttcattatcaataaactttctcaatttattcatgcccccacttttgtccattgggaagcatgtaaacgcttgttgagatatctgaaaggtactataactaaaggacttcttctcaaacttgcttctcgaatgtcaattgtaacttattcggatgccgattgggccaattgtattgatgacaggcattctactggtggctttccggtcttttttggtctaaatctcatttcgtggtctgctaagaagcagcaagttgttgctcactcttctaccgaatcagaatttcgatccttagccaataccgctgctgaaatcatgtggttacgatccttgttttctgaactgcaagtcactcttgttgatgttcccatagtttgggtcgataattaaggggtagctgccatagccgcaaaccttttctttcatgctcagtgtaagcacatcgagatcgatcaacactttgttcgtgaacagattctgaataatacactttcagttcgttttgtgccatcagttgaccaagtggtcgatattctaactaaatgcttgcctaaagatccaatttgtatctcaaaaccaaactcaaagttgtaaataccccttttcgtttgaggggggatggcttgattctggttaggaagttagtttaggttgctagtgtcgttgttatcttaggccaactgtaatgaattctgttataataaaaatgtatataaaaaaaattcttgctcattaatcacaccatgatttttttttgaaaaaagagaaaggatcctcttgtcttagacaggaccctccccaatatgaattgaaaagcctcatttgtggcggaggaaaaccatagttacaatcacaccatgatttcaagtgtggctaactgggtttctctctgtggttgttttgtttcaatgaagaagaagaattcacctgtatagccgtgagtgaactatttgtgacccaatagacaagacttccctgcaaaacaatggtaaaattgtgaggcctaactttgtcagagcatgccacttcacatatgcaagcaataccaagaaacaaatacaatacattgtttaccccttttatattttactgatgatagtctatgttataattacgtgggcttagttagacagccttcagtccacaacaaatgatctaaatatttgctagttttccgaaataaataggagagactgaactatgtcttaaaatgagcaatgctgtcaaaactataacatcttagaagattccaaaggtggtttggttgccagggaaagaccaacagagaagatgcgtagaaagttgaaagttgtggcgaaaattggttgatcttctgtctcactattccccttactttaaagctaactgctacattttgtaatgccttgaaatgtacaattatgtaatctgatattacaaaacctaagttcaatagtaataataataacaaataacgaaatcacagcaataaatatcaagttacctgaggaacaaaataacagcttaagagtataggtagtgtcaagaaatccaagtagtgcttgtagtactgcacaaggttaaaagctcaaatcatcttcacaaactaaaatacttttaacagttaacaaaaatcgatggaaatataactactaagagaaaatatagaactaatgagatacatgccactaaggagaaaaagaatagttgtcgtctaaaatatatacaagacttatgtagttgagaatacttacttttactaataagtcaagcaggctggtgacctttttaattgcagattttctgaaggaaatctgaaaagttgaataacaagatatcaggctaccctctttcaaattagcttacagtaacatggtaaagtatgctgacaggctcatagtaaaaatatctttatctaactatctgccatttagagagattttttttaagtatcttttgtttgcttgtagactagttatcttacatcaacatataactaagacaaagtaattagaactgtagttatcagctgtaattggtaaccaactgaatacctgaacattggtatagtgcaaaccagcaattactacagggaatatggagcctgaaatcccatgagaaaattcagtcaaattctggaaccaaaatgcacccccctgacatgaacaccgtagaaaatttaatttaacaaatccatgaatgctatataaatatgcaacatatggttataaaatttagagatttcctgtatgacggtggacacaaaagatgcaatcaactgaaatcagccaaagccattaaaatgaaaagaagaaaaaaaaaagccttaaagatacacatgaatgatgactgagaagaagaaatcaataatgatagtcaatcaaatacgaagaaaatatatcagaccaatcaaaagaaactttcacatagctccatgcttttcacctaaaataagttaaaacatttgtgctagttctggctatacaaccttgtaaacaattgtatcaacaattgatcaaattatgcttgtctagtagtaaaacttcagagacttacacaatcgaacccagggtgatggtccagcgacattcttcgtacagtagtcatccacaagaagaagcatggcacctgcatatattttgaataacaatgaataaataaatttacaaatagaacttacatagacaaacattactcctctcctacactttaagaaaatatttacctggacacagacgtatggaaggaaccataaaaatgagggacagccaatggctttcttttccttcatgaagtgtgaaagatgatcaatataaccttttcctgataaaggctctggaaatggggatggcactatgcagataataagaaccaaaggaagttaatttatgatatacatgatacctaaactaatggtgacataattgagtgagtaatgaacaaattgaagtgaagatacaaaaaacacttacatttactaaacaattctccaattcgtttcaacttatgaagctgaaatataagcaaagggaacagaacagctctgagagccaatgtggaggaagcaataactacccacctataattgaatacacataacaaaagcaaccaatatagatgaacacactcatattcaaagcaataggtagataagcaaaaaaatcaaaatatagtaaaaagaaaaaacaatgtgtggaaactcaccatggcaagccactaaattcatgaaatccatccagcattgagcttactagacgaactggaagcattgactcttcacagctaattgataaagcttcatccataacattggattctgcaatcaactcgggcgagacagtgatcgagtggtggctatcaacagctcgagcttctccaaacaccgaatcatcttcagactgagtggtaatagctcgagagttgagcaacaacgagtacggattttttaacgggaggttgggtttgccgaggtgggaagaaaacggaagagcataagagacggagctagaattagagttaagaatgttgagaaggtggtaatcacgcttgtgagagagatagttagcttgaatagatcggcggaggcggttgagaatcttgtagctcgccattaacggccagaactccgactatttcacgcttaaaccattgatagaaatgagacgacgtcgtattgctgaatcatgtaataccaccattttttttcagaataatacccgaaattttattttattttatttattnnnnnnnnttttttttgaagaaaagcgtgattatattgcta

SEQ ID NO: 161815 - DNA, 16219 bp, Cannabis sativa
aaaaaaaaaaattgaacaatcaagttatcaaaattagttgctgtttaatttgttattcatcttaaaatttggttgacttagtttagaagctttatccaattagtttacgacccatgttgtcaagttgtttctcttttatgaactcctattttataggactaagctataagcggcttaagctataagcggcttaagctataatctcttgttattcgtttgtttctcagaggagttgattcaacaatgtttttgtgtttccttccctaaccagtcctcactgactttactcgttgtaatcttagttttgttcctcttatcatttgttttattatttattctccttttaacgatataatttggaaaatttgtatgtattaaagaaaacatactctgttaaaaaaaatactaatctatatactaaaatttatcaatttgcaccagacactatactaagcttcaagtgactggaaactacatgccatgagcataaagcaaaaaatatatgcacacaaaaggagccaaaaaaaaatattatcacagtaaaaaagctccaaacttacttgcattttgggtgttgatcgcagccaataaagtagccggctccgaaccgactgactttaaaaaccagtgtgccctcaaaacagctaaggaacaaaccatgaaatagaataattaaaatgtaataaataaataagcatcacattaggcagcatagacattctccattaaagaggaataatagaaatcatacacaatgcgaagaaggaaaaataaaagcagaagttatgaaatgcatgtcagaaatattaaatagaggacaataaacacaatacattttgctattacttaatcatcaatttccaggctcatgtttttagagcaccagtcaataacacatcaaaacgtattcagtcctcattccctaaaattcatcgattgtatacacttcagtttttgcacctcatcccttacaaagaaaagtctttactcatcaaaacacatgcaaactagtgaaaattgtaagtgagcatgtgaagggtatttgtatcagttaatagtagctgccagttgctacatccagagtccttagagcaagataaagcaagttataattattttctacaagtaagattgcaatagaatttacagtacagccataccttggacatgtcctgctactgtcgggtaaagaagcaaacaaggaatccccaaattttttctccaacatcttctccacctgaaaaatcaaaccagtaatgtaacgtaggaaatcataagaaaatacacttatagtagcgattacgaagaaaaaaaaatttacctgatggatgtgaacattggatgtgctttcacaataagagctaaatcgtgtccaatagtctcccaagagacctttccattcagttaaaccagcagaaacattatcaagctgaagcaaaggagaaagaatgaatatgaataaccacataagataaataattattctgctgtcttgttttttctttaagataactatttatagtaacaataacaacaaaaacagcagtaactataataagtaatattataacaattgcagaatagtgattggtgacgttatgcagaaagatcgtcatcatgaagccaaaagtagtctgtgaaaatttccaagtcaacgtaatctaataacaggataagtacctcagtctccatatcagcagtaaaactgtagtcggtaacctcagaaaaatggtgactgagaaacgcagaaacctaaaaataataatatagtataccagacaaaatgaaaaaaaaaaaaaaaacaatgaggcaacatatcaaagtgaaagcagaaaagacaaataaaaaacccaaccactttttgttatatattgaaaataacaatgctatgagattacttggtttctcaaataaatcgacaccttgtgtatcatatcactaagaaaatattgtccaaaagcatatcatagttcttgatttcactcagaagatgattgatagaagagtagattcccagtagataataataataatgatgatgatgatgatgcaaaacataccatgcgaccacgaaattctgggtgtagaacacggcttttcactgtcacataattcctatcctggtatcatcattaaataagaagtcaaaattccgcctcatgaaaagaataggattatttacaacaagttaatcaaagctaagattagttgtagtgataggccaaatggggcccctagatatgtgtgtgtgtgtgtcagaacaattcacaagccctgtccatgaagacatagtttacttcattaagtggtgttgggcaccaaggtgccaaaagctatgctcgttcaagaaaaaccttcattataggattgagcttggactcctcaataagacaaaattaaacaagggctcactgttaaaccaagctccatccatgattccaaaataaatgcagaacaacacatgaaacttatattaacatgagagagcctaaaagtttcaattgtttgaagctcatcattacctgtaaaactttcaatgtagatgcataggttgaaggccttcctatcccaagctcctccattttcttaacctggaaaggacagcaaaagaagttgcgatgaattgcacagtaaaaggaaggatgtttctgctctgttaattatttggtgtagcttcctatttcccaaatatatagccaacatctataatatagtaaaatgaaaaatcacaaattcctaccaatgacccctcagagtaccgcaaaggaggctgggtatgatgctgcttgagttccacttcacgcaaatataatgggtctccagactaccgaaaaaaaaaatgagaaggttcagcaaatttatgcaagatgaccacttcaaaccatgtgcattgaaactatattaactgagcacaattgaggtctgagacttattttagaatccaaatggtagtcttccttgctaataacatctaaatattttatagctgataaaattaaacaattaacatcattgccataaaaataaaagggggaattgcagattgcctagacctggcatatgtgcacactcggggaaaaggaaaacggaaacaagacacaaactaagaaaaagtaactttgtcttgttaccttcaatgaatcaagagttgcaaacatttcattgcgatcaattccttcattttctttatatctgacttccgcagcttccatgtcctaaaataaaacagatccagaaattacaaaatcggggataagtgcaaaacactagcaacacatgcaatttgaaagacaataaaaaagaggaggggtggaacataaaactaaaaaagaggcagatgtccctcctagatcccaactatggaattgcacaattgaaaaaaaattacctcattttgggaagtgtagaactttacaattaatcttctcaaactacccataaaaaataatttcccaaaaccaaaaacaagatttttagagcatagcaatatttgaaattacatggacagacagaagtgccaagatgtacttacaaggtttgttcctagaagaaaaaaataagaaatatgtacttaggagaaagaaaatgggggcaaaggtatgaaattgaaaacatcaagattcataccacaacttagacctaaagaaatcatgttttcaataaaatcatctcgcttttttcttcatttatttaaataaacttaaagctttctcattcatctaaataccacaaacatacaatttttttggatttttaaggattattgcatagtaactcaggtggattcaaccgtaatgatatagctcagcatgtctcatgtagaagatgtatgtgtcttgtgtagaggttgcggacaaactcccaaaataaaattcgcacacttagtctgttgtttttaaaacgaatgaggcagtcaagggaggtgtcaaggcatagacttctcaaaatttattttggtcaggatagaacaaaataatgaagttagttaacagccattcacaatctgtgtcgtttttaaaatgcacatgccccaaagtagtcctctgggtcaatgccttgacacacctcggctgcacaaaacaagctaaaaaggctctaagcaaccttttaaaaatgaaagattatgtgtcctaataggggaaaattagttttagcagacaatcttaaaaattataggcaaaatatgccctcattaaattattttgacaaagttgcctctcccattcaaacaccctacatctctctctcatttctcacttctctaaacatccattgtttggcagccaccctcacaacggaagcacccacgatattttttaatgttttaatcattaacaatccaatacaaaacttcagccaaataaaataatcacacatgacaagacactaatttaaagattttgaagaaatctgaacaaaatttgtggttttgtacacttattttttcttccaattctgcaaattttaaacaaacgatgctcccacgatggtcctttgaaaacataattttgaggccacaaacgatgctccagcaatgttcctttggaaacttgatgtttgaggcaaaaaacaattatacagcaatggactcttgaaaacttgattttggatgcaaaaaaatactccagcgatgctacaacgacacacattgaaaatttttgagaccaaaaccaatgcccagcaatggttccttgcaaatttgattaatttttaggccaaaaactccagcaatgtttccataaaaaaaacttgatttttgagatcaaaacgatgcagtgagcatcgcaggtgcatcgtttctacctcaaaaaccaagtttttaagactcttgttgtagcatagctggagcatcatttttggttaaataaaaaatcaaaggaccattgttgtagcatcgatggcgcatcattttttttactacaaaaatatcaagggattatcgctgaaccatcataagagcatcgccgaagcattgtgcctcaaaatatcgtttggcgtcatcattagtcattactgagaaacgcaaacaaaaaaaaatatcttgtacagaattgttcaaaatccaaattagcgtcttaagtcaatattttattggttgcaagttttggattagattataattattaacattaccaaaacaataaaaacagaataatgatttggatacactcaaattacacacactttctacacacaatgttgtgtaattaatgttaaccataaaattaaaaatgatataaaatataaatagctaatatttaatacacatcattgtgtataattagtgtgtaatttgaatgtgttgtagcattactcacaaaaatattgtaggcgcttccatggtggtggtaagtagcagtgttgttagggtggatcgaatttgtgagggtaattgagaaacaatggatgtttaaagagagagggtgtttgaatgggagaagcaactttgtccaaaattgtaaggattaaggaatgcatatttttcctataatttttaaggctggcgtcctattagaatgcataatccctcaagttttccaaaattattcatgactatggagaaaggttgtatgcgactcttcaatataactagttttcttataaatgagaattgaaaagtcaaatagaatatgcaaggtgatttagatcatttttctaaaacacaacacagagcagtgcagtatacaatagtaatttggaagaacaaaaatgtactcaaaagacaaagtgacgagcatgattacatctggtaacgacatagaggcacatgtaaaacaagcaaagagaagaaaatgggtggtaccttgaaagctgcttgatatccaaggaactcaacccttgagcttgtggatcggaaaataatgaactcatcggcatttccaatatcaagttgtatctggttgaattaaataaatatatcagcatgcagatcataaatttttccatgcaccaccttaacaggaggaactttttgagtacacaaaaaaagtatagttgtctacaaaaagataaaattgccacccttcaggcatcctctaaatagaatagctatgttttactttcgacctacaataatagtaaggaaattcttatgccaacctgcttaatggtagcaggttccatttgacatgccattgtgcgggaccagataagagtatacaacttcaaggaatcttcgtcaagtgttccttgaagtgttgctacaggtggatatcaaacaatttacgattaatagtcatataaagatcaaaaagatattgataacaaattcagaataaaaacaagagactcaaggaaaggaaaatgttcaggaataaagaaaacatatagcaagcatcatataatacacaaaatatatatacttacatggcaatcttgaaatatcagtgggtctaatagcttcatgagcctcttgagcattcttcactttcttaaaatatttctgagcacctacagatgcaaaacctttcccatacctgcagaaaatgaccttattaactaataaaataaaagatatagctagttcaacagtagcaaatcacataatctgcatttcaataaacattaaggtgcacaaatgacaggcatacaagtaaacaattcttgaaagagaagaaactagtaagcatctgtctgtctttagaaataatgggcttctattgtcaaacctcatatgacttcatatgaattcacttatattaaatattcatctatcccaatcccctccctatatctggctgtctttaaaattaagacgagaacctctattagtaccacaaaatttctccagccagctaccaacgccatcctcacatgaatagatataagttctcttaacttcaaatgcatccaacctaacttttgctgacatatatagaattttatttaataatgtaaaacatgatttgtactaaaactgaaaatagaagggcaataagtagcacaaaactaggtcttaacttcagcagaagcagtacttctatcaaaccataacttaaataatatttaaaaatggatatttctttgtatcacctttcagttaccaatgagcgtatgtccttgacagcttcgtcagaaatctaaaatacatagcaaaaagtattagaaaaaaaatagtatcaccactataaaacattacatgtaaacatcaatgcaagaaaatattcctgtacaaagtcatacatacatgtagtccatctgtccgagtatatgttatcaaacctgttgctttgccatcagacaactgaaccccctcataaagtttctgtgcaagctgcattgacaattagtaaattctattagcaaaacacatacataaaggttgtcaaaaaataaccactgacagtcatctgcttactgcaccaaatggaaaaaatgttaaagcaatcggaaaaccaatttaacaggcatagtggaaagatatacaaagacaaattaataacataaactccccaaaccttcatagtatgtgttgatgaaaaatgcaatttattagcagcatcctgctgaagcgttgatgttatgtatggtgttggagggtttttccgtatttgatttactttatgcctgaccaccttgagattaactgaattgatcttattttcaatctcttttgcctctgtgtgagagctaatagatagctgattcaactttttggagtcataattagtcaagtgtgctgggaaggaaacaacattgtccaccgaattcaattcattcttgctcaattcaatcttaacagtccaatattcctgtggtttaaactggtctatttccatttctctgtcacatatgagacccaaagctgcagattggactcgcccggcagactggcaacctggtaatttccgccataataatggtgaaatattaaatccaattagataatcaagagcccgccgtgcaaggtaggcatgaaccaagtttacatcaatttcccttggagacaacagtgctttttttatggatggctcagttatttcatgaaaaacaactcgtgatactgtaatatcttcacgtaaggcatcctgttgttgcaacatctcaaatatgtgccaagcaatagcctctccttctcggtcaggatctgatgcaagaataagattttctgctctgatgagaaaggcaaagaaagaagaatgagaatattcagaaacatttcattaaaattgatcagagaaataaaagtacattgaagaaaaaaaaaatgttggtcaactgtcagtatatagtagtttttcttaaaattaccaaaagagaagttaattgtcccacattagttagaacacatcccaaagttttggatgatctttttctgtgagtattggttttattcccatttaccatttaaggagagtagaattacttagttttagcatgatcagcaacccattgacgaattcaacaaaaagacaatattttccacaactaaaatgagccgaatttctaaaaggtctccattataccacaaacataacatcttaactgtcacttaggttgattaatctcacaaaaagatgaaaatcatacccacttagcgcaacctttatgctcttaagatgagtccaggcagcagaaggtacttcccacaccatactaaattcatcatcaggtctaacagatcccgacctagcagccaaatctcggacatgaccataactgggcagaacttcaaacatatcgcctagatatccctgaatgacctttgcctttgtaacagactccaccactacgacagattttccagttggggggtacaactgcttcaggttcatttgtccctgaggttttattggccccacctgttgtgctttttgtttctgttgcaaactattagctgctttcacagtttttccctttctactggacttcccacttttcttatcagatgatggttttgttgaagaactcctgaccacttcctcaggtcttttcttattttccttcaactgaaaaactggtgttagttgaataatattataaagagaaagcactaatgtttttttttttctctgtaatcagtatttgctcacctttgaagcctgatcgtggccagtcttgctcttacctgatttcattgctcgagaagtacctttggctccttctgcagtatcaactttaatcaatgtatccccagtttgttctgtattttttttggttctcgacttcttctttccactgactttagaggcctcaatactattgctgatgggtgagcttgaatcagacaatcccgggtttatattatcctttttgccaccaactagcacttcacttgaagcctctacgttaatatctttggaggtactagaaccgactacactgtttttgcgtttagcagccaatgccagtgcccgattcctgtgtttattattaaccccttgtaacccaaaagtacttccaccactttttccatcttgtttacccacattgtcaagtttacttgtcatggttttgacttgggaaaaaaatctcttggtaaaagttccataagtaggtatgcttgaattaatacctttataaaaggatgcattactaaaattattgacaagtccaaaagaacttaggaagccaagtcctaaccgagagtttgaggtaagagcacaatgggatccatctccacaacttctgataagatgaaaattttgtccgattttcgcctgattggtcgagattatgctagacaatttgacttttttaaacctaatcagagaagattttctacctctgtcacttgtcccaaaagatgaacatggtaaacaagtaaccgggtatttacatattgcattgcactggagctgaaacaccaatacatccaacaacatcaaaaaaatattgtatactataaactaaactcagaaacaaaacagagtaaatcaagatattgaatttaaaagtaaaatccaagaaacaaacaaatgagaatatataactaacaaaaatagctcataatgatttaagacttcattgtttttaacatgaaacaatttttcttacggctaaattaacctacctagtatattattggtaaacacaaaagcaaaaagataaaagactcaaaattgatgtaaagttcctcattagagaagtgttacgacagcagccgaaaaaaaaattgttatagctaagtattgaagagaagaagtttaatataataatgaaaaccataataaatttaagaaagcaggaagaagataatgaaatggagattaagaaccttagccatgagagggcggagttgcagagctgatgaagtagaagggttcgagaaagaagcagaaactgtggttgtggttgtggttgaggtggccgaacacaaacccctctgaagctgaatcatagccattaaagtttcatggttttgatttaagatataaatttgtgatgatatatgtatacagttgagtatctagaaagagatggaactataactggagctggagctggagatggaaatggagaagagagagtagggtagggtagggtggctctgtatggcaagggtttttccttctggaagaaagggttttggatgtgttgtaaacacattttcttcattattttttattttatttttatttttatttttattttaattgattattatttttagttgtaaaaaaagaacagttccattttttcattttcaattttatactgtacctcctaaatcttgtctctccacttatctcaaaaaaaataaaataaaataaaataaaatttctctcactcaacttcttcatattcttatcctatttatttctaacaatttcactatgaatctataaagaatataaaatatatttatttttttatctttttattttaataaattttataataattaataaatagtgacattatagtaaatattaaagtaaaatttactgtgtattaaatttaatacaatttttagcatgagtcatatattttttagaacactattttaaaaaaataaaatataaatatatatgctaaaatatacttgtttacttaattttttggaaaccaattaaaaaatagattaagcttaaagaaaataattaaagataaggaagacaatgcattttacgtgattggatcgttaatgagtcttagtctacaaatcaatattattgagctctttggtatgaagtattttacataaaagtgttctagccaaatttttaatcagtgtttacaaccaaaaattataaccccttgcatgaagggtgaatgcctatttataggctagagttgggttttcgagtgaacatagactcgttagagtttgcatgttgaataagctcactgatggggtaataatattataatattgacattgggtcgggtaagtgaggcccaaattagagggttttccgttgttcgtacgggttcgtacagtctgatgttgacaggtggccatgcgccaccgatcgtgtacaataaatgtcagagtagtggatgctggacaaaaggtgttttgcttttttgctgtgtgcctttctcaagtctgacacaggggacaaacccctaattttgttagatttagtgtcagaggggtgccacataggactgttcccagacactttcttgctcctggatgcctcttcgactactcttctgagattaccctcgactgtgtttctttgagtcttcacttctctaagcgaaagtcatccttccaggaccaaaaggtctgggttcgtcgatgtagggttacagttgaacccgaagctttaatttgactctatttgtgggctgacccattagttggtttgggcttggtgaatgaacccgtgagttgatttaggactctaaaagcacatgtgtcacctatctagaaactcgaataatatttacctcataagccttgggttaggagtcgtaaaggcttgcaaccactatctagattcgttgcggtatgcggggccatgagttgttcaggccctttaaaatttcaaggtggaaggacgtaaaagtttgtggacctttcatattctacgagtggagtacaagtgtcattggttccttggttcgtgtgtaccacatgatttgtgggagcgcgtgaggtatcaggttgtaaactgacgactggttatgtcatcgagattttttaggtgaatgtcatcattattgcaccttaattatatactctgcatttaatggcaacttttggtattcctggattgttggatcttgaggattgcattttctcatatttgatctaggtcattggatcaaaagtatgcagatcaccactttgcatataaatgagagagaggatagcccgtcaccatttttagccatttcaattttttcacccatatttcagagagagaaaaccaaactaagatcccaacaaaattggtgtatgtctgatatcgatacagagcttcacaaccgtcttctctaactctagtcaagacttttcccgagcatgaccacattctcagagacaagtctcccctctatgttgttatcatcagacttccaggcaaacaccgacgaattgatagagcattttaaaggctttcaggcaaggcttcatcttgcaacccagaactcgacacctcagtcccgactttgacacgtaagtacctttgtcttgtgcttttaatgtagttatttgtggggtagataggttttgggtagtgtttataggttgtgatgtcatgcattttggggtttttatggattttatggtgataatttgttgcatgtttcgccttgtagggtggtttttatgttacttgtttgtcgaagaccttaagaatcgataagaacacttgaacttagaaactttgtcatgccttaggaaaattgatgctatgagaattttgtattttctgttttttgcactatttgtcgattttgtgaggtttgacaaggtctttgtatgtgttacaatgactggtttttcttgttcgggacccttatggtgtcgaacaatatggtcgtttagtccctttttgcttccttcttgtgttcccggtctatcgtacaggagcaaggttccttgagaaatttgctcctggatgtaaggttcgttagggacctctccaagtagttatcgagaaaggactatctcgtaccctttatatatgtcttattgtgggatactaactgcttggttttcttatcttttaactttcatgatggtcgatgaagatatgtttaccgagcaaatactaaatgatcaagacgcggaacaagttcccaacatggaggacttgacactagaggaaggcaatttgtcaccatgggaaattgatcacattcctaacaaatttcggaactatcacatgctgaaaagctttgagaaggaatgtggccttcagagcatccctttcctattctggaataggctttccttgaaggactggaaggcaaggtcattcatcgacgactttggcacttggagctggagccacgttacagttggagcccattgagggactatttcacccacttcatgactgcagtaggaataaccaatttccaactgatgtcgcaaagctacaagcttatgacaggatggtatattttctgcaaggagcgtgagattgaggttccttctccgaaagagatcctctacttctacaacttaaagtcaaatccaacgaagaaagatcgcacctgtaatatcccaaaaaatattataacattgaattgggtatattttattaactatgtgattatatttataatggggtaagattatgatcttacttaagttaattgtgtgataattagtgtaaatttaataaatgattaaacaaagcgtaatttattaattacgaaaattttattagattaagtgggtatagtagataccatttttaaaataaaatattttttgggttcggggactgtagaaactcgacggtgtggtcggaagtatcacgacaataaaaggtgaactgaattagaatcataccgaactactttagattttaagttgtcggtttggcgagattagctagaaaggaccgaaatgcccctaagccttaacttattaagtgattagaaaaatggcaaattagtcttttcttagatgggattttgtccttttgtgattaatgtgtgctgaaatagaagttaattttaggtttatactattttagttattagctagatagataaaagcttagtaacttagaaaaaaaatcaagaaagacctacacatttccttcttcctttctcttccttcgaaaccctaggaggcagcaggagtcaagcaaagttatcttcaattttaaccaattctaggttgagctaattaacctaagttgttgtacaagtttgaggcaaattcttctttatttcctgagtttggattaagtttaggctagggttctttggattttagggttgcgaagttagattgagtttaggatgtgtttttagatctaatttggggtttgtttgagtttatattgagtgaatttagtggttgtttgacttgaattggtttagatgaagtttaatgagtttgatttcacttgattatgctattttgctcaaatggatgaattgttatgaattggtactctgaatgcaatgtatttatggtattgaattattctgggaagtttaagcaggtttagaggcaatttggttggatttttagcgcaaaaccagagtttcccttttcctgtaggaaaaccagttaaccggtttcacaggtatagaaaccggtcaaccagttttgccagcaaggggaaaccctaattttggcttcaaaaccaattttgtttggggtgtttttcaaagcttaggttagggtattttagtgatgtttgagttagtttggatcaatggggagttaggtttgtctagttacaagaattagggttagttcctatatttttgactaagttatttattgagttttgttgtcgtgacataggacccgaaatcgtcgagctttgtttccattcaggtcggcgcacacctaattactagactgaggtaagaaaagctttaagcatcgttaagcatgttggtaagaaatgattattatcattggtgcctcgattatgattaaggtaatgattgttgttgttgtgactcaattatgatcgtgggatagatacggtcattactgttatgagtaattactcacttaaaactgcagataggtttcttacttatcgtttactttatgggcaacgatagtgacatatgtagctagtggataacgagtggtaggggtgctttatgaggcattgagattgtctcatcttataggcatttaattaattatgcattgctgattatgtgctgaataatgagtatgtttattatgtcatgttgtggttacttgcatttttacattaagtgtgatttgatagcttttcttgcagagtctccgcgactcacgagtgcttcgtggtgcaggtaaagggaagggtaaagcggatcaaccatgagtcagaggttttccagcagtgtacatatcaactgcggggcctcggctaccagtggacaggatccacccttttggctgtattttgaattataaccctttgatgtaatactaatgttgaaatagactgtaaaagctttacacaggggatccccatacttaacagtggttatattttataaaagttatgttttatctttaataaaaagtttttaatttcactgcacttttcttagattaataaattagattataaataaatttacaaaagcacacatgtggcgtccctaagagacaggacgttacagcaccaaggtggccttttatcttttgaagaagcactccaaagtgaaatgtttgactagctcgtggcgccatcctcccgatatgagggagtattgatttttcacttctagatttcctttaaggaggcatccaacacctacattagacttcaacgtagttggtaagtgtcatctttctgtctctctttaatcgtacttttatatttaatgtgatctaacccaaaaattcccttttatcttcaatttatagatgaaatccctcgtcccaaatagtcataattccttaaagagtgacatgcccattgttgacctcgaaaagtggccaaccgacaacgaggtcgtatgaatttgatatttgccacgtgttacacaattagaactcaaaagtaaacaacgtaaagaattttatagaggtttggcccccttaattagtgagtaatgacctactccccttttagttgtattgataccgagggataatactattcatatcactataggtggg

SEQ ID NO: 161816 - DNA, 6146 bp, Cannabis sativa
tgcacatatcagaaaatagattaattgtgttaaaattatcttttttcgaaaaataaattattattgttattattattaaaatatttatgagctccgtttgtccaagtaaaaataaataaattaaataaaatcactaatttccatggctgacaaaaaaagaatctgccaatctacacagttaaattgatcaaaattgaggaaagtaatcaaagaactaaaggaaccaatcatcataatgatgataatttagaattcactccttcctataggataaaaactcattagaaaggagtctaaaacttcttttgttttgacaacagagttaacattgttcatcaagaaagcaatccattttcacatctgtaacatcaagttgtaatatctctgcccgacaaccaagaattgatccaatgctgaaacacaaaacgaaaaggcagacagttttaccctttacataaaatattctcacaaacaatcagtttaaagatttcaattttaattgctgaaacaaaaaatacaaatcacgtctctagtttaaggtgataaaataaattctggtacctgggatgggtacgcccaagatccccgtgtacaaattccttaatatatgtgccagcctgtcactcaaagatattataaacatagtttaggctatacatttttaagaagaattccataggacttaaacttttgcctgcgtctttgtttatggcaagtgataaattagatttcaaattttaaacattgtaatcactaattttcgggtaatattttcttcacgtaagcaaaggcaaagtggcacctatagaatttaacatgtgaagaaacagagagggaaaatacaagaaagggggactacactaaaagttgtgtatagtaatatatggtaaattgaaattctctcctcgcttccatcttattcttattattgcactcagctgtaaaacaagaataaaaaatacctgggtgcatagatgcaaaagaaaatattgagaactcccaacaaccttctccattttcatcctataacaacatataaatagaagcaaaatctcataatatattacaagaagagatggataataaaatgaagttccactaaataattgaaaaggaactaaccaatgtattatcttttcacgttccagtggacttcggcgatgaagtaccctgattggggtcttttgcataaccttctgtgtggagcagaagaaaaatgaaagaatacgcgtgaatactaactctgtttggatcttgggaggaaaatgatttacaaaagactaggtacattcaacaaaataacacatgaaacttaataaaaatataccttcattcaagagaagtcttaactaggcagcaatatgaatttgaaatatcaaggttttatcagtcaatcatcaatatcaaaaaattctttagaaaaaaaggagaaagtgtactagtttcattaatttacaatataatgcaatgtgcaaaaatggaagaaccaagctagatgagagccaaaccagatgaagctaaataacttaccaactccttaaatgaacatacagactcaaagtcttcatccttgagtggtcgagaaatccacactaatgcaacatattgcttctgtattaacaataaaaatattgatgataagtatgaggtatccaggcgaaaaataataaaaatataggtaatgataataaataaataaataaaagcaccataaggtgaagttttgagaacctgcttctctgactctccctcacgcatcagagtccaaacttgactatctactgttttgagatttttcaccccaacctacattaacaatactctgatcaacaatgaatcaagtatagaaaaatgaagaacagctataaagtgaacttaccaatttactatcagaatgattaataagtttttctatggattttacatcctctacagatggtacatggcgtgcattttgaatctcaatcaggaaaggccgacctgaaccaagcatcctaacctgaaaagcactttcaaacatcagaactctttttacttcagaaattccattaaaaaaagaagtagacatacatcaatatcctctctgccagcagcatgaaacttgtagttatcgcctcggcacacaggaagaatcttgctaccaattaattcctgcagagaagcatagaccatcaagtttaactctgttcagcaatataacagagaaaacaaaaaaacaaaaaaaacaaagaacattgaaacatcatggcatttcgaagaagatatcacctcaacagaagcatcccccattctttcatcatcaatgatccaacgtgtttgactaacatttctagagtactgcaaacataatataaaatattagtcacattaacttccctccttccttcattgccccatttctttgtgatattttgttttccacgtaaaagtgataataatactaataatatagacatagaacggaaagattatgcataaaagtttcaattgcacagcaagtgaatagattaaaacaaagcacataattagttgattgactttgtttcatgacattactgaatcctctataggcaacactaaatatcatccaagataaaaatatatcaaacctttaggtatcttccaccaacatatataggaatcctgttgcagtggagcacaaattggcagggttcactgacctggtttgaaaactaaagcagaattagtatcatcacactgtataaagtcagtaaagaaaataagaaacacagcctaaaaagcatgaatcacatagatattgatgaacatatcctaaaagcaagttgctgattggagctaatattacaaaaggacaccaataaatcatgaggaatatgttcaaacattataaaaatagtagagtttaaaactcaatttctcatggggacctaccctactcaaacacatactagagtttcttatcttcctataatttaatttgtaggcctaaggaccaagtcaaaaaataaatgaattaaatagataatagtgctaagaaaaggttgaaaaattgttgtctatattaaaagaactcatttaaaattgtgttcagagaatcaaaaaccgttaaccttttcgagaaaaatgttgacgtgtttagaaattcgactatcttgagaggtctccaggattgctatttctgatgcaacattactagaatcagaacctttaacaccattatcaacagtttccaagccatcatgtgtgcttacaactgcaaaatcaaatgaaataaaaaaaggagattcacttgaacacaaagttggtattcaaatgaatttgaacataaatttctatacataaatatcttgggaatacgctagaaattagtttcaaccaaactagcatctcataaacacagttaactagaaaactcaaagtctgtcaatcatttggaaagcacttgaatttagcttggacctatctaaatttttatgcacataatcaggatgtagtggcagtacgaacctgttacattcaataacacatgcactgataataatcattaccagatttcggaaaatgcaaatgtgggcagtagcagaagtctctttccttctctaatgaaggaagttgacaagaaaacatgaataattgaaattggcaaaataacattattattttttacaaagagagacgataaggtcacttggtgtaaaaaaaaaaaaaaattaaactcttatggtttgcagataatttttttcaaattaaagtcattacaaaatattctccaacttaatgattcagtctcttaatgcaaatttgtagtcatatacagtacatatttgtacaacatgtgtacataaaatattttacttcatataaataattgatatagtcatgcttcagcatattattgaaaaaagttttaaaaaaatgtttaataatcattgtcatacctgtctttcttcttttgcagtcaacctggcttttctcaacaaaatccaaaatcgctgttgatgctttaagttgggtgtatgtcatacgaatacggagagtgctcatattggatttgcaatcctgaaaaacttcaaatttacaatacgtttgagttgaaactttaggaaattcattggacgttaataatataataattgctgtaaccttgcttggaagttacacccccacaccatatagctactaacacagtaacttacaagcagtttttcaagtggtttcattatggaagccttcaaagcatccttcacagaaatgcaatcagaaagtgatttcctttgaaaccatgactcagatccatatttttctttaatatataacctgataataattagacagagaaaaaagaatgacagatagctttataaacagaattaagagctaaataacataatttaaaaaataaagagtaaaaaaacaaagaaaaaatcatgttcgaaaaacactttcaatggatatttaaaaacatggtcatgtgccttgcaataaaagagcaagtagaatgcaacacaaaacaagtattaccatatacaacgatcattttcttggataactggtggaacagacacttcaagagaaaaaccatcagtttgacgataatcttgctttaccaattctgcaattgagccaacaaattcataagcactgtcctttctcactacaaactcattgccatcgcggtaagtgaactgcaagatgcccaaacaaagactacaaagcaactgattgattttaggtcccttggatataagagaactgttggagttttcattttcttcaacaccagattgaacatgttcctcagaacctgatagatttccaaaaactgaactgaaaaccgaagatgacaacgaattacagtcatacagatcctctctaattccaaataacctcaaaatgcattggctgcataccttcatcagaaaagatgaataacaagaagaatcagctataaaaccaaagagtattgttgtggtacaaagaaacatgtcagtagatagccaaggccgctatagtaaaaacagataagaaaaatgaccctaatttaacaggaactggagagaaaacaaataccactagtaaaaaagcagcaaaaacataagcagcaatatatgaacctaccaaaaaaatttgtaccaatctaccaagccgaccattaagataaaacatgtcgacctaaaaggcctaatgataacataccaatcacagaaaagaagaaacgaatacctctcgtacagaaccccagaggaaacataagcagttacaagcagctttgtaggaatccataaaaccctaaagtcgtcaataaaacctaaacaatggaccaaatgctgctatgatcgtctcgagtcaaccaacaacttggtgtttcaaatctactcggtaataaactactaagcataatgactatacaaaaccttataagaactaataaaccctaatttactggtacttcaaaatcataacacagcaatggaccaaatgcggttatgttcatctcgagagcaacaaattgtggatacatcaaatctattgatgaagtaataataagcataatgactgttcaaaagcataactcaatcattcaaaatcgcatgtgaaaccataaacagaacactaaaacaaaataagaaaagcgaaagaggtatagaataggatacaaaccccaatggacaacaactcctttacagcttgggaaggaagctctcgcaaaatgtcatgaagattgccattctcgcattcagccattgtagaaacttcgagtagagagagattcgaagggtctttactttaaaattagaagagtaggctgccttagtcgtaaaggccgttctttactttgaagattccttctccgtcaattagcccaccgtcgtcgctcgtcgccccttgctgtatcgccaagcggtcttcctcctccccgaatcgcagctccgtcccagtacaagggaagaaggacctaaaataaaagggagacgaagaagaagaagaactgaagcttaactgaactgaagctaatggaaaaatattagggatatattagaacaaaaattacaaaaaaatatatggatttttttttttataaattcgttcaaaataatataacgcacttcagaggaacaatcttccaactgaagcacactctctatagagaaacaagagtctct

SEQ ID NO: 161817 - DNA, 5387 bp, Cannabis sativa
  modified_base (2053)..(2054): a, c, t, g, unknown or other
tctctttacaagcatgcaatggcgatttggggtttgtgggggaaggtggtggtatggggtttttggtcgacgatggtggtctgagagttatggacgacaacagttttgtactggatctgatttgtttttaatattttaggtttctttttcttttttgttcctaagtgtgttcatacccacttcgatttattatttgtattgttaattaatttgaactattttgaaattttgtctttatttttggttaaagttaatgcatacccattatttcggtgattaatgtgaatattttcagctttaaagtgttgtattgtgtctcttgggtaattaatttctagaaagcattctgatacaaatattgtatttcatatttttatatttttgttaatgtattttttaaattgtatcattagttaaattaattatgaatttataatatataatttgaattaaaaaataatttaattttttataaataaaaaagcatagatatagtaacgcgttttgagagtagttgttactttcatagtctgataaggtttcactctaaaatcctacagtgatgcacggggagggaagctaaaagggtttagtgagccaccataaagggtcactaaatactatttttccagtcacccacataagtgacgtgcggtgaagggtcactaaatagttttagagtcacttaacacgggtcacactgaaattagtttttcgtagtagtgtttgaagaactgcttgattcatcttcattccttattaaaaaaaataaaatcatctccaatttcaaaatttatgttttcagtttgtcccaacctaacatcatgtgaattttttacttcgatgcaatctcctacatctctgctacaaacctattcttctaattcaccagctgtatcacattctttccctttctttctggttctcagtcgtcttgccgtacggccaaacctaatgatgttgcacgttgttcataaatcaattgacaataacaacaaaatgtcattttgtcttgtctacttttcttcaaattctttctacatatttttttcatcaggtccactcatttttaaatgatatttttagcatgatcattatgtcattcatatataatatttgtatttttttttttctgctaatgtgaaaatttcataccaaaagaaaaactaatataccaagttcatggtagagagtcttgacacaaaaggctccacctcctcaatcaatgtaatttctcagtgatcatttaactatgcaattttgtctcacttgtttcaaatatttttttgaacgcgatgaggaaggagcaacagaaaaaaaaattaacttatctttaaatttataattgttattagattttatattttttattttttaaattaaaaaaaataaatgacttgaaccaatttggaaattgaaactgacatactaatttggcacttaaagtattaaaaataagatttagtatcgaattatctctaattagaggttatttttactattttcttattaattaatgttatgtgtgtaataattttaaattataaagaattttgttacaaatatttcaataattaagtgtaaaaaaattactaaaagatcgttatttcataataaattgtaaaaagttaattaataattattagtaatttaattttaaatataattaattttaattaagattttataagaaaataaagtatcaagtgtactattattttataagttaattattatttatttattttttagttttaaattaatcacaattatttattagaaatttaatgactaaaaataaatgtaattcatggtggttatatatttgatgtaattattaataatttttttttatatatgaatgttatattgatatttttttagtaagaaacttttgttttatgtaatgtaatatatatttatagtcaagtattataattttatttatgaacgtattataaagaaaaaatatatatgtaaagttcggttcttgaaatttttatttttattttgtttatttttagtcaatagtttgtttgtttgtttttttttnnttttttttttgaaaaagaggaaactttattaaaaaacaagcaagattcacacaaaggcaagaggccacaacaacaaaccagcggcaactgctacagccagcaaccccacaacaaaagctatcacctattaattacaaagtttattttgttattgtttaaaattaattttattatctagatggagttgtggatattaatgtgtataaagtttattttgttattgtttaaaattaattttattatctagatggagttgtggatattaatgtagaaatatacaatatgaggttttaggaatgatgatacgtctgatattgaagtcactaaaaaaaagttaccttttagtgataaatttttagttataatataaattttttatgactaaatttgattattagtcacaataaaatattacttgtgactaaaatataatatttagatacaagttatcattaatttagtattaatcacaacaagtattatgactaaaaatacgtttaatcataacaaattataatttttgtgattaatacttttagttatggattttttagactttagtcaaaacgtaaaaatgataatttataattaatcacaatttttttacttttagttataagttttgtattattgctaaaagtaaaaaaaaaattatagtgaaagaaagagaaaaaaagagaatgataaagaggatagggagaatgagaaaagtaagaaatctatgggaaagtcagatattgaattttaattttctaatcagaatattattagtttgatctcacaatatttgcttattatgtagtggttttactctctctctctctatatatataatatacatgaaattaaaatttatgtatgtgtacacgtacgatgagaatgcatggttacattaattgcatatatatatatatacgttcgtgtgcggcacggcaacggatgattcagacaagaaatcaaatgtgctgatatgaatccaaatgagttaatgtcaacctattcaacgtcatttttttggggggggtgtttgtaattggattaggcgtacgtacgtagctatatggatttttgttttgaaaccaccaccatatactttctctgcatataacaatttctctgatccccatcccctaagcctaaacatatatatttatacacgctagcgtgttatgggaaacatatttactttactgcccatggatagatctttacctaatcacatgaatgagatcacataaacatggttactaattagttacttgtactatctaataacatgtctatgactatatgtgaacaaaaattactaattatattattgtactttatatatgacctttaatttaattcgatcgttcacacaacggcgccaactaggttttactttcagttcttaggtaattttagtgaattacgaacctttgaacaaagactaagaattaagtcaagaaaatagtctttccaagtgtacgtacgtgtatactatgaaatataatcgaactacgtttgtaagctaccgtgaacaacatatatactctctagcctcatgttatccacatcatattaattactcctttgctacgtggcaatccgtttcataaaccgaattccacatcataacgggccttaattattgtttggcggttttggcttgcaaaagacatgtattttcaactttgtaatataaactaattatttatgtatatattttcaaaaaaaattatttatgtatatacacgtacgcatatgtaggacccatttttattgatcatagttgaagctccattatctgaaggtgtggtgggaccaatattgcaactgcatgagacatgtgttttggcaatagatcatcatggatgacttaattaactaagtacgtacgtaattgtattgtacccataagtttttgagtaattattataggcgttttccaagttgataagctgcagaatatgaattggagctagctatagatatctgttttgtcaacacttttgtggttttctctttcgtacgtcaaccttgtaaggcataaaccatgcatttcttgtgagtattggcaggtttgagtaattaatgcccatccatattaattggtattactttcatttgttggtatttatcgataaatatgaacacaaacacacacacacttgaaagacaaagtatatgaatatttatatatgaagtagttgttcttctctctctcacacacacatatatataataacttatctatatatatttattgatcagagaaaagtataaacaaaatataatgggaaatatttggttcggtaagaacaagggatttcaccctataaacgacgacagacaaagaaaaacgacaacaaataatagtagtgtgacaattaaggtgcgtatgagggcaacagagtttagggagctggtggctcaggtggatatggatttaaccaaaactaataacgctaattcagagcttggctggttgatccttcaacactgtcttcaaggtaagaatcgttctccaatggacgtcgatcgttgccgtttatcgcaaacgacaatagattatcgtcgtctaagcaccatttgtgaagaagaagaagaaaaaaaaaataagtagtgatttttttttcttaattaatttatgtattgttattattgggaattaacaaacgcatatatggtcatgatggaacctatattattacataatatttgagagacaaaatagatcaatttaatataaacaagtatatatatgatattgaagacgttatttaatttttattttggttgtatttttttaggtttgtcattaaacatgagtttttagttaatattcaatcttatacacacaagttttctttcttttttttttttttcttttttttttggggggggattagtagtaataaatagccgttgaagaaaattcggtaaattcctggagcggtttattgttgatatgccaaattaataactattgatttaataaagctagcgttgctagaaatttatattattgttgttaatttggattggaatgaagttacagtaaggcttttctcccttccccattaatatagtcaagtctatgatgttttatttgaatttactatatataatccttaaatttattatctattaagttagattacctttttgtggatgaaattatataattggataattttatcaaattagatgaaattacattgtctaaattttatcaaacgcactagtgaattttatattttgaatccagtacaatacatagctcaaatttaatttaattcaatccctcaaaatataaattttgttataaatattaataattatgtggat

SEQ ID NO: 161818 - DNA, 17951 bp, Cannabis sativa
tttttttttttttggtttgtttttattttaatttattaaagatatattaggaatagatttaggtattattaatttaaaataaatatttaatgtattatttttttttttttatgaaataatgggatttaatttgagtcttacacgtgtactcttttttataagtaactgaataatggaaagatgtaaaacacaacgtttggtatttaatccgtaaaaaaaaatataatatttaagtgtataaaattaaaaatttatagtatttatgccgtaaatttctcttgtttttatgttgccacaacatataatattttacatatatgatttaaaattttttataaactgcacgcgaaccgtaggttgttttttagtattctataaatatagaacataaattgtaaattttaaaaaaactttaaaatacaaaaaaaatttagagcatctgacatgtttttaatttaattatttaaatattttaaattttttttattatatcagatgtgagtgtaatatgaataaaataagaaaaatgctaaaaattattaagtgatgcttattaatattgttattagtataattaaatattaaattttatataatttaatttaatattttttattaaatacataaacaccacttttagcagtgctagttacttgccttgtagtaacaatgctcacaaaacaaagacagtgaaattattgtgttcattatttttttttttataaatatatacaaattaaagaaaaatgtaagagtgggtcctatgttgtattggttgggagcccaatgtgagaaagcccatttataaatcgaagtcggtttcttaggacaatttcttctctctctctctctctctatcggcctttttggctttctttcggttctgtcactaaactcatcagccgtaccctagaaatattatcaacctcgctcaagccactgatcggagatcggagatcggacaggacgagttccgtttcacttattggccggaaaaacaattgttttacttgcaacaggtactgtacttactgttttgagggattaattacagagagacgacgggggaaactttttctggttgtttgagttttctcaactgattctctctgttttgtacagagttctacattggcattctaaagaatgtgatttagctattatttagttctcttttctttttcttttttcttctttttaataataagttaggttttgtcatgattagtttgtaatatgtgtgttaataatcatacaagattttgttctgttctgtatggttccgagttttgttctcaatatctttacatttggaacgtaaggaccagggcaaaagaaactttcataattttctgattttggttcagtgaaaaaatctgtttcgttcatgtgaatcccatgtgtatggtgtttgttcctacatatattttatttcagtactgtgtttaagtttgggataattctatatctttgtctgcatgaagtgtttggtgacataatatctaatttatggtgtttcttggcaatttgaattataattattttaactactcattgtgacgaataagttacctggactggaacaatgttgtgttgttgaatggagagagagagagagagataatttgtagttagataggcattgattatataagtaagatatagatataaagtctctgcaactccaaattcttacatcataatacaattttttttttatacgcaaatgtatatattgaaaataattaaccctaattacaattgttatcttttaaggtttatatggaggaggcggcgagggatgaacaacccactcaaccccaagagcaaggcgaaggtggtcccccacttcctctgcctcaatctttatcggaatctcaattacaagaaggagtagatgatgaagaggaggaagaagaagaagaaggggaagaagaggacgaagaaccaaaaaatgaagacgacgaaatgattgccaaagttcagaagttgatggagaaggttacttcttcgcctgataaccctaaccctattgtcctccatgcacttgcctccctttttgaaactgaagagtccaagtaagtctttttttattttggggtgggggtggtccctcacttgctccgcctcaatcattatcggaatctcaatgtgcttgtttttttttcctgttttattagctcgattatttatttatttgaagttattcgttatgtggtaatatttgtagaatatttactttaaacttttgtttggattacaaggtttagaagtgtaattatcggtacgttggcttttcgtaaaaactaagagaacactgttgttctactagcaattatcctaacagaattcatttagtagcttacgtatgttttttgagtggtaattgtataagactatattatacaatgtttctcttcttttctatattttttatacgagattttgaaatggggagggaaaaaggggtttggtgttgtgggggtgggggtgtgctgtttgttgaagacggtaaaggaattactgtgattctcgaagcctacttttgctttagaaagttgtagagaactagattgttatcaaggactcttgcttcttggcttctatcaacaagacccaagttattaatcccattatgatgtttagaatatatttggaattttccaggtgatatcttcagaattctagctttgtgacttgtcttatatctgacgtagaaacttattttttgctgtgtatcatgagagttcaggtttatattggatacactatagaataataaattgtaagtgatctgacgaagagaaacttataataaaatattgagaggttaggaaatgtgtggtagttgttgatgcacagtgatgcttcaggaagaatagaagagaatagaatcatagataaaaggttaagattacccactaaccttaaatacgatgggtttagctttccttattgtatgctatgcatttcattttttggaaaaacatcttaagtagactgtgattatgatttccaacagtttttgagcttttgtagaggctttgtgatatttcctaatatacattttatattgcttttgttccactaaatttttgtagttaatttctgtttttggttaaaaaaaatgcagattcatggaagagaatggccatgcctccagcaatagtcgtgcttctcataacattggacgactgggaactgtaattcgggtagcttttctagcttgtgttaatcccttcctatcatttgggatggaattcagtgaggatatgtgaatttgagtggatagttaatggtatggaatttggtttactgaagtgttatttttttgggggtttgtttttctccaggagaatgatgatttttttgaattgatatcttcaacatatttatccgaatcacgttatgctccctctgtccaggcagcctctgcaaggcttcttctcagctgttcagtgacatggattgtaagagttttcccctccttaattaaatttcattgggtcattattatttgaaagccttactcatgtaatgtggcacagcatcctcacgtgtttgaagacgctgtaatggactccattaaagatagagtgatggatgacgctgtcaacttcttgggggaagatcacagttcaaagcatgatcttgtgagaaaggcctcagattttgaaatgtcgaagacctattctacaggactccttgcttattttctatcagtgtaagaataataggctaatgatattttgttttcagctctcatcagttttttttatagttttgtagttcatatatatgatgttcaatttaatttcagcggtggcccaattgtggaagatgttttgacatctaaactatctgccaagcttatgcgttaccttcgggttcgagtccttggggagataagtattagtcagaaagattctggtcacttaactgaaagtaagaatgggtcttgtgctatctgcacaagaggaagagatgaaactcggagtaaggctaggcaggtttcagaaactactcatcttgacgattcaaggattattgatgacaagtctttagatgaccaaagtggagagagggatcaggaaagaagcatatgtggtcaagaacctggagaagctgatggaagagaactaatgaatgatggtgatgacagatggcatactcatgatgtgcgtgatgtgaagaccaagtttgttgattttgatgaaaatgcgaaagatgattcctctaggcgtaaagttagtcgtggatcagtaaaatctagagggaagggaagatctacagagggctctgttgacaatgaacaggtagtgacctcaccaggatcaggtagccgagtgggactaggacgaagtacaagagaaaagagttcatcaaaaacttcagatgttaaaaaagtgtcagatgctaagaagtttctgggaaaaaatacttgtgatattttactgttggaaagaggagataatgatgagtgcttccaaggatgcagagttggagctacagacttttctgatttggtgagaaaagctgttagatctgctgaagctgaagctagagcagccaatgcacctgaagaagctgttagagcagctggggatgctgctgctgaagttgtcaaaagtgcagctttagaggtattgcagagtctatcttacttctctttgacttaaacttgcgtggttctttacttgctgtttgctactttttatatgcaggaattcaaaataacaaataatgaagaagctgcagttttggctgcctccaaggcagcatccactgtcattgatgctgccaatgtaactgaagttaggtaggtgactttgtttttgtctttattgtaaatgcagttgagttaccatttcttaacatcccattggctggtggcaggagctccagaagtacggaggcagattcaatgaactcaaatgtcacagaaccagaaacgaatgtggaggttgaagaatattttatcccagatgttgaatcccttgctaagttaagagaaaaatactgcattcagtgccttgaaagtcttggggaatatgttgaagttcttgggcctgtactacacgaaaaaggggtagatgtttgtctagcattattacaaaggaatttgaaacatacaaagccattggaggttgcaatgcttttgcctgacataatgaagctcatatgtgccttggctgctcatcgaaaatttgcagcactatttgtggatcgcggtggtatgcagaaactacttgctgtccccagagttgctcaaaccttctttggtctttcctcttgcctgttcactattggttcactccaggtaatggaacttagtgaatagtttttacaggtgtacacatatatttccattgcttagctcatcttgctgctgctgcaattgattcctttctatgcaggggattatggaacgtgtctgtgctcttccttcagatgttgtgcaccagttggttgagttagctcttcagcttcttgagtgtccgcaggatcaagcgaggaagaatgcagctgtattcttttctgctgcatttgttttcagagctgttcttgatgcttttgattctcaggatggcttacagagattactctctcttttaaatgatgccgcatctgtaaggtcaggagtaaattctagtgcaggatcactccgtgatcggtcacctgcagaagttctgacatcatcagagaagcaaatagcttatcatacctgtgtagctctgcggcaatattttagggctcatcttcttttacttgtggattccattcgtccaaataaaagcacccgaagtgcagctaggagtattcctagtgtcagggcagcctacaagccacttgacatcagtaatgaggctatggatgctgtatttgtgcagcttcagaaggaccgtaagttgggtcctgcatttgttagaactcgatggccttcagttgagaagtttttagcattgaatggtcatattactatgctggaattatgtcaggtataattcttaggttccacttttgctgccttttaaagtggcagacctgtcttttgatttttctgccttatctagtcattcatattgagtttttcttctgcaggctccacctgttgagcgttacctgcatgatttacttcaatacgcattgggtgtacttcatattgttacactggtacctagcagccgcaagatgattgtaaatgccactttgagcaacaatcgtgtggcggtagcagtaatcttggatgcagctagtgttgccagcagctatgtagtcccagaggtaaggatgttttctgcatcatttttcactgatgtttggtccaacttgagcgttttcagttattctaatattttatttgcaactttgcagatcattcagcctgcactaaatgtgttggttaatcttgtttgccctcctccttcactcagcaataaacctcctttacctgctcatggccaacagtctgttgctgcacaaataaatggccctggtgtggagaatagagatagaaacatagagcgaagtgtctcagatcgagctatgaatgtgtccagccataatgatcgtggtggagaatccactagtatcgatcgaggcagtgcagcagcactcagtacacaatccaacagtagcaatgcacaggctccaccctccacaccaacttcagggttggttggagatcgtagaatatctttaggtgttggagctggttgtgctggtcttgctgcacaattagaacagggatatcgtcaggcgcgagaggctgttcgtgccaataatggtataaaagttctgctgcatcttcttcaaccgcgtgtttattcacctcctgctgctcttgattgtctccgtgcacttgcttgccgagttctacttggtttagcaagagatgatgctattgcacacatattgacaaagcttcaggtttgataaaattttaatttatatattggtgaactggacgttgaagattcatagctaggaaaaatatgtagcttaaagatcaaaaaaaatctgttagttcgtttacttcaatactggtgcagagtcttacatcaatcccaccctatgcaaacacaccttctagagggattaatttgcttctggttaagcactctataggctcataaataacaaggtctgaagagaatattaataagctgcgactgcgagttgtactttagtggaagatacttgcagtatcaatacaagtttatactgaattggggagaaaattaatgattttgattttggttttgatgaaactttgaaagtagaattttcatgataactatggattttgatgataggctttattgctaactaggtttgttagaacttagatgtaagaaattactttaatctgtttgctaatattgatacatcacttttatcacgttcagagctttttgtttttttagtgatatattatgttgtcaaatattacctctttttttttttccttcgtaaaagaaaaactaggttatttgtgtaactgatcaagggtgttatcaaacataatggtgtttgtaggttgggaaaaagctttcggagcttattcgagattcaagcactcaaacacttggaactgatcaagggaggtggcaaggtgaactttctcaggcagcaattgagttaatcggggtaggcagatgttttctttaattatttgaggttgcttatggatattcttattttgttgacttttgtccttctctaatgttaagtcattttattgatggttaacttcataatgtggcatctatttgtagattgtaacaaactcagggcgtgctagtacgttggctgctactgatgctgcaacccctacgctgaggcgcatagaaagagcagctatagccgctgccaccccaataacatatcattcaaggtgcttagttttcactgtagtttcaaagtagtaaattatctaactgatttttcttacgttggagtttccctttctgatgctgacttggcttttctgtgctcttcttaatttcagggaacttttactcctaattcacgaacatttacaggcatctggtctgggttcaactgcttcaacactgcttaaagaggcccagttgacacctttgccatctttggctgctccttcctctctagcacaccaggcttcctcacaagagggctcctctatacaatttcagtggccctctggtcgtacgccttgtggatttctcaccaacaaatcaaagcttattgcgttggatgaggatgcaagtttaaagtgtagccccagcttcaattttccgaagaagaaacaattacttttctcaccaagtttaggctcacagactagaagtgatttgtacgcagcatcagttaggaagatgcttagtgcttcgaaacagtatactggtgtatcagaaactccatcagagtccttgttaaaatctaatatggatgcagaatctcaatgtaaaactccaatcctgttgccagcaaagcgtaaattatctgatttaaaggattctgggttcatgtcttctcttggaaaacgtctccacactagtgagcaaggctttaaatcacctacttatccaacaccaaatactggacgtaaaattggtttatcatttgattccatgggtttcctctcacctagttctagcttgagagatcatggacgtccagtagcaagtggatctacatcagaattcgtggatgatactcaattttgcaatacctacatgggtatggtgacaccatcctcccaaattgggcttcacggtgaaattcagaacagtaacacagagcggttgactctagactccctcgttatacagtatttaaagcaccaacatcgtcagtgccctgctcctataacaacactcccaccactctctctcttaaacacccatgtttgtcctgaaccaagacgcagcctggaagctccttctaatgtaacggctcgtcttggtacacgagagtttaaaagtatgtatggtggggttcatgggaatcgcagagatcgtcaatttgtgtacagcagattccggccatggcgaacttgtcgggatgaaactagtgcccctttgacgtgcattacatttctcagtgactcatctcatattgcggtaggaacccattctggagagctcaaaatttttgacacaaatagcagcagcgtattggagagctgcgcaagccaccagtttcctttgactactgtacagtcctatctatcaggggagacccaactggtcctttcttctagttctcaggaggtgaggttgtgggatgcatctgctattggtggagggcccacaaattcatttgaagggtgcaaggctgcaagatttagcaactctgtagacatttttgcagctttgccagcagagccaggtcgaagagacattctcctatatgatatccagacttgccagttggtactgaaactgtcggacacattagccaattcactgggtcggtctcatttctattcaaatgtacacttcaatcccactgacactatgttgttatggaatggagtactgtgggacaggcggataaccaatcctgttcatcactttgatcagtttacggattatggtgggggcggctttcatcctgctgggaatgaggtatgggaataatgcaatactacctgtactaaattttggaagcccatataaaaaaaataaattaatgtgacctatagcagagggataatggtttacatcctagtttattatgttgttttgggtgtccggcttgacaatttcacttgtttcaaaatatgtttcttatttgtaagatgagtttaatctttgtcttgcaagtgctttgtctgttgatacttgatactaagactgacattcatctttttctattttctgaataggtcattatcaactctgaggtttgggatcttagaaagtatagactcctccgtagtgttccttcactcgaccaaacatcaattacgtttaacgcacgtggtgatgtaatctatgcaattctgaggagaaatcttgaggatgtaatgtcatcgttcaacacacgtcggatgaagcatcctctgttttgtgctttcaggacagtggacgcagttaactactctgagattgctacaatccctgtggatcgttgtgtcctcgactttgctgcggagcctactgattcttttcttgggttgattacaatggatgatcaggatgagatgtttgctgcagccagggtgtatgaggtcggtcgtcgaagaccaactgatgatgattctgatccggatgatgctgagagtgaagaggaagacgatgacgacgatgaagatgatgatggtgacattgatcccttacttggtccagatcttgatggggatggggataccgacattgatgatatgagcaatgattctgatgacgacgatgatgttgatagtttgacgggtcttgaggatgacgatgatgacgatggggattatgtagatttcgaggggggccctggattactggagattgtaacagatggtgatgatgatgatgatggagatgatagtcagttggtggagtcttttagtagtgatgaggattatgtaggaaacggttttggttactgaatataaggttacaaattggccagggaagggggatattactagttagcgagattatgtaaattattgttttaccggggctataacccatggttgtttttcttcttttcataattgataaacaatcttgattatttatacaagtattcttctgttgattactatttgtgtgtgcttgtggtgacctaactgggcccaggtgttatatggaaatttaagtatgcatgttattataccataattaaatagtaaaccttgatgcctaagttataccataattagtatgctaaactttaaaactctctaaaaactgtactttggtatacaattgataaaattgctcttctcaattcaaacactttctttattttgtctcataaactgtatctttctatctccctaaaccacttataatcttttctttcactataaaaatttgattattaatgcctaacgatggtctagtgagtcttgtgaagacgtgaattttaaggcaaaaaatgatgctcataatttaactgtggtgtagggatggcccataagaaaattatacgtacaaggatgcttaataaggaaaataaataaatacatttaacactattaaataagccctcattaaagaatcattgaagctattgtccaacactctaaatttggacttacattgaaaatgtatagatttgagaaaatatataaaaattaaagaattttgtgaaaatttctggatcatcaaagttctaaaaatatttcatcacaaatgcgacaataatacatcgtaaatgcatcaaaaatacatcgttagatatcgttttttgccaaaaaaatgtctttcttacatcatcacaaaaaaacatcatttaacatgttttcatggcaccatcacaagtgcattgcaaatgcattgttgtacatcaatttcaccaaaaataaatataaatcatgttttactggcagcattgtaaatgctttggggtttttttttttctagccaaaaattggtaaatgcatcatcagacttctttggacaccattgtaaatgcagtaatgcatcatttgatatcaattttcccccaaaagtatgctttttagtactatcgcaaatacattgttagacgttgccaaaaaattatattctcttgacaccatcgcaaatatatcctcagacataaaaaatttgtgattttcagaattcagaaaaatgatgtaaatacaggctcagctttttgacggcacgtgcccgactagacacgaaaaattataggctggggcacaacacgatacgatgctacaaattggcacaacatgacacgaaaaatattttcttaagtacaacacgatacgagaagcacgaaaggcacgacacgtaagcacgaatagactaactcaaaaaatacgacacagaacaagttcgaaaagcatgacacgacatattaaaagatattataatttattaataataagatatgaatttatcaattataaataagttaaaataataataaaactaaaatataatactgaatattataattcttaaattaaaactactaaaacatgaaaagttaaaattatatattaatttatttataggatgtgatataaaaatttgagtatttatgattaaatattcaaattctaataatgttaattttttatatgattatctacaaaatattgttcaaaagttatataaatataactaaaactttaaaatatacatataatttagtaattataaaagaaaatatgaaaaagtaaaacacgaatttaagtctgtttaaaaaatacaggccgacacgagtaaaacacgacacaaaaatactagttctacgggccgtgctgagcctactctttaaaaagtcttcttatctgacatgttatttgttagtttgttgtggtgtctttttgtttgaatcatggcgtcgagtagtcaacctacacatgttcttgaagagagttatgcacaaatacaactggatgaagaggaagaagggaactgattgcaggagatttagaggggggtgaactggcatttgatgatcgatggtgtttggtggggaagtttctcacgggtagatcaattgattttgatgcaatgagacatatgatgacttcgttatggcatccaggtaagggagtgtatatcaaagaattggatactaacttgtatatatttcaattttatcatgaatttgatatacaaggtgttatagacagtagcccatggacttttaataagtttccattggtgtttcatcggtttaaacgtggtgaaagttcaaagcagttcatttgcataaactggacatgtgggtgaaaatccacgatttgagaacatagttcatgatgggtaaggtggtaaggagtgcaaggggctatattgagacctatgtcaaaatcagattctaaaaacttcaatggcatttggagagaatacctatgggtgcttgctactgttgatgttgagaagcccttaaagcgtcgaatgaagctgtgtaaggagaatggagagtggatttgggccatgttcaagtacgagcatctctctaccttctatttcatctgcggtatcattagccattcggaacgattttgtactaaacgttttaatcaagatgtggatcaaattgtcaaaccttatggtatcggaatgagagcacagatgagaaagaaaaattatcttattggtgcacaatgactgcgaacagggaacgaagaaactctgatggtgataggtggtgaaacttgccagcgggatggttcagatggaggggtagctaacattgctagaattatggaaattgattccacaatttctagcagagatgggggctctgaaagtttaggaaagaaaatcgatgggagtaatggtggacatattgattttgatactcaatcggggtatgatggagggattaaagtcattgacaaaagtcaatgcaaaagataaagaattaactcttattttggaaacaaaaaggaggcgtatggagatggaaagtattaaagaaagaggtgaggtggtagttgttattggtttggttatggactaaacatgtgttgtaggtgatgggtcaaaaaagttgagcaaggtgggtcttggatcacaggcctaccgaacattatgagcattttatcttggaatttccatggccttgggaacccatgggcttttcctttcattaaggaccttgtggtccaaaagaaaccgaactttatttttttgtgtgagacattgtcaagaagagatgttgttgaaaagttttgggtgtctattgggtttgagggtgcgatttctgttgatgttcaaggtaagagtgggggtgttgcattgttatggcgagttaatgaagacgttcatttgcttggctattggatccaactacgttgatgtctccattaaaggaagtgaccgtgggaagtggaggcttactggtctatatggggaatcaaatagaaacttgaggagaagaacttagaaatttaatccgtaatttgagagaggagtacgatttgccgtggtgcattataggtgattccaataatgttacttcttaacaagataagtaagggggtaattggtacccaaattggttgattaatggcttatgtgaagtgttggaggagtgtgggctccatgatttagagctgaatggttacccatatacttaggagcgtagctgtggtacgaatgactgggttaaagtttggattgatagagctcttgtttctcaacaatggcttgatatatttcctactgtcaagctcttcaatttagaggtgtctacctctgaccattgccctcttcttttgatccctatgaattcagttactgttgttagacaaaatgtcttcaggtttgagaattcttggttgaaagaacccctttgcttcaaggtctttgaagacacttggaatctatttttgggaagcactattatagagaaggttaaaaactgtggtgctgtgttatttgaatggggaaaagactattcgggtaattttaaacaaagaattcaagattgtaaagctgaaattcaccactgaaagaggggatgagatcctgtgtccgtagcaagttataaagaagtagaggtaaaactgagtaatatcttacttcaacgtgagatattttggaaataaagaagtaagcagctatggcttcgtgaaggggatcaaaattcaaagtacttctatgggaaggctacctcgagaagaagaaacaattctatacagagattaaaaaattcggagggatcgtgggtgggataggaagatcaaccttcaattgtgacagattattttcaacagctttttgaggcagctgatgtcgattacagtggagtggtggagtgtaccctacgataatttttgaggagcaaaatgcaaagctgcttgaacatgttattgtcgatgaggtgaaacacgcgttgttttaaatgcatctcgacaggttgcttgaacctgacggtatgactctaggattctaccagaaattttagaatgttgtaggtgaagatgttgtgtcattattgaggacgttctttacaacgggtgtgtttcctaaatctttaaatgaaactaatattgtgttgatttttaagaaaaaattgcatgagtgtatgggtgatctctgtcctatatctctttgcaatgttctttacaaagttatctcaaaagttattgctaataggttgaaagttactttgacatatgtcatttcaaatacgcaaagtacttttttacctagtcgtttgatttctgataatattataatttcttacgagataatgcattatttgaagagaaagagaatgggaaagcaggattttatggcacttaaactcgatatgagtaaagcttatgatcgagttggttgggcatttcttgaggctatgatgatccgtatggggtttagcaggcatatagtttcattgattattttctgtgttactatggtgagctataatgtgacttatgggggggatgtcatgggccctataactctgggaagaggaattagacaaggagatccactatctccttatctttttctggtttgtgccgaaaggtttatcctctttgttgaaactttatgagcaaaatcactggttcacgggctgtgaagtggctagaggttctccaagagtttcacatatactatttgctgatgatagctatgtgtattgcaaggcaaataaaaatgaagcttcaaatattttacatctccttcatgtgtatgaaatggcatcgggacaacaagttaactatacaaagtcaatatttttgagcaaaaatattgttgttgttgagcggtctaggatgtgcgagatgttgggcatggtggaagctttggataatagcttttatttaggtttgcgttggataatgggaggaaataaaaatgcagttcttggctttcttaaagataaaaagcagaaaaagatttttagttgggagagccaatttctgtcaaaagcgggaaagaaagttttgttgaaatcagttgcccaagctttgccttgttatgctatgagtatatttctactcacaaaagaaatttgctctagtcttgaaagaatgatgtcgaaattttggtggaaatctcaattaagatcagctaataaaagggtgagttgggtgagctggaatcatctttaccgatagaaacatgttcgaggaattggattttggaatctacgtgactataaccttgcttttctaggtatacaaggttggaggttgttgactaatgaagattctttagtaagtaaaatttataaagctagatattatcctttgggtagttacctcaatgctaccttaggaaaaagtcttagctttatttggcgaagtctttttgaagcccaggatttggttcggacaggggttagaagatcaattggcagtggaaaatcagtgagtattttacatgatccttggttgcccgatttggataacccttatgttactttgagtcatcctagtttggataattggatggtgttcaatctgttctcagtgggcacaaaaagttgggatttggaggtggttaatgatttgtttaggaaaagagatagggacttgattgtactaatttagccgagtgatacagttgagagagatgagtggtattggaacaaagaagcttctggattttatactgtgaaaagtgtgtacaaatttctataggggagtaataatgctgctactattggggaggatcgagaaggatggaagacattatggcagctggctgttcctccaaaaatttatcattttatggcgtgctattttgggatgccttcctacaaaggtacaattaagtattaagcatgtaaatattgatcgtatgtgtctgttttgtaatacggctctcgagactatccatcatgttcttcttgagtgtggttatgcttaatcttgttggaatttgtcaattataaccatggatggtttagtgagtactgattatagcagctagttttttgagtttgccgaaattagaagtgctgctattgtgatggaagttgccatggccagttgaaagatttggatagctagaaatgatattttgtggaagaattgatcttgttcagcgttggaggtggttcggtcagctagagttattcttgactaatggactaatgctcaatcacaaaagacatgtgcattgttagttgacgatattaacaatgttagtgagcaatggaggaaaccaatgtggcatatggtcaaggtgaatgttgacggagctatttttgaagcatagtataagttcggttttgggtgtgtggcccgtgattctaacggctgtctgatcaaggctctctctgcaagtcgtgttagtttggtccaacctaaagttgcaaaaataattgggatcaaagaagcactaagttggataaaaagaaagcaatgggctaatgtgatagtcgaaactgatgcgttggtagtggttcaagctattaaaagctttattgaaatgccttctcaatttggattattagctcgagattgtcatgtgttaatctcttcgttaagcaacgtgtctttagcttttgttaaatgatttgcaaataaggtcgctcattgtgttgctagagggtcttattttttgccaaattgtacttttagtgaacttgatgttcttcctgttttataatctattgtatcaattgaatgcctttgaataaaaattactttgattcaaaaaaaaaaatagagcttttgattgtgtaataaataaatttattgaggtcagttgtaatatcccggaaaataaataatatttaaatagacatattttattaaatatgtaattattttgataacgaagtaagattatgatcttgcttagggtaat

SEQ ID NO: 161819 - DNA, 6572 bp, Cannabis sativa
gatacgaccacctatttcaatttcgcttgcttttcgcaatagattttgggcatcttttgatactttctccaatagctatgggttacatttacagttttttttaagcatgttcactataattgataagaacgaacagagtgagcaaacgagaacaactaattagagtttggaacaacatgttgcggagagttagcatatgtatcatgtttgttcaattatctaaatgatagcattctttttaaaagttaatactatttcaattacaaagaaaaatgtttttaatcaggcttgaacaccaagataagatttgagaactataggagtttaatgttttgtgtgtgtgtgtgtgtgttcacgcgtgcatgcgagtatattgattctgcatatgaaatcattacgaatgtccgaataaagtggtcagtagaagtacaagagtttgatctacacatattctcttgaatctgatgattgttgcattgcaaggttacggattttgctttggacaatgtcactttaacttttttctgtgttagtcacatgttgttttatgcaattatttgataattttgctgaccaatttttattttgtctcgagacattttgtattaaaatgtttcatagtttgtatgttcatgttttaatgctatattacctttatttttgtgtagttttttgttataatttttgggttcttttttgttataatttttgggttcttttataggctataaccatttgatttctgtattttctgttccaggatatcttgtggtggatttgaagttctttttattggaggaacgtattaattataataacttggtaattcgcctcaaccaatctcacgtcatatttgcacctattttggttttcatctcagaagaatggtgaagaagaaatttttcgacaagaagaagtctgcaactttccagttgctctctcgtgattcttctgatcctaattacgacgattcacctggtagtgatcgagtcttcatccgtgttgacaacaatccatactctgttgacactttctttgcgggcgataatcccgacaatgttgatgactccaattccatatttgatgatgcgcctgaggattatgatgctggtgaagagggtaatcgggtttttggcagctcatcacagtcgactgcacatcccctgcctgaccgcttgagaaaggaaattgtggagttagggtttcctgacgatgggtataattatctggaacatttgagggagattaagaatagtggtggtggttctgccttttatcacaacccaaagaccaagcttgagcagcttcccaaggatattaaggttgaatgagtttttgacttgttttgtgtcctgttgcttttatgactctgtttggttttagccaggaagggaagaaagattaaaatgatttcttctcatgactgtattctggggatttctttaggaaaaaagttggattaaaattaacttttttttttggtccaggcatatgacgcatcgaggttgaagatttcggaagtgaaaactgatcccaatgaagaatttgtgtacagtgtagcgtcaaagacggttggtataaaagttaagaaagcggttgatcctgaagtagctgcattgcttgatgatgatagtgatgcctcgaggtttggttcagatgttgaggacttggaagaggattttgtgatccaggcaaatcttcccaaagacacagatgatgatgtatcatcaaataataggtttaattcatgtgagcaagaacagtttgagaccaaagatgtgattgaagacaaatcctttgggcaacaacagattgcagctgacttaagttataagggtggagctggatgtcatgtgccagtaacactggtagcagatgattcttctgtcgaaaagccacgagttcgccgtcttttggatgagcaatttgacatggtgagtcttcttttactatcttctgttctgtccttgcatattcttcatagttattatatgtattttccagccttatattgatagaaagtgttactctttttatttttctgaaactcttgactttataaacatctcttttctcaagagggtagttgcttctctaaatatgcgtttaagtttcagtcagcggatctattacactttacatctttttcattccaaaatatgtccatacaatagcttgaaattgttaagttggtttaattaaagcattaggtgcgaattgctccttgcccaagctgtctaatctgcaattagtttatatttcaatgcactttatagactgaaacatttttcatttcacattcgatatgctacatttattagttttgaatttgaatatttatctcatgatttttcctatcatagcttgaaagacaggaatatggcactgacgacgacgacgatgatggctatggttacatagctgaggaagatgaatctcttgcagagaagttaaaacatgcccttaaggacaatgttgtggatgactttgacattgacggtagatatatggctcctggagatctagttcagggaaatgagaatctaggaagtacagagctagttgattctgctaggactgtaattcgccgctgtgtggagtatggtgagaagtatgagaatgatgatcaagatgctgatgcagttattctagaagaaagtagtgatgaatctgaagtgtgggattgcgagacaattgttactacatactcaaatcttgataatcaccctgctaaaatcgaagctcctggagcaaggagaaagaagaagctttctgaagttgtttctggagccttaaatgataccagtaatatgatatcccttaaaggaagagaaaagctgcctgtggactttttgcctcgtggtaagaaacctaccacagaaaaggtgaaaagcggagatagtttgagaattgagccgctgaaaaggaagcaggacgagacagccgaggagaagaaggaaagaaaggtacttttctttctttctatacttctacatatagtgcctatacaaatatatctgtagaaaataacttgaattgacttgtctgaaagtgaaccatactttaaatgtctgcataccataatatttttacttgttttttatgggtgtatcttaatgcaggctgctgtaaaggaagaacgtaaagaggcgcggcgtattaaaaaagaaatgaaggggctttacaaaggtgaagcgcatcgtgcacaaagagtagctgcgatatcgggtccatcttccattcatcttatgtgattttaggtgatcagtattttgagtgaatcagtttgctttgctgtttctatcagtaacaatctgatttcaatgagttttgacttttttgagtagttaaaaaatagcaatgttataattaggcaatctaccattttggttggtatacaattgtacttgacgatacactatttttataaaaaaaagttgggagtgtttttctcttgaatagattttatttggttatattacactgagttgtacatgttgtcatcataatttattacgatcttatatggtataatacattttacacaaattacacgtaataattatacaaaaacatcatgtatttgcactctttataaaatacaataattcataaacctaaactcgagagaatgatctgggcacatgagttgagtatatagtatatgataaagagagtatatactgtttaagacttctcttttgagaccattttactggaagagtctttacaagtttctttgacaacataactatgaggaattggggctgcattacctccactaaaatatggggtaggattccatatcccatagtcttccatgaatttcggtgggaaatggtagtgctcgccgccactttgaagcgggatctcaaccatttgaaggggagaaggtgcaggaaatggagtaggaggagtcggttgtgacggtgaaggcactgtagttgcttctcctgttagtatcattgtcattataatcaccattgccatactgcaggcatgctcaactaagttcacagttgttgatttcatggtttttgtggctaaacttacttgggaactaactcaagaaaattagccttaatttatacaaccataattgtgtgacaacaattggaggctgcaaagatattctgtatggtaatggtagtgtttaaattaaacttgaacatctctcctttcacacttattaaatgacataccatcatgttctttgcatgtactaagttgtgtttagagatatggaaacctagcatacctaatagagtagtataaaaatggtggaatgctatattttaggacattaaaaaaaaaaagctaaagattgtaccaaatttgtgacacataaatttttacaattttatttatatatttgtcactagttaatatatatataaatatatttatagaaattctaaggaactttttgttttcgatatatagaataattataccatacattttaccactattcaaaaaaataatttaaaattgtcagttgcccgtgtatgaaaataattaaaaattagcacgcaactaattgtttaaattttatttttagcaccgtaaattttttaaaatttttcgaaaaacagggggaatgcatgctatatttataatatacactatgactatcatataaataatattttgattataatttctatgcatgcgaaaaataagaaactctcttatgataagggcgagagcgatatctctatcgtatggatgtttttatccctattgatagggaagattttctttcagtatatagaaaaattataaaataatatttttatatgtcggagcatattataattatagtatgaatcatgtctatttttgagaaattttgaataatttaaggtggaaaaaatatgattcaaatataattagttgcacccatgcttgatttattttatactctataaatttattcttgatgctacaaaatatttagaatttttcaaaaatgtgtaaaatgtttactataaatataatgtacaccttcatataaaaaaaattaaaatataagtgctcagagtaccgaaaatagaaaattatcctacaataagagtataagagtaaaagtaatgccttcaccaataaaatgtctgctttgaaggtttttaatatcttattcatacatatttttaatatatattttggataaaaatctaataattttgcaaaattttttagtttatttgtattttgtaccttgtgcattagattataattataagaattcaatcaaatatactatttttttagttaaatttgacaagaaatttttattattcattagggatagtctaagtatacttatttctatcctaacatttttggagtatttgttatgtgagtttgatttggaggaaatagttagaggttgcttagatttatttctattttatttttttttggaaaagaaatatcattcacgtatttaagggaacaaagaccaaaattcaagcaaaaataaaacgacacaaatctccaaagaaaatgactaaacaacgggcaaatcaataaagatggcctaaagctaacactataaaggacaagggtgataaaaaccattatcacaacaaaaacaaaaaggaaaaactcaaatagaacaaaactcgacttgcacaaaggaaaatcttaacatcctagaaagcacaccaccaaacggaaaccaccaagtacatgagttagaagagtatgacgatgcactgcccttgggagaaaatctgtacccatcctagaaaagctaagtgttcgaataggttaacattatcataaattaaacttaaaaagtgagacctcacacttcattccaccaaaggaattagttagcatttatcttaaaattctattatatgctagagaccctaactaaattgaataagaaattgattattacagccttatacaatctaattttaagaatgtttaattgtagtttagaaagtagtatgaggtgatgtatatacttaatatagaattctatctcaaaatcaattactaatgtgggactctctagatggtatggtaattgcacacaatcctcaatgctctcttacaaaacaaggagctaacaaccatggacagaaaccattggttcaataccaactgcagtgcttcttaggcattcccatttgtgtttgtgatttataatcacaggcaagatagattcatcaagaaaacaatatggtcaaacaaggaatggacaagcaaagtttactaaaaaaatgagtttagaataacactaggattataagttcagccctgatgaaagagcctatacattcacgagggacaatctaattaggctttacactatctttattgagcttcaccttcactattattaatattcaatggtagaagcacactatagattctttacagctaatcacatagaatcttggagagagttacttttctcaactctcacaaaggtaaaactagagaaaaatgataccctttatatagtcttggtatgagatgtagtgacttaccacactattaggggtaggggtgggcatccgatccaatccaacctttttttcctcatccgatcc

SEQ ID NO: 161820 - DNA, 3632 bp, Cannabis sativa
taaaataatttccaacactttactatataaattgtttgcactagtagacagcataatagtttggtatgcccaaccactattacttggtcaaaatcataaaatcccatagtcttctaaaatcttaatacataatccataattatttctttttattcttcttgtggaatcttttaagttaatatgatcttgctagttgttgatatattgattcgtcttattgacaagttgaatatttgcctctgatacatatccaattagcagtccttatgtctagccactaatatactcatctcgatgccttgttgatctttactctttaatacattttcctcttgataattcctggaacggtaactggtcttgcattccaatatgaatctttctagtatactttgtcctcacttgtatgctttctgagataacttcttagaagatttcctatactgagattactccaaattaagtgcgcttaactctaaagtaagctcatagtgggttatcgaaaagaaggtgcgcccttgtcgttcctaattgtatttcctacttttatcccttcattaattaaaatctaatttcaatcattcccttcattgaccttttacaattccttgtctatattgtttacttaaccttgaggagttcctatctggatgtcaacttgaatcttgttcatctcaacttatttcaacttgtatcaattcctcttaaactgatgtaacttttaaattttgcaatcatttacatgtcacaactgttataaagttaattgattcaacgtatacgatagaggtaatattactcatactaagtacccatagctaaattgagagtattcatttcttgattccttaagtaataacaattaatcagagattgttccttgatcttgaagtctctttcttgcttttggtagtgattttgataatcttctgaattcatctaaaatgtatctcatgtacattctttgttccactgataatcacttggtataagctaccatactaacttataatgagtctcccaataccagtgctaaccaatcaaaacctgggattcttgtattcttttcacataattaccactataagttcactgtatggtttcaatttacttctactctttcgcagtcaacactacctttatacctagtcatttactctcgatctcaaacaacatttgattatacaatttattgtttaataaaataattatctctgttatctaataagataaccaacattcactgacaacttgaatgcatgcccacttactacccaataagatgacctttttcatcattatctaataagacaacctttttatcattgtctaataagacaatatttttatcactgtctaataagataatattttctcaagatttcaatggttatctcgtatagtagactgaccattcgatcaaatttaaaagcattttccaccatcaccgtattattatgggcaattcggataatcttctctatcttaacgacaccactgctctacctaacatgttatacgcttctagccccgattatatctcaattactagggtttaactcatgccactcgatctcatttcccctagtagtgagtagatcaactctcataatcgtcaccttcaattcacctaggattctggacaatactcataagttgtcccaccttcactaatgttatatcacctccaagaaaaagattttgtcctctgaatcaattaaatggatccctctaatagttacccatgttatatatttcagttgggcacattagctaccacattagctgatcgtttcataaaaaggacataaacattttgcaactcaataatgagttgtttacaatgagaaataatttgacccaacaaagaaatcatttgaactgcactatgaagagcttgaatcaccattaagcaatcggtttcaatatgacttatttccagatgtgttctttggaccaactttacggacaccaatcgcttcagccagttcaatagttgcagccctcaaaaagtaatcggtttggccttccacaagaaatccatggtggtttcgtgctactaaaccaataccataattgttaccaccttcaaatagagcagcatccacattgatcttgatactattttcatttggagcggaccattgctaaacaccatcacccgtctacaaaccagaccatgacgactcaataagagagctttaagcacttgtccattgatcaagataaccttttgctaatactacaataccatccacccaccaccttcttatgccaaacaaagtcatttttgacactccaaattgcccagcaaagtgttgacaacaagagcttgttgtccgtatccacaccaaaaaaaaccagaatgcactagtccaaaaaagaataacccgttgttggaattgatgtaccaatacccacccaattccaaacttgtttaacactcaggtaggtgactaaagcatgcaaactgatctcttcttccaacctacaaacagggaaaatagagctaatattgactcttttcgtttgcaagcgacataaagttggaagacaattacttccttcacgtcaaacattgttcttaaccttgggaggtaattttaaatgccaaaataaagtccaaaatttaaaagcatcagttactgtattttctcacctgccatgaatattttggactagtttgtaggcgctttttaccgagtataagcatgaagtttcataacaccaagtcaaactatctttgtccaaagaaggaagcaaaggtatgcttctgatcagctctatatccctggcttcaaacatatcctccaaaagctccacatcccaaccctcaccatccattctcatcagattgtgtacaatagcgttcaacagatttgggtgggaggaaatgataaaagggttatcattacaaggcacccacgggtcatgagcagctttgatatcacgaccattctccacacaccaatgaacgcccttaaaaaccagttgttgtgcttcccaaacactgcaccacacaaaactagaattgtttcctagtgaagaattgaggtaagaaccattgggaaagtaccttgccttcaacacttttgccaccaaagagtcgggtcgagaaatcaagcgccatccttgttttcctaataaagacaaattaaaatcccgaagatgacgaaagcccattccacttttcgctttatgaacaaaaagttgactccaagattcccagtgaattcctttccaagtattaccaaaggattgccaccaaaacttagacattagcctctccatatcatgagtaatgtctaaaggaagtaaaaacacactcatcgcatagattgggagggattgagcgactgtcttgatgagaacttccttccccgctcgacgtagaaactttgattcccacccttgaatacgtttttgaactctttcctttagaaatcccaacactgccaacttgtttctagacatagtacttggcaagcctaagtacaaactgttttctcccgcaatggtcatgccaagcaaattactgatgttgttacgagtcgccaaggccgtgttcatattgaaaaaatggaagacttagagtgtaacaccctaactgacataggcgtattacgtgattt

SEQ ID NO: 161821 - DNA, 5906 bp, Cannabis sativa
atactgtgtactgtgttattttatgattgttctacggttattttttaattattctactgttgttttaattattttgttttgctattttaggattgttgtataaaaaacagtattttataaagaacattgctattaggcaccagtggtgcctagcaccttctcgacatatcgcattgcgattgactaacgatacttcctaattatatgggacccgatacttaattggaacaataacgatattaacacatagtaaagtgctaaatagcactggtacactttaacatttctcttttataaaatattctacttgatagtatttttataaaaacttaattgttttatttggctgcagtaaataaactgagttagaaaaatgaaataaaaatatataatatggcggagaaaatggcacctaggcacgcacaccgtaggattagggttggagagcagcgaatcagccctacgtaattaatattaatattatttattaattattatatgggaaagagaaaaacaagtcagaaaaattgtgaggtttactttttgtttcacagcaactggggaattatagcggtctcgctctaaaacctcatctctctcccaccagcaccttctctctcgctcaattcaccacacctgagagattgcaccctcacccctcctcctctacttgctcacctcagattcagagggcctgcccaaaacaacaacaaccaggttcgtctcttacattagtttttcagctgtcaaagctaggattttgaattgggtcattggtggtgctgaggtttggtttttgagtatgtatattgctttatagtagcttatgaaaatgttatgtaagctgtgttttgagtgccttagggttgttaagagatgaagttgttgagattgttctgatgaaggttcaagttttggggggtgattggtgaaattgcagagagaggttgccattatggctattttacggtctttctatggaatgaaacaatagaatctttgaagacgcggaaggagatatataagtcgctataaaacatggttaagttttggctggtttctcatcgctaaaggcttcaaagattgtaaattttataattttattagggcttgggagttgggagtatgcttgtaaatttagatgataccttatcatcttatgtaactttattttttatttttaatttcagtgattttcttctaatatcaaagctttactactagtccccatggggaatttctcgtcatgaaaacaaactactcgcatatgactctgacagcttgacacatatttgttagtgctaattacaattttaagttgcactgtggtctcaataatagattgcatttcacctctcattatcccacagtaccagtatttggttcccaagagaattaagtgctggtggtttggattgagtatttcacttggtgtcaactaaacacaaactatacttgctggtttgcttaccctttgagttcaacctgtgaagttcgttgcagctctctcatttctttgtaactttgcatgatttcttatatttacctcgtactatatcttgattttttttttttttgtatttctacttgcaatagtcaatcaagataattgagctcattcatttgttgaagatattttgaatggcgattgtaccttctggaagtacgtgtgctgctcaatggggcattcgtcctcagcctatgttgaagcatggcactaataagatgacatcccaatgttggtaagcatatttgaatgtattgtttgtagaaatggaaatgcttatatatgcatagatatatattgaaagtttaatttgttggatctgctgttcttgtttcattgtatgatgcaagtttatcggcaaactgaattgatttgattgaaaatgtgtatatattcattgttagattaatttaagtatcgtaagtaattaattttaaggacatgtgatgagtttcatattggtgtctcacgaaggcttttactgtgttttaacactcatctagctggtaggataccagggtaaatattattatatactttcatttcagtttaatgattgagcgttgtttgatgatttttatatattattgtttgcagtgttagaagcaaaatatgcaatttcggggcaccagcatcaagcttcttttctcaggattccttgcatgctctgtcatcttcagtgtcatctcaaacttcacagcgccgtaggggagcaagatttatagttagagcagatgctgtaagtagcagcactggtttttatttgctcagtataacagatctaaatgaaatgaataccaattaactgcttcacccttcattgcatggtgctaacttctttttgtatccaggacttctattcaatccttggggtgtcaaaaaacgccagcaaatctgaaattaaaagcggtttgtatcaacattttattatttatattcatgcagttaatgtttgtttcttcgccgtcactattttctttcaaatgcttggcttttgtgctgtaaattaccttctagggaacatttattcacatgaatttatctggtattgacagtgtttgtcactgcctatctccttgcacagcatgattagaagttccatcgtttaatatgttcattcagttaaatcttttctcaccttcagtgttttatatttcacatgcaatatatgcttgttgtaataaaatctctcttatcttcactaaagctaattgattgttatttgtaccatagcatattgtcattcagttaaagctttctcacaaatgtagttctgtgttgctatttgtttcagcttataggaaacttgcaaggagttatcatccagatgtaaacaagtgagtttagttgattttttccataagtctttttagtcataagttgtccccaacctcaggttctcggcattgctattgttgttttgtgtaatgctatgtatagagatgtatgcatgtgtttgctctttgtgaggtgcctgttattacttgctgagagttcacccttctatattgcagagaaccaggggcagaacagaagtttaaggacataagtaatgcatacgaggtaaaataattatattggattaagatttaggaggtggaggttggatcacacaatcaatttatctgatcttataggagggtaattcttttgcaggttctgtccgatgatgaaaagagatctctatatgacagatatggagaggctggactaaaaggtgctggcatgggcactggggtaagtatatctgaaatcgtgacacagaaaatgatttttcataacttgatgttatttgtttaccatcttacatgagatgaccattgattatctcaggatttcagcaatccttttgatctatttgaatcgctatttgaaggcatgggtggtatgggtgggatgggtggtatggggggaagatccaggagtagagcagctgatggccaggatgaatattacaatcttgtcttgaacttcaaggaagcagtttttggggttgaaaaagagattgaaataagtcgtctagagagctgtggaacttgcaatggttctggtgcgaaaccaggcaccactccatccagatgtagcacctgcggtgggcaaggtcaggttgtctcatcagcaaggacaccattaggtgtcttccagcaagttatgacatgttctacctgtggtggaactggggaaatgtccactccttgcaacacatgttctggggatggtcgagttaggcgaacaaagcggattagtctgaaagttccagctggtgtggattctggaagccgattgagagtccggaatgaaggaaatgctgggagacgaggtggatctcctggtgacttatttgttattattgaagttataccagaccctatccttagacgtgatgacaccaacattttatacacctgcaaggtgtcttacatcgatgcaatcttggggactacgatcaaggttccaacagttgatggcatggttgatttgaagatcccagctggtacccaaccaaacactacccttgtgatggcaaagaaaggtgtccctcttctaaataaaaacaacatgagaggtgatcagctggttcgagtgcaggtcgaaataccaaaaagattaagcagtgatgagaagaagctaattgaggaacttgcagacctaagcaagggtaaggctgcaagtagaagatagttttttgtgtcgttggtttatttatatcattagttcaaaattataccttgttggtgcatcttttttggatttcggatgcacattgagaattcagctgttcctcagccgttgggaaccaaagatgcttggatggttgtggtcgtaggtagaattatcttgtgatggttttgtcatcttaactaaaggagtgttaacgaggaaagtgaaactttaaggatatatagccttccaatctgtattagctataaaattctacatcataaaatattctttggcattagagtaaacttcttagatgtcttgtatttttctttttggttctgtttggatacaaaacaaaagtacattcagttagcctgttcttttcgtcaatcaccagtgatttgggtcactattttttataatcaaaacaatttttcaaaagatttgaggggttacatgttgtcagtgcttgttctttgttacccgcagctgttatagaaaaattacggtgaaacaaaatgtaatcactatgtatggcttaaattagtttttgtttatttaattatttgtttttttagtttgctaaaatatctttggctaacatgctttttggtagccctaagtacataagtctttacggcgcatttggtacgagaagtttaaaataatttcattgactgaaatattaaagctgaaaatatgattgtttggaaatttataactatttttggttatgttttgaaaatatttagttagattactgttatttgaataatattgtttgattaaatacatgaatttaataaattattgtaaaaaattatataaaattattaatattttaaatccaagattgagagtaatgtttttttttttgaaagaattgagagtaatgtttggaacctatattttctaaaggatttaatatgagatatcaaacatcttcaattgcaacttgatgctcttttgtatagggaggaatttattggcatcaaagggctagagttaattggcttagggatggggataggaatgcaacgttcttccactgttatgcctctaagaggaagcgtaataatactatttcattccttagggatgataatggtaataatgctagtagtatggaagatttgagtaattttgttacttcttattttgaagatcttttccattgtgacggttgtgatacagaggctgttaatcatattcttgattgtcttggtccccctcttgaggatttggaggttgatttcttgcatcagcctttttcatttgatgaagttcaaaaggttgtgtttcagctctcgggagataaggcttctggtcttgatggccttaatgcctatttctatcaaaggaattgggacactgttggtagtgatcttgttcatgcagttttagattgcttaaataatggggctgacttttctgaggtcaattctacgttgattgtccttattcctaaaaagaagagggttagatctcttagggactttagaccaatcagcctttgttctactttctataaagttatttccaaagtcttagcgaataggctgaaattggtgcttcacaaaattatttctcctttccaaagcgcttttgtggctggtagagttatttttgataatattttgattgcacaagaggtggtccatgttattaataccaggaaacatggtaaaagtggatgggctgccttgaagcttgatatggctaaggcttttgacag

SEQ ID NO: 161822 - DNA, 8856 bp, Cannabis sativa
  modified_base (6036)..(6048): a, c, t, g, unknown or other
aattgcaaagaaaatcaattccccttcttctcatttctgtcctttaaatgatgtaattcgttgtgtcaaaagagaagccaatagcatgtcacataacattgctagaagagtagctagctaggaatgttaccaacttaccattgccagctgatttattattgtgactcagacttattgcattactgaaggaagaatagttacttgaaaaaaattaaataaatcgttgataacaaagaaataataagtcaaaagagagcacaaacattatgtaatatactctgattgccgaatcgcgagaattttgtgggtgaaagttatggtttagcacaaatatattagtaatgttttatatctatttatttatatatataaagtaatatattaagccattttttgagggtaccaaatgatttatttattaaatgaaattatttatacttatatattttttttctgaaacggaattatttatatatttgaacaattctaattatttatgtttggttgaatgtattcattaaataatattttctcaagctttatttatttaataatacataataaattcttattaaaataataaattcattgccgctgcaaaaacataaaaacttcttttgtatctatctattggcttacttaaactgtaccctggctaggctagttgctctcatttcatgtgccacactccgcagtgaccttttctttagtaatttatttaatgtactaatgtaaatatatccctctatacattctacaaatacccgaaaccacatacacatgcagtgttcttcaacaccattttcacattcactctcccctttttacacagatcaccgtcacttattcatcttcgattttgagcccaataatactatgattcttgtccctctctcgaactctaagtagattcgagggctgacatctggaaaagaaaaaaaaaaagcaaagatcttgattcaaaaggtgtctgtatgtgtttactattggctgaatttcattggtttttgactctgacccaagtgagttaagccacagttgatgtggttaaatgcccttttggctagtttttgggttgaatgaatgaaatgggtcggtgtggattgttgatttggtggtgaattgagagaagaatctgtgaaagatgcggcggcggcaggccgattaccggcgctcagttaggaggaggtttcctcattggatctgggttcttcttggattgttctctattgcaggcctgtatttgttcgtagttcaccataaccagaatgaagatcgggtagaacagccgatactggtaagagaattgagaggacccttttaatgctttgatgtgtttctattgagtcaatctgttatgtaattgatcataagtgcttttagagtaatgcccacttgatcatgatgcattgaattggcttgtgttttcgaactatgtcgtttgaattgatctcaattttttgtgctgaaattttgattgaaatatgaaaatgaaaagatgggaggggcatctggtttggttttgtttttgaacttttgggatttgttgctctgcggtagacaggaggctttttaaatgactaaattcaatagtttggtttcaattctgattgttgactgaactgactgatgactcacaatggtattgatcttattgggtgatttggctattgatctagctatgatctttcagcatacgaaagcaataatttccttttgtatagcttcaagtacggatcaaatgatatctcaaatggcactttgtttttcactcgtttgctattgcagtattctgcaaatgtacgatctttacacgtattgctgttatggcaaaatggcaaatcactaatatttgaatttatactaaatatttatgccaaaatacattctgagtggaatttctggtcaagattttgtagaatctctttgtagttattaccaattttgtgaccgaagaaatgaacattttaaactttagggaactagatagttcatgacaatatcaaatgcgcttagtcaagtgattgccaaaacatatttcatgcaatatagctatgttccaacttgtttcattcattattatggcacagaaccgctattgcaactttttccgttttgctagatctctgcagtcacatatattgctgaaagtgtttaagtgtttctttttcatatatacataggaaatttctacaacagaagcatctcatgttttgacaatttaaaattatagctcaaattattttgtattgacagtgtacattgtagctatagtaggcattgcaccaaaaaaaaatataaataatttatgatgccaaaacaaggttctaacattcagttgctcgtgtttctttttctttttttttttatatgcgtgcaattgctcattttgatcagtattgtaaattgtacgaaaattttaaaatttggtggaatgattactataattataacgtaaaacatcatataaaaaaattagctccctatattcatataatttattattccttttctatgcatgcaatatttgtaatgaggcttctcattgggaattttatttcatatatgtaaactcactcatttcactagattaattcacgctacatgatattcttaacaatctctagtgagagtcatataatattcagaactacagctaacatgttatggtattgttgtttcctctttgtggttggattttttatttggaattattatagttttgaagaatttacattcagttacacaacaaatatatcataattataatcaaagttttttattcttttttgaattgatagaacttcaaagaacaaaaagatgtgccataattacgaaatttaccattgtggttgtgaaaagtttttctgattttctgtgagcatgaaatgccttaccacgaaattgagcttgtaataatttgataatagttagtgatagtcataccaacatgagaattttgatggcagctttggcaattttgagaaacgataagctggagcaatttttgagggcatagataagcaattgttaattatcagtaagttgcaagagatcggtttttatttccttaaggagctaagaattttttgtaagacttaagcagctaagaatgattacaccatttaagtgatatagtctgtagatatggcaagtattacatgaaatgttttcaagttagtattaataggagaaatagatagacattagctataatactcgagtgttgttgtctttaattcatggtttcatacgtgatattacatgtagcaaactgttcttggttgatacagttgttgatttctgtgagatgatgcttaaagtggaaatattcagcactgcaaacatgtggttcagtgattctaacattagaggccatatattcttttgtctgaaacactatatctttgaactactctctaaactaataaagtgaagattaggttaggtttaggagataaaatggtattattctttagtaaaacaatatttttgatgcggttacagtatttattttatcactttgtgggtatattagtcataagacattatattatatgaattatcaattgcatactgcaaagttcatcagtggtttttcaatggcaggagaaaaatacaagaatccaacaagttgcccgggaagatttaaattttacacaagaaatattgagtgctacctcattttctcggcaattggcagagcaaatcacgctagctaaagcatatgtcattattgccaaggagcacaacaaccttcatcttgcttggcaacttagcacaaagattagaagctctcaacttttgctatcaaaagcagctatgcggggagagcctttaacatttgaggaagcagaaccaataatcaagagcctgtcatctctaatatttaaagcacaagacactcattacgacattgcaacaacaataatgacaatgaagtctcatattcaagcccttgaagagcgtgcaaatgcagcaactgttcaaagtactgtgtttggccaactagcagctgaagcattgccgaaaagcctcaattgcctaattgttaagcttaccactgattggcttttgaagtcatatatgccagaacttgcaaatgaaaatagaaactctccacggcttgtggataacaatctctaccatttctgcatattttcagataatgtgctggccacatcagttgttgtcaactccactatctccaatgctgagcatccaaaacagttggtcttccacattgttacaaatagaatcaactatggtgcaatgcaggcttggttcctgagcaatgacttcaaaggatctacaatagaagtgcaaagtattgaggaacttgcatggctgaatgcatcctatgctccagttgtcaaacagcttgttgatactaattcacggacctattattttggggcctttcaagattcaaaagctgagccaaaactgcacaatcccaagtatctgtctttgctaaatcacctgaggttttatatcccacagatctatccacagctagagaaggtagtttttcttgatgatgatgttgttgtccaaaaggatctgaccccacttttttcgttggatctacatggaaatgtgaatggggcagtagaaacttgtcttgaagcattccatcggtattacaagtatcttaacttctcaaactcagtcataagctccaaaattgacccacaagcgtgtggatgggcatttggcatgaatgtgtttgatctaatcgcatggaggaaagcaaatgtaactgcaaggtatcattactggcaggagcaaaatagtgatgggacactttggaagctgggaactcttcctcctggtcttctgactttttatggtcttacagagcccctggaccggagatggcatgtcttaggattgggttatgatatcaatatcgataatagactgatcgagagcgcagctgttattcatttcaatgggaacatgaaaccatggctgaagttggccattggcaggtacaagcctttgtgggagcggtatgtaaaccaaagcaacccttgtattgaagaatgcatcacaagttaaaagtatgctactttcccgctggtgatactttctgtgatctacacaacttttttaaaacttccaatctgggatcacattactgtagagtcagaagtagaaaattttgactttgttaggaagttatgcttcttctccattatagtattttacaagagcaacaagatttgttttatacaatagaaacatcaaacgtactaggcaaaacagtgtgaaagattcatttttggttgatggggttttcctattatccttctgccagctatagaattatttgttcagctattcttgtaataattatcagctttttttttttaatttatgttgtaacaaaacaattttttttgtcctctctgtactgtttcacttaaaaatgaactagaaaatcttatgttgagtgaaatttttgaaattgtcagatcttttataggcttcaatgttgcattatggttgatgctattgatagtttgttggtactggtatagtctttcagtttgtctgtagttgtattatggtggaaacatgtcaactttttatggagttgtgtttaccttgcaatctgcaaaaccataagattaaaaagcatttgttttagaacttcattggtgttcagcatgatgctctcgatctactattctaaaccacggttcacaaaatactgtagtgcgacttgaacatacagtgaactctgcattgcattaaatataaacatatatgggtgcactcttaatgtgtattacccacgataaaaaaaaaaattaatagaaaaattttttagcaagagaaataagaaaagaaaaagttgagtttgagttaaatatttttgtataaacgtatttttgatatagtgtataaagagatattttttgatattttttttaattaagtaattaaattaagtatagaaatttaaatttgtgatttcattattcgttattagatcaaaattcgataatttgatatttttaaaattannnnnnnnnnnnnaatttgtttagtaactattcatgggtaatacccattcagaagtgttccaaacatatatatgattgcgatttagacttgttgttaaaccaatatgcgaagttttatacacgtgttactatgtctttagtcaattagttaggtagttagttgttagcaaatttaggaattaagtctactatgctctcagtcttaactagagtatgtaagaattttgttagtagaggtatttagtctataaatacctctaactcttaactgtaaaatagttgattcatcatttcaaatactcagagcaataaagatataattttatcaaaacaagtctttgcctaagtgttctatgttctgtgattaaagtattgttcttggagccattcctggcatgtgagatcgtgttcaagttcttggagcactttcagttttgagcaaccaaagcatcaggtgccctaggcacccaacacccaagttgacatatttccaacttggggcacttcaaaccttaatattgaagaactatcacgagtattttctttgtcttcatccaaaacgagaaacacaagtgattttgggtgaaatacagatcgacatggaggacaaaacaaggacccagcgcctagtttgacctaggcattgggccatgtgcctaggttgacactttgtcaacttgggccactttcatcagcaattcagatgaattcgtttgggcatattctccatttcatcaacgattaagatttgagttatttcggggaataagagattagaattgggacccagcgcccaaagtgtcaacctgggccatttccaagaaatttttgagaagtcttctgggcatattctcagttttcatcaaagattaacgtaaaaatatttttgggaatcgaatggagtcatctggtggccaaaaactggacccaacgcctaggttgacatctggcactaggcccaacacctaggttgatattttgtcaacctaggctatttccaatcattttcccaaaaagtattctaggcattttttccgtcataaaaaatgaagataaaagtgatctcatggagcaaactagatttccaaggagccaaaacagggccccaacacctaggttgacatgacactgggccctgccctcaagttgacatgcaacctggttcgcttgtttctgctcctcaaacacaaattctgctttgggaattcttcttaaaatggtaaaaaaaaagggggtgggagaccttgttcgaaatcttgaatgtcattgaagtattaaaacaagcctcgagaaggattccgagaagcacccagcacccaggttgacacctgacctagtgcgttgggttctacttatcagaattcgatttcatttcgagcattcaattatttgttcttaataaacgagagctgcaacttgtaataggataaattcacagtttaatatttcaccctttcaacaaggtagaatatcgggaaaatcggagaattttgagtcttcctgatttcacaaaacagcgacatctacgagaacttgtgaacagcttcaccagaaaattgaatttgactaagtggtgtcaacacatcacttagacatcaaaaaatacaagtttgggagattttggtactcacttggcgtccaggttgacgtcatgtcaacttgggcgctgggtgtcagcctagacgcatggtgttgaattaccttcaatagaatggtcataactcactcaatattgatccgattgacgcgattcaactgtgattcgaaaatatttcaaagatacatcaagtcatgtctcccacccacactgaaaattttgaatatttctggtccaaaattatcctcaacaaagttgagatttttccaacaaataacccgaaaatgatccaatggacaagattaaaagtctaaatattgacgattttcaccaagagtcaatttctaccatttgatcatcatgaatcatcatcaatggtcaagatcagcccaaactaattttttttttcatattttttgtatttattaattattattttaataggttctcctttcttataaaatgagagctcctttagctcattattcacattctgaaaagtccccataaggttagataatctctctctactctagaatttgagcccgaacacttagaaaaattgtttgtaattctcatagaaataaaaactcaaagtagatgtagcttcatcactatcacctcacagggaatagactactataaatttgttgtgtctctcttacttatacttaaatatcattacattcttgccagcatagcgagcgtgtgatcagatatctgtgtctagatttctgcgttaatagtaatgatgatcaatagtagatcaccctaaaccttgagtgattatgaactcatgttcatgttattagtttctttgattctgtaacgccctaacaattaggcacgctatgatttcctaatgaacttaacctaaccccgctaaaccaggattactagaataagagcggaatttaaactttaaattatttacgaaatgaaaacataacttataactatttaattttacaaaccattccaaaatattacacacgttttgggatcccgtaaaaattttcacaaaacaatacaagttacttttatatgccgacctaaacggcgaaataagagaatacaaagtacatcaactggtagacccaacccacgttatctagtatggcctgaacatgtacaatccaccaccaagtcctcgatctcatggccaatcacaaactaagttatcctttcctgcacagtagagcacccgtgagccaagcccagcaa

SEQ ID NO: 161823 - DNA, 1415 bp, Cannabis sativa
aataataagtaatttgttaacaaggtagaaagagattggaggtgtgtctggtgtggtaggtcataggatctaagccaactaatagagaagaaattgagaatgctatgaagagtattttgaagattaatcatcggttttaggtagaggaattaagcatgaagagtattttgattcttttttggaagcaaagaagatcgacaacgtgtttctcggggtgggccttggatgtttgagaaacaattattatcctttatgaaaccaatgggactaggagaggtgtctaagatgacttttgaccatccttccttttggatctcaattaacaatgtgccacgtgcttgtatgtctgaagtgtttgcttgtgaatgaggtagtttgatagggaaaattgaggatgtaagagtggctaatggaattatgaagatccatgtgcgcatcaatattactagacctctcaaacgtggcttaagagtggccattaatgagaggggtacggaggtatctctactctttcaatatgagcgcctcttggaattctgttatgattgtggtattattggccataatgctttagatttccctcttaaagactttcaagatgaggaaatagggccaatttagaatggatggtatagatcatggatgtgtgctcctagctctctacctaggattcggggacatcgtggtagtatcaaacaaccttagtcacattttatgaacatgagtgaagtgggaagaattgtggaggctgttaaatgctcacagccaagaagaaacacagtggaagagtttgctacaacatcttttttagaaagttaagaatgggaggaggagctatgtagtagtaaggtggttaccttggaaagtgaggttgtaactagggagctcccttcaatccaaatgataagaagtgacgtacctcctggccctcttgcttgtcttaatgctaaggaggagtgcccaccttcccctagcaatttaatggtgtctccaccgtaacatatttaactgcattctaatagtattctgatagaggattcagggtccattgcatctacattggtcgaggtgcatcaaccttgccctcctgaacaagtatagcattttggagagtcccatgtgcctgctaaatttagaagtcatgataaaggaaaaaccattgtttgccctaaagtagagatgagtaagttgttttaaagtacctttgagcctttggtccaaacccaaaagaagaagacgtggaagagacgtacatcttccttagatggatgtggtgctagtatgtaatgaccgcagtttagaatatgaattagttaaggaaattagcattaattattgatatttttatagttatttatgaatttaattaattgtgggtctcattattaaaagtgggcactagagttataatttct

SEQ ID NO: 161824 - DNA, 8339 bp, Cannabis sativa
aaaaaaaaaaaaaaaaccatattcctctctctctttctcacgtccacttctttaaactattattattatttttttaattttaaaaagaattatatatatatttttttgttagttctgtccatttctgtgatgttagacccatatatggataaaaggataagcctttgccataacacactttaaagtacgtttggtaacattctgtgcgtcatcttccaaaacagcccatcaataacaaaacacacaaacaatccttacccttatttatttatttatatttatagatatgccaatacaaatataaaatccaactttacacattattatatgattcacttcactcactcaatttcaaaattgttccaagaaattgagtaaaacccagttttgtattttgaatctaaaaatcaaagaacgggttttgagatggagattgagtggtgttcatattaggactgactttgaaaaaaggcaaattttaactgcaaatattagggcaaggctgaagagggttttttttttttttttttgggtattggtccccagtcatttgggtcaatgagatgaatcagacaatgccaaaattttatgtcaaaacttggaaaaaaagtctcttttgtaagctgaagggtcaaatatattagaccaattgaaagaggttatatattcaactagttatgaaataataaccacaagaggctaaatatcattgaaactgactttaatgtagtccacttatagttatatgagtctgttaagtctttgtactattaaataatggtacatatcagtgcatctaaaggtactagatgaatcacaagctagaatagaaagaaaaagaaaaaattaaataacacaaatatgctagaaaatgagtctatggctaaagctgtaaatacgggccggcacaaaatcgacatgaacgagcacaaaccaacccaaaaaaatatgagcttgggcacaacacaatacttaaagtagcataatactgcaccaaaaaataaagttaagcatgacaccacataaaaaaaatgggcttgagttgaatttacttataaatatgtatttacagctacctatggctagctaaaaagcacataaattcaacttaggcaatagttagaagttgaactcattattaccatgtcagtgaaaaaaaagggagaacagagatgacaacccacttttaatttcatgtatatatgaacaaaaagttttataatggaaaaaaggtaagaagctagaaggaataccacttagtttgtggtaacaagaatatgacatgttcatgtgcagtggatggagtaccattatgactgaaaaatagtaccagtgtacatattgctttttttttccatattcaaatcaaattgattcacaaaatacaaaagattagacaacgaaaacaaggttaggaggaaaatgacagcaaatgacaaattttcaactgacctcaatgaattttcaggcattgaaaatttttaggattaacctgctgacttctattacaaatcaaaggcattttcaaccattaatacacatgaaaaagttgtacaactactacatgcaatttgtagaattacagaatgtgggacacacatctcattgatggtagcatatgacaataagatgggaactgcaattaacaaactatgaccttattggtttctataacagttatccacaaatctattccatttcaaaagaagctatttactatctacaaaggtagaaaagacaccaactttgcagatcaagtgcaaggagagaatgaaacattgcgagtgtacggaagaagacggttgatactcactaatttcaagttaccattatgtgggttctcatctccaacttttctttttttggtaataaggctctacttaggttctttggcctttcaaactcattagtatgtatgggtgacaaatgaggagtttcaactttatcaagtgactgttagaagtggttaaaggaaacccctcattttgtcttcagactcaaactgtttaatgaaatgttatgacaatgttaatttaagacagctacaaaataaaaggctaaaggaggagggcttactcactcacacattcccttcaagttttactagatttacctatatgggctaatagttaatattgtgctctaatttctgcttgtcataggaaattttcttttcctcccttcaaccacttgaactatcaccaaacatgaatttgaccctttttactcatgggactagcaacataagggaataaacatgtcaactagaaaaaaagacaaaccccataatggaacaaaatcacatataaagcactttccccaaattccttcacaaaagagactgatgtagaaaactcagcatcacattctatcagaattcaactttaagaataataattcttagccaatcctccctataaagtagtcaaccctaacacccaacataaattctagcctaagctaccatcatgttcttattaagcaaaaaactcaatgcaaaacatacatttttcctacaacgattaactcaaagcacactcttcttttacaaatacactacaccaagtagtgtacttatgcatcaagatcaaacgccaaaactccagaaactcagccgatgccccctaatctttctcagaagcactattcaggccaaaataattcacatagaatacctgacgctaattactagatctgaacatcaatagtttatatgttaaagaaataagcctactagatgcatgagacagaaaactagaatttaccaattgattgacccataacaacccaatattatgattcaatttctaactctactatctgagtaaataatcattcacaaaatgatatgaaagtgtgtccatactataagacagttagacaatgcactttcagcttttaaggtgagcaatggtttgtagaggaagcatgacaatgtcataatataatcacacaaaatagtcattctagtctaaaccggaaaaaatatagcaactagaatagaaaccaaaaagatcttacatggtaattctctagttctccaacacaatcctgcaagcactacaaaacatagaacattttataaaactcaaacaaaatatagcacaacaaccaaaccatttcagacaatttacttctacacctccactattaaaccaccgatctcaaaatatgtccaccgcctaagttagagtgctcaatcttctgatatttttttttgtaaggaatcttctgataattaagttcttcaatatgttatatttttaaacatattgataatccaaacagttgtaggtttgataacctccactgaatgtcagcctacaataaaagttccattaaaatgcacatgtttaggctcctttgaacaatcttatagtcttaaagtgctcatgtatgtatacaaagcccaggttatcatcactgaagtcaattatcaaatcacaatacgaaaaaagaaagccctacaaagctagctctgaacagacaaatttgctatgagttacctttaacttttagctaccttgatccatcaatgtctccggtttgaaagatccaactggctaacaatatacagcccccagaatagtaacaagtttttgttggcaacacaaatatatgataatagtttgaagttttaaattcaaatagtgtcttaaagcacctacttgcacatttttaaatgatgagcaatacatgtattcattgtacgtctactgacaagacaagagacaatgaagtatgcagattatagtgaaacaagtctaagtgattgcaaaagtatcataacttctgcaactatagaattctcattagtatacaatagtctttaatgcatgtactcttttatcatacctaagatgaaattgaaaaaagttgcagaagagctgacatattaagaatgtttgaggtttccttttcttttttcctttttttttacactcaattcgtaaaggcagccaaaaaaagtagtttattagcttacttgttaaagtatggtaggaggctcgaatcgaaatgatttctccttccttttctaagctacaatctctcttctcttatgaaatttcaagtgatcaaatcgaacagaaatttccaagtgggatttgttacaatataaaacgcagtcattacagcaatatggtcattataaaagtagaaagtattccagtccaatattaaattgagaaacaaaaacatcattaacattgtaacacaacattgttcaagtattcaacagaacaacttcattgccagcaaacagacaacaatccagcaccattggccattgcacatataataagagcaatctagcatgtcacacccaaccacttgagctagccccaagtccacccctaaagcaaaaattaacatataggtctaagagtttaaaagagagttagcattcttttccagtagtctcactcacataatatggcaaataacaacatattgcaacctacatttgccaaggtagtcagcttagatatcatagaagaatggaccccctagcctagtcctacaatacagaaatacaaatccaaattctactgacagattacaatacttgaatctcggcataaatgacagaccacaatatcacaattcattgcattagataacattttacattaaaatcattatattaaactaaatagaacatagaaatgagatttgccagctactctataatgtttcatctatgcataaacctctgtattaagtaattgtgttcaaatatagagcctcttgaagaaatgatgctaaattgacaataaattttaaactagtgcactttttttttcgtttttcttttttctctttaactcatgcatgtaaattaaaaaataataccttgagagtcactgacaatgacaccttgttcatccaaaatcttgctatgaatacttcataaactctatgatagcaaacttgcattctagtgagctaaatgaatagagtatagactgtgcatgtaaatattgtgatttggtgagcttcccaagcaaccccacttttccagaataaagcaacagtaacgagaaagcagtaacataatcttaaagctagctattaaaaaatgattgactggtaaagcttataagatgccactgaaagataaaacagtcctaacattaatacaatattatatgggaaggtggatttttacaatgcaaattaacgacataaaatatgttcttaaatactcagtactacagagtacagataaaaacattctttccacaatgtttttgcagtcaaaggtaaatggtatgtcaccaaagggcaagctatggaaactagctaaaacctattatgaccaggcagagttgagattcaaaaaaggttctcccacctaatatctgatactctatagatatggaacgaggcttacttaatgaaaacaaactaacaaaagaaaataatcatgtagacaaagtttagatacaaaggcagttaagtaaagccaccacccatttcctttctctttaattccaatgccaaacgctcattttcaagcttcattctctcattttccatcctcatcttttccaattcacggtctcttttcttagaaaatctttgccatttcaaccgctgtttctccaattccaacatctcaacttgaatttgtatctttctttcttctagttgcaaagagcgagactcgacccactgtttttgtagccatgccacttttgtgccatcaggtggggcttggttcatatcagcttgagcaacttgtggttgagaataagagcttttattacaatcatgcggattcaatgaattcccgaagccaacatcttcacgtccctgaccaagaccctgtctgaacctctttccagagtcccctaacccatacattcctctgtccccatgtgaagcattattatcctccaaatcatcgcgatcatcaatttccacttcttgatcttcttcatcaggatcatcatggtgatgcttcctcccatcttcattatcattatcatctctagttctaagagccaactgcaaagaacgctgcaatgctggatcatgaggcagatgcaaccgatttccattatgataagaacacatctcttcgtaaaataggtgcttcgagcttaatatttttcttacaccatccttttctttctcatttaggtaatctataacatccaaaagcgcaggattctcaacaacttggcaagaagttcccctcccaagcacatcattaagtcttttatatctcttgttaaggtcattaaatttgtcctcacactgttgaggtgaaacattaaaacccctttcagccataaccttggagacagatttccactttccctttttctgtaggactgcaaatttcctccttcccccaccactacaatctggtccagcatcctcacctatataagacactgcagtaatcagaagtttcaccatcttgtcggtccacttgacacgctgccatattgatcccttcttccctctactgagttcattatgaccatcaataccctcttcagtaaagctcggctcgtcctcctcacttgccgagtttttgttcctttcccccctactattgtaatcaaccatcgacatcctttgatcacagctatgcaatgttcccatagtaagcgggaaaccctcacgtatcgaagggcgaacattgggagtttggcattgattaggattatgttgttggtgtatggtatgtgggtgttgtccctgatgttgagcccgtattgatccttgcaaatcaagacctccataagaggccccaccaggaataatccctccatgagacaaatgaccttccattgaggagatcaaacttgcacattcattatctccaaaatccaatcttttactcaatttgtgacaactaacacaaccataattcaaaaatcaagcattaccatattcctcaattaccctcttacaacaattcaacccaaccctattcaatgctcaatcaagttaaatttagatcatcaaacatcataacaaaacagaacccaccaccagattttcaacaataaccacaaatctcacaacaacaacaacaaaaattacaaatttcccaaacacaatccttaaaacaaatcctataacagtcgaacaacaatagaatcgaaactacttatcgtttaattaccgaaattggtgagaaaatagaaaaacccttgctcctttgaccaagccgagaatcgggagcaggttagatcacgaaacaaacaccatgtgagtctcacccttcactgctcctatttggctcaactccaacaaagctataaatgaaagagagagaaagaagaacatatatttatatttatttatttttcttaaatataaatttttataataatattgtattattattaaattaaaaaattatattatttttaatgaattattttaaaagaagaagccaaacgtaaaagttcaacaagttcaatgtatatggagatcctgtgggacccacccaccacacgccctctccactcataccaaaatcattttaatttttaagaaatgctaaaaatggaaatggtgtgtttatgtgtaatatcgctattagtgtaatatcaagtcttatttattttattttaataaatattataaaaaatcgctaactaattataagataatattttttatcgtggcactaagtaccataagtaagggcggagccagcacttaaatactaaggggcccagtcataaaaatttctgaaaaatttatattgacccccttaaaagattgttattgtacatcttttatttgtttcacctaaaaaaagtttttagtttattttttttataagcgcgtacgttttcaaaaaaaaattaaatattttacaatgccgaaaataaaatttgaactattacttaccacatgtataaaaaaaaaaaatacgtatcaacaacggtaaactatttagaattttctaaaattttaaatattattctaaataattacaacgtagacaattataaagaaaaaatcgaactaaaaaattcttctgaatacaaaaacagatagggatagaagcttctattctaagagatctactataaaattatccaataatttttgtaccatgtaatatatatatatatatatattcatgtatagtacaccttataaaattgtcgttctagcatgctctatctattttgagatctaacaaaattcttcagtacattttatttcatgattgtgtatcgttgtagttattcaagatcattgataaacttaaaaaaattctaaactatagtgtcaaaaataaaatttaaatattttttttttcacttataactttattattttgtatatacaaatacttatat

SEQ ID NO: 161825 - DNA, 2637 bp, Cannabis sativa
cgtgttggctcgcacgcgagcccctaatacacacacccatgcatgcataacacacatacgcacatatactatcatgcatgttgtggatcacatgcgagctcccctcatgggcccacacacgagctcctaacaaacacacccatgcatgcaacaaacacatgcataggcagtcatgcctcgatgtactcatacggggtttgctcagggtgctcctagttatatcctgaggcccgcagacactattggcgactttgagaaatgcacattgagtgtgtaggtaaattgaatgcaccctatttaatctttgggttattagtcaactaatcttgaaagttaaaagtgctaatttttgaggttaacacttgcctctagtctacaagaattcttccaagtgttcttattggctgagtgagttagggagcatgccccgctaaagtgtgagtcttatcctcttagagttctttgagggggtgtcccttctatgtagggggcttccctagcttgaatttcacttcataacaatactttggtctagtggcaaattctcctctccttgtctaatccctttttttatatatttttttgctgccaagtgacctcagctaccatgcagttgagtgacatttttaactgatgtttgctatgggtaactctttggccaagttacttttgtaaccaatgttggtcgagcgactataagggtaaaatttttggccatgtgatttttgtaacctacgtaggtcgagcgactctgattgtcactcttaggccaagtgactttcaccactatggtaagcatgttttcatttgtgggagtattactctttgagcgttctcaccctcttattatttattcatccttttacttagatgtgaggaggcttattttacttgactgcattccctcttaacttgtgagtgtttgcttacgtttgagagacgttccttttatttaagcattaggccatgagcatctttatagacctcttttggctgggaaacttttgcaagaaaaagtgtgtttcttttgtcaaacaagggtatctagtctttgtcaacttatttttttttttacttttttccccttgccctagtgtgtagcgtcgttaatcgtgttgtgcacctgagttttgtgcataatttctttcttaaatttcaatcctttattattactttttgatggaggagaagtattactttgactacctgtgataaggtatgatttattgattttaatgcaatattcgtatattccaaggaataatttgaaggccacgagggtagtctttcattacatatgagtgcaaaaatagaaaatcagtcgggaacataaactagtaagctgcctcacggaccacctctttgatttcaaaatctcaaataactaaaggatattcccaactcaccttttcaatagtatttcttcttttggtgcactgcattgcatgccatcggtattaccatatcatctactcgggcccacttgtaaatcccttgcgggatgatttgggcaatctgataggggcctttccaatgtgctcccaacacttctacccccagatcactagtgtttgggaggatttttgtctgcaccaagtcttcgattttgaaggcgtgcatgcgaactcttaaattatagtatcttgtcaccctttgtttattcactgccaatttcatttgggccgcatctgttctctccgccaagcgatccaaattttcagcttttaatttttcatttactaattcattgaaattcttcacacaaaatgagttgagtttcatatcgataaggagtatagcttcacatccatatcctagggagaaagaagtttcacctgtggtcgagcagagcgtaatcctatacgcctagagtacatttggtagttcatctgcccatctgcccttaagctttttcagctttgtcttgaggttctttttgattactttctttgtagcctaaatgcctgttagcctggggtgtactagttctgagaatcccctttcaatggctctctcaatgaaataagaacatacaaatctccttcaaattgggttccgttgtcaatgatggttttgtaaggcaacccaaatctacatagcaggaacttattgacgaaggataccacttgcttagcgatgatcctgactaaggactctacctctacccatttggtgtagtagtctattgccaccacaacatacttcgcctaggcacaacctatttctaaagccctatttaaattaattccccacatggaaaatggcccaagggctggtcatggtcatgagtttggccagagggcatgtaatacgttactagtttaggtgtgttatcgtgattttaagttaattgtgaagctcattgctaatcaatgagtttattgaaaatcgtaagtaacaattttttttaaaaacttataaataccaaaaaaataaaatataaatataacaaggatcctatatacaaaacatttacaaaatatgaccagctgtcccaaagatcgtacactccaggcctaactgccttgacatgtagaatcttcatccgctcgcactcacttctgctcaaccttagccttccccttacctacataagcaaacaatatttgtgagtcgacagactcagtaagaaaagca

SEQ ID NO: 161826 - DNA, 3555 bp, Cannabis sativa
ggctcggagatgacgaagagcgatttccacctcaccatcgcaggaaagcgatctcgcgacgactctaggaaccatcaaggcccgtgactgtacgacctttgactttgtgggttttgcagaggcaacggctgttgtaaccgagggtttggggccttcagacacagcaacggtttgagtagatttcgagtcggaatcgtctggcgaaagcttccgaatcttgcgagggcggaaggggattttggaaggaggagaagaagtctgaaccggagcattgctgagctcggtcggtgctgtactcgccggagatattgtggtagcagagatggaggtcactgcagattcatggtgggtttgggtttgggtttgggtctgttgttgtggttgggtctgggtctgggtctgggtctgggtctggacttgagattgctcgcccataaggctcaactggttgctgtctgtgataatgcaggtatcgtcaatggcgacggcggcgaatttctataaaagggttagcattgaagccatgaaaatttgataagagagttggagagtgttattactgcagagtgaccacgtttgggttgggatattaggcaataggaattcactctaatttaattacttttttctctcttattttattcctaaatttaaataaataaatatttaaaattaatgtacactgttgagttgagttgagtgaaattctgcatcaccattcacttgcatccttctccaacctacacaaatttaacaaaggaagttagggactcttaatataatgtagaaattgttcatgagtttaacaaatcagactggagtgcttgagattaagttcaaagctttatttcatataaacttgaaaataacatttaagccacgggcaatagggcatctactactaggtaagagcacacatggaagtcattgaacaattttatttgaagaggcataacagtgagtatgatgaaatgaggaagttggtcaataatatttcttccaggcgcaatgttgagtttgctaattacgacaaatatgataagcctattcttgacatcattaacagagtagagatgacgaagaaactttgtcctagggttgagatagatttggctccattcctgtctgatctgttcgaccggagtgctactaccaattgtaagcttgggcctgacaggtttgtaatgatggcgagtagggaccccgtctacatggtagatactatgaggacccaagccaatattgtaagttaacttttacttaacttttctaaggcaagagatctgcctattttatttgtctgattcatttataactctttttacaggctagcctggttgcggagagaagttgctcgttggtcaacaaactggcttatgaacttcagttgctaaagtgagaacgcaccaatgctgaacagaggagagacgaggccacccaagctctagcagatgctaatgctagaatggagtccatcatcaagcaaaaagtaaatgaatctctagacaaggatgttcctcgtgaaaagaaggtgaccacgattgaaagagactgtggagacagatacaaagagcaatacaatgaggctttctctcagatcagtgatttggaagctgacttgaagcaagctaagcaggacctcaaagatacggagcgaaagcaatacccttttgtctcaagagtatgacaagcaaactcgccttctagatgagaagaccgtttctaccaccactttggagaggaaggtgaaacatcattcagaattgcaacagaaggtggagaaaggctaaaaggaggctttcaaaaaggttgaggaaactgtagctgaattaaactaggatatcgtcatgaacattatcacatgcatgtccaaaaattctttaaatactcagttcataagatccatcaatgtagcaggggcattggtgagtccaaaagacatcaccaaaaactcgtaatgtccatacctagtacgaaatgcagtctccgggatattctcttctcaagttcttaactgatggtaactggaatgaagatcaatcttagaaaagacagtcttacccttcaattggtcaaacaagtcatcaattcagggtagaggatatttattcttgatagtgagcttattcagttcccaataatcgatacacatacaaagcgaccgatctttctttttcacgaataacactgaagcatcctaaggtgaataactcgctctagtaaatcccaagttaagtaattcttgaagttgaatctttaactcctttaattctactagaggcattcaataaggggcctttgatactggttttgctcctagaactaactctatagccaattcaacctctcgggaaggtggtaatccaggtaaattctctggaaatacatctagaaattcacacatcaatctcatatttttaggtctagatgaaataggttggctagtatccattgtcgtaactaggaatcctaggcaacctctgcacatcaagtatccattgtcgtaaattattcaaataatattatattattatttaatatatattaaataaatatatttttttactttatgataaaataataataaaataaataaaaaagaaaatatgtaaaaaatgctatgtatgacattcttttgtagtattttttttcattataatagtaagcatcaaaatactaaaaatatattcatgttcaagtatctttcataatatctctaatgtcatggcaacaaaacttttcgtccaaatgtgaaactcatatttatacatcttcttatgtaaccttatttacttcagataagtgttattggtcaatacacaatttatacttacctacaactcaaactcaaatttcacatactcattacaactttaaaagtacaatttttttagtttagtaagtttagttcatgtaaaattattattataaattcagtttttttctttccaatctccttaattattttcgttttccctttcaacccaaaatatagtgtaaaagataaagaggtttttaggtgaggtatgactcttaccctattatagagatttctttttcacctagagaaattatattctaatatttatacgatgtcttacatggtagttataatagaaatcttactagtattcagaaaattatgatagtttgttgtttttaatatgtatttatacttagacacttactatattaatgcgtatatttattttcaatatatcaatttaatatttattatattcatactaatatatattaaataatttattcttaccatttttttttactattttggtggtttaaattacatttaataggtattagtagcttgttgttgtactctacttcgattatttttaatgaaagtttagttcatattcacacacaataaaaaacaaaaacaaagttgaaaatagtcatgttatgatactttttaattttaatcatattttcaaaactctaatttatttttgagaaaggcaagatgctttttttttttttttgaataaatattcataagttttattaaacttcaaactctgctatcaaacacga

SEQ ID NO: 161827 - DNA, 2838 bp, Cannabis sativa
  modified_base (983)..(991): a, c, t, g, unknown or other
  modified_base (2798)..(2808): a, c, t, g, unknown or other
tttttttttttatttttggttttctttatagcgtcatttagctaaacgacgtgataaatatttttataatgtcgttttgtaaacgacacctctattttttgcacactattcacgtcaattaactttataaatagtaacgttgaccgatgcaaaaattaatttttgtagtagtgattaaaatgtcctacaataaagaaaaagtgatggctatagtaaaacatttcaatacatttacatataattataggtaaaataaactttcaaagtgttgatataataaaggtaaggtcaatgttaaataaactaggtatgaaaaatacaggagaatcttccataaaaaataaattaagaaaatagaggacaatcaattaatcggtggaaatttttaacaaataaatcaaaaagcatgtcttaacaactccactaattatctgtagttataattatagttaaacactatatatatagtcaacatgtgacaaatcattttcctaatactataactaacactttctttaatttatatatttctttcggtaaaagaaatatagaaatacatatataaatgtgtatatagttatagtagccaatatacgagggggtgcatgtgaagaaaccttataaaaccattaaataatatttgaaaattgatgatatggtgaagtcatgattattagatcatggaaaaattaatttataattttaaagttttccaataattgcattccacttggcttatagcttcattattaggttgattaagatttttattctccgaatttcgagatgtactaaatcatatataccttctaaatttttaaggttgttaaaaatattccttaaactattgagattgttaaatttaaggactttgtccaattttagtaaaaaaaagtctaatatgatgaaagtttagagggcataatttaatacatgtcaaaattcgagggacatgatttgatagatatcaaagtttggggagnnnnnnnnngtacataaacaattactgaaataaaaaaattgaatttagataaaagtccttaaatctaacaatctcaataatttagagagaatttttaacgaccaaaaaaattcagaatgcataatttaatacatgttaaaatttaagggacaaaaatcataattattattattattattattattattatagattggctattgtagtagttagttttggtcaatgcatatgtactcaaaatgtctcccacctaaccttgtttgatcttttccgggttagtttagtctttttcataattaatatataaaatttctatgtaaatttgaaaaaattgaccacataaataaattggtgagtttatttatcataattatatacatatatatatatatatttaataataagtagtagtatgtaccaggtatgaattccaaatagacggcagaactatttaactttattaacctaattaataattatatatagaatatatcatcttttgtgttgtatttaagatatattaattcaaattagtttacttaatctatataataatagaattaattatttttcttcttttcgagaaaaattaactaatttgtatttatatatagttatttaagatttttatccccaaatattattttgtctcatgatttgatttttccagtaaaaattagttatttaagatttttttttctcaaattttgatttataaattattgtgtccctaataatttcgttagaagtagctctcaaattatttacagtgatatataatgtgactttctttcaattctaatgtcaaagttaatcctctaaaataataacaaacatatatgtatattattgtaaatacatttcaatcaagatatatataaataatataaaatatttgtattaattaaatatgctaaaaataaagataacaatattcattattagcaaaataaccaaatatcactttttaataacaagtatattattgtaaataaaagttactaagatgttgtatattttcttttagtggtacaacatacaacatatatgtataaaagtagtgatgagttgtagatctatcaaagtgtatgattagtggtcgggaccgctcaataatttaatctcaaattaataataatgtctagatctaaaacatagttagaatatatattgtttctcttattaattataactgttttttttaggaataactagttaataattaaattaaaccactatacaaacacttgtataatattataattggaagatatgattaattcaaaatttaataataatccaaaatcacagcgaatagaaccaattaataatagcctctgaattacattaggtagagacacaccccaaaaaaaaaaaaaaagcaagtatgattccagatggtcagctcaataatcttccatatattttatatataatgtttatgtatgtacatacatatatattctttaacctttcagacaaacacttataattatactaatatatatatgtggaacagttctgggccaatattatattatagtagaaatatgtatgattaattttaatagtagctaaccacacaatgctatgcgaaataatataattaagagatttttttatttttatactttaaaataattttttacgaaattttacataaaaattctcatagcaactaacatagcaacttaaatcataacaaaaatttatatagcaacctacgtaaaaactactaaagcaacccaaaccgtaaatttaaagtaaaaataattaaaaaataatacatgaaataatttgaggaaattacactctnnnnnnnnnnnatattgtcctcttttatttttaccatcttt

SEQ ID NO: 161828 - DNA, 2194 bp, Cannabis sativa
acattaattatgtatggaccgactcagagtgtatgtggcagtgaggacaagtaggagagttcagacattttcggttgtaaagattttctgcagtggggatagttttatgacaaagacgacagatgaaatgttttatcttagggggagtacaaagatcccagagggacttccaccaagacttaaaagtttcagcactagaagaagaaggttgggtaatgtgagtgatggtttttgcaacatgataaccagttttgacagagtagtggccagaggaagtatactgctagaaaaaggagtcactgaggttgttgtcagggggaggaagagaaaggatctcactgataatgtcatttgggaagtgtctttagataaaggagatgttccaattcccattggggaggagcaagttagagacatgggtaaggtgatttgggagggaaatggggagaacatgaaagttaggaatccaatggtcatcaagaatgtgagttgcagcaccattaccaattcttttacagaggccaatttttaggacaaatttcccccaatgcaagctctgccagacataggaaggggaatgacccagggggcattcaaaaaagtggatcgaggaaagtatttggacttaaagagggtcgcaagaagagaggattggtttgtttggattctccatgcttgcttggcaagcatagctttgttgaaaggttttagagatctgaagccaagaccccctgcattcttggaagtacaaagggatcgctattttttctaatgaagttcgcgttctccattcctagctccccaccaaaaattttccatttccctctcgacaaagctacagaaagagttaaggagtttgaaaactggcatcgcataaataggaatggcttggacaattgcctttaaaagaacctctttccctcccttagagaggagtttaccctgccattttgaaaggtaagaccatattctatctttgaggggattgaaggagtgcttcttagttctatcaaaacattgaggtagtccaagatacttatcaaggtgattggtagaaggtatttgcatgtagtcctgaataagagtttggtaagtcaggctggtgttaggggaaaaaagatggatgatttctaaaaatttacctattgtcctgatattttttggtactgggtaagggcctctttgatagcattgcaagcttggatatgtgaccaacagaacaggatgatatcgttagcaaagagaagatgagaaatttttgggacagtgcgagcaatcttcagaccaaaagcatcttcagcgagttcagaatgctttaaaatagaagagagaccctccgaatagagaaggaaaagataaggggagagagggtctccttgtctaagccccctagaaggaaccacatgcccaagggaatgaccatttatgttgaacttgaaagtagcaatggtcagacatttcatgattaaagagaaaaacttaggagggaagccacctttttgcataattttgctcagaaaaattcattccaatttatcaaaggctttgaccatatcaagcttaacaatcatccaactaatcctgcctttcgttctacttttgatggagtgtaagatctctttggccataaggatgttgtctgagatgagagggccttttagaaaagcactttgggtaagggatatgagagagttaaggaccaacttgagtctattagccaagaccttagagattattttatagacagttgtgcacaagcttatagctctgtagtccttaagggtaagaggattttttgttataggaatgagagtaacaagaatggtattgaaaaggaagatatcagaaaaattgttgaggaaattaagaaccgcttcagtcactttccttccaaccacactccagtttttttgataaaattgattgttaaagccatcaatgcccggggacttgtctggggccatttgaaacaaggcttttttgacctcaccaggagtgaaagcttcattcagagattgatagtgggaagagtcaaggctggggaaagagccagagagggtagtgtcgatatcagtttctggagggcattgagaggtgaaaagttcagagtagtaggattcaatgagggagagaatcgaagcaatgtctgtaacgccccgatttcccgagacgtcacactagctagtccgtttaa

SEQ ID NO: 161829 - DNA, 3134 bp, Cannabis sativa
tttttttttttttgaagaaatttaccattatattaaataacaatgcaatcaaaaagccttaaaactaaagttaaaacctatctttttctctgggtgcttcgtatattgacaactggtggtgaatagggtcttccaggaaaagtcttattatatagcgtggcgaaaaactattggctgcatgtagtgaaatatttcgacagctgatacactaaaataaaagagcagacgacgtggcaatacaagagccactctcaacgatcgttacatttccaagccatcacacattaccagacccacaaaaatacaaataaaacccccaaaaatctatccacatcgaatctcacccgttcatttgtataatctaacggccagcataccctgatatcccaaaccatatccaccaaaaacaaattataataattaataataaatattaaacaaaaatctcacttcagtgttcttctcactggagctccaccactatcttcatcctcggccttccacgaatcgcagaaactcgaagcaaaatgacctccattgccctcaaatctttcgttggcctccgccaatcgtcgctggagaagcaccattttactgtccaagcaaaacctttaatcaatgtccaaacccctcgccgattccgagtcgtcgccggtaaattcagtcctaaagttaccggccgaaacctgcgagtggcaatcatcggtggaggaccagctggtggtgctgccgctgaaacccttgccaagggagggatcgagacgttcctgatcgagcggaagctggataattgcaagccatgcgggggagccatcccgctgtgcatggttggagaattcgatttgcctctggacatcatcgacaggaaggtgacgaagatgaagatgatttcgccgtcgaacgtcgccgtcgatatcggccagacactgaagccccacgagtacattggaatggtacggcgagaggttctggacgcgtatatgaggaaccgggcgacggagaatggggctaaggtgatcaatgggctgttcctgaaaatggatatgcctacagaggataacgctccgtacgttctgcatttcacggaatatgatggaagggccggtggaacaggcgataagaagacattggaggttgatgctgtgattggagcggatggtgctaattccagagtcgctaagtccatcggtgccggtgattatgaatacgccattgcctttcaggtattacagcctaagattcttctatcgtgttggtgttgggttttttgttttcactatagagacgaagttagaacttagaattttgtgttgttaattaatttgcacttagattatgcttatggcttttgttgacatttttatgcaccaatagctgtaatgatataagggagtatcttattaggtgatgattgaaaccaatgatcaatactgatgtgtaatcttatgctatccaatacatttgtgtaagagaatttttcaatcttgattttgcattgtatattttcaggaaagaatcaaaatccctgatgagaaaatggtgtactatgagaacctagctgagatgtacgtaggtgacgacgtttcacctgatttttacggctgggttttccccaagtgtgaccatgtggctgttggtactgggacagtgacacacaaaggagacatcaagaagttccaactagcaacaagaaaccgtgccaaggacaagattttaggcggcaagatcattcgagtcgaagcgcatccaatccctgaacaccctcgcccccgtaggctagcagggagagtggccttggttggtgatgcagctggttacgtgaccaaatgctctggtgaaggcatctattttgcagccaagagtgggaggatgtgtgccgaggccattgtggagggttcggagaatgggaagaggatggtggatgaaggggacttgaggaagtacttggagaagtgggacaagacttattggcctacatacaaggtgttggatattctgcagaaggttttctacaggtctaacccggccagagaggcttttgtggagatgtgtgcggatgagtatgtgcagaagatgacttttgatagctatttgtataagagggttgtgccggggaatccattggaggatttgaagttggctgtgaatactattggaagcttggtgagagcaaatgcacttaggagggagatggataaactcagtgtatgaaaattaaagcctttttgtgagtatgtaacttataatgtctgttttctctttttccccaattatttctaacattatgtatgatacagttttatttggagccaagatgttgagtttcaattcatatttgttcaaagaattttcttatgcagtgttggatgaaaaaaaaaacaattgtgatgaagatgctgatttggttgtggtaacttcctaacagagcctccttcacttttggtgatattgcggctttagttagtgttcatgaatttgttaaaaacatgtagaagggaaaagaaaaaaaaacatttctacaaatataaatttcgaaatgggcaaagtaaactggataataattaatgttaaaaaattgctacaatataagagacatcaaaagttaaaacaatgtcaaaggactgaagtgttagggttattttagccggtaaagatattttaatttgatatatgtttttggtaaattttaagagaatatactattattagctaataaaatatttttattaaagataatgtagatttttaattatatttaaattaaaataaaaagaaaaattatattaatattttatataaagaaattttaatttaaatttaaaatattgtaaatatttttaattttatcgatttaatttaataaattaaaagataattctactcaataggcccgtagatttaccacgatatctcacttgttttattgtatgtataaaatattaatcacaccgaaatagtataccaatgtaactacaatagctaaaaaaaagtctcaaaaatcaaaatctcaactccatttcaaaaattaaaaaaaaaatatatattacttaattaaaaaaaaaattaaacctatatatattacacttaatattagctaattgaacctaattaaaaaaaaaacttattattaacat

SEQ ID NO: 161830 - DNA, 6538 bp, Cannabis sativa
tagagaaacggcacgtcgtttatgcacattataaacaaaaacgacgtcgtttcagtttggtttccgttcccgcgttttgctggaaagcagttgtggttgaccctataataagggtattatcggtattaaaaaatgtataataacggaaagttcagtgaatctcgatatgtatatatataaagccaaagcctttaggttaatcgcaaatctctacttctctcttagggtttgcgaaatcgctttctctgcaatcggaaccctaataattgatcatatcgattattagatcggaccagagagaaaaaagatacagagagacaaacaatgtctcggtgttatccttatcatggacctccgaatgcgaacaaaggagaggccttggacgagttgattaaggttcgtttgagcaaatctggtttttgctttattaatcaaaacaacaaggcctctctcttattcgatggattattaattaaaacattttggttttgatttatgtgggttttggttaaaatttgattacttaaaagacctaaaaatgtgttttttatttttccccttttttgtttaataatgaggaacactgatagatacccacaacgattttagtatgtaatttgaatttgggatgatgaatttgtaatgggtatttatggatttggatgattctctgttctactactctgtacagttgttcttaatgattctcattctgatgcttctatagcttcgaaaagataaagaagaagtgttaaagttaaggacaggaaaatgtgataaaacattgaaaaggaatgatcttcaagagaagatcaagaagaagaagagaaaaactaatgatgggcatgtttctaaggtagatgactcaagtgatgttactcaagaagatgggcaacccattagtagcaattacaagaagaggagattacatgaagtggagccattgtctaataatgttggggacaaggaaagtgagttcctttactttttctaaatcttgaattgaagtcatgtttgtgaacaccatggttttttgtttatttgagagactgataacaatctatatctgttcattaaacttattgtagatagaaagattcttatccggatacccaatactggatttgggaaacatagctttaaaccctgccgggaattgccattggctgtatcggagagcagaattgaaactaagggtgctcttaagcaatgccaagagttgccattagctgcacaagtgagcagtaaggagagtaaacaagagttacaaaatcaggagttgcccttgcctttgcctttgcaagggagcaataaattggagagtaatgaagcgaagaaactctgtgttagactatctccgcagttacttagacaacgccagggatcgtcattagctccacaaacgagcagcagggaaattaagaaggaagaagctcagaaactgcctcttaaaacatctcgagagttgcctttggctgtacaagagtgcaataaatccaacaggaatgaagctcagaagctttgtcttaaaccagcccgagagtttccattagctccacaagctagtagcagggaaattaagagtgacaaagctcagaaactaccacttaaaaggcctcgagagttgcctttggctgtacaaaagtgcaataaatccaagacgaatgaagctcagaaactctgccttaaaccatcccaagagttgccattagctccacaagcgagcaacagggaaattaagagggacgaagcacagaaactaccacttaaaaggtctcgagagttgcctttaactgtacaagagtgcaataaatccaagacaaatgaagctcagaaactctgcctcaaaccagctcgagagttgccattagctccacaagcgagcagcagagaaaccaagacagatgaagctcagaagctctgccttaaaacatctcaagagttgcctttggctgttcaagagagcaataaatccacgaggaatgaagctcagaaactttgcccaaaaccagctcgaaagttgccattagctccgcaagcgaacagcagggaaatcaagaaggatgaagctcagaagctcggccttaaaacatctcaagagttgcctttggctgttcaagagagcaataaatccaagaagaatgaagctcggaaactgtgctttaaaccgtctcaagagttgcttaaacaacggcaagagtctccattagctccacatgtaaacaatagggaaagaaaggggtgtgaagaagctcagaaattcttcgttaaaccagctcgtgagttgcccttggctacccaaaatagcaataaatccaagagtaatgaagctaaaaaaccctgccttaaatctgctcgagagttacccttgcctatacaaaatagcaataaatccaagaataatgaagctaaaactttctgccataaaccagctcaagagttgcccttagctagacaagagaccaataaatccaatagtaatgaacctcagaaactcctccttcaaccagctcgagagttgcccttagctagacaagagtccaataaattcaatagtaatgaacctcagaaactcttccttcaaccagctcgagagtcgcctttggcaatacaacagcacaacaaattcaagagaaacgatgctcaaaagctctgccttaaaccttctcaagagttgattaaaaaaccggaagagttgccattaccttcatgtggaagggaaagcaagaagccccaaactcaaaaactctgcacaaaaccagctcaagagttgcctttggctatacaagagagcaataaacccgagagtaatggagctcagaatctcgaccctaaactacaaaagaggatagaatccaaaagggcctccttgaaaaccagttcatgtgttaaagatgatggtattcaaagctgtgcttatttgtataaaaaattgattgaggatagggttcttccaaagattgaaagagagcattgtgattttgaggacgaatggctaatcgggtcaaagatggaaaagcaggaaaatagacaagaatccatagtacatgaagtaacaaatgctgttttatcaagttctatgagctgcaatttgtggccaaaagctcattacttacctaaagctgatgtgtttgcattgccttacagagtgcccttctaatttttgatagttaaatttgagataattttttaattttttatttagttcagtgtcttaaccaaaaaaacagagaaccatatactgaaattttgtaaagtatgaatcacactaatgagaatgagaagagtagcatgattactttatgtgaaatattacataacccaaccaaacaaacaataataaaaaccattgaaatatttcttcaagactcgtatcaattgatatttagcaaataatgaaatatatatgtttctatgtaaaaagaaaaaaaaaactctacataatttaaaatgcataaaataattgacacaattaatggataaattttatatggtccctaaataaattgataaaatgaattcatcactcatttgaattgtttatttttaacacaaaagtgttacttcatatgtatccttattatactcaaaaataattgtgcaacaacacatgcgcatgtatcctcatatgactgcaagtagagtaatgaggtctcccttcccttatctagacttgggagtaataagctcaaggccacccatgaatggcctcaatgggggcgggattatgacagacccgtcttcttgctggtaattctcaagcaggcatacaagcattcgcggtacagcacaggctgttgcatttaacgtgtgaacaaattggggtggagcaaggttactcttcccctttttaggagtgttccctgctgatggctctgagggacgatatcggataccaaggcgacggctttgataatctgtgcaattcgatgcgctcgatatctaatgaaggattggatttcaatttcattagggattaagaaatgatattaacattgtctaaatatgatcagatgagagtagtagaagtagcaatacctcaccgaaccgttctaaaccaggcatccatgcctcgatatcatattttcggtaagcaggagcgcctaaatcaccagaagccatatccaagattctgccaagaaaattcatcaattttgatcaatcagaaacagagcaggataataaaacataacaaattggaaaccacttgattaaaattgctaacttataatgtagtccaagtgacgagaacatgtcttcttcgattctgatgagctcctcaagatacttttcactctcatctggtcggcatatgatgaacatctctgccttactgaactggtgaactcgatacagacccctgaagataagcatagccagttaacaaaaaacagtgcagcgcatcttatttattgaaagcactgtggtgtatagcatgctgagaatttaccttgttgcagcaccagcagcacctgcctcggtacggaagcaatgggagaatgctacatactttaggggtagcaatgattctgaaataatagagtccacatgaattccaccaactggaatctctgcagtgcctatgagacactggtcactaccctcaatagaatagacctattttcaacttgtacatgatcaatacagaggtaaagatatcgaagtaccataaaacttgaagaaaaacaagtgcattgtgcttaatgatacagcaaaatatttgagcttttgctagttaaaaaagttctcttatgggagaaatagatatacctgtgtgtttgttcctcggggttgaaaaccacatttttcaacaacagaagacctaacaagttctggggttgttaaaggtgtaaagccacttttcataacttgtgatagtgtccaattaataagcgccatttctaacatgactgcttcatttttcagataatagaactttgatccactgacctgaaaataaggactttagttatctttatgggactttagttatcatgtcaaactacaatgattaaagattaacaatcatcaacggtaccactgaagcagcatcaaaatcaagaagatcaagatctttcccgagttgttggtgatcctttacagggaagctaaactctcgcggggaaccaacctaagaaagcgcattgataataagtaggaagggagcagagcaaaacaaaatccaaacaccttaacataggagaatgatagaagtataccatctttcttatggttgcacaatcttccccgcctattggaacatctggatgggtcaaattcggtatacattgagcttcctgctgaagttcatctgtgagtttaagcaggtcttcttccaagctaagaagctcttctttcagattctttcctgagcaaaaacataaacaaatgacaagtaataatgagaacaaattaaataatcttatatggcgaaaggaaggcactactaatcagtcataccttgttctatcagcttctggcgctctgatggttcaagctttcctttcatcttgtttgccaccacattcctctctccacgcagcctctcaacttcctgctatctgtgagtgacaattagctaaaattgagcatgaaaacccgatttgctaaaaccgaaaaatgtgctccatttaaacaaacaaaacagcctagataagaaactaatgatacttattcaacagtgctgcagaaaatcaagtcaacagtgctacaaaaaaagaagcaataaagaaggataaaccttaaaaaatggaccttttgaagagtaagcattttgtcatacaggtggagtacaagctccaaatttgcattggagtttctgtttcttatgttgacagcgacaacatccttgttatcccttatccatttgaagtcaattgcagctttccattgaggtttcacaactgcattacacaagtgagttgggagtttattcaatcaaagattcaaaattgaagcaaaatccattcatatgatagaaaaagaagagtacccttttcatctgtgggattttgcgttgcttttgtggcttgaacagtggaagttgagaaagctctaatgggtaaagaaaaggaaggtctttgaggactgtaatgtggatagaggaagaaggttttggagagtgacctgaaaactaagcgagaagaagaagaagaagagggaattgcggcaaacttgagagcatttaaggttgttccgcccaaacaacactggaaacccattgattatcgaccctgagtttggaaccactaacccaccactcccctactccccaagatgtatgtaaaaaaattccttaagaaaaaataataataatcaaaataaaaaagaaaaattacgtatgccattaacctagtataaattaggatttttaccccgaactttaacatgtattaaattatgtctactgaacttttttaactgtcgaaaattttccttgaactcttgaaattgttagatttaaggacttttgtctaattttatttaagtttactattttagtgattatttatgcactaaaccatgctccacagacttt

SEQ ID NO: 161831 - DNA, 4064 bp, Cannabis sativa
  modified_base (4016)..(4019): a, c, t, g, unknown or other
ttggtaacttggtagttggttacctgcacgtgctgaagatctatcaatcttgttgacgacaacaagtaaaactttctttaaaacaactcttgtttgtggcattggacaatccacataatctacctgcaaaaggaaaacctcttctactttaataatgtatagaacaatgcaaatcaatgattatatgaatggtacacataacaataattgaaatacattttacaaaaggtggtaaggcgtaccgattcagaaatctccccgaaattggagtgtccacatgtaaaatggactgaaggctcacttcactcatgctgctgtgactgattgaaatacacatacaaatatatgcataagagaattagggtgctgtgaaacaatagtgctttgggcccaaaccagctaaaggattgcttgtgtggagtgatgagctcttgatgctgactccttatggttacttgaggctgagtgatgcaagaaatcttcttagaggaggagtaagagttttcttcctcccactcatagttttcttccagcaaagggcaattataaattttgaaactttcaaaagagggtggcagtgaaccttcgaaagagggtggcagccctttcactggaagtgtctgcaagttggggcagttagacacgtagttctttcaaggatgtgagctcttgaaaccccccattgtcatttaaggttttaagacaagcaatgtcattgattttaagggagataagactggttggcaggaacccttgctctagaaaggaaaccatatcttcacctctatagcctccaaattctaagcttatcagattgggaagtgtttccaaattccaattctttcgagatgcaattaccttgtcacaacgttcaatgcgaagctcacacaaactgagaggcaacccaagtttaggaagtgattctaactctggacaatcatcaataactagttgttgtagagaaggtaggagaataggcagtttctcagggagaaaccttaatttgcagcaatttaagagcttgagttgagtcagaattgggcaaaggaagttgttatcaggtaataatgtgaagttaggacaattatagaaagagagaaaagataaagagtttatggggctattgaattgggagaaagattctacattttcacaatttaaaatttggacatatttgatgttgggaaaggaatctatattaagcaattcgaatgagttggaagaattttcaattgaaagatattggagaaattcatacctatagggtggtaagaattctaaattaccgcaatggcccacatttaggtctctcaagttggcaggaacatacctgtgatcactattgcttgatttgaatcctggaagcttcttacagcacgagattcttattttagtgacattgggcatcattgggagcgaagaaccaagctctgggcaatcataaatattaagctctgtcaaaaagggtaaatgataaggcaaattgcccgtgaggccttgacacatacttataactaatgattttagctttgggaaggctacaacatttggttcaggcattgaccattccttccagttcgacatttgtgtaaattccaaggtttccaatgatgcaaatggtgtagaagtagtcccataaaactcaagactcactgtttctattgtatggcactttccaatccaaagagttttgagagatggtaactgcccgagtggtggcaaagtacagagtttataacattctatgttgagatatctcaaacttatgagatgatagaaatttttagggaactttgtgagagtctcacactgaagtatgtttaatgtctgtaaattgtacaacatgcaaaaggacttgggcaactctttgactgaagtttgagagagatccaagtagcgaaggtgctttaattcacctattgatttaggcaattcatcgacacaacaaaaaccttttagagacaaaaatctcaaacgcttcaacttcaacaaatctttcaacacatgttgagcaaattcgtttgaagtgtagataaatggcccaacaggcaaaattgtacgcatacaagttcctttagaaattgacttgaatagctcatcgatgtcacaactctctaggggaactgtaacgtgtcgtgtttgcttcatcatttcaatttcataaaacttatttctctccatttgaataaacttctttctagatacaaaattagccaaatcaaccataaggtcatgcatgatgaaacgaaatgcatgaacgtttgaacgttgaaaaaaagatcgtgaaactaaatcactaaaatactcatatcccacttcttctcttgttctatttccatttgaatgctccaataaattatctaccatccaaagcctaaccaactcatctatcctaaattcatagtctttaggaaagagggaacaataaacaaaacatcgttttaaatgtgatggaagataatggtaactcaatctcaaagctggaagaatattttcttctccaactggcaaatccaatacattacactttgctattctctcccattgtgttacatctgtaaagcacaagaggcttgcaaggactttcacagctaaaggcaagcctttgcatttcctaacaatgtctttgccaattctttcagagtatgaatccataaaaaattcttcattgcgagatacaatcttcacaaataacttcaagcaagcttcctccttcaagttcttaagatggtgaaatccagctgttcccattatggatcccatgatagacacaactttagaacttcttgttgtgacaattatcttactaccttgagcccccactctaaaaatcatcttcattgcattccaaaattcatatttttcacaccaaacatcatccaaaattatcaagaacttcttttccttcaaccttttttgtatgttctcttgcagcacaatcaagttctcaacagcacaagtatttctagttattgcttcatgaacatttctcattaccttacaaatatcaaactcatctgacacacaaacccatgtcttgagttcaaaatgtttgttaacttcatcatcattataaacagcttgagtcaaagtagttttaccaatcccacccaagcccactattggaatcacacgtatcttttcactatccacatcattagacaacaacattcccttcaaacttttcttttcatcatctctaccaaaaaattcagaatcatctatggttgacattgaaggtggtctatgtgtcatgatcttctcaacgccctcttgtagattaaggatgtctttctgtttttcaaaagtttcaaacctctcaagaagcttctccatttctgtcttcctgtcaagatcagttgagtcaaaattagagaggaatttacttactttggttttgactgactttgtttccaccttgactttgagagcatcatattcaatttcatcaaagagatcctctgcatcttcaacaacatcttgaagcttgtccagccacttctgaactatggggtccctcatctgtttctgatctgcatcattgagcacttttgcaagagagaggaacgtagtctctagtttatcgagaatcctatcgaaaccagagtctttctttccccttaagaagctagccacatcagaagaagcgatcttcttcagcagaaactcaacggaaaaagagacaacaggtcctacaaccaactcagccattgttcccctcctcaccagttcagttgcaagtacagtaaatatgattctccgaatgtaaatcagcaatggcaataatgagagaaacaaaacaaaatcacaatttcttaagaggaaacaaaaacaatgctttgaaaagtaatatataaactatcttgagcatgtgcatgtgaccgttactcgtaagctgcgagattaacatgtgcctttagatgcttttcccacatatgtatatactagatattctaagtatatgtttattttattttagtttttagtttttttttaatattataattttaaaattnnnnatattcaatgtagtgataatcaatttgaaagcataatagtgattt

SEQ ID NO: 161832 - DNA, 1387 bp, Cannabis sativa
cattgcatattaaaacttggattgggattcaccttttttgcctttcagaatgttgtattgtatttgtgtatctatcttgattggcagattgttatattaattttttgcaatgatgcagtatcttgacgaaaacaaaaagttgattctagcaatattggacaatcaacacctgggaaagcttgctgagtgtgctcagtaagttacatctcctcttatcttaacgtggttgtatgcaattttgttctgatgggtcagaatttgcatctgttgcctgaaaattcttggtttcctctgctagatgtattacatgtttgaattggttgccagttgctttttttttaaaaaaaaaagatattcttattatttttcgatgcatattattgcatttaggagcttcaattgagaataaatatcagtttctaatgtatttatcgattctctttagtagtcatatccttcatctcgattttggctgtgaagtttaatgtgtttcatgtgtttccaactgtgctacattgccttctaatatttttgatgtgttatatgatcattaactttgcaagtcagatagcggcagaaggatgtagggatattgctttaaaaagttagaaattaattcatgttagttttatttgcagatcaattattgttagcaattcatgagatataagaataagattatactgtgtaatgtttcttttagcattacctgcaatatttatctactacaaatacaagttggtcatgcaattaattttttattttttattgtattggtcatacaattctaagataactaactaggcaactcttatatatcttctacactcaaattggatgcagttaaagcagtgaaagagctagaggtgctctcctctatgcttttatattcttgcattagaattacacctgggttgttgaaacttagtttttaatacccaaatgttaaagtctgtgttattagctgcttgcttgtactcacaataatataacttcatttacaatggaacggtgttgatctaggtatcaggcccaacttcaaaagaatctgatgtatttagctgcaattgctgatgctcaaccacagacgccagcaatgcctccccaggtttgtagtaagcaatgaccctagttttggttaatttatcttttcatcttttaatgatttacttgctcatttactcttacagatggctccgcaccctgcgatgcaacagggaggatattttacgcaacatcctcaggctgcagcgatgatgcagcaatcaggtatttttcctccaaagatgccaatgcagttcaataatccacaccagatgcagcaggatcagcaacaacagcaacaacaacagcagcagcagcagcagcagcagcagcaacaacaaca

SEQ ID NO: 161833 - DNA, 4010 bp, Cannabis sativa
cttcatattctgaagttctacatggtatcagtcgccatagactaacgtcgaccatggagtctaccttctccgatcctgcctctgctgccagaactccctcaactgcgacaacaacccagatgaactccaaccacaaccctttttctcactcctaatcctctgttctaacagtcaagcttgatagaactaattttttgtcttggaaatctcaggtcattcctactgtaatcggccatgagttagattagattttactttcaggcatttctcctctgcaaactctcgtttctggagaacccaatcctgaattccatcaatggaaacgcaaagaccagttgctgctgtcatggttgcgatcgtcgatgacagatggagttcttgcgtctgtagccaacttctcatcgtctcatgcggtctggcgtgcgcttgaacaaaaattctccagtcaatcgaaagcccgcctgcttcaactcaagaaccagttctcaactattcgtaaaggcggtcaatctatctctgaatatgttgacaaaactcaagcaacccacctcgtgcgtacatagctgaacatgagctcgaatatgaccctcaagcgtatgccacatcatttattcctgattttggcgatgattccggatggttcgtggatacgggtgccacaaaccatgtcaccaatggtcttgacaatcttgattcagctgtaacatacccaggatctgaaggtcttgttgtgggagatggtaagaagttattaatcactaatataggcctagcttctttacctgcttataactctacaagtctcaaacttaattcagtccttcatgtacctgctatgcaaaaaaatttggttagtgtttcacaactcactaatgataattgtgtttttcttgaattccacaaatcatgttgctttgtcaaggacaagcaaacagggaaggtgctgctcaaggggacacttaaagatggcttgtatgcgttagaacaatgctctcaacattcaaatgtggcaaaattgcagcaagatgtgcctcggggttcttcacctattgctatgagttgtagtagtcatgtttcattaccaaatgtaataaatgacaattcttgtaatacaactcatctcaataaagacaaaattgttcatctcaatgtctcccaccccactgttctgcaaactaataccaagaatcacattaatgtatggcacaacaaattaggacatccgtccactactgtcctaactaaaatactacaacatgttccccacaatggcaccatttctcaacttgagttttgtcatgcgtgccaacttggtaaaagccacaaacaaccctttcctagcacagataacaaagccacacagccccttgagcttatccataccgacctatggggaccctctcatatcaagtctaaagatggatacctttactacatccatttcatcgatgattatagccgatatatatggatctaccctctcactcaaaaatcacaagcacttgacatgttcttaaagttcaaaacaatggtggaaaaacaattcaacttaccaataaaaaaagtgcaagctgattggggaggcgaatatagacccttttctcgatttctcagtgatcaaggcatccattttcaacatccatgtccaaaaaccagtgaacaaaatgggagggctgaacgcaaacaccgacatataactgagatgggacttactctactagctcaatctggtcttgagttctcttattggtggcatgcatttcacacggcagtatttcttattaacagactaccaacaccagttttacatcatgtgtctcccacagaagtgttacttggccaaatacctgactctactattctcaaaccatttgggtgtgcctgctatcctcatcttagaccatacaatcatcacaaaatggaatacaagacaaaacaatgtattttcataggatactattcctcccataaaggttatttatgtgaaagccaagaagaacgattattcatagctaaaaatgtggtcttcaatgaacacctttttcctgctactgttcacagcacgcctacacaggtacaacacccctcaccatgtccttttcctattgcacactttacttttcctcctgtacccatcccctcctcaaatagcactatggccaaccgtgataatgaccatacacaacagccacctcccactctagaccctatacacccacccactctccccactattgatccatcacatctccctgacacaacaccaacaactactagtcaaaccaatgtacctcctcctattactcatgcacccacatatgaccaaccaattccacctaccaataccacttgtccatctcggtcccatattatgtgcacaagatcccaaagtggaatattcaaacccaagtcatatatagctacaaagcatcccttacctgagtcacttttacctacagagcctaagtcattaaaagaagctctctctcatccgaagtggaatggtgctatgggcagtgaactctctactcttaagaaagctcacacatggactcttgttccctatgattcatccatgaatgtcattgggtgcaaatggattcatagagtcaaattaaacaaagatgggtctctcaacaggtacaagtcaaggttagtagctaaaggatatctccaagaagcaggaattgattttcaagagacttttagtcctgtggtaaaacctactacagttcgcacagtactctccttggccgtatctcacaactgggatgtttctcagttagatgtaagtaatgcatttttaaatggccctctcaatgaaactgtatacatgtgccaacctccagggttcgaagacccaaataatccaacccatgtgtgcaagctccacaaggctatatatggcctcaaacaagcccctcgggcatggaatgataagctgagaatgaccctacgggcatggggattcaatgattccaaagctgacagttctctcttcatctatggcaacggcacaagtctagtcatccttctagtatatgttgatgacatattaattacaggccccaatgcctcccttatttcaagtctcattactgatctcaacaagtccttctctctcaaagaccatggtcaagtccattacttcttaggagtggagatttacaaagacaaaactggcatgtatttgtctcagacaaagtacattacagatttattagtcaagttgcatatggaaggtgccaaggcaagtcctaacccaatgagtgctacggtcaaactctctctcactgaaggagagccatttcctgatattacattatacagaagtacacttggtgcacttcaatatctctctttaacacggccagaggtagctttcatcaccaacaaattaagtcagttcttgcatgctcctacctcggttcactgggaagcttgcaagaaattgcttcggtacttgaaaggcaccatcaaagatggcttatggatacgcccttccactgatatgactctacacgcgtactcggatgctgattgggccatcagcatagatgaccgtcgttccactggtgggtacttggtctttcttggtgacaacttgattagctggtctgccaagaaacagcatgtagtggcacgatccagcactgagagtgagttcagagcacttgccaatactgctgctgaactcaaatggattcgatctatgttacaggaacttcaagtctctattcatcaaattcctgtcatctgggttgacaatcaaagtgccttagcacttgccgcaaatccagtcttccacgcacgctccaaacacattgaaatcgatctccactttgtgcgagatcaaatactggataatcaacttgctattcgttatgttccgtccattgatcaagcagcagatgttctaaccaaagctctctcaactgaccggttcctgtacttaaaatccaaactaaaaatggttccaacaccatttagtttgaggggggatgtcaata

SEQ ID NO: 161834 - DNA, 2947 bp, Cannabis sativa
aaaaaaatatattatagaattagaaatagaaaagatgatatattttggaaaataaaaatttgatataaaacagttttgatgatgtattttgtataatagaaaaaaaaaaagttggctattgagggcaggaacactaattaattctagtgcaaatagcctatacaattcatggtatcactatgcactgtttagtacttgtaggaagaaccaaacaaatccccctcaaagcttttatccacatcactatcaaacattcaaaattatctcccaaggtcaaaaaggaggataaccaacaaacaatttaaaccaaataaaataaaatgattttctcaaaaaacatgtcttaatcaatagattaaattaactataaaaaatatatataaataagaagcaaaattatttacaactcacgacaaaacattagatatatatatctttaataatttaatccttaccaaatcaatagccgcacgtcccgccgtgcccaactccatcactaaactttgtagatcaaaattttcattctcttggtcaacatcttcttcatcttttgcttcatgatccaaatttaatgataataaatgttgataatattcttcaatttcttcaacacaattttcccattgggtttgtgaacttggggagtctagattaattgataaagaagacaacaaacgacgagggtttttctctagagaatttggttggggtggaatgaaaatctttcctaaccaatctttaaaactacccttttctctaaattttgctaccattacaccttgatcatcttccattattcctctcttattttctcccttgatggaaagtaattttcctccacatattatgaatagctcacaaaaatcaggcttgttcttgtgaacgtaaaacgatccactaattgcattcttgattttcctaatagatagaagaaaaaaaaaagattaatattgagagaagagaacatgccctgtaattttttagtattagaaatacatgttagttaaattaattaccatggtgaggactttaagaatgaaaaacccataaccaaattggtaattttgagtcttgaaatcaagtccatggtgatcttgtgaattggctcatcgcatttctccactttaagtagttcggtcttcacctggagaatacacagatttacactcattagagcttaaaatttatttgttttgtaagaaaaaaaaaggttgaaaaaacaaacctggccacagaaagatgtgtatttagggagtaacttgtcaatcttttctttctcatattgtctaagaacatccaatttcttatcactaacagcacttgcagggagtttcccaactaaaaatgaataaatagatacataaacaaaatacccaattaaagtaatttgatcaaagaaagaaaaattatgtgttttgattatgaaaacttacatggggtgtaaacatagtccttggagacactgaaagtaagatggagaatgataatggagattggttgagatttccacttcttaagagtccactctaaggtcttaaacccatcttctaaatcgttcccaagagctacatacactttctctgttccactattatccattaagcttataattaatgtctaatcaaactggttttgggttttgcaagaaataacttagaaagttacataattatagaggtattttgagaggaatatactatttgttttctaaaataaaactatattacaaataaatagacaataaggcaatagagttattagtttgtaagaaagaaaattaataaaaattaaaaggagaaagttgtttaatagaagaacttttcaaactaacttttcaaactagtctctgttgaagctttttaacatttttccctttgtttttgagacaaggacagcccaatgttggacttttttgtgtgtctaatggggaaaaaatcaaggtgggacagaacggaactatgggactgagattttcaattaattttgtgttattaaattaaatatatataattattaattatatatcgtcactcattgaaagccatatagaagcttaatactgttattttagaatgggttggtttgtatgtgtaggacacatatttgaggtaacatataaaccgaataatgtttgttgtgacaatttgaatctaaggtcagcatcatttgattgaatgacacattaccaactcacctataatccaaaggaaaatagagagaggtccctaataattattttaagatacatttgagtcatatttacttagagcatcattgtcttgtagatgtcaattcaggtcttattttgtccaatagagtgggtattggtgtacttgcggtgagctcgagcaaaaggcgcaaccgaaggtcaataaagctctactgctatccaatttcggaatggtaatccaattggagaaacttgactgtgaggatgttatgtcaaattaatccatgattaaatatgttatatctaacttaagcttaaagttatctaacaagccactttggtggctactccattacttagtactgccctgaggggcttgcagtaaaattatatgaatttcattttaaaaatttcgacctaactatccatagtcaaaataagttctagccgtaacaaaatcacaatcaaaaaattgttttaggtatatcgatgtacttcttttatagttttgacatcctaatagaaccgacgatgtaagatttttgttgtacataaaggagcttgattataataagattaattaggatttttgccctctgaacttttaaggtcgttaaaaatatctcttaaactattgagataattagatttaaggactttttttttttttttctaattttagtaaaaaagtctgacatgtataaaagttcaggggtcataatttagtacatatcaaagttcgagagacctaatttcgtagatatcaaagtctgggga

SEQ ID NO: 161835 - DNA, 4828 bp, Cannabis sativa
gaattagcaacttgatgattaactaatacagctaaattaccacctaatttaatacttactagtcatctgtcctaatactaattattgtaatctttattacttaagttaatgagaatgtgaagaaccattcacactcaatattattttcctaataaggaaaagcttactttgcattatgttgtttttattagtttattattggctattgagtccataatcttacaaatcgtattatatttttacacattatcaatataagagttaaaagggagtcttacttgtttcgagcgagagaaagttgccatgcgcaagattcttagacgagcctcatttatcaagttgttgcgcgcattgtgatccaatcttaagcagttcaaaaatacaagctcctcgctacgaacagggaaatgatcccaaccttgttgtgtaagggctaacttacttacagtggacatagttttcaatgatgtgcaaccgtgcgcatcaacaaactctataaacaacggaatctctggtaaggctcgaagattcttacaattgcttatgtcaagttgtttcagctttaaaagtttgctaatacttccaggtactctatcaattatgcttccacttaaatccaaactttctaatgaggctagcaaaccgagctgctcaggaatttctaacaggctgcagttgctgaggttcagtcgactcaaagactttaaacctacagacattgttggaggtaatgcatttagcttcatgcaaccagaaacattgagaataacaagcttttctaactggcatatacttttcgggatcagctcaagctcgcgacactgctgcagttctagtgttttgagacgaggaaattttgcaatggaagaaggcaaatctctgatagctgtgtttcttagataaaggtgttctaaatttttcattggttcaaagatttcaggtagattcgacaactttgtgcaaccattcaagttgagatattgaagtgatatgaatttttcaaagctacttggtgacaatctctcaagccttttacagttagcaagtaatagtgtctgaagacaagtgagagattcaattgatgaaggtggaacttcatgtatgtttgttccgctcatatgtaatctttgtaaattccttggaagttgtggaaacttgtgtatagaagaacaaccactgatatcaagtgtggtaagcttaggaagatattccaaatgaaaagaagcttcggttaagcttcgacaatgctcaaggtttatagactctaaatttggagcccggatgagactgggaatgtgagtcaatcgaatagaataactaagatcgatcttcctcaagttcacaagatcctgtcaaaacaacaaatgtataacagtcaacttgtagaagtcaagtgtcacttgtatctatgtttttggtattttgacaactcttacaactttttttttgtttctatgtaacagtcaacaacatagatatagacatagatatattttgaactttgttttcggccaccgtaaattattttaagtttttaaaaaacagttgaaatgtctgatatataagaaatcatgcataaagttaaatagataaattcctgatctacttaattacctggactccatcccacattttctccaaattgctatatggcatgacaagttcaacaagatttttcaatgagaagccttcagccaaagatgtcaaagggaattcctcccagtacaaatacctaaccgatttaatctgttcagagaaagattgcaaagacatcattgtgttggtagaagaacggatttcgagcaatcttagattcctcatacttttgaagactttattcaattgaacttctccaatttcagacatgtcaagacatattccttcaacatttagagcagcagattcctatacagtagtaccattaagaaaacatgctattagatagatatggtgaaaatatgcattgcatacatacattactttatactatacagaacagaagtgtctataaatgttttaataattagcatcaactgtttattttcttttcacttactgtgttatgttcaaagatgtgtagaatgttttcattagtaagcaacctactcctcttgttagtatcacgacgaacaatttcacgagccatttcaacaatcaaatcatgcatcttaatatgattgttggcatcaaaagtcaatagaaatttgtccctcagatcattcaccacgttactagtagagaaatctcggccatcaagtatattttccacagtttctcggtccttgtttctgaaaaaacatgcagtatccaaaaatacgcctttttcattgtcgtctagttcatcgaaacttattttcaccacattttgaattcctatgttgggaattcttctcagcttagccaatgctttctcccaatcttgtttgctcttgtatttcaaacatgatgctaaaactctaagagccagtggaagtccttgaacatattccacaatctcttttgacaactctgtgtaatctatttcagagaaatttctttctcttgatgcaatcgaacgaaaaagttgcaaagcctcttcatagttcaaattttcaacctgatatacttcattagctccaatatttttaagcacttgcagacttctagttgtaacaataattctacttccatagccaaacagatcatgttctcttgataaaaactcaaattgatttgaattattcacatcatcaagaactgtaagaactcttttacgacgaaaaccatctttagaataaatactgctactcaatgtcgacccaaaagacaacgaatattgatcatcatcactacttaaactttcttcctcaaacagttcaccaataagcttattccgtagattcattagttcttgactatttgatactttgtcaacatttccaagaaagcagctactttcaaactgagaagcaacacgttcatacacaacacgagctagagttgtcttacctataccacctgcacccaaaatccctataatacgaacttctggtgacccaatgcgtagcaaggatatgatcttctccacacgggattcaattccaaccaagtactctgattccttattatctaatgattttagtttattcaatttactcaaaacatcttccacaagtaactcaaccaattcggactcagacctattaagaaagtaatcattaatatctagtgtttatgaaaaagccacccattctctttaattagttagtacaaggaggtagtcaaaaactaagaactcaaatgaatcagtcaaggtaagacacactaacgtgtcgtttggttagaggtaatgaaatggaatgcaatgtaaaagaatctatttttgttccatttcgttctttgattgcattttaaagtattgaaatgtcatttaaatgaaatgacttttctataaatttggtgaatggggctattccattttgaaatggaaactcattccaatagaatgaatatgagaaaagatctaataatatatttatcaatttcttttatgcattttaaatatctttacatatcattctatgcttattcctttttcattcccattcttattccaatttttttattcctcccaactaaatgcaacctaagtttggttcccaatgagagaaatctaaaaaaagtgctacaaagttttacattgacaatgtgtgagagctaatactatatacaagacgtaatttactcttttcattctcaattggggttcgtttgggaagctgattttcaataggcatgctcaacatagcacaattaacacatatatcagccctaaaagaaacaaaacggctaaagattattttccaattctcatttacaacaaatttgaagttagaataaatagaaatttgtctccctcaactattgtccttgaagagtttattttttattgtaaaaattctcattagcatgtaattattacagatatatatagatatacaaatgaattatgtcctagttttgatgaaccaaacatgcttaactaatttttgtaaaaagaaaaacgtaattaattcgatattataataagtagaaaatttaatagtttacttacttaatgattgaagaagtaaagttaaactgagtattggttgctgcagcctcaaaagctcttctccattcatccactctatctggttcaaacagagtaaccattttccctaattgttccctcacatgagattgatctacatggtaaaacactggaataacaagttcctgtttcaattgatttgtattgcatttcataaatacatacacaagctcatccaaacacttcggggacgaagcatagttttcagagaaaataactataaatagcttcgattcagatatttcttcttttcctgcttcctgttcctgacttttgagatccacatatgtgtagatattcttccgatgtaaggccgcatagagattgctaacaaaattcttattaaccttgtctgatctgaaattcagaaatacatcatacttttttggggtgaaattattggaagaagatgaagaagaagaagaagccatgttcaagttggatcctagctattagaaacttttctttgatattattgaggctgttgaaactaatggtgggcatattacgagtcaatgaaattgagttttttaatatctcattttttacaataacttaaaagagaatatttacaataatttagtgtgcatgtgtcttggacatttgttaggacaattcacaagtactaaatattaaatattagaccacttaggctagctcaagtggctataggtgggtgtgtgagtgttggaggtc

SEQ ID NO: 161836 - DNA, 2039 bp, Cannabis sativa
ttttgttcagtttctcaaccacagaccaagatatcatcatattatgccatacactattttgtttagagacatagtaccaaacagtaacacaaaattctatgaattattttctgaagaatcaaaaatcattcataaagatattgtgaagctgagatgtgattacgaaagtttttacccttggggtagtcaattttttattcgagctacatttcttgacatgttgttgatttcaccgaaattgcaatcgaatcagaatcatgaattttgcattagaatcatgaattttgcattagcaatctactcacaaaaaaaatggatcgaattacctacttctattccttcagtaaggcgacaatttcgccttgactgtggatttgtagctaagccgaaaattgatcaatataatcatgatcattatcattatcacaataatattgttgataattatagttgcaaggttgtgttatttgaacaagattttaacaatagtaatgctagagtgatgatcttttgttcggatattggagaatggagtagttctatgttgccttactcgttgttatggccaaatttggtagaatatccactccttgaagattcaattgcaagtaacaatggaattatatattggttattgaaagtaggagtgaatgaagttaaaggaatagtctcatgtaatccattcacagaagaagctgatccaaaacgacatcgttttattgagtttcccaaaagttgtaaagctactcatggaatgaagaaggtttataaagacaaaattcgtattggaattgttagaggacgactgcgattgtcgtttgttaaaagcgagggagctagctattttacattgagaatttgggagttgaatgatgacgatgatgaattattatggtgtttggtgcataaagttaagcttagaaaaacaacaaaaatggataagacacttgtgcttggttttcatccaaccaatcctgatgttattttcttgtcacgaaattataatttatacaaataccaagtgggtgaagacaagtataaattgcatgatagattcccaaaagtgtatgatgaaaaaattatgaaaaaaaatcctcatcataacttaagtgtgtttgttcttgtgcaccctccatcttccatccctaatcctccacatctatctccatggtctattattcaataaagctccatcagtgatcttcggaagcaatttctttctttagtatttcttgttttatttctatctagtttgttatatcagctactgtaaactcttaatatttcatcaataaattaagtgttgtttgtttgagtttcttattaaataattttgattcattaataattatatattatatatattgatttgttatatctttccatccaatttccatccaataataaaggcatttgttaatcttgctcctaacaatgtttttttttgttgttgaaattgcgggagaaagatgattcgaacttgagagctggaaaatatagaactactaaagtatgtttataaaaatatatatagagagagagaggagagagagagagagagtactatttctagtgtagggattttaaaagaattctcaaataccactatcaaatatttctttaattttttttatttttctaactttttaattttattttatttaattagagattattaattaattaattttttatattttaccttatttatatatgattagagctcattaattttataaaaaaaaaataaagatcattaattaattaaaaattaataaaaaattgaatatatgcatataaaactaatgattcacttttatcaaaaaaaaaaataaataataatgataaaaataagtgcctaacgatcattaaaattagagtaatttagcattttctttttttttttaaaaaaaaaatggtgatctttattaatgcaaataagtagggacaagtctcttactataatgaataattatcttttttaccccctgtacttatgacactatactattatgccccttaatctattcagcttgtta

SEQ ID NO: 161837 - DNA, 1027 bp, Cannabis sativa
  modified_base (919)..(931): a, c, t, g, unknown or other
acagttgagaatgcttgtgaatgtggaaaggcaaaggcctcaacagttttgatgcaattcatcacttgtggctccacaaaaatcaaagactctggggccattaaaaaacaaaaggattaacaacttgggcattcatagagtaaaaatcaaggcactacaagaattcaaatgtgagaagaagagtaatgttttactatatcagattatgaacacactttagttccttgttgctgttatgaagctagctaggaaagaacaaagtattttgttttcttttaataaacaagaattaagaacttcacttattagacttttctctttaacttttatgctacattgtcattcttgaaattccaaattgctgaagctaagttagatcagatgatagtaataatttttagatgtcatgtataggaggaagctttattcaagtgtcatcatatcaacttcaacaagctcaagccaaatgtctatgactgatttccaagtgttagagactcagagttgtttttatgatcagagatagctaaagcttaaaggccaatttgggttttctcttctgaccaaatgcacaaaacaaaaatgaggatataaatgaaaccgaaccttcgaaacgacattaaaaccataaaaaatgaaaagaatggaagccaaaaaccaatagtaaagttaatcaaaaggcaaaggaggaagataaagatgtagcccaagatgataagcagaaaacacaagttacttatgatacaggggaggggatgcttgaaattaccattcagtgtgatgacttgttgtgattcaatcatgcacacaacaaaaattagaacaccttagtgtgatcaacaattaataaaatgaaatccagcaaagattaaaaaaccagaaagttaacaaaatggagacttagagcatgtttggtatnnnnnnnnnnnnnttgttttcaaaaaattatttttagaaatgagaacaaaaaatagtttttggagtttttaaaaacaagtcatgtttggttagtattttttaaaaacaa

SEQ ID NO: 161838 - DNA, 800 bp, Cannabis sativa
atttgataatgacttttaatattatatacatatgatatggatgaagtcatcaatttcaagtataacatgttcaatatatatatatatgatgataagacataatcatataaatacactcatatggcaaaaagaataaacaatcaacaaatttatatgggtgaaacaaaaacaaaagcaataatttgaattggaaattaaggataatatttgaggaagagagattgtacgtatgagccattaataatatttgtccatatcgtatcatattatatttattcaggaaaattaaaaaacatgcacatgaatatattgaacttgcacgtacgagggaatttatattaattgcagtaccactccaaaaggtaggatcaaatataaatgtagcttataataatcacgtgaaaggttcagtactacttaccaatttaccatatatatgataattttgaaaataaggaaaattcgtattttcaatatctaaataatttttttttaatttattttatagagtagacaatatacactgtcatattataataataataaactgcatcaaagatttagagatgcaagtatgtatatatatcaaaagaaaaaaaaagtatatggaaacaacaagatcaagcacgcagcagatgaaatagatttaataactgatattattactacttgttaaaataaataaattaatatataggactaagtttatgtagcatactaatggatgttctaatagttattcttttatttgttttgacataaataagattttaatttaattttttttagttgtatatatt

SEQ ID NO: 161839 - DNA, 2266 bp, Cannabis sativa
ctctctctctctctctcctgtttggctcaaggaaaccagcaaaatacaaggaaaaactcagctcaaattcttcatttcttgtcaattttttcagtcctaggagttatccaacttgagataaacttttcttggtactcttgaaggttttacggtttcaaagttaggttttgaagagggtttttgataaattctgttctatgtatgcttactttgttagagcttgtttttagatgttaattagggttgtttaagctttaatttaatgattttaggtctgttgtgttaagagtggggtagtttactcagaaactcactcaataatggtgagtcactaatattgatgcatttttgtgttttgagtgatgatgtatgtttaactattacaaaagtggctttttctatcagtttataactgtcttttatactatttcctaacagttccgtatatcgttggctatgtggacgtcataaaaatacaaaattttaaaagatgttttataactgttggaaaaaagtcactttaaatgacgatttacaaatgttggagtaaaagtttctttaaatgattatttataactgttgacaaaaatattatgtagatgaaattgaattacttgtttatatatttttttaataataaatatatataataatattaattttcatcaaaaaataaataatattaattaaaataaataaaattaaatattttcaaatttcacaagagatacaattcaaaaaaaaaaaaatactacaaatgcaaaataaattttatataaaaaataaatactaaatatcaatattacaacctaagtgaaactgattaaaaaaacttaagtgaatttgtacgcctggcgatggccttcaagccaaaaacgagcctctccttgatggcaaccctaaccaggcccgtcgatagcctttctccgaccgtccaagccaaaaatgagcctcgacttcactccccttgatggcaacccacaccaggcccagcgatggccttccttcggccatccaagccaaaaactagtctcgcctctttcccatcccttccccctcaaatctctctctcctttgttctctacacggtagcgacctctagttctctctagcccaaacaaaccccaaaaagcttaaccccaaccttctaatctcgacctcaccccctctctccttgtctctttttctctcggctcatatcgaacgagccttgtccggtggcttcttctgcctatcgataatggagccacacccaacgacagggttcaactccctcgaaagcccgtggtcaagactattccaccgtaaaatcctttgcagcttcatgctctgatctaagtactttgaggctctttcacaatatagtcttgagttagaatgataaatgagaagagagggaggcagcatgttatttgttagggttagaaaataaatgtgaataagatggaaagagaaagagatttttagggttttttattttatataataataaaaaaaataaaatatataagtgagagagaaataatataataataataataataataaatatttactctttataggctgaaaagaatctttccaatatttaataattgtacggaatactaactatatccaacaatatataactaacaagtataaactgttgggattcactattttttaaagaaaaaatcatttaatattgtctatggttctccactgttagcattggttttttctaatagtaagccattgggaagaaaaaaattcgcttacttttttcaatagttttcataattgaccctctttaattgttggaaaaagtctattttgtagtactgtatgctgttaaactaatctggaaggtttcaataggtttggaagaactttgggttggttttggtgtaaaaactaaaagttaaagttatccgtttgtgttgtaggaaacggttaaccgtttgacccagtagggaaccccatttttctaaaaacaattagtcgtttgggtattttgagtttagggcctattacaggtttgcttaagttatttatcaagttgtcattgtcgcattacaagaaaaagttgttgtgccagtgactaagctcgccggagtaagtaagagtagctcattgacatagttttatcggtgacattttgtaccagcaatgattcgtgggcatatcacctttcactactacaaaatttactattcacgtctgtttttaagtgacacttaaagaatttacgtcagttttctaaactgacgtatataccgtagtc

SEQ ID NO: 161840 - DNA, 9259 bp, Cannabis sativa
agagagagagagatggatcaaacatgatactagtttgggctgccactcatcagaaataagccatttggatgaaggaactgatgcgaatgaagagagaaacctaagctactaggtgcaactgaattcagacagaaagaaaaagataaatagagagatgatcaccttgaattttgatggttagcaatctcaaatttgatatcgttcgggtcattggttacagaaaacaaactgtctggcttgagcagctgatgttgagagaaagaggttgagagaaagaggtcaagagagagagagtttaagataggtcgagagagagagaggttatgtggttaagaggtcgagaggttgagagagagacaaaaggatggggaggtgtcgagagacagagagacagaggggggagatctcaaatctaatactcatttgggccaccggtcaccaaaaacaagctgtctagctagagtagttcatgcacacaaagaaagaaacctaagctactaggtacatttgatataaaacaaaaaaaaaaaagaaaaagaaaagatagatagatagataaaaagagagagataacgaaccttggattttgattggcggtgatctcaaattcgatattcatttgggccgtcggtcacttgaaaaaactcatctggttggagcaggtgatgctaagagagaggttgagagaggtaggggagatctcaaatttgatacccgtttgggctgctggcctccagaattaagttgtttggctggtgtagttgatgtgcacgaagaaagaaactaagttactaggtgtggctgatattagacaaaaagaggaagaagaaaataaaaggagagagaaagagagagacagagagagcgagagctacacagagagggtgagagagagataatagaccttcaaattgttggatgttatgtcctaaataaaacattttctttgtaatctcatttattaattcaataaagcaaatagaaaatcatttatgacgtaatcaattacttggttcacacattttattttacttaattatatgtttaatacttacattctattaaatattgatcatatagttattcacatttatagtgatgtcatcatagtagaatatagttgtgattatatgatttaaagtgttgactcattttttagtcaacaaccctgagttaataaaacaaaaatatcagtgtttgaataattgaaacatgcaagagcaaataaacgacagagaattttatggaggttctgcccctagattggtaatggcctattgcctttttagttgtatttatatgagaaacatcaggatcacatgaacttggtcaagtgagtttcttgctaattcttctgtaaaagttacaaataatttgccagcataataaatttcttgagaatacagaattcggtcattcaatagtgaatatgatcccttatttatagggaaaaagatgtagtatatttacattaattatagaataaagcagttaatatttgaatgattcaatctcacaaaatcctccaatttcccctgattctcgcaattcctcaattataggtgtgttgattgacctatttgtaaggaaattagttgttgagatgaatttggaaatttacctctgtgaactatctagttggatgtctcatccgtgagatggctttttggttgctcagaatgctagtcagtctgatgctggacgactctggtttatactatagactaatatcttttggagaacctaatcaagggtctcacgtccatccaacctcttccatacttttcacatgtcacatcattgtataccacatcatcagagtgatttttgggataaatcttacccccatctctgtgtggggactttttagctttcctctttgcacagttaggtgatgcgtggttttacttggatggtacgtctagcctgggcatcgtacctacccgaggcgaatcttttcctcatcctttcaaatcttttgccatgattattttctcttgaaaactacaccttggggatcgtgtctgacggttacatattttcccatgtgggattttcatgcaaagcaaggcttttggattccttgtggggataagccaatgatttcaaatttaatccccaaaaacgttttccatactctcatccttcctataaatacttcaaaggaaattcatctgaaactttaaaattttcaaaaccccagagaaaaaaggagagtgttctttgagttcttgagctttttctcttagatcgattgctacatagaccaattctcctaataatccttcttcaatacaccaagatgaataatgtgtaagttttctaatcctccattttgcatgatttttgtacaaatttgaatttgtattctgctaatatgtttgaatcttcttcattcttgaattgtgaatctgcattttgctcggtcattgtcttgcttattccatctattaaggaatagcctaactcggttcttctgcgtacttagttttttttgcaaactttctatcaaattaagccattttagaaatttttaggtttttgaaaaccctgaaaacctatctcgatttggaattctatcaacgagatagaatcttcttattttgattcgaatctttatgctggtcgaagcattagaggtgtttttctatgaaaggcactttccatgcttttgcggtgcctcacctctcagtccttcttttatagatgagcccaggtgaattctggggaggtgatcaccgaatacatgaatacttgctcagactactttttgaggaccactcagcattctgagcaacaagttcatcttcatcctcgagtgaaacttcattttcttcaatatcccatgaggaaggattttgaagtgactcttcagagtccacattccaacatcatcactataccgaccaggtcggtggtgatagttacgactgttatatttgggagttaaactgaggttcgaggaaattccctctagctttgtggacgtacatagttcgagcatacatctaggacaccctgcttgttggacgtcctactttgctcaggctactatttgtctttgcagacttagctattttggtagcaaaacacacttcaaagccaactcgacctctaaagtgcacactagctcagacgaaatagactacctaactagtctcccttcatatccttatatcgggtgattaatggcgggccaagcccaaaatgatctagaactttaagaagctttagaggagaagttgaagtagaaatggaagagatcaaatcctctgacattctgggtggttacttaaggctagtgtaaactaaactaaggaggagcttacagaggccatgcccgtctagaaaaaatccaacaagtctcaacccgtatgtcaatctcctccttacaggttgacggtaaagaggctgaacaaccttcgtgctactagcttatttaatgaagcttttatttatcttcctcgtgagggtcagctggccgacagtcttgggaatggcttatgcacgtggtctggatcccatgcctatcagggttctatccttcctctccacgtttacttttgatgtctggccaattattataatatcttccccatgcggattagcttgaaaaggttaaagtacttatcggcactgtacgtactggtacgcccaacaaggtttggagagccttctccccacaagatcaattagttttttgatcttagaccaaccccaaaaatcacaattcgaggtactttacttttccctcctaacctacccgtggctaacaggcacgagggagataacaaagataggaggttatgctcgagattacttcataatgaggtatgttgaagctaaccaccattctgtccaaacttcttggccattcctctgcccactcctcaccttggacttgagaagaagggcccaccagatagtcaagctttccaaggaggctagggacatctctaagttggccacagaggagaactttcacaaatatggactctatatgtccattgcgagcatgaagaaatgaaaagaggccaaaggatagtcatttgttgctcgggctacagtaaataaagaaatatttgccctaacaaaagccacaccactaactcattcaaactgatcgactattaggattgacaagcttgtggatggtgtaacacggttttatttgcccattatcgatggtaagggtaaaatggtggtggaggaagagtctacccatgaccctttggatgatgagcagctcgctgtcattctttatgagaatgctccttaggttatcaagggagtggttcatacggacttttactttctctaaacttttcatatatgtatgttgtacttggtttctcttttattttttcactaagtttttgtttatggtgcagcaatgttgtccaaaattcttgcccagctcaccaagaggaagcagagccaagactaccaagcaaacttcctccgcctaaggagagaaaactctttcagccaacgaggtactccttgatgttccaactagtgacactcaagtccaacaaggagagataattgatctagacaacccaactctaccatataacaagaagaccaccatgattccatctaatgcctggccacccactattttgaccaagaaatctagaaggtattctgaggcagacatcccctttcttccgaggcaaaaaaggccaaggagatggtgaaatgataccaagactatgtaatttttgaaaccaatgagcagctgaagggggctgacaaattcagggtcaaaacactggtcgaagggctcctcagggattttactaaggtaaaaaactttgcatctttttctcctagctctagatacactattaagtaatttctaactttgattctttcttcctttaggtgaatctcaagcttggtcattgttactcccgagcaaagtctatggagagttcctccaaggaactctagaaggttgctaacgcaaatgaagagcttgagatgaaagataaggtgctgattgatgcgaacaagcccctgagtgcaaccaacaacaaggtgactgatttggatgcagaactagccgaccaaacccaagttcatgagttggaaaaggcatttgaagttgaaaacaaaagagtcaaggagctcgaggatgaaagggaatgctttcataggatgaatcaatctctcacttgctaggtgaatgagctgattaagtctctccaggctgaggaagtggcacatcagaaggacaacaaaaagtatgagtccataggcaacatgctctttcaccttaaggatgagctggttcaacaattgaccttctgcgaaggaaaagctggtcagttgaaagatgaggatgtggctgagcatcctaacaatgctactaatgaagctaccgaccccaacttttctattcaggagtaggacgacaacatcctagccactcaggatctgaacctgccgaccccatggacatataaagacttttctatcttttattttctctatgtactttggcctatgaccttatctcttgatacaattttgttgaccaagtggcttttaaacttgatttgatttttattatgtagacatatggttgactgggttgcctttagtcccagacttaaaatatatataacttataagtatgttcctttcttcaatatcctctgaggaaaaaagaaatttgaatggactgagcagtgtgaagatgctttttaagacctaatgaaaagacttgcacaacctcccatcttatcaaaacctctagactgagaagaattgggaatatacctagcaataactaaatttgcggtaagcgctttgttaatctaagaagaggaaggtgcctaacatcctgtctgttatgtcagtaagaggctaattgatgttgaaagtcattatcttccaattaaaaaactaaccaattgtctcctactagccttgagaaaattacaaccctacttccaagctcatcctatcagggtgtacactgaccaaccgctttgaaaagtattgcaaaaacttaattcatatggccagctacttaagtgggaaattgagctagggcaatatgagttcacctaccagccaaggttagcaataaaaggccaagctctagctaactttgtggctaaatgtactaaaaaccatgaatttgttactaaaaatagtggtgagccagagaagaagcaagaggaagagcaggagcaacatgcagaacaaaagactaaacaaggaccaatatggaaagaccatgtggatggctcatctaccgagcaactctccagtgcaggattgccctagttactctcaggggacaaaaactatacaaagccataaaattttgttttctagccttgaataatgaagcagaatatgaatcgctaattgctggactcaaacttgcttgggagatacgcgttgaatacttagacatctatcgtgattcacaattggttgtcaattatgttttgggaaattatatgccctgaggagaaaaaaatagttgcctacctcagcaagattaaagatatatcagcacaattcaaagggtacacaataaggcagatcccaaaggaagaaaatgccactgtagatgctttggcatgactagcaagtagtatagtggttgacaaggcaaacttccttgccattgaatatcttgaagaaccaagcattaccttcttgaagacatcaacatgttggacaactctcctacctggatgacctcgatcgtagcttgcctcaaatcaagaacactattgagcaacaagaataaagctcaaaagttgatgaggaatgttgcatgatattttattttggatagagtaatgtatagacgtgggttctcacttcccctcctaagatgtgtaaccaaagaagaagttgcacgactacttaccaaagcacacgaaggattttgtgggaaccatgattgggtacttttggctgaccatgatagaagaatgatgcacgacaaagtagaaaatcataacctccaagtagaatccctagatcagcttggagaaaaagagatcaagccaacttgaagatatagtcctaccagcaaaaagtggcaagatactttagtaagaaagtgaaaatgagaaaattctttgttggggatttggtgcttagaagagtttttattaacactgaggacaatgcagtagttgtgctcggacaaaactaggaagggccataccaagtgagtgagtcacactgttcaatgccaacaaattgggtcggtataatgatcaaatacagttcatcccagtacaaagatacaagaatgaagaacatgtaaaaaagtactaccagtaaaaatattgttcttaaatgacttcttttggatggcatgtctatgtaaaatccttgaaaatttttacaaatgccaaggtctgatgaccacctatgttgcatattttatctagaataaatgtaagttacttatgtaaccacacattctgaccaataaatgagaaaatatgattttataatcattcaaattgtgtcttttatgtatatgatgtcttgcaaatacttagtggttttccaatcacgaatttcctaacatgtgtacaaaaaggttttcccaagaatagaggccgaacagactactatggtatactctagttaataattttgtaagtgagcaagtgtctaaactattctcggtcacttgggagcacttacacctggtacgacatagacaaacaacacatgaaaatacttaagcgaaaatctaagaattaagtattagcaagagaaaggttttattatcactaagtatttgcaagacatcatacaaataaaagacacaatttgaatgatataaaatcatgttttccaatttgttggtgtggttacataagtaaattacatttatttaagataaaaaatgcaacataagtggtcatcggaccttgggatctgttaaatttataaaggcattggacgaacatgttgtccaaaagatgtcatttaagaacaatatttttattggtagtgcttctttagatgttccccattccagtatattggtactgggatgagctgcatttgattatttgtaggcaccaaacaatgtgacttcagtcacttggtatggcctttgccagtttggttcgagcacacctattgcactgtccttagggttaagaaaaactcttctaagcaccaattcccaaacaaagaattttctctttttaacttgttaaagtatcttgccacttttggctagtaggaccatagcttcaagttggagataataggtcagcttttcgattggatgataacaatttttagcatcaataaaccttttattggcacaatagacaggatgttggacaccttcctcttctcgaattaacatggcgcttagcacgaatgtaatgcctgtacttgaaaagtaattactttagatttaaatataattaactaattataattatatatgaatatacttataaaattttatatgtcgagatcccgagttaaaaaccactgttggaaaacataccataaatatatacataatatttttttacaagtcacaaggcgacaacaaaagatagttcaaaatacaatatgacagaaaccctccaggttgcactgccgcaatatgtacaatccttgccgagcagcaacccactactcctccatcttagctttacccttgcctacacaaggtagcaaactaatgagtcaacaaactcaataagatatgcataaaatatataaaacattgcaatatcgaattgtacttaagccctcctgagcctaagtataaggctcatcaaatggttaagaacgttctcaacggaagtacgacctctgtaccacatgtactgaagtaccgactacgtactagtgttggtagggccatattgtacctccaagagttactaggtgttgtaccacatgcactccgtacccacttgtactcgtgttggtaacaacgtaactacccttaaataccctacattgtactaacatgcattcattcacacacacatatactttatggtaatatttagagatggaaattgggcggttaatgtacgggaaatgcaatccccgcccccatccctgctacttatttatacccccatccccgccccatccccgtttaatcaccaacgaattcggggtagggaaatacccatcgggtctccattaaggtaaagtgaaaaaaaaaattaaaataattgaaaaaaataaattaaactaatattctcacaaatatttattatgcatt

SEQ ID NO: 161841 - DNA, 3847 bp, Cannabis sativa
aaatattaataaaaatatatcatgggagtaatatttgtactgcagcaacctcaaatttgaagtattgagttatatatataataaaccacttgatgctagctcaagtggccataagaagtgtgtgtgtttgaggttgggttcgagtcccaagatgttaaataaaaaaaaaaaaaagagttatatatataatgaaagttaataaaaattagagaatcactttatatatattttttaatttttaccgtttgaattattatgataatttctatgtaaattgttatttaaatttttataaaaatgtaaaaaatattactttcaaataaaataaaaaaaaaccctaaaattatatagaaaagaaattaagaaagctggcgagagacgcatgggccatataaaaacaattccagcggcagcggtagcggcagagagacctgtactcacctcaacaacaactactacattactactaaatttctttcctacatttacattttttttttatttattttctatatataaaaaacaaaataatatatttatttatacatttttttttgtttaaatttaggaaataaattatggggtgtgtagaagtattaattaattaattaataaggggggtgtgatagcaagcacgagactctcaactctcaagaaaagtttagcttagcttagcttagccccacgcgaagaagaagaaggaaaaaaaagaaataaaataaataaataaaattaagaaaagatacagagagagagagaaggggaaataataaaaggaggaaggagcagaataataaggtgtctctctcttggactgattcgtttcaatcgcatctgatttcttccctctcttctgctattctttctctttttaactttcctttctctctctctctctctttgtctatgtcatgtgtggaggagagaaagtgattattattatcatcagaccataccaaaacccaacgccaaaccccaaaaacacaactcaaatttaataaaaagaatggtagaatttgagttggtcttattatttaccttctcaaaattcaatttttagttgtggggttttcttaaaattctaatcttgacttctctctttctctttctcattctcattgaagagtccgccttggcttgagaagagggcataatattgcttcttctcattcatgcttcctatgtggtagcgtttattgttgcctccttcttcttcttctcttttctctctctcacacaacacaatattactattcattcatacacaacaacaatacatataatatatatatataaaagtttatctatatatctccacacattatttctgtcacaaacttttctctctctctctctctatatatccatccacttatcaattcttttcccataaaaaaaaatggctgttcaagctcaatacccttcaaatattctcctcctcaacaggttagcatttcagcttatgatcaataatgtctttctctccctttcttttagtgtaatcaaaaactttaatctctaataatgttttgattcatgttctgcagaaatggacaagaagggcatgattattcattacaacagcatcaagatggattatttcttgatcaaacttctatgatatttaacaatgttggtggtaagtaaacaattttctacttcaaaaatttataataaatcccaaatattaatttactctgtttcttatcctattttcattacacagcgagtaataccagtaataataataatattaatccgaggaaaagaggaagagaagcttcggttgccactccaatcaatcatttctctcttcaacctcctcaactcatcgacctttctcaactccataaccagagccaacccaatgtcgtttccacagggctaagattatccttcggtgaacaacaacaacaacataatcagaataatcataatcatcaaaatcattatcatcatcatcaacaacaatctcagcagcttcaacagttgaaccagtcatcatcgtcgtcggcgtcggcgtcggcatctctcttatcagtaatggcagaggatttcgcttcacaaatcaaacaacagagagacgaaatcgatcaatttcttcaagcccaggtaccatttttttcgtctcttctctcattcaaaatttcttttatcagagaatttgattattggaaaatttacgtaagggagtgcgtatcctagcagggagagcagttgcggcgtacattagcagagaagagacagaggcactatcgtgcgcttctgagcgcggcggaagagtcaatatctcgacgattgagagagaaagaagcggaggttgagaaagctactcgccgaaacgccgagcttgaagcacgtgcggcccagctaaccgttgaggcccaaatttggcaggccaaggttcgggcccaagaagccacggcggcgactcttcaggcccaattacagcaagcgattatgaacggtggtggcggcggcggaagaggtttggtggacgacggaggggtatcttgtgccggagaaggaggagtggaaggtcaggcggaggacgccgagtcggcttatgttgacccggaccgagtcaccaccgcgtcgggaccgagttgcaaagcttgtcggaagcgagttgcttcgatggttattttgccttgtcggcatctctgcctttgtacggaatgtgaccgagttgttcaggcctgtcctctttgcctctccttgagaaattcaagtgtggaggttttcctctcttagggcggcccaaagcccaagcccaagcccaattgtaccacttgggccccgttaaaatccattgtgatcaacgcaacggtacaatgggagaaaaaaaagaacaagtaaatggacaaaagaaaaaaaaattaataatatttgattataataataattaaaaaaaaaaaaacacaatcatcttttttctttttttctttttttttttaatttttttcttgaaaaatagctgaatagactgcccccacatgacttaatttttccttttgttgctttctttcttcttccccctcttcgagtgaatttcctagaggtaatgtacatggccacgtgggtagtggcattgtctccttttcaatttttttttttactttttcgaaacttaattcatatataaattcttttatttgatatattatatataactgagtcattgtccaaatatctccatttcctttttttttttcgattctgatggggaatttactatttagtttttcatgttgccaaactaaaaattaatatctcagattttttttagtggtgacatgcacttttcaatacaaacactaattttgtatggatattatattttattacaagtattgacattgaagatagaaccttaagaaacttagtaataggtttggtttgtaaaaaaaaaatctaggcatgatcattacgaataagagaatagagcaatgcatgtaatctagtatatattcgagtggtcaaagacttgtatcactagcttaattattgtattgatataatttttttttttactttgcaaaaatatcagctagctatcatcaaaaggatcttaaattttcaaaaaatattttttatatatatatattatttaaaattttacagcctaaaatttttaattacaaaaatatgtttttatgtttttaaattaaagaaatatatttttaattataaatttttaattacaaaaatatgtttatgtgtattacaattataatactattattattaaattataaaacaataataaaaaaataatttattatatttactgaaaatatatttttgtaaataaaaaatttttaaaaataaatgatttttttttttt

SEQ ID NO: 161842 - DNA, 1136 bp, Cannabis sativa
tcaaaagattagataaaactggaaacttataaaagctcctaccgacatccaattgatgatgctgcaaacggcaagccttctggtatgtgcagccacccaatctggcaagaacaggaaataattttttttttctttttctttttaagacatgaaatctgggattgacttagttcaaaactagtcactagtgattttaaccccaaagaaaaagaagaaaaataattgggtttactttatttttagtttctcatacttggatgttgagtcagactaaagaaaatcaacaatagacttggtcagctaaaatagttttaattaatttggttaaaagtttctttccctatacataatctcaatgaataagtcccaggtattggttattaatgcttggaattgctattagtaaactcaatttcattaattcttggtggcagttgcattattattacctacttattatgatttttattattttattctaaccttttattgtcaaggatttccactgcaatcaaatatatgagtttcttggtcattggatgatcttaaaaaaacattctgaagtctaaactgttaccttctagaatatcttttgctaattaatgtgtgatcaaaagaatcatcaatgattcaccaaaaaaaaagagagagagagataatcatcaatgaaatctctacattccaaaattaagcacacaacataatgtgaacggtactgtttgtactatatatactaactaattggaagttagaaccagaataagccaagattgttaggtgaagttgtactagattttaagaagaagaccaagtcaaaataaagtattgttttgttgacttttaacttcaatttgtattaaaaaaactagcaaaaatattttatgattgtgataacttcgattaatacgccaaaacatattagattatgctgcaggtaataacaatgaacagcacgtgttgataaatttaattgtatgatcagacttttaaaagaaaataaaaagaaatgttgttttcagaggaaaaggtctttttacttaaatccaattgttgttgctgatattttgcaacaccaaaaagtacaatttaactggtaaaagagagaattatttgagagatgacaaatgcgagtattc

SEQ ID NO: 161843 - DNA, 6326 bp, Cannabis sativa
aaaaaacagggctaccgttctcgagcctcttggaagctggttcagctcgatgccaagtacactttcctccgctcatcccacgccgtcctcgacctttgcgccgccccaggtggttggatgcaggtcgttgttcagcgcgtccccgttggcagccttgtcatcggtattgatttggttcccatcgctcccgttcgtggcgccattgccgtccagcaggacatcaccaggtccgagtgtaaggccaagatcaagcgcataatgaacgagaagggatgcacggcctttgatttggtgttgcacgatggttctcccaacgttggtggtgcttgggctcaggaagccaccagccagaacgccttggttatcgattccgtgaagctggctaccgactttttggcacctaaaggcacatttgttaccaaagtatgaattttcttcttcctggttattgaattttctttggattgtgcaattatgatatataataaaacaatatctaggttaagtcatttatacacgattcaactctggtttatgtattcagaaatgacatacaaacttaatcaaatgtttagttatgctcttcatatacgattaatgtctggtttaggtatttagaaatgactcaaatgtttagttatgctcttaaattagttcaaattagataatatatcattggactgtgcatttagatgattattgttaggtattcaataatcgtttaaacgaattaggttgtgatttttttttgggggagcatacagttcctgcgagtctgcgagcttgtaaatatccaattatgatatcttactaaatgtaaatattcgctttggtagatttgccattgttttttttccttttaataatttaaacagtttttactaccttaaatgtttttcgcagctctgaagtgtagtctatattagaatttagaatttagaatttagtgttttgtgtttcatttttatttatgttatttagtaaagtttgaagtccacctaagaagtttgctcccatcttaccatctccaatagtgtgctaaaatagtgatgcattcctaattatagctcttaaaaaaaaaaaaaattgcttcaatggtatcccaaatttctcacataatatagcatcatgatgaatattttgcatcactgtaaatgctactctttgtaatttaccttttatgttatttttttatttttatttttagctatcatatgaaatgctagatttcttattttatgattttattattatctttagccaccaataaaatatagagaaaaagatattactttttgtatatttttaattaatattaaatcaacattaattaataaacaattgatttttacaaaacattttataattttttattggagcataatgctgaatatgtttttgtttttccgtatcaggtcttccgatctcaagactacgagtctgtcaagtattgcctttcaagggtgtgttctctttttctttcatccaaactaatatgtttacttggatatgcctgtaatctactcctggtaatcattgcagctgtttgaaagggttgaggttcacaaaccagcagcaagtcgttcctcgtctgcagagacatatcttcttgctttcaaatataaggctcctgcaaagatcgatccacgcattcttgatgtgaaacatttatttcagggatctatagaaccccccaaaaaggtaaatctaattagaagtaactaataataataacttcattccgtttacacattaatttcccttagtacaggagtactgttttctttaaactatgtatttcttatatttgtaaattgttaacataggtagtggatgtactgagaggctctaagcaaaagagacaccgtgatgggtaagaattgtttctaaacatcatttaatttaagttctgcagttgtacaatttggaaagttcaaataagtagaaatatatagtaagtgtctctgttgtgctgatcacagtttaattatagatatgaagacggagacacaactttgaggaaagtgtcaacggctgcagattttatttggtctgacattcctcttgagatccttggttctgttacttctataagttttaaggatgaggcttctttgcacattcaaggtcatgctttaacaacagaagaggtatattcctaatctgttgttgttttctctttgttattattgtcatttagcagttttaatacccttggagaggttattgttcaagtgttataaatttcattattgggcaggttaaaattttatgtgatgatctgcgtgtcctggggaaacaagattttaagcacctgttgaagtaagatgtgcaatcttttttctctatactttcttctctttagtttttttgtaattttattttatttattttttgtaaaaataactgcatgttttcatgttttttcccctctatttgtgtttgggctgggagagttggggcatatgttaagctagaatctattgatcactttaccaggttaaattgtctttttaaatctgggtagtttgttacttcttcatgaagtttgttctgtttagttttctttatgaagttggctccaaagagtcatgatgggttgtcattgattcaaatctgctcagcattaggccagtataccctgctgactgcagcttttcatatcattcaaatggtctgtgctattattttcactgtagaggaggagcacgtatttatctaattgcaacatgtgcatctctatgtatttgtacttggattttcttgtgctgaaactcaatttttgacattccactttcaattatataggtggaggatgcagattagaaaggagttgtcttcttcagaaaagactgaagctactgcttctatagctgctcaagatgaatctaaggaggacgaagaagagaaagtactcaatgagatggaggagctaacaaacgccatggaccgcaagcagaagcggaagaaaaagctgcttgctaagagaaaagccaaggtttgttgtcttcatatatgaatctctctctctcaactgcaccaacttacatggtatcatggaaagagaatgtctattgtttttcctatggaagttttctgcctttatatatgcatctctcctctctctcttctatctaaatacaactgacacggtttcatgatttgttgctacttgcctttgttctaatctaggacaaggcacgaaaggcaaatgggatgcaaatagatgcattggatgacggctatgttgaccatgagttattttctctctcttctatgaaggtatgctttcactgtactacagactaagtcctggggtttcccactatgcttaagtttgggtttatatgatgcctatgtattgtcaatatatgtttgtcatctacaataaataccttaaaaagttgctctatctccaaacttgtttttcgttatggatataatattgatctttctactgtatagcgaagttattataaattactacatagtaacaaatagcataaataacatgtatatttatatttatttttttaaaactaaaaataacatgtatataaataattaaatcagattcagataagcttcatttgaattattagtaggttggaaaaagtgatcatgtatttatgtgatgttatcgactcttttccttgctgatttttctttttttcaacattgaagtattctgtattgttggttaatggttttgatagtattagcgatgtttgtagattttcacacctccctccacattaggtttgtggggttaatgtatatattcttatgctttaatgttggatttttattttcctctgcactcgagcttctttctagaagatctttctagacaatataaaattccaatgtgcttttgcctttttagaagatctttttgatgtttttttagtttcctctgaatatactagaaaatgttctatggtgctttataagtgtacttttttcagggtaagaaagatcttgtggtggtagattccatggaaaatgaggatcagaatggtgacttgggtgatagtgacaatgaagaaatacatgatgaggctcaacttgattcatccagtgatatagattctgatgaagaacggagaaggtttttttctactgtcttatctgggataagcctgatattgattgaagcatttgctgtgtcctgattaaattttgtatttggatgacagatatgatgaaaaaatggaagagtttcttgagcaggcttatgaacaatatatgtccaagaaggaaggaagtacaaagcagcggaagcgtgcgaaagaaatgcattctgatgatgttctggaggtatgttcttgtgattgtattgaaaatgattaaacatccctcacatgactacaaagagtcaccattttcacatgactttttctgtgtcattttgtttctgccttttcttgcattccagtaattgttctttggagtttatattcttgttctttctttgatctcagtggcttctttaaaatgctttttgtcatcttttgcaagagctacttgttaatgaataagaaataaagtaaatggcacatttattcttcttgttaaagagtgtggaagtggtatggagccagttctcattgtgtattgttttagtaattgtggctctgtttttttttttttgggcggggactgcagggtggtgatgatgataatcaaaatgtcatatgtgattatgattcagatcaagaccctggtgatcaggaaggaaatcctctgatggtaccacttgatgatggtgaagtgccaacacaagaagagatcacgaacaagtggtttagtcaggatatctttgctgaagctgttgatgagggagacttggaaaagtttgatagtgaagatgaaatgcaggctaccatgccagagaagaaggttcctttgcctgtaaaggacgcggtaaagttaggaaaccgtgctgtagcatccaatcattctcaacatcaatcattggaaaaagatgattttgagatagttcctgctccagtaacagattcaagtgatgactcatcttcagatgaatcagatgaggatgttgacgcaaaagctgagattctagcttgtgcaaagaagatgctcatgaaaaaaccgagggaacaaatgctcgatgatgcatataataggtacatgtttgatgatgagggtttgcccaaatggtttttggaggaggaaaggaagcaccgccattccattaagccgataacgaaggaagaggttaatgctatgaaagcacatttcaaagaaatagatgcccggccagctaaaaaagttgcagaggccaaggctcgaaagaagcgagttgccatgaagaggcttgagaaggtgcggaagaaggccaacataatttcagatcaggcagacatatctgatcgttcaaagagcaagcaaattgaacaactataccggaaggccgagcctaagaggcctaaaaaggaattagtggttgcaaagaagggtgttcaagttagggtcggcaagggtaaaaaacttgttgatccacgaatgaaaaaagacttgagagcaagtaaggccaaaggcaagggcaatccaaagaagggcaagactggtaagtttctgaaaggaaaaggaactgcaaaagcttcaggacagaaggcacaaaagggtggttacaaagggaaaaagacgggtatgcgtgaataagacctcttcagatttgcaaaataacatttaatgttcaattaatttgctagataagccctcttcatattttatatatttactgtttttgacttggatactgctccgagtatagttgcctagaatttgcattttgctagaagatgaaaacaacaaaacttaaaaaagtgattgaaaatgcagacgagctatgttgtcagtggaatattggctagtgtaattttgttcttatgggcgcgccccttatttttttcttcttttaaatgtgtaataaacaattgatttcatattttgaggcttatattttgctatgtttgggatatcactcttcttgtaacttttatttgtattaaccaagatgtttgcaaattgataattcttatagcttaacaaattccaaaaggaaaatgtacgttctgagtgagttctgaataaactataccttataatgtagtacggtcactttggaattcgtagttcgagttcaaagtaggtcactgattaaaacatcaacatcataaagctctattttgctgggctgtacaaaacgtagggtccaatagaatagggaaatttacaaaaatattggaatttaggttaacttttataaaaatactgtcatacggaaattttttcaaaaa

SEQ ID NO: 161844 - DNA, 7223 bp, Cannabis sativa
agagagagagagagagatttcagcatgtataattaaccctagtttaaaagttggatttggaaagaaaataaataaggagaatgttggaaaacaaaattagaaactatggaatgaataatgagatttttttcatatatatataaaaataattaaattacaaaaatatttaaggcagaccctgtaaacattaatataacctataaattaaatattaccaaaataatatttcttctactacttcagtcgcacgaaacgaaacaaacaacctcatgcacgcaaccttcgatcgaccaacccaacaatcctacacaactaaaacgaaatccaaccagaaagagaattgttaacgcatattttcgttaaccaaaattaaatagccttttagtaataaatattctacagaaattaataaataacaaaagatataataactcaaaatatttttatgtagttttgtagttaaaatctacatactccacgagtccttcttagtacagaatgcaatatctaattttgaataataataattatctttccaatttttcgtcatctttcccatggaatctatccctatttataggagtatagattagcagttatcctttctgagattaattcaagtataattgttcatgaaacgtggacaatccccacgtttcatttaaatcacatgtgagataatactaaataactacccaactgctctttagttttatcttttagatggttattggtgacgtggaaggttatatcttctcttattcgagttatcttccttctccatcttgataagacaaattgctaagtgttgggaagatttccatctcgctatgctctctttgtggcttttgtaatgtgaggtaatcttctcgctatatgtaatgcaagacaatttatgttgatacattcagtctgctcaggtggatgaatgttccttccttgtctgtatattttgaggtatgcatatgtctcgtttatctcagatcaatagttgttattcttgtctcgcttttgactataaagtcaatgagttttgaatattatttatttaacctttagataataatgagttatttaatatgcatttaatgatatcattatatcatttagaatcgactcatattccttctattggacacgtgtcaacttctaaagtgtaaccaaattttgggtataacaagaaccaccattaattttggcgacttcacctgagaagacgaccgaaatcaatcaaaacaggggctctttcgaattcataaaaaaaatacagaaaaactgctacaaaactaaaactcaactagaaatccagtttaattcgcataaaattaatgtgctgacttcaatttttagattcatgaaatgcaaatctcaaaaaattgaactggagttccaaacaatccaactcaagtataatccaaaaaaaaattacatcaatactatagttaaatgtttattccgatgcattttttgttgttttctagatttctaatggtaaatttattcatattaaattacgaatggacatgtcgagatagttacgtacgtgaaaatactattttagtttttaatatttaatagcagttgcataaacattttgctaactctttgaaacttgacatatcaattatataaattgatgagaatacaatgaattttattatatttgcaagtgtttcatattgtcaatataatacaaagctctttaaagaaacttttataacatatttagttttattaatatactaaattagttgatgtaaagctagtttacagaggtccaacaattgtttcttcacatattaatattaaggtataagtaattatcgatcagtgacaaaaaaaatattggcaaatagttgcttatagatactcattcacatttaatatttctagttgcaattaagttacacgttagttaaataatagttttgttattataatatcatagtattataaaaatagagctcgaaattgtcaaaaaacgcgacctgaacaaataaaacagggctcgtattcttagcgctttcttcatattttatctccttaggaactagcctattccaaatcctcatgaaataaacttcaattgcgacttcaaaaggagtccaactcgcaaagaagaaggcttttaccacttccatctattcagcccatatatctaaaatgttaccaaaagcaactatggcctttatcatcaagaatacttctatactcctattctttcgtcgagacacctaaatttccaaaaagtcaaccctttcgaaagacatactcctctaattgacatgaagaggcgagttgattccatgttgtttgagattggtgcatgggagagaaatgggtgatctctttttagtactgaaaatcttcaaaacgttggttaatcatgtcatgccagcgtgtgtatgctgacactggcttcgctaatgaatcctgaacagtgccactcgagcaagatgataaggatgctcgaagttcaactgtcatcttgtttcagatagtatcagaagaagtgacctcagtttaaaatgacaaagaatattcaagaagaatatcggtgttcttagactaggatgacagagaacttacctccactcaaactgttttggagaaggatggagaatcaacaggtggttgatgctccatggaatgcagttgactttgttatttcattcctcttttattgtactaacctctggtcttttttctttgcagacaatatgagattcatggctgctatggcatcttgtttgaacttgaagagaaagattttggtgtcaaaggaaattgagcctcaagtaagggaagtggttcaaggcgtccctgctgctctactacttcaaagagggaggtcaagaagaggggtagatttgttgatgccactcttcctgcttaagactctggtagggagaggtctaacactgctggtgttgatgagagatctccaattgacctctctccgaatgaaactgagcatggtgttttgaactcaagttcggactcggtggagcagctgcatgagaaaggctcctagcttcttgtacacagtgatgccttgattaattacaaggctgagaacatttcgttgcagaagttagttggcaccaaacctccgcatatcatcgctcaaagatgtttcacctatatatttgaggtaattgttttatcttgtctccttttggcttaactttcttttatttaacatcacatgacattgtcctcttatcttcaggtttttgttggttatgcctacagcatggataacaaacacaagaagatggttgagcttgctaagatgctcaaggttgcagaagatcgtgttattattgcggaagaccaggtgacttctttgaaggagaaaattgattctcttgagagtgaattatctagtctttgagaggtggctagtaatgccaacgatcgagagagtagtctaaagaagaacttaccgggttcttggaagaagacctctgatcttgaaaaatcttctcagcatgcactgaatgaacaaactgctatgggtgctgatctgagagaccaagtcaaggtcttgaagaagagagtgactaccatcaaggatcaggctcttcttgacgttacattctacgatggcttattctttgatgtcatttatacagcttgggtcgtcaatgggggagataagtctttcaagtggaagggcttccctaatacaaaggtgactgacttcatcaagcggtgtgagcagtgtttggtggagaaacccttaacaaagttgacttcactataaatggtggtaaactaatggtcgaagaaacttcagttgttgaaggctacaaccttaagcatcccgacttccatccttatgctggtgatgcgcctcttacagagagtgggaacaaggaggaagctactgttgatataacaggcttttaagaccttctctgagtccgttctccttttctatatatttttagcatttagttttagtgtgttagttggttgttcccgggtgacctttttatgtggacaaaccttagtaaaatgttcttagaatttctttttagttaaattataaattatttccaatttaataaaacttttattctaatgattattttttttattttactttatttgttaccgcttgaccgtttaacacttacaaagtacaccatgtcttaagaaactcgattacttaaaataatgtcgctgcttcttaaagttatctttaccatgagagtacttacatagatgtgcaaaaaaaattgaatgcttgtgtaacatatggctctcgtataccataacataacatatgtgcctcccaagtgatcaaagaagtgccttcattggtcacttaccataccaaatccccctaggccttcttgatcatgaatcttgagtggtgttatatgtgtgagaactctccacttatctgagaattcgtgggtggcagtgttgaacacaccaaagaaataattgaacttatctcaagactaagtcacaagctttactcaacactttaagagtattgtcaggtctgtgagctgtaattgattaatttaaatgaagtaccaaaaaaaattcaatactttttctcatccaattaaatacaattacattactgtgagctatgttgaaagaaaaaagtgtactttaagatagtatttgtagatttccttcttcatccaagcttagctgaagtgatccgcactatactaatgccctctttaactttttagtataggagctatactttagcgatggacctcttaacttagagaaaactttgtcacactccgttagtttaagaggcgatcgattcacttgcactaagtaaagtgaatctcactgtgaagcgagttgttttgaagacagctgcctttattggaagtaccatcgtagatgcaccatgttccaatacattggtatggattcaagctatagtcatagcgtgccaacttgtaagttttgagtttaagagcttcaatgacgacatctgatccttcctaattaggcccaagtactcctacatctttcatgttcaggaatactcattgtaacaccatatcttcaagcttaaatttcttatctttaatcttggagttgtagagttttgcaactctttgtttatacgatgcctttctaagcttagacctttctttgatctcttcaattccatctagggattcggtcagtagttgatggttggttttctagttgaatgtcaatctttgatgggatggaggtgtgagctctagaggtatcatagcttcgtacccataggttacaacaaagggagtgtaacatgttattgtttttctattgtgcaataagcccatagtactttgggcaattgtttaggccaattcccttttgcttactccaagaatttatttagtgtatctttaagagattggttgactccttccacttgtccatttgcttgtggataggaaatcgctgagaaactcttaattattccatgtctgatgcataaatcaataaaaaggtcgctatcaaattatgttctgttgtttgacatatcttctatgggagtgcaatcggcaaatgatattcttgaccacgaaatcaagaactttatttgatgtgatagtggttaagggctctgcctcaatccatttggtaaagtagtcgaccgccaccactgcatattgaactccaccttttcccttaggtagtgaacctatgaggtcgattcccatacaacaaatggccagggtgtttgcatactcttgagtttgtttggggcagctctgggtattttggagaacctctagcatttgtcacacttcctgacatagtccattgagtcttcttttattgtcgaccaaaagtacccttgtcttaaaatcttatttgagaggattttcccctagcatggttgccataaaatccctcatgttcctcggtcatgaggagtttagcttcttccttcatgacacacctcagaagaggcatttaaaagcttcttttgtacattaatttgtccataatgatgaagcaagttacatttctcattagtctcttagtttcattcctatcagttggaagaatatcttgttctcagtattgtgcaatcggagtcatccgtgatggagtgctatcaatcatcatgaagggctctgagtgttcaataatgctccatttggtaaggtattcgatgggaactacactgagagtgtcagaacatgttgtactagccaacttagctagtgagtctgcatttgcattctgttcacgcggcacttattagatggagtagtgcttaagtcgggctaatggatctttagcttcacttaagtatgtgattatgtttgaccctccagcttgatacttgccaagaatttgattgacaactagttgtgaatcactattgagtgattcatctttgattgctagtgctaatcatagtcctgctaggagagcctcacactccactttgttgttggttatggtgaatccaaaccgcaatgcactatgagtttgaaatccctctggagtaactaagatgagtccagcaccagaatcgtgctcgttggaagagccatctacatatagtttctaggaaggtccagttttttcctgagttgcggtctcaggcatgtggacctgatcttcacaaatcatgggattgtattctttgaggccagtacatttggtaatgaagttttccaatgcttgccctttgattgttgttcaaggctggtaggtgatcttaaactgacctagttcaactgcccacttgagtaggcaccctgatgcttctagtttcatttgaactttcctaagtgattggtcagttagtaccttgactgtgtgtaggggtgttcataaaatagtcaatccaatccaatctacacgatccaatccaatccaatccaatctacaaagtgcggattggattggattggaaaatttaaaattcgcacttgtgcggattggatgttgattaacatgtaaaagtaccaatccaatccaatccacgcgtatttataaaaaaaattatatatacaaaaaaaaaacattttgatgtaaagaaaatagtaatttaaaaatctaatacatataataccattatattgcaaaacttaaatgatcaaatgtatattatatttttatattttttttcacatacaatttaaaataaaataaaatattttttatacataattttttttcttcctttaaatttgttaatattattttatttattttaatgt

SEQ ID NO: 161845 - DNA, 3701 bp, Cannabis sativa
ccttgagacacttgacctgagttaaaactctcttaagcttggaggttcaattccttgcacctttcgaaataacatgagccttttaatatatcttaatttgtctagcaataacatagactctgtcattcccaattgcttttacagtttttccaatcttgaacacctccacctttctaatactaatctgcatggaattatctcaagtgatgtagcaaatttgacctctatagtcaatttaaacttgaggggtaatgctctagcaggaaaaatcccttcatttatgggaaaactatgcaatttggaagaatttgatttagcaggcaataattacaaaggcagcgtctcaatggttttcgaaagcttgtcaggttgtctttctaaaagtttgaagtcactgaatttgggtggaaataagtttgattcttttaccggtcaaatcttggatgaaatgagagattttaaaaatttactaatactctcacttagcaataatatattttctggtcccattccaatgtcaatatttggaaacttaatatccttgaagacattagatctttcttcaaataatttcagtggacctcttccagaattccctgtttctctctcaaatttagaagccctttatattttctctaacaagttaagtgggtcacttccaaaaagtcttcaattgctctcaaagttaaaaaccctcttcatttcaaataaccaaataagtgggtcacttccaagaagttttgggtctctctcaaatttagaaattctttggatcgactcaaataatttcaaaggtgatttgtctgaaattcattttgccaatctcacaaagctcaagttcgtttatgcttctggaaataaattaagcatgaaagtaaattctaattgggttcctcccttttctctcctggtcttggaattgagaaattggaacttgggtccccattttcctatgtggctaaaatcacagaaaaatatttctcaaatcgacatctccaacactggaatttcaagtgtcattcctcaatggttttggaataactttttttctaatcattttattagagttgacaaatctgaaaaccaaatttatgggaaaattcctaattttccaaatgatatttcatgtttactaaacatgagtttcaatgagttgacaggtccaataccaagtattccaatttcagacatgttagatctttcaaataattacttatctggtaatatttctaattttctttgtgatccaacatcttatcaaagagaggtatcaagcctttatcttaacaacaattttttatcaggtaacattcctgattgttggaagtattggcccaaattaataatgatagacttggataacaataatttgaatggaattattccaagctctattggctttttaagaaacttacactcattgcatcttcgtaataatagtcttgttggaaaaataccaaaagctcttaagaattgttcagctttaattgggcttgatcttggtcttaataagttagtgggaactataccaagatggattggaagtcttccaagtttgggccttcttatcctccgttcaaacaacttaacaggtcttattccaattgagatgtgtaagcttctcaaactccaaatattagatgctagcaataacaatttaatggggagaataccaagatgtttcaagaatttaatgtccatgacatctaaatcagctgatcagtatttaacttcattttactttagtgttgatactcaagaggctagagagaatgtgaatcttatttctcgtgtgtgttttagacctctcaaggaaccaattgtcaggtgaaatctcagaagaacttacgagtcttcaaggattacaatcattgaatttgtcaagaaattatttgagtgggagaattcctatagaaattgacaatatatatgacatggttggaatctcttgatctctcaaggaaccatttgtctggtcgcattcctacaagtttgtcaagtttatcattcttgagccacttgaatttgtcatacaacaacttgtcaggacaaattccaataggcacgcaattgcaaagcatggatgcttctagctttattggcaacaagttgtgtggaccaccactcaaaaagtgtattgaagatcctatcacaacgcattcagatgcaagtaatgaagatggagaaagggaagatgatgaatattggtttcgattgggcataggaatggggtttggagtgagctttctaggtgtcattgttctgttggtggtttgcggtttttggaggcgtgattacttttggtttttcgaagagtatttgtggaacaagtttatggaccattttatcaaaataaagtacatcttttgaaagtatttgtgtcggtcatgttttaaagtctttcttttcttgtaataaggaatctgttagttttgtcctttttttttttttgtaagtttgtttcatgtattatcattttgggagatatccccatgttatggtttcaaaaagttttaagagtttaataagaacattgtgtgttttgcaatacttgctttgctcgtttgtgtttgcttgagcaaaagaaatgtgtagtatcgcttttgaaaatgtattgtggtttaggaatattataggttctagacttgtgtccatatcttaatatatcattgcaaatatatatagagagagttataaatgtatatatgtaagccctaaaatgatcaaaagtgctttttttttttgagggaacgatgatcaaaagtgcttggatatatgcttgttcccatgttagtgctttttatgaaaataataaagaaaagaaaatcatcttaaaagaggtttgactcaagacaaagacaagaaataaagttactatatataaaattaagaaagcatctggttacttgtcaaaaaacaaatttgtatttaaataagaaatgaagaaaaagcaataccataatattttgcatgttcaattcactatccctaattaacacagttctaatataaatattttacacttatttttgaaagcttattgtgttcatcttcacctaattaattgtataatatcaacaataatttgaggagcaagagtggcatctacctttaatatgttttcggaatcatgaatttgaagcaactccaactgcgatgtcaaaagagtagacgccatgaaatgttttccttctgcagctcttttctctaaccgagccgcaagcacctcagccggaagcatccaacaaaacaaacttcacaatatattgttggtgtcatagctttgtggcacgtagtttggatcagctgatcgaagaacttccctgtatcgcatttgcagcgctgaccatccgaggatcacacttttcttatcttctaaacattttctcaagacatctcgaagtgttttgagccatgaaatcctgtcttcttttgtaagagggattccattcttcattttttctgtgttatttgaaggaacaaaaacttaatttagtaaagctattaacataaaacatggataataggatatgtatacccaagagaaggatagctcaaatcgtcataccaggctcgttccaattctattagggtctccagccggagaaaatctaattgaggtttttcattatatttatatatatttatatatactaggtgattgttacgtgacaaggcatgtagtgttagttttatttaat

SEQ ID NO: 161846 - DNA, 1522 bp, Cannabis sativa
tatagccaatgcaatattaattttaaagtacttcaatagtattagtactacaagttactccataaaagagagggacgatatcctagaatctatgtctatattacttcaacagtattatcatggaactatatggttaaaaagagggctatatatatatatgtttataaatttccctcaagtgatttattttgtaacctttttcaggtatgctgcattaggcaaaacaaggagccggtatttgctgtataaagatgtaaataggaatccattgtaatcacatcacatgcatatattaaggtttgtttgtaactgagattagtattccaactttaatggctaacaagtatgctaatgtactagggcctgcccattctaatggcaccccaactcataaatttttttattttctttcttaatattatgatcacacttttttctttaataatctaattttaaacactggtacctccaaaaaacaaaaacccatgtttttgtggttgaagaatttctaagctcagttttaatttagttgtggtggaatatagtgtccaaattgagtcaccaatttgactggagtcaatattgtaccatcaaaaattgatagaatctatgtaccttccaaatagccaaggattaataattcctgccactacattttcttttaaaatatacaattatttttcaatataatatttatttcataagaagtgctaaggaaattctctactacattctctattctctcatgcactttcttatgtatatttgaccaaacacagtgctcaaatattttacattttaaattattataaattatcattaaaggctgtttgtaattcaattgtttcaaatttagagtctcaataacaattttttattaccattccacagtaattaagctaaatgtgactagaaggattaggtaagacatgtataaataataataataataatgaaggaatcaataagatgctaagctaaaatatttttaaacaagtattctcaatctggttgaaaattgaatcatttgctgccaagaaaatgaggaacattccattcgtcacaaaacatgaggcaatggatggcttatatatattattgattataaaactagattaagttttatatagtttttcttgtccttttaagatagtagagaatttagaatcctttttctttatataagtaaagctttgtgttttatttattaatattatcatcatcattaccaaatgccttacattacatgtttatttgtttagtgtttactaccaatggcaaatataatatggtgggcatatggataattcaatatgtgtttgatacgtggcagctaagggaaccacctaggatgaatcatttgtgggacatacataaatttatgagaaatgccaaagggcgtactaagactggttagtggttatattaaaattttaaaaattttaattaatttggatcaaaccatttgagatcgaactaaataaattcggtgtgaataatttgatcaatccggaccatttta

SEQ ID NO: 161847 - DNA, 3839 bp, Cannabis sativa
  modified_base (3768)..(3807): a, c, t, g, unknown or other
tgcatgtgggttatgaggtgatgtattttcccaagtctaagatgactaatatatgtcttgttcgaacgtattcagatcagaatcctttcataaatacgcttgcaatccgaagcttagatgcgactatgtacagccgtgttgacccaaagtatgcaatgcttatggttcagagatatacttattcgggatcaaatactgatgctataaggtaccttatcatttcctatattaataattaacattatcatatgcattatatatttttttagatctctctctttagagcactcgcaattataatatcttaataaagttaaaagctaagaaaaaaaaaatagtttagattaaaattgagcttaatgtaattttaaacccttagttattatatctcatttcaaattttaagaaatttttctctgcatttaacttataaatagtaaagtggtacgtaagacatattatatttttttcttcctctctttcattccattaattattatttgtttattattcttctttacttattttcatatttttctttattttaattaataaaatatataaagatataatatttaaatgtatagtataatgtaaatatgtaaggtaaaagtaaaaaaaaaaaattagtaaattattttaaagaaataaaataataaagaagacttatatgtagaggagtggtagtgaagtttttttgctataactgtaaaggtattttctaatttcagaaaaattatatttcaatttttatttgattgaatttatattatagttataattgttagctagtttttgagaaattgagaataatttatagttttatataaaataattaattatatgcgtataaaataaagtaataagaatgtgtagaattcaccaatattttaatcttaatgtattcatgttaacatgatcaacaaattgtttaaaaaaattatcaaaatgtaagtgaatttcgggggaaacacatcttttatttattctaataaacaaatagtactattataatatgtgtattacatatatatgataggtacccggatgatggttatgatcgaacttggtatcctgcacgaggtgtaggattaataacagtttcaaatgaagcatcatccattgatgttagcagtgcagaagataagccaccagaaattgtgttcaaaactgctgccactttcaaccaaactactagtactagtagctctactactactactactactatgcaactatacactaccggtttgacagccaccaaagttgggatttacatgacaatttacttttctgaggtcacattactgccctctacagaaaagaggtcgtttcaagtgttcatagatggagaggcttattccaaacccataatcccaccttttgggagctctgtccaagtttacattgccaacatcactgcttcttatgatactttgatcgagttacgtccaacccctgactccacacttcttccacttatcaatgccaatgaactttacactctctcccaggtttcaacactccaaacccacccaaacgatggtacatagctaattaattacttacttacaaataacaattttattaaattaatttgtgtgtgattaatttaattatgtggttattatatatactctatataatatacttatttgactattatgcataaaactgttgaagattcttgcggtacgattcttgaggaaatttttaatacgctttgtaattattttgtgcaagttaattatgtcttgcaaatatggctttaattccctaaggagaatggaatatatatatttagttacttataagtttttttcattaaaaaaatatttaggtttgaaattaggattagtaaaaaatgttaaaaagggcagttttaggtggtcatcattataggttaggtgtggtatcattgaattttttatatcctattattataggtgaagggttagcaacactacaaaatcaatttgaagtactacagatgtggagtggtgacccatgtcttcctacaaaatacacgtgggaatgggttacgtgttcttctgattcaattccacgtgtaacagcactgtaagtattatatatatataagcctacataatattaatatcatatctctttcgctgtaattctttaatatatataaatatttatataacatacacaggaatctaagtggctacggtttatttggttcacttccagattttagctccatggatgcccttgtctcaatgtaagatgttgcaatgatggactcatagatgttgtctcaattgcttttttatatattgattcaatgtaactgtgtatatatatatatatccatatatgtcatgtgttttgttttatctctcagagatttgcacaacaataccatatatggtcctattcttgattttcttggcgaccttccaaaattaacgttattgtgagtttatttattatacactataatttcttcatcatatagaaataaatgcatatataaaaatatatctaatataatatattgtttgttgtattatacaacacagggatttgtcggaaaataaattcaatggatcagtaccctctactttatccaacaataagaagttgaagttattgtaagttaatacatatatatatatatttatttatttatagctaggtctaatgaattatttttaatattttttaattagaagctagcaaataattaaattgtgtattgtgtgtttgaagggtaactgaaaattgccttaccggaatgtcttgcccacttccattggtagcgccgccaccgccaccgctgtctacagaaaagacaaactcaccaccgggattggatagctttttctttcaaccaccatcgtcgggatttgatttcggatatggctttgataatggcagcaccaataacttggcaaatatgatattagcagccatagttcaagtctttttacttgctttcatcttctttgcctagcttctaattacatacctacttgtttttttttttttttttcacattcttacaattttgtgatgatgtgttatcttatttgccccttcctctcgcatagaaaacattaattaagtttggttttcagtattaaattaaacagaaaatgtggcaataaagagatatttgatttgaataaatttcacatgcgaattatattgttcatttttggattatgattctataaaattgaacacctacttatataaatttatatatttatataattacaaggtttatcattgttatttgcactttattgtacaaatagacgacaaaacaaccaaacatatatacagtgaaataattacacatatatatagtggagtgaataaatattttattatatacacagctttcagagaatcagaataaattattaataaaaatatataaccaaataaaatgaagaataattttaaataatatttataatatgttgtttattaaaattgtttagaaaaagaataataatgatttatcttgtttactttataagaaaatataaattgattaaattacccttttaaattaaactatagtatatagtattattttgtaaattatattttaaaagataaaattattattatatatttaatattaaaaaataaaattaaaataaataaaaatcactacccttaatgacattttttaaaaaattggtggtggaagtattcttttttttttttatcccttatttaatcaagttctccatgttttaagctatcgtttggtaacacttttgtttnnnnnnnnnnnnnnnnnnnnnnnnnnnnnnnnnnnnnnnntttaaaaattttgcttttgaaaaataaaattg

SEQ ID NO: 161848 - DNA, 4524 bp, Cannabis sativa
actacatgctaaatattcatactgttacaagtacacatgctaattaatttctcactcgttaaacttttgggatccagattcgacctctgtggagacactacttccagaatactcaaggcctcatcttcgtggttgacagcaatgatcgtgaccgtgttgttgaggctagggatgagttgcatcgtatgttgaatgaggtacatttttgtcataaagaacttcaaaagtggaattatgttatatctctctagcattttttttaataaattaaaaatctaatagcccttggaattgtttctcatatttacattacttatttgaatatgcaggatgaattgagggatgccgttctgcttgtttttgctaacaagcaggatctcccgaatgccatgaatgcagccgagatcacagacaagctcggtcttcactctcttcgccaacgtcactggtatatatatatttttcaagtctctcttgatgtctcacccatccttaatttttatggtctctagattggatctgacaactttcacatattgttctctaggtacatccagagcacatgtgccacatctggggaaggactctacgagggtctggattggctgtccaacaatattgctaacaaggtaggatctgatgttaatacttgagccagttcttgtttttgagtttttctggctataatgtgttgattaccatatttgtcttgtttcaggcttaaaaaaagggctgatcatgcagcaatcagtgtctcaatgctgtgccttgtgtttggtgttgatggattcttttttacctttttctttttactgtcattaattaatgtatctgttcagattttgttaccacaaaatagaaattgccattttatcctgtagatgctaaataattcatggtgttctcagaatatataaaagattcatcctttttatgttagtatacacttttttttttttaacttcaatattctctcaagtccatgaaagttcttgtctaaaatttaccttgtattatcataaagtggagagaaatcttctgttctgtttccaccgttactttaattaatattctctaattacatgataattcttgtctagatttgcaccttgtaattgtatcataaggtggaaacaaatcttctgttccgtatccaacaaatttggcaatttagattttggcccaagaaatttagcaagttcagtccagagaatggggttaactgtgttagtgagtcgtgacaccaatttaagatcttgttagtggatcattaaagaatgatgaaaaatgtccactaattgaaaagctcatctttgcatcttttttttccttttgtaacaaaggaacatttccatttaaaaggcacaaagtcgatcaaaagatcaatataaatttaaaactaattgccaagggaaggctctgcaccaaataaaagagcaataagaattaaaagtccgcttacaaggagaaaggaaaacactagagaaagcttacaatgagaaaggaaaatactagagaaagataaccgaacaattctaatgttattaataatagcgcccaaatttagtagaacaaatttctttactcaaagtagcttgcatcaaacggggacaattagataatatcgtgagacatgcacacaacaaagaatcatccttacaacaaagctaccgcttctgccatatgaggttcataggcagcccgtcaccggcaccgcccagtatagaacctcacttgaccaactcatcaccacaatcccaagactaaaatttcgtaccttaaaagtcctatttataatcttcaaaaatatctcacttaaaaaagataaaaatttgaaattttgcccaaaaatcacctcctccttgcggccacgacttgctgccgaaaaatttatgtcacctgattattattttggtcataatgccttcaatacaactcaaaattggatgatttaagatgttttataaagctgagaacgagatcaacaactttcatgttgtgctcaaagtccagttatgcttcctagattgtcaaaatttgtaattaagttccgccttataaaactgagctcgccaacttccattattttccaccaaaatgtgctataacatctctccaaatgactctaattgcatgattaatctttaaaataatctaacaaattataatcacactaatcaataatttaaagaatcaatttaagaatattaatacataaattggctatatttataagataaaatattgacttatcataggccgaccaaacttgaatcatttagaattttcgccctagaagaagaaccctgagcatcttgatagcgccaaatgaaacttacagaccattgattcaccatatcatctgagagcaacttatgatcatgaaatttgtattccacctatgcctaatcctctatcagggaacaacaaattcttccatctcctgctttgaaagaatctccatacaaccaactaataactcataaaaactggaagccaacttaagaacatccaagcctttcaatacccacccttgtctaattcctttgagagaaggctacaactgtagagccttgtctaatttctttgagagaagaatataaccatagggcatgcacaatagtctcattattttgaaagcatattgaacatgcattcacagcaggccatgacgttgcaaattagtgtaacacatcaagaaattaaggcctacttttcaaataaaattcttaactttggacatcattaaaagagaccacaaaaacttccaccagcaagactgacttgaggaagctaacacttgaccccaatctggcgacaaagctccaatatcaactcttaaccgtgcacatactagtatttgtaaaatgcaaaataaacgcatccttccaattaaacaatgaaatatgaattgataagatagctttggcttcggctctggcttcatcaaagagctccttaatcaaaagagcgttcaaagaccattctctaattttagatcatgagcatattgaagctctggaccaccccgaaacgagtaagcccgacccacattaggaatccaagcatcttctcgaatctgaaccatgtctcccttcccaattaaccatcgaactcctttcttccataaatcacaaccctaaagaatacttttccataaaaatgagatcgtttagtttcaaccacttttattaaagagctatttgcataataaaaccctttcattaccttggcagccaaagaatcaggacaattatatagatggggctgcgtgcttagccaatagagattggttaagcataaacatgtcccgaaatcccattccaccatccaccttatgccaacataacctagaccacgtgcactagtgtaacttctgcttattaggatctccaccccacaagaatcgagcatagggtcgataaatttcattcacaatacccacatgaagatggaacaaacccatagcatatgtcaaaattccttgaatcaaagatttcgaaaggacctcacgaccacgtgaagaaaaaagcttcaactttgagccaaaaaatttatttcaaattcgatcaagaatagattgaaacaaaccacttttactttttcttgcaaagcaaggcaatctcaagtacttatcatgtgacagggtactagaggaacccccaacatactagcgagagattcacaaacatcttgaggcatacgagaagagaagcaaacaaccgatttatttaaatttaccaattgccctgacgccctttcataggtatgaaggatgtctctaaatcgaacacagcctgctggtaaagcttccaagaagaagaaattgtcattggcaaacaataaatgagaaatcattggcccatgcctttcacacaccagctcagaaatagcttgtgtaaatctaatgcttaataagagatgaaagtccttccccacaaataaggaacaaaaagagtgagagtggatcgtcttgccgaagtcccctggtaggtacaatattgccaataatatcatcattaacgttgatagagtaaatgatggtggtgacacaacgcataatcagtccaatgcaaccatgaagaaatcctagttgttccatcattccacgcaaaaatttccaatcaacacagtcatatgctttagtgatatccaccttgtacgctagaaaatctttttccccttcttatgtcttttaatgacatttaaacattcaaacctaatcattgcattatcaaagatgaggcgtcctagtataaaaacagtttgctcataaaaaattacatcatttaaaacctccctcaacctattactttatcattttaggaatgattttataaaaggacgttacataaactaatacgtcgaaactcactagtgaaagtagggttcttctcctttggaataagtgtaataattgtttcacactaaaatattatttaagtcattagtgaattggacattgttgctgaaaattattaaatactacgcaagtgcacgcaatcaagtagtatactcacgcaa

SEQ ID NO: 161849 - DNA, 5321 bp, Cannabis sativa
actaaacaatataacttgaatccttcgtatattttatttcaaattcgttacaatgtttaatatttgctaaatttgatattctttttataggaaaatttgacacaaactttcaaaacaccactaaagtaatacttttttaaatgagctaaaattagaagtgctccaacactaatatattaaactagttttaagtgtagaatgttatccacatggttgttaaagaaaaaaaaaatctcagagagcgcaatcactacgcattagtgggcattaattttagatggaagattatctcttatccacaaatcaattttgaagggaaaggagttcaaaacaaatagtaattggtcttattaattcagataaacctactcgtacaaatgatgaaatcaaccaaatatgaaaatgccaaaaactggcactgcctctacaaatagtttacaataccagtgacagtaaaaatgtgaagaaaaagacagtaacaaccaaagagaaagaaaataaatgctatctttctgtaactcgactatttctgtataggtaagccaatccctgcattttcgcctcccaaaagcctaatcattgtttagagaagaaaccttgtgttaatgacgaaaaatcataatctttcccggtttgtgttgaagatgcagatgatattggtgatggtgattgagttttgctagctccagcacttgctgcaccattaactggggtagcttgtcccatagcataaaaactaccaagcagaaatggaagagcaaagattatcaatgtgaaagatgaatcgagcactaatagacatctgttatgagtcttacagatgacatgtgacgcaaggcaaatattacttttcttgggaaaaattgcatttattaattaatcaagcccacggctacgtacatcatcatgttagcagatgaaatcaaaagaattatgcataatttattgatgtctttaggaagcataaagacttcagtattcacttggtttgtttgtaaaaataagtaattagggaaagaaaattattattggaattaataataaaaggggttgtcttaaaagatgacaaacaaagataattatcaggaagggttttatttaaaacagaaatataataattttcaggaagagtccaacaaattcagaatacaatgcaacagaaactcttatagggcaaggatttaaaacatacctggacgttgcatatggaacagagctcccaactaaatgtgactgtcccaagttcactgcctgactcaagagaaagaagcaaaatgtgagattcacaagaacaatcaattgaatcgccatttaaggattactgttcaatctacctgtgtaactttctgttcacctagcccaggcattggaagcatcattccaggaatttggtagcccatattgggccaactttgaatgggtacattggtaccatttggcaatggttgtgtgttggcaggaaatttggggtcacctttagcagcagccattagaagtgactgctgctgagccagcattgcaagttgctgttgatgcatagcaaatggcgagaccatatttgactatttttccaacgaaaacattaaaaattaccatattatcaagaatttattagttaagtaacagataatatgttaggagctaaataaactctcacacaaaaacagagacaatacaaagaacctggtggtattaagagaccacccctctccctaggagaaacagctctaatccaaattcatagaatactctttgaatccctcttgcactattttatttcttttaaaaaaaaacctcaatatttctacaaagactcgtacacctacactcattaatgacaaaatataactcactttttcacactccccactacttaatttatttctaattatttgactcttcggtgcctaacagataacttcaaggagtagtgcaatcatgaaaagatttttgcaaaacttattaacttggtgcgaaatggaaacaaaaatttgacttggaaagaaataacagaaccgattgtttaaacaggcaaaacattttttaatcaacaaatcatcaaacaagtaatttctttagaaaaacaatataatttaaagttataattatcacaaaccttctcgaaaagactcatgatgtcatttttcacgtctttgggtttctcagaaacaggtgttaatacaggtgtatctttaaatagatcctcaaatcctgagttggccttgttattgctctcaactggtttttgttgtgcaattttctctgctgttgatggttcttgagcagcagctacatgcatagtaagttataaataacatttcttaatcaatgtaataaaaaacaaatctatactacaacttgcatggtccaggacatcggagcaacgcagacatacattggaaacctgcccaagcattatcatcagttgatgctgtttctgggccattttcgtttggaccatccatagatagcatgttgaaaaggtcagtagcataatcaacttttggagtgacaataggaagaggggtggcggcgggagtactattaggagcctgctttgttggttcaggctgtcgtacagctggttctactttttgaacatcttgtgcttttgggacgggagtgacctgatcagataatgatacaaagttgaagttccatgaacagttctaaacgccaataaaaggtaaaaaagaaaataagacaatctttcaaaaaaagaaatatgccgtcttcatcgtgtatacccttgcttgtactccaaagtagaatacccaatatgaaatacttaagggacgtttggtatgcataaatttggagataaaaatgtgaacactttttgtgttcggtacaaggtttgaatttttccaaccccggaaagtgaactccaagggtttaacttgaatgggaaacactctaaaatattattattatctttttatattagaaaatctcaaaccaatagtttcttggttaaatgactttatattatcttataagtacaaataatacatatttatattagatataaaactacaaaatgatgataaatgtctatttgtcgaaagaactaagttgtttttcagtagtaaagccttttaatataaatagtttagtttaaaaataagagttgcactttcatttaaaatcagggattgtattttttttaaaaaaagttctattttgttctagtatttaacaaaaacaattttttatttttaattttgctgcaaatttatttcatgagtaaggttgcttataaattaaaaatatatgaatttggtaactttttaaaatgtcaatcaaattatataatactattttgatcaaatatattattatattaattataggaaagttgtatactttttgtccctaccagtaggagcgtctctattttttatgcacttaaagagattattattcattttcttttcttttttattgcatataacggtggacattacaattataacagatatttcacaagttttcaattttttttttttaaaaaaaatactttatagtgttgaaaacactcaaatatttaattgtacgtgtgcctatcttcacgtgcaattggctattttaaattctactttcggcatcattaattattcagaattttctaaaaactagtacaatgtctactataactataatgtagatctatcatataaaaaaataagttataatttttctaaataacgataatggatatgcccctacaggtaggaacaataacactactgctatagttgttccaattatttatatggaaatattaaaaattaatagattccaatacacaaccaaacacataaattaatattaaaatcctagtacacaaccaactattagaagattaccctcttcaactttcaacaatgaaaacaacgaattcctcgtcctcaacagtatcttaatccttttttagattacttctctctaccctcccaatagtaatcctttttttaagaaaataaattttttttactacagctaccttgcttttaagttgacactagataagtgaaactaacaatccctacatcctacataaatagtcagcataaagttcttcaacatcagaaggaaaaatgcaacaggaattgggttaaaaagagatgcaactcacttgttcaggtcctctaggaggaacaggaacgctcactcttgtccctggagcattttcttttctagtgggcggttgaatgttcttcctctcgtcagataatctttcagaactgcttgtatatcgatgaccaactctctccgaaggttttggccaatgcattgtagccttttcttcttgttctctagaaggtgattttggctttccatctctggcaacccatcttttttcttcatacctatgagagttgaccatatttaacacaagaggttataacactataataacaatgcacagacagaaaacctacatcaatgaacatagaaaagtaaatttacatcaacatcacaacagataaatttgacattagaaccaaattaattaaaaataaaatgaaactgcatcccagttgactattggaggcatactttgcacgtataaagttctcaatccccactctatcataatttggaggtagctctgcttcccagaaagaatttgccttctcattccccattgctgcatgaaacacagaatattgttctcaaccataagagaatattacaaagttaaactaaaagagaatttcgacaaaacaagtgttcttacattggataaatgcaacctgttctggaagccatgtgtccagtgttgcagaccgcacctgcagcataagccaacagaagttataatgacctgaattacaaataaattaacagaatctattcaactaatagtttggatatcaataatactgcttcaatgaaaagaatgtggcaggcatattcttaagctgatattacttcatgaatagaaaaacaagagtttacattgtttgtaaagttccacagcagaaaaggagtgagtaatagttaaaaatagcttccgagatcatttgccataaactgaccaaattcgctaatgaatacagcagtatagctttgtatgctcaaccaaaaaagggagcgagtagaattccatatatcagaaggaaaagaaaacatcaaattaagtcaaccacttgattttggtttggaattgttacaaatttaagaaagtttgcagtgggtgggtgggtgggtggttgaaattttggggttttttttttttaatgacattgggggagggggattcgaacttggaaactcctctttgtgaggagaagtgtggaaccactaggctatgc

SEQ ID NO: 161850 - DNA, 4517 bp, Cannabis sativa
agattctctagctaatataaatttaattactaatttttagttgagtaaattatctattttaaggcatttgcttggtgaagatctcggacctcttaatgtgaaagagttgcaaaatcttgaaaaacaacttgaaggatctcttgcacaagttagacaaaagaaggtatatatatgcatcttatatacatgtaatgatatatatgttggaatttaacttctttattaattcctttttccctttcgatatatatatatatatatatatatatatttatacaatcaaatgcaacacattcatctcaatattatatacaccttaaaaacatttattcacagatgcagattatgattgaacaaatggaagacctgcgtaaaaaggtgcgcgcgttctgtgtggccatatatatatatatatatgtattcgtgatctaattagctacttttgatattgtttttattaatgaataataatcattggatattctgattgatcatcgaatgattgatatccttgtgatggttctctgcttcaatttggcaggagcgtcaacttggagaccttaacaagcagcttaagattaaggttattatatatgtttatatgtaattggcaaaatgtcctctgtttttgacgtgtagttaagatatatattatataataatagctagtgtgtgatatgtatttgttttgtttgatttggtcagcttgacgcagaaggacaaaacctgaaagccattcaaaatcaaaacatatggaacagtaacttggcgtctggaagcaccagctttgctttgcatacttcttctcagagcaacatcacaatggactgccaccacctttcggaacccattttacaaatagggtaaataaagtgacaattaatatatatgatagttatatagtgttgccaaacaaacagccaaaggaaactataatttaagtttgtgactctgttgtttcatttttgaaaacagatatcatcagtatgtcccagctgaagggacttctcatagtataccaaagaccatgtctggttctgagactaacttcatgcaaggatgggtgctttgagtgagtactgccactatatatttggaccttataattaattaaagaaacagtataactttaattaaatcaacttatggtgtttgtaatacttaatttcatttctcatcttctaccgatcgactcattatttctactaattgcaaggcaggagttattagccctttcggtttttatctgtgatatgtaattccaataatatattacatatatatttatatcatatgtaaatgtgtgcagtatatttatatctatgagatgctctaagtgtccctttatggtgatataagttttcatgataaaaatgatattggaacatatcttacttaaggtactcttttttgtgatttttttttttaaacaaaatcttaaaattacatgtaaacaaaatattatattcctcatcatcacacccatatattttttgttcataaaaggtaataatattaggtcgttcaaaaatcaacactatacccccacataatatatatataccatatccattcataagatacaaattacaaattaagctagtaatatacataggggaaatccctccccttgaaagttcatcaaactgctgttagctagatattctagcatcctttgaagcttgtcaacaaattgaacaacatcattattaacaaaagtaaaggaaacatctaccagtcagggggtcttccactagacaatgtgcgaaccactcgtagagagtcagtaagaatgatcagattgtcccattgatgatcatagcccaaagcaagactatttttaaagcctccaatttagctgaccaaaggctagtattgcaccaccaaatctttcatctttaaaacatccatcaataaaaaaaaaaatttctttgcaagagaagtatgcagtgttctatttgttagaggtctctggtaataaggagtggaagtgtaaagttgcatctccaagaatctccccacaacttcctaaactagatttcctataatcacatagttagaaaaattatggtaaacacactattcttccatttccaaataacttccatcaaaggcaaggcagataagaaattcagttatgttaagaacttgtaaacgagataaggcatttcagatgaaatcaacccacaaaagtaaaggtccaccaaaaccaaaaagcatgcagtcgcaacagagcatcaaaacaaataaatgaaaagggttttcctcataaacatgataaaataaacacttcttatcatcacgaaaagaatacttatctttggtagaaagaacgccagagacaatcctccaaatcatcatgctctatcttggattgtcaccaactccaaatatcctgagtagtggtaaatttattcttttgatcttctagataggcacttttgatagaaaaaagaccagaatgggaggctttccaaatcacagtatcaacatctaattgagaaagaatttaattgttcctactttttccccagttcttccccaaaaagaaattggagaaagtcttagtttcaagttctggatcttctaaaaaggagattccaggtattttacttcgaatagattacataatctcccacaattcttcatattccatccacgggatccaaagctgtcaccaaagatcaatatattcactagtggcaatgatagtccaggctccatcaagaacgatctttctagcctcaagaatatcattccacaaaaaattatcagagtttagaggctgaacactcaaaaataattcataggggaaatatatatgtggctttgagggagatagtcaagggtctattggagtttgaagtcaagaaacaagcaattagccaaaagagctagatatcttccatacgtctaaaactcaaaccttcacaagatttgagttgacagaggtaatcccaagattttgcagccagaaatctattttatccaaagttccattcaaccagtatcttctgattgaagcatccaattctcggtaggaagtaattagaattttaacggtagacatagagtaggttgggatagcaagagcaatagagtttatagacaccattctcccaatagtagacatagtcttcattttccatccttccaatcactgacaaagttttgatttcaagaaatcgaaatccttttttcttttcttagtaaaaataaaggtgttgaccccgcttttagccaacgaggggagtctttaaagcatttggatttaataaaggttcggccctttgatgatagtaatagcctactcccctttttattatattattttgataattattaagatcacaagagtccgactaagtgagtttcttaacaatctcgaaaaaacttacaaatattttagcagcataagagctcttttgaaagtcgaaaaaaggatccttcctcagcgaaatgactcccctatttataaagaaaatacaagatgcaatgtttgaaaatagaattcgagaaactaactattaaatcccacgattctcttaatcagataaaccaatcccatagaaatatggattctaattaagctataattgtggagaaatttaaggaaaatatctttgggatcttcaattaccgcattcttctgtacggagaatggaactcagctagacatatctaatcttctagaagaagtgcgaggcatagaacttgctcagatgatacttgttgaagaactattcttaactaacatggccttgaatcgttgtggacgaaaccttaagcgagtataccccgtttaggtagaaatatgcttgatgtgtgttacccagttgagtgccatgtcaccttgtaaaaattgggataacatttgtcctccaagtctgtgtgggaacaacagctcgtacgtggacttcttcggattacaggtcgattagacgggtgacacgagtctgctcccacgtgacgtcctgggtataacacgaccttcccgaagcatgcatatcccctcacgtcactttagtatctccatcatttaatgctttgtctagaaaattatacattggatatcgtgtagacagttatggggaaacaggcttctgtcggttatacttcatgatgagctttaattgtcttcttttggggagggaagtgaaatttaaaactaaattactaactttcctttcgagtagcatataaaagaaaaactaaattccatttccaccttttttagtcattttcaaaaccaaaaatctaggcgcaagaattttcttcaaagttcttaagctttcaagctccgtttaagtgatctcacgaagtttcaagtgctcgacgatcacagtgagtaagtctttgccttattcttcctttacatttctgtctatgattgctctgctgcaaacttttaaatccccaaattaatgattgaaatctcaaaatcaaaatctttcataataaatagattgagaatcgagctttaatgggttctgtaacgtccccgcttcaagcctcca

SEQ ID NO: 161851 - DNA, 5777 bp, Cannabis sativa
  modified_base (5671)..(5678): a, c, t, g, unknown or other
agcaccatcccgggtgccatccctttgccaaaccccttggggctgccgtgcaaggctatcttctctatcaggattcctaggagtctcctcaggccaattattgactgaactgtcatgccaattcccatccatgtcctccgtgtttccatctctccattcattaaactggccaaaggatgtctgtggccaatttgctctcccatcttctgggattggcgcttgcgaattggttgcttgacttgaagtttcctgcacattaatacgctcagcagctgtgttgctctctgaatttcccatacgatcagacaaacggctgatatcaacttcttgactcgtagactgtaactgttcatgattttcatgttggacatcctgtggagcatttgtttgattttgatcatctccagaatcatcaatatcactattagctgtggattcagactggttgccagcttgtccacgaactatagtttctaatcttgaacgaaacccttccctagccagataaagagatttgtcatcagggcaactgagtcaattttctttcaataaatacggtttaacttaattctgctaatgtcaagaatcagagatatcaagcaaaatacaggaaacaatgtatatcaaacctacatagcaaaaggtcatcaattgtataccctatgtaccacaattggaaaaacaatagaaatttgtagtataggagtccaaactcaaataatcctagaataatattccaacagacatcgacaaaataaatgtacaccctaccaggtttatgcaaggtaaagacctccacaatagtgatcaacctctataatagaaagagttcatctctataatctcagccaacctaaactcctttcacaagcatcaaaatctcctaacaaattatgtgcatggttactaatccctaacaaaaacgaatcataaaaatgaagaggaacgattaggaattcaaaaattaagtcatcctttctcaatttactaactatgaggaatatgaaaagaaaactagtgtctaaatggctaacacatgagcattcattacagtcgattatttaaattttattaataaacacggtaaaagaaacgacatgtatcataatataaatttatcgacactaacatagcaacaagatcatctttcacttgaggaagaggagaatagaagaaaattataaatgaataacaaaaccactttaacaaaaaagattagcacacttgttcccaaaaataaaacaaagactttacataaattattctcctaaagatgaaagatgctgcatgagccttcaacaatgggcaaaccaacaagtgaaattacaagactgctccaggaacactaactatttcccaaaagtaattaatcattgcaaagtgtagtctccaatgcatgaaaacaacgataaaaggtgggaaatacagttatttacacaatttaaaactgttgagtttaccaatcactgaagcaagtcaagaaaaaacaaatgctagcataccttaaaccagaaacagtgtgccgctgtctcaattgaactaactcactcgctgccattgaaggaggtctttcttcttcaacaggtctttcatttctcaaaaatctacctcttaataatgactgaaagaaacagtttcgaattaggaaccaatcatttatggaagatatatacatatatatgtatatatatgtttatgtatacactcctaatcaaagaaacaatgtttaagaaactaccttaacaaacaaaaacaataaaaatcataacacactcagatccttatattatgagccatgtatatagaatgacagaaactaatcccggaaacatttctaatagcttggaatccactttcatgcatttataccaagctccttggatgaaagcataatacaagaataaggtcattagtaagaagaaaaagaaagatgttataaggtattggcagcacaatattatactgacctgaattcgatttcgatgagcaaaatcagagacagcgcgatgctccaatagaccctgaagctccctctgcctttccctctcaatcctaacaagcaaatcaatcagagcttgtcttcctcgcagcctcagcatgtctctccgaacatgctcaggctggccttcatcttgttcggaagccaagccacgggcttgaccaacttgagcaccagacccactgacttgaacttgattttctctccggctaccacgtgatcctctttgctgacttgtcatttgcacccactccctaacaattctcaccctttcacgctcagtttcaccaagccactcagctctgtgactattgtttctttgaccaacacttgcagaatgctcactaatgccactttccatccaccctcgcacaatctgcctcactctctccctctcaacatcaccaagatcaggagattgctcccgacttgacccattgttgtccccacgttgattctgtgaacccatctgttcgtgtggccaagggccataatcattctcactctcacttgcgtcctctaaactcccctgattaacactctccctgatatctgacatgtttgtgctagagtcattggtagtagtagactcgacactcctctgctgcctcagcctttcccgtgcccggcggctcagcacatgttcatcttccaactccctccacatttgcaaaattgtggaggcctgagtgcttggcctctctacagccccctgccgccccgaagttggtgactgtgattcactcaaaaaagaagaatcaagcatcgaaactgtgtgcagaccggcaagtgccatcaattctgtctctcgatttctcctctcaatagttgtaatcatctcttgtgcctgcctagcagcccacctgctcaaaatccgagagtggcgacgccgtgcagctgatgactcagccaaatcatcaccctccaaatcagaccttcgtctcctacgcacaagctgatcaccttcatcatcctcatcgtcaggattgcgagttgaactacaagacgcgaatgacatacaatcatccaaatgcccacgcatcatcaattcttcaaatccacgctcaaagtcagagcaggcatcagtagattccggcttctgttgtagcggttcaaaatccgccattccctttaacccaatcaactcctacaaaacctcacgcccaaacccagtttttcaacccctaaaattcaattcccaagttacagctacacctccatccccaacccacataatattaagaaaataataactaaattcgtctaaaccactattttacaatctttaacaacaaacacgcaaccctagtaaaaagaaaaaaaattaaaaaagaaaaaatgaagaagaagaagaagaatacggaaaagataaaattaaaagccctactcagattaaaattccatttaaactccaaggaacaccatctaaagcaattacattgacaattctaaaaacaattcggaaagggcaattcaaatggatattagatcggcctgagatcatgtgtagagacgaaaacgatagaaaatgcttgaattgtacagcggaaattaggtttcggattggtgcaaaaaggtaataacgtacctcagaagcttctgttctttcttttccctacagtctctctctatctgtgtatattcacaaaaatatacatatacacatataaattaatatatgtttatgtgtgtgtacgtttgtctatgactcagtcatatgaatttctgcgtatagaaaccctagtttcttggaaagctaaacaaatgtgagtgaaaagggagagaaaataataatggttgaagaaagatcagagagaagagaatgattttctcagaatttataaattaacattctcgtagagaagaagagagaaagagaagaccaccctattattattattattattattattattattttatttttcttttgtgtaagaaaattataaaataaataaataaataaattggatagacgatgtagagagagagcggcaatctattaggtatgccacgtataattaactattttcagaaattaaaaaaatattgagttttttattcacgcaatcaaacaatgccacgtatgttcttcacttcactaattgtttaatatccaaaaagcttgttttaattatagttttttgtggacctttttcttttttttcctatttttgtttcattattcttttgtgtggtatatatattagagttttataggtctttcatatagttaattgtgtaaaccttgtaatgtgattttttctacaaaatattgaatgaaaattcattaatcactatattggttggaatttaaattaatctttatatatatataaagaagaaaatcaaaacaagatagtgtatggacagaaaatagtgtatgaagaagaatatataatagatcactctaatgtgagattttattttgacaaaaaaaaatgtaaaatgatttattataattaggaatatactgtacatttgtttttttttttcccttcattaagaacaatttgtacatttgttaaacgtgttgtctctaaatttattttgctttaaaactgaaaattggtataagaaaaaacgggtataataagaactattatttggcccctttttttcatgtgtttagagatgagaacaaaaacccagaaatgttcttttttttttcatatcacaaataaggtttgacaaatattttctaatgacatattttagatggaacaaacaaaacaacttgtttctatttttttaaaaaaaaaataaaagttagttttgctttagaaatgtattttttattcttcttttttttttttttttggttgtagatgattattattggtaaatttatcttatggttggaattttagttgcactatattttagattagctatgagtaagagtggcaataatatgagtcacactatgttaaaccttaggcacgcttacatttcaagtaaaaattaggttgatccgcagtccctgaatctatagtttttacataaacacaattaagtctacattaataaataagccatgaatatattagcataaaattaactaagttcaaaattaaaattgaaaataatatataattttcaaatcatatattttgatatttggtaatgtttaccgagatttttgaaaaccgattaataaatagattaagcttagagatgaataaattaaaaattaaaaaaacaaagatttttacgtggttggacattaatacaagttaatattgtttacctagaaaagctttgaagtatttttacacgagttatcttgccaaagtttttcaaaaactctaatctttagcccttgatttgagaaatatttttctaaccttttgcataaaggaataatgttttatttataggtatgagttgggtgaattcaaactcgctagggtttaaaggtaacaactaagcctactgatgaggtgaaatacaatttatattaactttttaccgattaggtaaggcctaatttacgagaaaacgctcattcatacatgtggggacagtgtgattgtgataggtatcgttccccatcatgctggtacagtaaatgttggaaaaatatatggagttgaacaaaaaaaatagttttctttggcggtgcatgcactcttcaggtctaacgtaaggtaggggtgaaaatcggtcggnnnnnnnnggtttttaaaattttataaccgaccggacggttacggtttttattttacgaaaaccgtaaccgaccgtttagaaattataaccgtataaaaccgaccgt

SEQ ID NO: 161852 - DNA, 4807 bp, Cannabis sativa
taatttttcttcaaagagtgcatctcttttgacattgttgcattccatttctttctatccttgcttttcattgcttttgtatagcgagtaggttcctgttggataatcccacttgcaacatgaaaagcaaaggcaattaagtcagcatgaccatacctttcgggggttttacctttcttcttgttctgtttcttgctagcttgtaattcctctgatctgcttagctacatgttctgaatcaccgctttcatgatcagcatgtgtatcattctccattctagtagaagactccacctcaagctcagtttttcctttgcttcagttctgttttgatcaatctcagctttgtctccaacaagtttgtcatgaaccccatagaagcttcattgaatgtgacatccttacttataatacatttcctcattcctggctccaaacacaacagtctataccctttgactccatctgtatagcctaagaaaatgcatttcaaatctctagcctcaagcttgtcctaccggatgtgtccataacacacacagccaaatacctttaagtgttcatagcttgatagtttcccagactagatctcatctggtgtcttgaagttcagtgttgttgagggtcacttgttgatcaaatcagctttaattgtcacagattctgcccaaaatacttttggcaaaccaacacttaatagcatgcaacttaccctctccaatacggtcctgttgaatctctctctaactccattttgttgaggtgtctttctcacagatttgtgcctagctataccttcattcttacaaaacacatcaaactcatctgaactatattctaaaccattgtctgttctcagcctttctactttctttgcagtttgattttcaagcatgattttccaatgtttgaatttttcaagtacctcagttacttttcaataaaatacccataattttcttaaataatcatctacaattgagagataggatttgcctcctaagtgtgatgctgttcttgagggtccccataagtcactgtgaatataatccagtgttccatttgttcttcttaccagttccaaacttaatcctgcaagacttaccaaacacataatattcacataaatttagtcgttcaagctttacttttccaaataatccttgtttgttcaactcttttatccctctttcacttacatggccaagcctcttgtgtcatatctcttgtagaaattgagaagaaatattcacttgagttattttattactattggaaagaagcctttaaataggctgaggacagacttagacattaattacacttccactaacaactactaacacctcaactaacctaattaatactgattattttacaccctccctcaagctggtgcatacaagtcccacatgcctagcttgcacacttggtcatcgaagctttctgttgttagttcctttgtcagcaaatcaacaacttgttgtttgctaggtacgaaaacaacactactccttttcttcagttttgtctttatgaaatgatgatctacctccacatgtttggttctatcatgatgaactagattgtgtgctatactaatagctgattttcacagtgtagtttcaaaggacttgacttttgaagttttagttcttcaagaactcgtttgatccaaattagttcacaaactccttgagcaagagctctaagctcaggtttggcactacttcttgcaacaatagattgcttcctgcttctccaagtaacaaggtttccccataccttgctacaatatccagatgtcgatcttttgtcctcaactgaacttgcccaatctacatctgtgtatgcttatatacctctttctttatttttcctaaacaacaaaccttttcccggtgtcttctttaggcactgtaatatcctgtaaaatgcctctatgtgttattctgaagggttgtgcatatgttgactaaccaaactaactgaaaaggcaatatccggtctggtgtgagacaaataaatcaattttcctactaatcattgatacatccccttgtctacaactttttatttttctttcttcttgtactttccttttggccccaccggtgttgctgctggtttacatccgagcataccagagttccatttagaaatgcattcttgatatgaagaacacaaacaagtctaaagttcactcactcaaaaacacacaattaagaacacagtcgatccaagaatcacaaagaaaaataagaagatttaaacaatgacaaaagaagcaagacatcagaaattttacgagttcgagcccagtgcaatgctctacttctcggttgaacaacagccataataatcttcattaatcgccaagagtgttacagaattacaatgattcttgatcaagaacgattgagagttacaagtttcacttctctctctacttcgtagaaccaatctaactaactctctcccagttacaactagataatacatttttatacaattttttggagatagtatatataggtaactaactcggggcttgagctattagatcactagtctagcttgcaatgaacaagtttagtaattagtaacttgtaaccattccaagaatgatttatttccagaactacatgggagtaaagtaaccaccttcacatcaagttctctctctttataaccccaaacggttgtctagtggtgaggaggagtgttggaaagctctggtaagcatctgttccaaggctcaaatccccatagactcagaaaaccttagggtcacttatggtcacccggtcaaactgtgaaaacatgtatatttcacttttacatgttgctttttaaataatcatgtgacctttcatacaccatctttattctctttctattgtttttcttttattatttatggttatactacaattatgttgttagatgggtatagctattctattcaaggtatttggtaaatcaatcttttcgttgactaaacgtctaaacactattttgattggtaactgaaatattatagtatccttttttcacattcaggcatctttgggcactatggatttcatcattgacactgtggctgcagttcatcccctgactccactactagctttactgaagcttaatgggaaactgatcactgttggtttacctgacaaacctctggagctgcctgttttccctctagttttgggtgagtctcaatcattacactgaataatgcaaaatgccttattaaccatatatgtacatggtgacatcccccattaaaaataaactggtttgaaaagaggtgtcacataattgagggtagtgtttgagtctgaattttatgtttagcagttacaacgttccttcatatagcatatgttgttttagtcaccatcttttccattaagtttgttttacttcaaagattattcaagccatactgaaaacataatagcttctttactttatgagtacaaagttattgcttttgatggttaagcatttgatgggcaatttcttttaatatgttctcactcatttcttgaaaattgcaatgcgtgggagaacagggagaaaaatggttggaggaagcgatattggaggaataaaagagacacaggaaatgctagatttttgcgccaagcacgacatcacagcagatattgagctaatcaagatggaggagattaacacggcctttgaaaggcttgccaaatctgatgtgaggtacaggtttgtaattgatgtggggagctctttatcgcagtagattagagctcttctccaatctccatcctgatggtttccattatgatattataataaaatgtggattgttggactatgtatgctaaatatgagatggaactatggagtggagccctacaattacaatggatttctattagtaaatgatggatacttgtggctctttctatgtttggcctagcaatattctctaaagtacacatcttttgcacacaatgttcttgttttttcctttgtatcttttagctaatatctttataaaatcagttatagagcttcaagtactacttatgcattgaggtcatttggactataaaccaaactaggattctttttagagaaaattatatcatcttctatgtataccaagagctgtagtcttgtagactggtagtgttttagtagagcacaatttagtaatttttcctaggttcctttttagttctttcttcccattttaaataataactacccttttctttaagttaattgctttgttggtcatgaaatcttcggaaagatctcataggattttgttaaagttaggggtgtttattgtagcatccaatatttttaggcttatctagacttgatctaattatatattagacgttagatttatcatccgatccgatctaattaatgttagtcatccaatcgatctaacatccattaaatgttggatcagatcagttttatccattgggtgtattccatttatatctattagtttaatgagggtttatctaatatttttaacctagtattttttagatcgaatctatctaatattttagatcaagtgtattggatttagattggatctatctaataagaaaaaagagtaaaattttaatgttaattttaatatatacatatatactatatatataactacaaaatctaattactttacaaactaaatgaaaatacaaattagttcgattggatgttggatgtattagatttttggacatcccatccaacatctaatccgatccaattagatatctaatgtttagcg

SEQ ID NO: 161853 - DNA, 3353 bp, Cannabis sativa
  modified_base (3303)..(3317): a, c, t, g, unknown or other
gtgtgtatgaatgttcttatgaattacatgttttcataaataagcaaaatgagtattttctattgagtatcgaggagaaaagtatctaaaggtgtgaagtgagaatgtttctcctcactttcaattagccaaaggtaatcatacaagcaatatcattgagcagagctgcccttctctatttattgtttactacagctgaactatttctatcaaacgaaattgatgcctcaagggctgtcatgaatgaaccaaaatcaaactatagattaaagcctgttaatttatatacacatatatttattgtccactgtagcagacaaatattttccatcaaagaaaaattagtacctcaaataaactctctaagcttcatgaaaaaaccaaagtcaaaattgcaaaatgtaaatgagggaattagctccttaatgcacaattgaagttatccaactccttagaatgaggaccataaattgctttgatggtgtccctacagctactgcaatagatcaaacagaacaaaaaccaacgttaccaaagctaaaagatgaatgcttcacctcattttagcctaacaaaaacaaagtagcatagaagagaatgctaagaatacctgcaagcctccttattgaatttcttcttggagattccatatagcgtctcaaacacatcaggttccacacgacagaaatatggacgttctggaaaatggggtccaaaatccaaaagaggttagaatatgataaatagaagtagaagagtatccacatgaaatagataagaggatgttacctataacactatgccaagactatgggttactcctatcattacaaattgattttgagttggaactttaagaattatgtgaacccaatagctcacatgagcatccggtccagaaataataatgagccaaaaaagttactaaagttatagttcaagattggtaagagtcaccattttgaagggcatataagtgtatctcagtctatccatacacttacaagattatagtttactccactaattatcgattggttttaagttggaaccttctcgatcttagtatgtaacagcattagattctaaaagctcaaacaaacatccagttcaagagccatcataccaagatattaacacattgataagaccgtagacattactcaaacttattattttttgagttagaaacctatgaattttagtataacaaggcaaggaaagtaacaatcttggtaaagtgaatactcaccggagtaaatagagcatctgcgagtacttttctcatagtgtatgcaccatccatctggtccaaccatgcttctgtaaagctgaaaatcaacactttaaacaagagcaaaacgcaaaagagtgtaacaaaaggagctcagtagcaactaattccgaaaaactgaaaatgaagaggaagtaagttatacctgaacatcagaagggtcgtcgaaaatttcgtcaggagtggcgaaagaagggcctttgttaagcttgcagcaggctccgcagccctctacgcagtgccacagctgctcttttcttcccccaccaaagccggcattgcttctctggctctggctccgcttggccggccgcgccctcccgcccattctgactatgctaaacgatggcaaagctgcggtgtgagccaacatcgataagattttcttttttttttttctttttttttttctaaaagaataacatggataagattgagaataacaaatgacaatattaaagtaataataaacattttcaaatttacattttaaacctttaatttcactttcattactcatttatctttgtttaaatacatataaatgttacttttatgtattacccttttacattaactagtaaacaaggtccattttgcgtcctgctatttttaaaaagtttaaatatatgtataaatattaatatataataatattgtataaatagaatcggatttatagagaatcttttgaaaagttaaagttccctccaaggttcttcactttgcttggaaagttatatcgggttatttgcctactcgaactcaactacgaatcaaacatgttcctgtagaattcctttgagttttctgtaattctgaggaagaatctattctccatgtgttggttgattgtccttttgccaattcttgctgaaataggtctggtgtgggattaaatttctctactgccaacacttttactgactggttcaaggggtttttggtagggggtaggtcgggtatgttggagtaagttttgatgattggatggggcatttggaaagctcggaatgagttactttggaagggacgctcaagtactgctgctgaggttgtccgattagctcgaatgcacattttagttggatggtcgctcaaggaaatcggtttgaacctctgctgtacgactcaagtttgaatgacagcagagatttgtgggttaagcctcctgctggtgcgataaaaataaatatggatggtgcgatttttgacgcgacgaatcagtttggaattggcattatcgttagggagtgcaatggaagtttaattgaagcatattctacactgcataatggtgtctgtcagccggctttagctgaggtgttaagtgtcaaggaggcccacagttggctcaagttgaagaatttttcgaatgtgttaatcgagactggttgtattgttgttgttcaagctatgtacagctcggttgcacttccatctatttttggtatgtttattcaagagtgtcaaatgattcttgattctttaaataagtttcaatttctcatgttaaacgatctgcgaacaaagccgcacattgtgttgctcgcggtgcttgttcttggtctgatcgtctttttgctaagagaaatattccttctgctcttcagtctattgtaataatggatattgttgtttaatgaattatcattttcattcaaaaaaaaaaataataatattgtataatttcaaaaaatatatttactaaaaatataaataaatttatacaaaaaaaacctctaaagaattctaaaataaaatccgtagaattcctcatatacaatataaaacacgtaaaaatattttaaaaaaaatatgtcatagcgacgaactattgaaaattaaacaataatcacgtcaaatatagttctaaaatatatataaaaaaaataataaatctataaaaaaattcatcatataatttcaaaatagatgttatcatagattcttacttgtagtcaccaatacatttagggctcgtttggaatgtcgtattaggtcgtatnnnnnnnnnnnnnnntatattgaattggattatacattatatttttatata

SEQ ID NO: 161854 - DNA, 5306 bp, Cannabis sativa
  modified_base (5265)..(5281): a, c, t, g, unknown or other
tgcacacgttaaagatctcccttgccacgatgttttgattggcaagtgttggcaatggcctccatgcagaataatgcgggacctgaacccaactaaacttatccttctccagcagagaagagaatgggtgtttgatcatttctacaagtgatctcaatttcaagatcgacatgcattaaaaatctcaccgcgcatcacttcaatgggcatgtgctcatgtgtgtaacgttcagggcccaggtatacacccgtcttctctaggagagctaatccttcatctctgccataccttgaagaaaagagtttcaagtactcaatgtcctacaaaacattaaaagaaaagcttgatcgcaaacttagacgtagattaccagcaaagtttaacaggtccaaagacctatattcataattcactatagctgacctgcaggccactaagaatgcgctccaatcgtagtgaagcaactggtacatgtgatgacgagaaaacctcaccagggtagaatagaactccatctccaggtggaaggccgcgcctaaatcttatctgtcatatgaagtatttaacaagttcatacacataaatacaatgttatatggaacaagataaaatgccaagaattacctcttcactgggaactgttgccttctcgtagcagtttgcaccccagtacaagaatcctgtcccaccttctttccatacacgccacataacagcacggtgctgtgtacctcgcattccaaggtgccaattcggatgagggtcagatggtcccatgcacacataagtccaccattcctgtgggaacaagttcactttgcttcagtaacatacacatgcagtatagtaaaatagggaacaggttcattttgcttcatataagatcatgcggataatcaatgcctggtaaaatgacgatggatgctgattgcaaatattactttgatcaaatattttctgtagcaacagtaggaaaagaaaagcatttacactagaacgatttcttgaagaaagtagattgcagagtcgacatcaaagccaggtttcagttatattacctcaccatcttccggctgtaactcagaaataatatctttgactaaatcctctcgattcccaagcacccattcactgaaaataggaaaccccaatttgaagttatctgtcttgcaaaagttgaaacatcaatgcctaccaccccataaatgagtaaacaaacaaaaggtgcatccttgcggacttcagagcattttagtatcagcttgtattcaccacaaataatgacctagaagagaggagaagagcctgccctttatatcacaaatctaaatcatgcaaatattgaactgtgtgggtgacctagggatggttggtacatatgacagttgaaaaaaaaaaaggaggggggaaaaatttaagctgataagaaagaaggaatggaagtcaaaagccattcgctaccattacacaataataaacctgggaatattgcattgtccaatgtgctcaaatccaaaaaagaaaagaaccactttaaaatttgaaaatagttccaattacaagagcctaacatagattaagttgacacagataagaaacagaatgcacccgtaagatggagttgccatagtctggataatcgtaataaactaattcgtgattataactcaagttggcaagccattttcacatttcatccatcaactagtgtcctctagaatcaattaactgcaataccttgtgcaatagatttgagtatgaggccgcaggaatttcggcacttttacaaaagcctcaaaagcagtaggtgcaagaggtgcgtcacttggccctacataaaagacagaacaataacagtgcctgaattactagaactgaacccttccaacataacagctgaaacgagtgttgaagataccaaatttatgaggtatataataaactagtactcagtctaaaataaataaatatttacaaccgacaaaagaaggatgccacactagcaccataaacctcttcacagtaattgagaatcaaggtaagtacaatgagttcaataagagtacaatctacacattttataattacagctaaccatggacttgatacaactaactagtagaactcacttccaaaaactagcctaagggaggacggtgcccaagtagttatataccatcaaccaatcccacacttaatcaatgtgggatcctaacaatacaacccccttttagagtctacagtggcctaccaccaaacaatcccatacttagtccatgtggaatcctatcaggactcaaaagatgtacaggacatccaagaatttcaaaatcccaaagccagaaatgaccaataaaaactaactaacacggcatgtacataacaaatgtgaaaagcaaaaaaaaaaggaaaataattaaaaaaaactctctaccactgtagtatgtagtcaagacacgagcatctggagcataagcatgaatctcagaggccaagttccgcagagagtcatattgttccatattgagtggctgccatgaaatatgggagaaatattagtccttgtaataagacagacagccattctgccagagttcaatggcatacaaaaaatataactgaactacagaaaatgctatattccaagaaatattattatcttaggacatcattttcagctaaggtaaacaaacaaaagttttctattcatattgctctgcaacactgttcctacctcatcccacaaatagaaatatgctttcttccagtgagtctttgtcctcagtatctcaatttgtttctgcaaggattctttcgatgcatcactgtaacatcaccaagagggttaaaagccaactcagttttcaccacggaagagctgcataagtgaatctggagaactgactgcatacccagagatgactcgactgtatggtacagcatatgcagccaatcgtggctctgaaaaatattcatctgattttggatgatccgctacaatgcccatggaaaaagggaaagaagaaagtaagacacagcgaaattgtgttcataaacaactgtgtacagaataaatactgcctgatcatagtggcaagaattatgttgccaaatataaatttttggtcagcccacaagttacctggccaaggggaagtgtaagtcaaaacacgcatgctgtcaccccatctgcaaaaatatgggcttattctgaactgaagaagccacttgaaatgctgctccaatgcctcataccactctttgctcccatgaacaacaccaaaacgatcctcaataacggtatcagaaatctaagacagagttaaagacacaacacactgtgaccaacttttctaaaaggggccaaccaccagcttacaagaattaatactctaatagcaacatactctcagtttgaactaaattcagttgacaataaaaattgaaatggaggtatatgccaatatagcaacctgttctacggcattactgatttgatcgtaattatttcacttggcaaagcttatcagagaatacttctattccatagtattattacttttcacctgttcagagaatacttctattccatagtaacattatttttccctgttcagagattctcatccttgtcggttgattatgcgacgtctatatgattcacatagaacttttttttccctgtttttgtttttgaaaaacaaggtatatgcaacactagttttctacattgacaatctcatccctaactagctgaatatttgaaacttgatgttctaatgaactcagctagtaggaaactagaaattaaacaatagttcagtactttaaacaatatcaccagaaaacttaaaccagatgcatcagtgatggagaattgttcaatatacttatttcaaggatacgccaaacacagcaggaagtgaaggagtggtaggaagaacaaagtcccaaactgtcaaatttatcttcacacgcaatgaaaggtttgaaatggcatcttcatccattaaatcaactggcccattatctgaaaattcagaaaataatggagacagaagaacgcttcgtaaagatgtacttgcagatttcactctttctacctaaaggaacaaatattcagatgaacaaaccttcaaatcgcacaagaaacaatcctaattcagagacaaatagaaatgtaccattccatctgatgttctgtcatcaactggccccatcatttcaagacagctttgaagttccttgtaaagtttgtatttatcagctttgcttaagcattgagcagaagatctgcaatgaaccagaatgagataattatgaattctagttatactgaattgttgcagatttatagagtataatttataatcaatctctaaggtcttgagccaaatgaaatgaatggtaatatactcactcggtgtcaggttttgcagcagtgataatgatatccccctcatattgacccggtggttgtgtactaggaacatcaatagaaacccagatagcagtggtctctctgcaggttgtttacggaaaagaaatgcaaaggtacaaaagaaaaattagcttagctccttagtccccataaaaaaaaataacagagttaatatgcttttaccctggaaataagtttatttggctgactggaagattgagaggaacaagagcatctgggatacccaatattggcactacgcgccgcaatgttaatgaatttcccacaactaatctgcacggtagccaacatcaacaaacccttcattgacagagcagttattagacctcaaagaattaaacaatttaaggaactaacctatcaccagatgcagaggacaagtcactacactggaccagcacagtgcctgcacctccagaaccaacccaagaaacttttggacgaatagcaatctgaacactttctctctcatttctagcagccagaagatttatcttcaaaatagctaaattcagatccagatcaccaaggtaactcaagacagaagaaaagtaatagagaaaaaaagaaagaaagaaaaaaaaaacttaaatcagtcatcaaggagtgattaggtaatcatcaccattgtaaagtctattacatcatataacagaagaggaatgcaaactaaagcacaggtcaaatactattttattcagttactaagtgtacaccttaaaactattagaagaattacatttttcctccaccccaataattaaaaacaaaagagacaaaaaacttagagcatgtttggtannnnnnnnnnnnnnnnnttttcaaaaaattgtttttagaaat

SEQ ID NO: 161855 - DNA, 2233 bp, Cannabis sativa
tctctttctcttgacgacaaaattttctctgcctctcttagccttgtctgaacctcatggccaaggatagtaggcttcaatagaaacttgaagttcagagcgagaatcttgggcaaggaggtgacgagtccaagcagttggttaaaagtggatgattttcctttcaaagaaacatggctcttgattatggcattgttgtttttattgtggttgttgtagttgttgttggttttgttcttgctgttgtttctggtgttgttgttgttgttaatgttgttattattgttgttgttgaattgatgtttatgatgatggatttagtggtggtggagtggtggatccccgaagctcactatcccctcctaaagaatgttgcttaattaggcaagacttagcgttctttgtgtccctttcagatggtggaggagaagtcttaggctttggtgtcacaaaaacacccttcttgggaaacatgagtccatccaagctctcatccgagatgttggtgttcattgggttatcctgagtggtcccttccacaactactacgagtaaagcttccactagggtctgttgtccgagatggcctacttgggctatgccactttcagacacaactagctccttaaaagtctccatagttatggcaggagtcttgtcttctccagagggagcttgggaacgtggaaactcagtattttccttcacgggagagggaatttaccgaacatctaaagaagatgaggtagagggaaacctcaatttacgggacctagaggccctggccttgcccttccctttccctttggtcctctttatcttggttaggatttggtaatcttttcactcaaagacttcaacatctttgcttcaggagtatttataaacataacaaccgcatgctaaaaatatgtttgtgggtgtgaccgtgtagtgagcagctataaggtttcccatgagtaaaaaaagactatgccatctttgccaataaagctgccatattctcttgggaagagacatgatcacgaaagggtccaccctaacagtatttggagatatcttcgggttacgagggctcctaatgatctcatctaccatgtctatgatgtccttcatgggatacttaagacgatctaagttgaagaaatatgtattgaatcccccttggtcaattcgggacatgcgatggaggttgggggtacgaaatatgtggaagggtctattacctcttctcaaagtgctggatcctggagcatcctcatccgggtatgttgtagcatacttctccaggatctcctctacttctattaagggattcaggtggcaaagcgtccaataaggttccaggagtttttcctcctttgtggcctccataataattttggccaattggctatcacccccttggcttctcttaaagtctgactttggcccctgttgctgacattgttaatgctttggaaaccagcaatcagcccaacttcacggagcagttttatggtgaccaagccctcattttttaattggatttcagttaaggccttgtgctggaccaccttcttggccagttcctcagttttagtactctgacgtatagggtctatcaaaagaaacaaagtaatacgtaagcccaatcagcacttgaaccaagacagaaaaaattttgaaagaaaaagatcaaaactgcaagtgtcagagcatttacctaggatctacaagctgagctggagtgcaagtaccctctttactgggaaaccagtggagaagaaccaatactccctgaggtcaaggcaacgtttggtgtagctggtggggcagtgagcatcagaatacctcttgagcttgtagaatcccaatttcttgtagttggttctcatcggtaagctctcaaggagatgtgcgctcttcttgagatatgggaccagctccaggcactgaacccattcgtgctcgcggatgctgattcctttgtgacagccaacctatgccacatcaatctcaatatgttacgtagtctgactttagtggcatacatttctagtatgaacggaagtagtttaccttctagtccatttcccaaatggagttgtggaatgcctcagtgggaggtagaatttttgccttccctttccctttgggctttttggatgtcctagatggagcggcctccgggatagtctcaagaggaacatgttgggttttgtgccctacataaaactcatttcaatataat

SEQ ID NO: 161856 - DNA, 1856 bp, Cannabis sativa
tttcgcccgagctaggcggcgccgccaaatcccgccgtcgattcggagacgaaaccggattattgttattattattattataattatctggtacgatcgccaagggattggtttccacctcctcatcttctccaatcctccccaaattgttgttgttattcgtattgtttcctgtcgtttgccccaaatcgatgtcgttttggctcccgtcgatggtggagccggctaacaccagcgcgctgaattctcggctcatactcgtgaaattctcgctcaaagctccgatttcgcttcccaacgaagtcgacgacgatcggtgactgctcgtctcccaggcggaggtctgatctctccggcgaccggaggcgcgaattcccggcggtagaggtagcggcgcgtgaggtggagtcagcgcgtggatatctcgaaactcttcttcttgatcatcatgatcatcgcttcgattgtggttattattagtgcttgtgctggctgtttgatcgatattgttggtcagcatagtatggaatttatatggtgaaggtgtttgtttctcgggaaaatagtgtgtggaaaacaagagaaaaggggaaagagattaggcataataatatgggtttatactttgactagagtgaagagaagtgtagtgtaatattatcaaccacaaacatttttttttttattttgaaaaaaaaaaagagagagttcaagaaagctttagttgttttaatttttctttcactctaaattaagtgagttattataagccttaagaataataattaattattttttgttaaacaagatgtaggagctttaatagggtttttttatttcttattatgatcaagtcctcaaacttttagtcattttctttacttggcccactttcataatcatatattgtcttattatatctttgataattagtaattactcacatatattaaatgttgtataaatagagaaatgttgctattactatatagctattatagctaataatggtaaaaaattgtagatatataatgacaaaatttgtcggtgtaattttcatttttctcaaaaatttgtgtatatagaggttgaaaatgaaacctgtcataatcgatgttaatattactatatatatttcatgtatgtacgtataatatttatagatatgttctgtattaattagttacttgtactcatgataataataagtggacctaatacaagaaaaaaaatatatgatcatccatgaaataaagtttgaaagattattatatccacgtacgtatatatatatagagggacggacccaagtgtattagtttggggggttatagctagcccccattaataaaaatattgtcttttaaaaaattaaatgtaattttttaaatttgataattatagatcaaaatcgtaaagaaagcccccataaaattaaataaatctagtaaaaataattataatataagtataaatatttttgaatgataaataagcccccacaaagtaaaatttctgggtccgtcactgtatatatacatttatgaagacaaagttttgagtaaggatgcacactgaaagaagaattggcggagagtgtttctctcgtttatattaatcttcttaagaattttattcctcgtacggatacgcaatggaaaatctcttaatattcaaataaaatttatattaaaaatttaaatatttaaaaatattaaataatataaaaattaaaatatttacattatttattataccaactataattcaataacttatttttttaaaaaaaaatttactaatatattaaaaaaaaaattacaaaaatagcttataaataaaatataaaatactat

SEQ ID NO: 161857 - DNA, 5406 bp, Cannabis sativa
aatattttagtataaattaaaggtgtacatagtattatataaaaatataatatataattcaatttaatataaaacaatacaatacaatatgatctaatacaacgtaccaaacaaacactttaagtcttagatgcaacttaaagtagctcaattgaagttacaaacacaaatcaacataattatgtcatcacatatatgctctatttaatgcctcatcgcaaggtccaaaaaatttatagcttataatagattatgtcatatcgttgcctaagaatgctctcttccaagatgtgtcgctttggttgatgactttaatggcatcctctatttgatattattgttcgcgtttttaactaaagacaagtgtcaccgctagtttaggcctaaagtgaagctaggttaagattaggatgattttggagaatattcctattctatgtggactccatgtccaaatgctttaattgtctggatgtagttgtccaagtagtttatcacacctccttcaaggcattgatctggatctaggttaaagtgttttggatgaaaaatttcttacagaggcggcaacaaacgtctgacacaatgtataacgacatctcccctttgcacatttgtcgatctttctatgaaaagaagaataaatgtgggatcatggttttattactctaacattctccttcccacaaagccaggcatgtaacaattaaatgtctttgtcagtttgaaagcaagtatgttcttgatctgccacatgcatcttattatatttgtttccgaattatgcatccatgaaacttagaagttcatatcctgacatggcgtcaaccatttgatctattagaggaagtggaaagcagtattttggacaggatttgttcaagtcagtgaattcaatacacattctttaggtaccattaggctttagaacaagtactagattgccaagccagaatgggtattgagcttcctgaaggaacttaatttatcgacttccacctttactactttcactcatactaaatctagtggtcttcttttttgacgggttggatctgattttgaatctatattcagagcatgacagatttcatgaggactgattccagtcatgtcagaatggctccatgccaatacgtcactatttttcttaacgacttatataattttctctccaattgccggatgtagatttttccctaccaaaatgactttaataggatcttcattgtcgatgcatatttcttctacctcctcaattggttcgagattctctctactcccactttagggtctaattcaacttctacccggaccaccttagtgctggttgaatgagtattctgagagcatcatgattctcttctcggaccgtaagtacaatttttggctgagatattgtaacattttcttacacttttctgatcaccccttataattctaatgctcttgttttcacttaggaacttcatacatagatggtggatggaagtcacaacttcaatatcaactggaatcagtcgccctagggtaatgttgtaggtagtggagcaatccactactacaaaggtaaaatattgaaggttgtgactatgttacttccaaaagtttccccattcattgtaactagaagttaaacttttccaatggaagtagggtgtcaccattaaagccttcgagttgaactagagaagacatcagattagtttttactgaatcgatagcttgaaaagaaattctgaagagaatgttgacagaacttccgttatctacaagaattctggatactctcttattttcaatttaagcttcaattgccaacgagtcattgtgtggaaaatacatatgcttagcatcatcttctataaaagtgatcaaaaggttcatcatccgtggacgttcagcaggtatttgtacgagattatacttttctacttgttcaagctcattttaatgcctcttctgggcattttgggtttttcgtcgatatgtgggcttccaaatattgttaccacgtggccatctagtgttggtggagcaactttaggtggatacgaatttcttggtccacgtgcagcaacaggtcttgccactagcattttgtatcccttgaggggcctgtatagggggagctagtattaggagcttacaaaaaacctactctctaggaaggatttacagctctgggtcgtccaggaaaaaaatctatttgtgttctaccccttgtctgggatagataatgggtatccgaacctagctggataacttaccattccagaccaagccttcaattttgtcctttagatagtcgcacactcatttgtagtgtgcccaatatcaccatggtatttgcacattttactcgggtcccttttatattttccacctttgaacatcggcagtggctttctatagtagacaatgttacaaggagctttgtaaacactctcacaagtattgaccaggcttgtatacttggagtatcttgattcttgactcttccccttctttgaggtatcacttctacttagagctttagaacttctcttatttttggaatgacttacgtttgattctaaaacttatatttgtcagttcattttttcaggagcagcactatatctggtctgtgtcacttcaaagccgaaaagacttatttgtacagctggttgtctagaaacaataggttcatacactattagagttgtgaatgtgcttgccgaaggaacaatagttagagcaaacaactgcgaggcttaagttgttgtaaaactagtagatggtgttggaagtactccataggcttcatcataagcctcttccaagttaatgaatccttgtgctctagacaagaagtcggacaaggaatcaacactttttcgttgttattctccccataagaatgatccaataaataaccctgaggttatggccaccatcttcatatcatcattaacattttttggccacaacattcatcattttctttatatacttcttgagaattttttttcgttgttgcttaatgttagttagggaactgatttcaatatcgaagtccttcgcaactataaattgtttttgaacattacctgtagatctttccaattatgaacagatctagaaaataatcttttccgccaatcttttacaaaaattgacaaagtaaatgagaaacagaggcactttgcatcatcacttgccttgccacttgcatcatttaggtgtatttggatagatgggctttggggtctatcctactttcatacaaatctatttgtggcattctgaaatgtttcagaaaccgtgcttctattatccttatcacacatggttctatattctccttttttgaatcaggtacaattcaattttgcttccgagaaatttattttgtgagctttgaaaacttttcaattttttattctaaatgccatggtttcatcttgagattctcatccatgaattcgatcattcatatggtttctcaaatcataactacaaggtctcactttctcgcttctagcttctgctcttttagcatttaatcatgcccaaattaagatcatttgttgaaagacgtccacttccatcatctgatactaaatgaatctatccacatcagcactccagctagtagaactctcaggatgatttttatcttttttggcggtgggatttcgtgcctgagcatgagactttttcttacgcacagttctgactctagaatcagtctagtgaccttgccctgaagtattggtttctttctttttcttaataggttagttggcgagatttttgctcttttgatgatcattgggagtagctttcttagaagtctctactatttttcccttctcttaatcctaaggaggattatgggtgtcaggatttttaggattcattttcttagtattgttatcctgaggagcaacattatcaagtatattctcgtcaagattatgatttcgtcctctaaatattactttcagcatcgcaaatttcttcagcattaaacaagaaagttcttcttgtgccaccaagttctgttttgttgcttcttattttttggtcaccacaatgacctcaggatttggctcattgtgctcacttcccttattgatgtagttgtctttcggatctataggatcaagatcctcagtttcatatcttcttcttctccttcatcaaaaatatcattgtgaagatcttgcttatcgtgttgtgctaatgaagaccaaatttgattcaggtgagtaccaaaattatagtgtgtgtaattattgatggtatcacaactttctttaactctcaatgaaagtaccaaaatattaactgagatttttggaaatcaataatttaaatatatgagccaataaaatataattcagataaaataaaataagaacactcaatgtttttacgtggttggggcgttaactagccttagtccacgagtcaatgttattaagagagactagaaaaacttaagggattacaataagatatgagcactctattttcgcatgagtaaatgagccaataatttttaactctttgcatgtaaggtttgtgtggtattcatagattatacaggtcatattagttaccatttttcctctaatgaaaagttttacaaatataatattaactttaagcttatctagcaaaacccgacccatgggatgctaacgtggaggctataccatgatgctagttgtcaaaaccgtgtcctatcttcgtgaaaaattaatgacacattaattgcttgattgcaaattaccttattttcttatttagtgagatatgatcttccatcctagattatagaaaggtaattcatgatcttgtgtgatctggtaatggatattatattgggcttctagttacacgctgaaggctttgtccggttatagaatactatgtcttttgaatactgatcatgctgaatgagatctcgcctgaacgagttgttccatgttcatccgaaagaccaatggtttatggatccaatccaatgacgttgtctgtgtctagtattggatcttgaatatataaactgtattttaaaaaaaaaaaaaaaaaaacagttataaataatagatatatataatatatggttatccaattttttattaattattattaattgtaattactatttatttttcataatctctaaatttgtgactcacttacttatgtaaataggtgatcaccttattaaaataaatcactcagaatactctctcattcgatgagtctcatctgctctcttataacaattcagcaattcaaaattcatagacatataattaatatagagatttttacacctcatgtcaaaattgacatcttttttacatttttatcaatacacggttttttaaacttttttaactttta

SEQ ID NO: 161858 - DNA, 2413 bp, Cannabis sativa
tatactgttcagtggtggctacaacatcaagacaggacctggctgctctattgagctcatgaaatttgacatgggtggttcagcagcagtcttaggtgctgctaaagctattggtcaaatcaaaccccctggcgtagaggtgagcacttagtggatgtgtttttcaacttagatgtttgatgacataattgcaacttgttcttgatacttatgagcaattggatttattagttcgaaaattctgtttctaatctattgctcttctatatgcaggttcacttcattgtcgcagcttgcgagaatatgataagtggaacaggcatgagacctggggatattgtgacagcatcaaatggaaagacaatcgaagtatgatttctttgccttataattttgcatgttttacagaagtgacaagtgaggtttcattatcaaccaattgtcttgttatatgctcaaaatacatgaaagaaatttaatttctaaagatgaggccatttaagacatttgggtagacttttgtatattgcactgactattaaatgagttagattatatgcaagaccatgaaagctttacttctgcttgtattcggataaagtatgtgtttctttaaccgagcataattttatatatgttttaatattttctggcctcaataataccacaggtcaacaacaccgatgctgaaggtagacttacactggcagatgctttggtatatgcttctaaccaaggtgttgacaaggtagtcctgaaactatgtactgtattttgtaaccatgcatatgtttgtttactcttaggacagagttaataggaatatatgtagtggaaaatatcattctttgaaacttttttcttaggtagttttaatatgcgctgtaacatcatatactaattcaaaattcatatttcaaataatgaaatttttatatgagatttttcatatgcttatttatttaataacaagatgagttttgcttttctccacctgagttttattatttaatgttgagttctgctattgtatatgctgaaaaaaatgagtgctttttctatggatctttaacatgggtgggtgtttcttgtattgataccttaataaaatgttctacagattgttgatttggcaactttaactggcgcttgcgtagttgctcttggaccatcaattgcaggtatatcataagctactgcacttctaagtttttcaaatgtgtttatttttgtaacaagaaggtataatttatagatttgtaattccttcctaggaaattgtttcgatttgcatattggatttgctacaaagcttatctgatattgaattaaaaatgttgttggttctttacttctttaacaccaattataagtcgagttatcccataccttttccttcttgtaggtatctttacacccagtgatgacctggctaaggaggtagttgcagcttccgaagctggtggggagaaactttggaggttgccaatggaggaaagttattgggagtcgatgaaatcaggaatagctgatatggtcaatactggtggtcgtccaggtggttctattactgcagctctcttcttgaaacaggtaaatatggaatgaaacatctagattttcaagctttcgttttccaaacacgtccactgcaatgagtacaactaaatccgcctcataactttagttccattcacctcatctcgctaaattctgaaagcttttaaaccatatggctatgtatgcagtttgtggatgaaaaagtacagtggatgcacattgacatggccggcccggtctggaatgacaagaagcgcaccgccacaggatttggcatttctactctggttgaatgggttgtgaagaactcctcttagattgattggtttcgtttttcatctgtggagcaagggagagtgtgatttgggaccgaagcagtttcaatcttggtggaattcttgagtgttcttagccagtttatgctgcatggctccacaaagcaatgagccttagggcgtgaccttcatttttcatgtctttggctctttataataaaaaaagaacttgcttcataatcttacttgtttatggtgttctattccttacaatcttaagatgttcaacatgaagatttatgtcactgaatttaaaactggattgcacttaaaaatacaaactaaaatcaaaaattaaaaacgagagtttgattgctaagagcataaatagaaggaagctcaagcttaagggcataacagagcttaaagctcaactgagctcaaaatagcatattgaatgaacagatttttagaaagaaaacaaaaattacacaaaaatgaaagcattaactaggggtgagcaaaaaatctaagaaactgaccaaaccgagtaaactgaccgtctgaacaccgaaaaa

SEQ ID NO: 161859 - DNA, 2107 bp, Cannabis sativa
aaatacgggctttccttcttcattatagccaccaaatgccaccccctgagctactccctcatcctcatctccttcagtatcaggaggagtagtaggatggacctcgccttggtcctccacctcttggacttcaacgtccctagcattatcctcctcttcaatagcaggtcgagcctgttctgcccgcggcaaggtggcaaggcgggcaatatgttgctcggtcagtgaagatttttgcaccgtctgcttggttcgtgccatcattctacgtttggacagagttttatttgcgtgcctagcaataatcacaaaaaagtagcaacaggtttacccgcagcaacaggacttgggcggcccttgagtagagtgtcaactacgtctggacggactatgtacatcctgttggacggaagatagcgtctccactccttcttaagttcccaaatgaagcggtcgtatccctgaccttggatcttgtcgggatagaagtgatgttgcacctcaggttttggggaaggtgtgagcttactacttatttcctagtcttcaaagctagagttagaaaggttctcactagatgaagatgggctggcacagagacaaggatgatcctcgtatagaagtttaagtagatcttggtcgatacggtggttgcctccccaaaactcactagggttcatctacaaaaggtaggagataagaaaatgagaattggttggagcaacaaataaaaacaggttgaatgtaccaacaagatccgattgaggaatcaaaaatagaaacttcactcaaaaatggaattttcaatcgagaagttcaaaactttgaattggaatttgattctcactaaattcctaatggataagtgaaaatggatatcgtgaggttaaaatcaaggtgcagttagtatcagacgtcgtggttaagcataatcaagatttctaaatttaaacctaggatttctatggttatcctagaacagttcaagaacagtcaagattcgcagatagaaaccgagaaaattaagcatgcaagtgtataaaagaaagaaataaagaacttactcactggtttgaagatttttgttctgctcggatggtgttgacaagagttttcctgggaattctctggtttttcaagaataagaatgactaaaagagttacttagggtttccaatattattcataagtagttcgaaaaaggaaataatcatttaaaaaaatttaattccttgaattccctccaaaagtatacattatatactcattacaggcagagtaaccgtcatcacgcgcgaacatcaagtcgtgatttgaggcagaactgtaaatcaacattaatgatctaaaatcgaagagacgcttagtcaaggtcatgtcagtttgtcattcgatgcctaggacacgggtcacccatcttgacaagactccagattgagtgaagtccatgtgcgaccaagaaggtccagcgcagacttggggggaaaatgttatccagttttttgcacattaacgtggcgataggatcagatgacacgtgtcctatagttctgatacctgggtagaggaaggtacccctagtagcctgcacatgatttgtcagcgtctacaattgtctattaccctaatagagttgtacataagacatctaaccaggtagaagcatgtttgtgtcgagcaacttacaagagatagcaacttcagaataatctcgttgtgtccagacacgaaggcaatccctacaatcgtgggattgagttagagaaatatggcaacctattcttgtttcctatttcttatattgtaattatgtaatcattgtaatttcctattttatgcattgtaaaaaaatgggaaaccatccctcacgcattcctataaatagtgacctagcgtcactatgatagggattgaaagaattgcctcagagagagagattctagagagaaaatagtgatctaagagagttactcagagatcatttgtaagatattttaagaggaagaaaactttgttccttctcttaagttaatacaataaaaggggagtaggctattaccacactcacgaggccaaacctctttaaaatctggtgttcactttacct

SEQ ID NO: 161860 - DNA, 4553 bp, Cannabis sativa
  modified_base (4520)..(4528): a, c, t, g, unknown or other
tctctctctctctctcttcagaccaccgccacaaccgcacaaactcccaaacctccaccaccataactgcacgaactcgcaaccttccaccgccgcacaaacccgcgaaccgctgccatcaaacctccgcccaaacgcacggaggaggatctagaaagaaataaacatcctcctagacgctctctttttctctctttcaattttttttatacgaaaatttgaaaccccaactttgaaaccctatttttcagatctgacttttggagttatagtgaacacgtgggacaaagacgatgcgattgtgatggtttcatgcgctggtgattcgatgaataatatcttgggagtggcgaagctagatgtgtcgaagggttccgataataccaatgtgggtcggaggatgtacggattagggtgctttggaggagagtcattctttgtagccgaaagttataatggtgatgatgaagaagatgatgatatttggtatggtatttgcatgattaaaatttaggagattatgatgggtggtggtggtggtgtagtctgaagaaagaaacagagagaaagagaggagagcgagagagaatgaagagagggaaaaggaaaggcagaaaaaaaaaatatttaatgaatttttttaaaattttaattttttttgtgcttaaaaaaatattttttttattctaattttaaatatttatctatgtgggccaataatattgtgccacgtgtacattgtgtctatgtagacaatatcttatgtacacatagacaaccaacctagtagttaactgtcaaaaacagataaaaagggctaaataaatgctaacagactgctggttttggaggttttgctgtcaaaatttggattttagaagttaattgctactaaaataaaagtattgaggattatgccgcaattaatcctaataataataataagctcgtggatgtttattagacttccttgacattgtagaaagagagagaacaaaagataaagaaagatagatagaaagagatcgggaaaataaatagaaagaatgaggtgaaagatgaaatcttatcttattggataaaggaatatttacaggtatttatactagtcactagctagcaagaaaagagtgagcaacaataacagaattggttagagtcctaaccgactcctctaattgtaatggttgtattagcactcttgatattctccattaaaattataattgaagcaccctttaatttgaagtttgtctctaaattgattgaagcggttgaaatagcttttgtgagggcatcagctatttgatctatggttggtacatgcttgactttaacatattgttgcaacaccttttctcttacaaagtatagatcaagttctatatgcttggtcctatcatgtatagctggatttgcaatgagcaaaacagtgctcatgtacattctagctaggggatgacatgtgaaattcaaaaaagagagtgaattcaagtgatttctgcaactacattagttagagttctgcattcagcttttgtactggaccttgagatattttgttgcttcttttaagaccaagtaccaagattaaagccaaaataaatttcatatcctgatgttgaccttctgtcatctagatctgaggcccaatcagcattacaaaatacaacaacttcatgatgttgaggcttcttaagatgtagaacaaactccatggtgctactgtgagatatttgagaatttttttttacaaacatcgagtggacttaagcaataactccttgattgattcaagtgataattatgttatccacatacaccagaattagagtactaaatttaaaagagtgttgaataaataaggactggtcagatttggctgagataaaaccaaaagtgagaagaggttattccagcctttcaaaccaggctctaggtgtctaatttaacccatagagagccttgttcaatttacacactagattaggggcaaaagtatcctcaaaactagggggttggctcatgtacacctcttcatggagaacgacattgggaaagaaattgtttacatcaagttgcctaattttccatccttgagacaaagccaatgtgaaaataatgcaaaatagtaagtggattgaccactagactaaaagtttcaatgaaattaaacttgaattgttggtaaaatctcttgaccttacatttaataatttatcatcctagtggtaagcgaacaagaatgtatgtcttgtttttgatcaaagaaagtatttcatcaccatatagttgcctcccattgaggaagttgaagggcttgagcaactgtggaagggattatatatggagacgctgaaaactattcttggtttatgaacaccaactttggatctggttctcatcaaatggacatttagaaaatgtggtgcatgagcttgaacaatagttttaggtgctgcagctcgtggagcatagacaatatattgtaaaaatgatgtcatctataggactaggtgaggcatgcttaaacaatggtgaaccaggtggaacatgaattattggtgctcgtgtttcattagttgattcctattgagatgcatctgtactagactcagatgaagagccttgggtagctggtaacatttgctcttgttgattgagacaactggagatacagggtcttgaagataaagatccccataagatgagacaaacgaagaattttctggtgaattgggcaaattttgtgtggttctttcagtgttgatgattggaatttgagcaagaagatccattcttaattaaggaacaataataggtgaggaattaggcttcttttggaaggaaaatttctattcataaaaaatgtcatatttaaggatataaagtcttccattagaagcaagacacttgtattcgttttagtccaaactatatcccaaaaaagttaagattccaatctaaattgtaacttgcgtatgttgtagggtctaatattaggagaaaatatacacccaaaataagtcttgaacctgatgtactcaaattacttttaaaacagaacctctagatgtgttttgaagttaattaaaataggagtgggaagtcttctatgatgaacgcggctattctgaaggcctcatcccagaactttaatggcattgatgcttgagctaagagttaagccattttccacaataatgtgcttgtgttttctctatgccaagtcattttgttcatgtgtagttgggcaaatatgcatgtgaagaacattcaattgactcggaaactttgaaaaagttctcaattcaccacccttatttttctacaacatttttattttgctaccaagttcagcttcaactttgaacatttgaaacacttttaagactttatatttgttttcaatgtatagaccgataaatctagagtacacattcacaaaatggatataatatatgtatccatttgaaggagtgtgagaaggacctcacagattggacacaacaagttacaatggtgcagtgtactcagagtactgagaggccttgggaaaaggcaatttgtgaatcttttccaaacaacaagcagctcaaacatattgtgcattttattatcaacagaaatattataattttttaggagagtttggacaaccttacttggaaaggtgacccaaactgttgtgccaaataacataaggagaaaaacttaatttattacattattaacaagcaaattaagtagaagtattcttagttgatgtagaaataacatgagcaaagatgggtgagttgatattaagagaggtattggtgcatgtaggatcatgagtgtcagcagctggaagtatgttcaagtaataagatgcctcaaaaatatataagtcattcttgtgttttccttgaagaaggatcaagtgattgtcctcctcctttaaaaagtaagatgcaacatggaattcaaagaacacgttgtttttagaaaatttagaaacaattaacaagttcttagttatagcaggaacatgttagagattgttaagcactaaaggttgctgagttttattagaagactggaaggattaacctatgctcaatagacaaacctaaaccatctcccacaaataattgctcatgtccattgtagtgagtgttgtgctgaatgttagatgcatctagagtgcaatgattaactgcaccggaatccagataccaattcatgtcccactttgatgaagtgagaatattagcttgagtaggtgcatcattaatattttcattagaaaagaaggttggagaaggaccaagaaatttcttgtcaaaaatgatagtaatagttttggcattgaagtttatcgttagagagaatcaacctcctctatttgaactaagattatctcaacctgagtgaaagtatagaaagctaaaggaatttaaatttaaaaaatgctaattagtaattttttctcctgaactttgacatgtactaaatcgtgctccctgaacttttttggnnnnnnnnnattccccctgaactattgagattgt

SEQ ID NO: 161861 - DNA, 1792 bp, Cannabis sativa
gagagagagagagagagatcatatgggtcaaaattaatcacgagactgctctcctatgatcatcataattaatcaagcatgattagttagggtgtccaattaaatatattatatatttatttttatataaaatcataatacttaactttttgttcagttcatcaaatggggccacccatattgcccttcccttgaagcagtttgttaaaacttgtaacaaataataattagaacaatatataaaaataaatcaatatatacacttaaaaactaattatataggatacatttgacccatgttggattgacacatccaccaattacatttagacactgatttcataacaactatatgcaaatattggttaaaggggtgatgttaatgtgctagattttaataacaccaatttgggaagagaggtatttgatttcgtggggtatcaaatctcaatcatttaagaaaactatagttatatatatacatatatatattagtataatcaaacccttttttttttaatttatattatatatattaaatataattatgatgaaattaagaaaatgtttgcagtgttcttatttgacctgccatctgcatggaagtgttgcaaaaacatagacgttttacccttaataattatattaattaatttaattatatatatatgttatatattttttgatgctagctgcagttgcacggcaatcaaaaattaactttgagtttgactgttcttcttaaatttaattagttcattattcttgccaaattaaatatattcaattccaaacaaacaaatttaagaaaaataatcaaaaatgaagtctattattgaaagaattaatgccaatgaattaattcattatatatattttgacactaatttaatatcctatatagctcttattctcacttaaaatagtaaattagccatatattagtgaaggtggatttatcttagtattttgtttttcatatatacgagccaagaaattatacgtaccctatagcctaattatttgatgatatgtaagaactctcaatcggcacctatttaattagaaaaaataaaataaaaagattaatggtgtataagttaataatatacattaattattctgataaataaaattccaattagtatgccctattgataatatgtatgaactctaatattaattatgaaatatatagtaatattttaaaaattatatgagaaataggacaaaaacaatatattaattaccaattgcaattaattaataattctaggaaaattacttataactttgactgatttggacctgatcatccctttctctaggtgtaaaagagttataatggaacttgataataattaatgaatacatatttgatcagtagctataccaaaaaaaaaatacataatttagtagaaaaaaataattaattaactgaagaaaattaaatagtaataaacaatgtgatttacctaaggatcaaaattttaaagatttgatattattcattctcattcttaaaattttgtctatctcaacaaaaaatatatacaaattacataaatgagaatgaataatatcaaatctttaagaatgttataaatttcataccggagataaaacatattttaatatacataatgacagttaaaaaaaatgttgatatctacaggtacttgcggacccaacgaaggaccagtgtgggcttaagcccatgcttaaaaaaaatattttttttacttcttaaccaaaaaaaaaatcttttaattattttaattgcccacaacaa

SEQ ID NO: 161862 - DNA, 1473 bp, Cannabis sativa
aaaaaaaaaaaaaaaagagaccaatttgataaaacctatataatttaaggaccccccataaaataagcctacaaacaaaataccaaccttaccatagacaatactgatcaccatcaatatgattccaaaacctgccactttaacttaactgtcaaatcaacattcactcttcagtactcttctatatatcaccacaaatttgtattcaaccaaaaaaagttaagtaaaccaaaaaagacaatttccatctaatatcaacaaagatattgagttcttaaaaatttgatttgttttggttatatacaatacacaacatttaaaatggtactatagataagacactattttctgtcatttagtaaccaataactttttcccttatcattctgtcataattgtgtcacaagttttagccttatatgctctgtagattgtactgcatatatagtccaatattttatatatgtaaaaagtgaaaaagaaaaagaaaaaaatagctgttgtatacgaaagaatgaccaatatgtactgaacaatagaacatgataaggagacaagtgaaacctttatttttgaaaaatgaataatgcatgtaaatatttaaatttggctataaaatctctaatgtctagtctgtgtcacttaattacaaaggacataatagagagaagactttagaagggtcctattattcttgaatcttgaacaatgagaaatatatatatatataaatttatatatttatattaatgtgggtacatcagaacagatatatagtattataagttattgattattgtggtccaaaaactttgtgctaaggcaaaatgggaaaattgaatgactgttctgcatatatatagtagtgtgcagttgttatctcaatgaatagtagttgtccaaagtcttaactcttaagttgtcccctgacctaatttgttatataataattttaagactgatgatatgaaaactcattaatattagttagttcaaaacattaatatcataggacactattggtggttactataactacgtacagttaatatatgcagattttaaattcccacacaacaattgaatgttggatctcattcattttcttttttacacttacattgctatataggaaacatatggtaattgttgttatattatttgttatttagcatagaatataatattagattaaaatatgatcttataatatctatattatgtgttggatgttatattatatgatatataatataatataatataatacatatagattttaataatctcacaattacagagttacttggacgtattttttgtgaaaagcgtttgaaacgtttagcaatctattaatggggtgtttctagcaatctcatttagggttcgtttggaacgccgtattaagtcgtattgtattgtattatattgaattggattatatatcatatttttatataatactatgttaaa

SEQ ID NO: 161863 - DNA, 2475 bp, Cannabis sativa
  modified_base (2195)..(2195): a, c, t, g, unknown or other
atatcactactttactaaacaagaggaataatcaatactctaaaagccatcctgtctcataattccaatgatttaatttcgaatatacaaaacatgcaccaataacatccatcatgatgaaagtattcattttatgacctagctagatagtgtacacattatataataccagtatctatgatctatatatatactaattaattattcgtggttatagaatattatgtatatactagcgtataaattaaataattatattacaaattcctaacaacgtgttctttgagtgcgcatgtatatagatctagatcagtctaaaagctttattatgatcaatagtaatttatgaaaattatataattaataataataaagtaattgaaagatgttctaattaaagctaacagtactactatatataatattaataagtaacatatattctttattctcctctcatgtcaattccaatccagatatagttagcttaaagtcgaattatcatattaggttaaagaggaaaggaaattaattaatagagaatcccagttgttgtttctttagaggatcagtcgttttcattctctttttgtttgttttcttttggcccgattaatatgttcaattattcattcatatgccatgtgctatatatataaatatatacacacacacaaaccctagctagctgcataataatagcattaatacggtaaataataataataataataataataataataataataaaagctccacataatgcataaaattttgcagctaccatgacccacttaaaaatatatgctggaaaatatttatcttcacttttgaaaacccacatgggaggagctcatcacaaaattattgcaagctcatcatcagtacaatcaatagtactagttatcactagctttgtcataccctatatatatataggtatattagtaattaaattaagaagctacaaaaaaaagaaaccaagaccaggttaagaatatcgattggcgtggttatataattacctactgattgaaatgatatatatgtgctaagtacagcatgcaaaaagaataacaatgatgaatgaatttgaacacacaatcaagccattaagcttacactgtactactgtataggaaaaatataaggtgtgtccaaaaataagagtggcatctctcatttgttttccacagataatgtagatataattcttttctttttttgactgtttatagtgtacttaaatataatatttttaaaaaatttgaataattcactataccaaaaataaaatcaaataaatatttatacttgtatatacatgtaataatataaattgatagttaaattatacacataaaaataatatatatttaaataattaaaatataaattgttatatatattggattaggattattattcatacaccaaaaacaaataggtgtttaagcctgctataccttttttttgggagtgcacatcataaaattacttgatgatatatgtatggaataattgtggccaaatttcctaaattttttatttgatgtatataaatctctaatttcaaaaaatagtagtaatagtttctaagtttgagattcttgtaagttgttgtcttcattttaataaattcattagttgctcctaaaaataccacgtgttgatattaaattagagtataaatctttgaaaagttcactttgatataaataagtctcaatctcgaaaaattgtggtaataggccctaaggatattcatcaaatccaatctgcactattttgctcataatgtatccgatccgcactaagtgcggattttattttttggatccaatccaattcacacaatagttcaaatccaatctaattcataaaagtgtgaatttgatcagttatttaagattggttactttttaatattaaattatttaatatttatgaaaagactattttttttttcacatactacaaaataaaataaattataattattttatgtctccaacaacacattaaaataaataaaataactaattcaaaggaagaaaaaaattgtaggcataaagaaatgtttacttttattttaaattgtatgtaaaaaaaaattatatataagaatataatatacatttgatgtattaagttttgaaatataattgtattatatgtattagacttttaanttactattttctttacattaaaacattatttgtatatataattttcttattttttttttataaagatatatagattggattgaattggttacttttacatgtcaatcaacatccaatccgcacaagtacagattttgaattttctaatctaatccaatcctacggattggatggattgatggattggattggatcgactattttatgaacatccctaatagccccaagctcaagattctcgttagtccgtaggtacctaatttaactgctctatttgttg

SEQ ID NO: 161864 - DNA, 2861 bp, Cannabis sativa
  modified_base (2316)..(2324): a, c, t, g, unknown or other
gtcgtccttacccacagtggttgttacaagggtttcgagatgtacttcagcagtgtaatttggttgacatggagttacaaggctatgatttcacctgggagagaggcagaggtttgagttcttgggtagatattcgattggacagagtattggtgtcttcttcttggacccaagttttcccctcagctactcttactaatttagatttttctccttcgaatcactcccctctattcttggaacctatggtggtaaatgactttcaagcttgtcgccagttttattttaaaaatacctggttaaaggagcctttgtgcttcgaaattgttagggactgctggaataataatcaggcagcaacgtttaatgataaaattgacttgtgtgcttcgtcattggctcaatcggatagagagattactgaaactttcaatcatcgtatcaaataaagttacaaggcagagttgaagaggctgcataccagtcgggattttacctcagttcagaagtacaatgtgattaagaaacaactctttgaagtgttggatcaacgtgaaagcttttggaaacagcgggctaagtagttttggttgcacaagggagaccagaatagcaactacttccacaaagtagtcactagcaggaaaaggaacaaccaattacatcaattaaaagatgatcaaggggcttgggtttcatgggattttggcctacaattggttgtttcaaattattttcagggtttgtttatgactttgggtactagatgtgatgaggttgttgagtgtgtttcttcggtggttccgaattgggttaatgaggagttatgccaactggttagaaatgaacaagttaaaaaagcattgtttcaaatgcatcccgacaagagtccgagtccggatggaatgacactggccttttagcaaaattgctaggcaattgttggcagtgaggtaatttgatgtgttagtcagttttttgaacatgttgcctttgaacaaggatacagtgaagctatgtggtccttatcccgaagaagaaaaacctggagcatatgtcggaccttcgacctataaccttatgtaatgtgatgtataaaatcattactaaggttatggtaaatagaatgaaaccgtttatggacatttttgtctcggagaaccaaagtgctttcatacctgggaggctgatttcggataacatcttggtttcgtttgaaatacttcattattaagggaaaagaaagggtaatgagggttatatgacactaaaattggacatgagcaaagcctatgaccgtattgagtaacacttccttgaagctatgctccgtcagttgagttttgcagaagcttggattcaacttatattgaagtgtgctacctttgccagttatcgagttatgcatagaaactatgaagttggcccaattttttcctataaaggtatccgccaaggagatcctttatctccatacctctttatcttatgtactgaggctctttttatgttgcttaaaaaatatgaacaaagtggtttgattcatggttgtaaagtgacgaatggtgctccaagaatatttgaaggtttagttatttgaaataagtattttttttttttaaattaatagtaatgaaaaatggggaaaaaagaagaaaaaaatatgaataggttgattgatatgagaaaaaagatattttaatgattgtttgtttattttttatcttaatgtttagtaaaaaataaaaaaataaattagaaattagaggatatttaggatactaaatgttttttaattgattaatcaattaatatttataagcctaatataaaatttaaaaaaatagagaattaaagagagaataaatagttctatttagagagactttagagtattatgatacctcttcatatctctcatttatataagtatatatatagatatattgattctaatgatttttttatatagttatatataaaatattattgaaaaattatttaaaaataactgaagtaataaaaaaatacatatagtttaataattatctcatcaattataaaaaataaaatgtaagaaagtagagcacgaattcaaacctgtataggaaaatgacttggcccgagtaaggcatgacaagaaaatatcgaacctagaggctgtgtcggacctaccctttaaaaattattgcatggctcattttttagttaaactatttatttttcaaatgtaactacaaatttagttaagcactatttattcttcaaatgcacctacacactactcattcctcaaatttattattattattattnnnnnnnnnattattattattattattatatcgcatttcatctgtttttatttaaataaataatctaaatatataatatttaaatagtataaagtaaaaatatatagaaattgatgaattataatgtaaaaatttgaggtaaaataaaaaaagttatattttttttaatgtattttaaagaataaaattgagaaatagttgatagtgctttggaattaaatatttaatcttttttttttttggacaaaagtaactaaaatatttttttgttagcattgctataaggcaccaatagtgctcatcactatctaaagcttgcgcttaaaaatagttagcaatattctataataattagagtaaattatatggtaaattatgtaggatccaactcttaattacttcaatagtaatgtgatacttgtattggtctagaattaaataaattttaattaggaaatttgatattatatgcttaaaattaatttatccactaaaaatatgctagcatattttgcatcatgcaaaatatactcacattatttttct

SEQ ID NO: 161865 - DNA, 3933 bp, Cannabis sativa
  modified_base (3882)..(3899): a, c, t, g, unknown or other
agagagagagagagagaaattttatattactacaagaaataataataatagaaaatataaatatcttattgtgtgcaaaagaaatgtgttacctaatactagatggttgtttgttaggccaataaaaataaaataaatgttaaaccaaacttgaaggcaaaggcaaaagaccatacttttttctataccaatttttcaaagtgtgaattaatattttattttgtatattaattgaaccatctcatttgtcctttgtcattccgaactcctcgaattatttgtcaccacgtaagtaatcaagatttgtaaaaaactattttataaaagagtattactaaaaagattgcaccattctcagtgtcataccgatattagtaatattatattctatataacttaagaaaagaacttttaaacaatattactaaccaactgtggtgtgctacttatagaaagttctagataccattgatacccaataacaatattttttacaaaaccgtaattattcacgtgataatacatggctcccgatactcagggccgaccctaaacataggcaggctagatccacgcttagggcccactcattttaggggcccaaataataaaatattttttaaaaattatacatatattttaaaaatattatttatctttatagtaagggtttattttttttttttttgcttaaggtccattttaactcagggccagccctgctgatacttatttctacggatatggaaccctagttttaatttttagcctaatttttatattaatttattatgattggtttgtagttggactagccttagagtacttctagttgtgacttgtcaacgtgtgggatcaagtgtgactaatatactctaatcctaaccattcattatttgatgcatcattttcatggtggaatatgtaaaaagaatgtaagacgtgtctaatgtggcacactattttgatactaacatcaactccttcttcattaatcatcatatctcaaattcctataggataaactctaacttgattctaccttttacactacactgcaaaaaatttaaaagagacaagtcaatttcttacaattttttcaacgagatatgattttttttttcatataaactaaaattaatttttataatttattagaagttttttaataattacaataaatatcaccataaaagattttttttttaaatgatagtatgtatttttaaaaataaggagtatttatgatcttatgaaaactgagtgaattattaattttttttatttttaatattaattattaaaaacatattatttttcatataattactaactattttatcaaaaaaaaattaaatttttatgtataattaaattgtataattatactacttagtacttacacacagttattctaaaaacctctcaaacagttagaaaaataaaataaaataggaagttgtataacccacacttttgacaaaataattaattttgagagcttattaattaatataatgactgattttaaaagaagaaacatttatatatagtatacgtaatatgataattttttttcaactaattatatttattcttttctcaaaaaaaaaaaaaactaattatatttattgaaactatatctcattatatttacatgttcttttttcataaaaaaaacaatccttatttatagtaatttttactgtcttcaaccagaaatatttccaataatatcatacaattacagtttacagaatattaattaactaattttctttcatattttttttttaatttctaaaaaaaaaaactaaattgcatagtacaaacaacaatgtaaattaacataaaatttctaaggttttgtagtacagaaaattgaccacttttgtcatcattgtcgtactactctcaaaaaccaaactcaaaaccttaaatattcatttcattcattcactcagctaatttaagccaaacctcccaaattcccaaaatgccccgcttaacaactcttctccttctctctcttctcttcctcattttcaccaccgccgtcttggcccacggcggcgacggcgacggcgacggcggtgtcgatgatgatgatggtgatgttgactcaaaagggtctgttaatcttcattcaaggcctttgattttggccaaagtttggtgcttgattttgatatttattgggacatttctagccggtttgtccccttattttttgaaatggaacgagggctttttggtaattggcacacaatttgccggtggggtttttttagggactgctcttatgcatttcttaagtgatgctaatgagacttttgaggatttgactaagaagaaatatccatttgcttttatgcttgcttgttttggatatttgttaactatgcttgcagattgtgttgtttctcatgtttattctaagcaaaatcatcaagatattgataaggaatatcaacaacaaggtaatttttaatttgatttctgttaattattttttatttcttggagattagtattgaaaaaatgggattttgtttgtttgggtttaattgggtatttgagaaaagggttgcttgcaaaagagtttcttcttttctctttttaaatttattttgattatttttggagattggtaattttttgtttggtagattagaaaaatgtgattttggtcatctgggtttaatttaatggggtatttgagaaaagggttgcttgcaaaattgtttctttttgtctctttttaaattacttttgataatttagaaagaaaaagaaagtgagaagttgagattttgttaatttgggttttgattaatggctcatttgtcaaaaagggtaatccacaaaatatataatttttaatcactttgcatattgactttattttaatatttctttacaaagtgtctttaaaaaaacagagttttttacaatttttcttttgttattggattgcataaacttgacactcccaatttggagacttttgaaggccaattcacaaaattattatacaataaggtttatttttactatttattcactaaattacttctaattatgcttcatttcagatagtattgagcatggaacaaagaacaacaatcatcacacaaacccagcaacaagtgtagcatcaattgattcattatcagacagtattttgctaattgtagccctatgtttccactcaattttcgaaggaatcgccattggagtagccgagaccaaatccgatgcttggaaagccttatggacaatctctttacacaaaatatttgcagccatagcaatgggaatagccctactccgaatgatcccaaaccgaccgttgttgtcatgcgctgcctacgcttttgccttcgccatttccagcccggtcggggttggaataggaatcatcattgatgccactacacaaggcaatgtggctgattggatctttggaatttcaatgggaattgcttgtggggtttttgtttatgtctcaattaaccatcttttagccaaaggctacacacccaaaaagcctgttggtgttgataagtctcatattaaatttttggctgtgttggttggtgttggagtcattgctattgtcatgatttgggatacataataataaataagtatttggtggttggttagacaattagttagttaattgcactaaaagatgatccaactaactttttggtgggtccattaagtggttttgtttggattttagaatgttgtaaactaggctttggtgtttcaatactaaaaaaatctcttaaagaagacttctttaattagtttacaataatttaatacgagaaaactataaattttatgggtttttatatatatatatatatnnnnnnnnnnnnnnnnnnatatatatatatttataaaaatatagtttttgtt

SEQ ID NO: 161866 - DNA, 3319 bp, Cannabis sativa
gaggtttatatgctattccaatttagaattttagtacaagattgttgcttgatgatatctcttctgaataatgtggtaatttcttctgaataaaaaaatctttattttattaattcttttctcatctattttatttaattcattcttaaataaaagcattagacactaatatccgttggacattaatgtaagaagaaagccaaagccaacataaagaacaaaaaaaagaaagagtatttttattttactcataaaaataaatataatcaaatggtcccaaataaaaaggcacagactttcaccaatatatcacgatatattgatacgatatgataaattaatgggaatttctctgaacccaaaaaccaaatactctgttctctctggattctctcaacattcaactcacacactcttcttttctatcttcccaaggcctttttagctcagcttagctagctaaagcttcaaccttttcccattctccaaacacccttttttcttccattcacactactctctctcttcttctcaagattttcttctaagctcttcacaacttgggttttgtttctggtttagaaaggtaagcctgaaaacccctttgcttaaaaatggagtctttggttttgttgttggttgttttgattctgtgtaactggtatggagtagtgagttcattgaatggtgaagggtatgcccttttgtcatttaagcaagctattacagaagacccagaagggtctttgagtaattggaactcttctgatgaaaacccttgtgcatggaatggagtcacatgcagtaaagagcttagagttgtttcactcagtattccaaagaagaaacttgttgggtttcttccttctgcacttgggtcaatctctgagcttcgtcatttgaatttaaggaacaataaattgaatggaagcttaccaattgagctttttgaagctcatgggttacaaagtttggttctttatggaaattccttatctgggtctgtctcaaatcaggttgggaaacttaaataccttcaaactttagatttatctcaaaatttccttaatgggtctgttcctgaatcaattgttgagtgtaaaagacttagaacacttgatattagtcaaaataatttcactggttctttaccagttgggtttggaaatgcatttgtttctttggaaaaacttgatctttctttcaacagatttagtggttcaattcctggtgatattggaaatttgtctagcttacaaggcacagttgatttgtctcataatctcttttcaggtcctataccagctagtcttggaaacttacctgaaaaggtttacattgatttaactaacaacaatttaactggtccaatacctcaaactggtgctctaatgaatagaggaccaactgcttttattgggaatcctggactctgtggccccccattgaagaatccatgttcatcacaaactcctggtgcaaattcaccttcttcatttccatacttgcctgataattcttcagctcaagattctgatcatggaaagagtggtaaagccaaaggtttgagtaagagtgctgtggttgctattatagttagtgatgtaattggtatatgtcttgttgggttgcttttctcttattgttacacaaggatttgttcttgtagaggtagaaaggatgaacatagtaagggaggtgggaaaggaaagaaagagtgtttgtgttttagaaaagatgagtctgagactttatcagaaaatgttgagcagtatgatcttgtggctttggatacacaagttggttttgatcttgatgagcttttgaaagcttctgcttttgttcttggaaagagtggaattgggattgtttataaagttgttcttgaagagggacaaacattagctgtgagaagattaggtgaaggtggttctcaaaggtttaaggagtttcaaactgaagttgaagcaattgggaagctaagacatcctaatgttgttactttgaaagcttattattggtctgtggatgagaagttgctcatatatgattacatttccaatggaaatctttccactgcacttcatggtaagtttaagcatatcccattattcgatttgtgttcatttccttgtcttaattatttcaattctcgcggttttttagtataaaattttactaaatatgtacgatttcaaaatacagagtaccagatgagcattattgaaaacacagagtaccaaatgagtatattctgtagttcatattttgatcaatttttcgtttcgtgtactcagggaggtctggaagtgattcattcacaccgctatcatggtctattcggttgaaaatcatgaaaggaattgctagaggtttggtttatctccatgagtttagtcccaagaagtatgttcatggtgatttgaagcctaataacatacttcttggaccaaacatggaaccccaaatttccgattttggactcggtcgccttgctaatattgcaggaggatctcccacattgcaatctagtcgaatggcaacggataagtcactagaaagagcacaaaagggtgcaccttcagatgccacaaccgttgcctcgtctactactaataccacaactaacttgggatcttgttatattgccccggaagcactcaaaatggtgaaaccatctcaaaaatgggatgtttattcgtacggtgttatccttctcgaaatgataactggaagattgcccttaatccaagtaggttcttccgaaatggatttggttcattggattcaactctgcattgaagagaagaagcctctctctgatgttttagacccctatttagtccaagacgccgaaaaggacgacgagattattggagttattaagattgcaatggcttgtattcaaactagtcctgaaaaaagaccaacaatgaggcatgtaagtgaagctatggaaagattgatcatatctgattcatgagaatccttttcttgatgttttagccttataactcaaagtgatgatcatatgtaatttgacatagattttcatgacttcaaattcattgtaattttctttttagctatggcattggactgagcttaagttaggatctgcaacaagagcatgttttcaagtgtttattttaaaaattgagtttgtttttagtatatatgtgtgaaaatttgtccttttttttttgctcttgttgcaaagctttttgtatcttgttgttttatatttgaggtcaatgaagattaaatatttgttcttttcattaatttattactatttttcataagagaaatgctaaaa

SEQ ID NO: 161867 - DNA, 2055 bp, Cannabis sativa
ataattaataatattaattggattgaaatatatatatcacagttatcatcattgaaaggtagcaatgatcatcatcatcaacatcaacaacaacaacaacaccatgatcaatatgaaaactttaagaaggaagcagctgatcaagggtcatggagtaatggaagtagtgaccaaaacagttcagatgtcaacttagatatttcaaggccaccattaataaacactactactaatacagctactacaactactacttcatcagctaattcttctcaactagtacaaaaccttttcccttcaactcttagaccatcttccataactcaacttctccaaggctcatcatcaaggtcagatttcctcaataataagcaccactctgctgcacctcctcctcctcatcatcaacatcatcaccatcaaatggtgcaatctgaagaaagcttttgcaacttgtttgtcaataacaacaattctgctgctgctgcagccgcgactgcagcagattctgccacggccgcaactggggttgatgatcaacaacctagcttctggccgtggccagaacagcataattattttcagtgaagaattgaaaatgaacaaaaaaaaaataatattccacaatatatattttgatgatgaattatttttcttttgtagcaaatcatgaacacacactactgatcatcatcatcatcatcatattttctttctttctttctttcttttgggtataatgcatgatgaatttgaattaatttttcatgttttttggctgtagagatatttgatgtatagagctttcatcaagtcatgatcatattttgttatttccttttttttttcattattaatttatgtttaaattttatcatcagttgggggctgtaaatgggtcttatatattatatatattggtgaaaaatggcaatttttagttaagaaatcatgtgcttctgatcagtgaatcagtagaattgatcttctagagctggcatacatacatatacatatatatatatttatatataaatatctatatagttagctagctagcatgcatggccaagaatatatatataaggactaataattctctgttgatttgtattaagtttgagaaatttaaggtgtagaatactgtagctagatcaagtgagatggtgatgatatattataattggggttattgaaggagtatatatatacatatttatatatattgaaactatagtataaatgtactgtatgaaaatgatgggtggtgagagagagagagagagattctgagcacacattccaagaggaaagaagccaaagagatgggaggagagtactgtggagagaaagaatacaaaacaagtgttaggaaatggtcatagttttgagttttgaaggtgacgtatcctaattataatatatgatatgttcatctgattcatctaataactatatatatatatctccatctctttccatgtgatttactgccaaactttattctactatgccatattttttacaggagaagaaagtactgacttcatgatcagttaaatttcatttacgtatttatatatagaatattattatatatatagatgcccttttctgatctttcatatcacttggctcaggaaactaataattaatgtcgtttattgtatatatacaaaacaaaactaccaataattgtaatcaattttgagggcctaacagtacgaactaaaagtatatgtatgtagaattaatgtaaagaaattgtttgggcttaattatttttaatgttttattaaaatatggagtgatgggtagtttttcttttggtaggttttggcctacgtagtgtaacttaattagcaattagcatatatgtgaagtgtagttgaagtggtgtgttcttttttttattttttaatgactaattatgatttttgtcttctgaattttaacattattaaatcatgcccttttaacttttaaggtcgttaaaaatatttcttgaactattgagattgttggatttaatgacttttatctaatttcattcaa

SEQ ID NO: 161868 - DNA, 4174 bp, Cannabis sativa
gttgttttagttttagccgaaaatatcatttatttgaagctcttagtttgtccggaaccacacaatacagtattttaaactaacatccatgacaataatgttttaagttcatagatcagattatctatgataagtctaatattacagtacaacaaagagttaacagcttgctttcaaaaaaaagagttaacagcttaaaatattaatacagtgaataaaagaagttcagcaaatagaagaataaactttcaggccttgatagtaacacagtacaagcatgaaccggaaggcttaatctcagaagtcttccattccgatccgggggcaccattcggatcatatagcagagtttgataattgggttctttctctagtgagaacagtaggactttcccatctaatattccaaaacggaaaccgatactagcactacctgtcaatggaacaggcaccatcttccacgaattgtcagccgaatcaaaaatagcaagcttccgctggttcttccactccatacagaagaggttcttccccaccacagcatgagaagtgaccatgacacaaccattcttcttcatctcacaccaactttgcttctcaggattgtagacatccacaaactttgaatttccaatggtgaagcttgaccttccccccatgacatagagcttcccctcaaatccacaagcaaagcaaccccacctcggacgacgaagagactctatgatgctccatgaattggtttcagggtcgtatacctcagcactagatagactgttgccatcaataccatagcctccgactacataaacttttccattaacttcagcagaagcaaagtcatatcgagcaaagttcatgtctgttaatttgctccagctgcaaataacacaatgtatcacagaattagcaaaagaacactacatactctttcgggtccaaaacaagtcacatgttaagcaaactcaaaaaattgcagcaactcattcctcatgaagtagtactattagaaaagaggccattgtataccagttatttaagaacttatggatgcatattttaaaaagtgagaagcaaaatgcaaatgctagtacatgtccaaagcataacaggtagattgtaagtctgcacactatattcaaactattaagctaattcactaccatttatgcagcagtaagcatggtggtaatggtaaagcaaaaaactcctctctttttttttttttgttttaataaatgagatcattaaggtagagcttatttagagcaactaccccgaaccaattaaaaaacaaaggccactccaaaggaaaaacaaacctgttgaggcaagaatcatattgataaacatctggtgatgcaaaggccactccattgatcactgtatagcccccaatgacaagaagctttccgtttacaacaactaccccaaacccagatttagcaaaaccgggcatggcaggaagaatgcgatttttgttccccacacaatccaaaacctcccagtggctctcctttgattcagcatccacagttaagatatagagccactcctcaagcactccagctaattgccttacagtgataaactctttgctttgaataaatgacctccatttcttgcacacaccacccatagttgggaagttggtacgaggtacaagagcaaggcaatgttttgccacatcatcaggcagcccaggtagaatggggctgtgactgtcaacttcatctagaagttgagaagacaaaccaggataacttttcgagcgaatcaaagtatcctgtttgagtgaattaaataaactcatagttggttgtttaaatctcttgttttcactcagaaaaccaggcatttttgtaagagaagctacttagatcaagagggttgttgataactagatgattccacacccttgactttaactttagctctcaaaggatgacttaatgattttataattagaccttcaattaaagaaactcatgatacgcatctcctaaagggattctacaagaccaagccataaaaaatgttgcagaacgaataacttcagtggtaaatgccaacgatttcttgtgtttcctccgctctgattcaaattccataccagaggttctgctcttagaaaaactgattcttgttcttttatttaaactaatttgtaagataacagtagcgtctcgccctccacacatttgccaaagtcctattaaaacaaacacagtagcataataaataaataaaagctgtataaattcatcagtattgatggagattaagagtcttaaaaaaaagaaaaacataccgatcagtgccataaaaccaagatggttttagcctccagtaacttccattttcttgataatggtttccaccttcatacaccggaaagaaggaaaaaagaaaaggtcagctcattgataaccgaaaattgactttagatcaataataatgattctgataggcatagcaaatctcatccacgaaagcactagaacacctaaaattatagcatttgactaaatttttaactgtaccaatataagcaaatgaaagattgttcttttatcttcgcagaaaaggtaaaactgctacctcagatctaagatccatccaagaagtaaaaaaaatcaaaagtaaagataaagaaaatagatcatatatgaataagcaataatacaaatctaaattcgtatcaaggataatgatatccaccctcaatttgtgtaaagaaatatcagatagtgaagtcaaaatccaatttcgaagtacatcatcagttactgaattcaaatttaatgaaacaaaatcaaagatccaatattcagatatgaactacacaacaacacaactcaatttactactgtccaaaaattatacttacaacaagctaatgattaatacaaaacaaagaaacctacattcattttcaattgttagctcaattagtaccccacaaacataatccgaaataacccatgtacaaaaaaaaaacccatgttctattacagatctaacgccaaaatatccaagcaaaagataataatggcggcgtaaatgaaaatgttgaagaagaaagaaaaaatgattgatgcatacctgaaacaagtggagatttggtgattgtgtttgtgtgtattatgggaaatgaatgatatttgaagtgagagagaataatatgaaagaggaagatttatataagtagagaagtgaggaagataaagcttacagaaccggaccacgtcagaatgatatttccgcagaaccggtaaggaaagagattgctataatgagtttaatttggtttgtgttcccgaaataaaggaaggaacaaattttttatattttttatttatttatttttgggaacaattaaaagagaatattttaggtgaaagtaagtactcggataatacgattacctgtacacttaatatggaccgttcgattgttctgattttggatcatgatttcgatttgatcgatgacttggagagcttaaattagacttctaattgtttatcaaaaaaaccaaattagactttcaaaatgaattaaaaaaaacagtgatattttttatttcttttttcagtgttgttcggtggccgataattttgtttttattttttttcttaacacgtggtgattggtgagcttgggtcaaacacacgctcactacttttttacataaggttgtcctttaatttttttgtttgccttaaacaattgattagcaatctaataaaataaaaaatattaaaatatatgatacctcataaataattgtactaagtagatctttaatagtagtattttttaatgatgttaaaaaattttacatcatataaaaatataatatattacatggaaaatataaattgacattttatttacaaaaatatttccatcaggtaagacaatactttttatgtgattttaattatcaaaataccacttacactatcatcacttacacaatcagataatagttgcagggtggttgttgcgtgattgccggtagttgcatcaaacgaaggtttcaatcaaacgatggttgcagggtggttgctaggtggttggccgaaggttgcatcagacgaagggtttaatcagacgaaaatttctgggtggttgctgggtagttgatcgaaggttgcatcaaacgaag

SEQ ID NO: 161869 - DNA, 3253 bp, Cannabis sativa
cttcaaaaattatttccttaactccctatttctttcgccatttagaaaaaattatagtttaattttttttttaataattgtgtatgttataattatttatatatattttttaaatttttaaataatttattatgttaagaataaaatttaaatattttattacatgcttagtaagcatctatttaaactttataaattcgaaatattataaaaattagcaagtgatcctaaaaaattataatgtacataatcatgaaaataaaaattaaaccaaaaaacttttatagatgtcaaaacagataataatgtttggaaaaacgacctcttaaaaatatacttcataattttatttataaattgtgtaccaaaataatatgagcattgctaatttttttttttattattattttgaaaggtgagcattgctatttagcataccataaattagtgttgataatttcttataacattaaaatttaattaagataagagagattcaatattgaatgccagcattagtatttaattttggaaaatcaatacatatattatttttatttttttttaaaatttacagtttggatttctatgtatatttttgaaaaaaatataaaaattgttttgaagtgtaaaaatgaaaatacacttttaattctttagcatatttttttaggagtttttaaattttttttaaaaatattgtgtaagttttatactgtatactgtattaaatttttactgttgttctacagttatttttaagttgttccactgttgtttaattgttttgttttgttgtttaacgattgttttacaaaaaagatagtatttttgtaaaaaattccgtgtgacagtaaaattgtaaatttttgcctaaaatttaatacttttgtaaaaactccattgaaacacgtcaccattgtgtattttaagataagatgggagggaaacgacgtcgtgttgggggtgtgtttcaaagaagaaagaaaagacggatgaacaaaacaacagacatgagcaaataatcgaaccaaaattcaaaaatcccatcttctcttctcttcccttctagccgtagccctagctagggtttctccgattctacagagaagcaaatgaaccagccatcatcggcgaagcccaatcccattcctaaccaaaaccctactcccttgatcaagaacaacaacaaccatgccaggttagctacggcggaatgcggcaactgtgggtcgccgaatcggtgggttctccaccatgttcgtatcagaggcatccatcgccgcctctgcacgacctgcgtcctccgtctccacccttcattattctgccctggttgctttcagttctacgattcgaacaacgttcctcctccttctaaacgcctcacctgctccaaatgttcctctttcacccacactcattgcgctcaaacgccgccaccgtcgcgtccgccgccgacttcttcttcggcttcggttatggcgtcttcttccggctcagcctcttcttatctctgtccggcttgcgcttcccccaatttcaacttctttgacgttgattccgaacccaatcgagcgatagacaagaaacttgctcttgtcttgctctgtgctgctaagatctccgctgcttccatgaccaaggccgtgatcgttgctagggctgaggctgagcgacgagtccgcgaggctgccctagcccggaagagggcgaaggaagccctagataacttggcgactctcttcagcagcaggggagagaaagctatgcgcaaggatgttgttggtgatggctccgctgtggtttctgggtcccgtaaaaacccacttgctcagaattcgcaagtgggaaaggcgttcaatgggtttactcctcctcctcctaggcagaatccatcgaatcttggttcctctcaacccattgaaaaaaaagataatcgggagcgcaaatctgttgttgatcatcatcttcaccgcccaacaacccttcaatctaacggtaatgtacatgacaaggacaaatctgtagccatggatgctgacaaggaaaaggttaagcttgaaccaaagatacaataaatgaaataatgatgatgatggtgatcgtccatattgaaatttatattaaattttttagctgttttatttttttaagggtttggttgggactggtaggagaattagtagaaggatgagcttagcaccccccatgaattgattttgttgtgccatgtcgaattttcttcttacattttgttcttcttctttcagtttattgctttgttttcttggttctgtgattactttggttctctttgttgatctgagtattatggctcctccagtgctattaatgtagtctagtcattgttgtagtgttgtttagtgaagataggcttaagcttagtttttttctcttttctgggttaagtttgttgataatgtccaccttgtatgtatgtatatataataatgacattgatcattatgtttggtaattcacattccacaaattactgtggtgttttgttataagaaagaacataaccaacaatttagatatcttttgatgcaataattatatctaatattgtttagtcatgaattgtagtgttaatggattttgatgaagctgatgttatttattttgaaaatttgcatcatgtattgatatattaatgtcaattttgaacttattataatcctcttcctttctctacttttactgttgtcaataaagactaccacactttctttcgtatgaagatttaatatttgttgtatgaagattttagtgaatgcaaatcacatcacccatacttagaattttctatattgttaggtgatttgttgcccattcatgaagactaatttgttatagtttgtaatcttatagtggtcccggtctaattgtagaatatgttgtacctttatagtggtatttttcttccatgatatctgatatccaccatagaggattttgattacatttttgatggattttacttaaaaaagaaaagctggaattaatgccattatataacacaacttcactccgtagctatattctttcttttagttattttatttattatttgatacttttctgtaacatattgttgtgtcgtgtggtatggtaatggaatggaagttttgatattcaatagtgactaggggatgtacatctattggtttgggaggtatatcttatatattttcttactcactctaaagttcgggttgctaaaatt

SEQ ID NO: 161870 - DNA, 3327 bp, Cannabis sativa
caagcacttagatttaataatttctccatctttatattgctaatgtatattcagactagttattttttgatatagaagttataggttcaaacagtttttgtacttggtagtaagtagagcttttgtgaacatcatctgatgtgggaactttaagtaattggactttgccatttgcaatgatatatctaaagaaatggagccgcgtaataatgttggggtaatttcaacacgcaagtgtacgtgtctaattgaggattagaccgtccattagggtcttgttgttgttgttgttgttgatactgttggctttgttgaggttgattttgctgaggataaaattgtttttaaaagttttgctgacgaccataattattttggtagtttccaatggcgttaacttgttccattggccaactgtcgacatctattgagcatgtgtcagtagtataaggtcctccacacaacttgcagacaacttgagcttatttggcttgtgcagaaaaccacaaacctgaggccttggaagtagagttgagcgcctaggttgacaatcaacctatgcgctggtctcaatcattcaaatgccaaatctaattcaaccattgaatctgaaatggtcaaaacgaggtagaaagcctcgtcctcaagtttaagaatcttagaaatatcaaaacgacaatttgggagctcgaaaacagagtacccaacgcttaggttggcaaatggcctagtgcgctgaattaagcttatccaattctgattttgttttgaccgttcatctaatttttcacaataactatgatccattaagtcaaaaaagttaaattcataactttgcattttccatttccaccatgtgaaactcacttggaaatgaagagttttgagtctctcatttttgcagaacatcaacatctttgagaactggtgacaagctttgccaaaatacagaaatagactaagtgagccaaaatatcacttaggcatcttaaagtacattccttggatattttttcacttacccaacgtccaggttgacatcatatgtaaacttgggcactgggtcatgaactacctttagtaaaatagtcataactcacttaatgttgatctcattgacgcgattgaacttgcatctcaaagctaatttaatgctctatcaagtcatgtctctcacttcaatcgcaattctgaaactattgatctcatatttcactcctaagggagttacaaaaataagctccgagttacccgcagcgggtcccgtcgggctttgaaaaatgactatcacttaaagaagctaatttttaccgttagatcatcatctatgatcagaaacatccaatttgtattttttttcccaattttgtgggtcttcttcaactataaaaggaaagctctcttagctcatttttcacattcaaaaaactactcacaaggtaagagaatctctctctagtttctctctctagaaaccagagcttaagcacttagtctttatctgtaaattctcgtaaaaaatgaaaactcgtagtagacgagctccattaccattgtgacatgaggaatgaattactataaattttgtgtatctctctaaattatttacttacattctttattcatcttgctagtctaacgaattggtacgtattggctatttctcagcatcaatagcaagcctaactatcataaccatttttgttaagcttttctacaaaacacttctctctctaaccctttctttctctctcttgttctttcttagttgagcttctacaaccactatttaggaccctaattatatatttttttgatgaatcacctagtgtttcattactcttaaaaaactattttacaaactatgagcatcttcagttgacgatctcaagtattctatacaatattcttcctttacaaagaaccattccatgtccttcaagctaactttttttggccagacactgttaattctctatttcaccaattctttaactatacaagttactctatttacatcttcagcttttgaattccaaagcttttcatttctagtcttccaactctgataaactaaaccaaccaatgcagcagacgaaacctgcttttgaacttactggtcttagctctgccaatccatcttgtaagtctggtaatgttagcagtacaagccttccattaaagccaaacttttacttcctataagcattgagatgagaatgaacatgtaaaaaatagatgctcactagattcttcctgtacattgcataataagaagcccggatcattaatgatcccaaacttaaacaacctatctcttgttctcagcctactttgaattgccagccacatagtaaaattatgtttgggtatgttaaaatccccaaatatcttggctccattgaacgttttgctgagaaggaacaagtaacttgtatccaaaagaaatttgatacatggtcttagtgaattgttgaacatctaacagagacatttgatctttaactgctaccacctgcttccagtaccagctttcttggataggggcattgtagccccaccagtcttcatttatgacatatacattgtgtatccatttgatccgtaagttttcttctttattagcaatctcccatgcgtacttcaacatagctactttattccattatgttattctcctcaagccaagatcacctcctgattttgtttggcaaacatactcccaagctactaaaccagtcccattgagagtatgctgcccttttccataagtatgctctggaaattgcctcattttcattaatagtcttcttaggcagaaccataatctggctccaatatgaatttatagtcattaaaactgagttcacaagaactgcccttcctgtaaaagagagattcctggtactctaagtctttattcgggaagttattttcgcagctaattctttacattccttacccaaaatcctttggggacatatggacactcccaaatatctaaaaggtaaattctgcttacagaaaccagacatatccaatgatttttggatctcactatcatgcatgccactacagtatatagtagattttggaggattggaatgcaatctagatgtaaaagaaaataatttcaaaccttgcagcatatagaaaacacttttaaattctcctttgctaaacttaaatgattaagtttaatcttaccacaccttttatagaattgaaaattttagtgccaatcttctacatgattctagatgagtactattccatttccagtacaaacagcatgggagactgtaacgtccccgcttcaagcctcca

SEQ ID NO: 161871 - DNA, 1866 bp, Cannabis sativa
gaagaagaagaagaagaaagagctatcttcaatatcaaaagcttgcctgaggaggtcttttgtttaaacgcaaacccacagcttccagctcccttgtcaatatttgccgatgaccctcactctgatacattttacaagcaattaacataagaaataacaagattgttcgactaaaacaaatgatgcagaatccatcatagataaagaagtaaaggatgtcactcataactcaatccagtagcaacggtagagaagagtggggaatttagattcaaagtacatacttacttttgaggcatcaagaaccatcagaacaatgtcagacgacttggcaacagcaataacctgacagaagtaaagagtcacaaatttttttaatttccttaatagttacattattaagaagaacaagagataataaatgaccaacagaccaagacgaactctaaaattattctcattaatactattaaaagatatgtgaagaaattttataaaaaccatcccacctgccttccacgacccttgccttcagaagcaccttcaatgattccaggaagatcgagcaactgaatttttgtatcattgtagtgaataataccaggaatgcaagtaagtgttgtgaactcataagaagcagcttctgactgtgtacccgttaacattgtcagaagtgtcgactttcccacactacaagcaattgcaataagtaaagatttgaacattctctatctcagatacaaaacgattgtgttttcacattggcaaaattctattaaattagaaatatacaacatagtaaaccaaacgcataattaagacagatgggtcgataaatatgaaaggaaaaccatttacaaaccatacaaagaaaatcacacaaacatttccaagtcatgataaagatggcaaacctaggaaaaccaatcaacgcaacacgtccatggccaaattttgttacttcaaaaccatctccccctccactagaaccctgaatgttcatagattcatataaaagaaaatgatcaatcaacatattcgaacaagtagagaaattttcctgtgcaatttaagagcaagcatggcaaagcaatagaggaattgcatcccatacctttggaggctccagtaattgagtccgcagcttagcaatctttgctttgagctgaccaagatgatactctgcaattataaccattgtaacaattaaattatatgtaattctatccatgaaaaacagaattaaattgattaaagaaaaaaaaagatgcagataaagatacctgttgctttgtttttctgagtccgagccatctcggcctcaatttctttgatcttttcaatgatccccatttttctttatctgaagctcctgtaatcgaaaacaataagtcgagaacgcacatataactataaggggtctaaaatcgcatcaatttatgagaaattaaacaataaactgaaaagcaatatgggaaacgggataggagaaattgaaattgcagtcaaagttactcaccgcgacggagctgcctatgagtcgtggagcttgaagctgagatagagaaatggcagactgacagtgatagtggaggaggaggagtttagggctcagcttcagagtcagagcaaaggaggaaagaagaagagcgtagaagagtttggattatcgacttcatttaacggcccattgtaattattggatcggatttccaaggcccagctctgtcccttgtttttttttttttaattatttgaaaaatacataaaaaaaatttaaaaaaatggtttataaattttactttctttcttattatttttttttttttttgaaagaagctttcttattattttggtgctgtttta

SEQ ID NO: 161872 - DNA, 3898 bp, Cannabis sativa
ttggactgtaacatgagtgttaaatccaacaattcattgtttggaaaagaaggaaattaatgttgaaggtgtctttacccctttgttttcttttgcaatgcagtgcctaaataagaagcaaaagaatcaattcactacgtggacaataatggcagtgttggcaaacgatttattcactgatgacagttttgtggtaagaatatttgttttagtaatgttatgattctaccccctttgtattttctgatacaagtgtagtttggattccaattttactctttggtcttttgtgaaattggaaatagttttcaaaagcagcttcacggataaaggaaatcatatctaatcttccaattgcaactgaagatgatgacatagaggaagctgctgccctgaaagacgaaacagaaacagcaaatgaggatggtgaactaaagacagagaactcaccagttgaggaaactagcaagcaagagtctgatccgtttgggcttgatgctcttattcccagtacagcaaagaaaggagaaaaatcaaaggggaagaaagatgcaacaacaaagatcaaagatgaagaagacacaaagagagtccttaagtcccatagagtagcattgattacttgcttagagattgctgcccggcgttataaaattccatggtaaatatgcttacacaatttattaacttcttattcttaaatgttaatttaaggtagtttatatttatttctctttttgtgattgtttattcatgtcttttaatttgcaggtgccaaacagttatagacatcttggttaagcatgcctttgattgataatgtgtcaatcaaggtttacatctctacaaagggatgccattgagaaactttgggcgtctatacgagaacaacacgcccggagaaagcaagggaaatcagttagtgggaaacttgatgtaaatggctttgaatggctgcaacaaaagtatgctggtgaaaagatcagtatacgacgtgcagttggtggaagtggagctcgtcgtgctcagcagtggcttggttgaaagttaaggagtttttttggggtgcagatgacatccattctttgactgagagatagtaaaaactgtaactgctgtttaaagaatatgtggttgctttgtaaaattacattagtatagaaaattatcacatcattatgtatattgaagaaatcacaaagcatgtggctggaatttagcctcgaatatgatagtgccagaatggccttgatcagtcaattgcaaatggcagaagctcgatctcattgctctcattttttatttgtacatccgtattctgtatagaatagttacattgtatccgggataatagagtaaaagctaccaataatcactacaagaacaaattccttctctgaaatggtgaaatcgattacgatctcttactactattatcctgccataaatttttgacagaatcttggttgcagcatgaaaatcgtcacaaactctcaaattcttgataatcctcattggagtacttacaactgtactaataagactaaatgccatggctaatttttcactatgataattaagagcagtttcctgttcctcctcatcaatattctgtaacacaaccgatgtgtcaggacaataaccagcctgtttcaacctcatgctcatctcagccaacatttcatatatttttcctgtttgtggtgtgtcttatctcccattacaaagtcttgaactaaaccatttacttcaattgagctaagtcctggttgcttcttgattccattgtcttgcatagccattccaactgaggcaacgccatcccatctattcgaagcagcataaatgtttgacaacagcacattataacctctattctgaggttccagctcaaggaggtgtttagctgtaagttcccttaaattggggtttttataaagcttacatgtagcatggaaagcaccccatactacactgttcgggtgtataggcatgcttttaatcaattcataagcctcctcaagttttccagctcttccaagaagatctaccatacatccatagtgctcaatttttgaaaccaagccaaaaccaagagccatcttctcaaaaagccttttcccttctgtaaccaatccagcgtgactacacgcatgaagaactgcaataaaagtgataatgttgggttcaacgccatgtttctccatttcttcgatttccacaaccgtgcaaagcaaacccagttatcattgcattccacatacagatgtctctatcagtaaccagccccatctatgtcaccgcacttagcatacatgtcaactaaagctgttttcaataatgtatcaacttccaatctttgctagtttatgtacaaatgaagccactttcccaagtcaagcgctcttacttcggtacatagtgaaatgaggctgaccatcgttaccttatttttccttaatccttcttctgtcatccggacaaacaggccacaagcctgattagcgtaactggcatgtgcatcagctgaaatcatatcactccaaatcatgacatccttgtccttcacaccatcaaaaacacctctggcttttctaagatcaccacactttccatgcatatctaacagagcagtagccgaaggcaaggacaccacaaacctatttctcaacagatatgaatgcaacaacttacccaatttcatagcacctacaaaatcacactctgtgatcagacttaaaactgtaatctcatttggaaaaatgctttcgtccctcatttcctcgaaaagttttgctacttctcccaatgttctggtactaatgtatcccgctatcatgacagtccatgaaactacagttttataagtcaaaccattgaaaagcctttctgcataagtcaagtttccacacttggcatacatatctatcaaagaagtatcactatgaacaccaacttgcttaatgttgctattactcatgacataacaatgcattgctttccccagtttcagatgtctgaggtctcaaagagattaatcatgctattcatagcaatctcactaggctttattcccagataatgcatctcccttacaagttccaatgcttctcctaataatctattccgaacacaactcctaatcatcgtactccacgaaacaacatctctttcagtcatgtgatcaaacaccaagcgtcttgaaaccacactcccacattcactatacatctgtatcaaagcatcacgcacaaacacatctttgtccacaccattcttcaacacataaccatgtacctctttccctaatgggaccaacgagcattggccacaagctttaaggatagagggaacaataaaattttcaacatagtggtccacgtttctcatgtgagcatcgattttgagagaacattcaggaaagttgttgtcattgtaagaggttattaagaagttgcattgggcagctgggcttatatggggtcgaaaactcagaggaatgttttgaaggttgttatcaaagtgggtctttatcatgtgagcatggatttgtcgagtttggtcaatgttggggagatcataatgggttggagaagcacttttcatatgttggttttgtgtaaaactctgtttggagggaacaagattgggttgttgtagtgatgagagataaggcttgctttattgcttgtaaccatgatccattggataattgcaaggttaaggctttttggtgagatgggaaaacatgaatacatgatgtgtaactgaaaaatctgatcttttaagtcttcgaaggaaagtcctatctgcctatctcgactcacaccacaagtgtaatatcctggaattaagaaatggattagaaaaaccctaattagataattatgaataattg

SEQ ID NO: 161873 - DNA, 1386 bp, Cannabis sativa
taacttgtacgttttgtaatgagatgattatttgttctggttaatttgttttttttcttgttagttttgtcactttacgtagtgtgtggagttgaaaaaaaaaattataatatttcatttaatttgttgtactttcttggatgaatatctatatacagtgcttataatttgtgattaataattatattatcaataagtatatatattatatatatatgtgttgtatgtacacatggccgtacgtacctttaataataataaaaaaattataatcaagattatttacggtaaataaaggaaatgtagcaaaaacctagaagcaatatcactataaaataatatctgttattgatggaatttaatattagtatcattgattttgatgtaataagtaatgcaaactgctaatcactcccatgttcatctagtttagcttttatgaggccaaatttgagaagaaaaaaaatgggtcttttatttagcaaaaataaattttgggatcttaaagagtaatttttgttttttaaaaaagaaaagacatgatcttaaaagaaaaaaagactgggagatctaacggccctaaccgctctattctaaaaatagtacactcgcaacacgctaatattgatatagtgttgagcacttatcgtgtttaaagcaatattctaatagacaaataaggacaacaaaacaattcattgtcattaatatatataagtgactattcaatagttacattaaaaatataattacgataattacatttttttttataagctgttataacaaataagtataaattctatttttaaactcaaaataattataattaattatatacttaaaataaattaattttttaattaaaatattgaaaaaaaaaaaacatacttttcacaattaatgtataaatatttctttaatttttatttataaagaaataaataaaattaagttatatcagattagatgtaatttattaattattatttaatttttaaataaatcataattgtttaacaataattcaataatgcaaccatcttgaatataacctttaaaacattctctaatctctatatataatatatttccttcaagaaaaataaaatacatataaggtatagcttttgtgaaaggcacgcaaattcaaattaagaaacttaacagtaaatcaaaagaatataatcatatgtatgagtactctagagattcggctaatatttaatttgccttttcttaatgaagttatcactatgtacagaaagagtactaatgttaattattgttcatacaattttctcttcttttttttttttttgtcgttccttttcccatagattctattcctatttataggtgtataggttggcatttatttttatt

SEQ ID NO: 161874 - DNA, 2501 bp, Cannabis sativa
cgtttaccaaaatctctatcgaagacccttcgatggctctgcaactgttgtgaagagacccagatttgaaatctgataccggaagtttcaattgggaagctaggaattctcgagagaaatctggtaaacacgactccattgatggaatatcttgacttgggattgggagattattactgagttttttattaatggctaaacccataaacacagagaggggatgaaaggagtaacattctgcgttgggaagagaaacgacatcctgaactgccgaactcattaagacatcgtaaacaacgacgagtcgttttgagttctgtgagagtgagctgagaagagcggcgattggttctcggaggtgagtcgaggcttggatcctgaggatttgggcttggaaattcttggttctggtgtcaagaaggagaagaggatcagtgggttgaggttgagggtggagaagtggtatttcgaagctgtggaaatggatttcggttgatgggtttgaggatcgagatttgagttgggtaatatggagagttgagctaacgtagtggactgggatgttgtatgaagaaatgacatggctgagttttagggattggtctagatgactttgagctaggaatggaaccattaacaccacaactgaagatgatgatgaagaagaagtcgccattgatgacgtcattcttcacagaaagtttctgtaactgtcaaagaaaaataaaaataatagtttgagagaatttcctttataacattggattgaaagtgaaatgaaagagttatgtaaaatatcttaatactatacactatctataatcataattaaaaaaaaaaagagttttttttattttttttttttttgagaaaataaactatgtttgaaaaagagttgttaaaacaaattacacacacaaaaaaaaaaaaaataataataataataatagtaggtgataaatattacttacctaagagaaacactattcattcatgtataaacattatattaatattttaaattttttgtggaaaaattacaagtaatgggtaaaatcataacaattagaacttaatcaacaaataattaacaatgacaagattaataatttatacacaataattggagattaattaaggaatgaacaaagtattaaaacaggaaacagttaaagcggtaaaataacaaaattaacaccaagataaatactggttaaagtcttatagatcgatgtgatctatgactctactttagttctagaacaccaccaaatctttattgattgtgcaagaacatagtacaatacagttgaaatcgattttctattgaattcactcaaagtgattatctctcacgctcttacccaagaattttctttatcttcagaaaatttttcatacaaaactcaaacccaaactcaatctctattttttctccgtacctctctctttacctctcaatctttctttctcaagatcacctttggaaactcgtctgaacttgttatgttgtaaaataatcagtgttggtggtatttataggtctagaaaatagatcctaaagccagtaactgcaagtgcaaaattgttaagttagttacgacttaacaaacttaataaattcctcgtaatactatctccacgttagcacaagtcaaagttcttccggatgagagatacacttccaggactaaggaccaaagcgcatgttgaagggacttcccgaatagaaagaacacagttagagtcgactattcgaaactccattctaggaggaaataactagccatctggaactcctttttgaagaaaggcaagctttccttgagaatccttccggatggcacctatctttcaacgagacttgttgacatctaactttctataactaaaacaacttagagatattttgagaaactatactattcatttttgtagtatatgtgtgtgtgtgatattattatatttatttatttaatttttaaaataaataaaatatattaaataaataatttataaatgaaatagagaagatatagagaagttgctatatggtgtataagataaaatagagaaataaagttttagtgaagtattttaaagaatagagtagagaagctgatagagctgatatgagtgctcttagagcatctctaatggtgcaccattttactaaattagcgtggaatcttcacattatttcactccaatgacacactagattatgcatcaaattagtgtgtaccaaattttacaccattaatagtgttggaatttgaatctacaccaatttggtgtaatatatagatagtgcattctaacccttatttcattattttttttttaaaaaaaataatcttatattttagtccacaaattaaaatttattacaaaaataattaatttaaaaactaacatatttatgttagactttttatttgggcttacattaaattttattggttttattaaaacttgggttgattggatagttctttgct

SEQ ID NO: 161875 - DNA, 3548 bp, Cannabis sativa
ataatctaaagatttctgggacagcaaaattgcaacccccaatcaattaacctagaaatccttagtctctactttgttgcctgtaccgtatctttcatatcaggtaagttctttctctctctctctactgcattcaattatcgaagaatggaggaaatgcgagatgcattggattttagtagctcaaaaaattagttccaatatttcagctttaacgtttcatgttatgatataaactgcgaaatctaaattcttgcttgacaggttgtttagctcggactatctatttgtgatttattattgttctatttaatcattttatttttcatatcaatttttctgtgcagtaagttgttgatgtttgaaacttcctttggctggagatgcattctttttcttttttttttttttgaaatgttttaagcatataggcttgctgagttttagttttagcttagctaatacagctcttaatttatttgtattggccgaaatttgttcatttttggggatggctgtcatgatttctttcttaagctttctgtttttgaattgtttaatcacttgtctatatattctcgctgggtttgaattgtttaatcacttgtctatattgtttagggagcactcaattttagtatttagatatacttgtctatatattctttcttgtttaggtaatcttgtacttgtaatacaggtattgagatgcatgtcataaaatggttttatccctttaacagtaggaggaggaattagcagtaaattggatttttttttttgtttattactagtactactacttgtctctcttctaatttttaaggtattactcaaaaatgtaatttttttagaaagacttactgcataaattaaggataactatactaaaaataaaattatatttaatctgtcttaatctcttccttatttcaggtgatagataataagaatcggctgcatacacttagtaacactgagttgagcaacttgggaattatgatgaataaaatttaggtttgcttcaacaggtaaataataatgtgttcatcaatacgaagttactagtaaatcattgtcttcattacttttacactaaaattttcttaaatacatacttgtcaactgtagagattcacatgaatataggcaaagagctaaaatttttgtagatatgatagaaaaggaagctcgtaatctccagaaaaactatatttgttattttctgtttcctataggtgatcaggaataaacaactaggtaacaattaggcgagaggaactcttaacatttgagttggaatgaataatttttcattcattaatctttaaaatttgtacttattcatttctttcacaatataatgaatttgtatgtgactttttcttgttacaatactatgcaatcatataagtacttttatagtttatttatttattaatttgagatttcattagttcttgcatgttgtgatatattttctatgttattcaattttagcttgaaaatcaactcattgggtatctcgtagttttttccctttgcttcatgttttccagagtctcttctctttacttcatatttagcctcattggctataaatggttcagttgtccttttcaaaaatttagttcatggctagcattattgggagagggtcccttgatgtgtatgctatgagtaatctcatgctttaaagtgattgattattttgttgttttgctttctttctcgaaagtgtccaatattttcaattctatcttcttcttactattattattataacagttatatttatatatatgtgttacttgtcaatgtatataatagtccctaactaataacagagtaggctaagtcatcttttacctaaatatttttgtaattggcttaatttcaagtagtcaaagtgattcaggaactaattccagccccaaaaccaagctccaacgacccaagaagaaaagagcttgaagagttggagaatcaaaaaagcgagattgacgacgagagggccgagtccctagttcgaaaggagttgtggtgcggtctgtcttacctaatgttgcctcttccttgctttgttttctctcaatttattttcttcctatgcatatataattatacattcagtcatatttatttttattttcattgttttctagttttataagtacttccccatcctaatcctccaacattgcatctgcctgcgaatcatctcaacatccatggcggggtttccctctctcctcaggcgcgtgtatctcactctctacaactggactgtcttcgcaggatggtactacatttcttctcagattcataattacagtccttttggtttttgtttaatggcggtggtttcaggttacaagtactctattttgctgtaataacgctcaaagattccggccaccaaaatgtctacaatgccgtacaacgccctcttcagctcgctcaatctgccgctgttttggaggtttctttcttctcccttattgtaattagtattttttatgtatttgttgattcgttttgacaatttctcattcttcttgaacagattcttcatggactagtagggtcagtttttttttttttttgtgttaaattacagatcgttatcttgatattttttggatttagtaaagggatcatggtagcatgtttttataaaatatagttttgataatttgtgttctctataatgatcgcctgtatggtatctgtagtttggatttgtataaaatactaacttgttatttcatgaacaagtattaatgattattatggagaatataggttatcaaaaacatattttgttaaacacagtattccttattaaaaaaagttatattttgtaaatcttgtttttgaatgaaaaaggccttgtgagatctccaattacggcaaccctgccccagataagttcaagattgtttctaacttggggaatcttatggagttttcctgaggttagatttgtttgatttttttttttcccttttaacaatttcaacttgcatataccttgtgctaattcaatatctgagcatatatatgataagattattcataacagattcaaagtcatgtacttgtgagctctttggtcatcagctggtctattacagaggcaagtattacacgactgtcataatttcttacttatcagaatcttgtggttttcttatattggctgtctcaatgcttgttaattattttttcttgaacactgtccatgaactgctgtatagcaacttatttaatttgtcaggtaggaggaatgatatcatgtttgtctttttgtatttggtaataaaggaactggagagaacatcactttcttgtttggttaaaaatcatatatgcaggagggaaacaaatcttaatccctttttttacccttcatttttataattgtattgatgttaagtgtattataactttattttggataattaaattcattatgatctataggaagtattatcatgctatatgttgcttaattgataattttcatatctcactcacatcagtta

SEQ ID NO: 161876 - DNA, 1923 bp, Cannabis sativa
gtttcatctgaaattgtgtatgtctcgttatgactcgttgtctctttccttgatcatagttgggagcttgcttcagcactgaaagaatcaaaagcaaaatttgatgcagctggtgtgaaacttattgcagttggtgttggtactcccgacaaagctcgtattctcgcagaacgggtatgttttcctcacccacatttgagttacaagtttgagatgggactgggaggaatctaagtcctttttctatagaaagtctaacctgtagatttaacacgtagagtttatgtagttcaatagtttgaccacaagaagtaagatatgacgtatatcatacttctgttgaattttgagaaaacaaatattaagttagaattcatagtcttatctctaaatgtgaccttgagtgctgtaaactcgagatctattgatcaccaaagtaatgtttcttttctcttttttgttctcagtgagaactctcctatgggctttggttacatttttataggaaaatacgatttggtctccaattctattaaggtgtgatgtcaaattttattctaaaatatcttaatttttaatatctaaatacatatctgcaatgaagttgtttctcaaattattttggagtgaaatgtgaaatgaggtcacattttctttatgccttacatgtccttaatttctgtgtctctttacttatttagagccagtttggggttcaaacttgacatgataaggttgagattgttaatatatccttgacttagtcttcatttgatgttgaggtcgaggtggctattatgcttcttgcttagtattcaagtgacgccgaggtcgctttgctatattaggtgttgaagttaagatgtttgatgtcatgctcatatcttgcttatcttaatattttattgggttgaggtctctttgctttatgtgttttgatgaggttggtgtgtgttattaagttcactttattagtctttgtaacttgaatttgaggtggctaccatgctccttgctttagctgtctctatacttgtttgtcactgagtgttcttcgtcactgctttcaatcttcagacctagagcatttcatccagatctacattcttttcccaaaaaaaatggatctcttcatcaaaggaagaggccttttacatgcaaaggcatccctactactgtgttcccggaatgagcggtccctgtgattccactctcaaagtagaacacttccatacatctttgtttgcatggaataacatatggcccatgacattgaaggtagctatgcattgcaagctgttctctctgaacatctagcaaatatggatttcgcataagattaatgtggggatttgttcacccactattttgacaatagcgcacacacctttttcagacacttgcatataaaattaattagcgtctgtcacatcacgatgagataagactggcacaaagacaggttacatgcgttgtaccatgtagcccattggaccctcagttaggaacataagtctagtgttagtattgcaatcctttcattagagagaataatgaaggattagatcctcatttgacctggttaatccaacccattattcaaaccaattatatttttttttcattcttttttccttctcttcttctttgagtgaaatcttttgttactaatctggctttgtatcacatattcataccagtacttttcttcttttcatattctgacaataattctttaatttttgaggttgaacaaacccaagtctgattttggtgagtgacttcatatcttcgtcagtcctatctttcacttaacattgaacgaactcacctctttaccggatcaccttttttttttttttttttttatttttagaaaaatatttttaattttttaagtcatttttgttttttttttttttt

SEQ ID NO: 161877 - DNA, 774 bp, Cannabis sativa
aaaaaaaaaacgatatcaattattgttaaggtcaataatcattatatgtaatagttaaataaactatttatgattgattacatatatttacatagatattataattgaagacatactttggagcacaaatatagaatattattcacttaagaatatatttgaatagcaaattgataaaacaaatagcctatcctattattataatgatttatattagcaatagtaataataataataattatgttaggtatttaaatatcaatttatagattcaattataaagttgaacataacatcacttttttttctaaagttaattatactataattctctatatttttaaaatataattattgtggagacataattatcaataattgaatatgttaactatattagaaattttgataattagttttaatattaatttctaactattgttgtagaccaatgatttaacatagcatcattcttagtgggaaccttcaattcattcaacacagcacaattaatggtttgtatcaaatatcacaatattttaacaatttttcccattattttatatatgcatttaatcgttttttataattgatttactaataattgatcatttattttcaaaaatacaattttttatgttttatttataaaaatatacttttaaagttttaaaattataaaaatacactttgctatgcaaaaagtaagaaaacgactaaaaacaaccacaaatcaacctcacgataactataaatcaactataaataaattat

SEQ ID NO: 161878 - DNA, 4340 bp, Cannabis sativa
aattaagctggtaatagaattgtgctcttaatgtagacgattttcataagactttgcacaacactctcaaaatgtttggaccgaccttgcaccgagtatgtagtgtagtggttgagacacttttcataagttcttaactctaattgtcttttagagttcaaatatcgataatgaaattttactatttgacctaaaaagtgacattcccagattattatcaagctgaaagagatggagatatgatgtgcaattgtgcacttattttttttatattaattaaaattaaaatatattttaattaaaatagattttttttaaaaaaatattttttagatctcaaaaaaaaagacctaagggaagaaaacgaaaaacgacatgtcgtaactaccaaaccaccaagcgaaaaccctaaaaaaaaaccagtacactgaagctcagtcgattatggcgtcttctaatgtggaagaagctgtagaggaagtaaacccagttccaaggttacagatttactccacctcctccaatggtgtctcacaattttggataggttttttttttttccccaatatcatatcttataaaattccttttttttttgttttctgagtaaaattagagctcaatgattttgttttttgttttttgaacatagaaaagtacgaaagagaagctaagaagtattgggatgtcttctacaagcggcatcaagataaggtttgctttcaaaaataaagttctgatcttgattagctacttcaattatttgttgttttctgataaattagactggaagattaataatttcaatttgtgtaattaattaactttgataaaatggtcagatttaattttatagttgtagcaattgttatagtttttttgatttctaagtattataagattagaaggggagcttggttttggtaaaaggaaaattgggttttcagtaattggaattttagaatgtgtttggtaggagggagagatggaaggaaaggtaacttggttgcgaatatcggggaagggattttaggaggaaatgaattcgagtttgcgttttgatttctaattttaagagggatggaaggaaggataggacaactcggtttcggttaattggatggttgtttgatgtgaatggttttaggagggaatgaaattgagtatggatttcaaattcttagtttgagagagatggaaggaaggataactaggttgctgatgattggaaggttaggttttaggtgggaatgaattcggttatggttagcttggcaatgcaaaagtcctctctttctttttcactctacccttggttacttacctcttcttattacccttatcagccttaaggttgaacaatgctatatgggctctcgatccacgtggtgcctcccgactagttgtcaggccttcaagcagcagccttacaggcctgacgaccaatcaggaagcctcacatggatctggagcccattttcattcaggacatacggctttgttccttaatgtttgttcttcctatgctgtatatttatttgtaaattaattatcattctcttttattttcagttttttaaagatcgacattacttggacaaagaatggggtcactacttctctgtaagctgagaattgaaatggattttgtgtatttccttttaagaatttcgaagacgtatattgatttccttgtttgcagggagcagggagaaaaaccattttggaggtgaacaactattctcacttctcaacctactgatcttaatgtgatttactccatgtttgagcacagacattgattgtatatcggttgttgtttacgagcagattgggtgtggagctgggaacaccatttttccattggttgctacataccccgatattttcatttatgcatgcgatttttcacagcgtgctgttaacttggttaaggtttgtattcatcctttttcgaaagctttgacttgtttacttaaccttaggatttgaataagtccttaaattttcttatactttattggctggcaaagatgtgataggctaactaatgcaattactataattaagatacaattcacaattggtgaggttatttctttagaagctcattgaatttctgttacaaaaattccaaatgggcgaaaccgagacatgatgaaatttcggtttggtcattacaggcacataaagacttcaatgattcgcatgttagcgcttttgtttgtgatttgaccagtgatgacctcacagatcacatatctccatcttctgtcgatatcgtaaccatggtatttgatcgaaaattgttgtcatttgtttttacttaccttctgattttgaagtggctgacatgttaagcagatctttgtgttgtctgcagtgtctccagagaagatgtctctagtgttacagaatgttcgaaaagttcttaaggtaagttatcccatctctctgattagctgagaaatttatctttaaagctttcatttttctataataaatcattaactttatgtgatgaaactcatgttgtattgtttgccagccaggtggttacgtgctttttcgtgactatgccaccggtgacctagctcaggttagcctgttgccattctctctgtagttttcattttcttttcttcaaatgattggttttttctaggattgttcacgaattggtttagtctgagttttttccaaaccaaagcagtattacagttttctaaacattcaaaactgaacttgaccaattaaatacgcaaattcaaataatgctttggtttaaaactatagtttgtatttcgtaacatttttttaagtacttactcattcttttactaatttttttcactttttaaagtttgtaattcataaaagacaacattgataaaaaatatcaagtcgagatcgtcccgaaatattaaaattccataataaaaatatatgtatataacaaattaggcgatttggtttgatccgctagcgagaattctaaaactttgaacaaaatagagaattataaaccgtccaaattaactaaactgttgacaccgaattgatctggtttcaaatgatttggtccggattgatttgggtttgaaactacgaattgcagattgctatgaacaacccaagttttttccgaagtttctatggctgtatgccaaattgtaacatggaaataaggacattgatcttataaatttcgagactgatctttatcctggtactaatatcatgtggaaatttacaggaaagattaacttgcaaggatcaaaagatcagtgaaaacttttatgtcaggggtgatggcactgtaagtgtgttgtttcacactagtgttattgtttcagtactatgcatttctattttgctagcttaattatttccccttatatttccagcgcgccttctatttttcaaacgagttcttaacaagcatgttcaaagacaacagatttgatgtcaaagaactcggtttgtgctgcaaacaagttgagaaccgatcacgagaccttgtaatgaatcggtaaacagtcttgtttacacataaataggtactttattatatgcttttatgaaaatcccggtttctaaagacattcaaaatgttgtaggcgctggattcaagcggtattccacatttcagatggtacagatcaatctaccaataccgaggctgccattcaaggcgaagagaacgttttgaagcgtgccaccgacaatgttgaggtcgatatctctgatggtttggcagcagaaatgtttggagatagtccttccaatgatagcgaggtacgatactttcgtcactgaatttatcgagaaatattaaaatttgctcccgaactattgcacttatctaagtagacgagtaatagtttataggcgaaatcgcaatctgtcctaaggccatgtttggtttggcgtaatcataatcataatggaatcattattacgatttcatcatttagtttggttttgaaaatattacaccattcatttgaataaggattacatgtctaaacctatgtaattgcctttccaccatttagtataaaagtaaaattactctaatacccttagcgttattttatacccttccattaccaaaatgatttaaagtaaggatatttatgtcaatacacaacacattttgttaccattctaaaattaaactaaacatcataatactattcctaattactattccattccataacactaaaccaaacaccacctaaattcattttcatgaattttctaccatatcatgcaaatgaataatgagaaagtcatggaattcgaacccgaactccatttacgattcaattttt

SEQ ID NO: 161879 - DNA, 3233 bp, Cannabis sativa
  modified_base (2407)..(2407): a, c, t, g, unknown or other
  modified_base (2812)..(2818): a, c, t, g, unknown or other
tgactcaactctctcattttttttttcatgtcttccccttctccctcatcttccccttgctatttgtcttactcttactcgtactcttactcctacttctctcaaacccttttttttcttataattttcgttcccactccagtcgcagcaggtagcaagccactagcgctccagccgctcctccttccttccttcttttgatttttagtttagttggtggtaaccctagtagagagagaaaggtaaatgttgaggagaggctgagagtgagagagagaaagattaattattgtgagtggtaattagtgaggcgtggagtgaggtaaggtaggtgagaggagttatggtaataatttaatattttttttgaaaaaaacatcaattattattttaaaatgtgaacaatgtaaagtaaagattcccttcctccttcctgacacaaaagtaaagtaacattatttatatatataaatggaaaaacatttaatatatattatataatatattaaatgtaaatgttagattaatcattaaacggtcggttactgttataaccgctagcttattggcaaaaccgtaaccgaccgccagttacactggtgtggtcagttttttttaaacggtttcgattatgacgtggcgccatttttttggttttttaacagtcggtttactggtaggtgtcgattttgtggtttgaatgttcacccctaagtactgaaaaaggcatggatttgtccacaattttctccttgccccttaaaagaatggtataaggacaaggaggatcagactggctttcatcacatttttgaagataaaagtgacaatatcttttggtatgatcaagtttaccacagaaaaagcaaaaatcagggagcctttcatacttaaagtctatccacttaatgaattccctacccatacaaatgaacctaatgttcatacctcttcgaatgggaagattaacatccagaagaattctcaaccttaagtaagggctagtaccctccttaacagtatccttgtcaacctctatgaggtcaccaatttcagaagcaatgaatcgagctaagtcatatgatttatacataaatggtataccataggcttggatccagaagtggacataatggagattttcagaagtaacagggaaggaactctcaggggcagcaaagatggtaatgctttgggcaaaatgccaaggctggccttctaagattctgcccttatcaccatcacagccaaacgtaataaggaataagccatctgcatgctttgtgacagacacagggaatcgacactgtgatgaccaaatgctagagagggttttcatgagagacagatgattatagggtcggattgtatggagtttgaggagaaggctgatggtggcaggagaggatgtggaggaactagcatcgtaagtgaagatggtattttcatcaggtggaaaaactaaagcacttgaaacggtattaagaaactcatccatttttaggaaaaaaagaacccaaacatacatagagaaggttacaagaaagcaaggagaaggataagaaaaacaatacctcaaccgcactatatagatgtagaaccagagccctctaagatgccttcttgatgaatccctagtcacatccctagcttccaccatggtagcatcaatgatgatgaaggacttattaacttcgggaacccagacgttcgcctccattttactatctccaagggtgaaatgatggtgggagatttgggaaattagtattaaatgcaaagaaaacaaaaataaagagttaaaagaaatggaaattagagagaaagaacataaggatatatgaatagctttgcaataataaatgagatgggattgtttaaaatgataataaagctcagagcaataaatgctctcattaatgaaaatagaagccaagattcgacttcaacaaggaaaagaaaaagacaaaccaccacttgaccggtaagggtggacgaaaacttccattgacgggaccaagaatgaacaggaattacggtatcgcatgcttactaaaaaactccaaagagagagaaaactttaacaaaaatatgtgtatactgtatttgcgatattggacagacagagggtttctaagatataattattgttaacgtgtagatatttaaaacaaattaatttataatctctatttaaatcatctaaaatttctcttttcaaatatgtatatatatgtaagttaattatttataaccaaacaaaatatgtatctaatttatcatctatttaatattattctctcaaccatataatatagtatggttgttgagattttatgccctaaataaaactcatttcaatctaatctgatttgttctcaataaagattagaagtcatttatgttnacatgtagttttcatgtttatgatttaatgtgtacaaaatctgttacgtccagaacatatagttattcacaattacagggatgtcaacacattgaaatacaattgtgattatatgcttcaaaagacaatgtccctcattcatcaatgaactggatttacactgatgacttttattatcaattacttgcttgacggacaacttccagctgacaaaaacgaggcgcgaaaactattgtatttagtgcctcgctacacaataattgaaggcaaactgtatagaagagggtactcggagccgctgcttcgatgtgttctccctacagaagcgaacgaaatcatcaaagaaattcatgaaggcttttgtagggatcatgcaagttggcaaagtctatctaaaaagatcannnnnnnaggatattactggccaacgatcaacaaggacacccatgagtttgtcaggaaatgtgataagtgttagaggtttcacatatacctcgcatgccgccaacagagctaaggatgatgacctcgccctacccattcactatatggggaattgacttaattggggcattacccactgggcgaggaggagttaagtatgcggtagtagcagtcgacttcttcaccaaatggaatgaggccgagcttcttgtttccataacctgcaagaaagtcctcgactttgtcgttaaaaacattatttgtaggttttgattccaataaagatagtatccgagaatggaacccaatttgatggcaacttgttcactgagttttgcgagaggaacaagattatcaagagcttctcgtcagtatccaggcc

SEQ ID NO: 161880 - DNA, 4546 bp, Cannabis sativa
tatatatatgtatatatatactatgtggctttttatacgatagtactagtgttttgtttttgaatattggattgtaacaattattttagctaattgttaatttattcaaaaaaaaaaagataagtgtatttataataaattaaaaatatatttaattaaataaattattttgaaataagttatctcttataatattgattttttccttttttgttagttaaagagatcagtagtagtgtgattcctaaaattaattctttcaccatgggagactataacgatgatggtgctgatttttacctctatgacgatgacgatggtggtgatgattccgatgaatctaattatgacctccaattattcgaagacactccttcagtctcaaatattgaaaaagctagttccgttaaggtaaagaatgggatgggttcgattggaggatttcttgaattaaagaaacaagtgtatatttataatatctgtgtcatgttgtaaaaaaagtgtatatattacaattacaacttttaattagtttctcagtttcacttttcaaataatgagtttttggcattgtaggtaattacaaaagggtctctcttggctgcacaggtatacaattacacgaatatatgtatataattattatttagaacattttgattatccttttgttatgtgctttaattgttgcgctgggctagaattttggattttaattgaaattaatatccagagggaggatttggggaaggtgatggaaattttatcattgaaagagcaccatgcacggaccttactcattcactgtcgttgggatatggaaaagttgctcaccattcttgtggagaaagggaaggatgagttatacagtaaggctggtgtgacctcattggaacaggacgataactctgctgctgctaactcatcgaagttgtcaatttcatctatggttttgtgcactatttgttatgaggatgttcctccatgtgagatcacaaccatggactgtggtcactacttttgcaactcttgtgagtatcattctacccttatatttcaacgctacaaacttaactagatatatgtgaccattaacacacgatttcccatttgaagaagtcatatttaggcctcgtatttggaattagttttataattactagataatgtaattcctaaagcccctaaaatattagtaaataatgtaatttctagagtagtaatattatataatatgtttggatgtcaaggaataagtatgtataaattctcacttttatgtctgataaatatgtcaaattaaatgattatcttaaattacacctaaatccaactaacttcaatgctgtgtttttttttttgggggggtatgattgtgtttaggttggacagagcactttatagtaaagataagtgaagggcagagtaggcggattggatgtatggaacacaagtgttactcagtgtgtgatgaagagaaagtaagaaatctagtgaactcaagggatcctaaccttgctgagaaatttgatcgttttcttctagaatcatacattgaggataatagtaaggttaagtggtgtccaagtgctccccattgtggaaatgccattcgtattggcgatgatattgaagaaatacttgaaattgaatgtgcatgtggtcaacaattttgctttaattgcctatctgaagcacactcaccttgtccatgtccaatctgggaaatgtggagtaaaaaaagtctacttgattcagagaatgctaactggcttacagttcatacaaagccctgcccaaactgtcacaaaccagttgaaaagaatggaggttgcaatcatgtaggatgtgtttgtggtaaatcattttggtgagtgttttttaatttgtcatcattttttccatgacccattgctcttaaatattctaaatgagaatatatgttaattggtttcgattgtgcttgaattgcagttggcattgtggtgacccattaaacaaggaacacaaatgtggaagatatgtagaaaaatctgaaaagaaagaggaatttggtcttattacacagaattacctattgcgttatactcactaccttaaccgttataaagctcatctagattctttaaagcttgaaagtaagcttaagaaaaccggtgaagaaaagatattatgtttgatagaaagtgatgcaatagtaacaaattatagttgggtgagcaatggaatcgacagactcttcaggtcaaggcgaattctttcctactcttacgcttttgcatattacatgtttggtgatgaaccatttgaaaattgcatcaccaacaaggaagagagaaaaagaaagcaaaacttgtttgaggaccaacaacaacaacttgagctaaatgttgagaagctttcatcgatgatagaagaccctttcgaatattttccacaagatgaaatctcgcttagaaaagcgcatattatcaatctaaccagagttgttgataagttatgcaaagaactgtaagtttattatcttgaactatcacgttattatgagatatagcataacttaataactagtgtatatacttttcttgaaggtatgaatgcatagaaaatgattttatggactcttccgaatgtgcaaattctaatattgctctttacaagtcaaatggggtggaaaaagcttcgaagctcgttattcatgaagatatgcaaccctctcccagtaacggtattattctttgtattttaatttaatataagaaaaatcactaagcatacataagttgtcacctcatataatggtgatttgtctaagaacaatgctttttttgtttatgatgagagttaacatggtgaaaataaccccaagctttgtttgtaaaagctactaacacacttgtcaaatttaggtgaggtgaacaaacgtccttgcaaatcttcatcaagcaatgaatcatatacggccgaagttaaaattgaagctgaagagtcttctttgaagcgtcttaaagtgtttcccgtgtagattccgccacttttggagacaccatcgtatatatttacaattttttttagggatatacttacaattatttttttgttaggctaattttagatatagttagctgttaattgatatatatttttttaatctaaatagtttcatttaattttaccatagcatttaattctaggaaacgaagcttgttcttcggtataatgttttataaactatatattttgatgaattttatattaaattagaacaaatataagtgcatctttagtttttagtcaacttttatctaaaataggtaaaatattaaaatagtcattttttttttatgttattacttcaatcttgttttttattttagttaaaagtaaaattaattattttaataatatttatataatttgaatttttttaaatatatattaatttaataaaataataaaaaatagcaatacttttattaaaatattattaaaaaattatcgaaaaagtaggaaattgtccacattttgagaattcatcctctaatataaaattatttttgtgtgtaggggttcatttttttaagactcctcctttattttaactaaggagtggtctagggagtatgattaaagataattttatatttgagaaatatgctacaataatgtaaacactatattctattgatatatatttacaataatgaaaattgagaattaatttgagtagttgctacaatgtaaattttagaaagtataattggaagcaaactttcatataaacatccaaattaaacttgtttgttgaataatatgtaaaatatattaataaaaagtcgttttcgtaaaatgaacttgaaatgtatgtttaaactttaaagttgaaaatataatgtaaagaattaatggcctaattttgtatgctcattagtgtatttttaaaatatattttctgtaaatatataatatttttgtatgcttgaaaactgaatctctcacatcaatgacatcatattattgatgttagtatggtcaataataacatgcaataaatctatgtgcttatagagatataagggaaaatgtttaagagattgttggatcattttaattttatttttttttatctttaatttgataaaaatattttataattttaatattaattttaattgcattgttattagatttccatatttttgtattgattgaattatatatcaagaaaatatgtctagccattctatttatgaaaaataaggcataaaacataaatttatgactgaacatttttatacatattcagttgtgtatgtctaattttatatgaattttttaatatgtttgattagatttcttgtgaagaaaactgaagcaaaactttcattttctataaaaagaaagtcgcacttattgcacacgtttttgtaggtacagaaacaaaaatttattggctgattgaaaatctattctagggaattgtcttgtgagttgtggtcttgttcagaccgtgtatgagctgtcaataaggtgtatattgattata

SEQ ID NO: 161881 - DNA, 4305 bp, Cannabis sativa
tcaaaaaaaaaaaaataacttttttcttttcaatttctggaaataagcactaagaccagtcaaaataataatttggacatatttatatatagtaataattaaaataaaacggaaatctctcattttattaatattaatatacattgaacttactgttacaatttatttttaaaaagattgaaatcacgtgacacatcaattattaatatatattcttttttgttccatgaaagagttttgatagaggaatatggaaagcacctaggaaggttagcaagatccatattcgaaagaatggcaaagaatctgaatttggataaaactgaatccgaatccgacctatccgaactaaccggattcattcgggcataccggtacccgatatgctccgagttcagtaaggaacaccctgcatggggcatggactctcacacagacagctcagtcttatccatactgagttgtgaagaccaagttggtggacttcaagtcctcaaaaacgacaattggttaacggtcgaacctatctccaacactctaatagtcaaccttggagacatgatgcaggtacgtactataattaattaattaattaattaatattaattctaattttaataaaacgacgtcgtacgtgataatgatgatggttttgtgtttgttgctttgttgatatatgtatatataaaggcgattagtaacgatgagtacaagagtgtgaagcatagagtgaaagtgaacagatataaagagagaatttctatatgttacttcgtttttccaaaagaagggagtgttatacgaagcatcaactataagccttttacttatactgaatttcagaagcaagttcagcaagatgttaaggcccttggattcaaagttggcttagaccgtttcaagcatactactactgctgctgctgctattactgaggcgtgttaaacgttttcttttatataatatataatgtcgttttattgggtcctatatactgctactactactagtactttgtttgaattttgcttttgttttttttgaatgggtttgacttttactttaattctcagttatatgtgggttttattttgtactcgttgtagtattatataaataatattaattagacgttgttgtgtacgtgtgtgttgttaataacttttggtgtttgaggttagaagagtaattagacgttgttgtgtacgtgtgtgttaattaataacttttaaaaacgtatcgaatgccatttgtttttttttttttaataaaaaaagtcaagtctttaaaatctcattgcgcgtgagaagtatgagagagtcccaatacatatttattataacaaattaactaagtcaaatttcaaatgactattcttagatatatattatattaattttagcgagcgttttactggccaagactgtcctagagatatcatataattaaattttaaacattcacaacttatttaataatacagtgttgttgactactgctactgtctaatagaggaggccatatatggccatgtgcatgcaatataaccaaactataagaacctgttgtgttgtgtgattattgaaaaggaagtatctatatatatataaatataaatataagaattgttaaaagatatacaagtatctagtactcttctctttatcatatttcaattgtataattaagtatattgggttttatataaattacgaaaataaattttaaaaaatattagtaaaccagttataaaaattatgttaaacacgatgaacgatgagtgcccaataaaaaatactttatatatatctcatgatatgtcgtgcttcatggtgacatatacaagatttataaaatggatgattaaagaagaagattgaagaagattcatttggtcaaaagaattctctctccaataattttttttaaaaaaaaaatacatatgaatcatggaaaaactctttgaaagttcatattattgtccggtctccgaaatcttaattttttttttacatttataaactagaacatatatatataaatattaaagaaaacagatatattccatgcacaaagtttaaaaggtctcaaatacaaaagatgtatagaagcaggagcagagcgagagtcgaaattcaacgggttccaaactatattataaattaagtgaaaaataatttaaaatatattattaatattataattaaaattgaaatacaatacatctctcttagatatcatgcaaatcatatataagtgaatttatgctaatttttttttttctatatacactagcaaataatcacttaaaaatatattttttattttgttgtgaaatgtagtcttcactatatttatagcggaaaaagattgatctgtagtaactatagaatctggaagtgtagaataagagttactatactttatacacaaatttaaatttttttacttttttaatttttactaactactgacataaataatcagaaatagttgctaaaacagtaaaatcaagaagtttttcacttttttttaaatcaattttttgaaaaatattgtgaaatggtaatagtctaactagcaaatcaatcaaataaatattattaaagaatataaataaatactttaaaagaaaaatgacacttattattctttttataaaggaaggtaataattgtatatgattttgttagtgctactatagacaaaatatacaatttagtttcttcaaattttactttgactttttttaaggggtcaccatttaataattattaaaaaagttcaattacaatatactaaaatttaagacttaaaattacatatacataattgcatatatactaggggggccaattacaatatactaaagtttaagacttagaattacatatacataattacataaatgctaagggggccatggccactataaacaactatgtacgtccgcccctgtatagaagattaaacaacaaaattcaaagaaagtcccggccaccaaacataggaactatctaaaaccaaatgtcctttttgtaagagaaacaatgatattcttaaacctattacaatgagatagagaaatactttgaaaagatttccaaacattagaattatcactaagcacaataccaaactcattatagcgaacatcttgaccattgacaacaaaaaccatacaaagacaatcagagaaagttgtaacattcctgaaccccaacagaaggcaaagagaaagggcgccatgaaatagggtcattataacctccgctacatgaggctcaaaggtaccaataagtagaaaggcaccagaaaatagggcatttccatttagaccgcactacaagaaaaaagacttttactggcgcagttaattaacctcgtcggtaaaaggtggctagtttattccatcaagtaatacttatgccgacaatttattttgccggcataagatacttttgctggtgaagtaccttagtttcgccggcaaaaggtggtaaatcaaccaccaaaaagcagaaacttttggcagttcaattccacttttactgataaaactaagtgcaacgacaaaagtgaattaattattgggggtttaattttacttttgccgaagaataaatgtgtcagtaaaagtagtgaaaattttggcggtttaattctcgcgcagtaaaaatatgcccagaaaattaggtgaaaacttctaccggcaagtttaagtgtgctggaatttttttttacaaataatgaaacgatgcgtttcactatttgatttagggtaaaaattttgctgaataaaacccagcaccgaacccctttctccattttttttctctttctcttcttcttctccatttttctccattatcagtcaccaccaccaccattttcaccaccttcatcaccaccatgatctccctctctctctctctctcacccattttcctcaatctctctatctccctctaattttttttctgaaaaaaaaaattaaaacgaaacttaacataattccaatgacttaccaccaactacacctccattcatctttgcccgagcctttgacgtaattccaaggtgacctctaacttttatttgtgcataaatttgggtttaattttatttatatagatttggatttaattttgtatatatatatatatatagttagaatatatatgtatatgtatgtgtgtatatgtgaatgtatgtgtatttttgtgtataaatgtgtatgtaaatatatatgtttatatatgtatatatatgtgtaatgaccgctctagtaatgtggattagtaa

SEQ ID NO: 161882 - DNA, 1360 bp, Cannabis sativa
aaaagaaataacaataaaaataaaatggcctatgcctgcccaatttagcgaattatgttcatgataggtattcactagaacttgtttcctaaataatatgtaagaaaacacatgaatgatggaaaaggaaaactttcttttattattatttccgttcccgtcacagcccattaaagtttagtacacaaggtctaagggtaaagatattagaggatgaacaggaatcttttatgaatatggatcttcttagtatacaaaatataattatgaggtgttgaattaatctttaaacgttctgtggtcaaatgttaaggttctgaatagatttaaccttttggtatgtaagtacaagagaaaagactagaaacaacatatactgcttccattcaccaaaagtcagaaaattgcagtatttaaacaagctagcttttaaagagataccaagcaaataacatcggcaacaacagaaaataattctagacatcactcaggaaaaataaaaggattataaacactaagaccattatagagaggtcaagggtggagaggaaaaaaaacctccaatcgttggagatcagcaactgcaggagattccttcgcactggtcaagttatagatgcttaacaagttatcccagcttggaacagtcatgcttgtgacgactccatttacaacagctccagggtaaagaagggccttcaccactggaattggaaagatctcacttgcaatcaactgggaagatgttacatgcaatggtgttgtacacatcccagatctgcatggaatcctgtcaaatgaaacacataaaaatactaagtacacaacttgtacattaatatttaataaaggcttctccatttgtttcttctgtagttctcaaaatgctacttctgtagatgaaacaaacaagttcctactaacagcaaaagaagcaaaagaagtaaagaaacaagatcacataactcaattaaaaatatctcaattcgtgagataactcacttgttaaaaattctcctataagagatatgatcaaccagagagatccaagtcattttcagtaacaagatgttacacaaccactctaaaaagtcaatcccattggccatttccatcaggtagtcaaccatactcaaggaatgtgagaataacatttacttcaatcaaaattatcggaaattgaacataaatactgaaacaaattaacagagcaactattaaaaaaatgaagcacatcaataaaaaacaaattccaagatttaatgaatcaattgagacactaaaaattatagagcgaaaaaacaaatcttggaaatgacccaaatcgatatttattgataattaccatgcattgataatt

SEQ ID NO: 161883 - DNA, 1326 bp, Cannabis sativa
gagagagtgaccttggtatgttgttccattcgaacatgaagtggcacatcatcaaccttagtgaaacctcccaaaggatgaagcaataagattgggttattgtaccccatttccaataggcttcttcttgtgtcattcattaacagagcatgtccattatgaacaggattccttaattgaaaagcaaacactgcatcagcctcacgcctctcaaattcattcctcaattcttgaggagacaatctgtaatcatcaagcccatcattgtattttatgggctcaaacacttctaaatctccaccaataagccaatttccacctttactaatagcctcatcaacatatggcaatccatcaactgtggtcccccatgttcttgctattctctcttctttgttatgcttgtatatctcaattcctctaagtataccaatcaaaaccttgttgggacttaataaccccacatgggtggaacacccaattctttcttttgtctcatcatcaatggctaacacaataggaagtgacatattcaccactattgatgacccatttttggtggttttaagtgaattgaaatgcaagctttgtaaatactcattttctctcatgaaaccctttaatgggctagcccatccttcactgatcacatgagcccattccaaatcaatcttagtgagactcaccttgggtagagcctgagcttctaggacccttgaagccctttcaatctcagggaccacaagatttacaagctcacccccatcgggctcaataagagagctcttgataataggagatggagaatgcattgtatctgattatagagaataaatgaatagtaataaagtgatttggattaaataatgttggggttattattatagagagaatgagattcggtataactgagagagttgaggaggaatgagagactgagtccaccacctttgatccaaacacatccacacattattatttgctacctataaaatttgagtatgtagaggctctaatataaaatttgatgaagtgaattgtacatatatgtttattttgtggcttttttgtaccaattatattatattaaatatataatgtgattaatctatgtctgctgccaaatgaggactagtttttgtgtatgtataataagatctataaattaataaattcgttcaaaataatagaacgcacttcagaggaataatcctccaactgaagtacacgacctgtaaagaaataagaatttcttgccaagcaatgagccaacttatttgcagatcgttttacaaaacacaaattgtaaaggcataaaataccgct

SEQ ID NO: 161884 - DNA, 6497 bp, Cannabis sativa
gagattgttgtcctgctctggtttgggagataaagttagtagtgaagaaagaagctctgtggaaaaggaagagagggttttgcagacgcttgtaatgggtgacggaattggcagcaacggtggcagaattggcggtggagccggtgacgggagaggttctggcggcggagatggtgatgggtcgggattctttgagggtaataataatcgtgggagtaatagcactgatgtttattaccagaaaatgattgaagccaacccaggaaatgggctcttacttggaaactatgccaagtttttgaaagaggtaaagattcagtttttgtggtaaagattcaatttttaagctctgtggattgataatatatgaaaaaacaggttcgaggagactatgctaaagcagaagagtactgtggcagagcaatattggctaatcctggtgatgcagagattctatccctttatgctgatctaatttggacaagccacaaagatgttgagagagctgagaattattttgaccaagctgtgaagtcttctccagatgattggtaagaattaataagaaggttttcttcttttatctttggttggagaaaacaaaaagagtaggactaattaattgatttatttgaatatttagttttagagtatatcaatgtacgtttggtctgcctacgtactatctttctttgtgttgtgttgtcttgttatttttgcagctatgttttggcttcatatgctcggtttctttgggatgctgaagatgaagatgaagaagaagaagaagaaaaaaaggaacatgatcatgggcattcatctccagccacttacttccatggagcccccccaataactgcatgagcatgatcttagtactcactattcacctggtcttgctcttaaactctttgcttacaacaaataatatagtaaaaacactatgacttgtacaatattaataagctcatagtaacataatataaatttatagatatataatatatgagatgtaacttttcggcttgtaatagttaaagacttgctgactatagtataataatatcataaactatgtaaaattattagtacttcctgttttaagttattcttcttgttttgttgtttggttcaattgaagttttgattcattagaacagctagagatgatgacttgagacttgtgtagtttccattttagaattaaattccaaatcaaaaaagcataactctgttttttatctcttgacaggtcatgaatctcaaccaagtattaaagatcattgtcttttttgacaggaatcaattaataataatattaatcttgaaagagatggttcaaaaattaaataaaatatccaacgataagaattgtgagtagtaggtgcatttgtggattatattgcagcaagatctatttcaattttctgtgtctacagataatctttgtttgtggtttgtgtagctttgtaacgaccatatctatatctatcaaactgccatagttatcacgttcctctttctcagaagataccatatgaaaagttaaatcaaaactttattcataagaaataattcaggttgctgtcgttttttttatgtggtttctctaagctaacaagtgaagcagaaacaaaaatcaagcacttctaaaaagaaaataaggctacttagggttcttctttaacttttcaagctattaaaaattatttctgaactattcatattattgtatttaaagacttctgtttaaaatggttcaattttactaacgggctacgtggatggaagattgggagccacaatttggtacataaatgatcgttgtgtaaggcgttcgtgaattggacggaaatccttgaattcaacactctcaatagttcgggaaaaatatttaacgacttgaaaaatttaagtgacgattcagtacatgtcaaaattcgtctgtgaggagagaaatcctaatgttaggcaaagaataaatataaaatgaaattcaaaaattgagcaagtttggaaaatctcattccttaagagattacaagtgttgttatgtacatctctataaaactcaaaatcagtcataatgaactagtctttggggtttggaaaatggtggtggaggcacctcagaaagaccttcaagcatttgaaccacttttgtcatagttggccttatatgcatctcatcttgaatacaccacaatgctgttttaataacattattcactctttgatcattttcatctatttctagccttgaatcaatgatttcttcaagtttttcttcctcaaacatcttaaatgcataagaagggaaatgggatttctctgaattatcatcctctgaatcatgattctttctcccactaatgatctcaagcaataccattccataactgtagacatcacttttttctgttatggcatagttagtgagccattccggagccaggtaccctcttgttcctctcagtgttgtaataacaaggctctgttctctgttcattagctttgccaaaccaaagtctgaaactttagctacaaaattatcatcaagcagaacattttctggctttatatcacaatgaataatcttcacttcacactcttcatgaagataagcaagaccctttgctgtccccaatgcaatgttgaatcttgtattccaatccaatacttgattgttgttgttgttgaaaatccatttatccaaagacccttttgccatgtactcataaacaagaagcctgtgaaacccttcagtgcagaagcctttgactttgaccaaatgaacatggtgaatactaccaatgatgctaacttcagctttaaactctttcttccaatgatcaatcacctcaagtttcttcacagccaattgtgtcccatctggaagaacacctaagtagactgaaccaaaccctccttggccaacttttctagtgaaattctcagttgccaaacaaagatcagaataagtaaaccgaacaggcatacccgaaagattgtcaaagaaatcatcatcatctgagccttcttgagcacaatcattttttagtctcttctttctcctgatgtacaagaatccagcataaaccatagaaaaaataacaaacatagtcgaaattataatgacaacaactattagtatgtggtcttcctctctttcctcgttttcttctctgttactcaatgacttaacataggaaatatagccatgactcttctcaccagaatgttggaaacttccaatctggtctaagagaaaacagtttcctgaactactttcatgaaacaatacaaggcaagaacaatctttgagacaagcttgtttacatgaattgagatcagttttcaaagagggtgtgacaaagtcaatagcaaaatagtcaacattatctcccacatatataagctccactgaatcattggaaagattacagcttgggagattctgaagtttacaattaaaccgagagctgagaagagaaggacactcacaccagttatcaacatggcacacatagtaaggatcacaaggctgtggaacactgcaccatccttctggtattttagtagcctcaaaagttgaggtttttcccttttgaagatttttgaatgaaatgatcccatcagaggttaaaacagcaacccaaaaagcagttttgtcagattggtttgagaaaataaattgccatagtaagtttccatttggatcataaaagttccatgaattggagacaagagttgcagaatgaaccacaccagtaacacttctatttgttttccttgtttcactttgtacagaccaataaatttgtggtgttggagaaaaccctgcatagagagccaaagtccctgatttgatttcaagaaagtgagacaaattgttgtgattaagagagcttttgagagtcattcctggtaagaattcttggccaggcaaaagggtatttgtgggatgactaaaactctgccaaatgactcttcctccatggtctccatccccaccaatcaccaccaaattaccagagtccctcaattccatggctatggcttcttttcccgttgtgtttgtagaccaaacgacaccgttcccacttgttaaaatgaggttaccatttatgtcaaagtcaaacttatcaaagtttgatattggtagatctctattagcaatccaaacaggctttgaactgtccttatgaataattgcaaggaagaaggatttggcatcagggacaggaaagaatcccaatccaaagacagagttgtttgatacgaggaataagccgtggttgtcgttccaatccatctgagatgtttggaaacctgggtagattttgtcaacatgttgtctaccaccaaaacatgatttgattacaaaaaagaagagtaacaaaaacttcatcatggctctaactcttaagttcacatatctgctatgcatgaaaaaattgcatgattagattacaacataaagcaaaagaaaatatatatggtgacttaaaacaaaagtaaaaggtgggaaaataggactgacctcatttcttatgttctgtttcattaactcatgggatttggaagagttgttttttgtttgccttaattttgatgagtaccaagtttaagattgtcaatggggaatctagatgaatcagagctgttcctctgaatatgtaacattttttttttttaattttaaaagaaaaaaattgagacagagaaagagaggacggtattaataaatagagtatgaattagttgatattaattaatctattctcaacactgtcatgactatggggtctttttttattgtatataaactataaattattataacgtgtaaagaacatgttgtagtagaaaacatgtccttgttcacatatcttagacataatacaacacgtttccatgtcattttattttttcgattattcttgtatttttctcaactcttttcatcttcatttgaaatgacaaaattcagggataaaataggattaaggtagaaatattgaccccaaataaatggactaatttggtaaatgtctccttttaattttttttttttttgaaaaattgtcaaatataataaattagatgataaaagttataagaatacttttatttcatgtcaattttttataatattttagatgattagtattgtatattatttattataattacaatgaataaatactacattattaaatatatatattttatacacaatattatttgatatatagtaacacaaaaaattaatctacacacctattaatattctttatttggaacttggaaattgaaatttattatagtatttattatttaatttaattttattgtatagattaaggctgcacatatatagagtattgttattttgtattagtattgtgtctaatattttttataagtgatactttatgattgattaataatattcttaaaatttattttattaaattatatgaaatttaatatttaattatattaataacaatataatacggactaagatgttaagcacgaagtactttttataatttagtctaaaatggtaattggtgaagctagtttgtgggggattaacgttatcatttgtaatagtgcacgatttgtctctttgcattatgatctaattaagtatatttagtcattggtttcatgtgcttttcgattgtggagatgctatgcaatcataacatattcttaactaatgattatgaaggaaattgaccacaacacaatttgattctaataacctataaaatccaaaatagaaagggaagaatatttctctaactctaagggttccactttagagtggtccgaaatccgaatccaacaataaaatattataagtatgtatcttttcaaggatttttttttttctttttctttattggatagaaatctttttaaggagttttgttcacgcactctcatatgccatataccatttatagattctatatggtatagactcattaattgacaaatttaattttttatgcttacaaatatttaatattttccccctaaatacataacatgtaatatttgtgggatatgacatattttataatatctttaaaatacccccatttacattatcccctatcccctctcttcttctctctttcttcatacctattagaccccaatcagggtccccatcggacccgtcgaacccctatttacagcacatgcattggaccctaatcgaggtccccatcagacccgttgaactcaaaagtttttccagtacatgcatcggacccccatcggacccgtcagacccaaaaactaaatttttttgcacatgcatcgaaccccatcagaccatcgtcttccccaaactgtaatttccccaaatcacagatctgaaccttggacattgttggtcaccgtttgggtctcctccgtgacgcggtgatgagggtcggaatggtgggtgtgggtctcggtcggggtggtcagtc

SEQ ID NO: 161885 - DNA, 5687 bp, Cannabis sativa
aataataataataataatgaagccgtttggtttttacagtgcctaactaaaatctttcaaatggataggttaaattttttgtagaaatggaaaaacctgagacatttcttgaaaaatttagacctcgtgatatttttatataatttctaaaaaattatgcaaaaactgagaacctttaaattttctttcgcattgacccctaaaaaccaacaaattctcatatagaaaatactgtcttaaggcagaaggaaataccatcactgacaaagccataatatgagacagtcatcccaaagtgaataacaccagtctgaatccactcaacagcaaaaacatcagtggcagtaagccctccctggaacaaacaaaaaaatacataatattttccaactgggtacaaggcaaatatcatatataaaatcttaaggaaaaaatattcaagactttttcacagcttaacaagtttaaagaaattcagacagatattatacctaactattcgtaattgtgtaaaaattatcactggaattaagcataatcattaaattacaattagaaaacccttaccaatttgtagtaaaagtgcacagtgcacaaggctcccatttacataataagcttcataaattaattcctaaccttatgaaaatatttataaagaatactaatggactaatatcatcctaaatcaactataatagaaacagacttcttgttcttgatattcaagtaaaagctattgatggtttacctacatttcaagaacatgtttattgccaattttagaagattttatttatttattaatttatttttgaacaagactttaactactaactaggaataatcaaaagttatcataggaattggctgtctggaagagtacttatcaagtgaggtagatctgccctcactacttgtgaaagacagagagaagtatatttaagtactaactaggattaatcaggaatacataataaaaataatgtaaagcctaagacttagcatcatccttattgtactcataattgtattatcaataattatataaacacatcattgtctatcagtagccacataaaagcatagcagtaagtaattacatagaaatgtagacttgtgcttgtatagctatccaactttaaagaataatccacactcaaggttatgatatatgataactgaaaacagtgaaatctaaatggacagaaagtaaattcaaaattaatagcttgtcttttttagctgaatggataccttaacaatagccattgcagcagaaattggatctctaactccaagaacagtccaaacaagtgaattatcagagccagcgggtataattccaattggtatagaaattccttctttctgattgtctctactgagtaaaccatttaaaacctgtgacagaaacactaagttcttgcagaaaagaaagaaaatagtgaaatgaaatctaatacaattcataacatcaaatcaaagaacaggtaaagtcggaacacatatagtataagactattcatgtgaaagctacagggtagaaaaggaaaagaggaacactgaattctaacttctaagaaacaaacacaaaagtataaagtttaagtttggcaaagtagggagatttgacaaagagtattcatgttattaaacttctataacacctcaagcacatttctctacagcgtacagtgtgtatctatcagtggtaaaatgtacgaattacagtctgtgtacctaagtggaaaaccacttgactgtgattaagaaacttagaaacatcaggaaacattatataagataacatgtttggtgaatataaaacgacgaatctaaatcaaaattttgaaattctcttaatgaaacagtaaagaataaatacattcttcctacatgaatggtaatcccacctgctccaaaagaaagtaatatctttcacaatacaataaataagttgatattaaaatatctttgaacaggtagtagaaactagcaataataaaaatatgagaagaatatgtttaagtatgtagactttgtctaagccaaagaatttgttaggccctaggactagtagggtgagctaggagatattaaaaaaaaacgggtatacttagtcattgtattacaaactatgggagcccttaggcccctttgatgcaaatagagttttactcaatacattgcatacccaattctttccatacttacatatgtatagagcctattctcactcacaaaaccatccccaatacaatgactcaaatgcccttgttatttaatatcttctagctcaccctattaatcctagggtttaactaaaattacagtggcttaaaagaaaacctatcatagaaaagaaacatagaatgaacgagaagacactgaatatcctacacttctttaaagaataagaaaactaaaagatttaaagcagcaaatggtttacctcattgatgattccatcacccccaacgcatatgatccctgagggtataaatggattaatggtgctaaatcacaaatcagatgtaatagatgaaaataagtcataaaacagtatagttagtaccatcaggacatctgctgatatcaacggtggatgcaagtgttctagcatgacctgcagatgttgttttgactacttccaatttgaaacctgcaagctgtcgcagtttacactttaatatgaaaatgaatatgaatatatgcataaaaataagtatgaaaaagctccacgtagagattttatatgattaagaaactacatgaaatttggaaggtaaagtaaggaaataaatataaaaaacttcctcagcaattataaagattaatcagaaaatgtaacaatagtcttcctgaagtcattgcaaggcttagttgtcaaacaattttagcattagtaggaataattaaggctttgacattgttaaactgtaaatctaccaataattgttttacaaattattagatgcaaacagctacatcaatttgcaaaaattttaataataacagaactgcatgaaggagtgacagagggccagaataaaattactagcctgccccttgtttttatgtccatgataaaattgtatatgtaattgatggcaatcaaagaaggagaaactgcccctttgctgatttaaggtgggatgggatagaggggaagcaataaaaaaaactaattaattacacttcatactgcatgcatggtaagtataagatgtattatcattaaaagaatccataactgttaataatctctttgattaaacatcacatgatgttagtgccatttaaaacacaactgactgatattactcccccttaaaaaagcaagggatagaaaattcaataaagacaatcagtgctaaattgccctgaaaataggaaaaaaaataatagttcctatggaaccttctcttctaacggaaattggccgtacccataagaagcagcccataaattagtaacttgctggagaagaaacatgtagacgaaatgcactttgatcataaagaacgtggtaatcaaagatatcaaaaatctgacaacaattacgctttcacaaataggtagacatgcaaatttctactgttgtgtcagttttttgggttttgtgagtttagctttacgtgctttgcctcagctggtctgttttgctttacttgttccttaatttaatacaatagagctcatttcttatcaaattaagaaaaggtagacatgcagaagtaggcatagcattggaatgtcataatttcatctcagcaagcaggaattggaagaaaccagaagaaaatgtcagtaaaccataccttaaatataggttcgacaatcttgtgaaaaaccttactagaccggccacgtccagatcgcgggtttaatatgacaagcatttttggtggactcttacatttgaaaatcaactctgtaggagtgtcaattggaattaattctgaagatgcttgcttttttgaagagagcaatggatggggcaagcactttacataacactgctgatctgcaaagcctccaacccattgaacagcctcatcaacactagaagccaagaagcgaaagtccttgcgtgctcttcgaggtttcataaaacaagaaaagccacaagcaccttttttaaaggggtaagagtgcacagtaaaatgtctcagacccacattgtatgaaatctgtgaaaaataaaaatgattaataacttgcctcttccaaagaacattcataaggcatatcacatagccatcacctcagttttataatatgtaggagatcttgattcttaccgagataacatcttccagagcaagcttgtgagaaccccatatcaaagctttgctggtaagcctagcattaacagcttcttggttagatatatcgctagaggagctttgtgtttgtgcctcagatgaagttgcatcaacattaacaggttttctcttatccaaaattagctttccagagaagacctcataacccaacaaattagacttttcatctccaccaccagcacctggtcctccaccaatgtcaatcctatgctcaaaagtattaagtttctcaggatcatcagtaggggtaggggcagtggcatcacctccccgcctcgaactcttcaccctgctacgcttctgcttctcagggaagacaatgggggaagagtgttggcctccagcagctgtagcaatctgagaacacaatcccagtcgccgaagagattgttgaggcacagtcactcgcaaagatggcaaattactattcctagaaccactcccactactctgcatatctctttatgttcttccccttttcttcttctcttgttatgaaaaatcttattctatccaaattcagttcacgaatcacataaaaaaggatcaagaaagactgaaaaccgccccaagcccaaagaacgaaaagaattacataacaaggttgaagaagagtactaccatcagctaaagaagaagacgaagacgatgatgatgatgatccaattccagttacccaattcttcaaatccaaaatgaaactcataaacaaagaaaaccagatcaaccaacctgcaaatacacacaattctctcacatttccaatctttactttcacaaaaatcatattacccacttcgaatcaaatccatccccaaaataattctcttccactcccaacaacgaaaacccaattaaaacccctcacaaaatcacacccatattcacaaaaacatgtataaattctctcaaatcaatttaagcaagaccacaagataaaagaaaagatcggatacccactccatccaaactgtattttcccccaaacaaaatgaagaagattaagaacagtaatgagaatgataatggagagaaggacgaaaaacttaccagctgagctcaaaaggggtttcgcagatcctaatcgttcccggatgatgatgatggtggtggtgagaagaggaaggaggaagaggtttttaggtttttttttttatttatttttattttcttaatctttttgttttaatttaaattgtaatgctgccaataagaaaaaaaaaatcaaaagtcgcacactgaaacctaaaaaaagctttaagagggacccatcgtcccctacctctctatttccaattttttttttattttatatatttatttaaatttaaattt

SEQ ID NO: 161886 - DNA, 4025 bp, Cannabis sativa
ttaaagatgggccttggaatgactttctcccgaatgttttgaggaggaatcttgctatgtaagccagccaaaggtgccccactaaggggctggccaacctggccgaccccccatgccattaggtgcaaagtctggctactcctactactagatctgtgtggcaggacttgtccgtcttcaggcagggaaaagtatgtcctcaatcatgaagaacatggttagacttttttcctgtagaccctacctaatttgtcgactagtctccctaggagaggatctttaattagatcctaacctatcctagtagttatctcattgaactgccttatcaggtcactagcttctctattacggtagtccagctccgcctgttgagattggaggatgtactcctagtcatcaatccatatcagtaattcacgtctttgttgtgcgaatgcattgcaaccaatagcgcgtgattctttagtttggccaacttggcatacaacttctctaagtcttaccaattcaaagttttctctaagtcttaccaattcaaagttttctctaagtccacatgaggctcaccaattactagtcaaccaattcctagctttatttctccagcataatattagggactagagttagtctcggtgcaaaggggttgctccacattaacaaaaccctctatacggggtgccaatggtggatctactctaggcagtagaggctagtcattgggatcaatcgtgttagtagggtcaactgaaacaattttgttggtcgagtttgttaggcctacccacttagtagggttaccagcattggctacatatgtgaagtttgtggaaactccaatggtgggtagaacacaaacatatggattagtagtcatggagtcttgaggaagacccaatgaggctaaagttgtagctgaatttttccttgttatagccatggtgattcattaaatcatagacaatgctctccatgaaagcaccaaattattgaccttaaatttggccaatcaataatgaagtcatatttattatcaagatcactacgtgtacaaaattagaataagtaaataaaaacgatacaatactttatagaggtttggcccccttagttagcaagtaacgacctactccccttttagttgtattgatatgagagataataccactaaggtgataagtgttgatagttctagagtggctctctatgtattacaatagtgagaatctgaggaagttctcaagtggatgagatgtgggagacttagtctctactacagtgttaatggcatgtagaagagaggctgagctatggttttgagttcttgaactcaagagcttaggaataacaacttaatagctttcaggtttagcctagtgctctttatataagagagagcatacataagatattagattaatatcccttagaattagaagatatcacttatttgttacacattaaataaagaagaaaataagtcattacttagccctaaagaataggtaaataactaaagttaaacccttatttttgtggattgtttaaggccaattcatagcaaaaaatgtgatcgaggttgaaagctacagaggcacaaaaagtgcctaccagaggagaagctagcccatctaccatttgttggaggctgaccagcctatgtcggcactagggccatcaaggggtggtaaggccagactctcttggttggccagtttgttgtctctttatcttgcttaagttcgtggacacttcgtcaactagtacgttgtgcatagtgacttgctcctcttactttcgatctctactccacatggcatcaatcttgcctatgtagacatgccacctcacgtggataataattagggtaacatatacgttttctagatgatgtgcttctttttgccatggcgatgtctgtctaatttatgctttaggggctacaattattttctcacacctctggtctcctcctgaataagtcaaaattcttagtttattgttgggagatggagccttcaaagatacaaagagtgatttctacttctagttatgtaaaaagtgagatgccattttagtgtttgggaataccaatatcttagcagaattctaaggttgattgtgagattttgctagaaaacatggtgcatcgtattagaacagaacatggatctccctgggagtattgcactcactaatatggtgttgatagccattcacacctaatggtcgcaaataatattacttccaaagacctaatgcataaagtaaattcaatctgctgatccttttcatgggaagtaatatcagaacaacttagatgaggaaaagttgcactgagtaaaatgttatattatttatataatataatatttagattaaataattaggtgtgaaaaaatattaattttgtcaaatagtaacaaataataggagcttacatagtttgaacataaataataaaaaggagttgcaaatcttgaaatgattataatgacaaattttgtaactcctaccaatattatcactcctaataaattacttaaagatgttactaattgtattttgatgtgaatgattaatagctattaaaaatatagttgttggagaattgatttattcatttataaggtgtataaatggttcaaaatcaaataggagtagttaagaacactttggagaagaattggataaaggtgagaaaattgtaactagtaactagttatagttttttcagcatacaagtgcatacattttttgaatctttgggagtctttctaacagcccaaaaactcctccaaataattcaattcatacaataaacgtctagtttattattggtaacatctaatggctttatggtggtactttatatttatatgggagtaaaactgtataaatagtcactattagttcacctatgatacatgtaggtaaaactactggttgtggttaagaccttgtgaggatatgttcatgcatagacacttggttgagcatataaggcttataaatccttaagaatacttctaaagtttccctaactgtccatgtgaggaaagaaatgacttttaggacaaaggtcgttgagccttagtcaacttattgagtgttattcttttttttcttctctaagtttcttgtaatcttaatgtagtacttttatttatattttgattattttaattgtaatcttcctattctctcttgtaattagaaaatttctaacaatctaaaagttattttaatggcatattatctttttcctaaaatatatcttaccatggagggtcatacaatcaaaaaagttatccatgaatcaagatcatgagaagaagaacattgtgtaagagatttgagctattcatgggtaagaataatgggtttatttgtgttaaagtattttaattaaaagtaatatgtttacatgttcatacgatgagatatgatattttggtagagattttttgagttatatatatgtgtattattatatataatgatatataatattataattgagtttataacatgttagtatatgtatatattgtaagagatatatattatataatatgtatatgtgagttatatatattgtatgttggcatttaatatatatataaatatatttgtgagattaaatataaagaaatagtgattcatatatatttgtatatatgatatattatgtgtatatcatatatattatcactagtagaaaattggactttaaatgcagtttttaagggctttcaatatctattttggcaaaattcactaccgatgttgttccaaccgacaccataagggggaagtattaaccaatgacatagagatcctatggcgttggtttttacgaaataacgcatgccatagtgtccctatactgtcggttattacagaataaccgatgccatagggtcttctgtagttttttttttctgaattttgtgtaaattataatttttattattaaaatcaaattttactttcataaatatatatatgggtgactattc

SEQ ID NO: 161887 - DNA, 5544 bp, Cannabis sativa
  modified_base (949)..(975): a, c, t, g, unknown or other
ctctctctctctctctctcatagggtggttggacagtgtaggaaggctctttatgaaaattttcatgttttactgttgatgacctgattagctatgagatctgagggctttgttgatgatcatatactcatttgaatggtcatgatttatttttcttgacagtattcttttgttgtatgacactagttaatcagatgtgttacagaagaacttgatttgaattatattcttttttataggatctagaagcttcttaactgtagctttcgcttttgtatttgtcagctactttgcaggagttaattggtgtgcatttcgggtcatgttaatattagctgctcaaatgtttgtcaaatccttttcttttttaaaccttgacattttgttgcaatcagctatatttactgctcccaccattatcatcataagccaccagtgccccatttgtttgatgttttggtacatactaatgtgtatgtcatcaccctcattactgttgttggtaatgactaatgatgatgatctccatcttcaggtggttttattgtatacctagcactggtgataagcatcaagttgatgtggtggaagatttttgcaataagatctgtagggcctttacattttaaagattatctatagggcctctaacactaaactcatttggagacaaaatggttttaattaaaaattgatggttaattttttatgctagtctataatatagttaatagttattgattcatatgagccataagagctatgagctatctttgttagttatatattaaaaccattgcccgatgatgaggaattttttaccttattgatgtgtgcattggttcctttttagcctccatcttttctgctcccaccatctttggtacacaccatctctaaaaggtgcttttgccgcaaatatcccttattattattactattattattnnnnnnnnnnnnnnnnnnnnnnnnnnnattattattattattattatgtggtggtggtggtggtgacgacgacgatgattatgatgattcttgtgtctattggatgtggtgaatgccaataatggtggttgaagtagtggtgtttaaaccttgaagatgtgattggttttccatgtacatgatatctctagttcttctctgagggcatatttatgtattgcgatggtttcttttatatatttatgggacttttttatggagtcaaatttcattactactgttttttagtacagtacatgtttttttgccctgtcatggaaaatttcatttgagatgcttatttctttgttttgcattgtaaccgtttacatctgtaacactctctctctctccacataatatttaaaccattgtaagtgctcttgtggctttgaatgaaaattctttggtataactgtttactggtattactggtatgctatactcttcttatgatgtaaaagttgtttgcattttgctccactaaaatatcaagcataggcaatggcaacactttatttttgtgaactgaaaatagctactctgtgatgggtttttttttttttaatattctagtcagcttcttgtaaatttgtaatctcagcttatccaattagctacgagatctgagggctctctttgatttggcaaatattcatatttgtttgtagatgttattttataatgatactacctgttaaacacatcggttattgaagtctgtaattggcatatttctaatggctttagtatttattgtcttggttacatcaaagtaggtaaatgcctgtcatggttttaaatttgattatgtaaatgcctgatgatgacattttgtttcaatgagtttgtatatttgatattccatctttctgctcctgctattgcagatattcaccatattccaccagacgtcctgtgtatgatgtttgcgtacatatgtgtgcggatatcattactcatcaatgttattatttttattgctgttgttgttgttgtgtttgtttttcttcttctttttcataagatggatgctgtgaatgaatgtctgtggtggtggttgtagtggtttggtgtagagtcatctggaagatgtgattgaaaataaatgagatctgagggctctgatattgttttcttttttggtgttttttcttttagttccctcatgttattgtaaactaacccataaaataaccagtttattctattttggctttctttccatgtttcgtattttcatttttttcttctgttttgaacatctcttgacttctctgaatttcaactttctatttcttacaaaattgtgttgtatatgctagttgttttgggaatatggttaactttgcttatgatatgttggcaccatagagttgacttatattttttttgggttagtgaaagtttgtttgtgctttatgatgggaactcctttaatgctttgatgtcattttttgccttcatcttttctgatcccagaaatgtctgttcacaccagcatgcagtgtttatcacagtaaaacatctataaattaagaactttgttactttgcagggtactttattcatcatttgactcaaacttttatgtgcctgatgatgacattgtgttgcaatgagttttaatttggatcgtccatctttctgccatcattgatattcaccatacgcctccaattgttgggaagcagttttgtggtaatgcattagccttattacatctgcgactctctctctctaaatatttatatgttggtctcaacattgttactatataatatatagaggttttcctctatatattgtactaaacatcttgatgtgtttctttaaatgaaaatacataattacttaaactaaacctttttattttaaagatctgagtttttctcattatatgttttttgccctgtgatggaaaaactcattttgggaaaagcagtttcatggtttttcataatgagctttggtaattctgccccctctctttccctctctctagttgtgatagctacattttagagcactcacaacattttctctgctcttatttcatatatatacaaaaataattatttctctctcatatggtggatggatggtacagcaaggctcataaattaatgaaaaattcccatgtcattctgttttaatgacatgattagcaatgagatctgagggctttagtagatgaataatatattctttgatattagtgttacccccttattttattttgtattctttttttggttgcctcaccagttaatcaaaggtgatattctagaaacctaagctttgagtaccttttttgaggacatctaatgattatcattcttattatttgctagaatttttcaacttcagcttggcttgtgcccgctcattgtttctttgatccacattttgacgattttattttagtgaatttaattgtgttgcattcttctttatatttggttgtgcttttgttctgctactaccatcattgatgctcactgtaagctagcaataccatgtagtttattgttgctgctgcttctactgctgttgttgataatctgcagcttacagttgtaccggtgtcagtgttggttgttattgtggtatcggtgttgagttgtttcggttgaaataaactcaataagtatatagcttaagaagtggaagtttttttatcacctttgatgttaaagtttgaaacatctttgatacggtacgtttcttttgggctgcatatagttgatgatattgtttctgttttttgccctgtgatggaaaaactcactgtgggaaacagtttcatggttttgcatcatgagtcttgttgcatctgtcctctctctccctctctctctctctctctctctctctctctaaggtgctgtttagcagtgtacccatataaatatatatatatatatatttctctctctctctctctctcacagagggtggctggacaatgtagcaaggctcataatgaaatttttcatgttttactgttaatgaccttattagctatgagatctgagggctgtgttgaatgataatataatcttttttatgtttaagatttattttccatgttattttaccatgttcttttgttgtttctacaattttgttaacagtagcttttggttttgtatttgattgttgaagttaattggtttgcattccagcttatatggactgcccaaatatttgtcaaatgctttttttttacctcacatcttgctgcagtcagccatatttactgctcccaccatcatcagtatcaccatatgccaccagtgccccatctatgtgatgttttggtacatatttatgtgtatatatctctagcctcattgcttttgttggtaatgatgatgatctccatcttcaggtttttgtggtaagcatctagatattgtagtgggagatttaacactatactccattggagacaaactggttttaatgaaaatcatgtttatctttatatgcttgtgtataagatagtcaatatttgatgttctttctcatcatttttcttaaaatatttttgtgattgttgttatttcatttaaatttgttgttatttttgtggttgcctgatgatgagaacctttttattgtattgatgtgtgcattgatttcattttagcctccatcttttctgctcccaccatctttggtacacaccgccatctctaaaaggtactttgtgtaaatatccctaattgttattattattattattattattttctcatgtggtggaggtggtggcggtgacaatgatgatgatgatgatgattcttgtgtctgttggatgtggtgaatgccaatgatggtggttgaagtggtggtgtttaaaccttgaagatgtgattggttttcaatgtacatgatatctctagttcttcttctctgagggcatatttatgtgttgggatagttcttttatatagctatggggtatttatactaagtcaaatttcattacatgttttacatggtcaaatttcattacatgttttacatgttttttagtacagtattgctaaaggttttactcttttggatattaaagtcttatattttgttttacaatgctcttttactgtgacaagtatctttttgttagattgtataattacattcttctcaagaagttgtttattatagacggtttcaatgtccaatgaattttttttaggcaaaaagttggatacatatctgaacttgcctgtaattgttgtatgagattgtttctaattacctgtatgtttctcttataatgaaattgttggatggattttgcttcattcaaattgtttctaattacttgcatgttattcttctctcttataatgaaaccatttgatgcattttgcttcattcaaatcaagcatgggcaatgacgacattgtattttttgtgaagattttatttcatataagtagacagaagtcttttctcgattgacctcttctccccaataatgtttcaatcgttgtccattgaccttgaattctctttcggacttttcatctttcaccacaa

SEQ ID NO: 161888 - DNA, 4356 bp, Cannabis sativa
tctctctctctctctctctcaggtttgaattcaaatgctcgaatgtgtaaaagtggtaaagtgtccttctttgcccttatttatacataaaggtggtgatatgagtgctccacaatcaatggcccatatttcatctcagaaaacacacatatgatctaacggtcggggagctggaaggcccgcatttaatacacttcattagaactgaggtattttcatcaaagatatttgcctcaatatttgcgctgacatcaattagtcgtcatcatcatatcctaagcatcacgcattttcctaatgcacatggaaattatggaccaaaaggacaaggacacgtaggtggcgctagctataatctaaaggtccccaaccatccacattctgaagcatagaagacaaaaatgtctcttccttttaaagctaatccacatgtccatggaaatctgaaaggaagactataagcctccgccactctcaagttccagaagcctgggtgtaaatactatttgtattttttaaagatgacacgtggcatttacaaagtgtaattagtctagaacggcctggagtaaagcccttccgagttcagacgaaagatgggcccaaacccatcgaaaacccatgaagcttgtctacgaagacgaagctcatctagatctggaaggcttccagccttcctgaagatagaataaatgaagccctcttgatgaacattaggatgcatccgaaaaatgaatgccaagaagcgccttcagaagcccttgtagggtgacgcgaatacgctctgacgccaggtcccacaaaatcagatattgtctcccatgtcagagtgtggtaaggtgcacaccaccaaaaagaatacctccattttatccaatggcgcctgcttgacatctttgtttataggagcaatggccacgcgacacttgtcccagactgcgttgtttccatctatatgaaaacctttgccccagaatccaaacaactgccagtggggtaaaagtcatgtatttcatgtattaaccctaatagtgggtctagtttgcacaaaatcctagtatgtcacgagtatgcccggatccatatcctagcctatgaatacccttttataccttcatgcaaaggggacgattcacttgacatcttttagggtttcttcttctctatgctagaaataccccagtgacaaaagtaagcaaagagttacggttcttgagcttataaaactctattgtaatacataaaagtcattcaacctaatacgttgactcatagactaggattaattaacactcgaatcgcgtaaaaatcctcatctccattctatatttacttatttaattttttaagctcttatttaaatcaattttcgaaaatttcagtaagcagttatatatggtacaaattactgtgataaatatttgtgttattataccaatgtcaataatatcataatcatattataatcatttaacaagatctcaagtaattaataatggtgaaaaaaaaactcgaatatgcaatttaggataaaattctaattcaactaggtggcacaacccaaaataacaaaatctctttttgggttagtgagtagctctatttacattcctaagctcaaatccttagtcaaatttagtagtcccaacctgcaaggaattatgcatattcattaaaaagtaagtatacgatgataatcattcaagggtgtcgtgttgctcagcatgctccatccataactcaaatgtttttttacggatgacagctacttattctatcaagcaacgactggcgctgctggtagtatctccactatgcttcgacaatttgaacaagcctctgaacaacaagttaatcattctaagtcttcgatatttttcagcccaaatactgatgtagcagtccgagcccaaatttgctccaatctccacatgaatgaagcccttaaaggcagtttgtaccttggtctttccaacactattggtcgcaataaaaatacagtgcttggttttatcaagaacaaaatcactacccgaatacatagttgggatggtaagtttctatcacaagcgggaaagaaattcccttaaaaacaatcattcaatcgcttcctacttatgcaatgagtgtatttcttctaccccttggtacttgcaacgaacttgagaaacttatggatagtttttggtggaagaaaaaaacaagtactagtcgtggcattatctggatgtcatgggatcgcttagcaactcccaaagatcaaggtggaatgggttttagacatcttcacgattttaatcttgccgtgcttgctaaataaggttggcgcgtgttctgtaattcagaatctcatgtgggccgtgtttataaagctaaatacttccccaatggtgattatctttcagcggaacttggtaataacccaagctttgtgtggcgtagcatttaggctgcccaagaccttgttcgtttaggtgcttcgcgtgttattggagatgggaaaactaccaacataattggtactccgtggctgccaaatcctgacaataaatttgtcaccagcactcatccttcattatataatcaaaaggtcagctccctcctgaaaactgatagtcgtgcttgggattctgaggtgattacggacctgtttgctactcatgatgccaacttgattctcggaatccccttgggaagtaatgttgagactaatttccggtcttggacagctgaacacaatggttttttcaccgtttaaactgcttattccttgctgtagcaggaaaaaccagcaacaccagcatcaaacaactctggtttttggcgaactctttggcatttaaagattccaccaaaagttttaaatttcttgtggcgtgcaatctctggaactcttcctacttgtatcaatcttgtaccaaagcatgttcaaattcctgctcaatgtcccgtgtgtaagtctcaccccgaaaccatacatcatgctctgatttcgtgtgagtttgttaaaagttgctgggctgtttttggcctgcctatcaacctagccgctgctgcatcttttagcagctggtttgatgatttgaaaaaaaatatgatgcaacttttacttaccgtgctggtatgctttgctgggcagtgtggaaagcttgcaacaatgtcgtttggaataaaaagttgtctacggcaaatgaagtttcactttcggcctctattacttttgaccattggagaaaagctcaagataaaaacgccctattatcgctgtcatttgaaaataatggcaatggggcagagctttggactaaaccagacttaaatcaagtcaaaattaatgtagatgttgtactatttcatcatgattctgcttatggcttaggtattgttgcaaggaatagcttaggctatcttatcgaggcaaagataacctacaaagggggcatatatccggctgaggttattgaggccgttgggattaaggaagcccttagttggatcaagaatatgggatggaactgtgtagagcttgaaacagatagcttgttaactgtccaagtcgtccgaagtgatcaacatatgtcttctacttttggcttaatcattcgggattgtcaaagtttgttgtcttccttacatggtgtgtagttacgttttattaaacgatcagcaaaccgagttgctcatgcagttgctagacaatctcgttttctccctgattgtagcattttggaaaataatgtttggcctgatttataggtccttttgtattcagaatgcgtttaattgaatgaagttgatatttcatcaaaaaaaaaagtatacgatgataaaaaaaatacaaataatcatttgcccacactttacgtttataccgtacatttaaatttaaaattttaatatactaaaaaagataaatgaattattttccccacgattattttcaattaatgaaatataactttcttatattaaatatgactatctaatagaaatggctagtttaactatatttttttatttttccattactaacatcgttagactaattaattaattattttttattttgaaaaaaataattttgaatatttaaatttaatttaaaagtatcaacaaaattaaataataatttttttatatacaaatcttaatttaaattagatgttaatttaattaattaatcatactttataggctaattaggatttttacccattaaactttgacatgtaccaaatcatgcaccctgaatttttctggctgttaaacattcctcttgaactattgagattgttagatttaagaatttttgtttaattttattcaattttactatttcagtgattgtttatgtac

SEQ ID NO: 161889 - DNA, 1975 bp, Cannabis sativa
aaaaaattgcaactatgctaaaaatacttttaaataaggtttaactattgtttagatattataataaaatctctctttctccctctctctttttatttttaataaataataaaatctcttaaattaaaataattataacattttcttccaacgatgttgaagtaaaaaatgttgaatttaaaggttgagaaactaagtgcaaaaggatgaatagtttggaaattttagttggatggaaaagtaaaaaggactaatagatgcagtatttttaagaagttggggatttaaatggtaaagttttgagattagggatccaattccaaggttaaaagacataataaattggagatttttgctgcaaataagcccctgttctatgaggtcaacaagttgaaggatatagctttatcacttaactgtttacttgtattataatgctctattgctttgttcttgatataagtttaaacaccttcctttctatgttgagactttttttttttaaatcattatgtgtatacaacagagaaataaagtgtatcataattgctgcaggaaaaaaaagtgttatagtttcaagtataaagtttgttgctgttatctacaggcacggttcttcgcgccggagaatgccaaggtacttgtggatcgctattccagaagatgaggcaccattgtccattgctgcttctgtctgtctgcgtaaagataatggtatggcactgagtctcactattacatatcttcgaagaagtatgtttcatacttgtgcagttttgaccatgaaatttcagatgaaagttcttcaagagaccattaacaatattagaaaaaattctattaatgacaaggttgaaagtggttttttgttattgtctcttgaagtataagctgtcaatgaagagtaacattaaattttaattagtagataagggaatgtataaattgttttattagaatcagcttgtatagtttcataactaagtttaaattctttgtttggatgtagttagagtatacatttcattgtcatgcttggcaagtcgcacagtaattagacagtaaataaatactgtgataattaatatttaaaattaataactgttgaataaattgctagcaaaaataaaagaggaacgattttaccgaatgaaaaattctaggttgagtcgcggattcggtcgctctttttaagacgtttgcggcactgcccaggagtgtgcaagcagtcgaaatttgccaagataaaacagtccagtcgtactgtatcggaatcccactgtactgtagagtaccgtcgaatacacccaaagatttttgatatcgcagatggaattttaatttttatgaaaattgtatttttttttcgatataaaaaagatgtattcttcccatcagtttcaatcgcattatatagacgaatagattgaaaaatcataatggaaagaagaacattttttgaatcgtggggtatagttggttgaacgtgtcccattaattgatacgactaagtaatcaattccaattaactacgtttttcaattaaattaaaaataaaaataattattttattaaataatttttttgtaaaaataatagagtgccacaccacaccaactaacccaacctggctcagatcggacggtgcacgtgtgtggtgggtcaagtgtgtgagtcctcacccattcgcataaaactggataccccttgggacccaaatccaaatgctaaagttgcattctatatacccttgtaaataagggttcatatcccatgcgggactctttccacttcacacacactagaacccatatattttttgttaaaagattcatcaaagatccaacaattccctacttaaatttttttaagaaaataattccatctaccagtatcattcaatagtaagattgagcataaacaaaagtatttttcgatttgaacctttgcgtagtaaatacgatttagattttac

SEQ ID NO: 161890 - DNA, 3543 bp, Cannabis sativa
aaaaaaaaattgatttatgagatgagatgatgatgatgtacttaccaaaagtagaagttgattcaatagatatgtgatgccattgtgagacagtagagactctaatggtgattagtccttctccatcactttgaccactttctctcctttgaacaagcataccacctggcctgagctcccatttgatttcaccaatattagtattattattatttgctcccaagtccttttgactattgttattactatcagctcctcctcctcctttaagtgccttactgctaagcttagagctgcttcttccaaagtacttctttgttgacctcaacttgatcatctttgcctttacttttcttttctctttctcttttgataatctttttctgtttgttgaaatttctaagggagaaggaaatgttgggtagtttatataagggagttgagagcatgcaattgggataggacaagccgcacaggggtgtatatgtgtattattattattatgtatgtatgtagtaattaaacaatataaataaaattgaataggagtgatattatagtaaatggccaatgaaatgatgacagatggggatggtggtggggacaatgctaattttatggggagctatagcacatggggggagtgagaagaagtgagaataatgggtgctttggtttagaacacgcttgcttaatcaacgggccaaacacttaacatcaattggtcgcctactcattctctaaacaatatctacactttttgtaaaataagtacatagtagtattcagaagagaatcttactattcttatcggacccatagaaggtaatcactttaaaaaaaaaaatgaaaattgttagttacgatcagggctgactctagagataggcggacttcccaaaataaaaaataataaaaaaatattattagatttttatttaaagaaaattaagtgtattcatgtaaacaacaaatattcataatttagttagttaaagtatatgacatattatacaatgttatgagttcgaattccataacactttgatttgtcttagacccataaattttcagggccgaccctgattacgatatattagttttagtgtaatagttaagttagattagatatagataaaaattatgttggatttaaatcatcacaagttcatttttttatttttaagtttagttttgctcttattttttaaaaaataaaattacgttcacttcactttaaattttaaataccatactacttaatagtaatgctctactttattgtaaagaattactaaatagcaccaccaattaaatatttttcaattattttcaatgtcatttcatagtgatattagaccccattggtactaataaataatagagattagaacactgtaagcttctttattttactctttaaattacctttttaattttttttttattttacctcacttttacaatacactatacatttaactaagcattattcattgggttaaaaaatatgtataataactaagtcttagctcacttgatagaagctcaaaattacaacttttttatttatatataatttaaagattgagttattttagctcatctattgaaagtactttagtagtagcattgcagtagtgtttcaaattaagattgatgttaaaaggcacgcatggtgcttccatactactaatatatataatttaatatcaagcctcatataatttaatttaataatattcattatagaaaattgtgaattaactatttatatagggccacctcaaacgatattcaacagtgtttaataataatgctcttaatttatattaaattcccatatataccatgtgtttatttttatattattattgaaaatactaattattaggtacttgtaacaccatgaatatttcatagcattgctcaatcttataaaacatcaataatttattaaattttatacgggttttttaatatattttgtaaaataatattcatttagtaacatattgagttatttcacaaattttgaaaagtttttttcttataaattattattaaaataatattagaaaatatttattttagcgaagaaaaaatttgtaaaactaatatcatcatacttatttttgttactaaaaaaattatttataactattagccacaaacacaaactattttacgagtttttaaaagtgcattagcaaaaattaataggcttttataataaaaaaaatatttagtcacgaaatacttgaattatatattaaatggtaactaaaactatatcactttattacaacttggtaattggattatatatttgtgacttaaaagttgtttagtaaataattccagtgaaataatatcattttataagataacattaattaaaagcaaaattatgtcaatttttccaaacttcccaataataaatatttatgtgtgaataatgtgatccattaatttttcattcaaagtgtttaattgggtattaggagtacaggtttggaaactgtcattataaagtcatgatctcatggtcattgttttctttttcaactcactttccgatactactaagctttcaaattgactatttttatgagtagttattttccaaaacatcaataacatatattttttgtaaatgtaatcaattatcacaccaaaacttattataagtttaagttattaagaaattggttatgtatataccaagattggattgcatgtgatggaagaaaaattgagagttttatgtaatataatatagttcactctacctaatttgattacgccaaatgggtgtctaaattatgttttcttgcagcaaaagagtgatataaatatgtatatctcaaactagaatatatgtttataccataagatcaaagcttattttgtccgtacgtgcagaattttatgtgtatttgataatgttttattaggtttagttaggtggagagtttataactataaagtttaattatttttctttatttttgagtttactttttgatgtatatatagacatatattattatgggtggttagcctaatgtgtagggtatcaacccatgtggaagatgtttagagaaaaatactatagtctccactcttgatcaaagtctcaatcatgtccaatggttcaccgtacctaatattatattaattatttttaaataaatatgtatgtatggttaaactcttcctaaattaaaggataagaactcaataaggcaccactttgctttccatcaaaggtctaattctacacgtaattcagatttttatataactttatattaattgagaagagcttatccaaatattgatgtctcttgactaggtgttgtcgagctgataatatatgtacacccaaaaaaaaaattaaaaattatattaagtaagcaattactaatatatatcctgtataaaaaaatagttttttttttattaaatcaagcttttttttttttttttcaataaaagtaaactttcactaaccgaaaaaatcaaccagtacaatattac

SEQ ID NO: 161891 - DNA, 2325 bp, Cannabis sativa
agggcacaaaacccaacaatttgaactttattgcagaagtggtggaattagcttacaagatgctagtttgtgaagattgtaaacgggtttgtgatggagaaagggagattcgatttctgctggtacaaaaagttgggcgaaaaaggtggaagatgatcttgagacagaacaaattcatgtctcatctaaggaacactgtaatcgttcaagaaagagaagatgttccatcgggatccaaagttgttgttcactgagccaatcattaggaatgacattaagatagctcaagtggatgtagaagaagttgaagaaaatactgccttttggaatagtcctgttatatgtatggtcctagtggccaatctgccaattttagtgtttgacgggttcataaaatgtgtttggggacatcttgggatattgtaggttgccaaaatgactatggggttagtcatggtgaaggccttggttgactgacttgaattcagtgaagttgattcactggaggcggggtcatccaatttgacagaaaacctatcattgtgaggccttggttgactgacttgaatgcagtgaagttgattcactcagttctgttatggatcaggttgcacgaccttgggctccattactgggggaataggactcttagtgcgttggtcagcacaatagaaagacctattatggttgatcaacatagtaaggagcatacaaggatatagtatgctagagttcttatagaaatggagattagtgatgctgctccttgcttcataccttaattaaatgaacatggacaattaatggtacaaaatattgactatgagtggctaccactcaagtgtaaaagctgctcaaattatgggcgcaccatggctgagtttcaaaaaggtgatactaggaagaaggaagaaggagaaatcctgaagaaagctgatataagaggaaagaaactagcagctgcttctttgcaagacaaaaaaccagtagaggacggaaaatagtaaaacaaagaatggattatcctaaagaaagcaacccctttgaaagcattaaatccctatgagaagatgaaaactaaagttgtagctgatgcataccaggataacaattccttcattgccttacaagaagcatgggatttgggtaatattcttcttaatcatggatagttgcaatatagattttttgcaatgtgaggggtattaataataaagataaataggatgctatctttgagttttgttcaaaaaataaggttggagttggagctttgttagaaaccaagttgaagggaaataaagttggagaaatgatagaagaaaattttctaactaggattacacactaatcctcctattgaggtatgtattgttatagtgtcgaggaaaagctatgttcaagttattgttatagaggacaatgcacaatccacccactattttattaaaatggctggccaaattaatgtttgctacattacttttgtttatggattcaatactagtgaggagaggaaacaactatggagtaagcttttcaacatgaaatttccagttaaaccgtggctaatagcaggtgactttaatgatctttttgagctagaggataaagaaggaggcaatgctatgtctataaatcatatccaggatgctaataattggcttgctcagagccatttagagccatttaggatctaatccacgattgaccatgtctttgtgaatgatgactagaatgatattttccctacagctaaagctcactttagttgggaaaaaatttcagatcactgtgcttgtgttatattggttacggtgaatgagaaaattagggttaaacattttcaataattcaatttttgggctaatcacccagagttcaagggagtggttatggaaaattggaaaaaacctttgagatgcacaggaatgaaggccttacacaacaaatttatgccacttaaacattgtttcaagaggttcaacaaacaagtcataggtgatgtagggaaagcttatgagacagcaaaatatgttctcacttcggctaagatgaaagctcaagcaaatctgcgaaattagatgttaaaaaagcaggaaaaagaggcaccagtgagattcagcttgcaagaaaacatgtaccatacttttcctacgacaacgaagcaaggtgacttggcttagtaagggagatgacaaaaatttatattttcaggcattcttgaagaaaagaagattggagaacaagattatctcctacatcaattatcaaggggagagtattgataactgttggaatttattttaccaggatcttaaatct

SEQ ID NO: 161892 - DNA, 2945 bp, Cannabis sativa
taatactgaaagtgtttaagttttgaacccaaactttctaacttttctaggtatgaaagtgtgtaaaactaatgagaaagaactagtcatggaacctgcattgagatgggctggaaatcctaacattagttttacaataaagttgttatctctaagacttgaaattcaggttaacaaacattcttaaagggagcattgttaatgtattcttttatgtatatgaaaaagataactcattgactaagcttcagctggtggatttgcaaatatttgctgcaccgcggataactttgaagcctttggttcccacctttccttgtttcgctaatgttgtgatctcattgatggagaaggttagtagaagtagaactttatgacaccaaagggtacttttattctaatgaaattaaccatgtaaaacatcttagttaagtatgtgaaactgacccagatgtcatgcagcctcatgtagattttggcttgaaaatattgggaggggatatcatgtcaatacctggcctctatcattttattcaggtgcttcaccagtaatttgtttagatagatgaaatttgaatcaactttcaactaattgttttttggtgatttcaggatactattaagaaacaagttgcaaccctctacctatggcctcaaactcttgtaatacctattcttgatgcttcctcgtaagtgttaagtgctttagttacatggtggatatcacttgtgttgatctctcttctctcatgagaacacattgaaattttattcttactgttcttccaataatagagtggctgtacagaggcctgtgggaatcctacatgtgacggttgttcgggcaatgaagcttttgaaaatggacattttgggtacttctgatccttatgttaaactcagctttagtggagagaggctttccgaaaagaaaactactgtgaagatgaaaaacttgaaccctgtgtggaatgaaaagttcaggtttattgttaaggatccacaacttcaagctctagagttacaagtatatgattgggacaaggttatttttctcttacactggttttagtttagacactaatcaactcaagttcactacttgcattactaaagtaaaatcaatcatttaaatgtgtttcaaaatcaaaggttggtgggcatgacaggctaggaatgcagttaattccattgagtctagtaaggcctaatgagacaaagagattcacattagatttagtgaagaatacaaatgtgaacgatcctcagaacaagaagcaaagaggccagcttgtggtggagcttacctatgttccttttagaacaaatagcatcacaattagtgacaatggagatgaatctaatgaaaacatgagaaataggaaaaagagtagactgaatgaagggtcatatggtagagcaggtttactattggtaactatacaaggagctgaggatgtagagggtgagcatcacaataatccatatgctttgattcactttaaaggcgaaaaacgaaaaacaaaggtcaactttttcctcctcatagttgttatcaataccatagtttgaagttgttgaaatcattttattcactttgtgttttcagatgatgaagaaaactcacaaccccacttggggtgaagaattccaattcatgcttgaagagcctcccttagatgataagatccacattgaggtgttgagcaaaagaacaggccttcattttcgatcaaaggtatatatataatgttacaaatcttcttatttttgaccttgaatatatataatgttaaacaatttttacttgtaggaatcgttggggtacgtggaaattaatcttagtgatgttcttcacaatgagaggatcaacaacaagtaccacttgaacgattccaaaaatgggaaaatacatgtggaactaagttggataacggcttaaatgatgttagggaatttactctacactaattaataataactctataagaaaaattgaatagggcttttgttagctgattcattgctcttaatttgtttccatattttagtttgagaattgcaccaaccaagtttcacattccattcaaatcttaacaatggaacttggcaaagtgcgagacaaacaaaagtacataaataaggaccagccgtttcccctaattgaaataataaataataataaatgattattatcaatcaatcttgttttccacgagggagtcaaatatcgacattgattgtgacttagttaggaaaacactttaagctaaaatttgaagatgtttcctctcacaaccaactcattaacatttttattaggaatattggcggcaaaactacataaactttatagtttgtaacacttaactccataaacctattttttgacgtaaaacttattgaattcctattctattttagtttttacacttctatctaaaagcttctattaagtgtcacggtaagctgtccacgtgtgcacaaataatattggaactttttcgtggtccattgaaataaaaataaaacaataataaaagtatattttttattcttttcttcttgttttgaaataaccttaattccatctttgaaactcgtatggtccattgaagctcactgtgactgtatcaaagccaagaagcttcaacaagttactagtggagaaaataggttttactgtaaaaaaaaaaactaaaattaatggggagaattaaatgttacaaaccataaaatttaagtggttttattgttaatatctttttttattaaaacactagcagcttaagggagaatatggtcttgttaaacatttacagtagagagtattaaataagggataattatataaggtactattttttataaaaaaaaattatatttttaagtttaaagaattttttttatatttttacagcttttcatagaaacaacacgaaaac

SEQ ID NO: 161893 - DNA, 1875 bp, Cannabis sativa
atgtttttaacctttgtgttcttacaatggtattctttcgcttgaatttgcatgcgttgatgaatgctttaaccaattgtgccaatgcaatctttgtttgttctgcttttgccaatagacccaatactttgtggaaggacttgcatttaaagctggaacttcatttctgtttaatctcagtgtgatgatagcatctttcagttatgattttctaattatgttgtgcttcattgttggtcattgattcttttttagaaaatattgatgtgttttctctttcagcttttctttccggcagcagtttggataacgctccaatcaaattagatcatttgataataagcgggcataattccagctcaatgacaaaattcctaaagcagttggtttgaaaaaagtcctacgtgtttggatgttatagaggttcgaaacggaaggtaaatggtttttaagatttatggacttgaatggaacagtttaagaagaaacaaatcataaatagagatacatcaatgaacacgaacttacttttgggtgctataagaggtcattattgtatcagtggctgtcaataggccttagtaatctgcttttaaattttgaaaaatgttgaaagagatcatcatactaataaagtgggtgtaatagaacttaacccacatgtacttctatcagttgcggtattagttgtggtgctcattaccactagtcttgtttaatataaatgatgtgtttttagttttttccattttgtaatcaatattatttgattttgggatgttgtggacttgtggtgagttttccaattttaacagtgaaatgactacaacggtgaagctcagtctatgtgccgacatttaaatactaatttgagcattagttatggctcaactaaggcatgttgccgatgaataaaaagttaagcatggagttcttttgttttgttttctttttttggtcttaaaatcaatttctaacaggatgtggacttttgatatacaattatttaaagcctagtatagttacaatatgataagttaacaatatcaaggaggaaaaggaatgcaaacatacaacaagtaatagtatgaaatggttaattaatatagccgtttcattcatctttgtaattgctatagttattagcatttgtaatggtctgtaataatgatggttattagtaacacttacttacctaccatcttataagtaaatgaatctaatactttttgaagaaaaggacaataatgagaaaaattgagtatttttgttaaaataaacgtagactcaaacgtatgtataatttttttctgctgctttgattatttatttgcaaattgcaattgcattatctatacgactagttactattctaatgaatgcttgcttgttctttgatgttaccaaattgttccatcaagacagtgcgctatctttatccattttttttttttttgctgaaatctatctttgtccaaaattgcattaaacaaataatacagtttttctttcatagctacaaaaaccaactatgcgtttctgcttagatattaaaaaatatctgtgtttctaaattaaccatgttagtatgttactacaaagagggtcgatcacatctcaaaattgacaacatattaaattcatttttttttagaaaactattatttgttttttatttatttatttttctataaaacgaaccttttctcttaatatgatttagatgaattgatcttttatcattgttgtatattaaagtctgattattattactgaagagtatttaaaaaaattgatttattctttcaaaaaacaaaatttagaatttgtcttataaaaaaaaaataaaagtttttttttttgagtttttttttt

SEQ ID NO: 161894 - DNA, 3173 bp, Cannabis sativa
aaataaaattactatattaattattaactcagaattagacttgataattaatacttcaaaaataattatgtaataaataatacttggaatggaatgactaaaataagtctgtgtataaatatttgcaagaatttgatatacaaaatttttcgtccttttctcaatatttttactgctatttataaaagtagaataacagttatttagtttgatctaaagggtagttataccacatgagtttctccatgttttacatatttatacataggcagaaaatgttaataatcgcttgtgttttaaaaatacaaatgaaccgttgctttggacaatgtagttgagcaaaacttgtttcgtattcttctcagaaagcttatcaaaagaaacatagattaatttaagcttcttcaaagcaaacctgacagtcaaattagtattaaccattttttacctgagggagacacatagttttctttttttcttaaagaaaggcatctcgagcatagtgtagttccaaagcattctttaagcaaaggatgttattggagactagtcaaatatattcaatattcgaggcgaagagttgtcttctttgaagaagaaaattttgaacttctctcgatttttctcgttggttgattaaattagatcttagcatagttctgctaatattttctgaagtgtctttttaggattgtcatgtgacattgtttcttcattatgcaactaggtgagttctattttatctttgatttattgctttgtacacatgttgtaatgtcctagtagttaagacatgttatggtattgtcttaattactgtggttacctttgctaatcaaagagttttaatataaaaatgttttcaataaaatttttgtaataattataactttactgaacatgcatcatatttgtaatacatttagaatctgagatcccaaaatctatttataaaatatacataatatatataacatcaaaagtattgtctaatcacataactaaaaactatgccagcggtgtctcaaagattgcaaccctccaagcttagataattagatgtgtacaatcttcaccaaactctgctctcaccgtagttcagccttggctttacctttacctacccatagaaatatatttgtgagccgacaaactcagtaaaaaaacataacataatacaacatatatctaacttgtaattgagcacatatatactcaattaccataagtctactaactgcatctaacgtgtatttgagatccgtaagttcatacctatagcatgattaataataataccaacatctaagatccaaacgttcataccaagctctggtctcactgttgctcatctttggctttgtctttacatacacatagaagcatatatgtgagtcaatagactctaaaaaatataaaataatacaacatatatttgacttgtaattaagtacctatacactcaattactataagtctactaactgcatctaacgtgtatctgagatccaaacattcatacctataacatgattaaaaataatatcaacctaattccagtactctagtcatactgatattgataacattaatccatactattcactattgcctaacatattagatatcattatcttggcacaactctatgtacacacatacaactatctttaatatgctagctatatgaaaatatcatacatatattactaaacatatgtatatgtgcatcttaatatttttcttacctcaattcctattttaggtatgttagtcaacctgagtaaaaactcctatcaatgagtgatggccctaattaatattagcgttaaacatggtgagtgtttattctaaaatactttctaatacccatatctaaaatctaattttttttaccaaattatgtgatgaaaataccttaaaaaatatatattggctctaatttattttcctttctctagagacttctataagctatttaaccatatatagaacgtctaaaacaaacatcggagtaaaaagttacgaccacaataaaaaaaaaaattgggctttcccaaaaactacctatttactcagatttttagaaactgattaatgagaacttaaggaaataaaaaatattaaataatagataaatatatattttacgtggtttaggcgttaatgacctttagtccacgagtcagtagtattagccttctttggcaaatgtttaagtattacaaatgtttaccccactagggttccttactcaacacgcaagtgaagttgttaaacactaccagtccatctaaccgttaatttggtaggtagctctcccattgtaaggtgcataattgatgcaggttgtcacgtaaggatatggacacatgtcattcaaatatttctcctttaaaagaaatatctcaaacaagtcgttggacaattagtactacaaaggcacgtacgcgcataaccatggtctgatgcaggggacaagatttgacttggtgtcaaatgaggtgtaactatcaagtgtatcttcgggttaggtcgcatgaggcttctaggaagtgcaactcggaacctcttggaatggccaattcctaagaaccccctggaaggcctatgcctcgcgtatgcctccaaataccagaagcattaggttacaacttcaaggatcaattcctccttcacaacagatgtgatctcccaaatactttgatgctttccttgatcctatcttaaaagtaagaggaacccaagatattcccatacgatctgacatggcaccctttagctacttccacatataacctatccacgtgtagggataagatttaccccccaagcactcaaaactttagagtgttgggagcttgctatcttcccccagaggttggttttgtatctttgtcttgcagacaggttattaagaaactaaaggggagagtccattatagctattctgggttatatcctggaggactggctaaagtatgaggtttggttagcggagccgtgaggtccacgctcttcatcttagacgcgtcccttaggaaggaaaaggatgactatttttgaaaagacgcttgtcctcaggggcattggggatgctgttgtgaaataatgaataataaatactttattctcttttttagatgtattaaatatcaacctttcgtatcccc

SEQ ID NO: 161895 - DNA, 1794 bp, Cannabis sativa
  modified_base (1735)..(1743): a, c, t, g, unknown or other
tttttgtatttggaattctccacatagtttcagtctcatcagctttcttcgatttgccggcctttcggagagaaaaagaagaagttccagactccccaactaaagattttttacatgtaaaagacctaccaaatctaactcctaaagcagcggctccgtcgtcctataacaagtatgagtatcatgatgatgatgagaattcttcacctcatgatgatcacgataaaccattggagggtatcttttccctacctcttccctctttactctctgatcaccacaccaaccaatccaatgatgaagacaaagacaaagacaaagacagagattacaacgatgaagattattattccctttccaataactactactaccagagttgtccagatttggaatatattgtcaatagcaaagtacaacaatgggttgccaaagataacacccttgctcctgcactcctcaggttgcacttccatgactgtgcggtccgggtaagctagattttatcaattatattaattgaatttgaataatatcttaatgttgacaaaatctttttctttttggatgggttatataatataaatatagggatgcgatggctcagttttgctaaatgacgatggaagcgagaggacagcagcagtaagcaaaacactcagaggatttgaagtgatcgacgatataaaatcagaggtggagaagaattgtccgaaaacggtgtcgtgtgctgatattctgactgcagctgcaagagatgccacggttcaagctggaggtcaatactgggcagttgactttggtagaaaggatggtctggtttccattgctgaagaagctgagtcgatggtcccaatgggtcgggaaagcatcacggatttgatcatgtttttccagtctcttgggttagatattgatgacttggtttccctctctggtaagcaaatttacttattactatagtactaatttcattcattcaagcatttgaattattacattattgagcgatcgagagtgttttaatttaacaataattaaacatttcaggggcgcacaccattggaaggtcatcttgtgagtcgttacaacaccgtctgttcaactacagtcagacccagccattagatgggaccattaattcaaagttcgctgattacttgcagagaaaatgtagatggtcgaccgatcactacgtacagctagactcacagactccctctaaattcgacaatgaatacttttttaacataaagtataggaaaacaggagtcttatcaactgatcagctactcgcttccgattcaagaacttcatacattgtcgagactttggctaacaacgatggctcttacactttcaaccaacaatttcagaaatccatgaagaagcttggcaatgttcaagtccttactggtcgcaaccaaggcgaaatccgagcaaattgcaattttgtcaactctgctccttattgaccattgttctcttgacaaatgtgaaatatttaatttgtataactttgttaaacgtttcattttaattttcgtcattttaaatgatcatttgaaatattctccatcgttttgatactatatagaaaataatcttgatgatgaagctccctactataatttcttgaaaaatgtaagggatatttgtgagataaatgtctcatttatagattccatatacttatatactactagcaaaaattacgtgcgaggcacgtatactnnnnnnnnngctagtttttttctatgttatttaaaagtgatacaataaaaaattaaagaa

SEQ ID NO: 161896 - DNA, 3891 bp, Cannabis sativa
agagagagagagagagagacattttgtttgaaacatgttcaatgaacaaagaaaatgaacaaagaaaaaataaatgaaaaagtaactcaaacgattgttaatatcttaaatctttttatctaacaacatgggtaaagtccaaagtaatgaaaattggtattagacaatgtatttacatgtgcagcattatctaggcaatttgtatggcttttctaaaaatacgattactatgccaaacaaattttgatgagcgccatcatgtgaattctccacaacacattctataatatgggggtctaaaacaaaataaacaaggtctgcatcaaacacctagggaccagcctcaaaatttgcatcaacatcataagaaattgacaaagttgttcctcactgcatttgatctaaatccaaatcagtacactgcctattttggatacattttggtaacttggatcctgaaacattaactgcattattaccaaaaacatcacctatcgttccaaattcagtttcgtcatcatcactatcgatatttattggagttacacgattctgataacttcttttcaggacaaggaacacgttgaagtagtaactcaccacctgttctctttttttcctgataaaccacctggctttcttctcattaaagtgcatacttgaccttactatatccttgaatttcttttcctcttcagttgtccactgaagacaaatttcctcgcccatacgatcaattttccaacgataaaatgccaaaccaagttcgcgtttaagcttcatccttgcttcggcgatgtgaaatcttacacatccaacagatcctggaagaggacagttacagaattcttgtcttcccttgccaatagtatcagtagtttcaatggagaccttttggtctccacattccaatggccagacccttgttcctaaccatttggaatcactctcgaaaatcacaccagtccactcggggacatcagcttgaaagaggggtccaacagaaacttgtttctgtatggtgtcatcctctgaagagtaaacttctttaaccaaaactggtaaatcatcaactacagatgcttcctccttcggttcactttccaactccactttatgagtactaatcaatttagttggactggatgaacatggcttgcaacaagggcaactacgagatttcactacacttggaattcttgttctggatctcaacctgtctgaagaagggtaaattactgcattgttatcctcatacattgaggggtgcatctttaacttcttctgcaaatgaaaccacgatttgttatgaaattgtacagttacaaagagcacaagttccagacttcagctttcagcccctaaattgtcaagaagctaactagtccaacttttcgaccaactgtcacaatcactggttattgcttcaacagctaaggaacaacgaactgtatatatcttcaaatgagacattacaagtgtgaaactatgactagtcctcagtgctttcgttcattttatattaatttctatacttgattagtcctcaagaaaaacacactataattttattttataaggatgaatgaaagagtgaagggtgctaattcaaggaggtgtaaagacaaggtcactgaaaaaacctttgcaaatttaagggtatcagctatatttttatttcacctagaaaattgagaaaaaaagaaagaagaagaaaatctgccgataaagaattcaacttgaataaacaaaatagtacagatgacagactggagtccttggtagccacattaataaagattcaatttcactaccattagagactgccctcatacctacattggatcctaatttcatccagagtccatgaaagcgttgaaataagctctaggctgatcaagtgagaaatgcaagcattaaaccatgaccattacacaaatttaaggtgccaatctcgtgaaactcagtcgttggccgtggcctgacagcaaaagaagaaccagaacatatacaaaatggatttacatacataaataacataaaattgttacctgcactaaagattcttcctttctggaatcaagatgccttgtttgtaacaaaacctctcttgctctcattgcctggacccataaatttttctccccatgctccattaacttagatggccctgctataattccaatagaaggatcacccgagtgcttagcaatatcggttagccaattcagcaaccctgacaaagattctctctttctcttattgcatgtcttctctttcttattaataagagagctcaacaaaagatcatcgccttcttgatctttattaacaattttttcgtcattgtctcttttgcattgtatggtatctgacaaacacaactttttcttgttgcactcaccaccattttgggagtcaaattttaatttaactactttacaatctttactaccatcccactcaaccctgtctgggaacaaatctctaaactctgactccgactccatggacaacaacctaaaatttccattttccgaggtctgatccgtaaacctcttttcaccaagccatttttctaattcactcaaatactttaaataaaccaattttacagaagcagtagcaccaacacccaaacccgattccttggccaccttagcccacaaacgcttcttcgagacaaattcaaaaccccctttgtttctcacaagaagaaaaagtttgaacaaatccacaggcggtttactgtaatcaaccacaaccggaacaggcctaaagactccatctttactaactgccttaagaaaagccgctaaaaccttatcaaacaaacttcgtacctcaggaccaccattatcatccgagccattctcaacaacggcgacgccggcggcggcggagccaccatcttcttccccgcgtagaacatcgttaccctgatgagctccgatattttgcagggaatccaaagcagatccattttccaatatcgaccatcccgccatgaaaggtatcgtaaaaaacgcagacaaattctaccttgagagatcgacggttcaagaacgataaaaaaaagaccaaaaaaggtatcaacagaatggggtcgatttgatctgtggaacggagttagaggtgacccttccgccgtcgccggagattgtgacggtttttcagttcattttcatttctgggtttgaatggaaaacgacaacgggacaggagagctctgagatgggacaaagccccaaaacctacaaaacagtgtgtgggtagagctttttattacaaacaccattataataattaaataattaatatttaataatttaatagaaccaaaggttatataaatagtagtttttttaaaaaaatttataaataaaaaaatttacggaaactaccattatattgatttttttttgttttcatttttacattttttaaattgattttatttttataaatatgcttctatttcgagattatattgttttattttatgaaagttatttctattttaaaattatgctatttttatttattttatttatttttattttaaaattatattatttccatattaataaataaattaattaattaattaattataaaaatataaataaaaaaaactacttatataattgtgaaatttaaaaatgtaatgtagcattataataatacatctttcaatatttttttaggaaatttcacttacacccaaaaaattttaaaaacactgcattttaataatttttattttatataaaatttatatctttaatagtactaagttattttaactttttttcttctaattcatattcttaaaaaaaatatacctattaaataaaaataaattatttttttaaatattatgacaaaaaa

SEQ ID NO: 161897 - DNA, 1960 bp, Cannabis sativa
  modified_base (1890)..(1893): a, c, t, g, unknown or other
aacttgaagttgattagtttattcatgattgccttacaagttaccattacaatcagaacaaaatgcttgttaacataaacaaattcacaaaaatggatagtcacatgcattaataatccagaatttagtgcaacttaaattagtatctttttcaaatcgataacaaattcaagaaaaatgcaaacaaacaaaaaacttccagtaacttcattgattccagaaacaatctaatctatcaaaaatttatcggaagtctccataatagactccgacatacagcttgaacaaaagtcactagtaaacgccacattcttcagcacaagcagtgaatgacaaactgaaaaaattgaagtggtgcaccatatatcactaaaaacatttacatgcccacttgtatttccaaaggtgatatttgaaagccacccacaggcataggcccgtatgggaggggcattaacatctagcatgccaagcaacacaacgtcaaagaaaaacaatctcggagagagaacaacacctttaaatgtaaaatttccacaacaacaacaaatatctaagtaaccaaggggaagtatatgacatacaatttcagttggtttgttctggttgtactcggtcttctttgactcaataaccttttccagtgtctcctgatcccagtcctccatcgtgtctaacaaataacgaacccagaaaagaacaaaagggtaaaccattggttcatcaacatcaacaaaacacaagtgaaagcaagaataattcagacagccatgttagccaatcaccttcatcacgcttatcactgtaaatgtcgatcttctcacccttcctctggacattcaaatcatgtgagaacttgcatttaaaacctttggtacactgtccgaccttgaaaaactcgcacaatatagacttgggatcgacacctatccaaattttcacaagtccaaatttcataaaagacggaaaaattacccaaaataccaaataaaacagattgctaaccatcaccgaaaacaacaaagagtaagaaagcacaatacataccaactggaactttgggttgactgacagcaaccttgaacaaatcgttcagctctttctcttttgctttctcttcctccttctttttctgttcatgcaattactaatcaattagaatcctcatccaagacctccaaataaataaatcaaactcaccagcgaagaaaacgaagaaaaacaagtccaataactaattcctgtactatttacaacgtattttgaatggccaattttcccgaaatcacacagaacccaatcaaaaatatacatacatatatgtataaaagagagaagggtatataacacaaaccttcgcagtgagtttagctgaatcgagtttcggctgaacagactgtttgaggttctgaacatacttctggacattcttacttttgttcttgttcttgagcccaaaggtcttatcctctacgaccttctgcttcttagccacatcggctttcgattgctgcttcggcggcatagctattaagatttcaaaaccaaatctttttctgatcccaaaatatgaaaaggaaacttcaaattaatgggaccgaaaaagaaaacccaatttaattcgaagatttggtatgtgaagaacgactagggttttcagagaggattaatcagagttccggttggagtgagaatggagaagatgatgtctaaattgccactcatgcggatgacttgtaactaaagaaggatccaaactgaacattaatcaagggtataattgtccgttcactttaacttttcaagtttgcacccaccaccccattttaatcatgagtagctacatgataaataccactcacattattaaaaatatatctattctatatnnnntgtgcctatataactgaaatttttggtttttgagaaatttataggtgactttttatttttatttaat

SEQ ID NO: 161898 - DNA, 2713 bp, Cannabis sativa
ataatatattgtaaagttatatattttagtgggattaataatacaagactgtttagagagaggcttgatcggcttttttttcactcttactaactcacctattcatagtgtgaattttggaaagaaataagcgcaatctgttgggcttaatttaattgatttggtagttatcgagtccccggccatttggtccctgtaactgaattctctacttaaatccatttaattatcttatgtgatcttctttctttcttttaaaatactgagacatcattttattagaacgactttatctgccattgttgtgaaattcatggaatgactttttaattttaatatggaaggaaatactattaattctaatacaaaatgaaaaaaaatattaatatttttattaattttttttatgcattttacatttaatttaatttaatttttatgtttttaaacggatcatgacatttcgatcatgttagatttttttatttaaatttacaataattaactcaattttattatttgtattaaaatatgatttgctttattagtatatattgttagtgaataatattaatagatttaatgtatgtatataaaatcaagttaaagtagaagtgtatatttttttaatttaattaagcttttgagaagcagtccaaactaactaagattatgtagtttccttatattgtctcaatacatacaaatgttttttttttaaaaaaaaaaaattagataaataaaactgcttccaataatttatagttataaaaagaaaaacttaattaataatactacattatcaaattatagtaattagtttggatcatgcaagtactaatacttaattattatttaattatatcttttaacatttcaatatttgagctttcatgggctttttgcactattaataaattttttcggtcaaaatattttgagaaaattatattgtatacttattttattttattttttatttttatttttatattctttaagatttactcacttttatagatgatgttcttattatagtcctcaagttagatttatgtggagagtgagagtatattaataaatctacttttatattttttaatgaaatataatataaaagtatttttaattaataaatacaaaaaaatagtatttctcgatgactcacccatattgaatatcttattctttgctagagatcactttatattaatttgattaaattcttaataacgttgattaattaaataggcatcatatataatttatgtttttcgatatcgataccaactacgtcaacacgttttttccactccaccatggaaaataacatttcacaatgaataaagcaatatttgatatgctcaaattaaactataaataaataaaaactcggaatatgactgtgagaagaacccactaagagaaaagtgaacctttttgtagattacaatatctataaatatatacatatatattatattgacattatatcttgattattgccttccacatatattatacatacagtgctagtctacgtatatatgtacatatatatagaacaacatggcatgatgatcaatatatatatacagtccttaatgaatttatcaatatatatacgacacagggcaattcagtaatgcaaaaacatagagggttccaagttccaaccttcaattattattaattagaagagatcagaacaaccttaaaaacagttcaattatttaaggagacatacactttcgcaaatgttgttttagtccccttgaaagctcattttgtctcttaaaataacttttcttcatacatctcgtgaacaaaactaattataaacataccaatcattgtgttgatatttctaatttgcatacataataatatagcattgcgaataatgacaaagttaacatgtacatattagtgagactgtgagagtgtctaatcagtgtgcgtgtggttttaatttttctatagctacacgcatataactgttttagttaattcaagagagcatccatataattatatccagctcaaatgatatggtttgaaaagagggcattatcgataaaaagatgagttgtatctcaatatatataggccatttcctattgataatgaagtatcttgaatgattttgacatgaaagcccacaatccaaaagtcatatacataataaacacaaattcacaagcaaaataattctcacttttattgtaagtatgagatgtaaaggtcacacatttacattttgcctatatgaacatataattgaaacaactagataaaccagtacagagtaactattctctttaattatgtaaaaagataccaacgatgcatcatacatgatttaacactacaaccacctatagctatagctaattttgtagtaataatggtgtatatttatataaataattttaatcatctatattaatttactttgttcatttagaagatttttttatgtataaatgaatctctcacacacacaccaaaaaaaaaaaaaaaatagtaatggaaattgacgaagacagggcataaatttcttgaagagtactttattatattattatgatacaactctcgtgcaatttgatttgaaaaatgttaaaaaatattattggtacttaattagcattttaatgggtgtattatattcagtgacggacccagaaattttactttgtgggagcttatt

SEQ ID NO: 161899 - DNA, 1179 bp, Cannabis sativa
  modified_base (1104)..(1135): a, c, t, g, unknown or other
tctcaaagctctcacaatgcaatctcttgagtatttcttttagatctctcactaaagcaattctttcaatccctattacagtgaagctagatcactatttattggggctcaatgtatgatggaaggtttcccttttgcttacaatatctataatttgaaagaacatttattacataattagaatacatgaaatggggtattgagaaaacctatcgtatcccttttattcaatctcatgattgtagggattgcctttgtgcttggacttcacggtaccattttgaagtagtaagtccaggtacacagtttggaaaaccaaactcgtaccatgctctgatagtctgtcctttaccctgctcgaatgagctgacattgtgtgtgcagagatgttacttgaagcctgttcagattatctttctacccaagtgcaaggactatttgacacgtgtcactcatacatgctgccacgtaatagtacaaaaaatgagataacaatatatattcagaatttattattagatcattataattttctactgcactcttaactttacaccaaattagtaatacataagtactatatcatcaaactagtaaatattgaaggaaatacaactgcaaaaccacatttataatgaatgcgctacataagaggattttactacactccaataaattaaaaccagaaacaaaaactactttaaggtaacgtttggttggaggtaatgaaatagaattgaatggaaagaaaacagtttttattctattttctgtttagttgcattttaaagaattagaatatcattctaatagagtgatctttcaattagtttagtggaatgactattctatttgaaatagatgaaaagatcattctcatgcaaaatttgaaaaagttaaataatatattttaccaattttcttatgcattttaaattttattacattcttattccaattctcattcttattctcatttttatattttcattctgcttaatcaaacgccacctagagtcataattttttaataaaaagaaatataaataatatagttgtccagagataatagctagatgatgttaactgttgggttttatgccnnnnnnnnnnnnnnnnnnnnnnnnnnnnnnnntacttattaatatagatcagacataacatttaatgttgcatggt

SEQ ID NO: 161900 - DNA, 1442 bp, Cannabis sativa
aatatatttatattggttgagtttacattcatttatttagatttaagcaataaaatatactaattattgaactttttcaactgtagtttgccccaccactctgaaaaggatatgcaggcaacatggaataactagatggccatctcgaaagatcaaaaaggttggccactcattgatgaaacttcaactcatgatcaattctgttgaaggtgctgacagagctattcaaattggatccttttactcaagcatcccacagcttaactctccaatgattccagaaaacaatgatgattcttcttcatcaatcaatccatgtgaacaccgaaaccatcagcaattaaatagccaatcaaactctcaactcgagagtggcatatataaatataatcatgggttagccatgaaacctctatcatccatgtccagtgaagtatctgcacttcagctacactccaccaccacttttgatgggtttaatggagactctttgataacagaggactcttctctggttctcaacagatcttgtagtggtcatggagaattacttgcctccagccgaaccgagaatcagattttgcatcaaactttgcctctgctgcctgaaaaaaatgtggggatcacctcaagagataagtttgcatttagagttaaagcaaattatggtgacaagaagatccggttcagtttgatacccaactgttcttacaaagagctgcagctcgagattatgaggagatttagtcttgatgacattactatgattgatatcaagtacttggatgatgacagagactggattttgttgacctgcaatgctgatctccaagagtgctttgaaattcacagtcaatctcaaaactggaaaatgagattgtgccttcgacaagcttcgtccaatcagaaaattgaaccaagtccttttgaaagcagcagcagcagccatgttagcagtaccaactacaagtctgtctagctacttaactatatggtattggtaattcaaatcatatatatgtgtgtggagcgggcacgaatttgatacaaattggtgtttatctaagagacgatgttaatactaccttctgtatttcaaagagtatctgaatattatcctcggtaatattacttggttgctttcccagatgcggatcaggaatggttgctattatgaactaaaatcacaacaaatgaaataaatatagtgggataatatcagaaaagtgatgtaaaaaaaaatatatagatcattacaaatcatcaaaatccattatgaggcatctggattttttttttttaaagagcaaacacacatggatgatgacaatgttttcccatgaaaaataaagaagggcaataaataaataaaaccatggaagccataaaaaagtaagactttataaaaagcaatattgaaacctgttcaattcggtagaagg

SEQ ID NO: 161901 - DNA, 5317 bp, Cannabis sativa
tgagggtcatatggaagccaaggccatatgagctcctcttaaatggccatataaaaagattgttttaacattcaattggtttaggtccagctcttccatagtttttagtgctattagagtttgacttgaggtgtggtttaccataggagagaatattgcagtgtaatttactatcttcctttaagtaaaaccttttatgccttctttgaatttttggatctatttacaacctgctaccttctttttaatagattttcttactaagatccatgctttgtttttcctgagaactgatttcatctttcactacagtctcccattctagcttgccagcactctttggttccgattatgattattgttgcgagattggttgtcagattcatttgcaattctaattcttattagtgttgttggaaacaacatcccacttaaattgatgtgttgccttttccccttatgaataactaaattacttaagtaactgttattttggtcactattattttttttgataatttttctgataaaaaatggaatatctcttgacaataaccatggaatttccattctcaacttcactaatcatatattatcatcatcatatattgatatttaagttacatttacactaattactatataagctatatttttcagttaaaaaaacaaagggaaaaaaaaaacaaaaaagcttggaaaagagcctatcttttcttcaagtaagaaaagagaaacgagaggattgaactaaaacacctcaaactcagtattctcagatgtaccaccttcttcaaactccttacattttgtgccctcatcatgtttctgtgttgttgttgtagtagtaacactactaccacttccaacaacatcaaaaaactttggcagttcgggcggaatcgcacaccgtatcaacgcccaattcaggccttcgaagaatcggtgctgcttgatctctgcagcccccttcaccgatcctaaacggttctcgggatcttttatcaacaggcatttaatcagatccctcgcgtggaatgtaaccataggactacttggaaacttgagactcttggacacgacattcgccaatgtatcctcgtttcctgaacccttgaacggggtcctaccgtacaaaagctcaaacagaaagattccaaacgtccaccaatcaacggaactaccatgaccctcacctttaatgatctctggagccaggtattcgtgagtcccgacaaaggaatttgaccgggcgctagttggttccacaacgagctgtggcagcgggctcacttgggcagcaagctcggatttcatcttgcgggatttcgctgcagctgataagagcctaggagtgaagcaggagacctgccaggatggctggaggcagaaagggtcaatgcagctggattcggtacaaggacttgaagtctttttcgcatgctccactgctggagatgtcgttttaaggagcattggattgacaacacatctaagtgacaaatcaaaatctgaaagcatgatgtgcccatcttctcggaccagaatgttttcaggttttaagtctcggtaaacaactccgagcatgtgtaaatactccagggcaagaagaacctcagcaacataaaacctgcgaaaaaagacaagcgaaagtgaagctcacaacaagaaccaaatagtgattcaaaactctacttaaatgcattctaatcaccacatgtatataaaatcaagggggctcaaacttgttactcttcttagctatttgttatacatgcataatgcatttatttaaaaagacccaatgatttgtcaacaagcctttattttgatgcacacatagaaagcatcatagcttcttcaatcttatgtttccaaaaagagttaacttagatatttaactaagaagatatatatatatacacacacacatctacataggcacagaaaacaagaatttgatcttagaaaaaaaagatacctagcagcttgttcagagaagctccgggtggtttgcttttgccgcaatacatgaagatccccaccaggacaatactccataaccaagcatgagagcttgtctgaaacaaaatgggcatacagcgtcgggagaaaaggatgatccagcatctgcagtatctctctttccgtttgggcccttaacatctttttcctagtagccaaaaactcattgtccatcactttcaaagcaaacaggcaattagttccaattaactcagcaagataaacagtcccaatgtccccacaaccgagcctcctgagcagcttaaagtgcctcaaacccaagttcccgtattgtttctgaatttgatgtatggcttcccatcttacatcttttgacatgtgaggtctcttgccactgcggcttgatccacttacactgctttcctcactagtgcttgtgcagctgctatagtcgccaatgctactctttgagctttgggaaaactcccctttttctcttgatatcgatctctcatcgccctttctcacaagaaatctagttctgttacttgaactcacatccccgacgcttgaacttacttcaatgctgctagcatttacactgctggacaatggagaagctttcccattttcttccttttcatgctttggagtacagacctgtgtttggttctccaaattactagcgttagaatttaaatcagtgtccatgttcctttcgtgtgaaccagaactacaagaaacactcaaatcctgctttactttattcttgccagagttcttgctcctgaagataaaccgaggactactcgtaaatgatttgcttattttactacaggtgctggagctagacagagcagcagcagagtgcagcttatctttctggctcttttgtaaactcgaagaattatttgaaacctcaacggaggcagaagaaacttcctccacgtgtgcagattccttaatagtgtgaaggactgacaaagaatcatcagattcgtgttttctagcctctgcatttctctcgctcttaacttcagttggcaaaggaacaatctcggtctgttgtggtaattcggtcatccctgcatctggcaccatagatacagccaaagaagtagaagcttcagcagatggatttgatagctcttgcccaggagatggtatggtctcaggcatcttctcagaaaatttcgtcgtgtctggaaccaaggatatttcaacgaaattccctttgccttcatctattgaaactccagatccattagcttcaaccaccactgccctgtataaccttttaatgtttccagcttccgagacacctgatgaaccagcaggctttgataatcgcttcgtggcagccatctctgatgcttgagagatgcataatcctcgcaaagcttgcttcaaacttacaggttctgaaattccaattcctgatgctggtgacataccagctctcattggtcttttcatagcactttttcttaaaaggtccttacccgaatttctagctgaacttctaatgtcaatggcctgaaagagacgattgatatcatcctcaatcgaatactttttcccaaatctctcatccattttaaattcagcatctccttcttcagttgattcaacaatttcactagtactaggtaatgtactcattttgactagtctagattcaccaaaacacctcaaaatctagacacccaaccgaaaaatgttgtcctaaccgatttctaaacaaatgttgtggagatacatagagaactaccaaaacaagaatccaaactacataacctctcagtttagcttcaatcatgccaacacaaagattcaaatcaccactcaagatcccttcactaatttcaaaatgaagcatccaaatcctgttccaattgcagccctgcataccagttaaaagacaagtcaagaaaaaactaaacataagttttagaagtgaggcagacatgtatggtataccatccaaaatattacaaattgcataaatccaaaaccacttgatttgaaactaaaaatggagacacctgttgagaagacagctgatatgatctcattaccttatcatcattcaaacatactttgacaaaagagaaaaaaaaaacaataacacaaagaaaaaagggtaactcaactgactggtagctcaattattcttgtattcatttgctaaaagatttgatccatccaataaacaatcaacacatccaatacactgaaagacaacattacaaaataactcatttcccaaaaatctattttcacattaaagattacaacttctcaacaaaaacatagcttaaagatgataaaaaaactctcttaaatttaaattgttttctccaataactctggcaagaaagtcgactaaaggtgtacataaaaacatgatgaaatgatgaactgggcaaactaaaaggaacccagaaaagaaaataacaccataaaaataaaaattaatgatgataaataaaattggggcaaaactatgaaaaagctcttaccagaagcgaagcaggaaaagaaattccctttcaccaaaagagaaggcaaaggaagaaaatttagattagggtttttgaaaagggaaacagaggaagaggagagagagagagagagttgtagtgtgtatgtatttaataaagccccaatttttttgtgtgttggggagaagaggacacgagaagagcagtgaagaaagaaagaggagttgggttttgggggtagtgaatgaagagagagaaagaagagagagaaatcacgagaagtaacagagagaaacagaacagagctctactctcttctctacctctctgctactgttttttcttttttattttattttattttttaaaatattattattattatttatttatttattgaaagtacaaaaataaaaaatgaggggaaatgaatagaaaatataagtaaaatatattcttgcattgtactttatccttttgtttttaaaattacattctactttgatttcattcacatttggaatagttttttttaataattattatttattataatgaaagaaatttttaggaaaattattttatatattatttttattttatttttaaattacagtttgaattatttctttctatgttaattattatataaattttgattgtactttaagtaggactgtacaaaaaattcgtaaaccgcccaaaccgaataacccactcaaaccgaaccgaaaaaacagataaaaattacgaaccgaaataatccgaaaaaattacaaaccgcccaatctgttaattaggcgggttgaaaataggtccaacctgcc

SEQ ID NO: 161902 - DNA, 1577 bp, Cannabis sativa
cctctttggttgtaagcatgctaagaacatttgaaaacttactaagtttcagattgatttatttgtatcacttgtctgcaacataccagcaacatgaatttgagactttcctatgtgtattgtgggaaatctggactgatagaaataaggttgtccatggtgggattccaagacaaccgactgctatagttcaatatgctaccagattctatgaagacgttaatagactcaaatctcaggtttggccagcagctgatactagcagcaaccatccatcacagccttcttcttctataaatcagcatgttcaaaaatggagaccgccccaaactaatggtttcaaactaaatgtcgatgttgctactgatttggagcaaaaaaaagttgggcattgggtccatccttcgtgatcacaaaggcacagttctggctgctttatccaaggttgtacaaggtagtttcaaatcggatgagatagaagcaaaagcgctctttcatgctgttaactgggtttcgcaatcacaatttcttcttacacatatcgaaactgacgcttctcgggtctcaaatgctttgaatagattagattccgatttatcatgctttttctgatcttattatggatattcgttgtctattgtcctttttccctcaagttttagttacccatgtgaaacgaactgctaatcaagcagcacatggtttagctaaatatgctttagggttggatgcagactttgtttggataggagaaattccctatcgtattttctctgatgttgtaaatgactttaatttataatatcagtgaaatttctcaaaaaatatatatatatatatatatatactacatttttatggtgttttattaaacaacaataaaataatataaaagtaacaaaaaataataatattcaaacaaaatcaaaataacataaaaataatattacaaatgacgaaaaattaacaacaagacaaaaataaaataacaagaatataacataaaaataatatgaaatcatcaaaataccgtattttttgtaaataaaattttaaatatttaaaattttgtacaactgtatttttgtaatttttgtgtactttttacataatccttcaaaaaaaattgtccttagtacgaaaaacataatggggagattaactagtcaacacactcttatactatatcggtacaacatgcttccaaataagtacaatttcgattttaattcaattttttcgcatgactttgctcattgtttatatgccatccattcctatttcctcaaagtaaacatgccattaagatttagggtttagaatttttcaaacaacttttaaaaaatttaatattactacaatgaatattattacgagaaatagtcgagattgaaatctctatatgtatatgtaccaatttagagtgttttaggtgttatataggtaactccttataatgattatgattctaaggcatcacaaactactttgagaaaattatactgtatatttattttttttatgttttattttaacttttatatataaatatatttatataaatatatctttatata

SEQ ID NO: 161903 - DNA, 5242 bp, Cannabis sativa
cagcccaggccagccaacaactcatcgttttcacaaaatcagcctgccattttttaggcagttttcccatttctttaattttctcgtgtttcctcgatatttagggctttgttatgctaattatcaatagagaaacttttagttatgggtttagattcctagaaaggttttagaaagttgcttattcattttacgtgaccttcgttcagcgcgtaattttccattcaagtttgctgacacacttgaattcgaaaacaaggtaaaaatagcatagaatatatatatgtatatgtgtatgtgtatgtgtatgtgtatttatgttatatgcatgttgttgtattattaatatgctaccaatactagtacggtagcagtactgagtgcatattgtacaacctatgatgctttagattacaatccaatgttaccaacactagtacgaattacaacctatgatgttgaatcttagaagcataccaattgcaaattcctcttcttagatgttaacattttcaaagttcccttcatggcacttgtgaactttagcgagttaattttacaagaaaggaccattagattatttcccaaatttccatagggattgcggagctcgattccttttttaggtgtttcctgattaatttccttaagtagaatgttgtagtaatttttctattatttagatttagtgagggaaaggggctaagcatgtaatagactccagacaaagtttcttgtggggaaacaagaatggaaacgtattaacacttaggttttgtttccctaatccaaagtaacgaagctggcttagtagtgtgataggtttttctccaatttgtgataagaaggcagctggaaatgcgagggacttcaggaaaattttctttttcctcactccttgtaaaaaaaacctaccaatctggtcgagagaccaaagtgacaatgcaatagatttcaggccatgtttcccttctcaaggaaaggctgaaaacataatggttgtgattttgtggaaaccaagttgaatatgcaatagacttcaagcgacacttccttctaggaaggaggttaaagatgtatcaaaatttaggcaatatttccactcaaaactaaagatgaaaaccaagctaaatacgcaacaaacttcaagcaaaacttccttccaggaaagagattgaagatgtgttgaaatttaggcaatatttccactcaataattttaagaaaatttaaaaaatttaaatacaagtgggcattgtatgtttttgagggcacatagctaggtattttacaccccaagtgagctaggaagtttggacgtctccaaattattggtcacttatttaaaacatagcttgtgaaggagataataatgtgaatccttgtgtaaatttcttctattttaatttcattgtgcccacaagcatacatcaagaaagaagattcacaaggaattagatacaacttagaagaatgtaaagatttggatacccccatcctattggtagtaacgatgcaaatggtctgcattccaagagggatctttgatttgtccattctcttgagttggtatgttccatttcctactttgtgttgcacctagtatggtccttcccagttaggtcctgagacccccactcttggttcttccaaagttgggaatactgtcctcaagacaagatctcctacgccaaatgtatgactcttgactttagcattaaagttcctagcaatcttaccttggtacatcttgagttgaacttatgactgttctcaaagctcttcaattaaatctaatgattcctggagtagagagtgattttgagttgggtcgtaagtgtcttgtttgtgagagggaatcatggtttccactggtatgaccgcttcatacccataagccatcaaatacggtgtgtgccttgttgaagttctctctatggttctttatgcccagaggactcacgaaagctcctccgaccaatgggctttacaagcttagagttttttcttcaacgttgtcttcacgatcttgttcacatcttcaacatgtccattcgcctgtggtctcgccacaaatcagaaactcttcacgatttcgtgttgaacatagaagttgatgaagtgttcattttcaaactgcttcctgttatgagagacaattttgtgtggaagtccgaatcggcccacaatgttcctgataaaaaatctagggccttcttggaggtgccagtgttcatgggctctgcctctatccatttggtgaagtaatcaacagtgattatggcgtacttgactcctcctttccctatggggagggatcccactaagtcaatacctcatacgacaaaaggccatgaactgaacatgagcgtgatttctgttggtggtgctcgaggaactttggcgtatccaggaatcagaagttctcctcaactcagatattggtagatgggtcctatccaggaatcagaatgatcaggaatggcatttacccactgtgtttcaatacttagagtttctaagtggtctacaggctagggctgagcatcagtcggtttggttagttttttctttataaaatctagaatttggttttcagtctggattggtgcaatccaaaaactgaccaaccagtctagagcctattttaaaaccaaccattttgaacctcggtttggtcagtttaaatcgcccaaacagaacttcttttttttttctttaaaatatgatccattttattctataagcacattattctacattctacaactacaaacatataaattaaatgttcaaaaactaattgtcttattcttttaactttaatattaataaaataatatattattattatatattattaataattacaatacataaagtaaaaaaaacttaataaattaatatatatgtataacagtgggttttactttttttgggttggtttattatccaaaaaagactgtccgttcaatggcagttttaaccattagcaatttttttggttttcggttctggcagtatttggtaggtcagtttgaactgtttttttgttttctaaatattatgcccagccctactacaagcaccactccttattgtataatctctgagtctgtggtgagttttgccagcatgtccacgaatgagttttcatcaagattggtctcaaccaaatttccacagcagagaaaacaagaggagggggagatcctcctcgaggaaatggataaaataattagttggaacgtccaagggatcaacgaccataacaagcaaaatcaagtcaagaacatgttacatgttcataaagccgatcttgttggtctcctcgatacgagagttaaggctccaaaacttggggccttttatgtaaatatgtttaaaggatggtgtctcacctccaacatttcttggcatgatggaggtccaataattgtggcatggaatccgtgtagcttctcggccaacatactcaaatgcacaagccaacttatccatcttcaagtatctactttggatggtaaggtttgcttctttactacctttgtgtatgctttcaatgagatggaaggaagaaaagatttatgggcagatttaaagttgctagccacccaacaatcatggatggttttgggagactttaatgatatattgtttaaggaggaaaagggttggaaaaagagttaaatttttggcagcaacagaattcatggactgtgttgaggcttgtcaaatagaggatactaagtatagtgagagttactatacttggaataacaagcgacaaggaaatgagaggatttgctcaaaaatagatcgagtgcttgctaatcaacggtggctggacagtttttcaacagcagaaggaatttttgtagcagataagctttttgatcatacccctgcaattatttctttgtctcatgaaacatttaatggaaaaagaccatttaagtatttcaaaatgtggacatctcatccacgatactctgagatagttcaaggtgttggaatcaaagaattaaagacaataaactgtaccaagttgtttcaaaattgaagggactcaagttggctttcaaagacatcaaccaacagcattactctaatattcaggtgacaacaaatgaagtaagaaaagagctgcttgatgtacagataaagctccaatatgatcctttaaatgttgatcttactaacaaggaggctacctctcgaaccaaatatgcttagcttttaaagggtctcaactcattcctgtaccaaaaagctaagctaagttgggtcaagagcggagatgatgaaacagttgtttttcatgccagtatcaaagagaggagaagagcaaacaacattctatcaattgaagaccagagaggagttagagcagataagccaggggaaatttctaaggcctttctttcattttattacagtttacttggctctaaaatggaaagcaggtgcaagatcaaagcaagggttatgaaacttggtcctcttgtctctaaatctcaggcagaattcttgatgaaggagttttctaaagaagaagtcaagtttttgcaattcctggaataaaggctcctggaccagatggctttactagctgcttcttccaagacaattgggatctaattaaagatgacatttctgaggccatcttctctttcttgcattcaaatcagattcttaaagagattaacactactgtttaacactcactcccaaatgtaagtgtcctaattcagttagtgacttcagacctattgcatgttgtaatgttatttacaaagttgctactaagcttatttgttccagattaaaagtcatcttgcctgagcttgtagcacagaatcagggggtttgtttctggaaaatttattgctcacaacattatgatctgccaggatttaataaggcattatggaaggaaaaactcaaaggcaggatgtatggttaaacttgatttgcagaaagcatacgaaactcttgattgggatttcttggaagagatacttcatgccttccactttcctgataaatttgtccagttgattctgacttgtgttcgcactccaagattatctcttatgtttaatggctcactgcatgggtactttgaggggaagaggggtctaagacaggggaccctatgtctccattactttttgtgctaggtatgtgttgggttttatgccctaaataaaactcattccatataatcagatttacttatt

SEQ ID NO: 161904 - DNA, 3304 bp, Cannabis sativa
  modified_base (3178)..(3181): a, c, t, g, unknown or other
cgacgaaacattgaagccctagaggagactttttcagagagaaacgagaactattcagaagctaacacactccaaaaaaaatatgttaaaatacaaaattttgaagctgaagaaaaattatagaaagcctttacatagaaaatccaagcttttacatagaaaatctattcaactagaacaagaaatacaagcatgcgtttcaacctaattaaacctacttaactcaacattttaatcaagaaaacaacaacaacaattaacagcagcaacatcatgcatacgctatatggtctcctttttaacccctacatcattgtctggaacagtgtcagcagcgaattttaccaaaaatgacgctaaaagactttaaaaactgcatctaaaactcaattttatagaaaaatatttgtatgaaaacctaaaatatttaatttaaatctatctagataacttaagactgttacacttagtctacacctagattcacccatgcacatatatatacacaataattgtaataagatataatttattatgtgtattcttttcatttctttttttaaagaaaaagtttattctttgaaaaattgaaagagagaggaaaattaaagtaacactgaaaatccttacaaaagaaaaagtaataaattcgagtttattgaataaattcgagccaaattaaagtcacgagtcaagagcacaaacatattatatatatatatagcataccaacgattccacgatagtccacaagaacgtatgtatacattcatccaaaatgaacttccccacactacttgtcccatcagttctagtactactcttttccataacggcctctcccggaatatcccagccgaccggagccagatgtccggcgataaacccgccaccaaggcctaacccaaccgtccagtacatacgtccgcgacccccgctctacccgccgggtcttaatctcatgccaacgcgtccagccaataaccctggccccttagctaaccgaaacagaatcctgttcatcacccaagagctcaaacgaaacataacctacgaccctttcagatatacaccaacctgggtcggaaacaactattgtctcttcaaaggtttcttctgcgacacagtaccggacttaaacatcaccggactcgctagcattgactttaacggtgccaggttcggtggcagattcctcaacttctaccgattcattagaaacttgcccgacatagccatcttccacgcaaactccaacaacttcagcggggtcatcaacaatgggttaagccagttgcgatacctctacgagctcgaccttagtaacaacaagtttctcggtgttttccccaggaacgtcctcggcgcgaagaatttgactttcgttgacttgcggttcaacacttataacggaacgctgtccaatgacttgttcaacttcgataccgacatattgttcatcaacaacaacggcttttcccaaaggatacctgcaaacttgggcaacaccccagcgatttatctaactctagcgggtaacaagttctcgggtcccatccccacaagcataggtcgatcttggaataccttaaaagaagttcttcttttaaacaaccggcttacgggttgtctccctttcgagattgggtacttgaaccagacaacggtgttcgatgcggggtctaatttcttgaggggtccgataccacaatcgttcgggtgcatgaaatatttgcagttcttgaacttggctcataaccagctctacggagccattccggagtccttatgtaggttacccaatgcctataactttacactcacttataacttctttacccaagtgggtactcagtgcatgagattgatacgggctgggaggcttcatgtggaccgcaactgcataatgggcctgcccaatcaaaaacccgcggcagagtgtaaccgtttctttgctaggcccaggtcctgtgctcgtgagagcaccttcagctttgttccttgcacactctccaactccaggacctcctcttccaatattgatgatattgatggtcggcacctacgagagatcacaccccctccgccgccacggacctatgctgctctcgagaagggtcagaactgaaatccatctatctatattttatttaattaaataattgttattgtgtttgttttcttttttaatgatatttgtatggtgagatctctggcgcttggatcaaggttattttgctggttaattagtgtgtgtggtatatatagtagtgcgagtaaattttaaatttcatgtttaaattaatgtgttggtgtatttgttatattatttattaaataatataatatttaagattaaaattgtgatatattatatatattattatgagtataatatataatgtgattaggagttacatatgtaatatttaagaggtggagttactcatattttgtaatttctacatgatcatcaattaagtgtgtaaagagtagttacacaacttaattttttgaaattcaaagctataatgcaaatatagctcttgggaatttaattttatcatttataatataaaataaagtgggaatgatttggagagttatttacaaaagctgaaaaaatttgtaactagtaactagttacttttttttgagctttaatattagaacctttattactatggggatgccttttaacaacccccataacatccaaatcactcatttaatctcatttacactcaattaatagatgataacagccaggatgtttgaatttcaaagtgtgtaatcctaaacaatataaatagagaccttgattcatcctttgagacacactcttctcttctatctttcgaacacaaagctagagaattctaagacttgataattctcagaagtatttctacaaagtcgtaagtgtttaaaacagggggaaataatcttcttggacaaaggtgtagaaactttgttcaagcttttggtgatccccatctctactttaggtatttgttcttctattcttactttgttctactctttatttttatattgttctcttattctcctctaaacactcttatatatatcatatatattatatctctactatatagtattatatatacatactgttatcccaaagtttgcactctaacgtggcatcacgagaatnnnnacacgtggagtccacttggagcactgctagggaagatagaccgagcaggatgcatcgctggcacatccagaatgagatattcagcaatccgtgcagagcactcaacacttagcgaattcagct

SEQ ID NO: 161905 - DNA, 2920 bp, Cannabis sativa
tctctctctctctctctaccggcgaagggcatagtgatcacggtatcggtgctagttctggcagcctcagccaccgctattcttttccttttgttgtctctctcctcatcaacctgcgactgttcgtccgccgtgggcactgtttgaaccccagtgatcgatatcactgttgaaaatgcagccttttcggtggcggagcggatatctatgagcaaggatgatgtggagtggtgaaagatcagatctgaatcaatgggttgcatatgcagcacaatgtgtcaaaatattcagtcccataatttatcagtacagtggatttatattgatgtgataatcgacgaagaagtttactttcacgtatatatgtggagtgtcttttctaggatattggcaaagtatactagtatcggatgtattggtgatccatcgaactggaccaatatatacagtacaaaagatatcataaccttatcataatttaaaatatataaatttgaatttgtatgttgctattattcttgtcacataatttcaccagtacaacgagttgcctccataacagagtaagacgacataccgaaagaccttgttaaaggcacaatgagtcaccttcataatggataaagcctacataacaaaagaccatcttaaaggcacaacgagtcgcctcaatagcaaattaagttgacataacaaaagaccttcttaaaggcacaacgagtggcctccatagcggattaagttgacattccaaaattccttcttataaggcacgatgagtcatctctgtaatagattaagttgacatgatgaaagaccttcttaaaggtacaataagtcgcctccatagtggattaagtcgacataccaaaagacctttttaaaggcacaatgagttacctccaacgaaaaaaccttcttaaattcataatgagtcacctccatagaggattaagctaacatatcgaaagaccttcttaaaatgcgaacaaattgcttcaataaaagattaaaatgatatatcaaacctttcttaaagacacatcagtcacatccaaagtaaattaaaataatatataaattcttcatcaaaagcacataaagttgcatctagcatttaaagctagtgtatctcaaaatctgcgataaattgataaagatcatgtctgagaaataatatgtcggtcaaaacaagatattacatatctcgggtcgttcaacctgagatactacatatcttggtatggctgactaaatcccaaaggagcaaaccaaaagagggtagttgcaaaatcccaaatacctttataagataaggcaaattctttgaatcaagtaagctcatcagactcatattttacacaacctacattggttaaaccctttgaatcaagtcaagtaaggtataaatcctcatcacttgagtacattatctagtgttcagactacaaaatactcttgaaagtttcttataaaatacttttataagaaagtgggagagtagtatcttggggaaatctcaatgggctaacgagaggcccatggtgataaaaaactaagaaagacccaataaatgaatacaggtaaaaaacatgaagactggaaagatataataaaaaatttctagaagatcaagatcacgaatcgagatatggaaatataactaagagggtaaccacgtaggaagagtcgaagtaatgtctaattcaaatcaatctcaaataatttccatctcagattgtgtcgaggaggatattatctcagatcgaaaggtatctatctcggtttggtcctggactcttcttatctcaactcaatatgaaatctatcttatcttagaccagtctaagatatgacctatcatggtcatttcgagaaatggcctatctcgatcagtttgaactctcatatgtcagacgggatgagtcttacatatctcggtcgagatgactctcatatctggaataggatgactcacatatcacggtcgggatgactctcatatctcgattgggatgactctcacatattggacgggatgactctcatatctcggtcgagataactctcatatctcagataggatgactcacatatctcagaaaggatgactcacatatctctaatggaatgactcatagttaataatggatacttgtcaagatatgtaatgatatttcataataataatagacacatgtcaaagaaaattcttataggattgacacctaagggtaaaagaggaagtagagggggaaaatggaggtcctgaggaagcagagaagaaatcaagaatgaacaagggtaaagagttccccaaaaatatatattaattaattttttatcaatgaaaaacagtttttggtcaacacattattaacatttttttcttcataatttataatattattgccgttaaaataatttactagaaattatatggtacgtggcgtttggttgggaggttgggaggagggaggaatgaaaataaaggaatacaggaatacgaatgggaattggaataagaatagaacgaaataaaatttaaaatgagtaaaaaaaaataataaaaaaaatatataaattttttcaaactttgcgttgtaatgatctttccttctatttcaaaattgaatagtcattccaccataaaataatggaaaggtcattttatcggaatgatattccaatagttttaaatgcaacaaacaaagaatgttttctttccattctatttcattacctccaaccaaacgccacagtttctatttatgtcataaaatcaacttttcacttaaactactttaattttcaatctattgagagatgcaaaatttttctataattaaatttaggaaaatttatttcaaatattaatttttttaaaaaaatttatatatattgtgataatttttttttt

SEQ ID NO: 161906 - DNA, 4336 bp, Cannabis sativa
ctctcaactacttcctcctaccaaacaacacaagactgccttttcaattcttctctcaacgctaactattgtggcgctctccggtcaatagcctcatttacgtcgtcgtttcatctccgccattgccacacactgatcagtaagttatttagttacctcacaaaactcattttcacgatattttaaccatacgaaagagtataaatgttgaatttttgtggttgattatgtgtattaaggagcttttgaagcaatcgcactcaagttgaattttcgtggttgattaagtatattaaaatttcgattaaaatatatgttcttttttttggcacaatccaggtgtgaaaaagcataaattatggaacagacactagacctcgtactggggaaagttttatcatttgttgggaatgaattgtttttgttgagtggggttcaagctgagctcgacaaaatcaagaatgagctggaatatatgcaatctcttatcattgatacaaagggcaagagaggtcttagtgatctggaaaagacagtggtgagaaaattcaaggaaaaagctgatgatatagtagattttattgaagagtacacctacttttcaaacaagaatcgaaactcgaatgaattctacacatccattatttgtttcccaaatgcgctaatcagaaagcatcaactcgctactaagttacatcacataaggaggtcaatcagagagatgagagagacaagtaaccaatattatgccattgatcgtcatcatcatcatcatcatcaacaacaatgcaacaagtctgatgagtatgacactgaatgggcaatgaaaaaaagcataggggaattggctctttttgagagtgacaaaaatcttgttgggattgaagattccaagaatgagttgatggaattattgctgggtgaaagtaaagatttaactgttatttctgttctaggaatggggggttcgggtaagacaagcttagttgccagtctcttaagaagtcctgtggtgaagaaacatttctgtggcttctatgcatggatcactatctctcaaactaattatacaattgacaatgtacttagatcaattcttaaggagtttgctgacagagtagaggataatgtcaatccacaggaattgaacacaatgaatcaggtacaactagtgaaaatgatcatgaagaagctgcagcataagaggtatttggttgttttggatgacgtatgggagattgaaaacatgtggttagtcttaaaatcagcactattggaaaatagtttgggaagccggatactccttacaactcgaaaagaagacgttgcaacgttttcgcttgggactaaaagaaatgtgtacaatgtgagaccactaacagaaaataaagcttgggaactcttttggaagaaagctctgccacacgaccctgatcaatgttcaactcaactcttacaaacagcaaggaacctcattaaaaagtgtggaggcttacctttgggtatagcaactttgggtgctctaatgtctacaaagaagttggaatttcctgattgggaaggagttcttcgcagcttgaattgggagctaagcaataatcaaaggctcaactcgttgaagagtattttattacttagcttttatgaattgccaaatcgactcaagcaatgttttttgtattgtggcaatttccctgaagattttgagattaatccaagaaggctcgctcgattatggatagcagaagggtttgttgaattgggtagaggaatgacacatgatatgatggctgagcgatatattactgaactcgttcaccgaggcttgctgcaatttactaggagaaatcactccacccaatgcttaactatgcatgatctgaacagagagtttgctgtttcaattgcagaagaagaaggatttttccatgtatacaatggtcaagaaacaaatcaacataacaaagtttatcgcctagctgtgcacgaaaattacagaggagcatttggaagcatgtcaaaggttcgttctttctttgtatttggctctaacatagttgattcttcattattgctgcaaaacgtaccatgtgattttactctattaagagtgatagacttgaaggatttccctattcctgaattgtcaaaaaatatagtgaattgttataatttaacatacttgtgtttgaaaagaacacaagttaaggagcttccaaaaggtataggaaaacttcgcaacttgcaaactctagacatcaggcagactgaaattaaggtgcttccaaagggaattgtgaagctaacaaacttgcggcacttgttcatgcgccaatttaattacgccgccaaattaatggagtttgatcacttcaacatttgttatagcacaaaagcactggctgcagggttaagtaatctaaagaagttacaagttttggatagtgttgaagccggaaaagacacgattagggaactaagatccttgacccaattaacaaagataggcttaacaaatgtacatgaagttgatggggaagatttgtgcattttgattaaggagatgaagtgtatgaacttcttacttttgcaggcatcgaatgttaacgaggtgttaaaaattgatgaactttccaatttagcttctcaatttcttgccaaactttatctcattgggaagttggaaaggttgccatgttggcttgcttctcttgagtgtctcaaaatattgttcttgtcatggtctagaataacagatggtaaattaatcctttcccatgttagcacactacctaatttgaccacactcagcctcatcaaatcatatgaaggaaaccaattgtggtttgaaaatggatttgtgaagctggagatcttattattatgttgtatgccacaattgaacgaggtcattatagagagaggagtgatgccacagcttgagaaacttttcattgtgagatgttcacacttactcatacctcgtggtattgaacatttaagccgtcttcaaatgaaaagattgccttgaatgataatagatatctgattttgttggaatcttcacatgtactagtgattattgactcatcatgattatcaagtggtggctgatcaaataaatgagtagtttctcaaaagtgactgaaagaagcttggtgttggtgatgatcttctgggattagtgtatttggttcggccggaggaaggttatggaagttgggtccaagcagccaaatgttaacattactatattagggtgttgaaaatagttttgcccctacaattgttcattttttatactattgtgaataacttatggtattgaaaaatgatgttcaaaacagtctctagtacttgtataaaataaaatgaacacgtttgtaattaactattttaaattcctattttttttttttttgacaatgtaaattatttaaaatttgtgtgatgtcctaaatagttaggatgtcatcatataaaagaagttagattaggattttcttaaagctgtttagaaaatatccgattcgatccaattcgtgcgattcaatctaatttaatccgcaaagtgttgatattcgcacttgttcgaattagattagatggaaaaatataaaatctgcatttgtacgaattgaaagttgatttacttaatccaatccttttcatatttataaagtatttattttatatagctataagaaaataaattaattaattaaaaatatatatttgatgttaccattgaagatgctctaagagcaacatctccaatgggggttgtccataaaattgtttttgtcacatatgcaatgggatcatcattttcaatgcaattttatcaacactattatttatatttggcaaacaactatgtaacattactttatctttatcttcttttctttttcaaaaagaatactttatggtattattttatagtatttaataaaatttaatcacttaaatagtgatatgtggaaccatagttggcaacttttaaagttgtcaactattaaagtaatttttgtatgaaaagttatcaaattttaagtggatgagagaaaaaaaaataatattttaagatgatgtgtgcatttttgacaactataagtattgcccttattagagatactctaaggatatcttaaggtgtcaaccaacataaaaagtcacacatagggatgcacacgtggcggagaattagcggggagtgctcctcccgtctccatccacgttaaggattttaatccccatctccgcttatttcccatcggggatggggcggggaatcccctaatgggggcggggaatcccctaataaaaaaataaa

SEQ ID NO: 161907 - DNA, 6036 bp, Cannabis sativa
cctcatgggtctggagaccgttcggacgcccctcgccccccaatctctccatctctccatcgcatgtggcctcaaattcatcctcctccctctttccatcatgcacaaccctagactcctcctctcctcctcccgttcactctcttctgtttgtaaggtaaaatatacctaatctctaatttttttattcaaatcatatatattagtcattctcaccttgtgttattttatatatatttttgataaatttttgttctttcgatgtatagtgtagtgaagaagcaagcaagcataaatattagaataaaatgaaaaaaaatagttgacctgaccacctgcaatccacgaaccggtcaaatttggtcatcatacaggtgggtgttcattttttataggggcttttttatttttacatagaaacccctattgcaactagctctgcaacctaaattgtaacaaaaaatcgtatagaaactctaattacaaatagctaattcttttctcaattttaaagaattagctattttaaaagaggtgatgagagtgttcttagaattgtcatggggcacgggcaactatatggtcttcagttctacttcagatgatagggtaaaactgtaattaatgtaatttaatattaaatatcacattattttgttcatgtaaccgaccaatacatctcaaattgaatatatatatatatatataatatagaatattgttattaaatacagtgactagcattatttagaagtgatgttttacgattaattaacgatattctctaaaagttattatcttacatcaataccagttattatcttagtatttctcatatataatatatagcattatttattttaaaatgtgaaatagcaactggcattaaaagttaaggtacgtaccaaaagcagccatggaaaggcggagatatctgctgtagcgcatcccagaatccgactcatgaagctgtataagtaaccacaacgtgtacaattgccacacaaaagccgccaagagacatataattccccatgtcctgtacaattggttaagaataattaattttatatgcaaaccatggttcgaatccacccactcttttttcattctatgtataagttccttcaggatctaacttatgaccactagcaagaaaagaaattgctctaccatcattttattttggccacaacttgtcataaattgttttggattttatgtttagcccactctgacattacattacaacatatatgtaacccaaataatattaattatgtggatttacttaccaaccaaggagagtgagagcaagggggaggagtagtgcctgaacaccgattccagagcaaagagtgtgaaatgcagcgtaataagcattaccattcctggactcagtaataggcagccaagcctcgtgaggctctagcttagtgaagttcccaacatcttccatgtaaccttgcatgcttgcaatggcttgctttatcacagggctggccactagtggagtactagtgctactcatcaacctcgaaaggaatggactactttttgggactactactacttctccttcttcttttgcttggtgcttagctttctcttccaccaactcattcttgtcatgaacactagtagtagtagtagccataatttgatttcaagctaccttaattcttaatttgctgatcttatattattattgggggtgcttagcttttaaaagggtgttgatataaatatttatagtagttggatgctgagtcgtataggtcaatagtgggagaagacataaaagtaggaaccttttgaccgatgatcaattacaaattgtggctgctattatgtaatcaaaaagatcctaaacacgacaagaccaacattgtattgtcttctcttttttcattgattaattagataaaagagagccacaattatatatctaataaattcttatgaatatttagtatatttttttgaacctaaagtttttacactactaaattgtgctcatataatatatgactttttaataatgcttatcgaaatataaattttacataacgtagtctttccattatattcttttcaattttatcataataagatggacgatagttaataaatgaatacaaattaaatacccttcacttttttttatgttaataaataataggataaaatgactagtagaattaaaagttggagctcgagaaacctttcttatgcagagaggatggttcttataagctcagtgtttctgtctattgttgtaatatggtctagaaactaagtcatagtagtatttagctgacacattctctcatctaattactaacattgtctcgatagataattagttaatacagttatgcctatatatagacataacagtagagatctcaatacagttagagatccagttattagactcatgtcacttgttcttagaaaagttggtagcttgtatgtaagagttattctctcatagaggagggttgtaaattgagttctggtgtatttgatccagttacttttagtgagagaatcaattgtaaggagttatctccattgttcttgagagctgctatcaacttgtaatcgaattcaagttttcacgaatgagaagaagtgcctccatggctgaatatttttttttgcaacttgatcgagtatcaattaagttcttattttatgatttgtaaattttgttgttattacttgtttagatagtttgctactattcttgtttttctttcttgattctcatatatgtgattgtttaaatcacatcaaatggtatcagagctcggttcacattgaagagatcaagaagtgttcgattgaaggtcaaagctgcaagaacacagttaagaaatgacaacaaccaagtatgaagttgacaaattcattggagccaacaatttcagtctttggaggatagagatgacgacattactagtacatcaaggcattgtaaaagctatcaatgcagaagccctaccgactgttgaagatgcaaagaagaaactggaaattgagactaaggcacactctgttatccttctcagtcttggggatgaagtgctaagagaagttgctgatgaagaaaaggcccttggactatgggataaactagccaccatctgcaggaagaagtcgctggcaaataagttgtacttgaagaagaaattgtactctttaagaatggaagaaggcaaggagcttagaaaatacatagatgactttaataaggttgttcttgactttaacaatattagtgctaaggtagatgaagaggatcggggctataatcctactaagttctctgccaaaattatatgaacattttgttgatacaattctttatggaaaagatactcttataatgttagaaatgaatgttgcattgaattccaaggaaatacaaagcaaatctgatgataaaacatagcacaatggagaaggattgtttgtcagagggagacatgacaagaagggccataagagttcaaagcatggtggtgattgagggaatcaaaaggccaagacaaattcaagaaacactactaacaaaaagtgtttctattgcaagaaagagggacatttcaaagatgagtgtcttgctctaaagaacaaactgaaaagagaaaagacaaaataaaagggacaagttgatgttgcaatagatggatatgaatcagttggtgtccttgtggtgtcaaacactgactcttgccaagaatggatccttgactcaggattttcattccacatgtgtccttcaaaggaactgttctacaaacttgagaagacaacatgaggaactattttacttggtgataacaaagcttgcaccattcaaaaaacaagatttgttgggatgcaaatggatgatggagctcaaagaacaatcatagatgtaaggtatgtcctgacctttaaagaaatatttcgtctattagtgttttagcttctaaaggctgctagattaagataaatgaaaattcacttaatgtcatcaagggatcaataactattatgaaagtaatttatagaaatggattatattttcttaatgggaaatcagctactggtctaacttcaaatgtgacagatgcaggtgatgatgacatgacatggttatggcattcgaggcttggacatgtaagtgaaagaggtctcacttacttgaagaagcaagaaatctaaagcggagggtgtcatgcaaactaaatttctgtgaagaatgtggctatggtaaaagttgcagatagaaattcactgtaggaaagcacaccacaaaggagcgcttggcctatgtacattcagacctatggggaccctcaagaatccttacacttggaggtgcatactatttcatgagtatcactgatgactactcaagaaaagtatgggtatatatattgaagaccaatgatgaagcattcaatagatttgtcaagtggagaaaacttttagagaattagactagcaagaaacttaagaagataagaacaaacaatggatgggagttctgttccaaccaattcaaagctttctgtgataaagagggaatttccaaacacttgacagtgagagatacaccctaacagaatggtcttgcagagagaatgaaccagacattgcttgagagggtcagatgtatgctcaaaggtgctggtttagagaaaaaaattttggggtgaagctttgaatattgcatgttacctaataaatagatttccatgcatgaacaagcatcaactttatgacaccacaagaaagatgaacaggagaagctcagaactatgatcatctcaaggtatttgggtgcactgcttatgcacatgtgacacaagacaagttgaagcctagagcagtgaagtgtatgtttctagggtatccagaggatgttaagggatacaaactatggtgccttgaactaggtttcaaaaaaatgtattataagcagggatgtcacttttacagaagaggggatggcaatgaaaccattgtcaaaacgtgcattgcaaatagaagacacatccaacaaggtcaatcttgaggtagatcaaatcaccaattcagatgaaaccaacaacacagatgaaagtcgaactcaataaactgatgatcaatcacaagaaacccagggagacttagaagactatcttttggccagagataaagtaagaaggaacattagatcccctgcaaagctgggatatgcagactattctacatttgcattagttgcagcaagtgacctagaaaactcaaaaccaaccacatacaaggaaactttgaaataaagcaatagagaatagtaagctattaatgaagaaaaggcgtcattaatcaaaaacaaaacatggtcagttgtagatagaccaccaggttaaagattgatcgacaacaaatggtggttcagatagaaggaaggaatgacaaacactgatacagtgagatttaaggcaagactagtggcaaaggacttcacaaaaagagagggtgttaacttcaatgacatctttgcaccaattgtgaagcaagcatccattagagttatcatgcccaaggctacaaattaagaccttgaaatagatcaaatggatgtgaggacagccttccttcatggcactttagatgagaagatctacatgaatcaacttgaaggatttgacaatggcaatccaaattaggtatgcttactgcataagtcactttatggcctagaataggcacctagacaatggaacattcgatttgataagttcatgtcttggattgaattcaccaaaagctgctatgatccctgtgtttactttgacaaacatatatctactaatgtatactgatgacatactaatagtaggcaaagacaagcacgagatcagcaagttaaagtgtcaacttaagagtgaattcgagatgaaagacatgggggaagctaagaaaatactgttggaattttatgccctaaataaaacccatttcaatctaatctgatttgttatcaataaaaga

SEQ ID NO: 161908 - DNA, 6960 bp, Cannabis sativa
  modified_base (2325)..(2333): a, c, t, g, unknown or other
ttttaaaaatttacaagtattaaaaatttcttaaatactttaaaagaaataaggatgtactgaaatattcttttaaagaatgtactgttagggtgtaaaaatattaaaagaactaatattctactactttaccttgttaatttgtgtactagaataccatgtctactttaccttgtttgcagaggtagatgtgctatcgtccgtactactaaaaacagcatcttatttctattttatataatttattagaacatctcataaagagcatgtcttttctctcaaaaaaaaaaataaaagagcatgtctttaattgtaatttaatttccttatataatatatgtatatatatatatatatatatatatgaatttagaaaactactagagaagaaatatatgtctccttaatgaccagggcttaattactaactggtttttcatagacagtcgagcgaaaaagacatatatatataaatattaaatatgaaatatatgcacttagtagagttcatcatataaactatatttcctaatttgttgggatttagcttcgatcatcctatttgtacggaggactaatagggttattggatgttgaagtaagaagaggttgaaaattaatatgacattattggtcggtcttaacttttttagacatatatatagttaggttgattattgcatgtaatgtaaacagtgtgcctcatcatcatcggtaggacctcctttccttaattcgttgcccaggatccaatgtttatttaatttttcttatcagatttagaaactaaaatagctttaatttaagagcagagtaggtatagatacatttataatatacactcaagtgttaatgaacaccagctactttatttctcactggggaagggatgctatcatgctagtttataattgagcgttattgttattaggcactaatgtctctagtagtatttagaggtgatgccttttgattgattaacggtattttttaaaaaaattattatatttaattatatgaaattgatatttaattacactcataaatattttgaaaggtactaattaaacatatgactaaaacgtattaatatttctctttataattaggtgtgtattatatgtcaatgctagtttaatacaatgtgtcatatatacacaacatcttaaatattattgtttcgatcggttttagcattattttataaaacaaataatattatgtttgatatatagggaatgaggagagagacaatcacgtacgatcgagagagagagtaatgtgagaatcaagaatgtggagagacaaaattataagtatataatacaagggaatgtgcactcctacttttggagcatgtactatcctttattcagttttcaattatgaattctccgattaattaattaagagaaattaatttgtatattttattatatatatatctaggaaaaatgacaataatgatatttatatttaggaaaaatatgtattaatatactaattaattagatatccacaattcacttgtaccatatgagtaaccattttatagtaaattttaataataattggaaaaatatataataaattatttgaccctacaaattgtgttgtatatgtgtaaattatcttattgtattgttacaagagaaatcatccttacttcctccacttaattagttgattattcttataaatatttggttaattacaataagatattgaaaagaattgctaggaaactattatgtataagaagcaagccataaaccttttgttagcatattaaggtcctcatgacttaagattcaagggtatatgagatgagttaaatctccttttcgacatttttaataatgatcatgaatatataactaaatatttattttattttttaaaaaaataaaaataaattattgctacttaacacaatttatttttaatataggattttttattttttatttatttctgtaacccttttgatttggaggattatgattgttattaattttagcaagaggtttgctttaataaatgttgatgctatatgttttcattttatacattttttttttcacacgacaaaaactgttatttttagtgataattttttagtcacaacataaaaattttgtgactaaatggcacttttgctagcacatttttgtgttggcaaaaattggtattgcgctggtaaaatagaatttacttgtgatgtgttggcaaatcaatgttagtattagaacttttgccagcataaaatgaaaagcgctggaaaaaatgatttttcccatcgcgtaaatgcgctggtaaaagttnnnnnnnnnccactgcaaatgtacgctggtaaaactttgaccactttgctagtgcagtttgcgaaatgcaacttttaccagcgcaataacgaactgtactggtaaaagtgacatttcttgtagtgtgtgacttttagtcacaacaaaaaattacttgtgattaaaacatagtatttagttgtaagttgtcactaatttagttttagttataacaaatattatgactaaaaatacatttagttataataaattgtaatttttgcgactaacacttttagccacataccttttagtcacaacacaataataataatttataattagccacaattttttcatcattcgttacaaattttgttgtgactaaaagtaaaattttttgtagtgtcatatcatcacccataagttccataagttctaaatagtagtacacttgaattatgcaatgcatcattacttctacaatgtttattactctagtgttgtctcatgaaaaaaattaataaatactttatttgtcaagattatgtttagtgttcttcttcttctattttctacttgtttgaaatttccaaaaccagtctatccttgtttagaaatagtcgtagttattaacttattaggttgactaattttactaattcggtttgtttaataattatttaacattatgcttgatagagaagactgaaaggtggatggagaagggatagagggaaacatattaaaagagagtatggaatcctttgtttggtatgatagagataggcaacccaacccattatttttcatccctccacaaggaaagagaaaataattatataaatataatatataattatattagtaaggataatattgtaatttcaatgattaatttcctctctattttccaatttgataatatcaaattaataacacagaaaatgtgttttgctctccattcatttttacttttattccttaccaaacatatatatatatataaatatatatagcatagtcaatcttcttttgtgctctttgagtatggtctaagttatatataggacgtactgcgatccatttcaaccattaaatgaaaaacatgtacaaaaaatgatttgatattgtatattctaagtttttgcatagctaggaggccgtaattggtttgtttgaaccttttaatttcatctgaacaaaacaagctacatataatcacatacataaatcggttccttattataaaaagaccttattaattttatattctggaatattatgtccaagctacttaagcagtcattattctttctacaataattaagctgcatatgatatgacgtgtttcagtgatatgttcatttgaagttcatgcatttttcaagtaattagttaccgtacgtttctgttgctaattagttagtttgcatgttgatcagttgtagttcattaattcttagcttggcatgtatgcatatatatgactgtaacctatattttttaattatatattttcaatgagaattagagtaataattttcttacttttcatataataatatggttttaaccatagttgataggcttaatttgtgatccatattaggatttagtataggcttaggctacatagatatctgttatatttagtttttaaaagacttaatccaaatttagaatgcggaagtagtagagacatgaggtgtattgtaaaatatatgaatagtgaagtaacaactcatgtaacttatatatatatgatattaagtttccagacattattaataagagactcccaaatacctttctcaagatagtggagttcgaactcaagtgactctttttgactcactatctccaaattataaacaatttttttcttgattggattttgaatgtgaatcgaatgcttgtcagagttttgttgtttagttctatgttaagaatacaattgttgtggagaatgtagaatagagtgaagtgtatggggaggtgtatgaagttatatttcaaaaattaattagtaataaaattgaaataattcatgcatcttatatatttggtatattaagttcccaaacattatgcttttttataagttagtcctaggagggagatgaaatttagtctttatataaccttgagctatgatcacttggattttatgttactagaaatttccagtgtcatcataaattgtttatatttccataaattttcacttgtgacgatacataattatattatctgccatatcttgctagaagtccaatagttatataattacttttagtagattttctttgtcgaggccaaataatttgttattgtctgattcttggcgtttttgtctagtttatccttgcagtacgtacttataattcaagctaggttgctgatttactttcctggctttagttgcatatgcatgcttagtctaatatatttttaaaacaataatttttctacttttatagatgtttttcattttacatgtggtatataaatatatataggatattactgatattataacgtgttttgattttctcagcatgcaagctacgatagaacgttataggaagcacactaaggacaatcaaactcacaacaaatctgttgaacaaaccatgcaggttctcccttattaattattgcttcttttaataaaattaattaattgattgatatgtaatatcgttattagttgcactagctagtaaaacaatcacttgttttacatccttttgaggtgtaatattgttattagtgtaatttattatcagattatttgacttgttttactttaaaaatattataaaaaatcactaaccaattataaaacgacacttaatcgtagtgctaaacactataaatgtatcatagcaatgctgttaataattagatttctaattaatgacacttttgaagtgaatctatatattgctttttgaaatgttccaatgcatgcactgctaaattttatagctagcatagttaaaaagaattaataaaatatatatttatttgatttatttatttattttgaatagaaataaaattttattaagaagacaaattgtctaacaacataaacataaactcagtgaaaacaatactggcacagaagatttgatttgaaaaacaacaagaaactctaacaaaactatgagcttgtttggctgtgttttcagttttcagtttttaaaagtgagatgagaaaacaattttttgtcattttaaaaattttatggtgtttggtacaaatttttaaaaactgtttttagattttttcttacgaaaaaaatcaatattttagcaccatccgggtctaggttcgggtatggtttcgggtctaggatctgagtatgtgagcaaaatataaaatataatatgttagacaaaaaaaaaattatttttgaaaattgaaaacaacattttgatttttagttttttaaaactcaatttttaaaaaacagtttttaaaaatttttgccaaacgactcctaatagttcttaaaaactgttttcagttttaaaaaacagaaaacaatttttaaactgtaaaaccaaacaacctctataattaaggctacttcttagacatttgtagagtacattactctagatatctgtagaatatttactctagaatttcttatgaacatttttagaaaccatttaattagcctataattataactctaattaattagttgtactccaattgtaaaagtgggttaactgctgtatataagatgaaacatcaaactatcaataaagctatttttaatttattttctttacaaactaaagttctttaatgaaatgaaatagagactgtaaaatataatttttgtgttaaaaaaaaaaacattccaaccaaatactaaaacctatcctatatatttggtgatcatgtctaatatatcccagtaaatttagtggaagcagtagaaaccagcaaaatgagcttttgacgtcgtttaatattaataatatatataattatttgatgtattttattagagtatatattttgtgtgtgtgttatattgttagaaaagaaaattaatatagtgctaaaaatattatacaattttggtgttatagttgaagaggtgtgtttgggttggagaatatatatgctgttaaatggtaaatggcacattattttgttgagtctgacttgtataaatggtaaattctaaagttgcagcatttgaaacaagaagcaactgccatgatgaagaagatagagcttcttgaaatctccaaacggttagctaattaagctcaatgacttgattttcttgtactcatttaataataaaggcatatatataaatatacatgtataatattatataaaactttgaattgggaaactaatgcctcaggaaatttttgggagaaggtctgggttcatgctcccttgaagaactacaacaagtagaacaacagttggagaagagtgtaacaaaaattcgagcaagaaaggttaatatatacatcacaaagccatatacaaaaatttatttatgtatatcttgttattactgctgattattgttaattgcctcaactctaattcagagattgatatatatatatagtcaacactatcatattttgaatagtgtataaaagc

SEQ ID NO: 161909 - DNA, 2809 bp, Cannabis sativa
tcttcaagtaggacattactcgtatacacgggcaggacaataacgtgactcgggtccagcatattctggcagatttacaagttcaggaatctttgggtcccttaagcgaaggtgagccggttggtcatgctcatgatttgtgttgctcctaaacaagaaatagagataaaaatttatccattgataaacacatagagaaagggagagcaaatataacttgccatctctagtaacttaactttaggcttcttaaaaatgttctcattttcaaaattaaaaaaaaaaagtgggggaaataagttgtgattattttactttgaagaaacatgaattgactaataaaaatgtcatagactacaaacctgtgaagagaagttggaacatcaaaggagagcaccccatctggttttggataatgaatttgttgatgtaattcggctacctgcatggtgaaagagcaatgtcagtctcagtctatatttcccaccaaatcattcaattctaacataaaacctcatgcttcgtgcttcactaagatctctagaatttgttttcccatcaaataattcaatatttactgtcacaagaaaaaaataatcaatattttgcatctgctgtcatgcaaaataacaattaaaggtttaaaagacattacaataacaaatgaaaattattaacatcgctgacaataaatacatgctcaatctaatttaggcttaaggagtagggatggcaaaatgggcattttagcgggtcggtcggactgcaacccaggacatccaaatccccatccgagtctttgcccccggcccggcccgctactttttcttccggtcggtcagattcattttttttcctttttcgtgtccgtgcctacctatcccggttcagatattaataaaaaaaatagatctatcttgttcttcttccccacagaggttcttcttcatctaattttatgaataataataataatggttacataaatatatatatatatatatataaatctgtatatatatatatgcacaaaatattagttttactaagaaattacatttagttttaatataattataatatgtaatatatatatatatatataataattaattttttttttcttaaatgttagcttcaaaaaaaaaagattcgaccgttaggcgtgttggtgccgggtcgacccaccccatttacatccctaaggagcattgcatcagcaggcaaagcaagttatgaagggcaaaggacattagaagagacaacaatatgattacacagccaataaattgacaacactacgtatgtatagcaaagcatacagataaggaaaataaattcatatgtaaatatatattgcatattatattttctatccacaaccacttgattgagctcatttccaaaaactagtcctaatatctctaatcattcaaacaccaaatatgaaccttttcactatgcatgttagtatgacttgaaataagtgtgttctaaaccatcatcttacatttgttgcctcgtggtcgggtttcccatgcttcaatgtgaaagggaactttcctttcaatatatagctgccatgcagaaaacagtgatcagtaaggtctacgtcaagggaggaaaggaaaattatacagatttcattagcaagcatgattagcatcatagatagagatcatactgttcaatagcacttattgcaaggccaggaacgagtccgtattcaaatgcctgaaacatgaaatatgtaagtgatgagtaagtacattgaaactgaaaagcaccaaaccacacacctaaaataggaatataattttgtgcatctgaaacttgtcaaacaggtgttgaccacagttgcttgaaacccgggccaaagcatgtgaaactcagtatctctattctatcaaagattgacatgccttttttattttaataaatatcagtatataagctaatgtttgataaatgtatactttccatttaggaaagtatacctttttagaatgataaatgtaaataaaatgtttgatgaatttagatcctttatgactgaatctacttgaaggtcaccacaccatgaagttatcaatacccaaaaagcttcacacttgcaaggatgaaagagccattgtagaaataaagaacaataaagcccatatcaaattaacaaataagacattagagtaaagatactaactggccggtagttacgagcttcatatagctctttccatatccatgaattctttaaattatcccaatatgtttccatgttcaagccttcatgaagtacattaaatgcagcttctgcggccagcattcctgtgagccacaagtagtgaaataagtaatacattgtatggatgagatcaggaaatccctaaaattacaatgacactaacacctcaacacaaacaatctacaatttagttaacattcaggaatgcattttcttgaagtttatgatggaaatgttagcaccatgggatgagaaacagaaaccagatgcagttatccaccaacatactataattttcactgcatcggtaagataagatatctcaaaagtaattgatattaaacttttgaggcaacttacactggtacattaactaagccatattagtgggggaatgtttgaaataaggtggcgtttggttagaggtaataaaatggaatgggaaagaaaggagacaatctccattccattccgtttggttgcatattaaagtgttggaatgtcattctaatggaatggcctttccactattttggtggaatgacaattccattttgaaatggaagg

SEQ ID NO: 161910 - DNA, 5802 bp, Cannabis sativa
ggacgagtagtggaggcatcttgcctgcaagctttggtgtcttgacaagagatacactgtaaccattactcctaccccaaggaccagttggcactagaatatagtacaagccgagagaccacatcctacagctgcaacctgcagcttgtaacgtccttctcctgacacttggggaccaccaagaaatcaacttgtattttggagtcattagagctccttataaatacccttctcttccattgaagtggacgttggaaaatcattttacacagaaatacatacaagcaatataacatttatcttctttataaaatctctaaaacttgttcataattttttgagttttaatttcatttctctttaagtctttgattttctggccatagttttgttgacgagttttaatcgtcaacagatgcaatcatgtagcatcaaatcaatggagccaattccttgaatctgatatgccttgttgtctcccattagcccagttgtacctagtttttcaatgtagctgctgaacagattcttgtttactatcatgtgaaatgagcaccttgagtccaagatccattctccatctaattctgaactagatgcaattataacccctacagattcatatccatctacaatatcgacgtctccttagtttttgttcttcccttgactgttgtctcgcttcaatttagccttcaatgtcagacatttatcttagaagtgtccatctttcttgcagtaataacacttctttctaggtggtgctttttattttgacattggcttgtacccattcttgagtttcttaaattctttcttctttgttcttccatgaacaaatagaccatcaccactagatgcaagtttttcaactttcttctgaatttcctttgaattcaaggctaccttaactttagacattgttagtgtatctttcccataaagtatagttttgaaaaaatgtttatataccttacggagtgaattgagtagaagtatgacttaatcttcttctttaattctgaccccaatattgttcaagtccagaattaacttgttgaaatcttctagatgcctttgaagctctttagtctcaatcatcttcatcgtgtaaagtccttttttttttcaaatataatttattggccaaagatttcttcatgtaaattgatccaagcttgttccataattcgagggcagattcttcatcagctacttctctaagaactgcatctcctggactcaaaagaatagcactatgtgctctcatctctatctcttgagaaatcttcttaacattttcttcttccttagaactagtcactatgatcccatttgcaagtccttgatgcacaaggggtgttttcatcttattattccataaccccaaactcattaagacacgtaaacttatctacttcacatatagtagtagccattctagttcttgaatcttaatgagttcttgaaactacaaaacttgattcttgaatcctcaatctaaccgtgaagctctgatactatttgtggtgaattaacaccttttaagaataaaataaaataagaaatgaataactagaatgacaaaattaaacaatgacataaaaccagaatttataattgcaaaataaaataaatgaaatagaattaagatataacgagattcatcaccccttttatggtgactaatcctcgggaggaattgccatttggccaagctttattcgattttcaatactggagaattatagaggagaatatagagttaatctcatcaacattggtgtcttgcatcttaaaaatcaactcacttgagagagatgtaatcaaacacacacatccctttttacaacccttgtcactcattacaaatgtaattatcatctaaatttctctctagattgtcacctaaagaagtagtacacaagccttatattggcaactcaatatgaggggaactcgagttaattaaatgaaaaaactaacttacgagctgactagacaaacttgctccatctgacaaatcactaaatgagactagcagtagcaataaaccaagttactaaaatctcccacatattaattattaattttatcagagattagatagatccaatccaatctaataaatattaaatctgaatcattggatggatctactgagtctaaacattagataaatcaaaactaatctaataaatttacataaaatacatctaatagatagaatcgttccaatctaacatccagccagctcggatgactaaaattaattggatcagattggctggtgaaattcaatatctaatatataattggatcgaatttgaataaacttaaaaatatttgatgtggtctaatgaacacccttaaattgcacacctcagatcaagttttttttattttttttttatttttttttaagtagtatgtgtttgtcaatttagtcctttatgtatatattttgacaattataccttttcacatgttacaatttagtatttttcgtgtaaattaatttttgctcgttctaattttttgtttgtatttatcttcggtgatcaaaagtttggatccaccactaagagcactctcactagcttctctactctattcttcaaaatatatcaccaactcttattttttctattttacctcaagcttatatattgcgctatatattagcttctttaaaatacatcatcaaaactctacattttttttttttcaatttttaatgtatgttattcattttaaatataaaatattaatatttacacatatccttatataaaaatatgttttaatgaatactattctattaatgtagagctagcataaatagtgaattttaaaagagaggaagtttagagcttctaatgtaacatgtttttattttaattctttaatttttttagagaattattataaaagatctaatgtgagtgctctaatataatatgacacattttgatcaagtgttgaaaattattaatacattttagtattacataattcataaaaaaatatctaacatattatttatgtatatttgtcaggtgggatataagctgtatagataaacttgagccagaatatgtgaaaacatattataaggcaatgttggaatcttatgaagagtttgaaaaagtagagcttaaaaatgaagaattatacaaacttcaatatgcaaaacaagaggtatatttatatgtaggaaaactgtatagaagcaacattattttttctttttcagtagaacttctctatttttagtatttatagaaattaattataacttaatttttttttttaatttaagcgtttatatattacattatataacctgagactcaaacccaacacctccaacacacatccacccttctatgccaacttgagcatagcctcaagtggttatgtaagattaggaaatggttgttgtgttgagaaaggaagaagaaagacttaaattttcttatataattgtgtactagttatagtagacatttcacatatttaaaaaaaaattagaagaacttatagtgttaaaaatgaatatgtgtgcaactgaatattaaaattttgttttcgacatcataaattattcaaaaattgataagatatataaaaattaagttatatggaacaaaataagtagtagctattatgtcttatatatattagttaatactctatatttcagctgattatatactgtaatttgtaatataaaatttccatgcataatctattctatatatatatatatatatatgacagatgaaaagattgattgaatctcattttgaagaagctaaatggttgaaccaaagatatttcccaagctttgatgagcatatgagagtatcctatgtttcttgtggtaacacaatgttgatatccacaagttttgttggaatggataatgatattgtaacaaatcaaactcttcaatggctttccaatgaccctaaaattgtgaaagcttccactctcctttccagattcatggatgatataggttctcgaaaggtacaaatataattaattaaattatatattctttataattataattaatttatgtaaatttctttaaaaagtaaaatagtttgaatataaccctgtttgttttgaattaatttagaagtattaaaacaagggtagatacgagaagtattaaaaatataaataactaggtcactactaaaaaaatagcatctcgggcgagcttaattgatccaaaattgacctatcttgcatttaacatcattggaataccattccggtcgtatgacctttccatcattttagtggaatgactattccattttgaaatgaaaagaaaaaccattccaatacaagatttgaaaatatttattaatttttttatgcattttaatttttatttcattctaattttcattctcattcctatatttctatatttttattcctcccaaccaaatgctatatcttggtgggacgtcagtggtcaacctatctgtcggtcttttcaaagctcatcaagataggtagaattttaatatatatttgtgctctatatctcgacatcttttgacatcgcattgagattggtataccagattagccattttttgtattgagtcgtccaaaatgttaattattttatttcattagactaattaacttttaatattgtatatatgtagtttgaacaagaaagaaatcacataccatcatcagtggaatgttacattaagcaatacgaagtatccgaagaagatgcacttgaagaactcaataaaagagttgaaaatcattggaaagaaatcaatcaagattttattaggccaactattgtgccttttcctatcttagttcgcgttcttaattttacaagggtaatggatcttatctacaaagagggtgatgatcaatatacaaatgttacaaatgttggaaaagtgatgaaagaaagcatttctgctttgcttatagatccaatcccattataaattaattaatatataaaccattatctaatagtacttgaggtaattaaaatctgcccagttatatatgttgagacaacttagtactttgtgtggtttatttcatcaataaacttataatgaaatccttttatttttaataaacttattttattattatagtttgtttcgatcaatttttttattatggttcagaaaagctagttgtgttcgtagttttcacttttaagaagtgaacaaatcatagaagcaaaaaaggattaagaagaaattctagaaagccagtcaaagcaaccctaatcatttgtttaaggcttgactcttaaaagtttttaattacctcttattaatgtgtgtttgtttgcccaacactaagttaaaaatggttaattaaaattcaaagacgataaaggtaactctaaggaaagcttgataaaacttcacatttgagttatgttggagaacacatagatgaggcacttggcttcaggttgggccgaaacggttagagaagggcaatcactcattcttaaaatcagtattcttaagaccaagttactttttttttttgtccaagtttcttctctttttgtctaactcactttcttttttatttgtgaatttcgggaatatccccattcataggtccgagatccacatctatgaattgaaaggttcgaatgatcaactctgccaacaattattagaatcaataggtcttcaaacgttcatttaaaaaaatggaaaccctttttattggatgatcatgatacttcctaaaaattgaaattcttgatcaatg

SEQ ID NO: 161911 - DNA, 3508 bp, Cannabis sativa
  modified_base (3477)..(3483): a, c, t, g, unknown or other
tttattttattttattaaatttttgtacctatatataataagatgataataatttaattaaatgagttttaatttttttcattttttttatggaattttacatagttatgcatagcaatttaatttcatataataattatgggagtaaactaaattgtaaaaataaaaatataaattttaaaaatatttaatttaatttctatatttttttagcttttaaaattgaaaaaaaaaagaaacttgttatggtggtatttaaaatactattttttatcaaaaaatattttttaaaaaatcaactaatttttttaacttatcttagttattaacaaaagtataaagtataaagtttcattcaaaaaaaaaacaaaagtataaagttagttaaatgaaataataaattacattaacaacagtatcatacattcatacatctatagttagggttggatagtggatatataccacattaccactcactagaccaataacattttttttttattattattatattattattattttttttatagaatttgtaaattatttatgattgaatttacctatagaataatgtaattattttttagcatggttaatataatgttgtaatctattttattttaaattatggcagtgccaaacctagctagctaccagtcctacaatcaattattatttttttcttaatttttttttgccccactttttatttttgattgtatattatttatagttgaattattctgaagaatattgtgattattttttgacatgtgtaatgtaatgttttaatcttctttattctaattagggcctttttcatttgtaaatggggtgagattcatacaaagtttgaaatcattgttttaagttaaaaaaataataagatttgccgtacaccaaaatatgccattatttgtttaatatgtaaataattaaagttcgtgtgtttgatttgttggatttttctcatgataaacattattaattttgtttaaaaaattcaatagtgggttttctttttatattttataagcattttcccaaaaatagaaatatgtaaaaaaaaaaaaaaagcttcacctaccttgaaccattctaagcaaacatggcttgagtgtagcaacttctattttgtcattcaacttatgacctttaacctgtgaaaaaaaaaaaagaaagatattgagatataattataaataaataaataaaattggtattattaactgtattaagctataattaattaattaattaattaattaataattacctcatgagagagtgaaaagtttgtgagatggcaagtttctacattcacagccaatagtcttcttacatcaagtatcttgtcagtagagatacccttcaaccaaacaaaatatctcaataataatcttttttttttcattaatatttattaactaattttccaaattgaataaataatattatttaccttaagaacaacttgattgtcataaggggttatcactgtaatgtcaagcacaacaggaacaactgaccccaatacacaaaaaaaaaaaaaaattaaattaaataacaataacaataataatcaaagaaagaaaaaataaaaaatgacatgaaaaaaagtttcttacctttttcttcttttttcttcttatactctgcttttgatttactggtcttacctctacctgattttggagccattttctttcttctttttttgattccctcttctaattagaataaagggatttttttatttttttatttttggaaaaatatagttttatatatatgaaaggaataaaagaaaaggagggtatcgaagaaaaatatacttaatttccagaaagaacagagagaataataagataagagaaaaggagagtagtataatagagtagtgtatatgagaaaatcttttacaaaaaaaaaaagaaagaaagaagaagataggataagggtgtgtttggggggtttattttgctctctttttagatttgagagcaatcctggcctctccttcttgctaaaacaaaaacacacccttacctattctctctctctcttctctcatgtgagtgaatgaatgtgacgttataagagcacagaagagaggtcccatgcactcagacaaaaaaaaaaaaaaaaaaaataggtggggttagagttggtagaaggaccgttaaaattgtgccacgtgtcagatgatggtgtggccgtttccattttgttttttcacatgtttttgacttagattttcccaccacaaagaaaggagagattatggaagagaaaggggttgaattgaatcttggttaatttggtttggtttagtttggtttggtaaatttttagtgtggttattttatagaggggagggtggctttaatgtatgtagttaattgggtttggggattagtattgttatgctttggttttcatttaatgtttttgggtgtaataagttagatttttaggtagtgatatttggtagttgctactatactactagtactacctagtagtgtgtctatgtaaaaaaaaaaaaaaagcatcttgtgagtatttattatcttttatatttattggggcaatgaaattgaaaataaagcttttcttcaaaggaaatgaccaaaccaaacaatgaaaatatgtgaagcattaattcaaacagattttaagcattacctaatacttttggtccaacaaaccaaacccatattaaaaaacctcaccattttcctttttcaaaactcatattaaaacattagtggtgtttagtgcattcttaagtattatatcgctattgatgcaattaagtatcatatctcatataatttgatataataatttttatgaaatatcactaatcaatcgcaaaaaagctacttttgagtggtgttgggcaccactaatgaataataataatgctatatatttcctaacatgtttgattttctaaatttaagatttttgataaaataatactacttaaatttgcatatttagtcacattaaaattaggctactaaaatccctaatgatacaatagtattacttgttaagacatggtaaaatatattattataagtaataggagccataatggaataattagtaagagttaaagggtcaaaagtgaaattaactttctaaatattaattttaaaaatctttatatttttggtgtcattgagtttatatgagatcattaaattggttaattaaaagtttgggctgaaaaaaatttagtacaaaaattagtatctctaaattttaactcccccgaatattttaaagtggaattactttcccacaccctttttacaatttaaccacaaaattgaccattagtaaatgttgagaatcatggggttccatctcaaaatcaattggcaatgcgtggagtagccaatattgaatcgtatcagagtggacatggtcataggatcacttgcccgcaagggatannnnnnngataccatgttgagaatcatggggt

SEQ ID NO: 161912 - DNA, 7663 bp, Cannabis sativa
  modified_base (6974)..(6978): a, c, t, g, unknown or other
ttaactagatctgttcgttgtttgtattatttcatgttaaataataatatataaattaggttcgtgtcatcataaacatgttgtatcattataaacgtatcgaaataaatatataagacataataatatgaattgtcaaccctaataatcacattaattaatagtctttttataatacttgttcagccactcactttaccaattaatagtcttttttaaacatatctttattttagttgacatagataaatgcacatgcaattcattaaaaacattagctgttaccgaacctctcccaatattttaggtatataagcattctaaaccaatctaaataatttaaacagcatatataacaataataatagatgaagataaaatataaataatgtagaaaaataaatataattaatttataaaacatatataagcattattgatatcaacctacgtaacggaaagcgttgactaagatttttattaattttcatgtcaatgtcaacagccccacatcttttttctttctattttagtaattactatttccttttaggtcaccaagttggattttaatattgagcattactttattgagcaacagaaatgttaagtggctcctttaagcttccaaacaccacaacctatatttttttatttaataaataatataaaaaactattacgagcaatgctgattgaacaactacttagagatgacagcttgcaatttgttagcaatatttctttaaaaatgatttaattagtttatatggtgccgatatttaattacacaccgaagaggctgcaagacaccatttatgccctaattagcattaatatttaatatttttttaaaaaaattggtgtctacatgattaatatttaatatattatattaccccttaattagcatttctgtctctgtttttcgttttttgctatcgtctttaaatagttgatctcttatatcagtacttttaattcacccacccaacttataagctaaattgaattttgataaagagagaccaaagagattatataattatatataaactataaagaatggcggcgcctgctgttgtatttccaaggtttgtggttatcaaatctaaattcaacagcaaatacttgagaaagataactaaggaagagattgccaaaacgacgttggaagatgcgtttctgtttgttaaagaagacaaaatcacgagtcctttggcgaaattcgaactgataatagccaagacgaatcctggatgtgtgcacataagatgctgctacaacaacaaatacttgaccagaataggaggacattttatcgaagccaaggctgatcagcccatagaagatgcaaaaagactatcatgtactatgttcgaaataaccgaagccgatttagaaggatacttccgaattcgccacaaacagtctgactgttatgtagttctttcgaggtctgaaggcgagcgtcacgatagaactatagtcgcggaatcaaccacagtcgaccgtgaccattgcgacatgttccaaatgttagactgggaatcttttgtgatatttccggaaattgtgtctttctcgcatgagaaagacacaaactatctcagctacaacaaagataatagttgtctacagtttgtggagaacaaagacatcgcggatcttaccgtagggaatgagatgtacatttggggtgacggttatgtgcgcataaagaacgtttctagcaacaagtactggaggcgacgggaaagcgataactggatcttggcagactcagacgacgccactggcaacgacaagaacacgctattcttgccgatccagttgggcaacccactcaacaccgtggcgctacgcaatttgggaaacaacatgttctgcaagagggagtcggagtatcttagggcgcaggaacgcagcattaccaccgagacgatgttgttagtttcggaaagtgtcatttcacggagcattgaggacattattttccacatagacgatgttagggtgcatcaacagatcaaggttggggatatggtatatgtaggggccgaaaaccccgacgatgaagacgacaacatggacataaagatctcctacgagaagtttacgtctgctacttttgcgaccagccataccctaaagttcggggcgaaaacgaccatccaatataaacctattccgtttgttgctgaagggaagatcacattgtcatctgagctttcaaacaaagttaagtgggataatactgagaaaagcaatgtaaaatacgaggctgaaattcacgttaatgtgcctcataagagtagagtaacatacagtgttcctgtgaagtggggaacgtgtgatgttccctactcttatactcgggtagagaagctttacaatggggaagtaaacagaaggagaatggatgatggcatatacagaggggttagcacattccatgttaaggccattccgaacgtcgaaaagatacctgatactgacttatagtgctatatatatatatattatatgtatctatatatatgtatgtaagaattgcgtaataataagtaatagagtgatcccagcagccacaccaaagaataatatcgatgcatgcaataataaattacatttcccgtgttgttttgatgaataatcaaaataaataataattgggtaaataacaatattatattttccaaaatgacaaaaataattttcagcaattttgctttttaagataactaactttaagaaaatttctaatacgaaagaaaatataactagttttgtcataacatctttagataggattattattaagttttattttgataaaaaatcagtttagagtcatattaatttgtataattttagaaaatacaagatctattttgtcatttaacaaaacagaaggtctaattagtaacttttgcaaaccacatggtctaaaatattatttacccataataattgcctcacgcaaatgtgaaaactatttactattagttttatatattttaattttttttaaaggaactagcaagatttttcattactccaaatatcatttacaatcaaacatcatcttccattagaagaccttataagatatatatataacaaatttctttacaaactatgatctttaatcctttttacaaaaataaggcgaaccaatccgtatctttttatgttacacaaatacaagtaattctatttttatttgatccacttgttttataaacaatcagcttcggacttcctagctagtgtagaaagccagaatttttttcatttcgagcatgccaaacctaatatacaagggctgctatagctgccgaatacacacatttctttactctgctttttctttggctctttctatccacctaacaagcctttgaatggaaacagagcaagctccccatcccagcaatgatagcaactgttgaagacaatttctgatgtatgaacattcgaaaaataggcggtccactatttcttcatacatacgacaaagaatacaagtatcatcatctattatgttgaatcgatgtagcctttcttttatttttagcatagccatccaaaagataaaactgtgtttgcggatgttgagcctaccccaaacttctttgctccaattctctcgatcctgtgtttgatagagaacattgtatctttgagcaatctaatacttctccaatgagagcacgaacagatcataaaagtttttcaccttatccttgatctcacaatcttttcctagtaccaggaactttgtgtcagggtcttataatccgaccaatcctcatccttgaaatatacattgtgtacccatttaacgtccacaagtatttaaccatggcagcagtgttccaatcaattatgtttttgaagccaataccatcggcactcttcagcttatccaatcaattatatttttgaagccaataccactagcactcttcaacttacacacaaattcccaagatatattacccgaacttgtataatttgcttgacttttcaataaaaaggctcagcaaacacctgcaatttcttttcaaatctttttaggaagaatcataacttgactctagttggagtgaagtgataagagcaccgaatggattagaaccgctcaacccacaaaagacatatttctcgagctccagcacctgattctcactgtcattttttccaccaatatactgcattctttggttgagattatcttggcacaaatgggaattctcaaatatttgaaaggaactgactttaagctaaatcatgaggcatcaagaatgcgttgaatctctgtttcttcaactccattacaatatattgcaaactttgctttgttggtttgcaaactagatgtactcgagaatagtttaaggccttgtaacatgaaacacatgctcttgaaatctcctttgcaaaataagagtacgtcatctgcaaagcttaagtgattaaacttcaactcatcacatccctcatgaaagttgaaatcttgcttcttcacaattctttgcataatttgagaaagatattccatacctaatacaaaaatagaaggagtgacattggatctccttgtctcaagtctcgctttgcctcaaaaaaacatgcattgtccctttgaacatgagagaaaatcttggagttctaacacacttcatgaccaaattaatgaacttattcaaaaactgaaaagcatgtagtatctcttcaataagtcccatcctataatgttgtatgcttcttgtaaatccaacttgatcatacaattggcttttgttgattttctctcactatgtctaatgagatcttgtcaaattagaatgttgtgagcaatgaatttgccttttacaaagccccttgattctgagccactaaataaggtaagatacttttgagttgagaacaaatgagctttgtggctgctttataaagtacatggcagcatgctatagtttggtagtcactaacattgttaggatacttactttttgggaacaagtgtcaagagtgttaagtttatctccttagaaatttgacctgaatggagaaaagaaatgatagcatcacttatgtcctcccctaccaagtctcaattatcacggaagaaaaaactattatagccattcggtccaaaagctttgagaccatgaatttcaaagacaaccttcttttcttgatctcgagaaaactcagcaattagcaaattagcttgttggcttgtaacaagaggcccctgattaacaatctctgtcaaaacacttcttctattttccattttactaccaagtaggctttggtaatgagaaagaaaggcatatgtgactcttgaaggatcatcaattctttctccatttccacaattgagtaaattctgttatgcctccttctttctctgatgttagaatggaagtgagcagagttttcatctccctctttggcccaactcaacttagctttttgttgcgaaaataagcaatatgctttatgtactttttcataatttttcctagcttccaattccatcaattgcaacccctaatttagtggatcaagctttattttatattgacattctgacagaaactccatagctttagaatcagctagctgcttgaatatgaggaaaaccttttttgttgagctctttaaaaattggttgaggattttaagttttctaactacttgaaacataagattccccttgattttctgctgacatatactagtcattatctctaaatattttggatgagaagaccacatccgaaaatatttgaacagtgtcatgccactcaaaaattctgggtgcacactaagtaccgctggtgtgtgatcaaacatcccttcatttaaaaagacagcctctacttttagaaaagaatttagccaatcttgattagctaatactctatcaatttttgagtatattctttcttccccttgttgcttgttattccaggtgaagtaattcccactgaactttacatcctcaaggtgacagttttcaacacaactaatgaactcttttgaagaattgtatcttacttgagtgccaattctctcctccttggcgagaatgtcattaaaatcactgagaaccaaccatgattctataacagccaggtcttgatcagatcttgccaaagtactttcgtgccctcctcatcattgtaaccataaataaaagaaacaaagaactttgttcttattgtctatggaggccggtaacaaacaaatgaattaactgacttgtatagttcaaaatactcaaactgaatattaatggattccaacttgcaatgatccttcatccatcatgccaagcactacttcaagtgaagcaccaccccaaaaacatcagaacatataaggccccaagttttcaagccttaactctcatctcaaggataccaaccaaactaagcttttaataagaaatcaattgcttgactgcattttgtttatgttggctataaatccctcggacgttccaagaaagtatattctatccattaggtagaggaggtactccccctcctattttttcccctgatgcaatatctaccattttatcttctagtttctctaccataatctctgttagaacactgaatttgctatagtgcttgagtgactctctttcccttttggtttccaaccttttgtaactggtttgaatccttcaggatctacctttgtcttcttatcttccatatcaccattcggttgcttggtctttgtcacccattattccattatagtggccacaaattaggggtttccactcatatgtgattgctgccgatacattagctccgtactcatcttcaaaggataaggtcagggaaatcttggtttagagagacccactactacaaaaaggaccttttgcttcagttttaaagtgatacataaataatttgcttcggtttgagcaaccgnnnnnattaccgtagacgcaaattttgattttttttacttccatttcaaaccgacgctaaatgtttttttcttcagttatgaaccgaagcaaaaaaaaaagttttacttcggttcataactgaagcgaaaaacaagtgcaccgacgctaattggttttttgcttcggttatgaaccgaagtaaaagaattttttaaaataaaacagaaccatcgcaccaccaccaccaccactatacgattgtacatctcacactaccacatatacagagatttgaacagccatttaaactcaaaatcaacaactttaaaccaccgcatcaccaccaccactacaccatcacctccacaccaccaacatcgcacgccaccgccaccccaccacccatggcgaccgcaccagcgcaaccctaaaaaattagccgacatcaaatgagaaaaagagagattgaaagagagagagaacaaaagagaaaaataaaaagagagagagatgagaagggggaaagagagaacgatattatcgtgatagggtggttgtgtggggtccgtccaagccagtggtgtgagcggcagcctccatcgtcggcgcgccatctaagagagagagatagagccgagagagagagagagatagaatcgagagagagagagagtgtgtgtgtgtgtgtgtgaaacgatatggggcgact

SEQ ID NO: 161913 - DNA, 1367 bp, Cannabis sativa
agtagatatacaacaaatacaaggttcacaaactaaaagcaaaaatctctcacgtataaatttgctctactttcaaatgcacttgagtctaggaacgatcaccggaaaatggtaccaaagggtcaaatacattaacaatacatggcagtgaattgaaaaatagcatataacattaaaaataatgcatcaaaacgtgatttttatacacagatacccatttttctttgaaagacagatcaatcctactaaacaagactaaaaaagtaattctctttcaaaataataaagaaaacccagttgagagaaacatggacacaaacgaaccttcttctttgttgggtactgtaacgtagacgacgatgctgggaacagtgtcgctaccactctccattctcatagaactcgaggtcttagctggtgcttgggtactgaactttgatctaaataaacaacaattagcacacgcaaaattattaaattgaaatcaagttaagaacgtgtaaagagagagaggtacttcaagagaggggcaaagggcagagactgagcacaacccgtattgacagagaaagatgaagaaaatgaaggagagaaattgcagaagccgaagctgagcatgcaaaacgccccaattagaggcaaacgacgtcgtatagtggaggatgtggagaaaatgggcgaagctctggctctgcaacacagtgtagaagccattatgtgaagtcgaagtggctgtcttttaatagacgttttgggtttgggtttctgctaaaggggcctgtttgggattcatttcttgatgctcttaattaggatatggataataaaagcaaacccgattctcctttcatgggagtgccacttgttcacatgtagaatagggattaataagaaaagataggacaatttcatattgcttaaaaatacaccccatatcaaaatttagattctaatctaatttgtaccaattgatacttataatttttcaagatacccaaaatacattttaattaaagtttccctctctttgtttttctctcttccccgcgctctctctccttcccacctacctccgagaagttgagaagtcgagaagcccaacagctaaattaacctattgtctctccctcaatcttcatcagctttcgctttccctttctttctcacttctcctctctttctctctcttcaatcttcctgaatttcggtttctctcgcattcactcgctttcccacttaactctgagaagcctagtcgtaacccaccaccaaactccacatccacaatcaaactatccaataaaaataattccagaatcgaaaattcaattatttttcataaaattttacaagcatcaatcaatcat

SEQ ID NO: 161914 - DNA, 4482 bp, Cannabis sativa
catataatttattataatcctctacaccaatcattgtcgacttggctcactttcgaaggccagtgactcataattctattttttacactttcattaatcaattgcacttactttcgatcttagaatcgcttaattccacaaaacatgatttctcactaaccaaatttgataaaccgtagatgccaacagccgagtaaaccaattttcgaaacttacttaaattggctctttctataccataagcacactacaacgaatcaatcacccacaataatctaatattccgaaatttgccaattatcaaataattgagaagattactactatgagtccaacattgcttttattcacaattattattattttttttaagaagaaatattcttttttttttctttattcattaatatttttttagtaatgctacaaaacactatacattttaaaatttcttctcattcacccacttttctaaaggaatcactcactaatatttcactcccccaaatttattcctagcttatgacataatgtaaggtgcaacaagacaaaaagtagtgaatagacatattttaggctttatattaagtggctataaattttaaattaggctcaagctcaaacttggtaaactagagatgatagaataagggtaggctcgaaatgctcaaacgattcaaaaaaaattgcctaaatcatattctaaacaagcattgccaagaattttgcctcaagagaaaaaatcatgcaagttctatcctattcaagcaatcattctgcaaaccaaagtagaacatttatgatacaattcaaatattgacaatttacgtcgatatacaatttctaacaagcatccaaattaatctagagagtcatagaatcaagcacacagttcacaattttcaatccatcccgtaaataacaatagcaacaaaatcaacgcattatatcatcggcttaattaacaacaacctaaataaagaaaactagaaaataaacacacaaattaataaaacaaaacaaacaaacaaaccaaaataataagtctcctccaccaaacaaaaatttcacatagtcccccatgtgaaacaaaaatttaaagagaaaaaagcttaccttaagttcatgccacatcagcatgcgcttgatgcccataataagcgtcatccagggcaacatgaaagttgtttttaaaaatgccctcaagtttcgcatgtgatgagtatgaaccaaaagcagcacaaacaacacaagactttagatgatgagcttgtggagaaacctttagtagctcgtagagaatataatttggtgaatatagcattaatgaaaaataaggaaccattggtagtttataacataatagcattgacgaagtcaaatcaacaactacaaccaattctttaaccaccaaagatacatcgttttcactttcctcaagtagcctcttaattagttgttcattttccacatgaccatccacaaccttgattgtgagttgatcttcaataattttatcattgaggattgatgttttttcattcacataattgagatcatcatttatttttttgacatgcatccaatgtacctaaattttcagccacttcaaatgattctttctatgcaattctacgctcaatctcttctatattttcaactaatggcacttcttcattattcaaacaactctcataacttttattatttgagttattatcgttaatatacttcaaattatccaccattagattacacatagagatcttaccatgtctgtcaagatttcttctgcaagtgatggcgtattctcctcttcctgaaatggttggggtgagtttgggaaataaggagagtattggtgactccaacccttaagtgaggaatcccagtgctggtcgtaatcaaaatctatcatgtcatttaatggattaattataacacgacttctccttaacaaaggttctccaattacctctacttcatactccacccaactttttgtttcatcatcaaagtctgttataaaataataatgtaaaacacccacttgagaaattgggataacatctctctccgagctccttaaatctccaacaaccagagtagaatggctcattgtgttgttggacaaaattcacatggtataacatttggatttacctagtaggtcaaacacattcaataaaatattaataaaattaaataaaaaaaactaaattagaatagaatttaactatattgataataactaaaatagtccccggtaacggtaccaaaaatttgttatgaattttctaacacgtaagtatacgtattgtttacaagtaatagactcacaagagaaaggtcgatcccacaaggactgtagttaattagcaaacaattgaatttctgattctatttggtgacaataaaaattgagaaaaaaaagtttaaaaactattgaaaaagtaaacaaataaattgaaatgaaattattaacagtgattaaagcttagggtaattaattttgattgtatatgatttattataatttaattctcaatttttaattttcatgtgatagcagatttactaaaaaaaacttatattcgggttagcacatatatatctcaacctacatgaaaactttctactcttgcaataaattttacaaataggaggcattaagcataaaaatccttaatgctacacaaactagataggtactcttgtcctatatcgaaatctatgtttatttcactataccataatcaatactcacttctcaaattttacattaaaattattaaacaattaattagtgataaaacaattaaaagtgattaagtacaaatgaaatagatgcataaaaaaacaattgaggaagaactaaattatattaaaaccgaagtaaagtgtcaaataatctctattaattaacaccctcataaaatgtctagctactcataattattgtaaacatgtgataacaacttaataagagcataaaaaataaagtacaagaaagaactaatcgaaaaaataatattgaaagtctccagagctgccttctgcctctaattttcttctcccaaagttgtcgactcaaaattattgaaaagaagcctttatatagatacaaaaaaagataaaaaaattttatttttgcagtttagtgtggcggcgcttgaagcacgatttttttggcagcaaccttttagttgcaacgactaataatgtgttggcaataactttttcaatattgctcggaattagacgattcaagatgttttgaaaggtgaaagagaaatctaaaaactctatgttttgattttatccaaaatctgataggaacatagtcgaatttaggcttaaaatttaagctttattttcttgcaaaattttctctactttatagatcatcgttttctgaaatttgacaaatttatacatcccaagtgtcgaaacctaaaccaaaaaaaaaaaaaaagtgtaattctattctaaaaaataacaatgaagaagaaaattaactataaaaatgactcgaataatagactaaaaatagcccaactctttaccaagtggacggcattgggattgaaacacaaattagtgtcatggaacatactgtgcatcttcattgggatagggacaattaaatttttttgtgatgcctttcaaatacatcaaacaacacgtcaaagcatcatcagcaacatatccttctactatggactcttcaggacgagctttgtttaacatatcctttcaattttttcatgtatctctcaaaaggatacattcacctcataaattccggtccacctattatagcctcatttgtcaaatgtaaccaaatggatcataatatcgaaaaaatttggagaaaaaattaatttcagctggcacaatatcgagatgagttttttttttttgtgctttctccatatcttttacatttaatgtctttgaacataattgtctaaaaaaatagcatagctctgttatggtatctcttaaactttttggtagaaattaacgaacagttagtgaaagtaactgttgcattattacatgagagtcatgagacttcaatctagatatattattgtcattctggcttaccttttatctcaagttagaacaaataaagccatttggaaattttgcttcttttataaattgataaaacttttacttttcttcagcacccagcacgtaaagagcatgtggattcattaatcttttgttcccaccaactttataaatccacaataactcccaaatcccgtcttcttgagatcatgtctatcattatcagcatctttggaattttcattaattatccaagatggtgtcgaggtggctgtcacacacattcttctcaatatgcatggcatctcactactacaatctaagcctttagcttcccttttttcaatctaatttataaaaagggaagctaaagggggtgaaaatatctgcattgacatt

SEQ ID NO: 161915 - DNA, 3057 bp, Cannabis sativa
  modified_base (3001)..(3008): a, c, t, g, unknown or other
tccagtcttaccaccaataatatctccaagtaaatcagaactttcatcaagaaccttagttagagaaggtggtagctttatgacttgcacccgaacgacacaccttttatttggagtggtcctctcaacataatctgagctcccaactaaagtttttaaattctcaagagtattaattgcatctccctcaatagtctctttataaaaaacaagaggcggtgaaacttccaagcttactctagcaaacctctccttcaaatccattatgcatctctcaagatgaacttcccctgcagcagacagaacatgctctccccttgaagaaactgtgacctctacaaacgggtctgctctgtttagaagctttaaacctttcattaatgcagttatatctgcaggatcagatggttcaatagcaactctaagggttggagcaacttgaaactccatacttgagaatggccaagagttctttgtggaagaaagagttgcacttttcagaatatattggccgaggcctcttattgccacaacatttcctgcacgagcagaaggaacagagtttaaaccttgacccatcattaggtacacagattgcaactcagcctcctgtacatgattttgcattgactctgcttttaatggatcatatagagctgaaagtacataaatcttctgtcctgaataaagaaccccactaaagatcctcgcaaatgcaagaaagcattcgcccgagtcatcatcttcactttcatcaatataattattgatgaattcaccttgggaattcctttgaggaagcattttcttcggaacagcaaacatcttggatacaaaagcaacacaaggagcttccggactcaaatcacaagcttcaaccgatgctctcacaagctcagcctctgcaagcacatcagaatcaacttcatcaacgacaacctctcttttggggagtaaacgtggaattcgaaatgcctgtgctgtaatagggtcaggcatacacttgactaccattgataacactgcttcagacagaggaagccaacggctcatcactgattgaagtacaattttgggatccttgttttgaagctcccgaggtggtacagacagattaaatgacttaattactttctcaagcatctttttgtctccatcagtatccaaagcagcctggtaaacttgccaaagtggctcaagcacaaactgaacaaacataggacgagctttacttcctccaccaattcccttcttccccacaatcatcttactcttcgcattgaaataccgaggaccccatagcgccttttgcaatgcagctgcacttgccccaagcttggaagcatagaactcggcgaaatcatgtatagtaaaaccccatccatccaatgcacacacaaatgccacatttcccttttggggttgaaaagtatcttcctcatcgtcctctacaaattcatgactctcatctccaaattcaccagaaggcccagcaagtatagaatcaacttctgacaaatatttctccgacttatacgcactcacaatgccattgacttcatgaacaatcctcaacaacctcgtatacgcctccatgggactcaacataagctcactaattaatctatcaatcttgttaagcaccaaacacggggttagcttctcaatccaagcttgccgcaaaaccgcatgggtttggatatgaacaccttcgacggcatcaaccaaaactaatgctccgtcactcaaccgcgccgccgtagagacctcactacagaaatccatatggccaggggaatcaataaggttaatggaatgctccttataccggagacctattgaggagctcttcatggtaatagcgcgccgctgctcctcatcgaggtagtccatgaaccggagacgcccggcgagcttagggtggagtaagccaccgccggaagaggcgatcaggtgatcggcaagcgtggtcttgccgtgatcgacatgagctaatatgcatatgtttcggatattacgtgtatcggaatcccccatttttgtctaaaaaaatcaatttgaacagtatacaagaaagccgaagcttgaaatcaaaactaggtcaaattcaactaccaaacgaatcaaacaggtttctagttctggaaagatgtttggacggagagaaagaggttacagacaacggtacctctccttcctctcttggtcgaaatcaaaatcaatggaagccgttctcccttagggcaatttgctctttcccacttcttctatttgtatttgcagcaatttatgcaacgcgttcgataaaaattagggctttgcataagaaaagaaagaaataaaataaacaaaattagggtttttcttttttttttttttaaatgaaagggatgcttttatttaaactttaatatcatccaatacaatccttaacaattcagaaggagaattatccttaacaaaaatacgatcggacaaataagaattacgcgtaaggaaatgcacgacctcattagcagaacgcttaacaaaacacaatttaacatgagacatctatgaaagcaagtgttggcaatcttgaaccaacataccaaaagttgaaggcatgacgacgctggtatgaatggcttgaacagcaagaagacaatcagcctcgagcaaaatattgtcgcatgatttatctttaatccaactgagagcctccttaataccaatcaattctacaatttcaggtgaagatgtcccactcttattaaaagaaccagcttcaataatatctccattacaatctcgagcaacgaaaccaaagccaaaagaattcaatgcctcaaaaatagctccatccacattaacctttaccatgtttatgtcaggtttcgtccagtgctccacctcctttccaatctcaaaatgagacaaagcaggctctaacttacattgttgagcacactgccattgataaagatgagttcttgcagaaagaactgttgggttttatgcnnnnnnnnaaactccatttcaatgtaatcaattttatttaacatcaataaagaaaca

SEQ ID NO: 161916 - DNA, 2326 bp, Cannabis sativa
  modified_base (1938)..(1939): a, c, t, g, unknown or other
atgaccatgaaaattgcagtgagtacaaaaggacctgcctttctttggtggttgttgttgtcttgaactataattatccttatttcctgaagctttatcaccatggaaagcaaaggcaacattcggatttggatctgtagtgggattatgaccccttctttgattctcttcttgtgtgacaaggtgaaagactctattgatttctggtaagggatccataaccaagatattaccttaaacctgagcatacatatcagacaattccatgaggaaagacatgatatattccatgttgtagtgttcttgcaacttcttgactcctccacaagtgcatccattgcatgaacatgttggtctgaaattggaaagctgctcccaaatggttttgagcctggtgaaatacatccctacattgtgattttcctgtttaagattcacaaagtcttttctcaaattgtacagatgagcaccatttctttgatggaacctgacctgaagatcagtccatatagcagcatcagactcatcgtaaagtatactagatgaaatttctttcgaaacagaatttaaaatccaagaaattactatgttaatgttacggatccaaacattataaagagaaggatcataaagagaaggtttagggatagagccgtccaagaatctgagtttattcttgactgatatggcgagttacatatccctgctccaagccacatagttgtcttggcctgtgagaggttgagacacaagaacatttccagggttatctccatgatgaaggtaatgtgggtcggttcgtcgagatgacttcttggtcgcgccacaagaagactctaatctcccaaattgattgaattgcgactgttttttacggctgtcggagtcgaatcgttatctcccattcttgtagcttgatctttagttgatattcttgaatttgaaaagagttatctgcaaaaaaaatgcaaaaacgtagaaaaggggatagctaagatgtcgatgaagataatcgatcttcactgtagatgtagttatcgccggagaagacgatacagtgatggtgaaggttgaagacgactgaggatcagaggaaaacattactttcctgctctaataccatgttgcggaagaaaatgaatgaattgttttatggaaagtaaatgaattgatacatagtactaaataaagccctatatatagatatgggcaaaagatcaagctagaaaaatagttggagttaggtgtaaaccaaccgactttatcctcaataataggactcaacatgtgacaacaataacaaaaaaataactataacacctaacaccttataactatatcaacggtacaaactgtaatcttaataattatcatggccaacattcttaatattgtaaaaatagcacaaatccttgattgtgggttccccttgcgtgaactccatgtacatcgcataaaactcaaggatgattttatagctgtcgggggtgagttggaaaggagtgatgtcataatatgtaaaaatcacctttacaaaagaatggaatggaactgcgatgcagtagaaaagaatgggaatagaaatcaccgtgatgtttgtcggaatgatcgctgagttggtaaagggaaggtgtgggcgttgtattgacactggttttgtacaactggtgttgatcagtttcaattatgaaatgttggcaagtcagatttccttaatcgcgataccaaatccttgcaggaaaatggttcgtccaatggtgcatcctcaacagacaacacgacatcctcattgtcttcaacttcatccccgtgagtaggggtcactaggggtgttcattggaccatatctaatatttttagacctatccagatccgatccaggtatatattggatgttagattttaccatccgattcgatctaattaatttcagtcatnnaatcgatccaacatccattgaatgttggattggatcggttctatccattggatgtatttcatttatatttattggtttaatttgagtttatctaatattttagacttaataatttttagatcggatcggatccatccaatattttaggtccagtatgtattggattggattggatccatccaatccaagataaaaagagtaaaattttaatgttaatttttatggatacatatagattttatgtataacaatataaaatctaattacactcatcaaacttaaatgaaaatactaattagtttgattagatgttggatgtattggattttcggacaccccatccaccatccgatctgatccaaatggatatataaaaataacatccaa

SEQ ID NO: 161917 - DNA, 1015 bp, Cannabis sativa
cacttcatagtttttattgctcaaccattttcaaaattgtagacaaacccacaaataggtactcaatttcaatggtcgaagaaaaataaaaactcagaaaaacataaacataattgcagccatgaatgtagtagtaactaaaggcttaagagcataatcaataagattgatacctcttttaatctatcataaaatgcactaaacacattggttcccgttgcggtttggcccccaagagctgcaatttcatccttccttgcattatccttatcttcatatatatcaacctgaagaaaaaggacaaacaaatcaggcatagctctgaaaacattgtgatataatggtaatttaagatttcacccaaagtacacatggcttaagattggagaattataagaaaatgaatgcattttatagtgaaatccgagggtttaccagtttttcagttgtgacggtgatagtgtcgatcatatggtggacacggtggctctgaaacaagcggtccttgttgctggatgggtcggtctggagttccttcactatgaggcgctcgagccgctccacctcctcatgagctgacctagtcacttccaataaggtcgacgacatggccgagtgatcgaaagtccagttagggtttcacactttctcaaactcgagggcttttggagggagaagaagttggagaaggttacagagaaagagtattacgtatcgatattaaacgacaagtccatataaaacgatttgtcgtatttagctccaaactttgatggggagtaaaaaaaaaaaaaagaaaaaggagagttttttttttttgaaaaatgcgtttataaataaaattgaagttagacctcatggtcattacaaaagatattaataggtatagtagatatctctacaataccatatctctacaatacctgtaatattgttggcaaacgcccatttggccacattatgggccgcgtagttacagtttttagcaatgtaagaaaaattacaattagtcata

SEQ ID NO: 161918 - DNA, 2145 bp, Cannabis sativa
aaaaaaaaaaaaaaatcttaaaaggtaaaaatataattttttatgttttatgtaattatccctacattttatttcaataaaatcagaaagcccaaagaacgaccataggtccataactgcaggtattacatggtagatttcatttgttgctgtctaacctaaaaatgttaccatattcaagatacaaatcatgtatgaaatatataatattttactattattattctaagctatgatattatatactgttactccattacatgttgccattttaaatttacatataaacatgggcttcctctaccataggagcaatgaatcactaattctttctatgaacaaattcatcagatgtggaaagtctgcataagcagtgaaatatctaactacacaacctactttctctttacagataaataaaacctcaacatatcatcagccttccattcccttattttccttttctgactttcttgataaactatttttgctcaaccaatcaacagactgaaatttctgaagaactcttttcatcacacaatcaatcatcagaataaactcttttttattatcaaggaagagacttaactcttcgaagaacccttgggcatttcttcttttcctctgccggaatcacattttccataagctgcaaaagaaaactacattagcaaaggacatttgtatctgcaagaaactcaaccaacaccaaacgcttttaaattttcttaacaaatataactactttcattttttgttttaaccaaaacaattgcataaagatgcattcattgcattgctaaggtgttcattaattgcagcacattgtattacttgtatgcatgcatacgcaaatgcaaaatgatagttcaacttcaaaatataatagttttagagcaaactcatagttcatggtcccaacctgttgaaacctttgctgcgtccgctcaacctgtattcaatttacactagtgtcaaacttacaaagaaattaaagaattgagactaatatatcattgaaaataaatttacactcataaggatttgtaaagaacaataatccacagcatacaaacacaacagaacagagcattgctgttttctgataaacataaaacacagaagcaacaacacgaaaacaatatatcccataagagaaatgctatagagcccgagccaggtggccccaattttctcccaatccaagtgtctacctcatatccttatacatagtttataatctgaccaaatttttataatttctacatataaaaaaaaatcaaatggaaattcttcattaaacaatttttcaacagtttcaatatatttgcttttcactttttttttcttctcttttaattatttccacttagaataaagacaattacatgaagcatgattctgtgatattttttcaattttaatatgttttttaattttttttctctaaattgcaatcttagtacatgaagctttatatagtgttgcaaacaaagggacttgaataaaatctctaaatactgtaaccacagagaaggaaaatgggcagtttacaaaaagaaactaaacaatgactgtgccagaaggatacatcagatgtagctctttgaaaattccgttgaatatatatagataaattttaatttcagttgaagagttgattaagtaaaagaaaaaaaaaatctgctgtgttgaaatatcgatttttaaatcctgaagaaaatttaataatatgaaaaaaaaataaaaactagaaggaaatggtgaattttttaaacccaattttttttactctctataagaaatgagaaatgatgagatccacatgttagcaattaatttcttaccttataattttgattcccaatcattttatcactgaataaaagttatcattttacattatatattttttcccactgtatttttccttatttcttattgctgtttataaacacaaatcaacaaaaaaaaagttttaacacttattttcaagaattatcttaaatctttattttttaactaaatggaaaaaaaaaatagtagaagaaattattagagatatcatgatagatgacaaaacatatatcaagaaagaaaaagaagaagatgaagaagagaagtgagggcttgaggagagagaaa

SEQ ID NO: 161919 - DNA, 6771 bp, Cannabis sativa
tgatggcgaggcatccgaagaaacggaactgaagcggccgcggcttgatgacaaacctgatgtttcaggtatcgtgacactgtttccccccactgttctaggtttttaatatttgatttgagctagttagaattggattgtgacacttgcgcaacactcgtgtaatttagttgtggcagtaagtgaaaacgggcacctagaagagaaggtagatgaacctgtgaaggatattgaagaggtgtcggccttggaaggtggcctagaggaaactcaacctcaatcggaggaaggtactcgaaatgaaactgataagcagcatccatctacggacagtcatcagctgtctggtcaaaatgcaaatggagctcaggaaacctcgaaagatgaaactgaagcaccctcttcagaggaccagcagcagcaggagggagaggaggcttctgctgaaccccatcaacttacatctgttgatgagcaacaactttcatctgataacgaaacaattacacgcagaatggaggtccctaataacaaggttggctttgctttctagcttcctagttccttacttgaatgctatgataagtccataaaacttttctgaagtaaacccaaacatctgattttatgataactcatcgtacatccgtggtgtttgactgtttgcaattgcattgacggctagtttacttaaccctcgtaatacatagcataattgaaagtactcattcttcagagttttgaaagtaatctatgtttgtagtgagttctgaaaaaagatcaaaattgttagtctgtaaaaggtgctactcgatacatgaaacagaattttaattcgtaattttaaaatgttccctataaaactgatagtggaaaagtagaggagtaattgcgaatttatgagtaatggcatcacctaaggtagaataggtagtacatttggtggggtgttgttaacaaggtttgaaaaatctttaaccgcaaagtgcaaagaaaatttacttctaggtgttaacagtggtttgaacaaccaccctataacacattactacatgagctcgtgtcgcaatctgaaagagagtgttataacagtgcaagcagcctcgtaggatagaggaatcttataattttcttgtgtatgggtatattttgttttgtcatttctttgcaactattatgaaagattgttgtttatattgttgcaggttggggttcttattggaaaagctggggacactataaggtaccttcaatacaattcaggagcaaaaattcagattactagagatgcggatgctgatccatatgctgcaacaaggcctgtggaggtcattggtactttggacaacataaacaaggctgagaagcttatcaatgcggtcattgcagaggtcatttgttctcttattacttatctattctgaactgctgttctaaactctgccttgtctcccttcccttccactctagctgctgacctgtaactcaaatgcaacttttgtttgatgtttggtatatactcagtagttgtatatttctacaggctgatgcagggggttctccttcccttgtggcaagaggccttgctaattcacaggccgcttcagccccagagcaaattcagatacaagttcctaatgagaaggtacagtgagctacaagtgttggttttaacgggtttcttcaacatttatgtacgaaagcttcatgtttctataacaggttggtttaatcatcggcagaggaggggagaccattaaaggtctccagacaagatcaggagcacgcatccaggtagttgatattgtactcagtacacctgttaatgaattatgtctattttccttttctttactgtatgaatcatgtatgttgatctattttccccttttcagttgataccccaacatcttccagaaggtgatgagtccaaggaaagaactgtacgagtgactggtgataaaaggcaaattgaaattgctagagaaatgataaaggatgtcatgaatcaggttaattatttatcttataatcttctctcaaatagaatgttacttaatgtctgaaatatggtaaatttgaagtactgttctctggtacattgggttattactgcaattgtttgctttgccagtgctgcgatatcatagatgctgttctgattgtgaaaacacataaattatgtttggttcataatgttcaatacttggggatattttgaaaatcttggaggatttctctcatgttcataatgttcatatggctgttacctggatgaattatggtgtatctaatttatttgttccttgacctacataattttttttgacatgtgtttggggtttatataattttatctccattttgtcaactatgcttaaatattcgtcctttacacggtatgaaattattgagtagtgcttcaagttcatgtccttgctgtaactttgtagtatttatgctttattattttcgtaacatgatatttgagtaaagacggcaacatgttgaaattagggtatgccttttacttttttggcatgcaaatacatgtacaggtcgctgtagctcactttaattctatgcttctaaagtcatttgtctcatatacaatttgtcaagggatccaaacagatttggtagtgcagaacttctgtatgatttacatttggaaagcaacatatatggtcatgaaatgatttgcttgaaacaatgtaacattcgcctgtgtcaaccttccttcaatttgaggaaaattgttacataatttatactgtgggagttggaccttgttttctaaacatgatgagagtgtaatattgatgaatcatccatgccaaggtctcttgaatgctgttaggaagataatatattcaatccaagatgtcggttgccttgatttatttatgttgaaggtgccaatttcgaattggatggatttaaaactgcagatgggctattgccttttccatggggccagctttgctttcttggtgtagcaatagacaacctctcttctctggtccactgaagaaaggtatctggcatttaatctcgcgattgcaggatgttaatagttggtaagactgctttgagatctgaaagttaaaaatcgtaattaagtaagactgttatattaacctttagagctgctgataagaactcccaagatttatgcttgaaatgtgtctggaattcctggtgaagaaatttaatcaaactttgcttgggttcaatgcttggaaattatgcttgatgttgaactgaagcatctaggataaataacttgccatttagtttgatgtctgacactagtattgtttactgacagacctcaagtacaggttcctgaaatcacaatgctttcttacttggattggatgatctcatatattttatctttgcatgtgttccttcaattgatcagttatttattaattgtaatatatccaaatcaatgatcactggataagaataacatatctggctcaacttccatatagattttggatagtttcgatggcgaattcaaaatatgccttgttgctgcatgatcatcctgggtttttctccatttctgtataaaatccctttaagtttaatgtatttgtaagtatcagcttcacaatgaaagaattacttgtgctattaaaaatattagaaatattgtttgatagttatgccaacctaaattctatataggattattgaaatcactagattactgggtataagatctgggtaatagatggattgaagacatgttcagatatttggctctatgtaaaagctttattttgtctatttgttttttcaaaagggaaagacagatcagttagtctaagtatttattgcaagtttgctatttgatgatcaattttttcaactcataatttatttttgtagaaatattttttagtaaactatcaatgaaaagaactttgctgtttgtagtttctaactattatttctttacctcatttgtatatttagaactgtacttcgttatttggcattgcatctggtagagattccatttgtgattgatgtatacttgttttaattcaatgatgataacttccgagttggaggagtcacctcaaaattttgaacaccaatgtggttacctggtccgaacagtgctttaaattttgtcgtctgctatttatttgattgatttctaatataatacagaagaattgctcttgttttaacttttatttttttgtttggtcatttggttttgagtagactgtgaggccatcttctctctcaagtggttttaatcaacagggctatcggcctcgtggacctcctggaccacagtggggtcctcgaggtcatatggcccacccatcctcgtttgattatcagcaacgagggccatattcatctcacaacccacagtatccaactcaatatggtggttatcctcaacaaatgggtccaagaggtggttttaattctggctgggagcaaaggcctccccctggcttgcaggggcacgggcataatggcggttatgattactacagtggacaaaaaggccatttatcagattctgcacacactgcttccatttctctacatgctcctggcccatctccaaatgctgcaatcgggccacctttatcacaagcaaactacaattatggacagcctcagggcccagattatgggcaacaggcaccttattctcagtcagcacactcccaacagaactatggtcatggctatgacgatcatgctccagcacagcatccctatggtagttctcagccactgtatcctcaaagtggtgctccagcaggttatggtcagcaacagcagtatggtaaaccatcttatggggtgcaatcccagggtccacctccccaatcttatggtcctcctaggcctagtcagcccggtgatgtgccttttcaaggtacagcttctgcgcaatcgtacggtcagagtgtgccacctcaacagccatatccatatgcttcaagtgggcaggcatatcctgcttacggctctgcccctcctgctgctgctgatgggtacagccagccaccacctgcgtctgcctcaggctatccacagcaaggaggccaactggctgcaagttatggccagtctggttcgcagcaaactggctatgcacaggtggctcctactgcagcgtatgggcagtacccttctgctcagcaaggttatcctgagcagtctgctccaaattctgctggttatgggtatcaaggtcaccaagatcctggatatgggactgctgcacctgcatcaacttatggcacaccaaatgcacaagggggttatggtgctcaacctgctcaggcccagcaagcttatgatcaatcagtccaacagtctggtgcttatggtgtccaaccaagcacttcagttacttatggtaaaacagtatcacctcagcctggttatgctcaatatgattcgactcagatgtatgcagcacctcattaattataaatggttttagttcatattctgtcgagttaggtttgagataattaatcaaattttaaaccaatgttttgttgtaggtttatctgacaattcacaaaccgactcctgcactgtaatgtttgaaattaattatgaaaattcaagattagcttttataaattataatatctctgatttctatagtgtgacaacacctatgctttgagaactttgttgcaggctgaagctctctgctttgcttccacaagggagattaggccgaatcaagtaagtggccgagctcttatcataatggtgaacttttaagtcttaacaatttcaactagaatagggacatttgcggcaagacaaaattgtaaagaaattgatgacgaataaaacaacaaaataaggtttagggataaaggtatagcattagcatttcctgcttacaagtactactggttgttcatgtttgatcaaaaagaaaatctttattaatcagcaagctgtattacctatcccaaggaagctttactcaagctaaccaatgaaaacaagaagaattacatgctcatcgttcctgtacattaacttttctataactaactagattaattggcctgtgaatgggcccgtttcaattgttctcggatattgagaagtacacgtgtggcctatctaaaaatacgaataacaatacaaaaatttaaatattatttcgagtaatgatatttgcaatgcacacaatttgcacacatttatatggtaagtattgtcaaccaatcattttttatttaaacggtcctacatatcaaaagtgactaatatatattatatgtaattagattgaatcgattttaattatattttacaagtgttatacaataccgatccaattcaattagaatccaatagttcacatcaaatcaaatccaattggattggattgcattggtttagaagttgcccatccctagtaataggtttgatgttcagttggttgcaatatcaggcttagcctttagactattctagttgactcagttgtaatttcaaaaaggaaacggctgattggattaattatcaatgccacagttgcagcaattgtctacaaccttacctatgtgcacttcagagagaaaaaccatcgaaaatacatttgttcttgttttctagaggtcgtagagttagcacttattttattagaacctagatttactatcatgtatgttgattataattctataatctaacactctaaatatgaatttcctagtacgatggaataaacacatataaagt

SEQ ID NO: 161920 - DNA, 2716 bp, Cannabis sativa
taacaaattcaaatgccacttttgaagctagtcgacaaagacaaaattgaattattctattgcttgagcaaaaaccatctgaaacaaagccaagagaattgatagcaaatatggtttgatattaataattttgttataacaagattatcctcttaacgcccatgtttgcattcaggaccaccaggtagaactcagtacctcttgatacaggtgttttacagtcctaccaaattgtacattgacgtcaatctgaatgttaacctcttatagcaaagatcaggtgaaggttgtctcattttcaaaatgctgatatcaggccctaatatttatatcatattttagaaatttatgtaataaaatcaaataccaattgtctttgaagatctcaccatgtgatagtcagcaagattgctggtataagcatccaaccgcttcagatcataaggtgataacacttctttaatcgaggttacaaacccgtctaaggtagacgtccctgaatctggctccatgaatttcatttttggttccaaaatgctgtgagattacaaagtatgagcaccttgaataataagcacgcaacttacagaaattaacttcaatactaacctcatagcaagcttgtactccattgaacgaaaagtctgactcaataatctactaaatcttagcctgaaatctgtgtaaccacaaagtatcacgctgagtaccaaaaataaacaactagagcaaattattaatcttttgaacaatagacaccttggtaaaatggtccaagaaagccaaattcatccgatcccttatcttcaatatcatcgttgttcaaaggtttcaagaccatacacgaatgctcaccagtcacagtactctattccattaaaagaaaatagcattttaaacctccataacaaatatattaatgacatacaaaaagaacatgtgaaagtctcctcttaactgggctgtggccaataaaaaacggaacaaacttatgttttctccaaaagcgaaaaagctccaatgtaagtccaaaggagacaccaatatagtgaagcttctctggttttctttcacgaagatgaactagcaaatgaggaaggcctttctttggttttatgttttcttctagcaatgaaacctgtatagggaaaacaaaaatcagaaatgtttctcagatatataacgaaaggaaacccttatgactaaggaaaaactcaaaacacaaaccaataaggcatatttggtcatagaaaagctgggtcactttgctagaaaatattatcctcctttggaaaccagatatgactcataaaaccagcaccatgtttaagttttacaactttcctttcatggaatatttgtcctggcagtcagggttattactggtgtacaccattgaatcagaaaatattatcctccctttgtaaaacttctgttaatatttcccactccaatgtataggtgtaaaagaaaaattataaggtacatatgatatagctaactactaaaatacagaaacagccatgccgcctacaaaaataataattaccctatgagctaaaaacctcaaataaagtacccttgtacaaattatagaagagccattctgatataacattagtataaaaaaaaacgtactttccagaaaatatatgagaacaagagaaactaattataggtgttggatctaacctgttttgcagcttctatgactctgacaggtgtgttctccacggcattttcagaatctgtttcagaaataggtgcaaactgtccttcataatacctgaagaagaaaaatattttgctttaaactcaaaaggcatttctgacagatttgttattatttattatatatctgactatatcactgagactcttatcacaatatgttacaaaattaatgcaatagtagagacaaggcagctctgtacctcttttacaaatgacatttatacaaaaagaaatgaaacaatgtcccattatttctcagatcattctcatgcttaaaagcaaatgcaagtcaaaattaaaattaaacctaaaaagatgattctgtaactaatgtttgtagtaaacttacagtcaatgggtattgttacaagaactaaaaagttataaccaagcaactttaccaatgggtctaagtatgcagcagtccagagtgatcaaaaataacataccttgtcaaaagttcaactgcttgtgaaccatatcctagctgcaaataaaaaaggagaggaaaacccataaaaattaagaaacttttgatggaaaacgaaccacaaaaactctaagaactcagcacaacctttattgcacttggatgggtagcaatccggacaatccgggcacctgaaagagttggaaaaacagtgtcttggaattgttcgttaaatttccatggtatctggtctcctgcaggttgacgaccagtacttaagcttctcaaagcggacgcacgggaaatctgcccctcaagacagacctgtgaatatattacaaacagcactcttgaggcattgagcaaataaatgtatttatttacatatgacagcaatgttaaagaagttattcaagtacagtgtaaacattcaagttaaataacaaagaataattagcatatttgccccctgaactttcggcactacctagttttgccccttaaaatatacagcttgttaaaaattctccctaaaatataacacttacataa

SEQ ID NO: 161921 - DNA, 2040 bp, Cannabis sativa
atagcaaagcacatcaagaacagctatttcactagaaattaaaccctcacctcttcttccccatcttcaaactctccgtcttcttcctctacgggctgttcttcctctccagtctctccattatcatcctcatctgcgccatcctccccttgctcatggccgtcaatctcaccttcggtgctcgttatccgtcctgtactctcaggctcggcaatatcggcctcgtcattatccacctcttcttcatcctcatcgtcgtcgtcatcatcgtcatcctcatcatattcaatcccatcttcctcatcactatcttcaatctcatgaacttcaacaacatcatcttcctccccttcatcttcatcaatttcatcttccccagattcattatcctcttcatcttccccatcttcctcatcatcatcaccatcttctccaaccacgggagcaacacgaaacccattcgcctggtgattattatgcccattaaccctcctggccgtctcagtctcctcctcatcagcatcactctcttcgtcctcatcaacatcaacaactccttcaaccacctcgctatggccgttattcatcctaaaaggccgatcctcaccatcaatttctccacttccaggatcatcttcatcttcctcttcttcctcatcctcgtcatcagactcaggtcgctcattctcatcagcatccatcttatccaaatacttaagcgattttatcaacccaaagaccctagatcgataatctttgactcttgtaaccggacacttgtacagatcaagggaaacaagcttaagctgagcaagcggagcaagatcttcaatatattgaatccggttgttcgaaaggtcaaggtcacgaagcgagtcgagaccggcttcaacaagaaactcaagaccaccagcgatccgattgtcggtgaggttaagcttttccaggttcggaagacgtggaaactgctcaagcgaagaagcaccaatattagcaatagaaaggtgctgaaggttctggaacttctctagaagactcggtggtggtaacttcccctgtatgcactttgctgcaccgtctagagtcagcgttcgagccgaaccgtagtcagtttggccgtctagagctgtttcaacagctctctcccaaatctcatccatcaaatttcaaactttcccttctactttatctcatacaaatcaacacacaaaaaactatatctacacacctacaccgaatctatcgatataaccaaagaacaggaatcgattcaaagcaggaaccagtaccaatttctcttgaacaactttccaagaaaataaataacctttaaatcaaactctccttatcctttcgtaaccctaacctgaaaaagatcaacacacaccccagtcaaaattcttaatcccctttctgtaaaaccctagtttttcttgtttttttttttttaattggaaatgtttcagagaagaaaataaaaattagacctaaatttctcttctttctttttttctctctcttgtatttggttagagagagtgaccggttgtgataaacctcacaatagaaaagaactcacaggagcgtggcaaagccgcgtggtattagatttaacgccccgtttggcttatgccttgtttggtatgatggatggaaaatagtaaggatggaaaaagtagcggtgttcatcaaaccacccacaccgcacaaactgcctgtaccgtaccacactgcaccgcactacggttgcagtttgcatgcactgcactatatattacaaaattattaatttttacaatataatttttattcttttttcatataagaataaacatatgtatatatatatatattacatttttttagagacagtttaatatattgagttaatgattagtatatatgttatgatgttaaaattttaataagatttttttttggattattaactttatagattattttttaaatttttattataatgttcgataatgatagtagtgtaaactgctcaaatcgtactgcactatactgtatttt

SEQ ID NO: 161922 - DNA, 6381 bp, Cannabis sativa
aaaaaaaaaaaaaattgagctttggaccatattaagattaattatacatgcattaatatataatttgagtttatcatagatatcactcgagatgaaattaagtgatagtttttgttagttttctgatttggtgcactttgaggtgtttagttcttttaattcgagatagtgtactaattttggaaatggcaatgcacgtaatttttggtatatttcgtgatttttatagaatactagtttgtgtaatgtgtataagtataattgaagatcgcatgtatatcattattattattattgtaaatattaatcattcaacaaatacataaaaattaaattgaattaatataaagttaattggttgattaaaaaaattaattgaaaaacattatcaacttgaattatttgtatgaatgtgtttaagatagaaactcttaaataattattaaaatcattgatattatcttatattatattagatatgaaaaatataattttaaaacaatgcatgcaagacattgaaataaaggaaaaaattacacgttagaaaatgacaaaataagagcatccacgtgtcattttttcagttatatttaagttaatttttaaattaaaaataaaaatttaatgacatgaaccaatcaatattgtcacgtggttattgacttgacacttatggtcagatacatacaaaagttctagaaatataaattaaggattattaaagtaaaaaattaaatttaaatatttatctgcaattagatttatattacaaattacttaattaaaaattacatatacttaaatattgacataataaagagttctttcatttaaaattagatagggtagaatattgttatcccaaatttcgcattgggtgacgtgttgttcatctaagtgacacgggaagcattttgagatctggataggtgattccatctttggcatgccgtctagggtgggttattcctcgaacaacttatttgaagaataagctgaaacatccggacaaggtaaatgacaccgtccgaccaacatcaatctcgtagcaagcccgcatacaccgacaaaggtaaatgcgactgaaatatctttagtgatacttgccttatttatttatcaattaaattcttatttactgggatttccacacgttattatggtaaaataggaaacattcctagtttcctttcttatttctcatttatctgggaaacctaattgatatatttctttcctataaatagtggagtcattccattatttaggaattcaaattttggtcttcaagagagctcttatgttgtaaaaattgtaagcttttgagagagatcaagaaactcaagtgtttcttttctcataagtaatacaagtaaaataggagtaggctattaccactgtcacgagattgaacttctataaatctttgtgttcttattgcttaatttcatttaataattatcatttattcttattgctttaattgactgagcatcgttggctaaaagcaaagttaacattttggtgctttcattgagagcaaaaagtatattgtttattgctttgatcccctccaaggatggttgtaactaccgagaggttccaaactaatgaaacaacgatgactacggatcctaatgtgcaaactcctgttaataagagtgatctaatggtggcaaattctgatctaagcaccagtctacctccacaagtttcaccatcagcaagatagggagtgacaacccctttggatgagttcactccgggcacacagtaaactagaaccaatagtactcataccagatagactggccagagtactagagatccatctgtcggagaacctcgagtggtgatcactgatgatactgagttgcaaaacctttgagatgccttagggaaaatggaagaacatatcgacacttttcaccatgatcatgaggatacctaagtagctgtgaatctggcatttgaacagcaaaattgccaattctaggagtggatgaatcaatagatggagattatgagagcccaacaagcagtgattgataatcgctcgagccaggtaaccatgctgatttagcgagcttatcagttaagtggacatcaatcagtggaagatactccacacatacgagatctgaattttattattcaagagagcttttatgctgttaaaattgtaagctttcgagagagatcaagaaagttaattgtttcttttctcataagtaatacaagtaaaaggcgagcaggctattatcactatcacgagggccgaatctctataaatctccatgttcttattgcttaatttcatttaataattatcatttatccttattgctttaattgactcaacgtcattggctaaaagcgaagtcaacaaatacaaaaagagaatattagtcaacaaagattcaaaatttaaattatcttattcttcatgtaaaagacaaaatattttatatttaaatacagaagacttactaaactacaaccaccgaaattgtaatgcctacacaagaaggtacgtaggaaaagtttcaatattactaaacgaaccatttgatgaatagtagtgcttattggctctttaaacatacataagatttatatatatttatatatatatgggataattctaacgtatggccataagtcaacaatagtaacaccagcatcaatagttttaatcacggcgtcagcaatctactttcttgcccgagatttcttgcctgggctttaaattccccatgaagactatttcccttaatcttcctactatgcagagagcgggggaggccaaaaatgccttcggaatcagcctgaggaggaaaggaggattctacaaacgagagctaacatgctctcaactgtgaagagggtcaagacttctgaaggcctctttgccaccgtctccactgagccaatggtagacattgatgctctagagaagcggttgacgcccaaggtggggagagaaactacactttttgttgttgaactcttataccaagtggctagtagcgtatccaagctgtccctagagacatatatgggcaacttgtagtagtgttgatgtgtttgtcttgacccatgccgctaaacaacaagtagtgggtgtaagttttgactcttccatccttgttcccactattgtatattattttcttacattttattattgtattaggcgaccttgatgccagagagggccattaaagaagtaggcacccttatcatggagcttgagcaggataatgttaagaatcaatagctgcatgtcgttaaccctactagttgagctttgggaagcaaaatatcaggttgttgtcgaggtggacaacgctaagaaggccaccgaggagagggtcaagagtgtgctggatgaaaatgaggatttgaagagggattttgaggacgtgaaaaaggaaaaggagttattggaggtcaattatggccggaaaactctcctcatgcaaggcatccacgtaattagtgatcattgtagggagaccatagagagaatgcaaagagaagcctcccgtcagccatctaacaacactcagagatttgaggcttgagcgaccaactgaggcggtgatttccctagggctgcgatccaaaacttcctagagcttcccaaggactggcatgcatgattctcgatctcaaccaaaaagtgagtctcctccaattagttctcttttttttttttttttgctttaattatggttttgtagaaacaatcttaaccttgccaacaaaatcagggtgcattattaaatttgatttataaaatactatcgagtggtattttttgaaagaaatgcttcgggagtttaagtttcctgacaagtttgtaaagttgataatgagctgtgttcggactcctaggttctcacttatgttcaacagttcactacatggttattttgaatcacaaagagatttgcggcaatggaatccaatgtctccactcctttttgttctcggaatgaagtatctctcaagaatcttgcaaagaattagtaccaagccagaatttaagtttcatgacaggtgtgcatacttgaaaataaatcatctgtgctttgcagatgatgttattttattttgtcatggtgattataaaagtatttattaccttctttaaggcctgaagcttttttctttcacttttgggattcaaccaaatcctacaaaatcagcaatctattattgtggtatgcaagatagagaggtacaacacattgttgatgcatcaagattcagcaagaaagaaatgtctttcaggtacctaggcatttctatttgttctaaaaggatatcaagcaaggagtgttcgatattagctaagaacatgacatctagaatcaaagcttggaccactaggaatttatcatttgtgggtcgagttttccttattaatttggtattgctctctattcactcttattggagtaaaattttgattttgccaaagaaaataattaataaaatagaagctatttttcgtgcttatctttggaaaggccatgatatgtttcaagaatcgagacttattgcttgggatttactttgccaatcaaagatggatggaggggctagttttaagaagattgcgaagtggaatcttttatcccttttaaagtatgtttggacagtggccaataaggaggaaaatttatgggttcattgggtacatatcgtatatatcaaagacaaaattagtagaattaccaatctccttcccatggtagttggtactagaaaaaattgattgttgtcaaagatcaattcaagaatcttgctaaaacacaacaactttttggagggaaatatcatatttctaaaggatataagctgttatgtccaagccaaaacagagtttgttggagccaggaagtgtggggaagacttaatgttcccaaccatagttttgtactgtgaatagccatacaaaatagattaagaacaaaggatagattgctgaaatttcacattattgcttatgcaaaatgtgttttctacaatacaatattgaaacagctgagcacatttttttccaatgttctttgtcattcaactgtcttcaacaagcaaaaacatggctgtcttggaaggccgaatcaaactagctgcataaacttactcggtagattgtaaaagttaaatgcagcaagtttcgcaagcaggtttttattgctgcaatggcagctttggtttatcgactttggcgagctagaaatgagattatgtggaattcaagtaatgacagggaaactcagattgtaaataagactaaaaataatgttaaagctagaattagttgtgtttggcctaagaaagtaaaagttatagatacaagttggttttccaagtcgtatttggatatacagtataaaaatcaaaagaagaaagaagagaaagaagtcgtacatgtacaatggcttttttttataggtcttcaattgagggggctatttgtttgtaaggatatttttagagtaatgaaaatttttctaattcataaaaaaaaaatcttaaccgtgccctaaccgcggggctatttgtggtaacttttgagacaatcgttttactcatgcatgcttactctatattcatgcttattattttgcttgcttgtgccgcttgatagattgcctttaggactttgcaaagatttttggttccaacggccaaaactttataaatgagaaattaaaccaaaacacgagcaataatgtaaattgtgacaccataatttaaagaggttcggcctcagtgttggtaaatagcctacttcccttgtattttattaatctttgttgtaggacaagaacacgctcttggatgaaaggattaaaaaagacagtgtttttgctatttgagtgataatttccagatcccctccttggctatgtgtgaccccttatataggggaagggttggtgcatctacttcaggagatgcgaccttagtgctaaaatatctcaatcgtttccttaatttttggaggtggatgaggtatcattcatgcagtagtatcccgctatttttgtgggtttgtaaccacttttgagctttatgtgggattggatgatattggaagagtgttggatgcatcaggctatgtggcggtactcccctagggtgcagcctgacccaccgaccttagggagggtggtactcacctcgtggtggtaaccctgtaacatctcctccatgctcatcgtgttctcttgagtacttactagtatatagtcttgataatttgagtaagtattgttggaaatattttaccaggatttagatttactaccaagtatgtttgattaacatcctaatatgagttctaaaacaatgaaataaaca

SEQ ID NO: 161923 - DNA, 4249 bp, Cannabis sativa
gggggggggggggggtgtgttatatataaagaggcgggaattgaaatttgaaagtttaagatgtggaaaaataaaatttcatatcaaaaaagcgttaaaaccatcgggcaatgtgccgtcacctatacattgctcgacggttataaaccgtcggcaatttccctttaaaaatacacgtgatttttttgcgcatgtttaaaaattgttgtctatacctctcgatagtttaaaactgttgggaatacctaatttttcccgacgattttaaacacttacttaattttttagcgacggttcttaaaaaaatacatttttaggactgccacgaataccccttttgtagtagtgctagatatcatgtccaacaccaaaggggacatgatcaaagacttatcatattcaactttaatggccataaaagatatgtttttgtagtagtgactaccttgtatgccaaaacaattctataaaccccaatcgctctttttttttggtttacataaatcttcctcagccacattccttagccttgcaaacccatgctttacatttccacaagaatgctcggcaaatcatagttatttcttttaacactctcttaggaattaacataatttgtgacgagtaaatatgaatagtgaaaaaaaaaattaatgagagtgactcttcccgcatatgagatatttcggatgcttaattaagttcttatccttcttgtcatttttccaactaataatattttacacaggttagagataataatttgagcccctgtagcatataatatatggattaaaaatcacgatagccaatcatgaaatttaaaatcttctttttggtccaacttatgcattatacttgttaagtactccattcgaaggacaaagcaagggggtgggatcttataacattattttgttaattatggatattataatatttattttgttgtttggatttcagatttggcgcggagtaattcgtggccaagtctaaaagtttttttggtggtgtcggttctaaattgacaactatggtgcaaaaaaatattttgtacctgtgttggtttagcgctaacatatatgtccaagagtattggtgtcagttctgaataaacaccaaagaatatactttatatgttgacggtataagtgtcaattttatcatgaactaatactttagatataagtgtcggtttgaaactgacaccaaatgcaaaatttgtattagtgttattttttaattaagtgcacatgtgacatgcatatgttacattaataattttcatcttgaaattaaggttcgacttccatcaacaatcattttctgaattgatttgtaaatatttggatatatatctatatcttgtatggtagttagtaatttctttttaaaatgactactttgtaaagtaactagttaatcgacacctttaacacaataataaatacaccagaatataaaaatatatttttatatcaatatatatacatattaatttaatttaattacttttgcttcaacaatattatgcaatcaaataagagaaaacatcacatctatatagaacctatatatatatatgcatatggaaagtatgtattgtatatatatcttaataaacaaattaaaatcaatctgttaatttgtccaatttatgaaataagatgtaatgtaactgtgtataatacatgtgaaagctaaataagaaatttctctttcaaacagttcgacataataaatcagttaatatttcgttataatcatattctttctatagctaaccaccacacttaagtacatgcatggaagttaaaatttcttaaatgatatgttaaattaatgaatcaatcgatatgtgttttaattcacttttgttgtctttgttttaagagatagatatataggcctatatatataacattatctagtcatcatgtcacccagcagctgggacttcataaacaattaaaatccacataaaaatctttataatgtaattaatataaatatatatatatatttgtatattaaataaagcgatctcttattaattaattaattaatttcttatatagattaagatttaacaaccgacgttcaaaacttacattaggtgcatggaaggttcaccggccggcctctcaagtcatcaattattaacatctcataactcaataatttaatgtataataatttaaagtaaacaaataattattagtattttggagggataaataccattttgaattgtgttttgcaaaaattatgaattggactatctattttgttaaatgaaaaaatagatactgtatttttcaaaattgtacaaataggactctgaactgattttttgttaaaataaaatataataataatccaatttacagatgttatgataaaattggttatattttctgtatctgttcgtgtaaaaaattgtcttaaagttagttatattataaaataaaattattgaaaattgagctagagtcctatttgtacaaaaatatagggttccttttatcatttaacaaaacaaaaagtccaattaataacttttacaaaacacagagtccaaatagtatttaccctatataatttggggctataatttattatttataatagtagagaaacagaaaaagtacagttatgctaaattcttagagaatattaattaaaaaatttcttattattatccgagttcttcaaattctcaaacaatttatattcgtactaattattaagaaatcatgatgattacacgattagaaatatttttataacaaatatatataattttgagatggttggaaagcattttgagacaattaaatccttgtatatacatagtaatatatagtgtggttgatcgatgttgatcccaagtaccaaatagcatgcaaagttaattattgattaagctatatgtatacatatataacattgtgtgtgtaaatgatgatgatgaacattaattgaaagcaccaaattaaaagaaagagagaactaaaagcaaaagaacaacatctgtaaaatcataacaaggacgtaccaaaagggtaacaacagaacatgcccatcttgacatttccccaaaccataaagcggttatatgtggttttcaacctctaataataatatacaatctcatctctttcactttattttattttttttacaaacctaattacacatgccctttctttgctaccccaattctacccccattacttaggaacctctttgtttttgaatttagaaaaattataattcaatttatataaatatatataacattatacatagtcataaaaaaaatcctaaaactaaatatttttcttttgagaaaaagtctgttattataaatcaaataatgtcatttacaacaacagagaagatggtagaaggaatatcttctaaccatatacattcattatccagctgtaatgcatgtctagccaaactatgagcggcttggttagcatctctcctaatatgagaaacacaagcattagagaaattggacaaatgaaatttaacatcaaaaaccagatcataaaaccccgagtgttgtgaaatacagccatttaaagcattgacaagtattaggcaatcagtttccacaaagtcgataggaagttgatatttctgtgcccacgagagaccaacagacattgctttagcctctatttcctgcggcttgaaattacctattgctggtgtagacagtgctgcaataacctgaccagctgaattcctaacaataacaccaattccaatcttgctcctcgaagaatccaaaaccgcatcaacatttagtttgaatactatcataaaaagagttataatttatatagacaaaaatagtgtcctactataaacttttccattatttaatctttcaataaaacttaaccttttcttattaatgagtgaatcctagcgcactctttttctccctatttacgtatagggtgcaattatagtagacattatttttgtacatttccgtagagacatgtattttttttttgtaatttacaaaaattgtaaactaacgtatatttatattataatctacattataatacaaaacaaaagataaattaaatagtcaataatatatgttatagggtaattcctacaatgcaccctcttaaaaagaatgtactgatacactcttaatttgtttcggcatccagaagaattttttaatctgatttctttttcatattcatgtacg

SEQ ID NO: 161924 - DNA, 3736 bp, Cannabis sativa
atcaacttaatgattttctattcaataactacccacattttgattattacaatattaataataattacaataaataatgttgttttgtacataaaattcatacacctcataattttttttaacaagtaaataataagagttatgtttgcttaagttggcttctgaaattaatggcatgacatggtgcgagatttttagtgaggtcataaaaaaagtaacaaaataatttatctcaaagcccaggataaactctatctttctaaatctcacggtggcttggggtctaaaaaaacttgtgaaatgaattagacctttttaactaaatgggactgaaacttaatctcagacaattagtctttgtgttatagagttttgaaagccaattatttaagagggtatcactttttgaattgtacttgtaaaaactttgattcttggttttgaaaagaggtggccaaggccaaagatattgtcacaaaatgggcctgtaaagttattgtggatggcaaggataccaggatttgggaagacccctgagtgactcatagtcttgattatttccccaaatctaatggaagatccaccgtgggattaaatgtggtggctaacctgttaacgaatgacgaagagtgagatcaccataagctaggctatctttttgaccaatccataattatagctattttatagggggaaacctagtagccaaggctaggattactagatctggactaaggaagctaatagtagattttcaaccaaatatgcctatgattcaagcccttgaaagagctccccaaattgtgattgcttcatctctttggaattggttttggaatagtaaaatccacaaaaggcacaagattctctaatggagccttctttcgaatgctctcctcatccggttagtaattgggcatcacatgcaccttgaagatatgactttccctatttgtagtgccaacgaggaatccatggaacacttgttcctctattgtaatttggcgagtcatctttggaaagcctttccttgggggatctttcccaatctcagacttaggcgttcgcatgtgagattaggtaaaaaaatttgataacaaatcaataaataaaatcatttaattaaattatacacataacgttaacatgaacaaataatacacatacaatttgttaccacactgaaaattacaaaagagacataattcagtaagagcatctttaaccatgctttctaaacacactctttagttaagatagggagtgaaacttgaaaaaataagctttaatcatacaaaaaatgggtctctataatagagaatggataaataactctctaaatgtaaggagcttcttacattttcgctgaactttttaatagtattttaataaaaaatactattaatttttcattattttataagattaatttatagttgataaattcaaattataaaatattattaaaataatcaaatacttattaaagtaaggaatataaaaatgactctatttttttattttgccattttagctaaaaaaataacagaaagtactattcgagatgctcaaacaactcttaaataaattttaacaagtagattgattttggacaacatttcaattttttttgaggtccttcattacttaaaacagaagaaacatggccgagatgggttcgacattaggtgaagttgattatgggatgtatttcaacagttcggtactggattggccatgggggtcaaagtcttggtcctattatatctacacacggtattcgacaagaagatcctctctctctgttctttttatattgtgtgctaaagatttttctggacttatcaggaaatatgaaataaataagtggcttcatgggtgtaaggcggctaggcgagctcctgttatttctcatatgttatttgcggatgacaattatctttgtcgagcaaatgaaagagagccggccaagattatggagctcctgacaaagtttgagcaagcttcaggttagcatgtgaatattgctaaattgtcgatcttttttaacactaatacctcggaggtaaaccatgctcgagtttaggaaattttggggatgcagaggttataggtgatcaaagtttgtatttggatcttcctaatacaatgggcaggaataaaaagggttctttgggtttcttcaaagataaaatgcataagtgagtagaaagttgggacagaaagtggctctctaagtcgagaaaggaagtccttttgaaatctttcactcaatctctctctacttacgctatgagtgtttttctactttcgcttaagctttgttctgaaatggagcaaattatgtgtaagtagtggttgtgggcaagtagtaatgacccatgtattcattggttgtcatgggagaagctgacggttgtaatgacgcgatggggtttttgaagtttacttgattttaatctagctatgttagggaagcaagggtggcggcttttaactcattctggttcactttttggtcgtatatttcaagtgcaatattatcctaatggatcatttttgtctgcggagttggagtcgaatcctagttatgtttgaagaagtatccttgcttttcaacagttattgaaagttggttccaggttgtgcgttgttgatagttattctattgacattttggggcagttgtggcttccatgcgaggagcagtccgagattacttctttccatccaagtttggaaggggcgaaggtcaatcagattatggtgggaggggcccgagtgtgggatgatgaatttctcgaggatttattcaatgcttctgactgacggttaattaagagtatatattgtgttggatgaatatcttgggtgggatcattggtggtttaaagagatttcaaggatttatttggtgaagagtgcttacaagcttcttgaggtgcttcatggtaggtggtcggaagataataattcgggactttggagggtattatggcaactcaaaattcctcataaggttaaagacttactctagagggcatgttttgggtgtttaccaacactgacccagttaaaaggtcggcatgttaatgtggttgtcatttgcccggtgtgccaagatatgaatgaatcaatcctccacattttggttgagtgtcgtttagccaaagattgttggcagcaggttgatggggctatttgcaacctttcgaccacagatttgttaggatggttttatcaactagtcatcggatttttgaaaactttggtttgtcatgttgcgatgatttgttggtctctttagaaagcaagaaatgagcttgtttggcaaagtaaaaattttgttacaaatggggtggtgactactgcgttgtctactttaatcaatggaagatggctcacaaaaattctgcaaacataacagatttcagtccttgtgtttgggtggagcattggtcggttcctagtattgatatgattaaaatcattgtagatgcctctgtcaactctaggactttttatttcagaattggatggttggcccatgatcatcatggaactgtcatttatcagtgatccaaacaattgcctgatcgtgtctctaatttttggcggatgtaattgcattgaagaaagctttgagctggatcaaagaacgagacctaaatcaacttgttgttgagtcagattgtaaaagcatcattgatgctctgtatgttggaaattattttac

SEQ ID NO: 161925 - DNA, 2436 bp, Cannabis sativa
tcaacagttccttccgagttctgatgagtttgactcgggtgtagacaatctctcttcacctaaaaagtacattatatggaatacgcacatgaacacttgtgttttgcctgaatatgtcattagtttcagagctcccatttcctctaaaggttggtagtttcacattatgtcattatctttaagttacttcacgtgggttggtgtttattttggtttttctgaattgggcttctgttatttttgtagtttctgataggacccaagagtcttttaagagacccacttcaccttggatgccattcccaactttgatatcagtactttccaagttcttacctccacggcctattgctttaatctccaagtaccatagggattataaagtaagtactcttttacttattttgttatatttgcatgtctttttagtagtaatcattgtttgcttagtgtgcttgaacttgatatcttattcataaccttttctttgttctttttcaggacaagaagatagctaggaatgaactaatacaacgtgtgagaacaatagcaggagatgagttgttgactaaagtgataaaaaccttcagatcaaaggtatgaaatatgctctgtttaaaggcatgccgagtaatattattataaggaaataataaaattgttgaaaacattgtcactatattttatttgtatagaatctctatacatatttaatgtttggttttccttacacttccactcaaatagttggtcacgtacacaaatttgaggatattcagggaactaaaaagatacacaagtgatgttatttaactttgtttatagcactatgagaggcagccagtcttaagtcaactttatcataggccttttttgacatatatggaatcccctttttcttttgaaatactttgatgctcggattaacatttatgcttttggttctgttgttgtggccggtgtgtaaagttggttacttactcatcaagataacagagttctactttgttcaaaaatcccatgacgtaggaagattgaattactatggaagacgtgtgtatctagaggaatataatcgcttaacatcttaaggaataacattaataatatgtattagaacaaagtatttgtctagttggttttttctcctctttcctttattccaagccatgttttgatattgatgtcatgattttctttttcaatctcttgttgaaggattgtcactttgtgagtctcgtattaattagttatgtgttatgttttgtttatgcagcaaccaagagtacagcagcagagtaatgtggttgagcacaatcagagcaagaataatttgggcaagtaaagtgagaaagagggggtccaccagatgctaagagacaaattgaatggctcaaagtattttggcatcttagaaaggtttacttggttaataatattgaaaagaaagcttaatatgttctgttgtagtcttctcttgaaagtggaaatgaaaaataaaacatttgttggttggttcttgatatactagtttgtattagttgggtggaatcagtctctaccctcttctagagctaagtaccttttaggtattgctctttatttttctccccttaatccctttaacttgctattgctacttctcaagtgaacgaagctaaagaaaaaaaagaagcggggaaaaatggaacagaagataataaaaaagtttgttaaaaaagaaaaaaataatataaggtgaaaaaagttggagtgtgcaaaaagtcatccgatcacaatagaccgatttaattttaattgatccaatagaatcggatatctaattataattgaattggatcggatgtaaattttgaaaattcaatcggatcgattgtttgatcggacaattcaatatataatcgaccaaatcgatctaattatcattcaatcgtcatccaattatatttatatatttttaaaatacatttataatttaaaatatttaatatattttatttaaaaatatatattaattgatttaacatatatttaacatataagattaaagaaaaaaagtcttagatttaaaatattaattctcatttttctaaacgctaataaaattgttgtcaatacgtattgaataaattttattttttaacaattttattatgagatcatgaaaattaagttgaactaaactaatatttattataaatgttggattattaagtttcaaatcatgttttttatatataaattttttttaatgaaattaacttaaatggtaattaaaatggattggatagatttaattcaacccaataaaaaatcagtcactgcattcaatgagtggaaccgatctaatctaatgcattcattggatcatgaaaaaccgcgtttttgcaaatgtcagttgtatatgagaaaatataaaaactgtaagcgtttgca

SEQ ID NO: 161926 - DNA, 3237 bp, Cannabis sativa
aataggtttcgaacctgcggtttaacctccacaatgttctggccacttttgacagtaactggttcattggcaagaacactttcaagatgatcaagaagttccttagcttgacacgaaccgaaatcaggatctgcatcctcataacaccacaaaagtgttgtttccttatcttcaatggtggaaccatctgttgcttcagtgtaaagtctcattactggttcagcaatctgtttccaactacaatcagcaacaggtagacatgtttcccattctatgtctctctccatcctgaaattacatcatacaatttggtttttttagtaccaaacaaaactttacaatagtttcaatacaatttcaactaaacaacactttttacctgaggaagtaaccatgctcagcaccaattcccagcttctcacaaggagagaaccattcagcaagtttctctcggcttctcgcgctaacaatgaaaaccatgttgttcttgtctctacacaagctagttaagatactaatgcacttagaactcgggctcttatcgattgagcactgtgggattaaggtaccatcataatccaaaagaattgcccttcttgttgtccttctataagccgaaactatgttctccatcaacaactttttaaagcttggaccgagcgccacaactctaaaaccaagtccaaagcctattccccaacacctcgttcgcacatgatccctacaagtcctctccaaatccatcaagaaactgcgagcccagtatccgacatcatgagtactaacatacttgtaatgtttctcatggcgaagctgtttttcgggcacagccatctccaaagcagagttcatagcatccgacacagcatcaacattccatggattcacacgaattgctccactcaatgaaggggagcaaccaatgaattcagacacaactaacatactatttttcggggttgaagatttcaaccccaaaactttatccaatttctcattaccttggcgactaattacatactcataagggatgagattcattccatctctaacagcagttactaaacaacactcagcaactacataatatgccattctctcataaaacttaagtggctcactaatgaaaacaacaggctcataaccaggcttaccaaatgtctcattaattctcttcacggttgagtatgtctcagcctgaacttccttcacatcttttccgcgccctcgagctggattcgctatctgcaccaacacaactttcccctgcaattcagggttctgctgaagaagttgctccattgccaaaagcttcaaacttatacctttgaatatatccatgtcatcaactccaagcaacatgattctaccctgatcagtgtactgtttcataagctcagcaactttagtttcggtttccttgagactcaggacatgttcaagctgtcccatgtgtattccaacaggaagaatcttaatgccaacagtcctaccatagtactcaacgcctatgtaaccgcgcttagattcataggaaagaccgagcattctactgcaacaggaaaggaaatggcgggcataatcaaatgtatggaaaccaatcaagtcagcattcaaaagggcacgcaaaatctcttctctaataggcaatgtcttgtaaatttcagaggaaggaaaagggctatggaggaaaaacccgagtttaacacggttaaacctcttcctcaagaaagttggcaacaccataagatgataatcatgaacccaaacgaaatcatcttctggattgatcacttccataattctatcagcaaaaatcttattgacagacacataagcctgccataatgacctgttaaaccttcctccaaggtctggtgacaaaggcaacatgtaatgaaacaaaggccatagttgttgcttacaaaaaccatgatagtacttactgaaaagatcaggtgggagaaaagtgggaacacatctaaaactctctaacagaatctgggacacttcatcttgttcatttggttgaatttcttccttgagacaacccacatagataacttcaatctcatcatctcctaacccatctttcaattggagaagaagtgaagtttcatcccaactaaaaagccaacctttactactatcagattttctctgagcccttatgggaagctggttagctactattatgaacctatctttttggacagaagatgatgaatctaagtgaacactctcagaagagtcactaccaacctcagatatcaaaccagaaactctcataatacgaggaattctcccactcattctcccaaatgatggtggctcacctgaagcaagttctaagagattggaatatgatctagagattttttctttctttctttttctctacacttccagaaattcaacactatcaaaggttaagaaaaaacccattaaagaaaaaggctttgtttagctaccaaacccctttaaattttggaatttgaaacaagaacagggttgagttgctactaattgcaaaacccagatacgaaatcttgagaagaatagaaaaatgtgaagaattaagttgaggaaaccaataatagaaaaagggaaatgaggaaagtctttgttgaaaagataaaaactttgaagaagaagaagataagctttgagacaatgaataaatcaaaaagggaatggaatagaatagattcagatcatgaacggctaacaaatattgtcaaccaaaacgttcacactagaaaactgtcttaactatttaagtcaaaaaaaaaaagtttcaatctttatgaaaactaaacaaaacaattaagaactacagttgaagatgttaccagctcatgaaactgcagaaccaacttttttgtttttataattggaattgagatgaaagaaaataaaaacctcaaaaggcaaagattttggggtgagagaaaagcaagacctaaattttggtagctttttttttttaagaaaaaaaaattatggagctttctgagtgatcacaaatcacaatcttataagtgcacccacattctctttctttctatctttatcttcttttgtgggactgagacaacatattttagtggggataatatttctggcaactttgtttttcacaattttattttttattttatttgatgataactaggtgagtttttattttatttgatgataactaggtgagattagttctttttattttattttatt

SEQ ID NO: 161927 - DNA, 1517 bp, Cannabis sativa
aaagaaagaaagaaagaaaaacaacctttgcaatgagacgaaatgtatcaaaaaccttggtaacagtcaatggatcaggcttccgcatcatagactgggaagaacggcttgcctttgcaacaagacctaaatctcccaactcctatgaacagaaatgacatttattgtcatgaaaaaaatgctaaataagaagacatataatatagcaatgacacagtagtcatccccatgttaattaaaaaaaaaaaagaaacacaccttttcttactgaatataagggaaccagaaactacgaacagatagcaatgacaataccttgtattgcttcttaacctgcgtttcagtcctcccacaagcttcagacagcgccttaataatcgaagcatccccaattccaagctcgagcccctcgtgggcaggagcaatccgattcgccgcaagataaaccacaggcaccaaatcttcaggcgtggtatgcattaccgtcctcaacatattgcatgcaatatccgtaatcacaatccgacccgactcgttcgcaatcaaatcaaaagccaaacaaagaaacaaaaaaggaatcctctctccctccttccaacaagcaatcgatttggggtcgaaatccacagccttcgttttcagttgttcatatttagcctttaactctgcaaccctcgtttgaacactcgcaccagaggtggctgtacaaactttcttagtagctgcgacctcggacggctcctcggtcgctgccacctcctgcttcacgatggcattctcagtatcgtggccattttcggatgcagcagtaagggagagggccttgtcttccgatagggaagaatcaggtttggaggagcgttctgagtcgggagtcttccgtttcttgggttctgaaacagaagactctgaggacttcttcttggcggcggcagcgcgtgcaccggacatgagagcgtcaaaagcggaggggcgagaggacatgacagagggagagagtttagggttgtggaagagggttatgggagtaaaggagaatgatttggagataaagagagagagatgagggagagagattggagctaggcgaagacagtagcatgaaccgagtttgagcatttaaattgcagaaccagaacaagaccaagaaacatatggcgggaagaatataagtagtgaagagagaaagaagaagagtgtgtttggtttttattaattattacagacagacctctgacctttcctagctgacctgaccttccctgttagagaaaattataaacccgccttcaattttaaaaataaaaatacagacaaattcgggattatatttcgaggttttttattttaataaggctatttagaagttttcattcacaatgacatatgtctaatatgttgtttaattttcataaaaatagttttaaaagggaaatttgaattcctatacttacattacttaaaaatttgtcccctaaatgcaaagttattaaaattggtaatatatgaccatttta

SEQ ID NO: 161928 - DNA, 1130 bp, Cannabis sativa
  modified_base (1068)..(1073): a, c, t, g, unknown or other
gtgtaatttcctcttatataagttgggctgtgatgggctaatgtttaatgaaggccgcgctgatggacatgttgtgagtggatgcagaaaacgccgtcgatattattttccttgccctagcagtagccggccgagatagtttcagagattggagtttcaaaagtctgtttcagaatttaatttgagtcttttccaagcgaggtttccgtcattaactatggctaagccagagttttccagcactctcaaaagcctgaaggtaaaggagaaacacagaccttttcattttttgaacttcaattggaagttctctttttttttttcttattataagttttgttaatgtttcgagaaggagagacgaaaggaacagattgaattttttaattgggttttgcttaaatttatctggccattctttaatttcgttaatttattggtcaatttttgcaatttctggttcttagcttattatgttaattaatgtttgtgtcttctcccacagttcatgcaaagagcagcccagaaagaagaggtgataaaaaaagaagaggtcaaccctgccgagaattttacttcccctggtggtgttactaggaagtggtagttctctctctctctctttgtgattttcaaataattttaagcgttctgctaatttttattatctatttttacggccaatgtgccgttgtgattgcttgtcgatgtgaatgtaatggatttgtgcgagcttaaaacagaatccgtctttgtgtattgtaattaataattcaatgtaggatttgcttattttctgtgtgtgatttggtttcatcagaaaatttggaaagccctctttgtattatgatactggaactattaagtcctattagctctctaataccttaattcatattgaatcagaagttttccatagtaagctgttgtccaagattagggcattagctttgtggactagagtggggactcaaggtcccgtaaatactcttgaatagaggcattaatgtatttctttgaggttgccatttttttttttgaacatgaaatatcaacttcattgaaatnnnnnnttcaaattacaaactggcattatagtctgccaggacatcaacatcatgaatgctacg

SEQ ID NO: 161929 - DNA, 10875 bp, Cannabis sativa
ttttttttttttttttgtgatgaaagagtttgttttatgttttgttctttctttgcttgaaaacacattcacctttcgattataaatgcaagataagaatcatgatgttgtttgaagcaagtcataataggttgtagtaggtatagtccaatgccaatgtgaaggctcttagatggatctcatcatcacccccaataatgctatttgtttggttttcaaagtacaacactttaccttttctaactcatctaaactctactttgaccatcttttgaggtctcttaagtaactatgcagttctaatcacattgataaataattggcttaccaaacttcatggctgctaacatatacaaacatattatattattaagattccaaaagtttgatacatcattagggagaaatggtgtagggagcaaatcagatagtgacacatttcttaattcaccttaacctcattaccttagcgtagatcgcactttatgacacatcaatccaaaccaaagccttaggtatatgtacttgtgtagaaggaattattgaatactttaaaacatccaaaataaataaataaataaggtaatgaaaatcacattaattactctaggatttgttttggatcttcaactttatcatggaaaaagttctataagaaaaaaagagtaggaaaaaacagtatttttcaaagattttataatagatttaattatttttgaagttctaaatttaatatttaaattttttattttgtttatcatggtaatgttagttcttttcattttatttttttatgggaaatattctggtctatacattagctcaattggattttagaaatgacatatattgttggttgtataaccgacttagttggttggacaatcctttaaataaagggataatttaaaaataaaaaaaaaaatataaaaataacaaaaaaattataaaaatactgtttgtgtggaattttcaatattttgacggttttttaaattttatttaaataaaatatggtcttcttatattgtactcttgttattttttttttattgttttgttgtgtttttataaaataccgtataaatataagaaaaaaactttgaatgtagaaatgtaatttttttataaaaattggtgtttctatgtaattatcccttaaataaatatttagaggtattttttttttttaaaaaaaatgatctattttcttttttgaataattcttttatttttgtttgaatccaaccaatataaaatcaaatgatctttttaatttatttttcattgctcaaattacatgtgatttcttccataaaaaaaataaatgtgcatatgagttctaatatagctccttattatccaagtatctttaattaattttctttcccttattaatttactagcttattttgactatttatatgtactatgagcagtgaagatacatatagaagaagatcacaaagaactaaagctaaggactcagagaaagctcctttccacatatctattcatgaaaggaatcccaaatgcaagtttcctctgcttaagcttgtcctactagttgtcattttcggcactttagtaacacttttgtactctcctgatatttaccacaataacaaccatccatcttcaaattctgtttctcagtaagtattgacacatatttatgtgtgtatttaagagtaacatttttatttactgtgatttttataaggtccaaactatgtaattttatgatatttttgttgagtttgcaatttaatcccattagttatttgaatggtgcagagagagttttgtgaagaggtggatatggggtggatcagatccaagatatatatcaaatataaatacaaactgggatgacatttctatagttgtcaagaagttgaatctgaagaatgaatatcagggaattggactattgaacttcaacaacagtgaacttaatcaatggaagcagctcacaccagatgccattcacattgttctgcaattagactatgctgagagaaatgtaacgtgggattcattatatccagagtggatagatgaggaggaagaagaagatgttcccatttgtccatctttgccaaagctaaaaaatccaggaaaacgacttgatctcatcgcggttaagcttccttgtcgaaacgaggggaactggtccagagatgttgcacgacttcatttacaacttgcagttgctgaacttgccgccttttacaaaggatacaatccagtgcatgttgttttagttactgagtgttttcctataccaaatcttttcaaatgcaaggaacttgtggcccgagaaggcaatgtttggctatacaagccaaacttgaatgtgctgagggaaaaagtccaacttcctattggttcttgtgagctttctcttcctcttgggggaaaaggttagttttaatccatagaacacacatcttttcatttttttttacaaaggagtcaattatacatagaacaatatataactataaataccatatgaaccacttgcttatgagtagctacaataaacaaaactagtgagaaacttcttggtattatgacataaaagtatcttaaattcaaaagtagtaaaacttgttataacggttcatctaataccatcatggcactcttttcagtttattatttttttttcttctatagctctaatacattcttttgaaaagtagatgcagtcacttctggaaatgtacaccgagaagcatatgcaaccatcctccattcagctcatgtttatgtttgtggagccattgcagctgctcaaagcatcagaatgtctggctctacacgggaccttgtcatcttggtcgatgagtccataagtggctaccacaggagtggccttgaagcagctggctggaaaatcaagactatacaaagaattcgaaatccgaaagctgagaaggatgcttacaatgagtggaactacagcaagttcaggttgtggcaactaactgagtatgacaagataatattcatagatgctgaccttctaatccttaaaaacatagatttcttattcagaatgcctgagatttcagccacaggaaacaatggcaccctttttaattctggtgtgatggttattgaaccttcaaactgcacattcaacctactaatggatcacattaatgagattgagtcttacaatggtggagaccaaggctacttgaatgaaatcttcacatggtggcatcgaattccgaaacatatgaacttcttgaagaacttttggattggagatgatgaagaggtgaaggcaaaaaagactagactgtttggtgctgatccaccaattctctatgttctccactacttgggattgaagccctggctatgttttagggattatgattgtaactggaacgttgacattttacaagagtttgctagtgatgttgcccatgagaagtggtggagagtccatgatgccatgcctgagctgcttcaacagttttgtcttttgaagtctaagcagaaggcacagttggagtgggacagaagggaagctgagaagatgaacttcacagatgaacactggaaagtcaaagtcaaagatcccaggttaaagaagtgtgttgacaatttgtgcaattggaagaagatgctgaagcattggggcgagaccaattggactgataatgagttctataatccttcaccaccagctattcccaaaacttctctctcatcatcataagttgatttgttctactttcttttttccatttttttcttaaagaaccaaaaagaaattgaggttaggtcaacacaaaagaaatgaagaaaaaaaatgttgtttgtgaccattgaccaacaacattgctctctttgagcactgagttcaccgtttttgttttactacctggttcttttatactagagttaaaaatgctgttttttatagaattgttgtacttaataatacacagtggtttaggtcaatgaatttgggtatagtagatgctttggccaccttttcatatgttcatagttttattgaaatagcttatgattatatgtatatatttgagtataatggaccaacaaatagatggagagaaaaatagggtggctagaatttcattcaataataggaatgaactaaaatatcccaaaataattatttaacccccccaagaaaaatttatgatatgctacagtaagaagtatcgggaggttggccaacaagaaaataaaaattatgagaatttgtatgtgacttattaaagaagtcaataagttgcaaccaagaaggaacaaagacaaaataatggtgcccaacttttgacggtgacgagtaaaatgacaatcaatctcaatatgcttggtgcattcatgaaaaattaagttatgagcaatctgaatggtgttgtgattgtcataatacataagagtgggacaagagtgaataacacccatatctacaagtaaccatctcaaccaaataatatctttagtggtagacaacatagcacgatacttagtttcatataagattgagacataatatattatttatttcttgctcttctaagaaataagagaatcctccaaaaaaagatataaatcaattatagacttttagtctgtgggattataaccatgattagcatcacagtaagcttgtagctccgaagaagagttgaaaggtggtagcaggctctaaagatggtaccttaaagcttttgtagaatgcgaataatagtaaaacaatgaataatagtaggagaagcaataagttgattaacaatatgaacaacatatacaatgtttggatgaataataataagataaacaaaattggtaacaatgttgcgatacaaagtatgatcttccaaaggagagtcatctcgaggagaatattgaacatttagctcagagggagtgtcaacaattctagtattagtgagacgaggatgctcaataatttcaataatgtactttgactgagaaagaagataaatttttggagaaaaggaaactttaatacccaaaaagtatcataggaacccaaatccttcatttcaatactcaaaaagtaaaaatcatatcatcaatagacaaggaaagtataatacaacatgcagatttgcctttcacaaataagttgaataataatcacttgagacaaaaccaagagacaaaataaaagtagtgagcttctaaaaccatgttaggggagcctgtttaaaacaatataaggcttttttcaacttgcgaacctctcattgcttatgaggaacaccatgaggaggaacgatgtaaacctccttatgtaaatcaccatttagaaaggcattcttaacatccatctgagatttcgtccactggcaaactgttgctactgctataagagtacgaacaatagtcatttttgcaacaggagcaaacatttcctcaaagtatttaccatactttgagaaaatcccttaaccactagccaagccctgtagctttcaatagacccatcaaacttggtcacgtttagcagaagggaaaggtaccaaatctcaagtatgagccttttcaaagaatctagtttcttattcattgcatgcttctaaataggaccaataactacctcattataggataaatgctcagaaagacaatgaatagatgttaaaaatgaagtaatgaagtagaatgagaagaataaacaaagtttggtatgtaagtagacttatgaatgttttgaggatagcaaggaggtccattatcttaggacaatctagaacaattatatgaggaggggtaggagcaattttagattttaaattgccactatctatttcttgagatctttcaacatgatgcctacgagagtgatgaagagtaaaaggaactataggagatatggatttttcacacaaaaactcagagaaaggatcaatgtgaataagatttgattttgtcaaattataaggaatataaggaatagaaagaaaggtatatgctcaagaaaaactacatgacgagatacatttaacttttgagaaaaaggatcaaaatagtgttatccctttctcccttcatcataatcaagaaaagcacaaaaagcagagcgtgactacaactttgtacactctaccctaggacaaaacataaaacaagtaaaaccatgtactttcaaagaagaatactcacaaatacaaccatatagtttctcaaaaggataacaaaaatgaagtgacagaatatgggatcatattaattaggtgaactatagtaagaactccttccccccaaaactgacaaggaatagaagatgacaacaaagaagaacaaatattttaaataatgtgtctaagctttctttcagctacaccattttgtacaattgtattagtacaaaaaaattatacaaagtgtcatctaaagcaagtgaatcgacaaatttatttgaagtatactcaccactttgttcacatctaaaatatttaataacagttgtatgttgagttctgacataagctcaaaaatgatcataaatatcatagaagtcaaaatagtgtttcatatgataaaaccaacaaaaacaagtgtgatcatcaataaaagagacataatattgagaaccaacttttgtaatcataagagagggtccccaatcattagagtgtactgtattaaaatgtgtaacaatataaaatgtacattaattgaaagttaaagtagaaaattttacaattttacatccactacaataagaaatatcatgaggtcgcaaatttcttaaggtctctttagaagaattttttttttttttaaaatgagactttaaaatatgatcaaggcaagagtgccacaaattaaactagaatttgaagtagacaaatcaacactaagagctgcaaatactgataactttagttcatacaaaacatataattcccacacctataacaagtccaattagtttctaagacaacaaatcctgcacatggcaagatatagaagaaaaagacactaaataactagaatcacataattgaccaataaatacaagattcaataaaagattatgaatatggtaaacgtttggaagcacaaaattggaactgagaaccagtacccgctaatggcaggggaccaactgttggaacttatttttatcaagatcttaatttactaacaagtgtgtttgattatatacattatagtctaacatcctaaaatataaaattcataaaatgataaataaacacataagaagaatagaatccttatattggttgcagcagaaattagcgactcctttcgttcagtcactctaaccctcaattcgtgttttgtagtagggtattgccaagtgatgaacatagatagcttccttaaacctgataagtaataactcaacccaataaataaatgatgttttggtaacctaatatacatacttgaaataagagcttttctatttatattatttaggcaagatctaagaaaaccatggttttacttctaaataattatagaagctataaagtccatatctattattaatgctccaacttaattatgggctagtcctatgggtaagcgagtaccaaacaagttaaagaacctgtatagtaaaattaagctaaagcttaaccatatcaggattgagaccacttgatctaggatcaactaattagtgataatgacttagaaaagatataacagtaatttaatgatatcttttctactatcaatatcggtcaagtctgatgtatagccgatacattcgataaaattgcctaaacttgttgaacattgaagaacacttaaagtcctatgtctttcaaaggcacaacagatggaacagtcaaagctttaaaggaatacaaggatatctttaaccaagtgactaaaataggtggaatttgtgagagattttagtagcttggtgcactgctactgctagtctcatctagtagctttgtctagtcagctcctgagatatttttttttcagttaattaacccaggtacccctcattttgtgttgtctacataaggctgttgacggtaagaacttgccaactaattttgtggctagaaaattcgaatttaaggcaaatttcaaaagtaagaagaagtttaagtgaaatgcaagtttaagtggcaaggaatttcttgagtaaaagaatgatttcttttattgcatttagtatctgagttacacaattaattttccaacccctctcacatttgagaatgaagtatttataggctctaatagtttgagatacatggtggtctcaaagagacaagctatctctttcgggctacaaactgcaggtgcacgaggtggtcttgtgcctcatacctttgtgtggtgttaggtgatcccaagtcgtagaggtgatggtagcagcgtaccctttatcaggttctcaaatcttgtaggtgcggtgcctccactactcgtgcctccttggttttagagcttgcaggaggtgtaattgtaatgaccgcatgataaattatggattagtaaaggcaattagcattaattattgacattttataattatacttgatttcatagttattgtgatccccatttttagaaatgaatattagatttataatttctcaattttggagattttattaaactgtaaaagtattatttatgttaaatataaaatatgcaattttttttgcttggcaacgatggaaaatgcgatggatggtcattagagtcacacgggtaaatttagattctaatacaaatataagttaatatttggaatatcgagattagacggggttatggtgtttgaccattttgtccctaagtcatattattacttaagcaccaaaataagggccttttgggtattttaagagttaggtggaatactcctttagatggaagctcaccactaattagaataaggataatatagtttaattgtcctttttctcaaattctcagaaaaattaaaaattaagaaaagatgttcatctctttctctctctccctttgctcggctcccacaataaccgaagaaaatccagctcctaccttccatttttttagaatctagcaaggattcaaggtgtttcaagtggatgtaaactctagaacctttaccccatattaatcccaaaaattgacagagttgatttttgagattagtcaataatcagccccaacagtcgagagacatcaattgtaaaagtcggtcaaagattgattgagtcaatgcatatggcctaagaatcgttaatcttggaaatccatgcttacaagtctcgtggtatttccttgcagctcggaggtcaaccccgtaacaactcatgagtagagttagtaagattaacttactaggttacaattgttggaggattttcatagtgatattttcagaattggatctttccacaaacataagattcaaagatctctttcttatctttctaaagcatcttgagttgtccaattccaatgtatatcgagaatgttatggcagaaatactaagactaccgaattgtgacagcttggtatgcaagctggcggcataaaagagatgcaaacaagaattgtataaaagaactttttaaaggagagaaaaatcttttttcaaaatatttttttcatggtaaaacttcattcgatccttaacttttttgaatagcatatgcattattcctaagttcttgtaactcattcaattgaagctttcttttctcgctcgctttttctaaggaaaagtttagttgcttaatagcccaataggctctatgttctaactgaacgggaaagtggcatgccttcccataagcaagtctatagggagacattccaatggacattttgtatgcagtacgatatgcccataatgcatcaatgagtcttaaggaccaataagtcctagttgggttgacaattttctctaagatgtgattaatctccctatttgatatctcaacttggccactagtttgtgggtgataaggtgtagtgactttatgtgtaataccatattgtttcattaaatgctcaaaagggctattacaaaagtgtgtaccgttatcactaatgatagcaagtggtgaaccaaatcgtgagaaatattttctttcaaaaacttaagcacaactttgtggtcatttgtgtggcatgcaatagcttcaacccatttagacacataatcaacaccaacaagaatgtacaaattaccaaaggagttaagaaatagacccataaaattaatgtcccaaacatcaaatatttcaacaagaaaaataggatttaaagacatcatgtttcttctagttacacttcctaatttttgacaacgctcacaagatttacaatacatataagtgtcatgaaagatagtaggccaataaaatctacattgtaaaatttttaaagtagttttctactactaaaatgtccaccacatgcatgatcatgacaaaaagatatgatttttagattgatcacagtttagaatgtatctccttattatttgatcgatcaggacaatatttaatcaaataagggtcatcccacataaatttttttacttccaaataaaatttagatttattttgtttagaccaatgagaaggagtttcatcagtgatcaaataattgacaatatcaacataccaaggaaaagaatatacatgcatgagttgtttaccaagaaaagtttaaataatagtggaggaatcatgattcgtttcaacaacaattctacacaaatgatcagttacaacatttcaaaagattttttttatcacatatctctaaattaaattcttgtagaagcaagatccaacgaattaaatgagatttaacatctttttttgacaagagatatt

SEQ ID NO: 161930 - DNA, 1436 bp, Cannabis sativa
gagagagagagagagagaagggtattacgcattactgctaaaaaaatcaataacaaccatcaattaaacgcgcgcacatagtgacattgaatagagaacagttcatccaataaacaaaaaaaatcccaaataaagacattgaagaaaaacccatgaaaattttaatgtgaacgaaaaaaaatggggagaccactgtaagcggaaaattagctctctgttgagagtaaaaagagtgttttataaggaaacaagggaagtaactgacccgaacccagatcagaggtagtagagacaggcccacgaccaccaccagaggaagcaccgaaagaagctgaagcggacggtgaaggctctgagagtctggcatcggctgctgattttgaagctgagcccaaaacgacaggagaatcgttaggcttcgtaccaaaaaagtcatgaaacatgggattagctagttggttttcctggttacgatggttgttggcattgttttctgcattgttaggcatactttgttgagccattatcatcgcgggtacagccatttcaaacccatatcacctcttttctcagctaattcactctcccagatagtaaaaagaaaaagaggtaagagagagagagcacagtaaagagagctcgattttcagaaaagatgaaagggaaagagagagagagaagagaagagatataaaaagcaaaaggttcttgcttggtctactctctctctctctctctgttatgttgtccgtttggttgggtttgagaataaatgtttggttttgtattaaagtgttatgatttgtgtcttttctgtaacattttggtgagtactaaaactcaactcagaaaggtgaacaaatatatacagtaagtaccacgattgcattcattactttttttactctttattatttttattattattattttaataaataggagttttgttcagactttaacatttatatgattttttcattggattaaatgctttttaaattttaaaaataattgtaaatttatctatgtcacttcattattttttaagataatttacttatgtggtcacaatcacgtttataattacaatatgatattctatgggaaatttgattttctatatttagaaaatcttaaaaaattttctctaaatacatacttaataatattggtaatatatgaccacattcctaatatcccacaaatacccctcccatttgaaaaaaaatcaaaaactgaaatcatccatggctgcctcatcccgaaacctctctctcccatggctgcctcatcccgaccaccacgcccggccaccgacaactacccaccaccccgactacgcacgaccaccgtccgaactacgcatgacccagccacttctctcagacccaacccctctctctctctcttcctctctctcaaactgaaaaaaa

SEQ ID NO: 161931 - DNA, 5916 bp, Cannabis sativa
tttatttttttagagatgtgccttatagttaaattattcttctctgaactattccactagggccagtactctactaactattaaatattttaatcattgagattgagattgagattatatattcaattatgaactaatccataatttattaattttaatatctatttgattacagattgcagatgatatgaaaccacctccactagtgatcagtattttgagcaagctttctaagatcattccatcttggaaaataattcccactaacgacattattgaccttgctttcaaagttccagaagttagacaagcggtacaaatatttatttaatattatattcttaatatttataaattatatatatatacaaaaatatgtagtagttttttatttaattaaaactaaaacctaacactatacatgtttgtgatttatttaattaatcaggttagagctaatccatattgttacaagggccggcctaggttgaagacaggctatgaacttttgagagttagtactgctcttgaacagaaacttgaagaggtaaaaataaaaatttaatttatatatatatatatttatatacttaatgagtattattgagagtaataaacaaatttaactataaatattaattttaaatatattaaattattaaattttagtccgataacgaataataaaagagaaatttgaatttctataattaatttagttatttaattaaaaaaaatatttaagttaaatttaatttttttatcacttttttgttgaaaaatatttttttaattattttttttaattgatggactaatttcagcccatataatgtaaaaataatttttttttttctaattaaataaaaaaaataattataaaaattcaaaattttttaatattactcatttataaataatagccagtgcacctatatttatatatattgaagacaaataaaaaaaattaaagaaattttatggtgcaaatttatgagaaatttagtataattcaacctacacacgtcttttaaaatttaggtgtgtcttaattgaataactataatctatatatatatatacatttaaaatttgatttgttttgttttatgtttgtttagatctcatttccattcctagttttacatggagaagatgatcgagtaacagacaaatcagtgagcaaactgttatacgaaacagcctcaagtaaggacaagaccttcaagttgtatccaaaaatgtggcatggattactctatggggagccaccagagaacattgatattgtattttctgacataattgggtggttacaacaaagaactgcctttggaaattccaggttggaaaacgagctcaaggcccagaacgatatgttttccaagaaataaacaatggttatcaaagtaatttaatatatatgaaaatatatatgactttatgttgagtctaccaaaagtataagacttgaaaaatccttttatgcacttctagtagtattagtttatcattttttgaattttttaaattaagtccttaatttgactttatgtaaattttgagtggttcaaaattggatctattctaaatcaatgtttgtatatcagattgagtgaaaaaaaataaatagttatctttatatgatatcaatttatagatacgtgttcattataaattaatcaacacgcatatacaccacattaaaaatatatatatatatatatataaacaaataaatagtatcaatcttatccactactaaattgaaattaagttttatttatatacaaaaatcaatatatcccacttgcaacaatataaaaccaaatacacatttcaatttatccactatatttaaaaatatttactaaattctcttcaatattaacttaatctattatccacaaaattaatgataatgtcaaattttctattcccatgcttactttcttacaagaactggattctttactattggcattttcatcagtgttatcatatagtaacactagcaactaatctatttctggagcaatacaaagatttgtataaaactccctcagcctgaataattctctagcagccatagacacggctatgtattcaatctttatggtagagcttaaattctagaaatcacagcttcaccccagagtaatcaccatctcagatgtagatttctattatttgagacatgcttagaaatctgagcgtagccaaaagagtttagaacacctcacctatagactatgcatataatttctagtcctcttcaagtatttcaggatatgtttgactgttatccaatgttctaatcctgtgttagactgatatctactcacaactctcacttcataatagatctctagtctaatctattatgctgcaaagtgtacataagacttcctactactattttataagaaatttttctaactgcttttatcttttctggaatagttgggactacaccttagatagataaattttgtgtctggaaggcaaacgaccttcctaagagttaactatagagatgttctctagcaccttatctacataagttgcttgcgtgagaacaaagaatttattctttcaattttaaataccaagaacattgcttgctacactcaaatcctaatttagatttgagtgttcagtcattctttcacgtctgacgatattctaacattgtttgcaatgagtaagacatcatctatgtaaagcaccaacagtaccataatttgattgtctttgttaggcccatcaatattctatttgaagctataggtttcgatgatcacatcaaacctatgatttcaagaacgggaagcttgcttaagtccatgaataaacttatcttgtagacattcccttcttgtttttataatttgaaacttctggttcatccatgtaaatggtattgtcaaacattctataaggaaaagttgtttgacgtctgtttgccaaatcttgtaattgagagtaatgggtatggataagagtatatagagggttatgagtgtggcgacttcactaagagttttcttataatccacaccttctctcttggtataacttttttgctacaagtctaattttgtaagctttggcttttccatttatgcctcttgttcttcttgtagatttgcttgcattcaatgatcctaaagttactttgtacaattacaagattccaaaacagaattggaatacattaaacccatttctagtttcattgcttcgattcatagttctttattagggcttaccattctctattctaaggacaatgatttgtcgtcactaatgtcaccaaccaccaagttaatttcactgtcaagattgaaaccagtagagtttcttgaaatccccccactacgatgagatattgcgactgtctaatgagaagtaacagtggtatattcctctttgttttaatatgacttgcgtcagtttaaacaaagggagtgggatcatcatcttcacatgtagaagatgacgaaatatctattggaataaaatttgaaagcttctcttctagtaaaaatttgctacatggtttcaggttaatgatatagccatcttctagaaaaataacatttgtaaaaataaaaactttcttatttttgtgactatagtatatcctccacccctagtcttattaaaatatccaacaaaatgtaaaccattctagctttcataccttattcctaagaacatgaccagggctcttctcaaattttctaatggcgtaaatgaccatttcaacattctaaaggtgtctagggaataaacttagatgggacaacattgagaatgtggtttgctgtctctaaggcatatctctagaaagacactgatagttgagtaattaatcattgaccttgccataactgttcaattctgatgtacgttcaacaacaccatttattgtggattatctagagcatagtgtatatagttccaagtccaattgaataatcttagaactgcatatttatattttttacccctatcaattcgtaagatctttaactttttacctgattggtttttatccatttgatagaaattcttgaaacttctcaaatgttccagattttttaaacataaggtgttgacgcggtttttcgtcaatgaatctaagatgatcgtaaacgagcaagatgaacacaagtgaatgttgatcaaaagtaaatcgatttatgtaaaggcgttttacaataatgaacaataaacttttatagtggttcaccccctttcagaggtaataggctagtccacttatatatttttgatctcaatgcttgagaagagttctccagagttatgttctccgagagttcagtactcaagtgagtttttttggaataatagtgaatgtcctttattacaacttatttcttaaactttttataggcatatatcatgggcctagggtttcttaacctggttatatctttttcttagcacaagtgaagttacatttcaaatacaaaaaataataataatgtaattattcaacaaataaatatcgttacaacttatcatttattatctatatctctagagtagctccagtagcatgtgttatttccactgggtggacctaaatggacatgggtagaccagaatgaacatgggtacacatgaatgtgtgggaggtgtggagtgttgagtgactcgtaaagaagggagatggggatccaattcggtcccttggtgattttgcctaagcagctcgtaaggaagggagatgtggatccccttacaccttggcaaatggtggacaaaggatcttggcgtgcaaatcaggacctttggtaaagggagctgggcgtgcagatcaggtcccttaatggctcttcaatatcttaaacaaaaatctacgcacatttacgttgggttttttgagagataatatttttcccccaagtttgttataattttataatattatgatagagttgtcgaaaaagtaattcctgcatttttgaactccatgctcataaatatcaatactactaagaaaaacatgtaagtaaaccacaaaatttccaagtattttgggaagataaaaaaaatccccctagcttttaaataagttttcaccatccataagagtctttttccactctccatttagaaaaataagagcttttccaaaagaaaactctctcaaatagcttcaaaacccatttcaaaggttaaagtttcaagagaaaactaaagattgttggagaggattcaagcttgaagatcctcattgagcaagttctcctcacccatttgtaggaagttattttaccaggatctagatttactaatatgtatgttgactataattctataatctaacaccctaaatatgaattcctaatatgatgaaataaacacatataaagtttagaaaatcttacattgatggcagcagaatgttaatgactccttccattcagatctctagccctagattcctttctgtaaaagagcattatcaagatatgaacctggatcttctctccttcagtttggttggattcttcacaatctttcacactatgattgagtacttgacttgatatgaatgggcatgtactctatcactaatggctcgaaatcgatgaagaacaagaaaaggaattagaaatataaaggaaggaggctcttaattttctagttgtctgacaaagaatgaaaatcaggctttgagttggatgatgttatgagaatgagagtcatcttaatccttttatagtatttcaactagggtttaggatttaaattatacggattaaaaaagataaaagaaaagcaaaataatacttaagtggccgaccatagtagtgggcctcactagttataactttgccattttattcaacaatttatcttttctttcactaatgccat

SEQ ID NO: 161932 - DNA, 4137 bp, Cannabis sativa
ctctctctctctctctctatgtcacgacttagacaggttgagccacgtctggtggtcgactagtttctgggttggagttgacgggggcaagggagtctgaacaatatatttggtcatttgggtgtcgtagattttggtagtatgaatttgggttttacttttgtgtttctatcttgaataatttgagttggatcaaataatcgatgtgtatatgtataaatttgggtattacatgaataaattggataaagatttggatttggttagctgaatatatataaaaatctaggattttttttttttgggtttcttaagtgttgattggatctgaagtggtgatggaagtgggaagtggtggttgttgtgggtggtagtgtaatagattagggtttgttttgtttaggaaaaaaaggaaaaagaaaagaaaaatgacaagaaaaagaaagaagagagaaaaaaaaagaataaaataaaataaaatattttttataatttataattttaaattatttttataatattttaataaataatattacatggaccactaaaaatttgccacatgtacatttgtgtacacgtggatagcccaatgtggcacttaactgaaatttttggatagaagtgtatagagaaaaatggaacctaagtttagtaagtttttctgtaaatattttagtttttgtggttaagcattaaaattttttaagttcgggtggttttgccgccaatacctatatttttaatttatatttaactctaacaatttgttcaaattttttgttgggcaaaatagttgagattcgtgaaactgaaccaatgccgaccaatattgcccaacaatgcaatatgtcgaccccgcccaatttttcgcaaatatttctattatgatacaggtgctggctgagcagtcacgccacttgagagggatggaccagtttccgagacttaggttgggagccaagagggaaactatcaggacaggtccctccgggcaacccacgatcatccaggaggaatatgagacactgaagcaaagggtggaagagcaggaagcacggaataagtgacagcaaaaaatgatgcaaactaaaaatcaaatcatgagcatgtttcagtaacaaatgatgcatctagccactgccgttccaagtttcaagatgtccccaatgccttcaattccactgattccaccatttcggtcgcctagcattgggtcttttttaaagactgtccctctggatgatgacgatgacgatattgtggacttgtagtttcatttttttttgtactgtaaaaatattaatttttattaactaacgatacttttatttagttttacataatttatatagttttgtaattataataaattttgattttataatatatttcagattatatttatttattagtatcttaaaaaatttgattttagttttgatttaattttaattttattataaatataattatttttttaacaaaaaatgttttgccggcaaactatatctcatcggcaagccagcaaaactaaagttatattttattgacaatgttctgtcgacgaaatattatgtcaatagaacttctgcgggtaaataaaaattaggtgtgaattggcgtaaaattttatcggcgtaatatttcatcggtaaaacttcgtcagggacctttctgccgactaatcattaccggcgagagaacttataccgactaattaatttgccgaggtaaatagtttttctagcaagttatggtgatcgccggcaaaacaccttatgctaacgaattattgtcggcatcctttgctggcgtaaaagctcactggcaaaacaatgccagcaacatatgcatacttttgtcgacaaaattcttttttcttgtaatgagttttgagttcaggttcggtgtctgggtccgaggttcggtctatgtcccgagtccggtttggatctgggtctgagtccaaggtctgggtccggcctgggtttgggtccaggttcggcctgggtccaggttcgggtctagttcttggtctgcatccctagatatgggtccgggtcccaattttgggtccagatttggtatgagtctaggtccccgcattcaagtcggaaattagggttgatcctgaatcctttgtaaatattataatacaagttaatacggataatttgttatgtattacataatataacttacatagtattaataattaatataatatattattttatctaaacataaatttatttatctttcatacaatatgactcttatacgaattacgaatcaagctccttcattatttcattaacaataataatgataacacatgtatcagtacacatcatcctccttaatagagtttttgttttcaaaaaataaaattaaaacaaattttgttttccctctctttggtgcacgtagttaagatttttatacacatacacattttagtggtggcatgagaaaatattaaagagtgtataaatgtttttttgtgtatattaatgtctaatttatttttacttacttctattcaattgcaatagttaatttttaattgagtattttctttattaatgcaatgagttgctatataaataattaatagttgtttttaagcttatttatctttctggagttgttgtattcatttatgtgatatatcatgtactctcggttgtttttgtgttgtggtttcattgtgtaattttatattgatcgatacaatttgacatgtattttttattgctattaggtaccagtagtgtctagtactttctcgacatgtcacgttgcgattgactagcgatactccttgaaacatattatattaaattttatgggacccgatacttagttagaccaatagcgatattgacacataagagggtgctaagcaccaccagtgcactttagcatttcatgataggtgtcttattatttatgtgtatttatttatttataaatcgctgcaatttggaattgatgtcttcattaaaaaaaataaatcataatatataaatatgtatgttatgagtaaatagtattttgtaattttaaattttaaaatcatattttttaaatatatatatagttgaaaaagaaattaggatcgtaaaaatataaaggaaaagatctttctttgaaaaaaaaaaaaaagtgtgttgaatagatatattgatagagagagaaagataaatgcccgaaattattaaggtttatgcacgtgcagatatagctataatgttttcatggtttgatgattagctatagtaaaccatcaaaccatgaactaattaattatgatacatctataaatatcaatattaatataaccgacaacaagagttcatgttggtgtcgcacgcttaataaatttaattatataaataaataagcattacgtacgcaaataagtaataataattaatgagtcgaagattaggaagagagaatcattacactttctcttaaaaataaaatgtttattttttagaagtaaaaagagagagaatcttagaaagaaaagaaaatgaggagtgggcatatacatgtgggggcatagagagagaaaagtgacataatagagaaatggtgttaagtgtttgtgttttttccaaaacccaacacgacccttaatatctgggtgagggccggccggcaagaccccaaagccgaaacgtgttcagcacacaccacacacactataccaataaacgtacgtacacctgcactgtatattatatgtgtaaatgatatataataaataatcgatagtttcatgacatgagccatggtccatggacctccatggaggccaggacaatatgacatgatcagtgagccctatagctaataagccacccaacaccattcctttattttcatataattattgctctcaaagaataatatgataataataattgcagtctcctctcatcctcagttgccacgagtcgatattttaaagcttcaaacctcatcacatttggatttcctacctattacaacttttgacatttatattatattctagattaatgttatgtgttaagtcacgtatgttaattttattttagtttttaattttttataatatcataattttaaaattaataatat

SEQ ID NO: 161933 - DNA, 5031 bp, Cannabis sativa
  modified_base (4975)..(5005): a, c, t, g, unknown or other
aaacctcacggccagagtgatgatggcaaattggaggaggtggtggtagagatggagatggggaggacaaggtcttagaggctgctcctccatttccaggcactcctactcctactccaccaactggtacgaggaggagttcttcatcaccatctctctccctcgtcgccatattattcaacattttttttgtttttaataatgttttaccctcttgttattagccactcaataatcctagttagttacgatttttaaatctgatgagttccaacggcccgttaccgaaaaatggggatcaattagaattaatacaatgagatctcaactaaacgaggtactttggtttttttcttttcccttttgggactgatctctaatttttgtacaaaaaaaataataccttaggtaagtaacccaaatttataaattatttcacaaaacacaaaaacaacaaaaaaattataaaaatatagtttcacggaattttaaatatttttataattttttgattttatttaccgaaaatagagtcttttttatgttgtattattgttaatttgttgttgattttttattatctgtatgttattttttttttgttgttttgatattatttagaaaatatttttatgttacttttatgtaatttatttttatttttttgtgttatttttataaaaaacggtaaaattataaaaaaattctttaaacttagaaatttattttttttttaaaaaaatataaaaatgtaatttctttaatttacggggtggtggtggactttcaaggtcattgcttgtttatgtcattaatgcgtaaagtagagattcaaaaacaagttcacacataccgccaacaatgaaagcaataataaaaatagaagtcgcggtcaataaggtagggatcatcaaaacaccaaaccatcccatgtaaagacatttttcggtgctggttatctagttacagaaacgacccataggctttcactttcgcgtctctctaaaattaatgaaaaatttgaaacaaattaaaatggtatgctttactcagatgaaaaacgattacgtacatggccaataataattcattcccacagagattaaaattatttaatacagtagaattttcaaccattaaaatccaatccatgatacattttctccagtctcccttgtacacagtgtacattatacatctatatatatacgattacgattacgaaagcctactattagagctttgctacctaacttcaattaagtaaatataatataattacttttcacaaacccaatcccatatttagagtaaaacaattgttttttccttcttcaagtcacaataatgaacacagaaaaaaaaaacaaccaccctttattcgtttaacattcaggtactgccaccagggtaggtgcagccatcgtagcctgcaaaatcccccaaaagaaaaaagagaattattattatatcagaatcacatacgctaaagtaatgcatgcttatccccaaaaaaaaaaattactcactgggattattggaagagagagtggctgtttgggagaaatcacaattccatggatcgtgaccagctgtttggtaaaggatattcatggcgtaggcagcgtgggaggccaaagtattgggctcaaaacaagcaccgcccggttgaattggaccacagtcaaatccatgtccacaaacataatctatgttagcctgtaattgggcatctgaaacacctgcctttggaacacaccaaacagtcttttttgcctttggtgatgatggagtcactggtgtggtactgggtgacgacgatggggtctgagaaaaagtaattgattgttaacaaaaacgacaaacaataatgaattttgtacataaactacgcattgtaatcagttgttaaacttgtacatttgtactgagtctagtctactgacctgggtgctggttttagaaaggccaacgtcgtaagtcatggaaagatcgggtttgaatagaccaaaagcacgctctgaacccgggccaggtttcaagtcctcatcgtacagagcaaataagtaagtatcgactgatttcccaggcatcaatggggttccaaccatggaacggaggtgggcaatcaggtttccattataggctttggcgttctcctcacttggaccaacctcattgctatctcctttgtaaggccaccctgtctctgcaacaacaatctctacatgactgaaccccaatgagttcaatgcagatcttatggcatccacctgaacaacaagatcactgtctctgttaaagactttagtctcattcaacaagaatagataaagaacctcagcaaaagaaaactctacctgagcatcaaacatgttcatgtacttgatctttgtgttggaatcgacacgcccagcgttaggttggaagagacaaaacgccagcgtttcgggtcttgggtcgtcccggtaagcgaaatacgggtatgggttgatcgcgaaaggtgaaccggtagcgttattgaaggataacagacctttcaacgtctgaatatagtccgggtggaagctaccggctgatggcggctctgattgccgaagcacagccatggaatgtacggtcgagaccttgacttttccacccaatgatactgaatcgagggcattttggacattctgcacagccggaacgagctggttcacaaggttctggtcaccggaggtcatgacttcgttgccgacagttatcaagataatcttgctggatgggtagaaaggaactacatttgagttaacccaatttttagcgaaattgggatcggaagcaagtgccggaatatcgccgttagcagcaccaatgacaattccgatgccggtgttggcaagtgctttgataatagccgggtccgatccatataatcggaccttctcaattgaagtcgactgaagtagctttgctgtggctgacggcggtggaaggttgtcggcgacttggccataatttacaccgatgaatgactgtgattctacatcataacggttttaatcagttttcaatttaaagaagaaatccatatgttttagtttccttcctccttcgttttctttttttttttcttggctaccaaacaaacagaaacccaatccaaaaagaaaaaacaccatagcataaaataattaagcattaaaactaaagctccactgattcttgaaacaagagaacagaggaacccaatttcagaaagaatcaactgaattgaaaacttacttgcaagattaaaggtgagcaagagggtagcgaataacaaagctgtagtagtagcataagggagtgtgatcgccatagtcgttgaatcaaagaagactcttgtgttattctgtttctgaccaagaatgtgagaattcctggttgagagcgcaagataaaatataagacaaggaaaaggaagaggctaagtcttgggggcagaaccgtaaagttactttaggaaaagcttattatgtaggtaaatatttttgtttctttttgtgtaattacacgatataagatgtgtgtgtttgaatatgatacagtaaatgtaattacacatgaaatgaaataattacatagtacactctaattacatggtagttggtgacttgagagaatagttatggtttatgctgtttgacacattttgagtacattttcttttgaaatggcagaagttttaactttaaaaaatgacgacattcaatctcgtgtattgggatttcagaatgtgattttgaagtttaatagaaatgttttttgggtttagtcttagcagattttagatgtagtttttctaattttcactatgatagtatctctttctgttctagatctattaatgttattgctcatttcttggctattatatctcgtcgaaagttactaacaagatttagtggcctaattatcttattgcatccacgatctcattatatatgagatgaattaatttaatcaatttcttctccactttctttttaacttaggacccggacccagaccgtaccccccaggatccaaacacggacccagactcgaacccgagacctaggtcttgaacttaggcccggatccaagacctggatcttgagtcgaacccaggaccggacccggacttggacccaaattcggacactcacctggacttggaacccagttcgaggccctgaccaaggacctaaacccggaccttgattctgggacccacacttgaacccgagactaaacccgcactcgagatcagacccagacctagacccatactcgggacctggacccaaacccggaccttgattctgggatccacacttgaactcgagactgaacccgcactcgagatcagacccagacccagacccatactcgggacctggacccaaacctggactcgagacttggacccaaacccgaactcggacccggaactcgggatccagacccggactcagactcagacccatacctggaatcggacccagacacaggacacgggactaggacccggacctagacatgagacccgaactcgggcccgggacctagacccgagacctgaacttgagaccgggctcggacccagacctaggacccaaacccaaacccagaaccgggacctaggacccggacccggacttgggaccaagacctggacccaaacccggaattgggacctagaccaggacccggacccgaacctgggacttgggacccgaacatgagactttagacctggacctggatctaggacccagacaccagactggaacttgggcccgagactcgagacccgagcctcagactggactcgggacccagatctggatccagaccggacctgggactccaactgaaaccctgacctaggacccggagcccagaactcgaactgggacttggacccaactagtagttggtgttagagtcgagtttattgaaaatatannnnnnnnnnnnnnnnnnnnnnnnnnnnnnncaataccaaacataatattgtattaa

SEQ ID NO: 161934 - DNA, 1036 bp, Cannabis sativa
  modified_base (918)..(929): a, c, t, g, unknown or other
cattcttccatattatttaactagctttttcataatttggatagatctatagggcaagtattcctctttatatttttgtaaaaagtcttttattgttcacatgcaaatttaaagcttattcccttgaaagggaacaaaactttctttgcgattaattgttctttatgaaccaccactatttctatgtgtacatcactaagctttcaaatcaaaaatcatctttttaaacaaataatttataagtgaggggttatagatagacttatagtactaaaatgtactcttaatatttagccaagcatgatgaattaagctttaatatacataaagtttacttttataagccagatatgggatttctcacatatcacaatattaagccatgatagaaatacttgaatatgataataaaaacaacatgagtatataattatataattatttgagtctcaataaacaataatatagtatatttaattaatagcatatacagttgatctcatcaaatggggttcacatgatagctagtttggcagcaattttagaagcattccatctgcaaatctgcatgatgggtttgtgaagttgtgttctaaacgcactcccaaagcgcctaaggaatataaatatacataattatattaatatgtttgtttataagagccatatagtatatattttttttctttatgaaagggtattatgagtagctactctacaataatatattataaaccatacaatattttaatatttttctatttctttttcagaaacacaatgttcccaacaaagcacccaacattgagatgggtggaatcataggcagcaatggagcagtgcaaaatgtgcatttgttgggatgtgttaaaaatataatgttgagtttgggccccaccactctctctctctctctcnnnnnnnnnnnntctctctctcacacacacatatatatatatgtgtatacatatactactcgtttaaattatttctaatataaactcaatatttgtacattctccaagtcaatcaatac

SEQ ID NO: 161935 - DNA, 3234 bp, Cannabis sativa
tatatatatatttatgttgttaattatatggttttaagttaattttgtttgtgtgtgtgtgtgtggagacatatggtacagcctgtattttaatggtgttgtaaaatgagaattaatggtctattttcagttgttgtgaaattgtgacagaaaatgattaagatttagaccaagatttattgagattatgatggtaatgaatgatatggtgttcaattgacaagtctttattggttcacttttgtatgtcacaatatttaatttcttaatttagatgtctattttctatttcataaaaagaaaaacaaatataatcatctaattggtcctactgattgtattattaatttctcatttagtgctaaaaattttttgctatatatttttttaaaaaaaattggttataaacactgtataaaattaaagacggttttttcttccgtattattctacatgtataacattttataataatgtcaatacacaaattaaacaaacaatttattctccatgtataaaagtctttttcttaaaaaaatatgatacttgttatctattgatttatattatatccattattaaaaaatggactgatcgattgaatagtttcctttttcatcaaaaaagaagaaaaatgtaaaagtttcaaataaactttttcctttataacactggtcatatgattgggtttacacttgtgttttgatgaattatctgtttgaagtgtattttttaaaatattacaattaagatctaataactgaaatattcttagttattaaaagaggtatatttcatggaatcctttattttagttaatttttaaaaaagtttattttgtaacaaaatatattttgaaaataattgaatgaaaataattttgagtatgaatctttcttttattcattcatttaccctcgtgggtagcaaagttgggaagcaatacgagttttatttgaaaagtattcatgaaggttaatatattattcgaaaaggaggcgtatggttattggattgagtattgatatcctaaagagaacccatttatgattttgaattaccctagtttggcaaataaaaggtttccagtcttcaatgagttatgttggtatgaagaagtttcagccctgattgttgaagtcttctcgggaatgtcttaatgtgatccagatcatgtttttcaaaaaaaaaaaaaaaaaaggtttccagtcttatgaagattggagagtcgtcttgggttgaagaggttcctaaatatatttttgtagagagggatgtaaagcctattttgagcattcatttgtttttctcaatgtctgatgatatttgacaatggaatggtgagttctagagtgtattcggtcaagagtgcgtatcaatttctttaaaagcttaaatgtgagttagttgaaattggtaactcgatcttttagaaagagttatggatttgagagtgcctcctaaagtcgaggatttgatttggagggctgcttccaattatcttccacctgtgtccagttgggcgtgaaatatgttccttttccctcattattgtgtccaaggtgcttgtgagtaaaagagtctatttctcattgtcttgtggggtgttcgtttgcttttgcttgttggcgaataacaagtattttggtgatagagattggtgacaactcttttagggattggcttcatgatagattccagtgttgggattctgagatgaaacatagagttgttatgcattgtgttgtggtatgtgcgtaatgataagttgtggaatgataataataagactgttaaagaggtgatttcgttggctaagggtacctttgatcaatggagttgtgctcaagataaaatttttgattcctctttattttctttacaagacagcggagggcacgagcactgtattgcaccgactggtaatacaatcaaaattaatatcgatgcaactatctttagcaatcagaataagtatggatatgattgggtggtgcggaactcttctagtcagattattatggctcagatagtaagtcgaatgtgggtggttgatcatgttcttgcataagctatcagggttaaggaggtatagagttggttgaaagatattgggcgacataatgtgatggtggagttggacagtttggtcacgatccaaactatccgaagttcattatatatgacttctatttttgggttctgcatttcagagtgcaaatagattctttctaattttaataatgtctttttaatacaatctgctaatcgtattgctcactatttgactagagtttcgtgattaaatgctagttgtatttatttggattctacgattttgagtagtttacataatgttcttagttaataaaattgtatttttattaaaaaaaaatagtttgattatatttataaatattttgactaataagtatttagattttgagttccttattttaattttattatttttaaagtaatagtgaggtcctaagtaaattttttaaaattgtgtccaaaatagtggaattcttttttatacattagagtactttggtcattcaaaaaaaaaaaataatcttaggctcgtaattgtaatgtttttaaaataatagagcgtttaaaataattttttaaaaaaatttaaggtccaaactatttaaaatactcaatttagatcagtgaaaaataaaaagaatactcattttataatgtgtagcgtattatagaaacaccgattattatatgacaatacatagtgtaaattttaaaaaaactctaaataattcatagtaccaaaactaaaaataatttattattacataggtaaatatgaattttcaaaattttttaaataaaaataaattttaaataatctattttgaaggtgcaatgtagtaggactttactcataaattctaaactagaatctatattatcatcaatacggtataaaatacccatcaccattaccatttattttttcatggatatttactatgtcctatacaccaaacatcttaggctccaaaattccaatgacaaagtactttttagtttggcaaaatttattggaagagtattaaacttataacataactgatgtaatttgttttttagattaatataatattttttaagaaaattatctatatactgtttttttttttaatttttttttttttttaaatttatgatttggatttttagagtggttgcagctctagttgcaat

SEQ ID NO: 161936 - DNA, 3378 bp, Cannabis sativa
tttttttgttattaattttgtctaaaataatcacaggtggtgaaagtgaagtttgggcaataaaaccaattagaaaacaagagttgtttcagttcaacaaaactagaccaatcttatgcgatcgatcccataattcccatgacatatgtgagatctttgttccaactgtattggaaccaaccccctccacattctttgtaatggacccaattgtcaatatggtggaaaagattcgaccttatccaagaaagctagaaaagtctacaatgtccagaattagagagctaactatagtgtcagacccaaaaggcccgagatgtgaagtccaacacaaagcctcagcgcttgtattcagtgcaggcgggtatactggaaacttcttccacgagtttaacgatggtttcatcccactttatattactatcaactccttattcaacggtgaagatgacatcgtcctagtgatatctaaatcacgggattggtggatcaataagtactcagatttgttacaaagttttagcaaacacccaattataaacttagacaatgatacaaccactcattgtttttcttctgccaaactaggtcttataactcatggcttcatgactatacacccaaaattgaaccccaaatcactaaccctatctcattttcgagcattcttagaaaaatcatacaccaagaaactgaatcatcgtagaataagtgttgaaagatcattgattcgacctcagcttgtactagtgagtcgacctagtggtgctggacgagttctcttaaatactgacgaggtaaagaaagaggcagaaaaagtcggattcgatgtcatcttatttgagccatcagctacaacaacattaagttcaacttttgagatgatcaatatgagccatgtattagttggggtccatggagcagcattaactcactcattatttcttcgacctggttcagtatttattcaagtggtaccacttggtgttggttggttggctgaggtctgctttgggaatccagcaagagatttggggtttaaatacatggagtacagaattagttcccaagaaagtagtttagtggagaaatatagaaaagaagagatgataatcaaggatcctgtggcttatagaggccagaattggtcacatgacataatggaggtatatttgaaagagcaaaatattagactagacttattaaggtttaggaaatacttaaagaaagcttataagaaaagtagaaggataatggagaaagaaggtatgcaaaattaagtcaagtcaaaataaaccttaaaaaaaagtcaaaacaatattataagatttgtaattttgcatttataaaaagtgtgtaataatagtcaataaaagtaagtatgtaatgatatttataatatcaacagaatttgtaaattgatgaatgatgaaaggctcatataaaatatatgtttattatttatttttatttagaaagaaaattatgtttattattattattgttttaaaaaaaaataatttatgtttaataaatacatgagtacattaaaaaaatatctatttgactttatttttgttatacctattttttagaacaattattaaatgcattgaattatatggcacatggcataaattttattacttgcaatagatacattgtgagacatatcaaataatatttggtaagacttgttgagtagtcacatacaacaaggatcacaatgtttatgaattaaagtatttcaagattgctaagatactcctaaggagaatatctagcagctcgaagaggtttaacattgtagctactcgagatttatactactataaatatcatatatatctttcattttgtacgatacaaaatataaaaagtgaagataaaagtaagaagaaaaagaaaaaaattgcggacctatacctttgattattttaaaagaatcaaagacatagttcatggagacctttattttcaattattttgaaataacaaaagacataggtctccactaccctagccccatatcagatacatgttgaggtctatgtcttcggttttttaaatgacctaagacgtaggtctataaaaccctaattttagatctgaaactctcatttcttcttcattctctatcttttctctcaatgaaaaagggccaccgccatctatcttaaggctccattttctccatacacaaacacttttcctcatttttcttttagatcttctagttttctcacccataacatatatacattataaaaattaattttttaaatgtgagggtagatgtcagattttaggccaacaattttttagggtttttagagaacggcagtcggctaatggtgacaattttgaggcttttaaagttgtcttttgttgatggtgaaaagtggctaacactagctcgctagattagggagatgaataatgagtttaagtaaaaaaattagagatacacacacaatttatagtaattcacttcccatgtcgcgatggtaatggaactatgtctaaggttaagtgtttaagctctggtttctagagagagatgctctgaccttgtgggtagtttttctgaatgtaataaatgaactaagggagctctcctaatataggtgaaggaggcccacaaaaatagggaaaaataattcagaatatgaaaaattctaaattggctaacttttaccgtagatgatgatccaacgatcaaaattaacttctgagactgatattcattttttagagcctgcgagacccgctgcgagtaacctaaagcctatttttgtaactctcttagagtgaaatttgaggttaataacttcataatagcgtctaaagtgtgaaacactactagatatagcattgacatagcttcgaaacacaagttgaatcgcatcaattggataaatattgagttatggctattttactgaaggcagtccacaaccaagcacccaggttgacatcccagcgcccaggttgacatatgtcgtcaacctagatgttgggtaagtgaaataaagtctaagggatgtactttatgatgcctaagtgatatttggacatcacttcgtctatttttgtgtactggaaagcgtcaccaattctcggagatgttgttgttctgagactcgaaactcttcatttctgagtgagtttcccatgttggaaatgagatgttggaaatgagaaaaatgagaaatgtaaaggagaaatgtaaagttaaatgtaaagttgtgtgtgaatttgacttctctgacttcatggatcttaattattgtgaaaaactaaatggacggtcaacacagaataagaattagataagcagaatccaacgcaccaggccatttgtcaacttgggtgttg

SEQ ID NO: 161937 - DNA, 3781 bp, Cannabis sativa
  modified_base (2157)..(2164): a, c, t, g, unknown or other
ttttttttttttgaggtatattttctataaagtaataattaagtacttacgtaaagagaatctccgatcatgacaatgaaagaggtagtattagatgagggtttgacactaaaccattggccatctctggtttggacctctaatccatcaacatgattctgattcaaaatagtgacaatgtttttatctgtgtgagcattcaaacccaacttggtctcattgctttcaggccccttatatttcatcagtcgaagaacgtagttggaagagtccatgtgttcctccaaatatttctcaactcccaaactctccaaaatcatccttcttatcattccatccaactcacataattgttcagaataagaatgaatagtttcactgtacaattatatatattcaaattacaaatggttaattattattaattataataatttattattgtagtaaaattgaaaatttacgtaccaaaaagttggatttccattatcgggccataaagcagtagtgaaaatttcaacattttcacgaatatgggaatggttaattgggatggtttcatacaaaggggcaactggttgttggcccacataaccatgaaacagtttctttgaaatgttttgttgtttggtttgtaaaggaagatcgaaaacctcttctattgcatcaaataaggccttttcaatgtctattggtattttatcgaactttgcctcgaaacaaccaaattcttccagtgcttcgcggacttgggtccttacggtgttccactcgggtgtacctggtttcagtacctgttcaactgaaaaatcaataataggaagcctaagaacgctttccgacgccattaattaagtatattaattagaattaatgtctttatatataaatattgttttggtttgagatttttggtactttaatttcaaattcaactagacccgtatttatagcttttttaaaaaatataattatagagaaatgcatgcatgcctagatcatggtgattaacttattattatttgtgtccttttttattttttaattttttatacgtactcaattattcattataaactataaagtattgtaaattgtaatacattatttgtaatcggagaagatataagttgtttttatatattatattctccatccctcaataaatataatatgatcatctgacaaaaaaaatgtacgtataatatataatatgagtttttttccattttttgggctatataattacaaattaatgacgtttcttccctccttttcttgcattaattagtatagatatatttgaaaattcaaataaaagaatcaaaaatttcagaactacaataatgctaataaaaaatattaaacagctgaatgtgagtattattaaaaaaatagtggcaagaatttgttgttttaattattattttaaactttagttgcattacacttacaacaataatatttttatagagtattaaatttaaataaattataatatttaatttttacatattttttattatatttttatgttaattaaaattaaaattagatatgtgtaattgaattaatatccaattaaaaagtggattcaattcaactatagtaattagattatatattgaattttgaggtctaataaaataaatcaaataataaattttgaaattttgatcggagaaaaaatattaaattaataaattggatgtccagcccaaatataaatattttcttgttttttctgtttatgttatttaatcatatattaaaacaaccatctttttaattttcgtctacttgattattatcaggagacagagcacgtattaatatattattaaaccaatacccaaaccagttattattaatatattattaaaccgagtttaaataatgcatgcatgctattattaattgattaaaattattacagctaataaatattttctttttctaaaagaaataaattaaaatgacatggtagagctagtacatctcctctatatgactaattaattagttatatatattgagtgcagagctaccccatagctagtgatgatcaaaagagcattgttattaggcatcagtgatgtttagcacattcttgacatgtcgcgttgcgattggctagcgatactctctaaaagctannnnnnnnaattatatgagacctgatacttagttagtgccctttagcattactctgatcaaaattatggttagtgtaattgagaaaattatgctttaattagtgtacgtggatgatattacctactaagttatttatcatataatttagctatctaaattattttaactacatcaatatatttttttgttactttattttatacttttatatgagggtaagcattacatatatatatgattttattttattcgaaaataaataaacaaataacaagagttagacatatagatcacatacatatagcgaaatcctaattttcaacacgaataaggattaggtagggctgagcatataggttggattaattgagttaacggtatttaaatgatttaacccaacaatataacaaaaataatatttaaaattaaaaatattgggttgattttataacttttatttcataacaaaaaatatttagagtttaatatttcataaaaaaaaaagttcaaacataaatatatcgatcaaaaattacaaaaaaaattaaaattaaatactatagtcatctgaaatcttaaaatattaaaattgtcaattgcattgaaagaagctttaagactttggatctataaacggggcaagttgttgttgagtcggattggaaaagcattatatcgatgctctgtaaaatttggttcttttattaactctttttggtttagttattttttattgtcgtactttaatttctgatcttaacaatattttttgtgtttttgtcaaacaatctatgaataaggcatctaattgtttggggactgtcgcttgttccttcccagtaattcgtggctatggtactgggggtttgtgcctactactttttaaactattttaatagatgatttgccccgtaatgaataagatacatgctttttgtcaaaaaatatatatgaaaattgtccatatataacaaattgaaacaaaataaaatcaattttcaatatcggctccaatcaacaatttcaatgtcaatcgtctttacttttagcgattattccttgaacttaggtgggttgcaagattttaacgcttgtaggtgtcgcttggtgttcgacccatgaagaaatgagatgctttttgttctgaaaaaaaatatattatatctcttttttatattattttttggtattttttgttctaaaataatctaataataaatacttttataaattattaaaataatattatattattatctaatatatattaaatatttaaattttcatattttatgataaaataaaataataataaaaaaaagatataaaagatgttatggtatggtattttttgtggcattttttttcactccaatcttaggcatcaattaaaaaatgctaaaaatgtatcaatgttataagcatctttcataacatgtttattattagatatgatccttaagatgccaaatatccaacagtgttataccgttgttgataaatttcaatattaagtctcactttaatctgataaattaataagaataattagcttttttagtccctgtacttatgacactatactatgatgccccttaatttataagtgtagttaaaaataccc

SEQ ID NO: 161938 - DNA, 4370 bp, Cannabis sativa
aagtacttttgtacatgaaatggagggatgtttgttacaggaaaactaggcagatcttctgtttgtgaaagaaaaagataatgatgaagaacctcttgagaccttcttagaaatggtggccttgggaagggtatataatttggtggtatctaaaccaccagcataactcttacatgccttcatttttcttctgatattgtaaggattttccttcttagcaagatcttctatactcaacacttttgatagagatgtgaatgactgtgatttgccttggaaaaacttggaaagacctctcctgagaatttgaacaagaaaaacacattagcatagattcaaaaaaggattagtataaaaaatgtacttgaacaaatctcagatgtgaaaaacttacttgatgggtagttgggacatgagttctgacaattcatacaaaggtccattatgatcatgggatgaagaaccagatgatgaaggggatgaagatgcatcatctaccaaatctgatgaagatgataatgatgatctgtttgaggaggtagaattcccaatggaggatgatgatgcagatgatgttgaattgtaggcatcatcatcatgaacatgattattattatcatcaccttccatgctaatccatctactctttttcccataatcaccatacaaacctatagagaatggactttgttgtagcatctgttcttcacaggcagccattgataagcagatcacagcaaaaaaacaagataaggaggagaaagtaatcaaaggagaagaacaacaagggagtggttgcagatattgttctaaaaaacctatatatatccaaagatgagaacttgggatatatatatatgtgtttaagtgtgtggaaacgtttatataaataaatattaataaaaaaaaggttggttttattgaatggatgataatggttgcctcccaaaaacaacaacatgtaattgacagacaaaggcatgaaagttttatttttttaaagtaaagtaaacacttgtaatgtgtttaaacacctaaaccattggtagtatgagaaattgatgcacttcattatggtccaagtaatgtcctttgttttgtttttaatttattctttttcttttattctccatttatcatgcattgccttatcttaagattcctagttatcttctcacatggtttgaatttgttgacctttcttaatgtgtaactaataaaagaagataagctctttatctataaaagccatcgagtcacttatccacattaaatatatgagtcactatctataccgaaattgaccacatactaattttatatataaattatttgcatgattcacaaattcatagtgagtgggtcaaactcaaacctcaaaaaataaaattcttctagatgaaccaacccccctaacccacgttggaattcttccaacattgccttcttctctaataatcaaaactctctctagtacaagtcactaagtcagcataaacatttgctcaaaatctaatttttcaagttttaaaaattatatatataatttattaactaattctcatattaatggtttgcagatgtcaacttcttattttttttcttttattggtataaagtctctgtaaagagattatatggtggtgaggtgatgaaacatgcttaaggagcaaattataaaataccacaacaaccgaaaccaatctaattgggccgacacacactattgtttttagtttggtcaacacttgtaaatatagaaattaatatatacccaacatttaattaattaattaattaaattaattaaaatctacatctggtcctgtggtatgggcagaatcatcagatcgaaatagtcggtggaaacacggtagagaagctacctagctagcttgtgtaataaacaattattttattgttatctcattagttatattggctaagataagatccctaatcttaaatattattatcttcatatgtttggtatccctaatcattatttattttgtaaaagttgattagtgatagaaatgagttgtcagtcataaacatagttatgtttcactggacactttttttacaagaaaattttcaagttcgaattctcaataaatttgtttattgaaaaacaataaacttgttacttactacttattattcatttcatttgctttaccatctaattctttctcaaaacttataatttcttcatccatatttataatttaaattaaacttagtacacaatatattttatataatctcttaaatttaatagcattatcgacctcaaatctcaatgctcgacctactaagtactaatcatttggggacctgatttaattttcggcctccaaagtataatgcaaattctttttatttatttttattggaaattgaacaatcttatatttaagagttttattattgtgcttacatgttattttacaattaattaataatattttttaaaaattattatattaaactatatgagattttatttaattaaataaataacaatatcaatatataagagagtactaaatactattagcgccttttattaaaattccattttctttttcattttataaaggattttttcaaccttaaaaattggtctttttttattttaatgttcaaaaatttggactaaaaataaaaattattggactttagagcctctggtaggcctttgtgcatgcctggcccaccataactcagatctaagtctagccctcgcgataaatgtcaaggaggtgctcgagcaattctccaacaaatggtgcttaagtgatgtaccaacaaccatggcgtcaaagactaatgctctagtctaatagtgtgtgaactgtgataacaacatatatgttaagcactaggttcaagttatatactgaagggactcagctagttggttattcatcaaaacacaaataacttatgcataaaaattgcaacacatattttatcatttaaattttaccttcaaattaaaatattatactttcaatgaagaataaataaaaagaaaaagtgactagtctcttgtaaaatactcagaagatagtgattatatcttatcttttaatttatagcctagaggcctacaaacacaaagcttgagtacccagtcataattttctagcctcctgggtaggttattatcatcatctttcttcaattctcacttataaaccggattcaataatggatataatctgattatttcccctctaatttatgatgtcctcataatttaatgtagattctacttttccgttacaccaattccttcaatatctagttctgatgtcacttgtgtcatgttttcccaacccactataattaaagggtggaaattatcaaaaatgcataaacgacattgttgtctctcaatggtaagtataaagatcagcaggaactgtttcacgaaagcataaaagtgtagcatatgatcatcagtcaagagaccatacttcaaaaaagaagtaaaacatttcgagttagctcagaagaacgaaacattttgataaatagacaatgaaaatgaagaaaatatagaatccaaataaatgattgaaaatgaaatatggggaaaatgattgttgaatttcaacaaaagaaaataaaacacaactgcccactttccccaaattaattttgcagtgaactcttccggaaaatatgcacagagtttagcacaacaccgatacaaacaattcctgctttaatttattaatcaataaaaaagaagaaaagagaaatagtaaacattatacaacaaaaacttgtacactaatggacacaaacgaacagataaagattgtggatctgacagtctcaacaggttgtggaagttatttcattactcattgtagttgaaaattgaacactgattaactaccaacttattttctatcatttatgctcatccacaatcgcccaaattgcttgcttagcatctaaaaaacaagaaattaaacaataatataagaaaacgtaatcttaatgattaacatttaaccataaacactctcttcaaccaaatatgatgactcaaatcaaaaatgcattcacgacactattatcttgacagacgatataaataaaaggaaaagaacaaatcttttcatgaaagcatagacctgaaacaatttctcattaaaaaggcttctgccaaatgatcatcagtcaaaacaacataaaacattttgcaaaatagacaataaaaaaatgagaaaaacatacaatccattcatatatagcgaaaaaagataatcattaaaaatgggatatggggaaaatgattgttgaatttcaaccaaaagaacatgaaacacaactgcccactttcccca

SEQ ID NO: 161939 - DNA, 3404 bp, Cannabis sativa
caactttggaagatcagaatctttgacttttaatatatatgaataacagtaattattaggccgtgttgggaggaattctacacggtaatgtgatttcggtattccgagtttcgattttcatggtcgagtgcgagtaaacgactttctcaaaacttgttaggatggacaatgatcatgctgttggggatacgaccacaacggagactgtagttcaggaagaggtgagggtggaagagagtttaatggcagtcgaagtggaagagataccggtgatggacgatgataatgggtgtatggctcaggaagcaggggagttagatgatatgcgacaacacttctttgattctatgactctggaactagaaccggatgtggaactcagtgctgaggtcacgaggaaaggggttcttgcaaagatcttcggaaaaagaaatgtggctagaggaagagtgaaggaaatactctcaaacatatggaacgtgaaaggtaagtggcgaatgaaaaccctgtcaccaggactgtgggagtttttctttgacaatgaagacgataagaaggagattctcaagaaaagaccctggctggttaatggggttttactgaacataagagattggccagaagatgggtgttgggaccgtacggatatgaacaaagcaaggtattgggtggaggctcatgggctccctacaccatatctcacttgggagaacacggatgttatcgtaaggaaggtaggagaatacgtggattttgacagagcaccgagaaatgttattgctcgaagaggttttttgaaatttcaggtagacattcttctaaaccaaaaattagtggcagggttctatctgaatatctcatgtgacaggaaagaatggatacaatttaaatatcacaagcttctgaccatatgttttacgtgtggtcatttagctcattactgttaaaaatgtgatagaacaatggaatatgcttaccccctgttggtaaagctgtaccactctacggggcatggataaaaatgggggttccaattaaaagctatttcgacccatcgattccgagaatgaaaccaatcgcctattaccatgacgccggtgacagagctccagtggggtgatgggataagggtaagaaggtaattgtggatggtgaaaaggatggatcgatgccagggggacaagaagcagtacaggggaacgttgggctgaggctttcaccaaagaagatggctgtgctgaatgctaagaaggcttgtgtagaaaattagagaaaaacacccttatcgggtaagagaggtcttcaggggtagaggtctttatccaatataaaaagacaccctatgaataatattgataatagactgagagatgcagggattatagctagtcttatggcagacattgggccttcacgtgatcagaaggtggaccggccccatgaggaagtttgcaagtctagggtccctcaccaacatcctaaaccaacctttgttacatggcccacggataaaagccttgatgaggtggttgatcaattagttggaccagcccacaaagaaaatgagttggtccaagtgattgtttcacatgagagtggggatttctctacaactaggtcggtttttactggagcaaaaaaaaggaagaaaagcttgaacattatcccagttatttctgagaaagaggaggcggagaacttgggagacaaagctcctacaccggttacattcttaccaccattggaggtcaacaccttcacaccaggaagcagtagttgagataaaacaaatggtaaaagaaggtgcaatccgagaaaaaggggtggtagctcaggaggaactaggaaacgggggaagcagggacttacaatcaatgataataagaatcaagaggagaagggtgaaccgcagctaaaaggtacgacaaattccaactcaaatttggataatgaattggttgacattaaggtttatgagtcacttgatcgttttatgggcgaggaggcggcccttaccaagccccctccgtcgacatgagactcttatcttggaattgtcggcgtgttcgtagaaccccgacaacccaagcgctcttagcttgggctagaagatacaaaccggaatgtatctttttgatggaaacaaaaacaaatgtggaagggatcaatgggatagcaagactgttgagatatcaattctcctctataattccctctgtgggagtgggagggggattttttctattgtggaatgatggggttgatttgaagtttattgatgctaatgatggtgtctttgaggtggagatcgtggaacaaattacttcggtgaaatggaggttctttacggtttatggtaggccgtatgaaaacaaaaagaaagatttttgggatatgatagaagtgaggataggtagatgctcagaaccgcggatggtgatcggggatcttaacttgatagcgaacccctgggaaaagtgtggaggtagaagagtgtcttcgagtgatacgaatattctctcaaactttatgcaaaatatgggagggattgacttgggattccacgggagcaagtttatttggcaaaacaatcgattcttggggggtttaaccagagagagattggatagagcggtggtgtcgggggattggatcacagccttcccctcggctgatgttttcaatgcccccgtcacggtgtcagatcatgcttttattctcttggatagtaatggaagaagacggaagggagtaaaaccctttagattttttgaagtttgggcaagggagaactcttgtgaggttacaattaagaaggcttgggaacctagagacgggagaagagtaaatatctgtgggcggttaagtgatacaaggacagcccttcaaagatggaaaaaggagtcttttggggactgtgatagaatgataaaggaggcggagaatcgtcttaaatggatccaaagccaacccttttcgatggctttgcagcgtgaggaagaaaatcttttaaattgggtttcagagttgtggattcgaaaggagggaatgtggaggcgaaaatcaagggaagtatgattgaaattgggggataggaacacaaaatttttccatgcttccacgataataagaagaagaaggaatgagattaaagcaattaaaaacaagatgggtatttgggtctcgacagagaagaagatcggaggagtttttaatgaattcttctaggagctttattgtgcaagcaacacgtgtatggataattatttttttgaccttcaaaatcctgtgattactggggaggaaaatgatatgattaaaaagattccaccaactgaagaaatttggaatgcagtggcggatctgcaccctttgaaggccccgggaccggacggaatgccggg

SEQ ID NO: 161940 - DNA, 3058 bp, Cannabis sativa
atatgactttggattcatctaaactcacatgcactgaataaaacagcttgagtttttctaagcactggaactgagctttgggttcagtactattactattacctacgttgacaactcatattggacaattaaaaataaataaataaaaaaacctgtcgtttatttaaggccttactcaataattgatacctacatggggtcatggatccgagctggggttgtacaacgtgcgccacacaacattatgattggaaaagaacagtaccccaaccaaacaattactattcttagactgattaagcgtttaattaaaagactcagctttcaccagatcccataatctcagaattcagaatcaaagtttgtaccttaattctttttcttaacggtaatattgaaatttattaaaggtagttaaaacaaaaactgttttttttttcctctcggtcctttctaattctctctctttatatataacatttcaattctttggtggatttttttctttttccagctgcgtttccaagaaagacccaggaatatttcccccctagctactcgctccaggtaattattttctcaagaggatctatattaaattttctaaggagtcaaggctcttctgtccttacagaattaaataagctttagatcatgatttgtatgagtgttttgggttaaatggaatgtgaattattgttagttggttgatttgtgaatggtaatgtaggtgatggagtttattatgagttaaacctggtttttagagtagttgaatgaaaagggttgctcttgtttctgaggttatatgctttacccgatttatttccatgaaattttggttttgattattttctagtcaggtcaaatgaaatacccagttttagatcttgggtgttcagtggattcatcatgaagagtgacatgaagggtccttatattaattatgcatttaatgctaaattaagctttttccttttctcactaggctctaaaggagcaatattgagcttgaataatggaggattatgccagtactgtcaatattgacagttcagattcatctaaagaaacagagatggtggaattagaaaactgcatggaagttttaacaaaactagacttggacttggcatattcttctgagaaattagtaaatcttcatggactactgatgaaccttttggcacaagaaaatgagcttgaaacaatagcagtggagaataactatatctcagaagaatttatggagaaggcactggtatttaatctcttatctagtattttagattctgaggtaagagaattggacagtttcatggttagtctccaagaagaaattgttgatgcacataaaaaaaaatcttcatgcagaaacttgaaagaacaatttaccatgatggaggagaagttgattgacactgaaggatctttgagacagactcaacttcagatatcagatgtcaagattcagtcatctaagttgcagagaactgttcttgcttttacacatgaaaattgtaagcaatgctagtagtgtaaattcttttttgttctcttttgtttgaacttacgtaattaagggtttattttcactttgtgattgcttgataatagggaaaaactgcattgtcgaggtatctgaacatggtctgctgtcaaatataaatgcccaatcgaatctgcagatggctggacaaagacatattctaaagatgctagagaaatcactagcaagggagctagatcttgagaagaggttaacagaatcaagaaaaagtgaggaagaactaaaacacaagctacattacactgagcaggtagcgtttcgaatggaggaaactgctcaagtagtttggggaaggtttctagaggctgagaattcagttgtggtgctcaagggaacttctcacgaattgttaggtcgaatccaacttgctcattttaatttaaatagcatggttcaacgagaaaatgagatgaaatgtaagtaccaagattgtgtagaagaccttaagaaaaaagatgcagccttacaaagtttcaagatcaggactgctgaaaatagtgccattgatgctgaactctccaatttgagggagacactgaagcttctggaggaaaaggttaaagaatcagagctccatctgagcaatgaaaaggccacaaacagttcaagtgaagcgaaaataagggaattggaaaatctaattgaatcattcagagaaagtactgatgtagcagacactagagctgaaagtgcagagctcaaagttgcagagttgactggaacaaatgttgaactaacagaagagcttaattttctgaaaggaagtgctagtaaggcagagaaaaaggttggtgttcttgagaagcaactgagagaagctgagatccaattacagaacgcaaaggcagtgtctgaagcaagtcaagagcaacagaatatgctgtattctgcaatatgggatatggagactttaattgaagatttgaaatcaaaggttgcaaaggctgaaaacaagactgatgatgcagaggagcattgtattatcttatccgaaactaattcagaactcactaaagaactgagtattcttagagaaagaatagagtacttggaggaatcgttggagcaagctacaaggtcaaaagttgaaagtgcaaatgatattaatgtcaagactaagttcataatggatttggtagtgcaactagggaaagagagagagcaccttgagaagcaggtatgaaactatcttgtatgaatagttcacttgttttcattattgagattgatttgtttgtctttgtctctaatgagcagtagttatagaaagctaaaattggaacttgtcatgaaataagagaaaagaaaatatcaataagaaggtttgcttttgctccatggtacctcctcaaataattaaccagaaacttaagaccagattacagactatgcttgattatgaatctcctcagtcctcacagcatccataatgtctgaattcgcttgataagcttttttgggagattaattaatagtcttcaacaataa

SEQ ID NO: 161941 - DNA, 8663 bp, Cannabis sativa
  modified_base (8608)..(8615): a, c, t, g, unknown or other
tgtgtgtgtgtgtgtgtgttttgatggatctggaaaatctccctaattttgagtctttttaatttcgtttggaaaccatctgtttcatgatacaaaggaaagaccacaccgtactcttttccctttgtggtgtcaaatctgtggtgtgtgatgtgtgagaaggagagggaatcgaagaattatctttgaagcagaaagcgaaacagtgggttttccctggtcgataagagactttaatgattgaggaaactattggtttcggcaaatataaaatggtagctgttctgtggaattgtgtgggttatttggcttgatcgaaatacttcaaaagggaataactggatctggtcacggtgaatttaaatatattttctagggctctctcaactcacaaggctttgagggaaaggaaattaatttctcttggataggaaattaccttttttgatagaatttttgctttgcccttttggtggtttttattatgttttttgttggactgatattttattcctcctttctgtcttccctttctcaaccgaattaataaatgtgttttagtttcctaaaatgaaagtattttggttttgccatgttaggctgtattgcagttttgttcctataaaagtatactttgggtttgctattttaaagtatattgcatgtggacgctttctcttttgtaagggcaagtggacgctttctcttttgtaagggcaagtgaacgctttcttttttgtaatggcaagtggattctcttttgtaagggctaatggatgcttttgaagcttaagtcatgctaggtttagtgcaagaggggtagttcaaataataaggcatgtagttttcttctacttggtttgaggttcgattcattcatggacacttgcatatcaattgctactatttacgatattatttcatggtgacgatcccagggtgtgcagatccataatgaactatagaaattattatatccatcaaataacaccaaaagtgttggtttcaaaagatggaatgtctaatgttttttactcggaaaacttattggaatgttgggagcgtgtcatagtgaaaagagttaagtgcaagatggcaggtcaaggagtgacatttttttttctcattgtgcacctttaggctacttctggtggctgaggctgttactgtttttgttttaaggagcttgataattcgtccttttagacaacacttgcactttttagagtagaccatttttgaaaatatcatatttatagtgttttcttacatctgaggaatactatgatcctaagaggaaaataaacaaatcaaccattttttccttaacgacaaatcaactattttaaaagcaagcaattgggccattatttattcagaagttcaagtaatagggattgaagcatgccatttttgttctaaacttttgttttgaggaatgagatggttaggctcagttacatatgagtggtggattggatgtacttctcttatttacagctaatggactggttttacttgcatttgtgtatacgctgtgaaatttgttttcttgtggtggacaaagctacttattgatgtttcattttgatattatatttattcatgaaaggatattttccttgcataattttttctgagttgttttgtttggagttcacttagttgaggttaccaaattaaatagtgatacaattttgacagtcactcatattggctactatattcaatatctgctgtcattaccctttatgcatgcattaagcttgggctgatgtttacctttttcgatgatgactgtcatacttatattggtttgtgattttctattggtccttttgtccttggacttaatttatctacttgataatatgtagttcaggagacatattctctactcacaaaggctcatagcaaagaaattatttggtctgtctgaagattgtttcgacctgattaggaaagatttggcatgattagataaaccatgatccattataaggcttctagcatactgttctaagttagaaagaccttaattttaggagttatgcttgtaactacttgccatatctgtaacatttttctacttgtgatcattagggccttcctatactacctcaaaccatgtttcttagtgtttttatttgataagggacctcttacaacatatttttgctattagttattcattatatgacaaatactttatctgacatggttgttctagtttcattatatattatggcaacacatattttaagcttttttaatgtaatataatggaatttgttgtatgtttcttatctttgttttttctgtcctcagaaattccttcttagtggaagattgatctttgggcctgatgcaaggtcattacttgtcactttattgctgattctagctccagttatcatcttttgcgcatttgttgggaggcatcttcgacatgaattttcaccacgtaattcaggatatgcaattctcgtggtggcaattatctttacaatccatgttagtcttcttaaccccttatttattctcatcaataattgagttcttgaaagcatgatgaagtatcatgtacagtgcagggtatgtccacatacagattgtttatattttatggcccgtatgttacaagaaagtctgcaatgcctttttcagttagcagattgcccttcattatgattataattcttacttgtgctgtgatattatttttatttatagcttttgaagaatttttaccatttgccgactagaattctcggtgtagtaattgcacacaagttatgtcatttgattgtagttttcccttttttcagtttaataaacattctccatttttcctatctttctatcaactttttccacccttctatatgatatacattctccataagcctactcaataaaatctctgtttggttcaaatttttataatttgcaacctgaatttctacatactggtctagttaataaattgtctttgatgagttgagtgcacgaaagattttagtccaatggtactttagtgtttcaaatttgttatgcctgaatgttgagggtgttccattgcttttgcaattcttgggcttccattgcactttgcttatttcaaactagagagtcatccaagatgttacttgtacaattccaagtaattataattattaattggtcaccttaggaatgtcaattttcgatgcttctcccattgagttaatcttttctcttacatattttgactgacatttctgtactattatggtagatctaccagtatttaattcattagttaatgttgataggtgttggtgcttctttttcttacttcagcccgggacccgggaatcatcccacgtaatttacaccctccagaggaagattttcgctatgacaattctgtgtcaaatgagatcgggggtagacaaactcctagccttcagttccctcggacgaaagatgtaatggtcaatggccttcctgtgagggtgaaatattgtgagacatgtatgctatatcgtcctcctcgttgctcccattgttccatttgcaacaattgtgtggagcgatttgatcatcattgcccttgggtaggacaatgcattggattggtatgctgttaacattcaatttttaccttactatcttcattatttcgagttttgtttgctggctttcaaaagttattattagatttctaattgcatgtttaaatgtgcagcgaaactaccggtacttcttcctgtttgtttcttcttcaactcttctttgcatctttgtgttttccttatcagctttgtacatcaaggttctgatggatgatcataggactacagtttggaaggcaatgaaagattctcctgcttctgtgatattaatggcttattgtttcatctcactttggtttgttggtggattaactggcttccacttgtaccttataggtacaaaccaggttagttaattatttttcttcccctctctacatttttggagtagctttattataactgtataatctaaatttatcgggttttgtcaaatgatggttcacaatcttttgtttgtggtctttgatttgacttaagcatatcctttggttagacaatcagttatcctgaatggaggaggtttacatctcgtgaatttattagtgattctaatcactttgtccaaaaaaaaaaaaaacaagttatggctggagggtggtagaaattgaaaatcgatagtcgactgttttttatttttttttgaaagaagggtttattgtgtaaccttattttttctgttttacagactacgtatgaaaatttccgatacagagcggacaacagaatcaatgtctacaatcggggctgtctgaacaattttcttgaagtatttttcacgaaagtaaaaccctcgaggaacaacttccgtgcatttgttcaagaggaggtacaaaagccgatgactttgccctctccacgagcaggacaagatgatatggctggggatccacgctcgaaggtggaagatgatttagagataggcgaagatctgttgaagatctcacaacgccgtaatttcgaagagatggatgaggacattcgtagtagaggaattgatgaggacatgcgtagtagaggaggatttgatgaggacatacgtagtagaggattcgatgatgatgtacgtagcagaggacacgatgatgacatgcgaagtagactcgatgaggatatgcgtattagaattgatgaagacattcatagtagaggagttgatgacgacatacgcagtagaggtagcaacggacctcccctaaacaactccgaggcaggctcagttatgagttctgaccatcgtgctaccactatacgatcagaaactcgacactcgagttggggaaggagaagtggaagctgggaaattgcaccagatgatgttgctaattccaatgtcaccgagagcagaagttatgtcactccgaaggatgcacgactatgatatgattggttagtggactgtacatttgatctttcttagcatgacaatgacaaatcatgtgggtaatctgtgattatttggtagcccataacctggttttgggaaaagtaaaaaaatttgccattgacaggaaaaaaagaagaaaaagaaaaccttacaattgcaccaggtggggttctgatgtattttcctcttaggtatgaaaattgaaaacaaacttaaatgttccttctttttgtgggaaaatggtttgctcttatattttttcttctgctgatgaatagaatgtgtgtttgtaattttttggaaggtaagtgggatggtatcttttgccaaaattgtcctcttttttgggttattgtgtaacagtttgcttctgtgaaattggtaatattgtgatgatggctttattttttttagtgtgtaattagtactccaaaatatatcactatattctaccaaaaagacatttcatttcttctattgaccaatttatatatgggtattgattagtagttcttagcactgtctagacgtgtcactttagaattaattagtgatactctctctaaaaaataatacattaaattaagtgagatccgatatttaattgtaccaataacaatattaatacgtaagagagtgttagacaactggtaccttttaacatttctctttatgtataggtgtttactataattgttacttctcaagaaagtgacaacataaatttacatagtaaaaatttacatagtaaattattcttatttttgttgtgcttttatttttataaattgaaggataaaacgacatcaaataaggcttttataagaggagaaagtgccatcaatgatcaaattgtttggtaaaaaaaatggaaaaaatgaagagaatagaagttgccttttgttaagataacgacactgaattgttgtcgtttttgtggtaaacaacaaaaatgaaaagattgtttatatagaagcaagcacaaaatacgaagaaagttctgcacacgccctttgagaagatgttaaatattataggttgattaaaatatttggatcatgacatttgtctttttttttttttttttggtttaagtttttaatataatcatattataatttctttgatttgtttattaattaagttactacttgttagttgttactgacttcttcttgtttcattattaggagtataatctgacaagggctattctaatagcattgtatttaatctaatgagaatcttgaggctagactagatttgattaaaataatacaatgtaataagaaattatggaattcaagaactaatctctcctaataggttcgtgtttagaaaatataattggcaattaaattcttaaatgttttttcattattgtctaacacttatacttagattgtggattttgtaaaacttgagaggacagattttgttaataatataatttttttttgagaacaataaatttttttaattaataaataaattaggcaatagtcatagcatcaataagataaccaaataataccgtttacaaaaataaaaataaaaaacttaataatatgtttaactaaaatatcaataagccgacgcgtcaaaaaaaaaaaaaatcaataagccaagaatattaagcttgaatcacaaacttttgcatgtaataataaattttattgttacaaaaaatacaaaatcattgaattacaaaagttatatttttcagagttataattattttagtgacaacataaaatataataatatttttgagtcaaaaattgtgttaccacttaaatgtcattttttagtgcattgtaaaaagtaacaagggcaattataagtcatctatcctattaagttttcctaatttttctaagttattttgttttttttttttcatcttctttaaaatccaaaacaatcaaaatatatttatataaaaatacaccttacctaaccttctatctcactatatatatagtccaacctctatttgttaaagatatcaaaaatcacacaatacacaatactaacttctactcccatacactactaaacaccatatatccataatccattatgaattttccaaacctaaaaatctcatcacaactttccattttcttgttcttcttattagtatcaacaacaacaacaacaacaaaagcaatatcatcaccatcatatttggttaacagaatatgcaaaaataccctaaactacaataagtgttgggcaattcttggatccgattctcaagcgaaaaccacaacagattatagagttcttgccaaaacagctcttcaattatcgattttgagtacgaaagatagccttaacttcctcattcgaaaaatagagtctgaacaagaagtggtaaaagcacttaaggagtgtgctatttggtatgataatgcaattaaagctttcaagaatgcaatgaatgaaatcaacatgggtaaattggctgattatcacacctttatgaaccaagctcattattgtcaaattgctttgaaaaatagataccttccttctgtgtcccaaataaactctcaattggaattgtatagtgatattaattttgtaatcactaagattcttaaacaataatatggtatgtattgttatgttattaccatcaaataaataaatttacacaaaataaatttatatatgtaataatctctctctctctctctctctctctcatttatttttgttgatgctattttattttgttatcttcgagaacttgtggaaaaaaatttgttaattatttggattgtagattttgtaaactccaaaataatagtataaattttgcattaacatagataattttcatacatactatattattttttcatcatctccaaacccaccatataaaattatatattcgtattttattttacttttaaaaataatttttttttaacaatataatattattaaaaaaatactctatctatctttacactgttgcactaaatacacaaggctttgaaggagttttccccatcataaggccatcaccaatgtaaactactcttattgctattgtggttttaacaagatcattttctgcaaagagtaaatttgccaatatcctcttgaaaataaaatcaatctatattcgaaaatatagatgtacattcaggagtggatatgagttatcgttaaattctttagacgatcactctagattttactttatgcaaagaaatttaaaatgtctgagaatttcatgaatttttagcaatattaaaaatattaaagttaaagatcttgtgaactgataggggtggaatatttggtggatatgcacttcaaagatcattgagttgaactttgaattatatccaaacttacctccctagaaattctgtttgcatattgatgaaagtaaaatatttatgattagttactaggaattgcctgagtccttctaaggaaataccctagtgataggaaaacttcagaatgatggaatggttatgtacttagtgtaaaaccattactagattcatgaatgtcctaatcgtgggcttaagaaaagctagaactgttaattaaggtttacatgtttgatagctannnnnnnngattaggggtggaccatcctatgatcattaagataagaaagtgtttgt

SEQ ID NO: 161942 - DNA, 2666 bp, Cannabis sativa
gtctttccaatttgccaatgctacgccactaccctaaaaacctcactttcccacttctacacatacctctaaacaaatttctttcttgtaacataaggtaaaccttacaggacgcttatcatttctttcattgagcatgcatgtggcaatttctagagaagaaccttggaatgggtagacaattgagatttgcatgtgagaggagatggattgattcagcagcctcagacatgatgaaaaagacaaggcagctacccaagagaaaatataagtaacaagaaaagacaataaagtggccaaacacagcaaagaatcccaaccgacgaaggtgatgagcagaaaacaaggtaacaaaagatccattgatccaaattcgctaaaaaatttagatacatatccatgacatgatgcttatcaaatcttcaactaatgatgctacaaggacagcaagaaaatcccaaaacatacatagggaatcaggaattaaaaagattaatattttacttgattaattgagagatgtaagctacataattagagagattttatgaccatcgcatagctaaatatttctcaatacacgtgcacaatgtgtgtacattagagatagtcacatttatacgatgggaatgtatgcaatagtaaaacattttctatgccatggaactaatgtagtaaagaaaaatttgtataaaaatgtttcaagatgatgaagccttacttggtgattgacagaggaaattccaatctgattgctttcaaatcataaaatatgaggaataacaaagaggaatcatgttctgttcattcagctttcaggttatcgtacagagtatcctgtataattcataaactaaagagtgaatctacgttcttgtaatctaaccagtaagacagcacagaagattagcatgtgatatattgaattttgacagtcagtgtatctagtcaaaaacagaaaagcaaaaaaaacaaaaaaatgcaggagtgccattagatgtggcatgagacaataaaaatatgcataaatatgcttctagcatatattcaatgacaagttaagcaataccagtttctgtttcaaatctgagattgcccgctttctttggtatgcaaaaaacttgagtgactgaaacaggaagagaaacaaggtcattacagaaatcctatatgaggtataattatggtcaagtggtaagaaactgatcttactccaattctctgcatctcgagagatctacggagtgcttttctttttgtcagaagattcccagatatcagtgttaaagggcgttgatagttttttccacggtaaataataatagcatagccttctttaagcttctccaccgaaatcagaatcccaccactttctgcttcaagaaactttgctgtgtacataacctgatgaaacaatctctgcatcgtaattactttagcaacttccctgtgtttccaatgctgatgcagaccttccattacaccatcgaagatcccacgcctacctgaagggaattacaagcaagaagtgatgaactggataaaagaattgctggacattgaagcggaagcatcaccaagagcaataactatgtttctcaacaaaaatgctacttgatgactttgttttgttgggtcaatagggggttgggtaagagtatattgggtggccaggcttgaaccttatacaaaatacaaacacgtggctctgagataattaactacctagtaagagaacttgttcaaaatggataccaggtttatttcatttatcatatagcatcctcaaaaaatctatatacaaaatgtagatcatggaatgcaattaaacaactcatctcaaggagaaacttgatgataccatgaaaacaaacaggtcatatttattgctccatgtaattaagatcacagcaagtgattgggaattgggaggaatgataacactaaatggtagattaatctctagaatgaaaattaactactagtttcttttctgaaggcaaggaaaatctaattgaacccaacaacctttaccttagaactttgacacttgacagtataatcttaacctttaccttaaattgagtatcgtccagagtagtataaaatccagtaaattcagatagtttggctgatataacaaggacactttgacaaagaaaacatcaggatcaattataaacaacaacttctaccttgagagttcagggagttctttccaaacaattcagaaatttatgaaatcaactttagggttgtatagatacagtatgaatggaaaaatagttccagacagtaatttaaaactgccaccaagacagtattcataatgtatatgacccattaacacattactgtcactgaaattaaacatgattcaagctatgaaatcagtaatataaggcagcttttccttaccaagcacaaggacactgtgcatcttcattcctatcatccgaaaacattccctctcctcatcagtaagcatttcctggtcagcatccttctcagaaggtttccatgcagcattcaacttcaataggtccttcgttgatttctctatcttgctactaagctgcaaaatgtgttcataattaattcaatctaaaacaattgatttgccattttaaggtgttaggtctggactacttaaaaattgaataacg

SEQ ID NO: 161943 - DNA, 3988 bp, Cannabis sativa
aaaaaaaaaaaaaatacaaaacataggtaccttttaacatttatgaataaatacaaaagaaaagcaaaaccggcactagtcttcttcttggggttgggtaggttgagtgagtcagtctcagtctcagtcacacatttgaatatttaaagcttaaagctttttcatggaaggagacgaccagaccatttcaaatccaatgggtcttcgctatcattatttattacatcatttcaaatccaatggctcttcactttcactttcactttcagtaagaacaacaagaacaagaagaagaataatatggcctttactccacaatcagctgccgagaaagctgtttccgttataggctccggctacgatatctctaccgatatcaaattctcttcttgtaaattgggtccttccggctccagattgatcgacctcgacctaacccacacaagagacctccttgttccttctgggattcttcttccccatgttcccacctccatcagctgtgataaaggggaacgcaccagattttgttcccatgttctttcttttaatcaggtcattttcctgttatctttcctaaatttcatgtttgtcaaattatgttaggcagatgaagaagaatgatcatattgttgtttttcattgcaaattttgatcaaaaaaagctttgatctttctgtgcaaaaaccaacttgttacatgtattttcacattagcttaagcaacttttgaaaaattgattgaattgttggtttgttctattgttcattttcttcttcagatcatatttatattattgctttaaatgagagagagtacttttatcactaccacatgatgtctattacaccaattcaaaattaaaatgttatgatcttgttcatagaaggatgatacaaggagtctcgttacttatatgagaggatgcaaatgttacatttttgttaataacagttctgttaagactaaacaaaaagtgtttgataaatatttatataataggtaagatatatattgtttaacaatccatgttttatatgttttatgtttcagatgtcagagcaaatgaataaggagttgtctttacctggaaaaattccttgtgggatgtttaatgctgcatttggcttcaggggatgctgggaaaaggatgcagcctccgcaaagagtcttgctttcgatggttggttctactctctttacaatattgagctagcaaggtccaacattgcactatcgaaacaaatcaaacaagaagtacccagttcttgggaccctgccgcccttgctgagtaagagattttaactgaaagaatggatttttttttatgtgttatgataaaatacagtttgttcatgttaattactaaatgatcatcattgaatgtgaatgtgaatgccaatgccatttcttatgcttaaagtggaatttgtgcatgtaaatctctaacactgaggtgtagaatctttaagttaagaacaagtctcggaaacatgttctggaaagctttgtaatcattcatttcaaatttcaccaacggagaactagagattattatggattagaaagaagctcgtaaaaaaagattaaatttttagtgaaaaccgaaaccatgtgaaacatgatagctttgttaatgataagtggatataaactattatggaacggacgttgttgtgtgtttagttgcctattttgtttccttatctcacattgtccgacaaccaccgtgatttataatcaattttacctttgaaagcacaggctcttatttgtagatgctaccagaattttctagtttttgttaacttttgatgacgatatgtttttctaggttcattgaaaagtacggtactcatgttgttgttggggtaaagatgggaggcaaggatgtagttcatgtaaaacaactacaaaactcacaacttcagaccaatgaagtgcagaaattgttgaaagaattagccgatgaaaggttttctgaaaatgtggataaacagccggctaatgaactatccggaaaaattaaggtaattagaatctcaaaatctgcttcaccaacactagtgggtaaaatcatcacataatagttcttgactcttacaaaattttggttggtttctaacagaagttcagaattttcgtttatttagttatttcttgtcatgaacttgtgtcttcactgtttaggctcaataatttacctcaatattgaatgtcatgatgctaaaatctgagtagagccttcttaacccttttccttttcttccccatactgttctgcgtgtttccatgaaacgggaagcgttcgaaaatagtgagggcaaaggctatatttttaaaagtttattattcaacatttcaggaagagtggtcgatgccgttggattttcacaactcatttgctgcctcatttaggccacctgccatcacatcaataaaagatgtaagctctttgccaaatccctttgtgatgtttttgataatgcagtttatgttgaacggatcaagacttatttactcaatttcatgcaggacataatgagcataagtattcgaaagggaggcattgacgtcggtcaagatcataaaacatggctttcaactgtatcacagtcacctaatgtaatatcgatgacttttgtgccaataacttcactcctaggtggtgttccgggaaatggatttctaagccacgcagttaatctatatcttagatgtcagtattcaacctgcaaactttcggtttaattctttattactgaacttgctagtgattaagttttgtgtttttacaatgagaatcctttattgtattaaaattggggtacttcatgagtatttactattgggtactcataagaatcttactcttttgtatgttttgatgcataatgcagataagccaccaatagaggaactgcatcaattcttggaatttcagttaccgcgtcaatgggcacctgtgtatggcgatttgcctctcactcttaggcacagaaaacttgcatccccatctcttcaattcacttttatgggccccaagctttatgttaacactatgaaggtaatatctaaattcagcacatcaattttttcggttctctttctgtatagattccagactctacaggaggcctgcagttttaaatattagttttcacgaattttcaggttgattcaagaagacgaccagtcacaggactccggttatacttagaaggtaagaaaagtgaccatctagcaatacatctccagcatctctgtacacttcccgatagcctccatatctcagacgatcatggttacgagtccaccaatgaacctgtggagcgaggatactatgaacctgttaagtggagcattttctcacatgtttgcactgccccgatacaatgtaatggcgcctgtattgacgagtctgcttcaattgttacaaaagcttggtttgcagttaaagttgttggaatgaagaaagtcttgttcctgaggcttggattttcaacagtggcatcggccaaaattcgtcgatcagaatgggaagggtcttcaaactcatccagaagatcaggatttctctcacagctgattagcacaagattcagttctgcacttaatacacccgagaagccggtgagagtggacttaagtttagctgtgtatcctgatggtcctcctaaacctgcgaaggcacccaaaatggcaaactttgtagatactaaggaaatggtgagaggtccaaatgacccacctggatattgggttatcactggagcaaagctgtgtgttgagggtggtaggatttcaatcaaagtaaagtactcattattgaccatactacaagatgactcaatgttgtttatgtaaaacaaaaccaaattctattgttcctgtaaattttatggtgtacatttacattatttaaattcatttacagatatataaattggctcaagaagacttgtaactttgaaatctagttttttt

SEQ ID NO: 161944 - DNA, 5267 bp, Cannabis sativa
aaaaaaaaaaaaaattagaaagctcgtatgaatagaatagaataaatttgtaaatgaagttgaatgatccgtttgcaaaatcgcagagagaaatcgtttagaaaaatttgttcttttcgctttacaatattttgttttgtcttcggaagactgaaaccaattccgaccatttcattttcccgggaagttagcgtaacttgcagggaatggtgagaaaattccctttctgaactagtctgttctcccttctctgatcaactatgcatttccccaaacatgagtttctttaaaggactcgttgactctctgagctcaatcttgtccactaattacagtgaaagcccccccaattctccgcccatggaaggcgtagccggacctggaattggcacgtcagtttcgaacgagcgcgtggcttacaagcttaagggtttctttgatctggctacggaagagatcgacaaggcagttagggctgaagagtggggcgtagtcgacgacgccatcaaacactatagcaacgcccagcggatacttgtcgaagcaagttctactcctgctccttcttttatcagcgccaggtatcccaacttattgtttttagcaactttgagtttcgaaattggtaattaagcactagttgaatgtcgaaatatattgattgtattagtgatattaaattttagcttctgtaaaattgagtgcgtatattctttcatggcagtgaacgagagaaggtgaaatcttatcgtcaaaaaatatcaaaatggcagggtcaggtatctgagagattacaaactttaagtaggagggcaggtttgtatttcccattgatttgaattcaattgcagttggtttctgatgctggtaaggattgtgggaaagtgcttataaactcatcattctgttttttatgctcttcttattgcaggtggtacatccattacaaaggtattctttgatcttttgacctgttttttcttctaaacttttgcattgcctgcctttctctgcgtgagtgcgttcctttcaattgaagtcttttagctgtatttgagtaaacaatggacagagtggattcagaaaagtagcgtttgcgctcaagtttgtagctctattatgaattttgttgttattttgatgattaggtttctagagaactttattctatagtcacctttcaccatagtcttgcaaaaatcgtgattaaggatactgttgagcgctgaacaagctgtcttacttaatactaagtaaatataacataaattgtggttatgctgattgcagagcggattggttcctgcacaaaaaacaacagtagcatcaaaaacagtaaatgctgggaaacatgttttacctaagccaaccgtaaatgtcgggaaacaagttttgcccaagtctactcgttccattacaagcagcccagtggtgaggaatcaaacaaataattctgcaaacacgaaacctgcacaagagtctggtggtaattatgaagctaagttggtagaaatgataaatacttcaatagtggacacaagtccttctgtcaaatgggaagatgttggtaagaagttttgttgcattacaacttttctctttatttgtatcaccttctgcagttctgctatattgaactcagggttctcagttgagcttccttctttgcagctggtcttgaaaaagcaaagcaagctctaatggaaatggttattttaccaactaagagaagagacttgttcaccggccttcgaaggccagctaaaggtaaatttctggtacttatattcgaagtaagaacggtgaggcacccaatatctcatatcatggaaaaactgacgggtttagcttgataggtttgcttctctttggtccacctggtaatgggaagactatgctagctaaagcagttgcttcagaatcagaggccacattttttaatgtttctgcatcttccttgacatcaaaatgggtgcgactctgctggatgtggctttctttcatcttggttattttctattaaaatatttactgattgtcattctaactgaattaggtgggggaggctgaaaaacttgtaaagactctcttcatggttgctaagtccagacagccttctataattttcatggatgaagtatgctattcttttgaaattctatataagtttaaccgtgcccttcatgtttcatgtcactgtttctgctccagtatgccacttaattaggagcctcttaaaaatgatttttcaaccattcgtctttctttatgattgctttagaaaatatgctacacaggttttctaaaaattaattttttgcagattgatagtatcatgtcaacaaggctggctaatgagaatgatgcaagcagaaggttgaagtcagagtttttgatacagtttgatggagtgacttctaataataatgatctagtaattgtcattggtaagctattttaatataaccaagtttgtcttgaatgactaggttgaatttcatgcatcacgatactcaaatcatgaatcatgctctatttgagtcaattcttctcttatcaagtgccaacatgtagaaacaatatcaatgataaaagatagttatacattgaattagctatgaaggaatgttaaatctatgtacactgggtggagataaaatataatgccagcctattatctttttggattacccattatattaacctagaatagtgttatttctaactccccattctacttgcaggtgctactaacaagccacaagaactggatgatgcagttctaaggagattggtatgtatatactccagttggccgcatcttattttctctagtattcttcattcttagtatgttaagttagctatttatgcattacgacttatgtaaatcaatattaaattttagcaacataattatgctatgtttataaatggagatagaattgtgtttgagaatcctgcatggtttttctgatgttaacacactattgctcttgtagtaaagatctgtaatcaaagaggtatataatgatcataatgaatatcctagtttccttttaaaatcttatatacaatttcaagaatttgttttattctcgtaaagttgctgatcaattgttacttggaattataaattaggtgaagaggatatatgttcctttaccagatcatgcaattaggagacttcttcttagacacaagctcaagggccaagcattttccttacccagtgagaatatgtttcttaacttctattactttttattttttttcttcttcttcggcttcctctttttcgaggtagatcatcaacattgtttgtgctggtttgtgttcaatacgagtctatgagtttattggtgtcagtggttagattcttagggttaagttcatccaatcattgtcattactctttcattgtggcaggcggagatctggaaagacttgcaaaagagacggaaggtataatttattccattttagcttttaaagagttttcatacttttacgaagcatgctaaatccattttgttaaataacttctccaaattgagtcactagttatttttcaaaacatggtgtcatctgtcatgtaacttttgaatgcatgaatgcaatgatataactttataaacgaagcaaaataatttcaggaattgacagccaattaaaatgagagcataatgttttttctttacaatggactgaaagtgagcaacaaactatcatggaatgaattctaactccggtcaaagttaaatttattgtataattaccttgatgtgcaggatattctggaagtgatctgcaagctttgtgtgaagaagctgcactgatgccaattagagaattaggtgaaaacattctcactgtcaaggcaaatcaggtaagacttgtgtagtttcaccataacttgatatcttattattatagtttcaaaatggttgatttaccatcttctatttatgctttgttttgaggagaaaatgcactaaccaaaggagattttgggttgtaaaaatgtatatgtttgaaaccctttatgtcaatgtaagaattaagagatatgacttgtgtattagttccattgatttttgctgtataaacttgtaaaggccaagattgaattgtctaaattagggagagctgttatttccagttgtctaacgtttaagatctcataacccaggtaagaccgctaagatttgatgattttcggaaggcaatgagtgtaatcagaccaagcttaaataaaaacaagtgggaagaacttgaaaagtggaacttggagttcggttccaattgaaatcctttgtaaatttttatacatcgatcttgactttgcctgaccgtaaggtttaaagtttattcttttatttgtataatatatttgacgtttttgttcaaaaaagaaataaatatatttgatgtttacttctcaactggaaaaccctagttacttgttttgttgcctcaattcaatatgcaagaacacacgtccattcgtaggtattatctattcttatttgggaagtttgggtttgtatttccactttttccttcttccctttcaagttaaaaataagtaatttgttcatttgcaaattagttattgattaaataaaattacatcaaaataaataaataaaaataaagatgacagtagtaataaaaataaaaataaaattgtttctcccatgttagttagagacaaaacaattctatttagatcatctaagttttgctccaatggaagagtagcattcatcttgaatccataaaattttcatgtacaattgctctagtcttttccaaatttccaaggatgttttttcccttataacttgtttcagaacattgacagcaaaattcattatgattgctggtcgagcttgcttcattatggttttagctttacccttctttgttgcatctcctttcttctcaaatttttcaaccctttcttctagtacagaattcaatttctagtagatgaagattgccattatcttctcttttcaaagattgaaatcccctcatccatcaaatctctctaggtttaatctggttgattaaagtactttagttctgttggattggtgttattttattatttttttattttatttttttggaagggggcgttatcaattttttccagttaaattggaagtttttataaaatacaactttatttggtttatacaagaggaaattacgtagaatatggcattttttctttaaatttcataaatatggaaaaa

SEQ ID NO: 161945 - DNA, 1658 bp, Cannabis sativa
  modified_base (1591)..(1602): a, c, t, g, unknown or other
tacaaactaacaaaaataccccttttatagtagtgctaccttgattcctttgcctccttctcaacaatctccatttagattgacgagagtcttgggggttatcttgtagaaaattctctgatgcttaagtcggaataggctcttggcttagagagagagaaagcatagtaaaactaaaatttgaatttagtgagatagaatttgatcgattcattaactaactcattttcttactatttttgtgctctttaaggaagagctctaatgatggcagaaaaatcactaaattcgctaaatgtagttgactcagcaagaatttgaactctagaaccccaggctttctgcttatgctctaacccttaggtgcatggatcgatgacgtcaacattacacattttttattttagattatcaatgatgtcagtacactactacaaaaaaaaaaatattaatttcgtcagtccttaaatcagttttttttaagatcgtcgctaataaaagtaagtgactgtttaaaattgttgacaatagttgagtactcccattagttttaaataatcatttagtattcctaaaattttaaaattgttacgagacaaaaattgaaacatagattcccatatttatataaaaaaatctagctatctccacattttaacctaaacctaatatatatctctcaaaacctttctctcttcacttgaatctaacacagtcccacaacacatgtaaacctaactttcaaagcctctctctcatgttaagactctctctctctttctctctcaatctgtccctctccgacgccaatgtagtcggcatctcttgctcacgatgatggtggctctcccttgctctagatctcgcactcgacaacaatgaaaactctctcgttctctctctatctcatgttctccatttgggaaaggcagcgagatcgaagacagtctgatctcactctcttgtttctctttctattttgctctctgtctcactctcgttctttgcttccttctctttctcgtttttgatggcgacggtcgtaagtataatattccttatgtatgatatatatatgtgtgtgtgtgtttgtgtttataaggttaatttattttgaatagatgacaatgatcatgatgatgatgatgatgatgttgttgtgtttgtaattaggaaccattattgattacggacaaggctagaaactcgtccaaagacaagactttgtaattattgtatacatcatgctttgttggttggttgtgattctttagctcttaaattaatgtcaaattttgtatgatatgaactgatcgacaagaaaaaatacgaaatgtacaactgactatgcaaatcgtcgcttattgtaataccctaaagtttaataactagattagcaaccctaactaggttaattaagtgttaatgagaaattatgttattatatgatttaatatgtggaaatattgtgatttattgcactttaacacccctttagtaggtcaggggcatttttgcaattttgacctgagatgggtaaaatcataattttatagcatattgtgttcatggactatattattatatagtnnnnnnnnnnnntccttctgcaggtattttctgacaagtcggcacggcatagtcacaaccgggtattt

SEQ ID NO: 161946 - DNA, 7365 bp, Cannabis sativa
  modified_base (7319)..(7326): a, c, t, g, unknown or other
cgtaactaatttgtacttaaagcttggaaaaaataccgtatgaatttattgtgatagtttcatatatagaccgagtaaaattacaaaaaaaaattacttttagtcataataaatttatgattaaaagtaaaaaaattatgactaattataaattattatttagttaaaaaaaattatgttataactaaaaaattactattaaaaataattgtttttatactgcatgttaaatgcactaaaaattaatgtgtcaaatgcactaaaaagcgtgccaaacatcaacaaagttacataatttgatctatttagcacatattatagtacatttgacacattttttttttagtacatttgctaacactattgtactctactagattacatataaggataaacttgaccccatgcattgtgtatgcagtccaccccaccatgtcaatttttttatttgcgacttttaataacattttggacccacgactctttcatattcatacaaaattattaacttcaaaaaaaaaataacagtttaattacatgccagtctgtgacaaagaaaaatatcaatgttgagcagtatttttctatgacaagtgcagcttagtttgtctggaaagcgttagaaactaagaatgtttaaagatgctttgaaagaaacataaatatataattatttaattaaaaccgttatttgatcaaattaatgaatctcagaaaagtttattatataaatggaattctaattaaggtctaatgtttgatcattcatttgttataacaactagctagatcctaacaaatttcagcctcaaaagcttttttaactaattaattaaaaaagtttgtgttgctgacctcaaaaggctcaaaattttgtgttattatagttaactatttcagtccttgtacttagggagacaaagaaagagaagattcgttttctaggctacacaactataattaatgaaagagtattgttattgggcaccatggtagttagtacatacatatcattttgtgattgactgacgatactttctaaaagttattacattaaattatatgagacccgatacttagagcatctctaatagtaaaattttaaaggatgcttggtgaggtgaacatattatgtggcaaaatattgagatgctatactattggagaaaaaagaatatcattctagaaatttacatggatgttatgttgtaacattgatgctattcattattttttaataaaaaaataatctaaaaagttattatagttaaaaattaagatatatattaaataataatgtgtgagattataattataacatttttaaagattgttatacataggagtgtttttagaattaaggtgccaaaaataatgtaaaagagagataaaataaaatattatatgtttagatgatatgtaaatttttagcatccttaaaaaatattactattggagatactcttaattacactaatagcaatattaacacgtaaaagagtactacacactactcgtaccttatagcatttctcttaaagaaatttttcaacaattgattggttctttgtatttgccttttcttataacccatattccttatccaccactccatcttattaataatttcttcaatatctaagccataaatattaacacccaaataaaaaaaaaaacttctcaaatgagtatcaattaatggccttgtgaaaggaaagtgtatattatcaaccttagcttataattaaaacgaacataaaccaagttgaaatggtgagaagttatagtaaagttaaaacttaaaagagccaacctgttgattttaattgctttcaaaaacctgcagttgattttaattaataataataaatattcgaagttaaacataattttcacaagtacattattaatgtaatgtctcctgcccctaactactatttataattaatatatatcaattgcaattgaaggaatactgaagtaatacaacaaatcatgatatataaaataggcagttgatgtcatttaaaatactaatagtactataataactatatatatataccaattgtaattgtaaaaacttgttcttattgaattgaaagtaattaacaccaatattatagtgaaattcctttttcatgcagagaataataaaaaggaatattttggattaaagaactattactttacttgtatagcactttttttttgttcagtacgtaatacatttgttctaatttaatccaaagagaatcccctacttctaatcccaccttgatcattaatctcttgatttgaataaaataccaaccaacaatattactttttgcatgtgtgacattaatatttaacaaacaaatatttaaattaataggaagcaaaccccaaatggccaagtcataagaaaccgtgtgtcattgtcatacacgcctataacggtgttatatttttatttttattttaaagaacaaaaaaaaaacagtactaagcagggtcaggacaattctgagtgaaatgaattattaaaaaaaataaaaaatttgagaccttcttatataaagataaataatatttttaaaaattattaaataaatatgtatatttttcaaaaagtattttttttatttggaccttaattaaacaaatatgtatatttttcaaaaagtatttttttctttatttggccctaagcgcgggctaaggtttaacccgccttaacttagggtcggccctagtgttaggagacacttattagcaccacgatgaagttagttagcgattttttataatatttgttaaagtaaaacaagtaagatttgatattgagttacactaataaagatattacttcaaaagtgttagacaccaagaataccttttactatttctcaaatatgacaaagagtttgtccttgcatgtcattttcccactttccttccttgtatttcccttataaaaaccacccaagccctcactttctttccctccaaatcaacaaacacaacatatttttctcattatcactttcctcatctcctcttccacaatcaaaatcccttgtatcacaattaatacacatatatttccaaacaataaccacaatacataacacacaatctctacatacaatacacatattgatatatacatacaataccatgtccatgtccatgtgtagctccgattccaaagtgaccgttggtgtttcaatggcaccacccacagtccccaaattcaatggccgaccagttctccaacctacttgcaaccgagttcccaccctcgaaaggcgtaactcagtcaagaaaatcactactactactactccatcatctctcaccttaccacctccatcaccaaattatttctcttcttcatctcttaccagtccaagaattaatactactaatagtaataatactcttaaacccgtggctaaccataactccttgactccaccaatttctcccaagtcaaaatctccaagaccaacggctattaagcgctgcaacgacctaaacacgagctcagacaaggttgtcatccctggaagcgtcggcaaagcttccgcggctaaggttttggagagaaagaaatcgaaaagcttcaaaattgttagtaatggcggaaacggtgatgttttcaattgttctaataattctccaccttctttggctgagtcttctttgagttactcgtcgtctttgatcaccgattcccccgggagtatcgccgccgggagaagagaacagatggctcttcaacatgctcagagaaaaatgaagatcgcccattatggaagatctaagtctgcaaaatttgaacgaaacttgatcgattcaaatcctttggattcaactgttaacaaaaccaatgatgaagaaaaaagatgcagtttcatcactgctaattcaggtatataaataataatcaagactctgttttttgtatataaaattgcagtttcattatacttaattatttcttgatcagatcccatatacgttgcttatcatgatgaagaatggggtgtccctgttcatgatgacaagtaagctttaccaattttcttactctctctttaagtattgttctttaatttattttgtaatatagaataaatttgatgttttttgattattattattattacaggatgttgtttgaactggttgttctaagtggagcccaagttgggtcagattggacttcaatattgaaaaaacgtgaagaattcaggaatgcattttcagggttcgatgcagagagtattgccactcttactgataagcaaatggcctccatatgttctcaatatgggattgatattagccgtgttcgtggagttgtcgacaactctaatcgaattctagaggtatactattactatacactactaaaataaatatgggttttttttcatttggggtttttcttatttttatactttaaattagttttaagtagaatctctatagcaattaatggagcaaactaaatcgcaatcaaaatccatatagcaactcacttagaaactacaagagaaactactaaaaaaacccaaaccatgaatttgaagaagaaaaaaaattaaaaaatagtatttaagttaatttatcttttcatttttacactttaaaatagttttttttttacatttttataaaattctgcataaaaactttcataccaattaacggggtatcttaaattgcaaccaaaatcaacatagcaaacccatataaaaactaccaaaaaaaccatcgaaacaacctaaaaaagtatataaaataatttcccaataaataatactaattattttcatttatttaatgctttaataaaaatttaaacaaccacatggtttatatttattttagtgttgttttttcctttgtttttattgggtgtgtcctctcaatcttttctgtctattcgatcccatttttaattcaatcatttattcctcacttttcatcaactttttagttaataggggagtaaatataataaaaaactatcattaagtaaggaaaacatgatgttaatcacatgacttatattcttttcttttcatctatctaatctattctatatgttaaaaagtttctttggcccaagtagttccaacctgttatgatatttatgtataaaatcttatttattatcattaattaacgtaataaatttgatttaatgaatgatgacagatcaagaaggagtttgggtcatttgctaagtacatatggggctttgtaaatcaaaaaccaatctcaacacaatacaaatcagggcagagaattccagtgaagacatcaaaatcagagaccataagtaaagacatggtgaggagaggttttaggttcgttggtccaaccgtggttcactcattcatgcaagctgctggtctaacaaatgaccacttgatcacttgccacaggcacctccaatgcaccttacttggggcccgcggttcagctgccccatcggccgcggtgccagagacaaatgacctataggacctctcctaattaacactaattatcaagaaacaaaataagcagtggaagttttaactcagagagaaagaaatgctcaaaagtgcatatatagttggctaatatgctgtgatgtttttagtttaatacagcagtgagaattgtgagtttgagttaatttaattacatttgaaaatagattgtttatttagattagagagtgctaaatagatatggtgtggtagtgtgcacaggaactaaagaaggccccaccaagagtgagtagtactatatagaaaaaagaagagaagacagagagagagagagagagagagaaagagagcatgtgcaaatgaatatggaggaggcaatggcatgtgtgtgtggtgttgtcagtttgcttttttattattattattattgttatgtattaataaaaatattatgaaatatagtattccatgtgacccaacattatactttgcattatttgtatgatttcttctttaacagcctgtgtgagatagtgcaagaaagagggaaaagaaagaggagtacttctggaccacttttttaattctctttcttttttcttgctttgcaattttcattgagttgtattgagttggggttgtatctattgggatttggtgtggatttcttttgggtgttttttaatttcttttacacaatgtcatgtgggtttctgtgtttatcacttttctgagaatgtcaagcaaaatagataatatacatattctcttcccatgtgcatttacttacattttggaaaccaggcattttgacccaaccccacccacttttgttaaccaatacaatgcaaacgaaagggtgttcaccatttcttgtggcataatgatgagtgggactcatcactcatcatatgataatgagaggccgttatttgtgaattagattgaagtggaaaaaatatttactatctcaactcaacaatgtaatggtgcaaaataaaaatattattgttagaaatttatttatttaagaatacaattatatatataaagtatgtgttgggttattatataaataagtttattttgaaataaagtttataataataattgtcatgatttttaatatgtaaatacataaaggtaatttttaatttaatgagggactaaataaaaataattaataaatattaccaattattttgtcagctggtaatataacaggtaatagtttacaatttacagtattttatattttcattctcttgaaactccttcattcaaagacaaaagttctagagagattttactacaaatttgaaagatcataccttttcaaaattgattatatcgatttcaatacactttagctaatttttgattctattgttgaatttttcatggattaattagtattaaatttaaattacagtaatttaacatgtggtattaaaaatactcctaaattaactcgtaaagatttatgattgtattggtcatcaataaaattatattggtagcgtatatatattttatatttttaatttggaattaaatttattatagattcattcggttattgctatttacattttgcatatacgatttgggttgtattcattcctgtagaatgatcaattcatgtagatacacatgtacatagtcttcaatatatatatttttttttgagtgtagcgtaatggtattttacaatcatttaatagcttaatagtttcaaggtcttaggttcgagcccatgacctctctctttttgggtaagttgaaaaatgcctcttttattcatcaattaatcaaatttacctnnnnnnnnatatttatttgaaacataactctttttatatgtattgta

SEQ ID NO: 161947 - DNA, 3025 bp, Cannabis sativa
  modified_base (2899)..(2916): a, c, t, g, unknown or other
agagagagagagagagagtcatggtgttgaagatttcctttgtggcaatttcaagaattccttttaaggatagttcaggtgatttctcttctcttgggttatattgctcacattgggaaaaatgtgaaataaagtttggggcttacttttttgttttagtttagttaaaatttagtttttagttgttgtgtgtgtcaaaagttaagctgatgatatgaataattatcgtctattgtgacttgtaaaatgaaggttgacaatattaattttaatactcttagaaattttagtatatgttgtaaatgtgaataataggattgtgctatacatgttttacatgttttttttccctttctgccttagcttgtttattgttatttaaccactattgagccaaaaatgtcctcattattactttaccttgttctttaaattatgtaataagcatagaaataaaattagggaaacaaattgtaattaggtaaaagtgttgatagtgaataaaattgcatttaaattatttagggcatataaaaccccaacaggcgcctcctccaagcgtcaaatcaatacatttcgatatgtattctcttaattttcttttttaagataaaatgtgatatcaatatatacaatttctatgatgaaaaaatattgttttattttatataaccatgtcacattaagcataggatattgagacttggttggaactttatttcttcaaattataattggattattgtgatttcatttacttatttggaaagagataataatttttttttcgctggccaagacatcataatattgttgttgaaattcccaagtcattttatcatcacttgtttcacctcttaacttttggaccattgtagttttttcatataccttgagtataagacaagacaccatatatttcaaccatgcattatacaaccgccaatagtgtaacctaaaatgcctactacaacaacagccattgaagctggtccaaggcacttcttccctagagtccctacaatcacatgtgatgaaaacctcccaaataaaaaaataaaataaaaaattatgctcttattgaaataaagatgtccttaaaaaacatttccaataacaaatttaatattgggagaaaataaataaatattgtacatggttttgggcccaaccccatgtgatatctctgcaatatattttagtcccttactccttgattatgaagtcttataagattaggttctgaaaatccctaggaacttgtgtcaagcaaatatgatatactacaattgggttttttttaaaagataataattgataacaccaaggaaggagataaaaatcaaacaattggcacaaataaaagactcaactcagctcatttcttttttaagggaataaaagactcaatctctaactagagtagattatgttaaaagaaaagaagaagagagaagaaataataagaaaccattaaatgcccatgtgtaccctgtttggtggccatgccatgatccataaaggttccactgtcccagcataattaataagagcaatcacaataatgaaatagacatataacaatgccatgtacctatacttcttttccattttttttattctttctggagacaagaagacaccaaattaaatgcgaaatgaccttgttcgggtaattacactattcatcttcctaaatgattagtataatactacaatccgtgattcaaagggcaaatttgaaactatgtaagaagtatttcttgtattattattggaaaaacaaaaagtttttttgcatacaaatatatgggtcacattaaataaatggcaccttatgaaaagttgtgagaagagagtgataaaaatgattggaggaagaggataagataggcagatgtggatgactttataacaaggaacctaaacagagattgcttagaattgaggaagcaatgctaaaggccagtccatgttattttcatgtgagtaatgtccccttcccatgtgcatttaattctatgcctactctccttttagtggatacccctttttatttggctcttgtgcttttctcatatttttttagagggactaattttgtccttgaagaaagtcacactttttctttactatgcattatttggaactgaattttcctttttcattattcggcaatttcatgatcccatatttatatatatacaattataaatacattgtgaaaagaaggaaaccactcaaaaggggtgaagaattgtgaaaagaagtgatgaagaagttgaatttgtaagctatatatgtgtgtatttatgaattaaaggtataccgtcagatctgtataattgatacaatagcttgttttattattagttaaaataattcaaataaaaacgaaaaatgttagacacaattaaccgatcaacaaaggaaaataatttggaaaaactaagttggaacaattttcactttctcgtattattaaaaaaaataataataaatttacggtattggtaattaattataaggaattattacataaaaaatataaattggcattttatttacaaaaatacctccataaggtgtggacagcatttatacctttggtgtgattttaattaccaaaatacctcttacactatcacttactaaatcagacgataattgcagggtggttgctgcgtgattgcgctgtggttgcatcagacgaaggtttcaattagatgatggttgcatggtggttggctgaaggttgcatcagacgaaggtttcaatcagacaaaataactattagttaaatatttatgcaattgtaatgtaactgtaatgcaattgttatgaaacattaaaaagcagagcaatatctccacgtatacgtaactctatctacatgtcnnnnnnnnnnnnnnnnnnaacaaatttaccattaaaaatttgcaaaacaacaaaaatacaccaggataaatattttattatagtattgatgtaattttttttgaattatacttgagttggattgttt

SEQ ID NO: 161948 - DNA, 1073 bp, Cannabis sativa
atataaaactcaattaattattggtcaggtatttagagatttgaaattataaccataagaaaagtacacactttatattaatattagttggcaaaatagtgtctttattaaatgaaggtatacaaaccacacaattgatggtactttaaagaaacaaaataaaaatggacagtgaaaaagacagtatgatatgtggaccaatatagtaattgatatggtccaacaaagggtgcatggcccttggccctttgggtcctatgccatcagatcatgattcatgtcctaatacattcacatatatctatataggacacccaacccatttgctatgccttctaattccaaggctatctctttgtttttgtgcctaattctatgttttaacttttagtattgtctttttattattgtatatacagcaacaatacagatggttgtgtcccaaaattgtaggcctataacattcttattttgaactactctttcttgtagagggtgccttcatgaatatattggaccttgaattagtactatatataactacttaattattatttaaagactctaggtaggccaattacttgtagatcaagtggctggggtcttggaggtttgtaaataattatgtatagagaattattaaaagtatcagttcacactctaaaatgtaatagtattattgatataattaaatatcgtatcttaaataatttaatataataattttgtggaatatccatatgcttaatagaaatactcttgtcttgtatatattttgttcattgaatttttttatcatccaaacattgaggatcttattcttgttttctggtatggtagtgtatatgttcagtgaaaaagggagaatacatatattaggggcaaattgtgaataaaaaaattggtggggcaagataaattagtaatattcacacatatatatatataatagatagatgttagatgtcaaatcacgtatattaattttatttaagtttttagttttttttaatatcataattttaaaattaataatattcaatgtagtgataatcattgaaatttaaaagcat

SEQ ID NO: 161949 - DNA, 2506 bp, Cannabis sativa
  modified_base (2470)..(2480): a, c, t, g, unknown or other
accccgcaatcttctgctttccatttggttagtcttcgaggcacccccaagtacttgaggggaaaaacaccctctgacagattcatttctctcaacattgcatgtctttcctctacttttacccctccaaaatagagttgggatttgttagcattgaaaaaccaaaaagaatagaaatataaaaattcagtagattgtgtaatttttttatggcaagaaataaaggtaaaattgtgatcttagctttattgttgattttgtctgagttgtcactatagagtaatataatttattttaggaaagtttcatacagctctaaaaacgtgttgtatatgtctttagggtttttgtctgttataaataggacttagagagcaaccaaataaattcatctcttatagttatattgttttatatttttatatttgtgagaagagagaatttcttgtgagaaaacttagagtgatatactaggttttaatttctattttattgttcttagaatagggtgaagagctttgttaaacaagagaagaggtctttgggagaagacctgtccatgacttataactttaggagaaagtaagcatacgcatatcaaaagctgaagggagtggcgtttagaaatcatattggcaaagtgaattacaaaagattgcgagaattcattaaagggagtctaaattcgcgtaggtcaattttattttttgtaatctttgatactttattactaatggattttattttttgggcgtggccccgtggactagtagtgtttgaaagaacaccaataccatgtataattctcttaagtcaagtttaaaattttgcacaatttatttttgtttttgctctgttacagcaagctatctgtgttctgcagtaacaaatttttaatatgttactgcaagtcgttatagtcgcattttaattaattttttttaaaaaaataaattattacatacaaaaacacaatttttcaagactaatgctaattgtattaattgtcacatacttagactaacgattctccaccttgacctctaatatagttttaaatgcaacattttagaaacacactagctactttggcaaaatcttgagtagattcaaacaatgtttgaattttgaagttggtagtgtctttgtaagcatatcagaaggattgtcttcaattaatactttcttcagctgaaccttgccttctgagatgatgtctctaataaaatgaagcctcacatcaatgtgcttagtcctctcatggaaggcttggttcttgctgagttgtagagaactttgactatcacagaaaatggttacctttgactgttctagactaatttctcttgttatacccttgagccataaaacctcttttacagcctctgtgcatgccatatattctgcatttgtagtagaaaggaccattattgattgtaggttagctttctagcaaatagtgtacccatttagctgaaacacatagcatgtttgtgatcttctcgagtccaggtcccctacataataagagtccacaaaaccaatgacatcaatgataactttggtgtctctatagatgagtcctaccctagttgtacccttgagatactttattgtctatttcactgcattccagtgttcaaaacttggattgctcatgtacctacttagaccatctccaatgggtggggtaaaatttgtgctaaatttggctcaaaaaatgagccaatattatatttgcccaaaatgttataattgtgctccaatgcttaggtgtaaattaattttatttttaatagaaaggtgtaaaaaggttaataaatgattaaaaatgtaaaaaatcttattaaatatataattaaaatgtaaaaaattattaaagtcatcaatgagtggcaaaagagtaaataaaaaagtaatatttattgtggtataaaatttagccaatgctataaattgtgtcaaattcgacacaactttcggcttgtgccaaatttcaaccacattatacaatagtaaaagttcaattttatgaatatgagctaaaaaaatacatttaaaccatctttatagcactccattagagatgttgtcacaatgttaacccaataacataggtttggtctggtacagaccattagatacataatgctccataccacactagtataatgtatttttttttctgttatccaaattttttgctaggtgatgtggcacacaatagagaagacacatcatcacggagaagatttctgaaatgtactccgcaaaggaagcaaggccccaagaggcccaaggtggagcacttgggcagcattcaggtgccttttaggtcatctcacactgtaatcctccaattaagaattacccttcgcaagaaagtggtctgatacacctcgcacaaagaaaaagtgaattgtagaaggccccaggtgtggagtatatattggaaatattttaccaggannnnnnnnnnntaccatgtatgtttcattaacatcct

SEQ ID NO: 161950 - DNA, 2582 bp, Cannabis sativa
tcatactattgaacatcattgattcatttaatgaattgtacttaaagaaaaaaaaaaaaaaacaatagcaatactaaaccttttgtgcgccagtatttgaaatatacttaatagtttcctttccaatctatttgagcccattggagatcccacccaaattggagatctcttcgtaattattgggcacaataattgcattacatcttatcctttcttttgaagaagtaacagtaagacatggccagtggccaaaggagttctacatgctcaagccatctgaaatttgtcttggccgagccagagaaattaatcaaaagtatgtacctataaattgcacacaatgatgtgacactcttttctttttctttctagtgtcagtttccgtacatgtaattggtttagaaaaactatcatgttaatgtgtgtaattatcattactcttaatcaattatatccttttccataagatacagaaattatgaaaactgcaatttcttttatctactccgccatatgtccaacaagataaaatgaactttgttgccttgcacaacctccactctaaacaagatctgaatggcttaagtaaatcttaggaattcaaagtttcattggtccttgtttcagtttcctctaacatatcacttgagtcaacgtttacatcctcaggttctagtacatcaccatgttcatctgcacttgattcgtttatttcatcatggatagagttctcgtcgtcacttaaatcttgatcagcgtaatcatcatatttatgaaaatcttttgcttgaatcttgactcgtcttcctcggatatatcggtactgccatttaggtggtggatatttcctgtttaatttatcatatttgtccaacatacctagctgctgaaagacttttcccatcatcgaaacaatggcaacatttggtcgaatgccaagctcctccatgtcagcaaatatctacaaaggaaagaatttgagatgccaaatttacaatatgagcacatccatagaactcgtagtaaccaacacaggccataagctaaatgagaaagctttcaggaacaaatgtttggtcagagcttctcatagccccatcgggagcagtctgaaccaaagtttggcactcgaaatgacatggatgtggctcaagagacagtaagaaaaggaaaaaaacttcattgaataaagacagggcattgaattacaatacctcaaacatcttgtcatgtaatcccctgtggtaatagatagcaagcattttgttaaagaacattcgaggtgtgctttccaagttctctgaaaataattttgcccaaagctcctcagcctcttcaagtcttccatcctctgctaaagcattcaagagtctgaaataggttcccattgttcttccttgacctttgcttaacatccactttgacatctacaattccataattgtttcaacaaattggaaagacttaaaaaacaaaagggtacaagagaaatttggaaatgaaattcacctgaattattctcttccattctttttgatcctcaaggatcttaattgccttcttcactgtaattaaaggaaattctaattcccaagcgataaaggaatcgagagccccgtaaacttcctctttgacatttgacacttccttaatctaaaaaagaaaaactcaaaattatgcatttccaatgttccaaatcaaatacacaacttctaataatttctcaaaattttaagctcaaaatgattcaaataccacagccttacactcttaacaagttttgccgatttagaaacggtcccaatccttttgttggttttccatactcgagcatatcttggcctggggccttttgcagcacataccttcattaaaattaacaaatcagatacacacatcaagttctgttcttctatttcaatgctctttcttctaataattcattatataaagcttaccactacactgcttctgctacttgttcttgttgttgttgatgtactccaagaaattttgactaattcaagacctctaatgacaggaggaaaacatctcaatgcaagcatctgaaaacaattgcttgaaattgaatcttcaaatgcaggagcagagccaaggaattgtgattaataacaaatttgagagcaaataaacaatcttatcagttctttgggaaatcaactcgaccaaaaattgacggaattatttcacttcacttacgagaacctaagctaaatccagcattacattcctaaaagttgtaattaaaacttaaaacagaaatggaaaataaagagtaattaacacaagtagaatagatacctgatagcgatgaagagcacagaaccggcgaggtgggttggccggaggacccaactggagcggtggcagagacagagattagggttgggttttcgtggaaattgattgcgaaacaatatgtttgccggaggaagcactagccgatgatggaattgaagagcgtgaggggtaaagataatgaagatactaataattaatatatttattatgaaccataatttaaggaaatttttacaccaaaaatacaaaatgcattcttt

SEQ ID NO: 161951 - DNA, 1690 bp, Cannabis sativa
tttaaaaaataataagtctaaaattttggataaataaatctgaatcattaatacaatagatatacataaaatacatctaattgatagaatgaatccaatctatattagatgttggattgaccaaatgcaggtcggttcttggctaaggtgaactaggttcgcgtctagggcccacccatcttaattaggggccaaataaaaatatacattttaaaaaaaaaaataaaaatacaatttattcttataataagggagtctaatttttttctataaacctatttcaactcaaggtcaactttgatcggatgacttaatttaattgaatcagattggatggtaaaatataacatctaatatataattagatcgaatttgaataagtttaaaaatattaaatgtgctttaataaacacgatatcacttaatattaacaaaattaagctaattaatcaagttattaaataataaaagaaaattctaagaccaataaatagccaactataaagtatcatgacaagcaaaggaatggggtcggcaccactcaatttttgataaattatttttatatatatattttcatatttactcccataaaatcaaaaatttatttttgtcatcatatattgttattttctataaatttataattttcaattttattttcacatatttttatatttatttccataaaataattatttttatttttattctaatatatttatttatatctccaaaaaaattatatttttatttccaataaaaataataataattttttattaattaattatatttgttaaaaaaaaatgtctctcttaacattcacggttagttccgccactgataataaaaacttgaaaaatgttacttttcacaccctattcaatgagtatatatcaatagataattttttaaaaaaaattgagtaataacaactttgcctatgataattaatcgttatgattatgaaagatcgatccaacaaaatataaataaattagaatttagaaatacccattactaaatatatatagagtatccctcactataaacaaaacttttcctactactaaggtattaataatttaatctctaattttattagtttaattatatattaattaatgtatttatgttatatgtttatatttgtatatggctaataagatcaatatcgatacacacaagacagactgttacccaactggaatattcagatattattttatgagggaattcttgttatttcgtgacactttctttgatcaaaaaaagaagaagactatataatttattttattttatgataaattaatttttttttatagaagataattaattaatattaattagtttattaccaaatatattatgcatggatggcctagatcgacagcttcttcgaagaagcttggtaagtactctactaccacctaggaacacgttcacacgtgtgcatcaataataagaactctcacgtgcacacattaattctaaattttatgttttattaattttaaacgttcgtttggtggtacgtcctattatactgtattatattttataatattatattgaattatattttatacatttttgggtatataccattttagaccctgtattttgcaaaagttatagattggaccctgtgttttgttaaatgacaaaatagatcatgtatttt

SEQ ID NO: 161952 - DNA, 4365 bp, Cannabis sativa
  modified_base (4319)..(4338): a, c, t, g, unknown or other
actttgtgttgtcgtacaaaaatgtgtactttatccctctctgctccatcttcatcttcttccttctccttaccattattgccccaaatcaagtccactaattccatcaccatacccttcatcttcgaagccaagactaagccaaaccattccattatctcatcctattcaaaatccagtaacaaagatgtatggaggaaaacctcccacgaccacgaccgccacccgagaaaaggaagaaatacccattatttggatcatagcgtggacatggatgaactcttgaggtcaatttgggagacccagaatgaggatgaacttttcgccgttctttccacctataaaggtagacagctttcgattaggtttatggttttgttgctttctcgtgagccagactggcaacggtcactcgctatcttagattggattaatgaagtagctatgtatactccttctgtgtttgcttataatgttgttttacgtaatgtgcttcgtgctaagcagtgggatattgctcatggtctgtttgatgaaatgcgtcaaagagctttggctcctgatagatatacttattctacgcttattacttattttgggaaagagggtatgtttgattctgctctttcatggcttcagcaaatggagcaagatcgtgtgtctggtgatcttgttttgtatagtaatttgattgagctttctcgtaagctatgtgattattccaaggctatttctattttctcaagattgaaaaggtcaggtattactcctgatcttgttgcttataattcaatgattaatgtgtttgggaaagctaagctctttcgtgaggctcgtcttctattgaaagagatgaaggtagctggtgttttgcctgatacagttagctattctactctcttaactatgtatgttgagaaccaaaagtttgttgaggctttgtctgtttattctgagatgaaggaggtcagatgttctcttgatctcaccacatgtaacataatgattgatgtttatggacagctggatatggccaaggaagctgatcttttgttttggagtatgaggaagatgggaattgaaccaaatgttgttagctataatacccttttgagagtttatggtgaagctgagctttttggcgaagccatacatctttttcggttgatgcagagaaaggatattgagcagaatgttgtaacatataacactatgataaaaacttatggtaaatcccttgagcatgaaaaagctactaaccttgtgcaagaaatgcagaagagaggcattgaaccaaatgctataacatactctactataatatcgatatggggtaaggctgggaagttggacagggcagcaatgttatttcagaagttgaggagttcaggtgttgagattgatctggttctttatcagacaatgattgtggcctatgagagagcagggctggttgctcatgctaagcgtttacttcatgagctcaagcgccccgacaacattcctagggacaccgcgatctccatccttgcaggagctggtagactagaagaggctacctgggtttttcgtcaggcctgcattgatggggagataaaggacatatctgtttatagttgtatgataaatctttactcaagaaacaagaagtatacaaatctcattgaggtattcgagaagatgagaggggccggatactttcccgattccaatgtgatttcattagtactcaatgcttatggaaagttgcgggaatttgatagagcagatgctgtatatagagaaatgcaggatgaggggtgtgttttccctgatgaagttcatttccagatgctcagtctttatggtgccagaaacgatttcgatatggttgaaacactgtttgagaggctagaatctgatcttaacattagcaaaaaggagttgcatcttgtggttgctggcatctatgaaagagcaaatagacttaatgatgcatcccggatcatgaacaggatgaatgacaaaggccttttgaattcaagaatattttaagaaattaatgcaaatgtttgcatcattttgttattcaatctgtaaataatatcccaccatgttcatgtgtacgtatgtgcccttgttatatatttcttaattctttacaacaataatttaatctttgttttcaaaggttatatctcataagaaaattaagtggatagaactactgggaccgagtgatggtgatgtaagcttggatttgaagttgattatgtgttaatgtaaaagcactaaaattgataatacgataaaagtagcttcttcgtactaaaataaggatgaattaatttgtcaaaaaaaaaaaattgtttaatatttaagaagctacacattaatattctcttttcggaggcgcttgaaaaactgtcaacttacttgaaattcttgaaggatattttggtaaagaaaagaaagttagaagaatataagacaagtgacacttactaaggagtgcagtataatcttacaaaagaaactaccagctaagcttaaaaattcgggtagtttcaatatttcatgttttataggagattcacttgaaacaaaagtcttatatgatttaggggtaaacgtgaatctaatgcctctatctattttcctaggtctaaaattgggagaaactcgccttataacaattttcttataaatggtggatcgctccattatgtatcctcgtagagtgataaaggatgtcttggtgaaggtagaaaaatttattttttttgctgatttcattattcttgacatgaaagaatatgcaaatattttcatcattttggaaagaccattcttagtcacatggcgagctttaattagtgtgcaaaagggagagttaaagttgtgagtccaaaacgagaaaataaattttaatttctttggagcaatttaaattcctacctgttataatatagagtggatgtagtgaatgattttcaaagagtaactaacaagaggaagaaacctaaagaacgatttcgttttgctcggtgttgtatgaaaagattgaagagttagatgaatatgatgaattatcatggaattcgaagttttggtataagtggtgaaaatttttaagttttgaatgctcaacacgctccgtttgtgatcgaaaattaaatctgaagcttcaagcgaattttcgactatgaagcgttcattttaaggaaaaatgttatgaataaaagttttagatttctcttttagctttccaaaatatcttgaatcgtctaattctgatcaatattaaaagagttatgaccaaaatattattagtcgtcgcaccaagaagcatgccgccaaaaatcgaggacagagaaaaatttatatacaaagaaaaatttacacaaacgattggaggattgagacaaaaaaatgtctatgaattaaagagagagactgagagagtatctatatatcagttaatttgggtcgcttgggagtgggggttgagattgtggttagggccaaaataatggtgaggaaagaaggttggagaaggagggttaatgtgaaacgttagccttcagtctatttttcaataaaaaaaaattattaaatcaagaattgttgttagataatcacttttaatatataaagattatatatttaaaatgaaattatatatttgaaatgagtaaaatataataaaatttaaaattaaaaaaaaaaaaaaaaatttagtgtttagtgatgatgtattatgtattttaaagaaattaaaaattaatgtacgatatatgcagtaaaataaagaaaaatagaattttaataatatattttaaatataagataatatatatcaacttaaaattataaaataataatactacttcatttaaatatttctttctattatatattattacattgtcttaacatattaattgattaattgcctttagtttctaatattttgccaaactaaacctataaaggttatactctatattaatttggaaagcaaaatgagattagataaattaaaaaatataggagagaataaataagttgataatttctcgactataaatgagaaataaatttgatacaaaattataacctttttatatattaggtaagacatgaagatatacatattgataagataaaactatattttacaattctatttaagatcatctcatatatatttcaaataaattaattagataaactccaataaaaatagtgtcaaatttagtaaaaaaaaagtcacacaatatttataattatacattaatgcatagaatatatgcaaattagcaaaaaaaaaaaaaaannnnnnnnnnnnnnnnnnnnttttttttttattttttataaaaaaaa

SEQ ID NO: 161953 - DNA, 2330 bp, Cannabis sativa
gcgtctcctccgcctcccccggcagcgaggaggacggggataatcgacgagaatggagtgatgtcggaggagtttgaggttggagagttcgatccgaatttgattgaggatttgaggaatttaagcggaataatagacgatgtggttaaggagaagaaggttagggttattgagaaattcaagctctgtgatcagagcatggtggactacattccttgtttggataatgtggaagagataaacaagttgaattcgactcatagaggggagaaattagagagacattgccctgaccaaggaaaagctttggattgcttggtgccgatgcccgaaggttaccagcatcggattccatggccgcaaagcagagaccaggtaaattgaattggattactttcttttggaattttactgcagaaactgttgttctttaattctctcatctgagatgatgaataagattgaattttgcaggtatggttcagtaatattccttataaacgtttggctgtagataaaggtggtcagaatttgatagctttgaagaaatataaaattgttttccctggaggtgggacagagtttattcatggtgctggtagatatttggaccagatttcagaggttgaacacttccaagaattctcttttacattaaaactttatttactctaatggcttttttctttttttcttgtaatgacattcttcaatcttatgatgatttcttgaataacaacagatggttcccgaaattgcatttgggagaaacacacgagttgctttagacattggttgtggagtggcaagttttggggcctatttgatggaacgtaatgtgaccactttgtcaatagcacctaaagatggccatgagcacccgattcagtttgcattggaacgaggtgtgcctgcaatggtggctgcattcgccacgaggcgattgttgtatccaagccaagcatttgacttgattcattgctcgggatgtagagttaattggactcgcgatgagggaattttgctacttgaggtcaataggttgttaagggcaggaggatattttgtttataaacaccaagaaaaccttcaagaacaatggaaagaaatggaagacctcaccacacgcatatgttggaaacttgtaaagaaagaaggatacatagctatatggcagaagcctttgaacaatatctgttattctaatcgtaaccctgaattgcagcctaagctatgtgatcccactgatgatccagacaatgtttggtatgttgatttgaagccatgcatcacccgattgcccgaaaatggttatggagctaacgttactacatggcccgaacgacttcaaactccaccagaaaggctgctgagcataacaatggatgggtacatatcaagaaaggaacttcttagagcagaatcacagtactggaaggaaacaatagatgggtatcttggtgcttatcattggatagagatgaagttcagaaacattcttgacatgagagctggatttggagggtttgcaacagctctcattgagaaccaatatgatggttgggttatgaatgttgtccctgttagtgggttcaataccttacctgttatctatgatcgtggactcattggagttatgcatgattggtgtgagccatttgatacttatccaagaacatatgacttaatacatgctgcaggtcttttctctgttgagaaaaagagatgtaacataacaagcattatggttgagatggatcgaatgttgaggcctggtggtcgagcttatatacgtgactctgtatctgtgataacagagcttcaagaaattgctagtgccatgggttgggtgcctgcaatacatgacactggtgagggtcctttttcaaactggaaagtcctaatatgtgataagaggttgtgaaaatctcaattattagagagatatagaaaaagttatgcaattttagttttattagatgttctttctatatgaaaagagaataggaaaagaaagaagagaatagtagcagatttttttttggacattactaataagataagcttttttatttgctggaataataagatagtttaacttttttttatggcatatttaaataatttagggttatggattttttgtttttttagaggttttttttgggaaaaataaatttaagcataaataatgcaaaaaaaattgggattacaaaggtgccgtttggtaaaattttttaatgacataatgaaagtaaaatttttgtttttaaaaaatttatttttaaaaagcaaaaatgtgttctgtaaccacttttgtttttcaattt

SEQ ID NO: 161954 - DNA, 4800 bp, Cannabis sativa
  modified_base (1162)..(1180): a, c, t, g, unknown or other
ttttttttttttttgaaatcatttgtgacagaaatttagttacataaagtaacatatttagtagtatcactcacaattttatttgcagcaactaataacattaaacaatcaatccagatacattacacacaaatagttctaaataacaaataatattagagtgttaaaaagcatagatctatcatctatgcatgtgttgtgttattattttcaaatttcattctttgttatatcttatcaaactttttttttcctctttgaagaagctttttagctgtaaaagaagacttgacaaacactattctggatatttaattttgatttatttatttattaatgacaactttggatccttcattgatcaataaaggggaatttcgaaccaggaagagtgtaaagtagagggttctcattattcttttttaacactagcttgtttgtccatgttctataacttacatcacaactaataataataaattcattttcatcttggaaacattcaaataagaaaatttccttttaaaaaataaataaagtgtcattattaatgctttagcatttcttttctgtaacatataattccttttcttatttaatcttttactttttgaaagaaaaatatataatatcttgaaaatagtagttgctattaatttacttctttctcactaccatagtaataaaactttattaatagaaatttaaaacaaaatactttgcgggccagttgtttgcttggttttcgaactcaggtggcgtttggtttagaggaatgaaaatttaagaataggaatgaaaatgagaataacaataagaatgaaattgaataaaatttaaaatacataaacaaaattgacaaaaaaaattattacattttttttattatgtattggaatggtattttttttattttaaaatggaaaagtcattccacgaaaatggtggaaatatcattccattagaataacattctaatactttaatatgcaaccaaataaatgaatgaaatgaaaattgtttctttttcattccattccatttccttaatggcgcgtttactaaactgtaattggcatgagaataatcaatgggagaaatgtgtctttttaaaatagaaaataatcggaaactatattttatcactacaagaaatgtcacnnnnnnnnnnnnnnnnnnntactgcgctggtaaaagtacttttaccagcacatttcaaaaactgcgctggcaaagaaatcaaagttttaccagcgtacatttgcagtggctaaaatctaacttttaccagcacatttacgcgctaggaaaaatcttttttgccagcgctttttattttatgctggaaaaagttctaataccaacattgatttgccaacccctttttaccaacacatcgtaggtaaattctattttaccagcgcaatactaactttattgccagcacaaaaatgtgctggcaaaagtgacatttcttgtattgtattatgttgtttattaaactgtcccgaaagaaaactagaatcatattattttgtttacataattaggaaaggtaatcagaatgcttcaatttaacaaaattgccattattagaacatgtaattatttttttttatagatttttaaagagcatatgtatcttttttatttttaattaataaaattaaaattaaaataaattaaattaggaaagggaaaggtattccctataaaaatggggagaacctttccttttattttctccctctccctaaccctaatttgtgtgggtctcactctcactactttgtccctttccaaaatttagtaaccaattgtatgagaatcaatatcataccattcattctcacttcctataagtaaatatgtcataactccaaccaaacaccacctcaattattaagtttactggtatattggtccatattactgtgttgtcattagtatactgttattagttgttagcttattgtatagagctagttagtttataagtcggtttgtgttttcagttataactgttttctgttaaaacggttgtctcctcttttcttgggtctgttttgtactgaagtccaagctatatataagcttgcctctcctctgtttagattaatcaaattcatttttctctttgcaagattacgattcccttttctcaacatgatattagagcgagaaagataagctttcttgtccaatcctcccagctgtcgtgtcttcctctctggcgtagctgcatttttctcgatcttcttcttctctgatctggtgatctcctttctctctctctgtacattgattccgcgcaatggctacagatgaggatcaaaccaaaattgctactgttgtcgatcttggcaactcgtctactcaaactaatcaaagtcttcaagttgctgcaaccaagaatccattggaagatccagctagtctgttcttccttcaccatggagataatcctggaaataccttggcgtctcaacctctcacaggacaagataactacgtctcatggagcagggcgatgcagctcgcaatctctgtgaagaataaaatcagattcctcgacggttctattcctaaaccccatatttctgaacaaagtctttataatgcttagtatcgtataataacattgtgatctcctcgattttaatttttttttttcaaaagaaatttcatcaagcattctttatgatgaatgtgcctcgacaatttggaatgatttaaagatccatttttaccagaaaaatggtcctcatatatacaatttgaggaaggatcttatgaacttaaacaagaaaatcagaccataagcatgtatttaactagacttaaaactatatgggaagaactaaccaattacaggccttcatttacatgtaacggatgtacatgtggaggagtcaagaagctccaagatcattatcacatggagtacattatgtaatttttagtgggactctcgatttcatactcgcaagttagaggaagcattcttctcatggatcctttacctaaagtgaatagggtgtttcatcttgtaaagaacaacaacaaagaggcactgccccaagttccaataatgctaactctgccatgactttttcttttcaaggtgataaaagagggaaccagaaggatgacaatcaagctggagaatcccatcctcctacgaggaaccggcccttttgcatgcactgcaatatcctttgacataccatcaaaaaatgctacaaaatccatggatatccccctggattcaataagcaaaacaagcctaaggatgctgcagcaaatcaggttcaaactggggaggaaagcaactctacttcaactgaaaaaccatgcacttcttcctcaattattcacgactcaatatcgggaactgctgaatttacttgctgcacaacaaaatggtatgaatgctaatgaccctagttcctctacgggtaatccaagtatcatcctatcccataattgtgctcctccattgcataattcttgaattttgacacatgagcaactagacatatatgttctaatgtcaaactttttcaatgcatatgtaacataccctcaactaaacgcattcttcctaacaatgactgtttaaccgtgaatcaaagtgggacagttaaattagacagtgaaatcatcttaaccaatgtcttgtatgcaccaacctttaaatacaacattgtgtcagtgagctatctcactaataattctcctatctctgttcatttcacctctgacggatttactatgcaagacaatgtcagcaagaggacgattggaagaggtaatactatcaaagatcttcacattcttgatactacaccaaattccagtcaagttatctctgtctctgctgagacttggcactctcgtcttgggcacttgtctcacaaatgtttgaatctacttaaagatactttgaactgtaaaatttatgatttacataaaagtacaccatgttatgtttgtcctattgctaaacaaagaaaacttccttttcaatgcaataatactctttctgataaagcctttaaaattattcattgtgatgtttcgggaccataccacattgtgtcacacacaaatcacggatactttcttactttagttaatgatttctctagagtcacatgggtttttctaatgcaacataaatatgatgttagcttcattatgtctcaattcttgacctacatacaagctcaattcaagcaagtttttagagtatttcgttctgacaacgcacagaacttgttttcaaggaactattttccaagcaaggtattatgcatgagttctcatgtggttaaacacctgagcaaagtgttgtttctgaaagaaagcatcagcacttgcttaatgttgcacgatccttatattttcaataaaagattcccattaaattttggactgaatgcatattagccgttgcatatctaataaatagaaatcctactcccctattaaacaacaaaactccttacgaattactctttgataaactgcctgaatatcaacatctacgctcttttgggtgtctcgtttttgcctcaactttatctactcataaaagcaaattttcaccaagagcccgtacaagtgtttttatgggatatccccaaggtattaaagggtataagctctacgacatcaatagcaaacaattttttgtatctcgaaatgttgtgttccatgaaaagatttttccttctcaaaaacttaatactgaagacagtgacattgtaacgccctaatgctaaggcacgctacagt

SEQ ID NO: 161955 - DNA, 1469 bp, Cannabis sativa
gtgtcatacaacaaagatgtatgaagataaggttttttttttcttttttttttttaatttattgatggacattatacttttgtggtgattttgatactgcttggaatatggatcctatggatgtgaaaattctttagtttgcagtaattaaatagtaggaaaatatatcatgtagtgcaccataatgttttgtggataagtgtttacctgttttgatttgtggcacctttaagatattcttgtatgaaacatcaattttaggataatgttttgtggataagtgtttacatgttttgatttgtagctcactgagcttcaaagccatcacgcttagtaactaacaatgtcgtgaatcatgaatatattatatctacttgagggctgtggcaaggtttatgttttgtggctagtttgatataagtgctatgtttattgtcggtttccttttagggttagattaaataaagtgattattaaagttcagtttgttcacttaaacaactctgtgcttgaaagtagacttatcacttttgattataactttttgcctaagttttaataagcatgttcttattggctggagttactaaaattctaggttgtcccgaaaagggctgctgcctttaaggttgacagtataaatcaaagagtattcagagtttcgaaaaggatatagtgagttagtgtatgaatgggcttcatttaaggttgatagcataatgtgaagaatacaaaattgactttgagaaagcctatgactatgtgcattaggactttctggatatggtacttatgaagaaggattcagatcaaagtggagaaggtggttgatggctgcttatctttcctatttgatcttcattaacgggagaccaggagggaagttttgtggatctagtgggctaaaatagtgagatcctatctcttttcttattcactagtgtggtctatctcttaaaaaaactcaatgttcatgagatattataaagaagatggtcctatcatttattatccttgggttggtgtgtatattgcaagaaaaatggggaaacgacttcccacttaattctagagtgcccttccaatcatctttcgtgggttagagtgcttagtgaatttggtatacattagtgcatgccccaaatctgaagatagttgctatcgtgtaaactcaaagggagaaggagaacttctcggctctggagcacagccattcttgctggaattaaacgggaggatctttgaaggaatcaattatgaggtagaagatgtatgggggaagatcaaattctgggttgcaattgcaactttggtttataagtcaaataaaacttagaccaagctaagattatctactacattccagctatctcttgggaaaccttacacaaagatgtgacatggtagaaattgttggggagattgatcgcatattgagaccaggcggatatctactggttcaagacaca

SEQ ID NO: 161956 - DNA, 2894 bp, Cannabis sativa
  modified_base (2834)..(2834): a, c, t, g, unknown or other
cagttcgggataagagtcaatgctgtatctccttgcgccatagcaacgccgttgcttaggaacgcggtagggttaaacaagagcgtggtggatcacgtgatttgtgcttcggccgtgctcaaagggcctgctccggagcccgatgacgtggctgaggctgccttgtacttagccagtcatgagtctaagtacgttaatggtcttaatcttgttgttgatggaggttacagcaccactaatcggtcgtttagtatggctttgaaaagtttgatgaatgaaaacaataattaattttaggtagttttgtttattgttattatgagccaaatatattaaagttttatttttttccttctccttttgtctatttgttttctttacctagtaataaaataagtgtaatttaccaattgcgctcttcatcatctaaatatctaatgatctaataatatagagttttttttttttttttttctaaatccacccaactattattacacttaatcctccaatattaatttttagtggttatactttccacaataccaagctgttagtgaatttaaagcaatctatttaccacagttaattgccaagtatatggatgacttatacgtactcttaagtacttgtgggttatgcctactcgtatctctcatattttaaggtctaaaattgatttaccaattttaccacaaataaaatttattatttattttgtcaataaataataatggattaattttaactaatatcttatttcactaagattaaaataaatattattttcactaaaataatatatttttctgtttaatattatttaagaataaaattatattttaactaattaatataattttctcaaataaaactaaataattaaatactatttaatttcataattcataattgttataattattcaaaataataactttcacaaattaatattttttccttaagaattatttctcatagaaattagttctcataaaaattttctcgtcaaattaaattttcctttgtacagtgttgtatgtatggaggtgacttaggcaccatgaacttatattttgaaactccaataaacacttaattattattgatctcatcaatagaataatttggtttattaattccattattactccactataaatatggaatttcactctttgacaatataaaattatatttacaaaattcttactagtcgtccacatgatataattaatataagtaatttacccaccaattattagttcatagagttggtcaaaattacccttttacgcttctaattatctcctaattccttatttaccattaattcaatgtgaacagttaatctataacttattatagatttaaatccaattgtttatactcctagaaagcttggattcaattattgtataacatgttctcagccactcatgttattaagctcccaaaacaaaagttacaaagcagacctccaactctgcatcctcattcaaaggcttcaaatccctcgtcgcccattcctctagtgaatgattgtcttttttgatgaccaacttcacttcatctataacaattttagcaatggccttcttgacgttggttgggtcaaaatgtattccacgaagattgaaggagtttacacagtggtgcggagcaattaggctggattgcctaaggttatttgtattcaccgattcccacacttcacgagatttggggtctgttcacctttttgttcaagaagactgtcaagttagggtgaggaatgtcatcgaaaaaataaaaaagagaggccaagattagattacgctgaactcggaaaaatgtttaaagaaaagataggcgggaaagttcattacgtacccgcaacatagaagtccaacgagagagtttgatatagtcttagaagtcatgtgcatgcttggatgagctagctggacagaccaccttgagtcgcttctttaatgagtagaagccaatcttcgtcctattcttcctcattgaattaggatacaacttatagaagtatagagtttcgttaggagaaagaatctctacttgatggtccttatagaaaatataccatcctaatagcaacttatatgcctgcgggatgagttggaattgagctacacccactgtcgtaaaaaagtgtgaaaagtaactctaaagcgggagatagtctccagattcaatagggccctagcttcagatgtcgaagccatccatgcaagaagaagacgactcatccttcagcactagtctattccagaacaagttgggaatgttcttaaggccccacttctcctcataaaactaaaaactagataattgtggaatttatttttatattgatcaatctcccactaagatggtttggttgctacttccaactccgtcccgcaagcttctcgagccatcttcactttgtggtccatgatcatttcttttgtcaacttattcgcttcaaccagcgctaaaactgaaaggaaaaagaaggcaaaactaagtaattaataccctacactaaaaaatatatattaagggtacaagttagtcctctcccaaaactttttggagaggtctctgtcggatccagcatctagaagcaagttctccagggaacattactccaggatagcaagatcaaaaaaatgagaatacaaagcgaaagattacaaaatattttattctgcacgagaataaagtgcagtgtgtttatgtattctatatcactacttcagtgcaaaattttaagccaatccaccctaatcgaattaaaagattaaccaccaagatgggtattgtaaagaccgcttagtttnatttagaaattagcagttaattaagatttaattatgataattatttatagctatttaaat

SEQ ID NO: 161957 - DNA, 9859 bp, Cannabis sativa
  modified_base (8912)..(8920): a, c, t, g, unknown or other
  modified_base (8970)..(8979): a, c, t, g, unknown or other
  modified_base (9041)..(9049): a, c, t, g, unknown or other
  modified_base (9634)..(9645): a, c, t, g, unknown or other
ctatgttagttagggtgtttcatatggtaagaatatgtatatagtataggttatatatataaaaagactgcttaatattatatatttattttgattaattattctttgtaatattttgtataatatttttatatttatttattaatgaatatattgtttaatattatagcccaaaaaaattaaatgtatccaaaataattatataaaaatagtaaatatatatatataaaagtaaaataaaaaaatatagatacagtgacgcgcgttaagggtagctattacttttatagtctgacaaggtttgagtttaaaaccctataatgacgcccggtgagtgattctaaaagggtttagtgacttattctgaagtgtaactaaataccgcttttccagtcacccacattagtgacgcacagtgaagtgtcactaaaagattctagagtctctcaatgtgcgtcactaaaatctttttttctagtagtgaatgctaccagttgtactttcctctaaatggtgtcacttatgctagaaccaatgtcgccctaagtctctattacttagacacgctacagtgattttttttatttacagttcacgcctttgctaattaaaagatgtcccaaaaatcgtgtcaaatttaaacttttaattaaactttaaactttaataaatatataaccatacaaaagtcgaaatcccgtcttaaaattttataatcatattcaaaatacactttataaacacgtcgcatcgtgactacaaaataaaggtccatgtcgtctcgagaccgaactctccagttctaaccattttgatgtgtacaaccatcctcgtgttggatttatggtactaaattaggtacgcaacggaagagttttatattatctgattatcattgtaccatattccgtagaatctccaaatgtgtgtactttaaatcaaaacaataaaattaataagtttagagtatatctcttgcagcctatcagagtatcctcaaaacttctcgtaagttgtatcccttaatcttgttgatgaggaattagcaatttggactcacaccagtgtcttccaaatctatccaccacacacaaggaatagtgtgagctattaggataaagtgtataaccttgttcttaatgatttctcaacacatgagcaagaacatctaagagaaaaaaaaaacagtttcctttttctctctatcgattttgaaatatgcagtgtaaaagaatgaatctaatttcttaaatcaagctcctatttatagtagttaaatctatttaattaaatcattatttaattatttaaataaataaatatctataaccgaattttgttactgatattatgaggaaatctctcaacaacttgagagaatatctcaacaactttaaaatatttataaccatgacttttcaaattagatgtttactaattaaattaattaaataattgattaactaaaaagacaaatctcataggaataggacaatagctaggcgcctaccatgtctgtctaggacaaggttggtattttttgtcctgacaagtcttgtctcgataaattttgcctcaatcgtttttgtctttttccctatttaattaatttgaaaaaaatatttatttattgtaaataaataattactattttgtcaattcaaaataaatttttcattcaaaaatctttatacaactctttatccctaccattgacagtctttcaaggtggcgattcggagaccatggacctataattctaagctccaataaactacattatttattgagtctcatcaactaaataatttcttatttattaatttcatgatcactccactataaatatagaattgcactcttagtaattatagaattatatttactgagtttaactctagtgtccattgatataactaatttcaatgattagccctccatgtgttggttcgtaattagttttggtcaaaatattatttacctttccaattacttctttacctttagttccattaattcactagtggaagtataattcgatatctcatctaaatttgtgcacaacattccagttctagaattaacacttaaagggaaccaacattcgattcgttaagaaagttaggattccataattttacatcatgtcctaaaccatccatgttatttaattcccaaaacagaagttgtaataatcatcttctttgaaaaaatttaacaagtgaataaaaaaaaactaataacatgaacaggagttcatgataactcaagatttaggccaatctactattgatcatcgttatgatatgaattaggtcttttatgataaacaatatgttgataaagacaacttttttcatatcgatccttgtcatatataatctctattatatacagtaccttcacttcaaagtctcactacatccgtaattagaaccaagattacttgcaccaaagaatgggcatcagtgaaccgtactagcaacattgattaaagattccataactttaatatgttgctgacttttcaattcatagctaaatagttttagttctttgtacaactataagccacaacctcatatatgaataaataatttttagatagttaatatatattattaataatttaacattcacacttatatcaaatatttgactctttatttaataatcaaaaatgtctttataggctttttagggcgtaaaccctaacaccttgagctctggactcactggtgctcaaccttcgccttatacttacacgtgcaaacaatatttatgaagcacgtacatatagcataatatcgacttgtatctaggcacccatacacctatttacaaggctttagatgcatcaagaacgttcttagtacgaaccttgtactatatgcactaagtactcgtcccgtactagtgttggtagggataatttgcacctcgagtaccactaagtgttgtaccacatgcactacgtactcgtctcgtactagtgtcggtaacactatgtcgtaccctttaaacatcatatactgtaccaatgcactttgtaccacaaccgtactagtattggtagtatattattcacatcaaacaacatgaaatttacatacttacacatatacatatacatatcttatgctagcattaccttgtttcctgattcaagtgtgtcgatcaacctaaatagatatattgctcgttgaatggaggccttatgtcacaatacgcaaaataagtaaacaacttgctaaaatctttacgaggacttaaactcaaaactagaaatttccctatcaataaatatcatggaaatgcccttaatattaaggaaacacgataaaaaaatactttggaaaaactatcaggaaaaacgacatgctattttgtataaacgatagattgtttttctaggcagtctttcagtaaaaacaatgtaccgttttctcagtaaaaatctgctattttctactgtagaaaaataataagtgtcaaaaaaaacccaaatctatcccaaatctcaaaatattctataaaaatctaattagttcctaataaacacaattcaagcataaaacacaagtataactcaaaactctcaaaatcaccattgttgagtcaagtttgagttcttgaactcaaacttgctcaacaccactcacaaccaacaaaaccagcacaattcaacaacaattaacccataattaactatgaaaacaaccccttaaaacctagggttcgaacaaaaccaatttcccaaaaatacatgcttgaacttcgaaaaaaaaactttaaaaacttaagaaaaagaaaactaagtcttaccttaggattacaccaccaaattccccttgattacttgaagaaaaacacacaaaaaaggagaagaagttgttgggtttctctggttctttttagggccgaatagaaggaaagagaaagagcttgaatgatgaatgttttcttggtttcttttgactttctttctaacttagtggataaagaacacttaacttgctattctctctaataatcaacttagaataagtaggattattctacaaaatccataaaaacaaatgtaaattcctttaggcaaaattaccattttccccttagttcacctttaagaaaacttttcgcttgagagtaaaatggtctaaaatcataacccctcacaatcccaagattcaaaatatcacatacgatttgtcccattaaaataaaggttctaaaccaacctcgtgtgactctagtagccaactgttgcatttccatcgttactgaagaaaaatcaagaaaatattatttttcacatatatcacatatataatacacttagagtttaataaaatatttttttcatagtgatttcaccccttttgttattcttcatcaatcttcaagcctttagtgaaagagtaccatgcccacacatagcaagtcaagtactgaatcatagtgcgaaagacggtggttaaccaacccaaaggacagaaggagattcaggctcagatcttgttattactatgcgacataaaggaacaagggttagagatttgagcagaaagagtcattttattctgttgccataaatgtaaggttctctaaactctcgtgtgtttcatttcatcatattagagagttcatatttagggtgttaattaaacacacatgctagtaaatatagatcctggtagaataagttccaaaagaaagatggggttgattatgtatctatgtgtttaacctactcgcagataaaggttgaacatcagagacatgcgggcttacttcagtctttgacccttcttgagtggaaatgggaagacatcaccaaggattttatgttggatatcctagagccacgaggttatatgattctatatgggtgataatagatcttttaactaagtcagcacactttttactggagaaaataacgtacacaatggatcagtatgtcgaattatatgtgaaggagatagttcatatccacggaactccaaagtctattgtatcagatagagatcctaagtttacttctaagttttgggagagccttcagaaagacatgggtacaaagttgtagtttagtacaacttttcacactaagtttgatggctaattcgagagaacaatttagatatcagagaatatgttacaagcctatgtaatggactttgagggttcatggagtgagtatttgttgttgatagaattctcgtacaataacagttatcaagctactatagggatggctccttatgagatattgtaaggtaggaagtgtcgttctctaattcattgggataaattcggttaaaggaagtatcttggtctagaggcagtatagaagaccagtgatgctattgagaaaattagggcacgaatgcttgattctcagagcaggaaaaagagttatgcatatcaaaagtgcagaaatatagaagtttgggtcggagatcatgtctttctacgggtttcacctatgaaaggtgtaaagtgctttggtaagaagggaaaattgacccctaggtttatagaaccattcaagatgctcaaaagggttagccaggtagcatatctttatccctacctccatcattatctattttttattatgtgttccatgtatcaatgctgaggacgtatgtatcaaatccaacccatgtcttgagctacgaagccctagagctgcatctagattatacttgtgaggaacaactagtttaaatcctcaacaggaaggttaaaattcttaggtgtaaggccatatcattggtcaaggaactctggagaaagaacaaggtccaagaatccacgtgggagttagagtccggcatgaggacactatatcccaaattattcaggttagattttgaggacaaaattctttaacagagggataattaaaatggctgcatgattagacatgaaattagtagttgaatagtaatttattagtaattaactagttaattatgaatatatttgcattattatatataaataagtcttattattagagaataggcatttatgtcataattttttaattacggagattttattaaattctaggtatgctagatatgtaataaatgaaattaatatttttatgtttttatctttgacaatagtagaaactctacgagttagttaaagatgtcacatttgtatgaattagtgttttagaggtacgaaaaataattatggatagttggtaattatgagattaagttgggtacttagagaatgaccattttaccttttgttagatgtttcagttgaatatgttgataagagcaaagtgataatttttcatgaaattgctagattatgatgagttagctattttatttattgaaggagttactccttttactctaaggaaaatagaattcattagtgtatataaaaataagaacaaaattagataaacttaatttcacaagtttctctttcttactttggccctaagaaaaacaaggaagagcaggtagatttctcagctttaggtatgttgatcgccctcttttctctttgagttttgatgaacaatggtgaattttatgtgattttaggaaattatgttctattatagaatagttgagttagaagtagaattgttgcatgttttaagttatgattttagtttgagttgggaattttagagtagctgccctagttgaagtcaagtttgagtttttgaaactcaaggtttgatcttcaatggtgattttttatttttggtgtaattattgatcttaactggtgtagtatgtttagaatatgtttaggactattttttagagattggtgtggtttggttcaggtttgggtagatttgaaatcaagaaatctgagtccttaacactcagcagcaaattgggctactagttgggacctagattactggttattgttcagacttttggacacccggatgggatttcgattgccttggtagggatttctaaggatacctcaatttttgtatttgttgatatttaggctattgccaccctatttattaatagtataatttcaaattatgaatttaagtcctacaaagtattttagtgagatacttatcaatttactattaatgtgacttagggcctctgatcgttgagtagtttttctacttagcttgactgacacacttgatttcaaaattaaggcaagactagtattcagaggcacataatcacatgattaacatatatacctatattatatttttccatttagattgacatgtctgaaatagtggtatgttgtacatagagttgcactaggacactactaggatactgacaaatatatgttacgcaatatcaaaaagtataaattactactaccaatactagtacaaccagattactgggtgcagtttcgtattttggttaattgtactatagttacgaatgttcaagacttagacatacgcattggagcgggtagttgacttatagaaattgagtatattggcactcaattataagtctgatatatatttttatgtgtaggtaaatacaaagtaaaagctaaacaacagtgagcgataggcttatgaagatttacatatctggttgtctagcctggagggttgaaaagacatccctgacaatattttatttgtgtggttagatgaaattttttgtttattgtatatactaggtatgtttaataaatagaatttcgatatctcgaattataaatattttgtaaaaattcaaagtttatcaaggctttatttattatgaaaattttattaaacatatttttatattaaaattcttaaattagcaaaggttagcaaaataatttaaaaaaattaatttttttgccttagctagtagggcgttatacttttattttttattttttgcatatattttataaatattaatttttagttttctaaatatatttgtttgctgatgagcgttgaagttcagacaatgcctttgtgtttttggtatgtagatagtcttaatctttttttttttttattattattattatatgacaatgtatagatcattagttatctaagacattatgcaattatttgagaaattatgaataactttacactctataagcaaagtttagcagtttgttacacatgtgcattttttattttatatgcatgtagtttaaaatttttactttttgtactgtaaatcattgttattttttcaaaattttatagattgtattaaataattacaatatactttataactatttaaataaaaaatatacaaagtagatgtatcggtgtactaatttttaggggtgcaacgtaaaaattagtttttataaaaagagaatatcaaattaagtttattataaatataaggccttggaaatatagaatattccttgatgggtaagaatcaataataaaaaacacaactaatttttgttataaagattatgatttgcaaatctgattctacattataaaaaattgaatggtttttaatcaatgaatatgggaagcaaattggaaaggcattattcattcatgtagtagtgttcacatggacagaatatttggtatttcagataccattctatatattcaccaccaacctaaaaataattttaaatgattacctattaaccaacaaaaacattataagtattaaattcaatcactatttttaataatttatggagtctatattaattttatgatatacatttgattacaagctgagattgtcgataattattctattgttaatgaaataaattaactcatagtatggattctgatcacctttagttatgataatttaatgtatcggtaggtatcacatataatataactcatctcgtgacttaaattgaccaatttatattaataaaaatggcgtttggtaacacttttnnnnnnnnntttttgtttttaaaattgaaaaaagtgaaaatatttttcaaaaatatgtnnnnnnnnnntgtttttacttttcaattttttaagtgagaatcaaaattttaaaaacaaaaaaaaatcactnnnnnnnnntttttaaacagttttttttttctcaatcaatattttggacttcgatcagactcgaacccaaatcctcccacggccctagcgctgaacccgtcttctgatcttaacccgaattcgaccccagacctaaactcgatgtaaataaaatcaaaaaaaaagaaaatgaaaataaactttacagaacacacttttatattctgtttttaaaattgaaaaacaaaagtggttacaaaacgtatttttgttttttaaaaacaaaattttttaaaattgtacagattttttgtttttagaaggcatttgttgtgtaaaacaccattattcattttattggtggaattgaattgcagattatatatatttataatttgtcttttaaattaatcatttttaaataaaaatatatagaatttatacttaattaagccatgtaatattgtgctgagattattattttttgacgattccatgactataaaacaaaaagtgttgtgtttttaaatattacaatttaaatttaaactagacatatttttcttacataaaatgtgactataaaacataaagagtgtgtttggaagtaactgnnnnnnnnnnnngtagggtaattactagagtagtaattacacaatttagtaattatactatattttaaaatgtaagctgtgtttggatatgagatggtatttacatatgaattcctgatatcttgtttgacaaaatagtaagtaattacatagaaaaataatttttttaatagctaatgtttaatatggaaagtttttagtaattacacagtgtaattacattcaa

SEQ ID NO: 161958 - DNA, 6419 bp, Cannabis sativa
gtgaaaaagagtgactgacaaaaatgtaaattgatataatttgtggaatttagaactttggaagtaattttattttatttttatcaggtgtgtttcttgaattttaattatgttgtaaaactttattatattgtttatttacttagtgtaaattccctataccacaacatatttttgaggtgtggtttatgggattttgaaattttgcagttgttgtctaagaaatgtttggtttgaaaaaataaccaaaactcgtacggtacccactgcgatcacccctaattcttgcttgagctttctctttgcttatcaatgaagttttcctttataaaaaaaaagaaagagttataggttggaaattttcttttattttgacacaatttaactatcgtgcttttcaatgaagtgcttaatttcagcttaaaatggtttgggaggattggaggagtgaagtggagccatggaacaacaatccaatgtctctcaacttcaaccattatcccctaaatatcaacaactacatatatataaatatatatatatatatacacacattctcaactacatcatattaatggcgtacaacttccttcttcacccattttgttatactcgctctttctcccggtaaaaaggcttcacaacaaagcttggttggttcttgaaaagatccaagttaagtaccactggcaaaactttagtattggctcgtgctccgctggccatcagaagcatcgaaatggccgcctttcccgcctcaaccgcgcactgcagcggcgtgtacccagcgtcgtccaacgcgtcgacctgagcaccgtggctgattagagcccttgcagactcgatatcacccttgaacgctgccctatgcaacgccgtccacccgttctggtctctaacgtttacgtttgctccttccgcaagacaactcttcaatccattcacgtcgcccagcctcgccgcgcggtgcagggcgtcgttcaagtgaagcggcgcaagaagctcagtgtggccgttatcggctgctagtgcgaaggctgtcctcccgtctcggtcgacgacgtatttggcgtttgaccgctccaatagacactctacgacttcgtaatggccttctgacgatgcacagtggagcggggtccatcccctactgtctctaatttcggcatttcccccggcggagagaagggacctcagagcttccacgtggccccgtgcggccgcttcgtgcatcggagtccaaccatctgtatcagacgagttcactccgaggtttcccatactcttgcagagaatctcgatcatatcggctctgttcatcgccgctgcgtcgtgcaaaattctgtcgacggagatatcgaatcggcaaccagaagctatcaaaaccttcatcacgtcgacggttctggccttaacagcggcagtcaacaacgaccttccctcggaatctttaccgttgactttagctccagcgtcaattaaagcagagaccagatctgggttttctgaatttatggctaatttgagggaatttgttatttgagattccgtacacccagaaatagctttccccatataagaactcagttcgggaattttatcgtggtgtgtgatgagaaactctacgacctgaggaccgacgaaggaaatgggtatgaaggcgtctttgaaaacatggcgtccggggacagaaaacaagcgacgaaaatcttcctggtcggcttttccggtggggagcatggcagatcggacggtgataagatcatctgtgagagacgtacagagaggcggttgatcaaaaggctgagattgaagagtatacgaggaagaagagagaggtgggataacagagaaaggttgagaaaacgaaaagacagaaggatttgttgtggtgagagagacagccacagacatggtgtgcataagattggtgagcctgaaaacagtgctacacttctggccattcttgaagctgagctccacctctttcacatctggcttcactaacctatccatggttaaagggagactcgtcaacccaaatcaaatccttccctttctttctttttcagggaaaagattatgagagaaagattgatgtggtggtgggcgtggtgagttgatcttttccttcccttttagtacatcatttttttaatcctacgaaggatttaattatgtgtataaatctgatgagaagttgttgttttaggcacaagctagctagtgactatgactgtgacattcttctggggactttgacgatgaaagagtcgttagttgttggcttgttttttaatactctattctattattcttaattgttagtttttttttcccttcaaaaaaaaggaaaagggtgatttatttttaccgccgaaggctttggatggccttaagatcaattcaactgaagcacctttgactcctctggggttggaccaatgagtcgcaagaccctaccaacagctggtgctagccaccattgtgcacaatagcaaactcttcaaaacagcaatgctattatttattaaattaaagagtattgcttgtagccacctgaaattttctatattatttattacttatcagtaacatcttacaatattcaattaacaattttacaattttaacaattttattatttattacttatcagtaacatctttaaaaaaaaaattaataattttacaatatcgtttattatattatcagtagcttaaaaaaaagtacaacaagcttgagttataattcttcggaacatctgtagtattttttaaaggtattaaatatctcaacatcattcaaagacataatatttttattttatctttcttactttaacactcttatttttaaaaatactttaatagtataatttttcaaaaatattataattatcatctcacacattattatatataaattattttttttattaaatattatatatattacacttttaattttttattttaacaaacataacataaatgtcattgtatcgcatcaatatatattttaagaatattatcctttatataacatttttatatttttctacttaaacttttcacaaagggcttctgtcctctctcctttgattcaaacatttttatatttttctacttaaacttttcacaaagggtttcctatcctctctccttttgtgggtgctagagttgtgtgtgcaataatgacacttttattttataaaaattacaaaaattattttatgttctcatattttcttcaaagaatttcttcaaagaaagataataataaaacttacaaaaataaataaataaactacatagtataatttgttacaaaaactatgtggtataatatttttttagataaactatatgtgtaattttttttgagataaattatgatataattacataaagtattattttttataaaattttataattttatgttcaaagaatttttttaatattttttcagtatttcaaaaaaataacacgaaaataacaaaaaaaaaaaataataaaaaaatatcatccacacaacatcaaaataataacaaaaagtaacatacaaataacacaaaatcaacaacaaattaataaaagtacaacataaaaatacattaaaagactgtatattgtgtaaataaaatcataaaaatatttaaaattctgcataaccgtatttttgtaatttttttattgtttaagtgtatttgtaaaataatccctataattattgtattataaacgaaataatatatatttatatctgtaattgtaaatctcatatgttggatctcattttcattaaatttgttaataacatagttacaaaattatattttaatttggtatactatatatataaatattaatactaagtattattaatatgtaatgcattagttgtattagagttgttattacttaattattattttaaataataataattaaatctaatacaattcaattatattttttaaatatataaccttttatctagttttaaattatatttaattaatttaattaagtaataaaataagtaaataaatttagatattttaaataatataactaataaatttactataaagtattattaattaataataatgtgtaatttatatctatatataaagaaaaagtataaaatagtgacgtggcggtttaaaaatattttaaaatactcattcttttttctctacttttgtttacttttttattatttttttaatattaattattaattttccattattcttcacgttagttttctattttttttttattaattttttctaatactcattattataataatttaaatatcctttttaaacgtatatttttcattctaaaaaaacccaaaacccaaaacccaaggtagttagtgacttatataaataaataccacaagaccttattgataaataaaatctagaagattactatacgaaaactctcaattctcaatgacgaagtaagaaacggaagataattagcggtaccatgactttgataccaattcttaatgatgatctactacttgagatatttcttagactctcagattttatatgtatagttgagtgtgcgcttgtttataagcgttgattttcggctattgttgattctaaattaaattttagtgccaaattcaatcattttcaccgtcaaaaaaggattaacaactcctccaagtcatctcttccttttactctaatatttagagaatgtggtatccataatatattgtcatggaagttttattttgaaaaatcaaagatttttgactatggaaaaggaccgttattggaggttttgccttggaaagatacttacaagtgttattcttatatatggttgtcctttgaagatattaatttattcatcttgagtgcaaaaattaaaattttaataaaatagttactcatactaataaaaaatacatcaaaatatgaaaatttaaaatttgatatagttttgtgacttaattagtattaaacaaaatacaaccgcacacgaagcacgttttgttttctagtttaaattaaaatttatataaaaaaaataattatttaattttgttgatacatttaaataattatctaagtcatattttaataaataaatttaatttaaatatttaaaattatttttttaataaaaagataattaattaattgatttaacaatgtaattttaactgttaactttataaggtaaaaaaaaccgttaaaaaataaaagagtgttcaatgcattaaataaatcaagatctttgcatctattagttcttttagagggtttttttttttttttttttgagataaaaacttattatattagaatgaaaattataatacaatagttattagaggaggtgggaattctttcaatcaaacacattttttgtccaccgaaaaagcatactttgttaaaacatgagcaaaagtattagcagatcgaaacacataagagatctgcactctagggaaatcggacatgagaatagaaatgtcatgtaagatactatgaaaatcagaaacattaaaatcatagaatacaattctttgaccactgattcgtctcaatgtagtgaataggtaagttcatttcttgtagccattgcaaactaaacataaaagccaatgcttccataattagtagcttatgtatttttacagtaccttcccacatcaagaattaattaatagagagaagagactccaatattctctgaccatttgagaaatttcttagttaatttgtggtcatattttatgtaggttacatcatccaaattcaaaatataatttgtactaaaaatttaattagctgtataaactaaaaacaaaagttaatgatctcacccttgtcaattttcatggggtcacaaacattaactatttatttgttttataaactttgtctctatggattaagagatttctgcattttatataatctcatgtcggttctattattacaagtttgtcattttccaataatttcttgttaggctttaagtgttttcacacatattttattttgaaatatttataccatatattaatttttctttaaagtttatatttatagtttgataaaaaaaaatttgtatttgtactttttactcatttttactcatttttatttattaaagattctataaaacttttttttttatatatatatctctttgtatttttgtttttcattaatttttttttaagtttgattgatcttttttgttttatttctcttccctcttagtttatctttttcttttgagtaatatacggaaaaaatacataagttttatgccgagtagcagataaatacctaagttctatttttggcggtaaaaataccttccgtcactactctgaaacttccgtaggtacctttccgt

SEQ ID NO: 161959 - DNA, 1704 bp, Cannabis sativa
aaacgaaccctaaatctattaatcaatgcaagatttttcattgactcgggctttattcactacaagaattaccataaataccgttcattaataaagaaaaattaaatctcataatcattataaaataagttttagagaatggaagaaatagacaaacaatcatattatttattggtaaaaatctacttcaccacattatgagctacaaaatttaaatttaagttgtgaggttataaatgagactaactttacaatccaaagtctttagaatatctctctcaaccgtttaatccataagcatattcattgtacgttcaacatttgtaggccatgccatactcaaagttaaatgggcccattcgagataggctaggatctagtttcaaatcatgagcactcaaattgggcccattctgggcttggcccatgaatctcacattatgtaatgtcaaacaccactaacaaggatttaccatgcagagctaaatttgcaatttgccaatctctttgactaatgtaatggcttccactaattttagcttttggtagtgaagtaatcctattaacaatatgcagcggtattagtgtttcacaatgtgttttgattgcaataccattcagtttgttatggtgtaaagaagttctactagtttatgttaatcccttttacatttacattttaatgttaaaataatattataaaatatctaagtggcatacttaagtttaagtttgcatctttactgttggaaattcaatccaaacccaatctcaaatccaaacacgaacaaacacaattcgaacaaactgaaaggaagtaaaacaataaataaaagatatatacaccgaactatagagattcacacttcctttaaaattagttgaagagtctatttctttcttctgaactcccaacaatatagattcaaattcttgcactatcatgattcaagtttactattacaaaaccaggtgactaaacaagttgcctaagaaaactctcaatttctctctatgctctctctctttctctcactataattttgggctcgagaaatctcttagtttagattatctcccaactaagttaggaatctttatgtatagaccctagttagtggggcttttaaaagctatatttgggattctgaaacttcaaaaatacttctgttgttagttgggtaactaatgaatttaaacttttagctctaaaaaatatttttaattttaacagaaactaactttagtagctttctcaagaaaatttcttgagaagttaaaagcagaaagaagaattttaaccaaacaagacttaagcggactaacttcataagaggagacacaacggactaacttcataagaggagacacaacagacataattgcaaattaacaaaccaaaaaatcaagaacctaactaaagaagaatgatgtggtacatagacaaattggatgtgatgcaatatttacattactaaaacaatataaataaaaaattacatctttactattacattgactattaatattaaattaactatgcttaatattaaattacatttgtaaaattgactatgcttacattgtcaaactccatactcgtttgaaatataactatgtataagagctgttggaaatattgtgaatattttaacaaaatatataagtgtcttagtgtgtgtgagttggaaagagtctcacatg

SEQ ID NO: 161960 - DNA, 6276 bp, Cannabis sativa
accacactttcaaattctaatattgtatcagagtcaaataaaattctagcgagtatccgatccaaatccaaaattttaaaccaaaagagctactatgagccaaaaatatcgctggtccaaaaaaagatgaatcaaaatagtcgcttgtaattttgtgagtcaaaagtgtcacttgtgatcgagccgtctaagaccggtaagcaaaatattgtcaccatttggatgttagagagtcacactgaaacaccctactaatttaagcacgctacaatactttcttaattactgtgcactcatttgttaatcaaagggttaattgaaaaacgtgaataattaaaacattcataaataaacttaaacttaaaaaaatatatacatatacatatcctgggaccccattttaaaagttacatttgttaaaaaaatacatatgctacaaaagttggtgcctagcgactactaaaataaggcccagctatcctgaagatctgaacactctaagtttaactgcttcgatatatacaatcttcatctaacccgaactcactgttgctcaacttttttcttacatttacctacacatataaacaatatttgtacgtaagttgacaaactcaataagaaaaatataaatatataaccagatcgtaactagacgcccgtacacctaatcacgatcttatcccatgtccaacttatcccgtgtctaatgcgtactaagtctaaaattttcgtgcgacaaagcctagcatatatctgtcggtatccaatgcaactctatgtacatcgacaccactcttgctaatatgccgaactaatggctttagaattttcttaacatatatccgtcagtattcagtgcaactctatgtacaccaataccactcttattgatatgttatctaataggcaactaaaaacatgaaggctaacgcatgtaagcatgcatatcaatagactaatcttacctcaattatgaatttaggtgtgttggtcaacttgagtggaaactgctgctcaacgatttaagaccctaactcacaatttacataaactggtaagtgacccgctaaatcacttttgcgtacttagactcaaattaactaaaagttttcctgtcgataattaagtagcgtagatatactctaaatatcgaaaaaatactaaaaatgagactacaagaaaaattctcaaaacaaaatgcaagaaaacctaccttttactaagaattccaaagagaagaaactaaccttggcttgtaaccttgaattctaagttgaagagtatccttgaatctaggtctaaaaatagtggaataatttatggtttaccttgttttttttggccaaaaattgaggaaagagaaaggggaaggaatatattttttatatttatcttgtttttaattaaattgtttgttttattaaaataatatcatcatataacctttaagaaaaaggttagaaattcactaaaaacaaacttccaataactaagggaaaataaccattttgccttttcttcaccttaaagcgacataaatgcctcgaggtaatatgatccaaaatcataatcctaaataacctgacattcaaaatgtttaactatcttgccctgctaattctaagatactccaccgtatttaagtgactctaataaccaaatcgtcgcattctactattaccatgcaaaaaaatatgaaaaatataaaatttcatataaaatacataattcacttagaattcaaatatatcttcataattgaaaaattattaatttaaagcctatttttgacaataagccttaatatctgttaagcggaatataataataaaagattaagtaaatctctaattatctactaattctcgtaagattaagtaaatccttaataatttactaattatctgttaattgtaaatgtatgaaaaaataatatcatatatatcaaatgtatatagctataagctactcctctttaattgattttgaaatgtaaatatcatattacatgtttgaaatgaataaagtatattataatttgaaagaaaaaaataggattttggtagttaattttaaagaaactatttatggtatattgtaaaattttgatgtaaaataaagtaaatggagttttgataatgtatttcaaataagagtctcaaacatcaatgccaaattcttgtagattatgtttatgggtgcttctacaatgcatcatttaaaaatggatctactaatgcagtcgctatctgtttcatctaaatttaacacgctaaaaataggattcaaacagtctattgcacgcgagactcttttattttatacgtgtgtataatacacagtttgaagcctattttcagcgtgtgacatttttttttttaaattttgtaggatgtcttaaataactaaaacgtagacaaccgtaaaaaaattggactaaaaaattatcctaaatgtcaaaacagataagaagtacatcgataaatcccttttaaggggtgcattgtaaaattttttaatgtttattatttatcttagaaggttggcttgagaaaaactgtgaacatttaggattgcatttttggtttttcgtatttatgggtttatgatatttacatatttgtggggaaatagtaaatattaacactaaatacagtagtctagataaaacaaaatatataaaaaaaaaaaattatataaagaaagaataatttgcggtcaaactccttgaatttttaaatttggtacggtttaactcacatatttaaaaaattatagttaaagttcttaaactccacaatcgttttggccagcaccttctgttaatttttggctgttaagtgccaaatagacctatcaagggtacacacggcgaagttttattagatcacctaatattaataataaaaaaataatttaaaaatatgaaaagttaaataaattaaaatatttaaaactttccttttttttttgttcttcttctaaactgaaaaaaaaaacactaactcttcatccatcccagccacctcccaaccaataacatattatcagataaacatccattaacttccaatatataattttatacccacagcaactcggattagagaaataagttcaaaataacccccccaaattaagactgctattattcgaactcaccctagcattgtatgtggtgatcgatagtggtctgtggcctgcatgaatgatcatgctatagggaccagtcgtttggatctcaccaagaaaggaggtagagcgagagaaagatgactgttcaacaatctggtgttgggttcgtgggtctcatcatttgggtttgggtttggcattccgcctgcactgagagagagtaacaaagagagaaggggattgataaagagctaggatttttttttcaattcagaagaagaagaagaagaaaaagaacaagaaaaagaaaagaaaaaggaaaattttaatttatttttaattattatttaatttgtatatttttattttttttaaaaaaagaattattaatactaagtggtccaataaaattttaccacatgtacatttggtaggtctatttggcatttaacagccaaaaattagagaaaagagtgctgaccaaaacgattgtggagtttagggactttagccataatttttttagtataggagttaaaccataccgaacttgaaagtttagggaatttggccgcaaattaccctataaaaaaaaaaaactaagttaacaaaaagaacaaaagaggaaaaacttaaaagggtgcaataagaaaattacataaattactatttttagtaaattttgtgcacatttacttataaagattttttttttatattttcacgatattcataaaaataacaccaacataacaacaaaaccacatgaaaataataataataaaaaaataacatcctaacaatatcaaaataacataaaaaataatatacaaataacaaaataacaagagtacaacataaaaatacattaaaaactgtatttatataaataaatttttaaaaaactgtaaaaatatttaaaatttcgtacaactgtatttttgtaatttttattattattgttgtattttttttttaaaataatcccttcaataataaagtcaagcccaagcccacaaccatggcctaagtcccttggtgaagcttattaggatacccatatgtattctatcatgactagaaattaaatttcgtatctattttattttgacgttgagaagccatgcgtgtgtgttttaataataaaacattgttatttgaataggtggtcaggtagcgattggttagtgatattctttaaaagttattttcttaatctgatacttaattacactaataataatataacactaaaaaaagtattaggtaccaataatattttttagcaattctcttaaggctaattagaatgtttgcctcgtgaactttgatatgtaacaaattatacctcctaaacttttttggtcgttaaaaatttcctctgaactattgagattgttggatttaaagaattttatccaattttagtaagaaaagtctaacatgaataaaagttcagggggcatgatttgatacatgtcaaagtttgagagacgtgatttagtagacattaaagtctggagagcatgatttagtacataaacaatcactaaattaataaaattgaatgaaattggacaaaagttcttaaattagataatctcaatagttcaggagaaatttttaacggtcaaaaaaatttatgaatcatgatttggtacatgtcaaatgggcgaaaatcttaattagccttctcttaataatatgacaagtgtcgtggttaccaatgttcacatttattagttacttgtcattgagacaacgtcaaatttgaaaaagacctcacaataaccagtcactcattttctttaccataagttattgggttattgctcttatttgcaacaaagctttaaaagaattaggttaagtttttaatctgattatataatatatatttatatgtataaggaagataactcttattaactagttaccaatttttttttttttggttattactaattagttacaaggtaaatggttacttatctctaacaaaccttcaaagaaaaaagcgaatattgggttatattttgagggtgcatctatagtctacccctcatagattatattgagatatcccattcagattttcaatatttagatagttttggttttttatttttatttttatatgacaatgtgcattaaagatagaaaataaaaaataggctactcttctcttgtttagtgtcgtaagttgtgcgatttttaattaggtgatccgcttactacttgcatgatttttttttcacatctttattgactctcttctcaagcatcacattgagttgattttcgttgtcttatgaaaattttggtttcgaagaaataaatgagttcataataaaaaaactcatccctctgaacctagtgataatttgggcttatgatttcgtgactacctatcaagggaaagttgttaattcaaatggagaggagttgagtgccactgatcaacctccctcttcgttgtcgcagcaggagatttttctttgttggacttcgcctcccccttggtttcatcaaagcaaattttgatgccacttttgatgtggctaagggatgttgtggattgggcatgattgtcgagaacaatcgaggagaggttttggcttcaacattttggtttttaggtggaggtttctcatttgaaatcgttgaagtattggctcttagaagtgcgggtgctcaatgttgtttatttagttttaataatattatttttgagtctaattgtcataatttggtgtccaaatttaacaattatatgaagtaggagttttctttagaacttgttttgaaggattttagtttgtcttcttgtaacttttgtgtggcaagtctagggctgtaacacccgaacttattatttactaaattcaaaagataatcttaatatattataactttattaacatatggatcgggatctcgagtattaaaatacgatttaaaagtattttactaatatatacatatactattttttttttataaacatgcgaacaggcaacttcaaaatacagactcaaaacagtaaaagaccgaaatccaccaggttgcactgccgcaatatgtacaatcactgccgagctccatctcactgttcctccagctttgcttttcctttac

SEQ ID NO: 161961 - DNA, 2983 bp, Cannabis sativa
cgaatggcatcttcgcttcctccgccaacccgacaagttctactccgacgtcctccccgacgccctcctccactcccgctccctcctcaagtccctcatcaacgctgactacctccatcaggtctccctcatcgacaacgccaccactgctgccgctatcgtcctccgccacatctccacctccctctcccgcaatgacaccgtcgtcatgttcaactgcgccttccaggctgtcaagaaatccatccaagcctacgtcgccaccgccggcgcctccgtcgttgagatcccgcttccctttcctgttcgttccccccaagaaatcgttgcccggttcaggaagggtttacagagaggaaaagccaacggtagcaagattaggttagccataattgatcatattacttccatgccctctgtccttattcccgttggggaattagttcgcatatgcagggaggagggtgtcgaccaggtctttgtcgatgcagctcacgccttgggtactgtccccgtcgatgtaaaagagattggggccgatttctatgtgacaaacttgcataaatggttcttttgtccaccttctgttgccgtgttttatagccggaatgagttgcccattgagacttcttggattgggactcgggactatagctcacagctccttgtgccttcggttatggagtttgtgagcaccttcgaaggtgggttagaggggattatgaagaggaaccatgagagggttgttcaaatgggacagatgttgatagagtcatggggcaccattcttggctcgccgcctcatatgtgtgccagtatgattatggttggcttgccttcccaattgggtatttccagtgaggacaatgcgtcgaagttgaggtcgcatttgcggacctgttatggtgtagaagttcctattcattaccaggctccagaagatgatgctgcaactgaaactagggataataagaatgggctaatcagtggttatgctcggatatctcaccaagtttataacacggttgaggattatcacaagttcagagacgccatcaatcaacttgttcaggacggaaaagtttgcaaaatgctatgatggaaatggaatagaaaagaaaaggtatggttgttagcctttcgttcaactttggaattgcttgtagtttgtgttgctaagcttaagtagtacaacgagtagcatatccgtatgtgttagtaatgtagttgccaaattaccgtatgtgttagtaatgtgttagtaatgtagttgccaaattaccaattgaatgttttatctatttttggaagttgtgaagggtacacatgaattgactatggaactcttaaggcggccttctaatttgatatgagatactaacatggctttaactggtgagggagagtagaaccagtagtctaataagaatttaatggttgaaaagattgtactatggctcaaatatgaagactaacttagaagaagggaagcttctttttaaggttttgatttcacaatcaagtgaaccacttgaggctagctcaagtgaaaagaaaatcacaatcaagtgtccttttggggcagcatgctaagtttggtgttcgttttgacactcttaggctaatcaagagctctgagctcgctctgactaaagtagaaactcactcttaacttcttttttgtttttcttttctttacaggcacaaccatttgacagagtagttaaatgaaggaaatctactttgattatggtcatactctgctgaaacgctaaagaaaccgatttgtttttaaattagttaacatctggagagagaaacaagtcaaatcgagaccttgatgtgttctgctgtagttggttatttatacaatttgtgtgaagagaatgagtagcttattaccatggtctctagtgggaaatccttatgggaaaagaacgtgtcaacaaaagtagagtaggagagtaggataggatggtagtaagttgatgtaattgaaaggcttgatgggctgatagttgctagaaaagcgttgttaagtataaatttatgtgtatataattcacattctgtaaatgtaatcaagtgctccaatgccagcttacttttagcagcttagtcacttagcacaaactaaacttcatttttgatacatgagatttggagagttactacacgcatattctcatatttttatgtaatgttcttttaaaaaggcaatactttatgagcaaacgcggtagtttgctactacaaaatatgatattcgaattcaagtctccttggtaagtttcagacaaagagcaatgtaatatggataattggacatattagagtagtatcaatatttttttgattcaagcgtttatatattactcaatacataacctgcgactcgaacccaggacttctaacacatcctcctatggccgcttgaggctaggagtatcaatatttatatatgttaaaaaataatttatataattaacaattaataaataaaaattaaattgtataatttgttttataaaacaaaactaaaattaataaattaaaacattaatgtttgttttaaaagaaattaagctgaaagcttatatattataaataaaattatttttttataaagaaatatatacaatttagaaaaaaaaaaaaaaagaaattaatgtctaattttattaaaaaaaaaaacattaatactaaagggtgactactgaatggttacaattttattgtaactatcatgtttatatttttttcttacctgtaatagcaggttactaataagtaaaatttcattttttagaatcaattaattataattaattttttttaaaaaaaataattaattgaatattttgcaagacctcttttttttttttttttgtttgacgtggtgaactgagtcacacatgattaaccacaatcggcggtgcaacttcctcgaaccaggatagcttattgtctaaccgaagggcat

SEQ ID NO: 161962 - DNA, 1891 bp, Cannabis sativa
aacgcactaccactatgctacggaggcttacatacgaaattcttattttattaaaatatatcttaaacaagtacatatagctacacattggaatttttcttcttaaaaagataataactaaaaaaccactcaagtcctcttccaaaaaaaaaaaaaaccactgaaatctgtttacaaccagcctataataaataatcatcacaaatttatgcgttcttacgtttatagacacttctatgcaatttgaaatatgataagttttgttccaattctttaatttttttttttttttaaaaaaaaaaatatatttccaagaagaaacagaacctgatcgttcatgaagcttttattttaactaagaaactaccaggttctcaaaaggaaaaaaaattgtcgagatatgtggtctcatcatattatataattgatccttaacgaatctattgtaaaattttcagtgttaacttctttacaaatccatggcagagagcagtagttgttcttacacgtagattattacacttccttgtcagcagaaagaaaaagagaacaatcacaatgacaaagcggaatagaagaagaaaaaaacatgcagttgagcattactttgagaacagctttcgccgtcgccgtcctggcttggctcccaaattggctgcttctcccttaataacctcatctaccaagtccttaaaaatggagcgctcaatatctaagactgctccagaaatgtcaccagaaaagtctgtccaattatctgagcgatgcataacatcctcccacaagatgtttttcaagccatcatcctcagcctctaagctgaagtttatttttttggtttggaatgtttcaatctcaaaacacaactccttgagaagcttttgtgcattgagtgtcttctttgctagtttcttcatccttagccatggttcatatgactcgccagccaatgccaacttctcaacaagaatatcattaacagcgtcgaatatgagctttctgtgaagtttctccttgtctgatttagcattgacagcattgacaaggctgccttcttcttttgattgcaggctgcttgccttggtttgttccaaaacaaagaataactcagggttgatggggtggcccgagcgatggagatgtagtgttgataggccagatccaagatctctgagtaggaggcctgaagccaacaatatctcagaaacatatctgtgatcaggattagtattctcgcaaagtgatgcaatgtagtctgtccttgcttcatcatgactggagttcaaccgtctaagcttctgaactaagttttcaatgttctctaactttttgcgattgatctcagaggtagggccagaccctgtgcttttatcaggcgagctccattgatcttgatctaaggatttcatttcattggactcctcaacttcatcacctgtagaatatcattataaaatgttattcgattcttatattttgcttatcggggaatgctattttctgaatttttaacccaaggcaaatgatattaaacatgcaatgtagaaaaactgacaaacttgaacaaagtccgcttctattctcatattatctcatttcagaaagaagaccactttaagcagctgatgtcaaattcacaagatgaactaaaatgtttaatcaaatttttaactaggatagcacattccagctcgcatgcttcctaagccaatacacagggcaatagcgcaactgcttcgtctggaactacatctgaatcaccagctttgaggattaggacttcctacagaactctactctactcctttttaccccaaagaaataaaataccatattaaaatgagattttttgtttcctacagaactctactctactcctttttaccccaaa

SEQ ID NO: 161963 - DNA, 1831 bp, Cannabis sativa
  modified_base (1796)..(1796): a, c, t, g, unknown or other
ttgagggttgtttctcttacaactgatcattttccccctgaggatactgtttcttttttcattaagaaggagggttcctaagatgttaagaaactcagttcctttttccccacaagtgtggtctcttctattttaaaaatccctgttgaccttactagagaggattgtctcattttgggacatcacccctgtcaattcggcctatcaccttgccaactctaccccttcccttccttcttcttttgataggagtttctttaaaggttggtggaaagctgtctggtccaccaagattcctcctaaaattaagcattttgtttggaatgcttttaatcatctactcccttctggtcttaatctcttcattaaaaaaagtgattgacaatccttattgctccatttggttcaaccacattaataccaattctcattctctcctagggcgttccatagtagcaaaagtttggtctcactctagattttctcacttttttgccactaataaaaattgtgatataaaagagttcctttcgcgaggttttgagtgtcttaacaaacacgaactacctattttttatggtatcatttggggtatttagaatcatcgtaacaattttattttctcaaatcataaatcctctattgtagatgtagatttttgggttgattcttatctttaggaatttcaagcggcccaagcaaagatcatttctctctctcataacagtaatgcacaagctgccaatatgtcccttagcccttctgctgtcatttcgtctcaaggtgctgctctccctggaataggctcctagtgtggatgcgtcaattcgggataaagattgcaaagtttgttttggttctattattcagaaccacaaagagggaagtgattgctggttgttacttgctagttactagttgcctctcccctctcttagcataagcaaaagctctcaacaaggctttaggttggtgcatggcagtctagtttcctgtcagtattatcaactctgactgtcaagttctcattaacaaaatcaagcacaaatggaaggatagatctcatctatcagacattgtttagattgttctttctctttctcatttttccaatgtctccactcgctttgttccaagaatactaaatcaattagctcataatcttgcccaacgagctttgggaactgatttagagattacctggattggttgtgattcaagtttcaatcctagatctctgtaacttgtacttctgtggtattttcttttagttacagatccgttatgttgtaaaaaaaacttatttaagattattcatttaagcctacctgttatttgttaaaaaaaaagcctacaccaattttcaataatttttttttcagaagaatatcaaattattaatgtggcaatttataatttactcccttaaaaaaaattataatttactagttttcgttaaattttctactatcaaaaaacgacatacagttttgtaatctgggtgtaaaaacgacattgtctagtttaagctaaggctaattaggatttctgccccctaaattttgacatgtaccaaatgaggctccttgaatttttaaggtcgttaaaaatactccctgaactattaaaattgttgaatttaaggacttttgtttaattttagtaaaaaaagtcttttatggatgaaagtttaggagacatgatttagtacatgtcaaagttcgagggatataatttggtagacattggagcatgatttagtacataaacaatcactgaaatagtaaaattgaatnaaattagacaaaaatctttaaatccaacaatctca

SEQ ID NO: 161964 - DNA, 5649 bp, Cannabis sativa
ggggggggggtaagtcttggtctttgactctctactttctacatttttttgtaaacttgttcaagccaattgattggtaagtttgacatggtaatagtaatatggtatcagaaataatttgctataattacctttgaaatgtctgccagccactctccgccgacccctaaaacagcttgaattccttgtgccatcctcagggcaccccttggacctgtgtttattgatgtttggactatatcctcaaccagtttaggcaggttctctatactatctgaaaaaaaaagtatgagacttgaaacgagagcataataatataatatacaatttctgaaacccgaacaatatgacttcacattcgaattttcttatttcatatagctcaataagaaaactgagctaagacccagaagccaaagcaggagcaaaacaagtttgaagaacatagagaagtaaatggagtataaaattcagggaaaaaaataagaccttggaagcgtgaggagaaaacatcctgagcttgtgaatagcgagcgaaaaaagtgaaattccttgagttggagcgaaagttgagctgtttcttcgatcttaagggaatccaactgcccatttgacgatgaccatgttggagcagaggcaaacgacctccacctcctcttagtgctgatacaaccgccatagtcagcttcagcttcttctgcttctttctttgtaaatttcaacagagaatgaagaagaaggtcacgagttggatggttggactgaaacgaaacgacagcgtttccttctcataataaacgacatctgagaaagcgtttcgtgtaagagatgatgccacgtagcatcgctagaggcaaatatctggatgtcgtttactgttcaaacaatgaaaacagaagcgacatgtcgtttattctacctatctcgtataaacgacatgtgcctatttcttagtttcacttcaaaactcaaagtacacgaaaatagttgtgtcccgtttctctgcaaactgttatgtggaactgtggtggcgcgtaaatttcacgtttcattctcggctctcagagagtaaccccattcccggctctttgaagtaagatattttcacgttccttttttatttctccttttgaatctttatagtaaaattctgcaatatattacagctgctataaatcgtggtaatgtcattgttcatggtttctttccaatgtgttaaactcctgcgttcttccacagttcaagttttgttttcttaaaattgtgaaatttcttatgtgggtctacttgtaaaccatcttaaattgctttttcacatgtgaattctatgtaaagctttgtatttgatgattacgatatgggttatagttgaattttcatgaaagtgtataattacatatttttttcggctgtagttataatgggaagaaagaagaacaggccgcaacgttctgttgggatagttttgaatagtaatgagactgatgagcagacggaattgggaagaaagagatctttgaagtctggggaggcaaaaaagaatgatgttgaagagccttatttcgttgaagttgatcggtctggttggatttcggacgcccaccttgatatttccgaagttgttttgatgaatttgaattttagagaagggttttctggtcatgaattgagtgcagattttcttagggatgagaagtatttgttaaggttccaattgtgcaatgtaaacaagtgtgttgatcgaataaagttaggccattggcctgttttaccctcaacagatatatttcttgagttaattgagaaacctgccatggaggaagagatgggaacttgctcagtgattttatcagggacttttgatgggtctgatgagggtataactggtcttgttcatttgacaagcttgaagtttatgacattgagaccaattatggaggttgggctgtcaaaggatactgcgtcgctcaggatgagagtggagatgcttgggaatgcttttgatgcttgtgagtcacttcttgataatacaagggagatatggaagaagagtatgatgaatgccatggcttggttgcgtccggaagtggttacttcggaggctcgatacggtgccagaaaatgtgcagaaatggactttgatgtgcatacagagatagcagaagaaaattccaaccctaagaaaagtggaaggtttgatgttgctgggttttatgaagccattaagcctccaaagtgagtatcgggatttttcattgtcatgtgttgatgaggatccattctctcttcccagaattcaatatttattttctctctttcaatcctggagtgaaatccgctggtgtgttttctgtgtagaacagatgcaatgcttgaggaagacttgcctggtttacttcctgagttgaggccgtatcaacgccgggctgcttactggatggtgcaacgagagaaaggaggtttacaaagtaagctgagaaatggagaaagccagtatgtttcccctctatgtatgcctgtgggatttctcaacactcattcaaaaatgttttacaacccattcaggtatgaccttataagggtgtggaagttagtaagacaaatatagagtttggtttcttcttttatgtgctcatgctggtagctttccagggaaagcctccttactcctccctccacccccttgctctatatgtgcacacacacatacatatagaaatataaatatgtatacatgtatgttctaatgcacatgttgatatgctaatcgatcatcttcagtggaaacgtgtcgttgcagcctgaatcatcttcagcatacgtttgtggtggtattcttgctggtaatcttacaacctcacaataattctgattgctagtaatcatgtcgctgtaaatctctaggtgaatgcatttagttgcagtattatgttaagatttccgcttggtaagaaattagatattgctgtagttttactagtatgactctcaaaatggatttttgtaggtataagggaagaattttagtaaatatttctagaactccatactccttttatatatcactccaatgtcatgctagccactcgacatgtgctgtgtgttgacattcattgtatagcaacatcaacaaataatttggacacaagacaagccagaataacaatactgactaaattgacaccactgatctatggaagttcttctatgcctttttttttttattaagttgctgttttactattcttcaaaattgttggctttgtcaacaatcttcgctttggtttaatgattgagctgaaaggtttttgttgtaaatgctcagaaatatcagcactaaaatagattgatagttatccaactgccttgaccatttttttccctggtcactactgtagatgagatgggtttggggaaaactgttgaattgctggcttgcatctttgctcatcgcagtggagcatctgaagacagcctcttacttgatactgaattgcaagctaccaggtgtcttagaagattgaagaaggagcgtgtggagtgtgtatgtggagctgtaagtgaaaattggagatataaaggaatatgggtacagtgtgatgtatgtgatgcatggcaacatggagactgcgttggttattcgtgtagaggtaaaaatgtaaaatccagaggagtttctgatggacaaggaaatcaagagagatcgtctgctgacaagagaaagaagaatgcaaccacaatagttgaaagagacggggagtatacatgtccttcttgttcagaactgatacaagctactgactctcctgtagctagtggtgccactcttatagtgtgccctgctcctatattgccccaatggcatgctgaaatcatacggtaatctcttcgttttctagtatcctgcatttagagatatcacttttaaagactgaatttgactttaatctggcttgatgttaatttggtttggctaatgttcctgaacttccctgaattcatacttttgtatttgctaagatattgacatttttatgccttagcttaaaggatttttattgtcacccaaagtcgcattttctcataaagtgtatcaattacatatgggcaaacattatcgactaacgaaactcttgtgaagcaaaccttttatcttaatgtatgaaaatcacagagacatgaagagaaatgatttatttgggttttctgttaccactttgatgatctctaaaaaagtctaatgaatacttactgctgaaactgaaatctggataaggagtataagtcggttgttacagttctttaccaatttattgatgcctagtttctttaattcatctcctggttgtaaatgctctgtatattattgcttagttacttatagttctttttatactcttattgagtgtgtctgttgtgtgtgtgagtggtgcggggtttaagttcccataatggagtatcttatataaaaagaaaagataagaaataagctattctattcataaattgtttgaggattcagttacttataatatttcttgtaatgtatttgctatgaaactgattagtttgctgttatttgtcaccatagccatacctgcccaggttccttaaaaacttatatctacgaaggagtaagggacacatctctgtcaaataaatctatatttgacatcaatgaacttgtcagtgctgatattgtcttaacaacctatgacacacttaaggaggacctgtcacatgattcagataggcatgaaggggataggcgcatcatgagatttcaaaaaaggttcttccagcgcttgtgacatttttacttaatatttatttcctcaaaatatgcttttagaagaatgtgttagaaataaagtttgtgaggatcttatataacatataaatgtagtgcagaacaatttgatgtaaatatataattcttttgccataaaatagcaaatagttaatgactttctttttgaaaggataaatagttaatgacataattcttacatatatataaatatatttatcttcatatatatacatatatagggagagagagatttgatggatatgaaagttttcaagacactgacagctaatttattgcaggtacccagttattcctacttatttgacaaggatattctggtggcgggtttgtttggatgaggcgcaaatggtggagagtaatgcgacttccgctacagaaatggcattacgcttacctgctaagtaccgctggtgcataacagggactcccatacaacgcaaacttgatgacctatatgggcttcttcggtttcttaaggctagtccttttgatgtttctagatggtggactgaagttatgcgagatccatatcaggtagcagacttcttaggattttcatttattctagaatacagtaataagctttatggagtactgaatcagatatattcttatttacaagtttgttttaaagttgttacatgccaattacttaaacaagctcattttaactgtttatgtctgtcagctttggtctttaaatttatgtttgacaaaaccttgataataacttttaattaactagttggaaattgtttgtcatgtctttgaattgaaccaataagggaatttaaagaagtttttttttttttttt

SEQ ID NO: 161965 - DNA, 3193 bp, Cannabis sativa
gagagagagagagagagatgaggactgtgtgactcggggagctaaaactaacagcaatgagggagatgaagaagaaggatagatagagagaaaaagaagaacaagattatttgggataaaaacggtgcgtacgggtatgtaagaaaagaacttatattcaaaaggtggggtctttcgggaaaagtgaaccccccccacaaataaagaaaaaaagaagagcttccgaacggaatcgtcgtactcaactcgagttcatatattcttctattttaactttactctttcgttccttcaaaaaaaaaaaaaaaactttactctttcgtgattagcaaaaaaaaataaaaactttactctttccagtttcttccatctgtgattctatagcccctatacattttcagattcagtttttgcgagaaagggtcctcaaagctacaaacttttatcaatggcgattattacagaggaagaagaagaagatcaccaggaacccatacaatcaaaaaagaaaagtaccaagccccaagaacccagttcgtcttcaacctcaagcaccaaaacccccaagtcagaacattcaaatccgtttgctttctggttttacttcactattatagtttcggttatcacttcagtctttatctcattcaattctctctcctctcaagatcccaaatcatggtttcttagtttaccagctagtctacgacaacactactcaaagggtcggacaataaaggtccaaacgcatccgaatcagtctccgattgaagttttcaccgttgagcatggtcccgttgcttccgaaaacgttgttctagttcatggattgggtcttagctcgtattcttttcgtgaaactattcgatctttgggtgccaaaggagtccatgctgttgccattgatttacctggaaatgggttttcggataaatcggtgacagaggccggagttggacaaactggggttttagagaggttttgggaagtgtacagtgaaattcaagaaaagggtgtgttttgggctttcgatgagataatttcaactgggcaaattccttatgaagaaatcgaagctcgaatgacttcaaagagaagggttgtgaagccgattgaaatggatccagaagatattggtaaagtattgggacaagtaattgaaacactgggtttagctccagttcatttggttttgcacgattcagctttagggatgagcgcaaattgggttttggagaactcaaagagtgtcagaagtgtcacccttattgataccaatccaagatcaagacccgctttgcctttgtggatgttggacataccagtgattagggaacttttgttggggcttccgtttggatattcatggttgatcaagtctttctgttcgaaagggatctctgccacagatttggaggctcatagagctctcttgagaagtaaggatgccaggagtgcgattgttggaatgggaaagaagactaattacagctttgatatggcatcgtggggtggttcggatgaactgaaaggtgtgcctttgcaagtgctttggtcagacagttggtccgaagaatggactaacgagggaagacgagttgcagattcacttccacaggcaacttttgttacacatccgggtggaaggtggcctcaggtaagatataaatatatatatatatatatatatatatatttcaccataaagtttctccatttataaaactttctcagttagaatgatcggaaactagttttgctacattgtctttcttttggactgcatgtcaaaagtgatttgttttgctttaaaccgatatttatctgacgttatattggcctaacacgagagagttgtgtagatctataaatggctaaacttaagtgtatctaatatttgttgcttgatgaataagattaacatttttatgcctttataaaaactcccataatagatagaaatgtttcttgggtagaagagcatcgatctgtagttctgtactactaaataccacacatatgcctttcccgttgcctaaccagtaagcattagtgtttttgggttttatctccaaattaaagttaacataaataattgtttcgactcagatttctaataggcagtctttctataatttgttgagctattgattggtttatttatgaatgaccttcatatggcacattttactgttagtatccatgtctgctggctctttgacttgctactccatgatatccaaccgttcacaagtgaagctctgatatagtttctaatgagttaaaacttctaatctttttaatcgaaggctgaaataaattcacacatttaacttatgaatgtaggaggatgccgcttataaggtagcccaaagcattgtgcagtttgtgtcttcattacccccaactgtcagaaaaattgaggaagagccaatcccagaacatatccagaaattgcttgatgaagcgaaaaacaatggcgatcatcaccaccatcatcatcatggtcatggtgagcatgatcaccaccatggtaggcatggtcatgaagctggttatatagatgcgtatgggcttgggggtcaaggtcatggtgctcatggatggtagctttgatttcaacttaatgttaattgtaactaggctgcttattagtatttgttgcctgattgaagtaagtttcttaagagagaaagttttagctcttgtgcatttggggctcccattgttgtattttgagtgtagcagtgaactttatagcatggaagttgatattttttattgatctttatcccacgtttcgatctttgacaagtcgagacccactcttaaggacattttggtgaagtctgctaaggattcccgaacctcgtattattattcataaaatgagacaaaacaagttttcttaggtaaaaactagttcgtaattcagttatataggattaaaaaacaacttagagcaaaaaaattagtttctaattaaactcttttaaaagcagcaagatattttttttttttttttggaacaatgaacaaaaaacaagaagtttcattagtactcgtgaaacaatacatacaggcagggggagccaagactagatggtagggggaccaatatcagtcggtgactaaaatttcttgtaggaatgtcaatctgggctattttcgcgggccgggccgggcccccggc

SEQ ID NO: 161966 - DNA, 6676 bp, Cannabis sativa
  modified_base (2368)..(2370): a, c, t, g, unknown or other
agagagagagagagagaaatgatggaggtggttttatctgtggtgataatggttctttatatagaggaaaaggaaagttgctgatgttacactttgatctagaaaagggaaaaaagaaaaagaagctataccaccataggaagaatctaatagaaccactctcaagggtgcccaagtacttatattctactaaccaatcccatacttggtcaatgtgggatcctaacaatacacctccctttagagcccttccgcaacatctctcccacttgagagtgcgtgactctgataccacttgatacaagtacttaagtagaactcactcctaaaagttagaataagaaaggaggatgcctaaatagttatgttttaccaaccaatcccatatagtgttccattgtggaatcctaacaatacacccctctttggagcccttccgcaggtcgcccctttcacaacaccggtcccactcgagagtgtgtgactctataccacttaatacaaccacttgggtagaaatcactctcaaaagttagcctaaaagaggaaagttcccaacttattattttctacttaactagtcacatacttagtcaatgcagaatctaatagaaacactacaaatggaacactatttaggcaaaacttcttgtgatgatgccttgaatcatctaaggtaattcagtccaaaggtataataagattgattgcgtcacactagcatatacagcagcaccaccaaatcaaaaaaacgtgatgcaccatgaattgtttttgtttttccctttattaagttttctttgaattagtgcaccattgatttcttttttatatagataaagtgtttgtccacttccatttgatattccaagatgagtcacttttttcaagcccttggagtcttctcttgtcctcattgttattcctcattcttgtctagtctacacactcttatatgatatatcattttcaattctctaccactacttgataaaagttttgaatgacagataggatagttactactgctgcaaatgttctattggctcaactcaaccaagtttttgcatttcaaatgcttccattttgaatggtcaagaattttcctgtactgaaatagttgaacattctgttggttgtgccttaggaagcaacatcaagcatgaaataattattaggcaacaataaaataaaaaaataaaaaaaaatgttttattattatttactttcagagtgctttctttacaaggtttttataataattaactagtgtaggtgtttttggaggctactccactaagaaatatataattttttttttaagtaagaccttttgaaatgctcaagctgttttgtgttcatatatgacttttatttataaggaggaaatgtattaataaaatctcttgcttattcaattagtcacatagaatcttctcaataattttgataaaaagtgtaacaaaaattaattaaaatacttagcataagtggattaagatataaagatctttcattaattgtttgtatatacctatatatatatatttatatgcttattattaatatatatatatatgatgtttccaatagctgaatacaaaaaatgacaaaaggcctatgcatgttatgatatgccaagatccttttaaagagacttttttgtgcttatttatttatataggttttgtaacaaaaattaaataagagggcaaataaatcaataattaatataatgaagaccattgtatttgtagtggtattctttggtagaagaacctatactagattcttattggagacaaagaaaaccccataaaatttagtttgttgctcaatttttttcttctcaattaacaccatgattactatactaatcaactttagataatattaccaacagctttagacaaatcggtttctagctttgtctttttatagtggaagcacttgatagttttatccactgtcattacttttatttttctttcttgtctgaagaaagaagtgagacaaaaaataattaggaaagaacaaaccaataatcccctggtggattagctatgaaccccataattagccactaagagaagcaggatcatcatgaataatgaaaatcggcagtactttttttttttttgccctttaaacaaagtaataaatagaatttgtcctcctcgaattatgacttttatagaagactaattaggatttttaccccttaaactttgacatgtaccaaattatgccccctaaatttttaaggtcgttaaaaaatgctccgtgaactattgagattgttggatttaaggactttgtttaattttagtaaaaaaagtctaacattgatgaaagttcagggggcatnnnttagtatatgtcaaagttcgagggcatgatttagtagatatcaaattttaaggagcatagtttagtacataaacaattactgaaatagtaaaattaaatgaaattaaacaaaagtcctaaaatccaataatctcaatagttcaaggggaatttttaacgtccaaaaaagttcagggggcatgatttggtataaggaataaaaatcctaattaacttttatagaattttactcttaacttttttttgttgcaaaatgaactataaaaattattgcaaatattctctctctagttacatgttaactaataactatttcttcaaataatttgttgatttagcactaacgtgatataaatctgatttagttgaagtgttcgacaataaaaaaaatatataaataacaatttaatgataaattatgtgaatatgtatatgcattcttacactatgtttgataaaaaggggggagagatgggtggatagagagaagtggaaggagagtgatggaagaatattcaatctcttgtttagcaagagggtatgagagatcaaatcttaaaaaattattaccttcaaatttaggagaattgtaaaaaagacaaaataaaatttgtaaaatataataattatccattaaaagtaataaatatttatgttaaaatggagaattttataattttattaattaatttttttccacctttcccacctcaaacacaatagagatcaacaatcatcttcatacctcttactctccatcctctctaacttttgcatccatcctactttctcttattcctatcaaacataagagagataatatttatacgtttaatgctgataaattagattttaagtaggttaaagttgttaaatagacacttgtgttacaactatgactgtaactcatggccacgtaaacaattcttaatatataaataaataaattcaagaggcaaaaatgtagtaggatcatagttcatagggaaaaaaaaatcctttttaattcataaatcattagctgatttatagagccaaataggcattactgaagctatgaaacattccctcctttgtgtgatatgacatgttgttatgctttgatttagttgtacataaataaagtcatttgagacttttgccggatctttaatcctagatatgttttatatgtatggcactttctagcatttggggtaaccaaggggggttgtacaaacaaagggtcataaatgaagagtgtatggctgagcagattttaagtattggctccaccattaaccctccactttgttgtgttaatctgagtaaatttgcattattagctgtaatgtaatgatggttttagacagtcagcaaagcatttcaactggttttatgtttgtccaaaaccaaaaaactatccttcttagacatcttatgggtagatccaatgttaaagaaccttccccaccttcacaaatgagactttgtaagacacaatgtcccttgtcatgcttcacaaagtgctgagattagcacaatagcatgtgcttctttaccatttttgacacacttggcttattactgacctaatgtgttaaaaaggaaaattttgtatggaccaaacttataagcttggaacataaaacagcaacattctttcctcttctgatgatttccaaaggattccaactacaatcttcaattcttatggcccgccattatactttgtaactactaaaaacttccatttcaaatatgaactactaaaatatattatttttatatgtaattactaactattttatcgaacaaggcattaggaattcatacaatgattatttcacatccaaacacaccttatattaataccatcctagtaattgcacttagtaattttcaaacacacctttaatattctaccaagttgaacccaaaagagatactcaacagatcagcctgtgatttgttcccacaatattgatgtttgagtctctcttgaatacttatatagtaattgttatagttttatgttcttaaaattaaaattatgtagggtgaggcaattaaaaaacaaaaatatacattctacatagttgttatctcaccaaattatacatattttcaattgattgactgagtctattgataattgaattaaactttagtgaaaagaaaacttactgttgtcttaacattcactcttcttcattcacaagaaccggtttttctcttcctttttgcgaaaatctctcactcgtaactgttaaaagcttgttaagcgacattcggtcgcccatagtcttccttttcaattcatatctggccttaattctatcatcgaatttgtaaccaaggaatgcagggaaagccaacaactcttcgatatctcggcccatctcctctattaagtactccatcttcttctccaaagaatcatagctatattgcagtatctgaggttgcttcttgctcatagcaaagatgtcttcataactaaatccatagttcaagaatagcccgactactttttgcatattcaagcaacttgttctagttatagaccccattacgattgtcagatcttttgttctatgtctatatccaatctttactagcaaaactagtttaaaagcaatgttcttctcatatgaaaggctaataaaggtaggagctttaagcaagaatctaaagatctccctcgaattcagtccacattgtttgagaagctctattctaggctgcaatttcctctccctacttgcactaaacacattaggataaacaacaacaatcttgaatatttcctcatcagttaaaccagcaaaagacctgaaaaacacaacatgatcttccatatgtttcgcgctgtaactcaaaatcgcgggaagcctactcaaaactgtccctacaccatcctcatctcctccagctagctccctaagaaactcaattcttggtataagctgcctctcaagatcataattcaaaatctttggacgttttacaatcaaatctatgccaccataatggcttaagtaagcaatagttttatcaatatcttcaattggcctaacacataatgccttagataaactcaaattgttgagaacattataaaggttttctcttggaactcctctttgaagtagaagattaaccttttgatcaaaacccatcaagtacaatggggatgtagttgcaaaaagaatctctaactgtgaagtctcaatctttccttccaaatcattgagaacaaaacttaagaacttaccaacttcttcagatgttaataaagttggtcttttagtgattaaggagcagagtgaaaacccatcaattccaactgattttaaactaaatactcttgcttggatggaatccatagatgtcaatgctagagctgaattcttgagcaaaagtacttcagtttcatcctcgttaagacccacttcccgaaagaatgagaacaacattcctgaagtaaaacaaaaccaatgaaaaaacaatatgagtttaaagattgagtttttatttttcattaaaagactgccaagtgtttgtgaaaatgattgttagaactactcactcatatcagtgtgaatgctcgaagttgatacaacacaactgcattggaaaagttcccatttagtgggtggaaaacacacttgtgttaatggcggtttcagttgaaattttgggggtttactgatggaaaaacaacactcttcattatgggaaatagtgtatgaagataatgagaaacgacaaggtaatgatgaaggttttaatgggtctagaaaaagagaaccaaatggatagaaagaaggaaatggatgtttggacaaagcaagtaaagccaccatttttgtgtctgcttagttaaactgtagaccacattcaaggcgcgggtgttttcaacttcgaaacctcttggagtaacgattttggttcagaatttagatgatagagtctagtctagtgaagtatgcgagaattgataataatgggctttttaacacaactcttcagtccagctagtaaaatgggcctctttcagatattgggtttggcccaacggtttttttatatatttttttcattattatataaaaatataaaaaaaaaaataggtaaaaataataagaaaataatatttaaataacaacaagataaaaaaaatatacaaataataaaaaattaacgataaaataacaatagtacaacaaaaatacatcaaaaacttatattttatgtaaataaaatagggcaatttacactaatgtatacattatataattttattacaatatatgtgcagaat

SEQ ID NO: 161967 - DNA, 2521 bp, Cannabis sativa
ccaatagtgtaccccaaaaatctagcaggtctagccactcgcatcttcaaccccattcacctttgaagattcctcttttattctccagattgcttccacttcatcagtcctaaatcgctgagtaaatgttgattcctccagtggggttgatgcgccatgagcataagccagaagaccagtgtaagcaatcattgctccattatcaatgcaatacctatcatcagtagcaaacaactttccaccgcgctctgagcacattattctcatcatttcctgcaatctttcattgcagcctacaccgccaacaataagaacatcttttgtgtcacagtgagccattgcccgctcagtgatctccacgagcattgcaaatagtgtttcctgcaacatatcataactttgtgtataaaagtaataggacaatctagtaacggtttcgtttaacttagattttggtgtgcattagaatatttttcaagtggaattctttactaatatagcatttttgtattgttaagtgcttgctaatataagtaatcattgcgaaaagacatatggaaggctcacctgcaaagagtagcacaaatctgcaggggtgcactcgttgtttttcagtttctcctcagcagttgcttcaataaagcttaaaatcccactaaaagaaacatccattcctttgacaacatagggaaggtctataaattgttctcctttctttgcaagctagatgagaaaaataaaacaaatgcatgtactacagtcaagaaaacactttctgacacagtacataagccaacacaaacaataagctaatttagtagacaggacctgtttggaaactaccaataccgattaaaaaactacgatatttatacgatcttcactcatccactcattactgatgataccatgttaccacaaacaataaggaaagcacacacacacaacacacttgcatatacataaacatcatgaaatgtcttcaaataataccatgttaaacacagcgaaagaggaaaaagtaaaaacagatatctatcacgttatgttcctcacgtaagtttgaactcattaacgtacctgctcaatgttgtatccaggacttggatcattagagagagttaaaaccctagcaaagcgatccaagcaattcccaacagcaatatcaatagtctctccaaagattcgataccgaccttcactatatgcaattacttgtgtattcccaccactaacatataagactacaggatcatctgccccagtcacaatccttcccatctcaatatgagcaacacagtgattaacagcaacaatgggcttcttccacaattgtgaaagaacccgaacaacaattgcagaaacttgcagtggtgctcccatgccaggacccttggtatagcagagacaatcaatgtcatctggggttatttcagcagttttcaaagcagccttgataagcggaagaacatgctggagatgatgttgggcagtctctcgaggaaggaatccgtggccaggtggggtaatgtaagtgtggcgaggatttgatagaatggttccatctaaggttacaactccaacaccaatcttgttggcggaaccctcaaaaccaagggccatcattttcttcatttttcacaaagactatatggcaaaggcaaaccctattattcaaaatcataacattcaatttgactacatgaggaaaacaagaaatcaaataaaagtcaaacctcataacatatcacttcccaattcccatgctagcttttggaaaataatccataagaaatctaaggctttattaatttcaaacaaagactatttttgtcttatttatttcttatacttctgtgattacagattggtgcggtttaaataagaaaaacaaaagcagacataattcataagctaaatttatggaatcataagcataataataaagtcaagtattgtcattagaacattattacaaacacatggtgggcagagagagagcaggactgccataaaaataaaaacaaaatcgcccaagtcactgagaatcgaattagaaaatatgaaatgcgaaagttgcttaaagctagcgttttggtacccatatcatatgcagagattttgttttggaaagatttttgcaaggttagcatcagtaattggtagttaaagtagacgattttactaacctcaatgtggcgggggaagggagcagccgcacttgggagatagactgatagaggctcaagaaagtgttttttcttattttgctagaagaggctcaagaaattgttagggggagaaatagcatgtttaaaagggtatttttcaaaatttaacccttctttttttatttattgccttatctcctagtttatcggaaatgtactttttggtttctacattaattttaatggaatatagttaattttataatattataatatatttaaaaataaaaattatatagatattttatataaaaatatttaatttttatttaaaatacttaaaatattat

SEQ ID NO: 161968 - DNA, 1442 bp, Cannabis sativa
  modified_base (1291)..(1306): a, c, t, g, unknown or other
  modified_base (1380)..(1402): a, c, t, g, unknown or other
aaaatcatctttttggtagtgttttggtgtagatatataagctttttaagaagttcttgctttgttggtaggattaagatgtgttgaagatgttttatttttagacattaaaattttattatttattcttgggacatctctctcatgtgtcataattttattgttgcagctcacaaattgattaaacatgcctttagataatgagttttattaaataaaagaaattcttcttgaagaaactctgtgataatagagttttgaacaaaagaagaaaacgaaagagaagaagagaaatggacaagaacaagatgaaaatagactgctcaatccaactgagattggcttcgatctttatttataatcaattaacagattacaatgcaagctagctgaagagagaagacaactagatttaacagaaaacagttacaatagaaaaactaacaactgaaaagcctaactgtctaactaactattgtctgcttatattctaacatcctccctcaaattatacatgtctggaccatgtatcaacttgtccttgaaatgtaaaaatgaagcaacagggagtggcttggtgaagatatcaacaagttgatgtgaggaatcaacatatctaacatctatctgttgagctaatacattgtctctgacaaaatgaagatcaacttcaatgtgtttcgtgcgagcataaaatataggattggaagccagagactgctcctaaattatcacaccataatattggaatttgagagaggtgaacattaattccagctaacagggactgaagccagatgatctcagttgtggctaaggccagtgcacgatattctaattttgtacttgatctagtcactactgtttgcttctttgaacaccaactgaccaagtttcctccaaaatacaaccagtagccaaatgttaattttctgccatcatacaaccatgcccattcaacattagtgaatccttgtaagtcaagtctcgaggaagctttgaattgtaaaccagttctttgtgtgccagaaagatatctaagaattcttttacatgcattctagtgttctaaggtaggagtttcttggaatcgactcagacaattggcaatagggttgttcgcgatgcgggtggtgcagttcttgactattttttcaaaccaacccgcacatgtatttttttttaatttctcaaactgcacccgcaccgtaaaactaaaaaaccgctaaagctgcgccgcaaaaaatggtgcggtgcagtttctgcagtttgtgttgggaattattttacnnnnnnnnnnnnnnnntaacatgtatgtttgattataattctataaatttaacaccttaaatatgattatcctgttggaaattattttannnnnnnnnnnnnnnnnnnnnnngtatgttttattaacaatctaatatgaattctaaaacaat

SEQ ID NO: 161969 - DNA, 5302 bp, Cannabis sativa
gtttggcggtcggttgtgattggaccggttggttgtcattgaattgaatcgatttatgcacacccctatctgtttgtattaagaattatttttaagttggttatataaaaaaaaattatcaaaaattaactcaaacctcagagtcttatttttactattttaaaaaatacaggaactattttactatttaataaaataaataatccaaaatagtatttaccctaataaaaataaaaaatattattcaaactcaataatcatttgtaagtgtgtttagttctaaattttcactgcatttgaagtaggtagcaatatgttgaagatgaaattttgtatgcaatatgaagtgaggaatgatgtccaagatttgactttgtgaattatctaatttcaaaagttaaatcatatatgttttgaagtacaaatgacctcaattgttaaattatagtgttgtttatataatatgtaatctgtgtttcaaactttaataaattcggatcaaataatcataaaaaataaaaattaaactaaaataatcttctaaataccaaaacaaataaaaattttaccaaaaaggactttttaagaagactactacataaatttccaacattcaatatatttatcatctcaactattcattattcaaattttagaaaatttcaaataattatcatgattagcttttacctttattgctataatacccaaatactctattttgttgatcttatgggacttcaattatcataaaagttacaacttcacacccttaaaaatctacaagtcaaagggaacaactatataaaaaaaatatacatatgtataatgttacaaatgattaaagggaaaatataggaaaattataagccaattgaagcaaaattcaatgtgcttcaattttcattactttattgttactgttttaccttacaataatttaactcttttagtttcaaactttatttataacccttttacttactctttaacaagatgatccccatgacttgttcttatcaccattaagcctccaaatactgattaaaccgaacccgagaattgtctagttaacgcctttgcctgtaaaatcgaaacaaattgttgagtttaagtattagctcattcattaacaaaacaatgaaaatcaagtaattctcattcaccatatggttgaatacaaaacttgtaagaacttaatttctcaaaaacctttcgcatttttattgaactttttctgtaagtaaacttgtgaatttgttgttgataagtgtaaatcaactggcaaataaataaaactctttctggttcaattttcgatgcgggttttcgggctaattggatttctccccatatagcagaaagagtggttttttagcaaaatggtgagaacggtgtgtgtgttgttcccgattaatcgaaaagcaatagagttcctaagttttagttgaattcagcatttcaatatcaccaagtttagcctacttcctcgaagactcaaaaattcagaagtaagctatgtcgaaagcccactaccataaacttcttagacagattctagatggctaaatcgagtgaaacaaatttataacttatacaagaaatctgatctaaaaccaaactattcttgacctcttgcagttattttctgcaccaaaaaggtacatactttgccccgaattctttacaccgacgagaaaaggaagcttggtaattcactgcattatgtatgaaaatataatcatacataactatgcacgaaagaaagaacaatacatatcctgacattatacaataaaaggggtgaacctctataatctaagggaccaaatctgaaagaaagcttgattaaccaatagttaaacttggcggaactatgagtaataacaagaactagctgaagaagggtattcttgcaatgctagattatgtttgtgaatcttctctattgtgtgtgccaagttgtaattcctaattgacttcttcgattactagctgactaagacaaagaatattctgcgtgttaacttgggattggtgtacgggaattcagcgaaacaactagaaaggagagagagaagttggttagctatcaagtctgttggaaaatatcagagcggtggctcggtgggtggtagagactaggctctttgaataactagggtgcttgtaattctctgattcagtccattgaatcgctctaaacaaaatgtctacgcgtagctataagacaaaggttgtaatttcgaagctatagatgatatgaaaaaaccgatactcaattgaatttaggtatggcattacttgttctataaccactgaacctaaaatcagtttcaagtatatatgatttatcataggtcatattcttatagctaatgcaatttatctacttaatgaagaaaattcttctaacaaaaatctcaaaaagttcatattcatattatatgaattatgtaataagatttcataaagggaatgtgcaaacctttgtgaagaatacaaacaacttgaggaattcgggaagccagcgaaaacatttgagtaagacttggtcaaatacgaaaaatttgcagttggaggaagagcatgcactttttcgccttttttcaaaagctcttgcaaattaagcctttgcagggttaagacagccttggtctctttccaaatgaaggcaagatgaccattttcgaatacaaagagagaaccgggtttggatcctggatacctaaaaccatatccattcgcaatgccctcccccgaaaaagcatgtttcacaaccagaggaagtgaatcagcatcaacatcccatggaaaaggatctggcgaaacatcatcaacattcaccataaacattgctgagccatttgggtgcagaacataatgagttccttccaatattttggttgcaatgagaagcctttgtccttgagactcctcgtacgaaagcaaaagaaagaacaaagctttcccaggtttgtcctcggtaggttttccgggtggccagccaaaagttcctccccaaagacctgcatactcttcgtcagcagttggaatgcgcaatggcaatttgtaaagagcataccggctgtcatgcatattcggccacgctctatacgatgataacttcattgcagaggcagctaatgtcagcccaattgtatctcctgatctcagaaattcagaaagctgagcatgcttactatcactactcgaagaaccattctttgaagctgcaagaccgccattagacttcccgagaatctgattaatgctatcccgaaaatacctgccaagagttttcttcttattgctttgtgagtggccatcatcttcacttgtagaataatgaagaccactcgatcgttcaagagtcttcttgatatcactcaattccaactgggttggatcaggtggcaattgggcacttaacttccaatcaacatgagttcccccgagtttatgcatttgaaccagtaccgatcttcgttcacttaacagcgccatatctttagaaacactatcctcatcagttctcatcgaaggaaacatcggcccaattgctgaatcaggcaccttaagacgaacttgacccgtaataacctcaagcaaacttcttctatcactaaaacccaaacggctaaaagccacagaagcttcaaactgactatacaccctttgtgatcttgacaatccactacttgttctaccaacatgtcttttcgaaacatccttgtccgaataatgaacaaaactcctactttgcaacaatctaacctcgtttctgcgcggtctagtctcaacctcaagcaacaacacattgcaatgcaaatcgatagacttaactgaaccgggatacaaataatcactccctttctccctaccatgtaagtaaaaagcagtagaaccatcaaaatcacaaaaaatctcaaacacaggagcccataagataggaccatcttcaatccctaaaggcccaagttcctgaggtataattctacacccaacaacagaaacaaaaccaggcatgacataaaccacatttccaagctcaggattctgatgaacccaaattcccatcaagggtttaacagtaaagagaaaactacaaagtgctttataagatgacacagcatttctccattgaatgagctcatgatgtggcacaattccaaccatatcacactgtgtaagccagattttctcagaggccacaagatcatgtagactacggcaacaaagagcaagattacatatatctctaggtgaaagtgaccgagtaacaattgttaatacatcatcaggcaaagccacaagcaaagtcgatccaaagggttctaaagacataattaattaaatgggttttcaaatctttggtatgttgttcataaaaatctaaacttcaaacatttcccaattctaaagcttaaaactttggaatcaaatcaactaaatgaaacaaccccatcaagatattataatcaaagattcaaacctgaaaccccaaatgggtttttctcgaattctagcctcccaactgaatcaaccatgaaattccttgaaggcccaattgattgaatggccaaattgaaaagggtttgtcatagaattcccaaactctattcaattattaagataggactgtgtatctgaatgaggtcaagtgagtgagtcataaaaatcaagtctttggattaattattgatttttgatattttatttaatagatttttgggtgtttcgtatgtattgaaagaggaagaataagaaaagtcttgtgggttaagctttggtatattgattgtgattattgacattttaatgtcacttttatgggctcctcttcttaattgtgtgacaactagccaaccaatattgaaataaggtataaagtgtcaaaattcaaattggcaaagaccaaaacactcactccaatgccttaaaaagaataaatgaactttgatttcaaattctaacaacactcaactatgatgcttttttagtgaaagaaaacaattatacattatatgatactttttgttttgtctttaatgatacagcacaatattatctaagaactatttaagaataatttttaatttgttaaaaaaaattaaatcttaatttaagttaattataaataagaataagatctaaattgtaattagtaatatattttctaagtctcgtattaaaaaaagtataccctttataatcattaaaaaactcattttaattaaaaataattttttaaggggcaattgttatacttgaaattcggtaagcacatcagagaaagaca

SEQ ID NO: 161970 - DNA, 1691 bp, Cannabis sativa
tggcggtggtggtagaggcggcagaggcggtggtgatggcggttgttttaagtgcggtgaaagtggtcacatggccagggattgcttccagggaggatcaagcggtggtggaggaggaaggtacggcggtggcggcggtggtagcggtggtggtggcggtggaaactgcttcaattgtggtgggactggacattttgctcgggaatgcccaaacaaccctcgttgagtggaaaattttcccccaaaaaggaagaaaaaagctttctttttgttgatggtttgtttgttgactcttttgttcttagggttagattgtttggaacaatggttttcttttttcttattttctttgttgggtttggtttgaataggtagtttatttatgatctaatattttctgggaaattattattgttggtattttctttcttattgtttatccaaactagtagtaaaatgtatggtcttggtattttgactgagctagtagctagctactcagtactcaccccattttgctcaattttcaagtgtgtatatatacacatcattaaggtgtttgatttagtcaactaattatctttcttcttcttctttacatatgttaatgtgttattttgatttgtttgtacgtgtttgggagattcaagcttcttgtggacttgttttccctggtcaacttagtcaacatgccatggcttggacttttatcgaacagtttggcttcatattgtaattattgtccttttactggataatgtcgttttgtgaaatgatgtcgttttaacgggggtaaaatattggtgggtgtagtaacatttggtcaattatggattatctggtaaataaatgaaggagcaacaataatactataatatatattctatccacttaacattgttattggggtcaaaaaaaaagaagacaaagttgttaaaatcatacaactctatgtatatttatttaataagaggagagatcatcagaaatcatatccaagtagaaaccaaatcgaaaaaaaactgtggagtgaagtgtagaaagaaagaaactcactgccacattgcagtttagtttgattcagtccattggctatgttaattttaatggagtcaacaacaatagaagcatataaaaaacgctccatcaacatttagatgaattttacccaattccatatcttagtaatagaatgagaatcttcaataggaatgagaccctatagagaagctaatgcatatcccgggcagaaggaatcaacaatggaagtggattagagttagacagaatgctccactatagcacttttgaacttttgatgttgatgggttctgctatcccatagcttattccacatgacatgacagaatgaagtctcttttaagagcttgaaataagtaagcggatttggtggtaaattttccattccattcttttatccaaactcaataatctctcccttgtcctcgagcctttcttcctctcaacatgcctctttttacacatttactttactctttttttacattttttactttttgacaaactcaataacttctttttttctaaaaaaaaagaataattattttttttaccccttgtacttatgacactatactattatgccccttaatctattcagcttgttacaaatagtccttgtataattttatatgcatacatttagtcct

SEQ ID NO: 161971 - DNA, 7515 bp, Cannabis sativa
  modified_base (98)..(101): a, c, t, g, unknown or other
ttgcaatagttattttgtatatttcactacgtgaacacacatacatatatattgggacatgattttgttccgtgattgtactttcacggaatgtattnnnngatgtacgacagccgttagatgaaggagttatttgatctgagggctgagattgatctaggggtaactggggttaaaaaatagttatgtaccctgacactcatctaatgtaccctgagacccatctaatgtaccacgaaatacattccgtgaaagtacatcacgggacaaaatcgtgtccctatctttgtaaccataaaaatgaaggaggtatgagtttcatacgtggtcttcacctttataatcaagttgtacttgctaaacaggcccgcttatacaatttccccaactctctagcggctttgtattcttaaaggcttttatcatagttatagagagtttgtatacagggtaatctcaagcttcagcaagatcttaggcgaagcttaaaaaaaccttgagcgaaaattgaaatagacatttttgacaaaattattaattatatcataatttattgaaaattatttcaattaattaaacaacacattaattaattaaattcttattattaatatttttattttttatattcattttatattattcttcacatgttttattaataatcatcacactggaatgatctcgctagtcttggtcacttgaacctcccttgattaattcttgaggacttcaatatcatgtttcactaccaaggtagatgtggggtagacaaatcactgctagcaagattgttgatgctccaaattggctagcctcaagtggatgagtggatgagtgcagatacttggattctaagttcacatggactaataaacatgagaagggaaactgcatttactccaaacttgatagggtatttactaataagatttggatggataattttctcaattaaagtaatttttaattgggatgctatgatcataacttctaccttatcaagcaacatgatattggcaaatttggtacaaagtcttttcgtttcttcaatcactagatgttgcacaaccaatacaaagagctagttttcaaaaacttgtctaaaccagttaatcaaaaaggtctgtggctcgtgggggatattcaacaaacttttcagactaaaacatatattgaaaagacttaacaggaaggaaatgggtgatatttctgcaaagtactatgctgccaaggaaagttttgctattgctcagagagatcttgcgaatgacccttgtaatgacttgtccaagctaagaaactaagcataagaggtttaccttgccaaacagagattctcaagctacctgtaacaaaccaataaagctcacaaattttccatgccactttgaagaaaaggaaaaagagaaaatcctataatctcttttgtacttaatggaaatcaggttgtagatgactataataaagtcgtggatcattttctcaaccactttcgtaatttcatgggaaaaaaaaaagtattgctactcaaggtatcgatctccccatacttgaatttggtgctaaattgaatttatagcagcatgttaatcttatccgtccattttctaaagctgataaaatgaccatttttcttattcccaaatgtgacaatctaaattttgttgctaattatcgaccgattgcttgttgcaatatgctttataaatgcattttaaaaataatttgttcaaaactgtctgaagtcttacctatcttgattcatagcaaccaaggtgctttcatcaagaatagattgttggctcatactattcttaatttttcaatatttacttaaaggttacactcgaaaaaatatctcggctaggtgcataatgaagattgacttcaataaagcatacgacatagtagactggcaatttattttttatctcctaaagggcctctgctttttatcttgtttcatcaatttggtgctagtttgtttgagggaaacttcttatactcttatgattaatggtcgtttacaagactcctttaagggagagaaaagtcttccaaggagtttcagtgtctccacttttatttgtgttgattatggattacttgactagacttctgcaccaagcttcttagaccaaaggttttggctttcacccaatatgtaagaccttgaaactcactaattttttgtttaagatgatttagtgatttttcgcaagggaaatgaaaaatcggttcagcttattcaatcagctttcaaaaaaatttgtgaagctactggtccttgctgctaataaatcaaaatctcacatctatttttgtggtgtcaatgagacttgtaaagggaagctcatgagtattgttcagatggaagaaggtacatttccctttaaatatctaggggttcacctaagacctaccaaatgaaaggcctctaattgtggagtccttcttggtaaaattcataaaaatcttcataattgggctagcagaaactttttttttttttttttttgcagggagagctcttctcatttatactattttattggaaatcataaacttttgaatgggtatgggtatctttattttacctcaaaaaattgtggctgtcatcgataaatattgcagggattttctttgggacacaaatgatactcgtagcaaggttcaccttgcttcttgggagaaattttgacttcccaaaaagtatggtggcattcacggtcggtcctgaaatttagtggaccataaaaaataaatttatttttagagccttatttagaaaaaaaaaatatggggcttttttcaaaatcattaaaaaaaatatgtgtaattttaaaaggggagaatattcttttaggctcctggactaggtgggccctaggcacaaacctagcccacctattcctagggctaggattggtggcattggctttagagaaagtaagaagttgaataatattgctatgttggctaagtttctttgggtcatttcgaccaagcaagacaatctttgagtaaaatagattaattctatctacctcaaagatcaagatatatggttagttcttctgaaaaatgattacagctggtattttaagaagcttatgaagcttagaaatatcatagacaaattagccttgctttgttctaggatttaggggaaatttagagtcagaaatttttctcttcctaatcctgctaaaaaagttaactgtgagttgtgttttttgggggctgctttgatttaacagtccgattttgtactgattgaataaaatattttcctttgtttagaaaataaaaattaaaaccatattaaatttaattttattattattatttaaattaataattaggtaatagtaattttaatacaattttaaataaatatatattgtgttactagtaataattagtagtgtattatatatagtggatcaataagaaccaaataatatcttaagtgtgaattgttgcccaatatgcatgatatatatgggtcccaaaagttctataccgaggtctatcgatttatggacttaattaatcaatatataaacagtcttttccactaaattaatcatcgcatttgcataataaaaccaacttgttggtccatatattcatatattaattaatggagttcgatttaacaactgacataccaataatggtcgtgttttgtagctagcactcatcttaattggcatggtttgtcataataatataaagatccatgtgaggggatttgaagctcagtacgaagattttgtgatccatatgtaaactataaactatagagactaaattataattaagtatatataaaagttgtaatattttctatgctactaactatatataataaactggagactatatcaacagtacatgatgaaattttctatattgctattctgtaattacaatttgtgtaaatgcttgacttgatgagtacaattcttttaagatatcattaatttcgttaatctcatttaattatatgctatatgctgtcatattccctaattgtatttgattacataaatccatttgaataaccttttgaaaaaaaaatgcaacaaattaattaagacacaaaataatatgttatgaatggaaaggggttttattttatttttaagtaatgataaatatatacaagtactcgtttatgaatgggttgagtataattataagtgcttccttatttcgtgtttgacctaagaataatccaaagcctattgactccactttaagaacatcgaaagaagtccatttcttgaagagaatcatacaaaaaagtttagaccatgttggtattccagatgcaattttcatggtccaaaataataatagtttgacactgcgtacatgtacgtacgtaagccaaaccaattatataattatatatataatatatatgtatttttatatattcgatttctctttgataacttcttaattagatcctcccttttgatcctccatttccaagctcctttcgctttctcttataggcatgttaattaggctatatatatttaaagtacgtatcccaaaatcggttgttaatggctttcacaaaaaataaataattaaataaatattattttaaattcaatattttacaaaaattattaattcgatcttttgttttactaaataataaattagaccccctatattttttaaaatagtagaaaatactattcttagttgatttttttatcaaaataaaacaaaatattaataatctgagatctagatgtgttacgacaagactgcttatatttttttacctctatttatgctaaaaattgtctttaagttggttattatttaccgagatttttaaaaattgattgtaaaataattgacttgaaaaagaaataaattaaagaagaagaaactgtgatttttatgtggttaaggcgttaataagccttatgagtcaatattattgagctagaaaagtttcaaagtatctttattacaagtatttttccctagttgaagaaccctaattttcagctcttagtagctataaaatgatttctcaatcgatccctttgcatgaagagatcatgtgagtgaactcggacccggtagggcttagaggtgtcaactagactcactgatggggtttaatataatatatatatgtatatatttaatttggaccaattgggtgatgcccattcacgagaaaatggtcgtccatacaagtggggatcgattatgatgccacatgtcgtgcattgctgtgttggtactaagaatgtcagagaatatggcattgaacaaaaataaggttgccttttggtggtatgtgcactccctcggtctgacatatgggataaatccatgacatggtggggccctgtgtctggagggtgccatatccggaagcttccaaatgtcttctcaattgattgtatctggattatcccatgagggtatctggatagatcttgatggacctttcgccttctaagccaaacaacatttcctggattgaagcggtccgaccttgtcgtgtctgttaagctggaattacatccaggttcggaatgggcttactttaactgatcttgggctttggaaaatgcatatatcatctatccggaaacacggatgacagttatattaaaaaaaatggctaaaaattaaggtcatgacactattttgtaccatttcagaatatacaaagtctaattcatcatttaacaaaacagtttgtccgattgataacgtttataaaacaaagggttaaaaataatattaacccaaaagaaaagggataatttcaaaaaaaaaaaaaaaatacaaaaacaacaataaaattacaaatatgcaattgtatggaatttcaaacacttttactgtttttaagattttatttacctaaaatacagttttttatgtattattatgttgtactcttgttatttcgttgttgattttttgttatttgtatattattttttatgttattttgatgtaatttttttgttacttttatgtaattttcttattgttttctaatatttttgtagaataccgtaaaatatatatataaaaaattgaacataaatatgtaaatattttacttaaaataacagtttatataattttccaaaaaaatagtttttaatttattaaaagaaaaatcattttttatataataaagcaaatataaagccaaaatgtataaacatagcttagtgattttacacttatcctcacaaaaaggagatcctaagttgtacttgttttgctttcagttgagcttgtcctaactattgtcacgctattatgtttattatgttgaatctcgatctatataaaagagacagagctcaactctaccgagtgaggcacttttatttctctcatctcattttttattttacttctctaaatttcttcatggtatcagagctgtaatgacgtcgaatttagcaaattctttaaacaatggaggtcaagttgaagggtatgatgctcctccgattgctactcaacctgcttaagaggctctacaagtaagcttttccaataataatcttctttcaataaatctaattctagatagatcaaactatactatttggagatctctcatcttggctgatgttagatctcttagaacaattctcaaccagctcaaactcttgaagtaacattccaaatcctacttaccttcaataattaaaatttgatcagttttttgtgcactaaatgatgaattttgtgatggaatatgtgatcaattgtcaaacctcatatgagatttggaccacctttgcataacactttctgccaagatcaagagcaagagttatgcaagttcaaggacttcttcaagctacaaaaaaaaaaagaaaaaaaggatcatcttcgattaaaaaatacattttgaaaataaaatttttgtttagtatattcttggaggactaggacaatatgaagttgtcattgtcaatttaacattgcatgagaatccgttgagtccataaacttcacataaatcaattcaccaccactactctcttgaatgttcaggccaattttgctaatctttccttgaataatagtaatcgaggtggtataatagtcgtggtcaaagtggaggttgaggttacactagaatttatggaggtccttacaaactctaagtgcaactttcaagaatctcagatctactttaggccaatttcgagtcaaattagaagaataaaataataataatctagtactagataggtcaaaaatcatttttattaattaatacaaaattttaatttatattagtctttaatatataaatctataaacttggttttagttttaaatcttttgaaaataaaactacttgcatatacaaatgtgtggagtccctcattttattcttcaatggataaatatagtgggcgtttgataacacttttttaatcagttttctgtttttaaaagtagaaaagtgaaaatatttttcaa

SEQ ID NO: 161972 - DNA, 4536 bp, Cannabis sativa
gagagagagagagaaagagaataaacttgccttgattgctcttttccttttccctgccccagtaagggtgtttacaaatgcatttactaagtttttcttcattgattcatccccaagttcatacacaatactcatgccttgagatgctaactcttgtgtaagttcattttgttcaccaagcaagtgtgaaaaagcttcctgcattcatatgtaaaggttttgtcaaagagttctagtatatagtgtttaactagggcaaagtagaaagcatccacgcaattaagttcatcataatttcctgttttcaagtcagattagaaagaaaaaaacactcctagtggaaaagcataggaagagtcaaaaagatctacattataattcagctctaagaagacagtttgaaatgagatccactgtgataggtcaaatatctaaagtggaaaaagaagataacaagagaaatgattgcttgtaactggcaaacctgaatttccggaagcatattctggatggaagggtgatggccacagtacattaaaattgataacagccagacagatccagcacagcgctcttcttttctggtactatataaaagattatcgaaaagctttctagtaattgcatctctaatagtggaatgaaaatcttcatcaaccatacatgtttcaccggtactatactttgataatgttaagttcacatctcccataagaaagttggaactcatagaaagtgtactataattagttttgagaatcacatcagcagtcacaggaaccccgccccacaaaaatgatagagcctcaccagcagcaaatagaacatcttcaacctacacaactcaatagctgcaggaattagacatctataatccactcaagtgctgaaaaaaaaattatagaaataaaatattgcaattgtgattgcggttgtaatctttagaggtttctggctactgcctaggcagtaatacaatgtgaatgataacctattgatcttttattaatactatcttggaaataataatgcttaatgtaataagaccatgaaaaaaataaattgatttgattatatacaaccaagtaaatgaatgaagctagtaaatagcagagaacaaaaatagttctaccaaccttggaccgggaaagactatagatcaaatcaagagcaaggtttagacgagaagttgatgtttctttcatgcaaatatgtccaattgctataacaattttttgcattgctttaatatcatccccagataacagcttcctcaacttttcttgtaaaattgtaagtatgtcaactgcagtttaattatgggctacttgttaacaatatttcgaaattggctgacaggaaatgataggggagattcaggcagtcaataatatttgaatgtctacactgcttacctgaattagagtcattggtaagtaatggcaatggaactcgcaatgcaatatgacccaatgcttgcattgcaactgaagccagtgtagcagtctcagagctaacaacatcaacaagaaacttcagtgtctcttgaaacaatgcctctggaatctgagataatattatgtcaagacataagcccgagtgacacagaagtactaaagaacattattatttcaagtcctcaaaagcaaccaacaatcaggaagatgctgaatataaaccatgtctgaaagatgctaggatagaattacgacttactgagggcactcgggatatgcaatcagcagtaacatatcctatagcacacaatgctccatgctgagtctcaaatctgaacaaaattgattttttcttcaagtatccatattataatttacactgaaaacagaaggtggcttgaataattacaagctttaaccccaaatatagatgctacaaacctcagtttctgtactccacgaattgaagcaactagttcactaattatagttgatgatgtagctacaggaagagtagaggaagctattccaagtagacgtgctgcagattcacgagtatccgaatccacatgactaagtagttgccttatccatgaaactttcagtgcataacgagttgctatcatctataaataacaggtcaacaaacttagcacatgtaacagtatatataaacatatttatatacattgggaacttcttaagtaggggtatcacttttgactctaacataggagtgttttctattttctttacctcaagaaattatatcccagtttttttaatatgatattatatattgtagttagaacaaacatcccacgtattttcgaaaagttctaaatgatttacggtgtcaaacataaagttcaaaatagtcaattgcacacgtaaagttacaaatgcaattgaatgtttgaatcctactttcagcactgtaaattatttataattttctagaactgaggagcatgcgtactgtaacaataatgtaccccgttatatattgaaaaaatggaattataatttgtccatatatcgaaaatacaaaataaccctatggtaagagcaaacgtgatacccctagttaagaattttcctatatatataacaaagagacagaacaagtaatttagtccgcacaaaagtatcagcaatattgacctctgggacacaagatccaacagcaatcaatgcattggaagcaatggcatgcaattcaacagatccttcaaaagccatagcatgttctaacagtgaacacatattttcaatagcagattgaacagtcggtgattcttctaaagatttgtgtttctccaatgctgactcaaagcatttcaataagaatttgatcataaccacatatgtttttgaaggaaaaagaagcctttgttctctcatctcagatgattctaacagctttggttgttgtctgagaataaaatctagcatggcttccagatttggatactgcacatcagattttccgctcatgctaaacccattatcgtttttcaaaaaaaggccttcatttgctatttccctgaaaaaagagatatatcaggatgccaaattacatttgtcacaagtttgtaagatgcattcctcagcttttgttggtttggtctttatagataaataagaagtttttattttatggaattataagacattgttttatgattatgactactgtttgttatgctaatttttacataaaggtatatttgtaacatgcattttatttacttccattccaaagtgaagtaaacatgaaatggagtactgtcaaatttgatattgattcctaacagtaaagtaaaaagcttatacagattcttattcatcaatccgattgaaggtgaattcgactactagtcaatctaattgttagtcatttcgattacgagtctcttaaaagcctaggctgagctaaagatggcacatacaaaatggtgatctttttttgcatacaagatttgagaaagtccagcattggagaaaaattaaaaataaaaggtgggacaaaagtcacattggaaacagataaaagaaacatgcaaagtaactatagaaagttttaataatgtttaaatattctataaaagatgaaagttttattctactgtgcttaattaactgtgggatttgagccaaccatgagagcaatagcaaattagcattatttatacatgagtttacttaattgagaaaaacaaacataaaaataaaacactcacctccatgaaacataatgtttacttaaatataaaagtgtaatgaaacaggaaaaaaaatgtgatctcggcacgtaattcaaagtttaaattaaaccaaacctgatatccaaactagtatcagctgccccgagcatacaaataaatcgactagggcaatgttgtgaatcaaacaatgatgttgcccatctcacagcacaatatctcacttcacttagttcctatgtcaacacaagaaaatagtcttcatgatgagtttaaaggtaaaatagcaagggagaaaaagagagaggtcaaatctcttattgtattaatctaatagggacgaatcaaactatagaaggacaaaacaacctaaaacgtaagagtgtccaaacctcttgagaacttttcagtaaaagcgtctccaaatctttcaacacagttgttggtgcaccctaaagatcaaacaataaattagtatagtgaacagaacaataaaaatcagtttaatgtacttaatgtaagtgaatgtaagggtattttgtcttcggaattggtgagagggtttaattataattattttctgatttggattggcagcacctaacataatagctttatttattttcctatggctttctctttgattcattgtattattttgattatctattattttcggttttgttattgtgctttgttatgacacaaacattttaaacattttttccctctcctctctctaaagaaactttcaggcacgtaacgaattttcatggccctactactggccatgggaaaaaccggctgtcctggcaccatgactccactgatcatgggaagaaaaacatccataa

SEQ ID NO: 161973 - DNA, 5262 bp, Cannabis sativa
aaaataaaataaaacaaatattaaaaaaatggtcattttctaataattgcttaggggactttcaacttgagtttcaggatagcacgaaaccataaacaagctcagccatttcttagagagagaaagaaaacacccaaggtagttgtgtgagcacgttttggaagagagagaagtgttttcagacaaaagggttgatatcttagcaagaaaggaagcttttttcgtcttcttcattgtcttatgtcattaagcttcaaagttatatatatcaatggcaaagaaccaagacccagaaagactttccttttcagcatcaacagtaccaccgccggcgcgtcctagtctaacactcccccctagaccttcaatggaaacctttttcagcgaaggagctggagctagtccaggaccgttgacccttgtctctagattctttgataatactaacccagattcagattaccgttcttttactcagttacttgctggtgccattgcctctcctttagctagacccagttttaattttgagaattcgtttgataattatgggaaaggtggagatgggagggacaaggattcttctgggtttaagcagagtaggcctatgaatttggctgttggtgctaattctccattgtttatggtaccatctgggttgagcccttctgggttgttgaactcacctgggttcttttcccctcaggtatatttatatatataagctcttgaatccaatttggtctttcttgaattttgagttttgggttggtacttaaaattatgtgttgtttgttttgtggcttaaaagggtattgttactattaaccccatctttatattttgggatttttattagactgaaaaaaatatggtctttgagttgaaatttgcacaaggggttgttcaagtttccattttgatgattcatttttttttgtctccatacttagacacattggtagttatgtagttcatttgctttgtgttttcatactaaagagttgtgtaacacgttcaaccaggtaattatccagtaatcatgtagtttgaggtaattgagaggccttaactatgctctccaattgggtgtaattacactatgtaattattaactcatttgctaaacatgaaaataagaattcgtatgttgttactacttgacattcaaacacacattccattttaaaataaagtgtaattaatctaatttgtaattagacagttacttccatacgcaccctaagggattgttcaattttccattttgatgattcattctttttctatccatagttagagacacaagtagttatgtagttcatttgctttgtttgtgttttcaagagtccatttggaatgtcacaccagcaagccttggcacaagttactgctcaagctgcatttgctgctcagtctcagtttcctatgcaacttgaatataaaccttctatagtatcaacagcagcctctactgggacacacacacagtcaattgagccatcatatataaaatctgaagtgtctcaacagcaacagcaacagcaggctgtgccttcaacttccgagcagatggaatcatcggggccttctcattctgataagaagtaccatgctcctcctcctcctcctgctactgctgttaatgataagcctggagatgatggattcaactggagaaaatatggacagaaacaggttaagggtagtgaatttcctcgaagttactacaagtgtacatactcgaattgccctgttaagaagaaggttgagaggtctcaagatggtcagataactgagattatatacaaagggatgcatagccacgaaatgcctcaatcttccaataagcgcgtcaaagatagtagtagtagtgatgcaaatggacatgggaatgttcacgtcaagtcggaaatgaattcacagaacaggaatggtggtggaaatttgcagaggtcaaatgaaactggacaatcccaactggggtacgaaagggatcgtgaatctgcacaaggcgttcttgtacaggtaccgggctcaagtgatagcgaagaagtggttgatgccgatgtcagagaagatgaggggaatgctgatgagccaaatgcaaagagaaggtaataaagtaaaataaacatcataatacttgttgtacactttttcgtatcatatgtttcttagtatggtatgaaattcaattgggagtacaggaacatagaagttggaacatctgaagtgtccttgtcacacaaaacagtcacagaaccaaaaatcattgttcaaacacgaagtgaagttgaccttttagacgatggctacagatggcgcaagtatggacagaaagtagtcaagggcaatcctcatccaaggtaggaacttttttcatgcatttgtgtacttttattatatccggatagttctaatgattgtcttataaatatttcagactgcttagactaaaaacgtttcttttttcaccgtgatagtattgttaaaagatcttattttgattcagtttactagttttaagattttctgtgtgcccatataatttcctttagagcttttcacataggtagactagatcccgaatcatcaaattattaggtgtagttggatctctggtcaaaatgtttccaattggtaagttctgtcaactattaaaacataaaaagtattgtttgaataaatagaggaatcataaaagagatatgaagtaaaaatagtgaaaaatatcctattttcttactttacttcccattgtttagccaattacaccaaagagatggtatgttttctttcttcttagcaagatattgcctcagaataacagctgaagtaatgaattcatctttggtttgttaaaaaaacattactttagatacatggtttcaacaacagtgaaggtggtctttaatggaatttcattcaatttgaagtcttttgaaaccttgtggctaatgtggattttgctttcttttcctttcaaaacagtttcacctaaaataaatttcaaaaggtttctttattggttacgcatttaataggccagtgctctgtatgtacctaccttatctaaatctttagtgttgagtgtcatcaataatgaccccatttcatatggtgggttccttcccagaaagttgtttaccgagtaaattgctttgctttgcgctgtagtgttgctcgttggcatgatttttgtgatgcttgtctgtttgtttctttacatattgagtaatttacggtgtaaatacttaaatttaatttccggttacagataaatgctattatatttttggaacttccgtaaatatccgaccgttaaatgccaagtcaatgaccacgtggtagtctctgactggtgcagttcattaaattttgtttttcatttaaaaattaataatttggatcaataaaaaaataacacgtagatattgacttgacacttaacgattaggtacctatagaagttatagaaatataacttaagtatttatctgtaaccgggaattaaacttagttattcatgctgcaaattacccttcctcgatacatttcctctcttttcctcaataaaaaaacttttcattttcaggagctattacaaatgcactagtgcaggctgcaacgttcgcaaacatgtcgaaagagcttcaaccgacccgaaagctgtcattactacatacgaaggaaaacataaccacgatgttccggcagctaggaatagtagccacagtacagctaacaataataatccacatagttaaaaaaaccagtcaacaaggatgaaaaacaagtccttttgcagcaactgaaagatgagaaagagcaaaagttacctcttttaagttgaatagtcgatttcgatcaactaacatggggcaacaaaatgaagaaatttaggggaaaaaatgagatcattttgacaggtttttacaaggggtaatagttgctgatttgtatgtttcctttgttttctttacttgtttatgcacaggcacaataccttacttgaggtcttgtacattattaatatacattatgaaatgttgtttatatatataaatttatatttattattattattacctactagaatgggagatggggttgtttactttgctgttcttaaggcctagtttggcagttgaaatcaaataaaaattttctgtaccccttttgaatgataaacacctattacagttctaatcatttcaattattaattatcatttctttctttctttgttgtgtaattattaatagtttattattttgtttattaaaatcacagaaaaggaaattagaatattttattttgtttgcatagaaaaaaattaatcaaaatgcatttacttgattatattgttatttataaaaaatataattattttttatttataaatttttgaagaagataattatctttgttattattaattaataaaaaattcaaccaatttaaataaattaggaaaagaatgtcacaccttatgaaattaggagtagaacttttccttttattttctctttaacttagttatgtgagtccaataatttatcccattattaaagttaaagtaaacaaatatgaaaatcaatacgattctaatttctttttaagtaaacatgaatgtacatatatatcaggaaaaaaatggcaatggcaaattgacaaccataaaatattattaatcctatatttttttggggatgaattataatatatactactttttttaaatttatagtttgagtgattccggtaatttttaagtgggttattatatggactttgattgcaatttagattacttcgtttgttgctatatgagtttgtgagaaaattacgactaacaatgtagaatcaaattttaaacaatcaaacaattaacaatgataagattaacaaatcataaacaatacttagataaaaaataaagacaaacaaagtaggtacaaccagaaaataacaaaggtaaaaaataacaaaaaacaacaccaagatatatactggttcaaatctgatagatcgatgtgatttatggctctactccagttctggaacaccaccaaatcttctttattgattgagcaagaacatgtacaatacagtcaagaagaattctctgttgagttctctcaaagtgtttcaactctcacactcttacccaagaatcttctttatctacaaaaaattcttcttgcaaaatccaaattcaatctctctcttttatctaaacctctctctctctctctc

SEQ ID NO: 161974 - DNA, 2242 bp, Cannabis sativa
atgctaatttaaaatataaataacaaaacgtggagaaaattgtattaaataatttaaatgaaatgtgaagagttgcttaatagtgtgtgaaaacaatgtgaaaacggtaagaagactataaggcgcaaaaagatgagatgaacaatattgaaattgttgaaacaaaagggcatatttatttttgtcaaaataatattcctatttaataatctctatccggataaagttggtgatgacaagttcaaggaaccatggataaaggccaaattattggtcattcaaaagttattttgtttacttctgagagtaaggtttatagcgtcatacgaggtaaataagtcaaaggaataaccaatcaaaacaatgcccataccacacaaaacgacaaaaacttcagagataaaaggcctagccctctccttgcaaacatttcaaacacttaattttctcataatcatctctttagatagactcgaacccttttgttttgtcaaaagtgatacaaacaacacttttaactctagttcattactaccctttttgagataacaataaccaacaatggaggccaaaactggttctgggcttcctcctggttttagatttcacccaacagatgaagagttaatcgtttattacctcaaaaaccaagccacctcaaggccatgccctgtttcaataatcccagaagttgatatctacaaatttgatccatggcaacttcctggttagtaatagtatactcaagtcatcattcaagtactactactacgacatgtttttttatatgtataaatataaatatataaatattcatattgagtctcttgtttttcccgtgtagcacagacaaggcagagtttggagaaaatgaatggtacttttttagcccacgagataggaagtacccaaatggagttaggcccaatagagcaactatatcaggttattggaaagccacaggtacagacaaggctatctatagtggatccaagtatgttggagtgaagaaagctcttgttttttataagggtaagccaccaaagggtattaaaacagactggattatgcatgagtatcgcttaaccgattcacgtagacaaatcaccaaacacgttggatccatgagagtaagtaaattttatgttttcttttccaagatttttgacttttttttttttagttattgttttcatttggtttttatagaattgactcaagagtatcttctttttttttttttttcagctcgatgattgggtcttatgcaggatatacaagaagagaaatgtgaacaaagctctagacccaaaagtggaagatttaagtccccatatcgatgtgacaacagttgccaacgaggctattaatgaggataatgaaaccttgaaattcccaaggacttattccctggcacaactattggatctggactacttgggcccaatttctcaacttttgaatgacaatccattcaactccgcccatgattttcttctcaacaacaccttaacaaacccaggaactggttttgttcaaaaattcgagtttggtgaggaaataccataccaaaacgctgactcagggaggtttcaagtcgctcagaccagcacaccctttaccccaggatatgatatgtactgttcggaccgttaaaagaagttgaaaaaagaaaagaaaaaaaaaatacatcaattggggttagttggacttggacatttagtaaaccgataattgtctaagaaattgtacatttgttaaatgttacttttccttctttcaagacattttgtaaaatgaaattattcgacttactcttaaattccaatttacaaacaacgttctattatcattatgggaacgaatcacgacaaaatagctaaagtttattctaaattatctaccttattctcagttgtctctaaaccaaagagatcatgattatggtaacgaatatgaccacgtgtcacaatattattgaactataagtatgcatagcgataaaagccaaggtagttgggggctgaccaaagatcattgtgtacttacatcagcaagatgtgatttatcaaaatgatttaggtacttacatctattacatattttaataatataatataacaaaattctacaatatacaccttaaaatagatgtatcgatacacttttattaatttggtatctaaaaaattacttagtctattttttttatggttgaacattatagttatttaaaacattt

SEQ ID NO: 161975 - DNA, 2843 bp, Cannabis sativa
aattaaaacttatcttatatatatccctctcattttattttcatagacattattattatgttctaaggttttgaaacatagtagatgagcttctgaaaatgtgcctggtttcactcggcatatgcttattatcattgtttcatgaaactaatcataagtcaaaaagaagtgtagttccataattgttgacccaattaggacttatatattgtacagtgcattttgttgggcaaatttaataagcatgcacgccttttcttgcaaatcaggtccgtaatttatgacaaaattcccaactttattagacaaatttcctcaaaaaagcaacttcagaatatgatttcttttctttctttatttaggtactactttttctgttgtaggttttatttacttcaacttgaaggaaaaagaaaacagttttcactccctttaagataagagttaaaaccctttgttttttacttttacatgattattctcttgctttattttgttctgataagtcactgtaatttgtgaaaaatcactgaaaaattgaaccaaagagcatagattgattgatattgaagctgcttcattttttttttcttaatccaataaactcaaatttgccaaagctacaagagattgaaaattgaaatcaaaacaaaaagaagagagaattttgcagaaacatatcttcacttgccaaaaaaatgaaagcatacccatttacagatatgtgctgcatgcttttgctaaggtgatgttagcattataaaatcaccaaaacatatagaatcaaaacaaaagaaaagacttcattttgaaccttttttttgtgttcttttttctgtgagcttcaaatttgaattgaaccatcaagatgctgaagaagtgacaatcaaaggagaaggcggaggtcgagggcgtctggttctgcttcttcctctgcgcattgtggccccggaaggtgaagctgaaggagaagaagaggaatttgaagaagagtttaacacatttgactcaactattagtttcttcttcttctctcctccttcaataggtggtttattgttatcttcaattctatgatgcctaacttttgttgagtttaaagtcacaggaagaacacagttgcacataaaccctgcattgtttaaacaatcacatattattgcagagacaacttgaaaaaagaaaagtctttccccattttgacaaattagttcaactacttgattggtatttaactaaacaacctaaaagtgggtagtaatgagttgttatgggaaaagaaaaggtatatatgtatatgcataactaacatttctttacaattatataaaaacaatcaacataaatgttgtctcttaccgattctggcaagtcgattaacccaacttgggattgaatttctagtcaatctaatacaagcatcattacaaaaatggttgcagtttttggtgatcaaattataggcatttcctttgtagacttctgcaagttcttccatgactgttcttacttcagaaggtcccatatctgttttgcctatcaatattgtctttctgaatgtaaatccctcacattttttaggctctccttcaaaaatcccagtacttgaatattcatgagctccaaatgcatactcaacaccatgaactgcaatacatccaatcaaagtattagtctgcatttttttttcccaatttccaattttttttaatacccagatgagaaagatgaagaaacatccatagattggttgaataacttgaattgaaccaaactccttaagcaaataattcaaagcccttttgagaattatcagaaattaaggcataaaagaaagtagataacagaaatgtaacatcattggattgaaatttttagatttaggtaatggaaaaactcgaataaaaataaaccatttgatctaaacacccaaataacaaaagaccaattaattctccttttcctttttcgtattctcatcgaccaaccaacggaaaaactttatctgaagtgggaacatattcctttcaaacagccaaactcaccaaatccaccgaacccaatttgaaaaataacaactttgaatataatgaatcaaattcaaacacagatctagattgtttattagagaaaaacccagataagaaaaagagaaatagaagaagaacaacaagtaccttgtaccccagaatgataaactccaagaccaaaccagtaagcatatccattaatgggtgtcagatcataaacatttaggtacactggtacagatccattatccgcattgttacaagattttcggcacaacaatatcatcttcttctttccttttctgtactttactttttataatgatgataatgatggtgagtcatttagaattatatgacttgatttatctgccatgacaaccaatctcagcaaccaaaagaccgtccttttcagctacacagtgatgaaacttccattatagaagaagggggaagctcacacttctcacacacactctcacccaataatttaatgggaaaaatataaaaatgtctccttttctttttaaactaaaaaaagagagaaaaatgagaaatgggatttgtttaaatcgatattttgatttgaaaattataagaaagaagagaatgagaatcttcttctaatgggttccaccggcggcaggtatagtgccgcactgtctattatttatacatatatatatatttatatttttatataataaaatttagagtatagtttggtggtgatttgttcttctttaattctgggtttttattttttttaaaaaaaataaatgaaaaagaaaaaattttggggttggaattaca

SEQ ID NO: 161976 - DNA, 3578 bp, Cannabis sativa
aaagagtacaatagtggttttgggcgccattcataactaagaacaattagtcatagcaatgcttatatttatacttatatcatagtaagagtctaatttatgagaaaactatgaattttttttctttttttatttaaaaatttgtacacattacaagaaagctaatacacatgaaaacactatacttgaaacactatctcttgtataacaatatataaagaatgcgttaatctctagaatcttaagaacactactactcacactagcaattctacaaactaatatcccctttctgcattgtgtcttggggtcatgaaacattcataaactgttctctttcaccactaaggtccatctattcatcaagaatgtatcccaagttttctttttctttttatcaaccttaatcctcaaaaatgtaattctagatttaaacagaagggttagtagattttccattttaggaaaaccatttggaaagtcttagcagaggagtatgggaagatataaatgcaacagtaaaagttagtgtcaactgaccccaggttgcagaattggaaagaaactccaactgttgccaggctttggttccttaccagcaactttctcattagcccaccactcagagccaatggttggtttaactgaggcatctgcttttgtgttgtcaaagttgaattcttttattgacccgagagtgattgatcgatgcttctgatagctttgatcttctccttctcgacaatcatgttcagagctttcattggaagtttccttaacacatgattcatatgaaatattattgttatcggtatctatcgacacaccatctttgttggtggggcattctgctggtaatatatcaaccaaagactctgatgcagttctgctattcaatgatgcagacttatttgcaaggcaacgtgcaacatcttcaccagttaactcaaacgacaccctatggtcaactacacacccgtcggtctgacacccgttatctgagttggccagggatgccacttcagatatctggttctccagaacaaaattatcagcacaaacagccatcaaagtcccatcaggtgtctgacatccagagcccattcttgagtcaagcccagcaccatttggggtcatggacccagagccaagcctggaacctagaccattgccatctggggtcaaacacccggatcccagccttgaacccagccccacaccatctggcgttaaagaccctgaacccaaccttgaaccccacttccgggtggtaaaatgttcatagcccaggatccttggagcttcccctgtacggaatccaagcatagggtgtctatcagggaaaggagatgatgttccagaatttgagaccgctgagcctggggaaatgagatggccacctgggcttcctggatactgttgataaggctgaaactcacaatgagatagtgaaaatttctgatttgtgccattgtttcttcggcttcggtcaagtgaagatgtcaaaagttgagcaaatggcacttcaggggatgaaggggtggtcagttgaacagactcaggtggaggagtgtacggagcagtagatggttcagtaggaaaggtcgagaatacaggtggtgagactaactgagtctcataggcatatggacctatggcaaagatggatgcagggccaccaggagagtacgaattcatggatagtgaagtgagggacaacaatccagctggggattgtgtagcagaaggaggatccgattggaggaaagatgccggagaagaaggaggagcaataaagggtagaataatggctgatgaggaggcttggtggtgctcagccgcagggactgcagcacctggtaacactggttcgggaacaagaacagcatgaccaattcgcttgctgtttttatgtgatccaaaacaccaatatagactccagcaacttccccatcttcttttctgcagccaaacaatgaaaaaagaacgccattcatgagaacctatagcgaaaatctggttcttatacattgttgggaacattgcaagcattctatagaaggcaatagaagatatcaggtgcattactttggcaagcaagaattaaaaacaatcaccatgttaatcgctttataaattacttatacaaacagcaacccaagataactttataatcaaatttttgagtacaggctataccaattggtcaagttattgccaccttcacgtagcccttaccagagaaaagagagtttagagaaattatatctcaagtgtttgcagataattttagaagcagtgcaacaaaaataaaacaaataaatgtcttgaacaaaaaagaaaagagatttaaccataaagttcttaggagaaaataagtcagaatattatgaagattaataagttacgaaaacaaatcaagtttgcactggatataaatgtcatgtttccacgtgaatatatggcaattgacatggaggtaggtcactgtaccataaagctaattccaagcatcataattgttttgggtcaatataacaaagggatttatatcatatgcaccctgcttcttgaacatgacatgtgaaaattttgctgaaagttaatggttatcggaagtgaaagtgaataatcctaaaaatgtttgtaggctggatttatcatgttaccccatccgaaaaggaccaccaggtgcagagcataccctatttgactaaggtccccaaggacaagataaggctgggggattaggagaacaacatatcatgtgaccaattagcttcttaaattatgccaacacatttaattaccttcaacccaagttccaaatttgtcataaacaagttcctctccacatctaaataatgtagaatagaccaccccaaaacccatatgcttaggtgtaactgcacccaaatttagtctcacacgaactatttaaaatttatctctaggtagacacaagcagaattcgaataaaatttagatcaactctaagacaattactttaagtgatactccggtgaagacaaatcagaaaaaaaaaataataggaaattggcctcagaaatgagtcaatttgacaatttgttaaataggaattttgtgttcggttgcaaaaagaaatctcaattaaactaattagaattgagtgggaaaatgttaaatcttgtatgctattgctatacgtatgaaaatcttaattgaaaactaaggatccaaaaatagagcctcgttgaattactaatcaaattttcaagccttaataaaattgtttctcctctgattccaagcaacaaaacccagtacaaattttttaaaaaaattaacatattccccagaacaatatatatgcttttagaactcaattccccacccgaaaaatcccagaaacgatcgaaaaaaataactcttcaagtgatgcaagttaacgaagaacacaaaagtgaagatcctacttttaattcagtaaaaacagaacgcaaaatccatatagaaatccaatacatacgcatacgtataagctacaggcacatactcatacacacatatatatttatacatacatatagatttac

SEQ ID NO: 161977 - DNA, 3007 bp, Cannabis sativa
agagagagagagagagaggatgtattagtcaaagcatcaaaacgtgaactagaaaatgtcaataccatacttttaattataccaggaaaaggggattctcaatgcattttcagaatacataaacaacaggaacacaattgatttacaagaaagaggtagcacagcttatgttatagttatgatgatcatacttccattgacacagacaacaaagatgcaaaatatgacacatcgcaagcttctatacctgagtaagctcagcatccttcccagttctcttgtatttcatgcaacattcataggcctcaagtaattcacgccgatatgcctgagatatcatgaacgcaaaagaattaacatggagaaactggtgcaatgaactttaatgaggaattaaaagtcagaacatgacaagactttccagatttaagaaaaagttttatctatctgtgtctcagaaattaagtcatcaaaatatcattaacaagccatgcatactaattattgataaaaccaaagaagaaaagaagttaaattaactttacaacctcaataaatgctctctcttttatggtagtattgggcctcatagccccttcctcaagcatttcatgtaatggctccaacacctttaacattccttcaatgttatgttcaccaaaatacagtcgactagcttcctctagtgcttcatgccacatctcatgccaaagtatggcaaccctgatcagctcctgagatacaagttgtgcctgtccagaggaagagcggctcagaaccatgcagaaccgaaactagattgaaaatgttgccttacctgatccacaagcacaccactgtgttgtcgaactctgtcaactacttcatgagctgcccgtttgcgtaaattactgattgatttgcatgctacaaggagagggtacataagagcctgcaacacaaccatgccatatttttcatttatcaagtctctctctgctgctaactcacaaaagaaaaatgaaaaatatcattacaaaggatataaaaaacaaacctggggatgactttgtccaattcgaaccagtagtgactgtatgagttccctcacagcatggttattagaatgtatccgtgcaattatttgaggtaaaacaaccagccatgtgttgatgttaacaagtgagaaacctctttgtagtgccatttggacttctgcagtagctccatggttgaaccacaatgtaagaaggcgaagaatatcctgaaaaaggtgcaaaagataattagtcgaagtcataaggtagtaataaacatatgacactaaaagtgcatgacagtctcataaatcataagacagaaaaacattaaacagaggcaagacaactacaatttatatatatttataacatctatatataaataaatgtttaaataaaacaatgacttgtctttatcgtttgtgggtttttttatatacatatatactattttggtacttgttattaacgtgttcaatgtcatactgatgtggtactcaataattaattagtaatttttttttttgctttttgtattttactttttatgaatgatctttatactattttttttaaatgattttttgtactataattattatatggcaccttaaaatgttcaataccacaccaactcacatacaaaatagttggttagtaattttctaaatcatattatattaaaatttgtgggaactaaaatgcaccaataactacatgttacttttgtggtgcttgtttacaatttctctggatttttttatttataattttttgtagaatgttttttctggtgaattattcttattacattaatagaatatcattgtttacaattttttttacaatttctctggatttttttatttataattttttgtacaattttttttctggtgaattattcttattacattaatagaatatcattatttggcaccttaagatgcccaacactacagatatatacacttaataattggttagtaattttccatattgttataccacactatgtccttgtttaacataatttttttttcaacaattatttaattataattgatgacagtaagatatatgattatggcacacaggttttgacgggggttacgtgcctaagacacgtcccattacactacgtataggtaaatgtcaatgtacttttcctatttcttcttttatttcttataatcatctctcctcttcttcttgctcttttattgtttctcttgattctatcactattcctaacattgttcgtgaagcaatatctcatcctagttggcttgctgcaatgatagaagagatgaatgctttagttgcaaatggtaattgggacttagttcatttactttaaggaaaacaggtcatagggtgcaaatgggtgtttacggttaaattcaatcaagatggaacaattgttagcttaaatgtccatcttgttgccaagggttatgctcaaacatatggaatagactattgtgatactttttctcctattgctaaactcacatctgctcgactattcatttccatggcatctacttattattggcatttgcatcagcttgatactaaaaatgcttttcttcatcgagaatttaaggaagaagtgtacatggagcaacctcctaggtttgttgctcagggggagttagggcgagtttgtcgtcttcgcaaatctttatatagattgaaacaatgttctcgtgcttagtttgataactttagtcaggctgttgagaaatttggtttgttgaaaagtaagtcaaattattatgtgttctataaaagatcaactgttgatatcattttgttaatggtgtatgttgatgacatcgttattactgaaaataatactgaaagcatcacatcccttaagtctttcattcatacttagtttcacacgaagaacttaagggtgctcaagtatttcttgggtattgaagttactcgaagtaaacaaggtatttttctatctcaaa

SEQ ID NO: 161978 - DNA, 3034 bp, Cannabis sativa
  modified_base (182)..(183): a, c, t, g, unknown or other
tttataatttaaataaataaaatgttaataaaaatattttttggtcatgattattttaatgaattaataaataaattgtatacataattaattattaaaatgaatttattaaatagtattgtattttaattttaataaataaaatttataaataatttttttgaaataataaataaataaannaataaataaataaataaatgaatttataaataaaatttcaaaaatagtataagattctaattatttcactaaaattcataataaaccagacttggagattctaatataacataatataaacacacaacaccttattatataagtattgacacttaaaaaatactactcatacttagatatataagatataccataatcaacacacggctatttataaaggatggtaaacaaagtctgtaagaatgttaaaaaaagtaagatagctgcagcgaacactgaagtaagagcccatggatgtttaaaatagtcatgcataagcactcttcggtactttggccaacgatgtccacaatgctcattcacatccacaataagcttactataatgaaagtaattgacaaaagtgtcattatagagttggttgaaaaattcagtggcttcttcattgttcaaccagttatccacaacccccctcttgcacaatatttccatgtctttgctggtgttgatgaggttgtccaacaatatagcataagaagtgattttccctttacaattagggagacattgctcgaagcatattaggttccgaagtaaagattccgtagtctcatgaatgtggagtggtggaatttcaaggaccccttttctaaattgaatatccaagagggaggccttagttgtcgccttgaacttaattccagcctcttgcagaattgtagctgatggcagctgttgccaatttatattattattatgattatcttttttaacaccaaccattgagtttcttagcagatcaagaatgtgcttgtgtttacgttccataaaatcagttattgattgaatcatgtggtcttcatgttgtagtaagcccgcctttctcgagaaagtgccattaaagaaaattaacactagcaaatccaacgggagctgatttattacttgcttggtgatcagctcgtacaaacaggcaagcacaacccaaggtatttggttctctaacaatatcaaatcatgatgtagaacttgaatcatggtattcacactgaatattgggtcatctttattacttgtaagattcgcctcttccgacctgaagaataactctttatacctgtagaataactcaataaggaagcaaccatcaagcaccaacatctgcacgaattcatctttactcatattaataggccctgcgtaacattcgcgagcctcttcccaaatttcactgatagcctctgtgagatccatcaatattaatttcttttcagtacttgtaccttgatcaacaaaacgagagacaaggtcgtacaagtacttcaatttaatattttgaggatctcttagatgttcttctccatagtggaatggtccaattgaaaatgcaattggtgtataagcttttggattatgcctcaacagtatgcgtgggactttgaagatgcaacacttacttgacctacacaaatcatctttggatatcatacttgctagcttagttaccactgcatcaacattaatcctcacatcttcctttctgacatgctcctgatccgccatttgatttttccttctattgtaaatatatatttcataaacaaattaaacagaaagattaccaagtgattagtacaatctaaacatagtactaaactagtgtaatgctacattttaatattttttaagaaaattagttaattggtgttgtgctaaatcttcacaaatttggtatatactaaaagttacattaaatttggctcagaatatagtattgtgttcagttcagaagtaattatgttttcccatgaattaatcatatatgattgactttaatacatatattttaattacactattatcattaactatttacaataatattgtagcgaaatcggccatttacttttgttacacatgtatgatttcctaataaaaaaatgacaggaataataccttccgtcacatgtcacaattttgttgcaacggtatatcttcttttgttaagtgtcaactagctagaataaatgtgtaatattgaaccacatgttgaataataaattagttatttaataatcatttttataataaatatatctaacaaaaacatttgtggtatagttttttcaaatgaaaaggtctctaaaagttattcttggaaagttgtttactcacagaagccggaaggctttcttgtccttcaaggaagaaactttaggaaaagctagcctttctcaaggaaaggagttccagatggctagtctttccttctagaataaggtagttttggataattgattctagatgtctctatcttatctaaaagctccttaagcgagtgtctttgttctgtgatcccagaaactcatatatgttctcggaagcactcttacttaagctgatatggagatctcgctcaaatgagagttggttaagttagttattgtttaacttaaacaacctcgtttcttgtcgtcaccgactttaggaccttgatcctaagcctataaataccaccacactcttcttttcaaaacatgatttcagattgagattgagagatagagagagaaaagattgaaaggtaagaggtgcagagaaaagagagagattggatttgagttttgtaagaagaatcttctgtaaatgaaaaagattcttggaaagagtatgagagttgaaacatgtttgagagagaactcaacggagaatctttcttaactatactgtactcgttcttgtttaatcaataaagaggatttagtggtgttccaaagctggagtagagtcatagatcacataaatttattgaacttgaaccagtatatatcttggtgttgttttttttttt

SEQ ID NO: 161979 - DNA, 1566 bp, Cannabis sativa
ttaagggatgacaaaatggggttttttcgtgggtcaagtcaaggccctgccccgacacatccgtgtcactatccgagtatttgtcttgccctgccccacaccgttacattttctttcaagttaggttcgacccgccccaactcaattatttttttggggtccggacctacctaccttagttcatatattaattaaaaaaaatagatctatcttcttcttcatcttctccatcttcttcctaataatgtttatataatatttatatagatacatatttttgtgtatatctatattttaagcataaaatgagtaattttactaaaaaattacatatagttttaatataattataatatgtaatatataaataaaaaaacattttttctttataaaaaatttagctttaaaatatatatatgatcgggtcaatgatccgatttaagcaggtcgaggatgacccgccctgattcataaagcttaatagggcggggcgagccacatccacccaagttacatctttaatggtggcgcactgtgattggttagcgatattttataaaagttattatatttcattatatgaaactttatatttaattacacaaataacgatatgatactttagagagtgttagacaccacttaagagtgcttttagcatttttctttcaaaatatattcaaacttgcttcctataaactataaaacaatattagtagtgttataatagccttgttataactgatacccaagaaatagctcaaatagttagccgcgtgatttgctccaagtccccaaggtttaggttaaattttttatccccaaatattataaggttaggcgaaaattttagtttaataataataatatccttaatacttgagtaaggttagtcctgaaattgagtgggtctagcatgccttagtccaagccaaacacttagttggttcgaccgtgactgagacgtctctttagaattcatactattatacttattatcgaatgcttttttttttggtatttgaggttgaggtcgtgaattcaaaactaaaatattatttcaaaaattataaatatggtataaaattttttttgataaggtatataatttaatagtctagtattttacttttgattttaagatgttgtttttcctggatgttagagtagagttttaatgacatatttcactattggtggagtaactcgttggtaaagtcttgtcaaacattcctaagcagtgctggatggttgaactacgtatcatctgatccgatctaattaatttcagttatcagattgattggatcagttttatccattgaatgtatttttatatgtatttattaaattagttcaaaattttctagtattttagacatatgattttatggatcagatttgatccatccagtgttttagatttaacattaattagattgaattggatttgtccaatctaacaaaaaaaggcaaaattttaatatttaatttttatgtatacatatatatttttggggctttttcatttttacactttaaaacaatttttttttttgtattttt

SEQ ID NO: 161980 - DNA, 1929 bp, Cannabis sativa
ctttagcagtaagttcatgatttacaggctctgattgcagcttcttctggacatctaacagttcctttcttgctatatcagtagcctcctgaatatttgagaaatgctacctatttagttccttgaaagccactttaagtttcttcaactttgtaatgacttgatacattttagaaccagtaattctttgattccagaccccttttacaatctctgagtatcgcggaagggaagtccacattttaaaatacttgaatggcttttttccattaagtattttgtgaaacaaatagacaatatccggggtgtgaacaaataactcctctgttgcaaaaacatcttcagcaatagagaaattatctaaccaccttttatttgctagaactcgatctatttttgagcaaatcctctcgcatccttgtcttttattgttccaagtatagtagctgccactatactttagatcttctaattgacatgttcccacacaatctataaaaattgtagcagcattgaacttcactctttttccaattctttcctcctcgaacaatatgtcattaaagtcacacataaccatccatggtttttgggtagccaagttctttaaatcggaccaaagtagtttcctcccttctaactcgttgaaagcatacttgaaggtagcaaagaagcaatgcttaccatctaaagtagctacatgtagatgaataagctggctggtacattttagtatgttcaccgagtagctaaaaggattccatgccacaataattcgaccaccataatgccattctatattggaagtaaaacaccatcctttaaacatgtttacatataagaccccaagtttcgaggccttaactctcgcctcgaggagaccaacaagactggccttgtgaacatgtaacatgctcttaacttgattttacttgtaatggtcgttcatccctcgaacgttccaacaaacaattttatccatctccaagaggaggatctccccctcctcttgtttttccagctatagcaattctgttggagccaatagtaatggcacctgctgctattgcattctcgtcccgtatctcagcaatggaattgacattcttaaagttatcagccaaaacttgataagaattagctatttgagtttccattgattccacttacctacttgttgaaaaccttcattatccactatcttcttgttttctgcaccagcaccagcattcctcctgtcatctttaaccacccaatgatgctttatcccttctttcttcttatagtccttagttgagtgtcctaagcctttacaacggttacatagtattggcttccactcatagttaatagaagcaaacacattagaaccatgatcatcctcaaagggtacttgcttagaaaaatcctgctgaattgaaacttctatgagaaccctcagtaactcagcttgtttctttcttttgtcatagtatccacttgcaatggagagcccaattgacctactattttaaacaaagatctctcacctcagtatttgagttcaatatctggtaattgaattcaaataggaactgatttgatatcttctttcttgaaattgacattgggatcccaagatttcatcaccacaggtcgattattgaagaacacataaccgccattaagtattttattcctggtatctactaaatcaaattgcaccagaaacaccccataagtcagggttcccactttgtctaccttatctttctatattctcctgataaaacctttaatgactgttaacggttggttagcaccaaggacatagcatactataaaggagctccagaaatgaatttcatcctcaatatcctctaaagtaatttttgttggaattattttaccaggatctagatttactaaaaagtatgtttcattaacatc

SEQ ID NO: 161981 - DNA, 4697 bp, Cannabis sativa
tcctctttgtatatattcatacactaaatacatacaacctctccttgaacaaaacccatatagcttaatgatgtttctgtgtctcacttcagttaaagtcttgatctcattaagaaaactctgtctgtagttgtagttattggtagcttcatctgatatgttcaaacgtttgacagcaacaacactagtcaatgaaagaacagccttgtacacactaccaaaccctccttttccaatgcagaatttctctgagaaatcttctgtggctttaacaatttccctgaaagtgaattttctctccttttcccatatcaacagctcctggtttttgttgtacttgttattagagctttgattcttcttcttgtccatgagtgtaacaaccacactgaaaagtattatcaaaccacaaaagggtactaagactcctataagaatattcttagttttgttgtttgatttaagaagattattattgaccctttttgttgtgtctctgtataaaccagagtttcccaagaaagagttgtcattttggaatggtttcccagttgggattggacctgtgaagttgttgtaagagaaatcaacagaaactaaaccaaacatgttggaaaatgatgatgggatctgcccacagagttgattatttgagacgttgagaatttcaagtgatgaaagtttcatcaagtttgatgggatttcacctgataaacaattgctgctgagatcaaacatgtacctcaatgacaccatgtttccaacctcttgaggtatttcaccagaaaacttgttgtgatttagaatcaagcttgtcaaacttttgtaatcctcaaaccatgttggtatagtaccagaaagattgttcatagacaaatcaagagtttccaaccttgttagtttggacaaggtttgaggtatgatcccactaaagtgatttttgctaagtttgagttgaaacaactggttaaggctcccaagttcagttggaatttccccacttaactcattagattctaagctcaaaactctcaaatttttcacactcccaagttcaggtgggatcttaccagagattttgttatgtcccatatctaagtttgtgagattcatacattgcccccacacacttgaaatttgaccaaagaattggttttcacttaatgtgacataaacaagaactgggtgaacaccgaaaacatcagtgatgttggttgtgaagttgttattgtctagtcttactcggattaagtttctgcattttttgaggcactctggcaatgaaccagtgaatttgttgttgttaatagtcaaagtctctagctttaatcccacacacaaaaatggtggcaattcaccagagaaagtgttgtttgaaaaactaacagacttcaaattaggactgttctttccaaagtctttggggattgttcctacgaacttattggtgaaaacattgaacacttctaagttcttgaggtttgaaatgttaagaggtaactctcctgaaagactgttagtgtcaacatcaaaagttgagagtgattctagattttcaatctctggtgggattgttccattgagattattgtagaaaagttggactgagaagagttttttgaggctataaagagatattggaattggacctgtgagatggtttgaagatagatccaagttttcaagttgtttcaagtttccaatctctttgggaatttcaccagtgaagtgatttctatataagaaaatcaaagtgagattctttaatagaccgatttcttttggaattttcccactaagtttgttgtgttgaagttgcaatgaggtgagagcagtccaattagatatcaaagaagaggagagatgaccagaaagttgattatttgatataccaatttctgtgatactattcagattggataatgacagaggaatttcaccagtgagactgttttcagccatagccaaaaagatgagcttagtgcaaaaaccaagctgagaaggaattgttgagtttaacaaattattgttaagatcaagacgtgagagattattgagttggccaatagaagaaggaatactcccactaaaggaattgttaaacaattcaagaacctcaagattatgcaacagaccaattccttgaggaatttcaccactgacaaaattaattgataaatgaaggtgtgtgagctgagaaaggtttgaaatgtttgatgacaaatgtcccacaaagtgattaaaagtgagattgaaagattggagtttgccaagattggtaaaaactgattctggaattgggcctttccaactgttttgggacatgtctaggaaagtcaagttcctacactttgatatgaaaattgggaatgttgaattgaagctattcaaattaagatcaaggtaggctaacaaaggcatgtttaaaaatttagaccaatctgaattctccaaatagtttgctccaagtgataagtaccataccttttttagattggtgagctggtaaggtattggcccctcaagagaattgttgaagagacttagatattgaagctctgacaatcggcttatctgcactggaatttctccttcaaaaccattgtcactcaagtccaacaaagtgagcttggtgagattaccaatggctgttggtatgagaccagagagcttacaattgttgaggttgaagactgtgatgtcaaggaatggagtgaagttgaagttgtccaattttccattgagttccaagttggagaggtctatttgtgagacttcctcattggaaacatcacagacaacattagtccaattgcagagactaatgatgttgttgttggaccatgaatcgagagaagatggttccaacaccaaggtgtttttccatgttatgagagcctctgcttgtgttgttggtgaggaagtaatcttcaatggaagccaaacaaaaataagaacaagaagaagaagaacagagaaatgagtttgagaaactcttttcatggtgtttgattgatcagtttgtaaagcttgatctgaataaagttgggttattttattcactcttttataataagaaagagaatttaatgtcacattcttcactctcaaaaatcaatacagaagaaaactgttttcaactttccaaaatatgtattcaattcagccaagaaaattttcttagtgaaaaggacatactgatttgaggttttgaagtttgaataagtacattttcaactttcttttattttaatttcgaggaaattgttttttgttgacttagaaagtatgatcattttgagaactgtatttatttatactctagaaaataatgcatgcaaatattacaaactcttacaaattacgagtgtttttcgtaatattttttaatcaattttttatttttctaattaggaaagtgaaaatattttcaaaaaaacatattttataaaattattttcactttttaatttaaattttttttttttaaaaaaaaatcattttcataaaaaggaatactatgtttggataaaggtcgtattgtaaattttgtagtgtattaattattacaataataaattttaatacaatatgaatcatattatttaatacataataattcatatttgcttattattataatctttagaaatggtttgaggctcgggtttgacatcaaggccggggttggggtttaggtcgaggtcggggtctggggtcggtgctggtgctggtgccagggccgaggctggggtcgaggtcgaggttgggtcagggtccggggtcggcctggggtacaactctggaaccgaggtcaaagtcggagtcggaggtcggggtccaaggctgaggccgatgttcgggtcggggtcaggtcagagttcgagactgaggttcagggtcgggcgtcggggccagggttggggtcaaggtcgaggtcggggttgaggtcaaggatcgaggttagttctgggatccgagtttatgtctgggtctcgcatacgaggtcagggcttgaggtcgagggcaatgtctggggtttgggttggggtcctgtttggggcctgggtcgggtttattgtaaatatagtacaattaaatgagtcaattagttttcttatactagcttaaatttggatttctccttttcaccttctctattacagttagtggattaaattatgtgtttcttatcatttcttgaatcagcttcatcaatcaaacagtagcaaaaatggataatctaactcttcttacatttatttctaatttcttaaaaatttagcattgctatctttctttgatttctgatatgaagggatgaaaaatagaatatcccaacttgtataaggagcgaagaaaaagttccaaacatttattagtccaaagaggaaaaagtgttaataatctttatctcattaaagaagtcaagacaacattaactcaagtcaatatgcgtaaaagaaactcaagaatgtcgaagtcactgctattagacacaaacacaatatgcttttattttctattgtaaagggccaatcaaaaggcatattgctactaactattactattagaagtacagtagaacctctatttaagaatactctattcaataataacctctaatttgttataaaaaaatcaagtcccgatttgggcaagttataaataaggataacctctaaattgtaattagt

SEQ ID NO: 161982 - DNA, 6791 bp, Cannabis sativa
tgaagctgaggtcgccaatgagatcacatggctgcggagtggttcatgtgctcattcgggtaagttctcttgtgcaaggataatcacggcattggcccctcttgctcatgttactagctatacctctggctctatttttgacgatcttctttccaaaaactcatatctttaccttgaagatcatattttgtcttctcttagtctttttcttgaagggaaagcttcgggtcgagatagtctcaatttgctagctttattaggggtgccctctttcgagtacactgactttcctggttctttgagacatccaaacatagctcctgtcgttgcaatggtgaaatgtcatggttatgttaatttaattgttcccaaaactcccttttccctggagaacatcctccattacagccccaatgctttgaactctgagtggcatatcaactttctcatttatcagctgctctcagctttggcttacgtccatggtttaggggtagcccatggtaatatgaccccatctagtgtaatgttgactgaatcatgctgggcatggttgcgcgtatgtgatgagcctggctggtcaggattcaactcaagctcaaaagatgatgcatccacagaaaagttgggatgctgtgtagaggactgtccttctcaatctctttatgctgacttgaagcttttcccttctgttgactggcaacgtgatttcaagttgtggtggaggggagagatgagtaattttgagtatctacttgtgttgaatagattagctgggagaaggtggggtgattactcgtttcatacagtgatgccatgggtaatagatttcaacacgaaaccagatgagaattctgatgctgggtggcgtgacttgagcaagagtaagtggcgtttggctaaaggcgacgaacaattggatttcacctattcaacctctgagatccctcatcatgtatctgatgagtgtctttctgaattggctgtttgtagttacaaagcaaggaggttgcctttaagtgttctgcgtatggccgttcgctctgtttacgagcctaatgaatatccttctacgatgcaaagactctaccaatggacgcccgatgagtgcattcctgagttttactgtgatccccaaatattctgttccctacatgctgggatgacagatttggctgtcccctcttgggcagatagcgcagaagagtttattaaattgcatcgtgatgctttagaaagtgatcgggtctcacgccaactacatcaatggattgatattatgtttggttacaaaatgtctggccaagcagctgttgctgcaaagaatgtaatgcttccttcatcagagcccatgctgccaagatcagtggggcgccgtcaactctttacacgaccacatcctatgcgtcaggtttctgtgaggaagtcaaatgaatctatacatcagtgtggtgtaaatgaatctaggagtgagacttctttactctctgaagtggattctttacaagaattggaagaagcatctacatttgtagaacatgctacgaatttgagtgctctctatgggacccattcaaaatattatgataagaatgtttcttctgttgaacatcctccaaatgatgattttaagaagcatacataccagcaatcaaattctgggaaacaccgtggattcccattttctattgatacaaattctcttcttgagtatcttgaggtaggagatgtatattctgtgagctatcaagagttgctgctttgggggcagaaatcattttgttccacgagttcatctgtagaaattgcgaaagacatattttctattggttgtatattagcagaacttcacttgggaaaaccactctttgattcagcttcaatggccatgtacactgaaagtagtgtcttacctagattaatgtttgaacttcctcctcacgttagagtacttgttcaagcgtgcattgagaaagactggacaaggtgttacttatttatctttcaaaatttcgttgctattaaattatcttactgactgtatatgtaatatacttccctattttatttagaacatttaacaataactttattagtaaatataaaggtggagatattcacttttttgtttcttatcagctcaagttattttctttcatatttcaatattatgtaggcggccgtcagccaaatgtcttttggaatcaccatttttttctgcaacaatcaagacctcttacttatttcttgctccgctccaacttctagctaaacatggatcttgtctacagtatgctgcaacttttgctaagcaaggtgccctgaaggcaatgggaccactagcagctgaatttgctgctcgtaattgcctatcacttgtagtggctcctttatcagatgtagaagcggaatgggcttattcacttctaaaggaattaataaaatgcttgaaacctatatcagtgaagaaaataattttgcctgctatccagaagatattacaggcttgtagttgactttcttgtaacatttactttggtgtgctttttgcttgctggcttattttgcttatatagacattcatttcagactgcaggttattcacatctaaaggtttcacttctacagaactctttaatgcgtgagatatggaatcaggttggcagacaaacttatctagatatgatacatcctttggttatatcaaatttgcatggagctgctcataagagttcggcagctgctgctgctgtactgctaattggttctagtgaagagcttggtgtacctattactgttcgtcaggttgtattactgcacattttaaatgttgacaaattgcgatctacacatctgtttgtatattaagtagttttcttactgggatactaactatttagttcaacccagacgatcttgcctctgattcactgctttgggaaaggactctgtagtgatggaattgatgtgcttgttagaattggtattatttgttagttttttcatgctctagtgcctacccggaattaccgtcttctgcttttaaattgcttttatgctttcacattacagggagtctcttaggggagaccttcatcgtcagacagatgctgccactgctaaaacttgttgttcattcctccattagcatttcgaatatggaaaaaccagaacctgtgcagagctggagcgctttggctcttattgattgtttgatgacaatcactggcctggttgtattcttgccaaaggaggtggttacaaaggagctgattgaagtacgtgtcttattcttttctaaatacagtatgtctatgtaaactgataaggcaacatttgcaagagtaatagagaatatcccgtgaatatatgatattgcaggatcaaagttgcttgcatattttgattcttatgcagaatgggttggagattggagtacttcaggtatgtcaaatttttgtactggttttttgtgatgggttacactttttcatctccattttcagatttgaactgatttggatttccatatctagtctttcttgaaattacctaacatgtgcatctgaaattgcacccgttctctagtatacgctcagcaatctaaggatgtttctgctgattaggttgccgcgacgactctggtatcaatttgtcagcaaattggaccagaattgacagctttgcatatcttgccacagctcaaagaactatttgatgagcttgctttctcacaggagactatatcttctttagccagaaactttaagctttctaaacagaaaattgagggtgaggctcagattgacagccggatggaccttgtgtgagtgcttgtaatcttaccaccttaactgtctaggttatcttaaggtttcttgaatttctcataaattcttgtcttcctttaatgtattttaaattttctaggacattggcaggttgcttctgtatccttctttagcatcacttttagggatagagaaacttcgtcaatgctgtacaacttggttgcttctagagcagtatcttctgcgataccacagttggaaggtacactttgttctctattattttttttttcccatttacttgcacacacatgtgcatgaataaaacacgtaaagttgattctgagcctgtcatgattcagtgggaatatacaggagaattgacaagaagtggttctgaatctatatctaggaggcctgtgttcagaaagggttcaactcctgaataccatcctgctaaactgttgcttaatggggttgggtggtcaattccacagtcacaggggagtagaagcaccaaaagctcaatgcctcaaagaaggatttctgaagttatatcaaagaatcctgttaatatgcatgaagcatcttcaaactttgatacgtttgaaccctggttttggttccctaaagcagctgctagctgggatggacctgatttccttggtcgtgttggaggtctcaaagatgatcatccatggaagatcagagcatcagtcatatactctacgcgagcacatcaaggggccataagatctttagctgtctgtcgagatgagtctatggtatttactgctggaattggtgcagggtttaaaggaacagttcagaaatgggaattgacaagagttaattcattgtccagttattacggtcacgaggaggttggttcttcttttttttattgaagttacaattaactttctataatgtatatctgcaataatcacagtcaacagacctggattctcctcactcaggatttatttgtggcacattgaagaaaacttaaatgactttttcatctttcaggttgtgaatgacatttgtatcctgtcatctacgggaagagtggcatcttgtgatggaactatacatgtttggaatagctgtactggaaaacttatatatttatttgcggaatcttcggattctacgcaccatcctagtcatatatcctctttctcgaagatcaaccctgagcaggccaatatgctgaattccagcacattatctggtggactgctgactaatgcatttgatggttccctgtatacttgtatgcatcaaatagaatttgatgataagcttattgttggcacaggaaatggttctctaaggtaaatgaatattctagattgagaaaaagttctgcaccaatcaatatttaagtattaacttttgccttgcaggttcatagatgtagcccgtggtctaaagcttcatctttggaggggagaatatttggagtctggattttcttctcttgtctcttcaatatgttcatgtggatcagacaaaatgagaatggatggagcttctccttcaccatcctggattgctacaggactaagttcaggtcattgtaggttatttgatgcaaggagtggaaatgttattgcctcttggaaagctcatgacggatatgtgacaaaagtatgtctaacataaccaaagagaaacttatctaaatggatttcctgctccaaactaaaatattcagcccctttatatgtgcaggtagctgcaccagaggaccatttgctcgtcaccagctctcttgataggactttaaaaatatgggacttgagaaggtaaatgcaaaaaacatgttatctaggctgatggtttagttattaagtacttaacaacattgtgtgtactgcttgctggtctttgctggatgcataacacaagccatgacttttctgtgcagaaattatggatctcagcctacaattttcagaggtcatacggatggtatatctagcttttcggtgtggggccaagacatcatttcgatatcaagaaacaagatcgggctttcttctttgtcgaaatctgcagatgaagtacgtaatattgttatatttgcttatgttaagctcccttctattttgtatgattgagcaacatgctttggtcgttgatgatgagtttgtattttggacatgacaggatggaagatatcgaattatacctcaaaatctgtacatggcagaacaaggaacaaaaaatatatccatgttatccagtattagtatattacctttctctcgactgtttgttgttggagccgaagatggatacctaagaatatgttgttagtgggacttgttattctctgctcaaatgctttcaccaaatgcagttgagggttttgtgttaccactttagtaaatttttaattaatgtacagttgagtatcgccaaaaaagaatggccttggggttcttttatgtcttgaaaactatttttaaattattggatattttaaacccttgtaaattgagataactctgattgattgccctgatatactttcacacacaaataatgtattgaattgaaagggcaaggattgagacgttatatcgattgctaaattgatatgtttttcttttttcattaatcacaagtgaaacaaatagaagtataatctaatgactcatttgttacatcctatcgtattgtattatgttatacagtattgtgtttggattgaattatattgtatcaatattatttactacaatactatatttggtattaacttgtatataaaattatattatcttcatcataaatttatcccaactccaacaccatttaggtcctgggctggggatgcgttcggggtcgggttggattgtgaattgagtttgggtcttgagttcgaggtcaggcccaggaccaggtttgaggttgagattcccaacctgaacctttgtaaatattatagaggaaattacacttactatgagattttaagagttctta

SEQ ID NO: 161983 - DNA, 2645 bp, Cannabis sativa
ggggagatggattttcttagaattaggaacatttcaaaaaacataataataaacataattttgataaataatagcatgtttatgttggtctttattgacaaactaattgggccgagatctttaagcccaactctagctcggcccatacagacactgacctatggccataaactgacgtggctagaataaggccatgaagtatcattcttttgccacgtacatacgcttgcgtggaaagaaagttacctcttttatatctcctttcgaagctaaaaacaaattcagaaaaattatattaaaatcacagtctgctttatttactaacgtcacagacaactcaacggaagatgggagaccctaacatgatcgaaatcgacggttttaaacttgtctgtgataaactcagataagtgatgcgtatctttagcgatgctcttttctcttgataaaagcaaaattaaaataaataaaaaatcaaaaacagaaaatcaaatttccgcgatccttcttctccaaccgccgaagaaaaaccagtttactttcctttttgcacaaaacttcagatataatttcccggaaaaatatcgattttctcagtgaaactagcaccgcaggtttgtatttcactttttgatttttatctctgtgtatgtgttttatatgtatgattgtttgttgcgaatttataatctatgttctatgtttgattataatattcgggttcatgaattagtcattgatattttagggttattactttgttcgtttttgtattgttttattttccttggctgttttattggccaattgacttgtgtttcattaatgtcgtaggtctttttgtgaagaaacgtttgcttgtaatgtgttttgatttattgagtaatatttttcagggatacggaattgaggaaatatagaaaaataataatggcctgaatcttgtaataattgtttctcaaggattttctaaggaagccgtgtgagggtttgtttctaaaaaaaggaacaaagctacatttcgggttctcgttgacaaaaatttgctttcattcatggtcaaatttgttatgttagtatatgtaaacggtcacattgctccatttccgtaggatttgatgcactcatacgctaacatgtaaaaatggctttcccagctgtgaaactttgcaatttaggttaaggaatcgagttcttgctcttactttttgtgtaaaggtaaaatatgagttccttgcaacaaataggtttatctcattagcttttttttgctctcgtcattcgttttcgagttacttaactattattcttatttttttttgggcacaaaagaagctgttgaccttctctgttagttcagaacaatgtttctagctgcatttgaccttttgtaactgtactgtaatcatattaaggattgtctcagctcattattcagttacacgtaccttgctgactaattttcacactcaccttgcagtttttagggtctggctgctgatgcttttcttgttgccatgtcatgaatagacaagcggagagttagaagttagaaggcatatcctggtaaatgagtggtacattattttcaacacattacatcgtaggcaagagcagtggttgttcaatactgtaatgccgtataccctgtgtgaagactggttttcataaagaatacctttggagctactgaagaaaaatacctgaaaatagcatgatttttggctgcttctgtcatatttgtgaagtctgttaaagtgaacaaaaaatgatcaagcaagtcgcaccatttttttgcccttcaaatctaagaaagtttaacctaatgggatgcactggtagtttttattggttcttttttctttttactctagctgagtgctcaagcagagggaagacgctggtattaaacctgggttcagaatcaacatttgtcatcaattggccgatattcagtgccagcatttttgtacttgttgctcttgttctctccatgtatcttatctttgagcatctagctgcgtataatcaaccagaggtttgttcctatattgttgcagttgttgaggaaaaaatttggcttcatttttgtgtgatgctttttcaatttaacactgaacttttgttattccttgaatgaacttttgctttcatcttttcttgttgttgcatggctatttaattctttactgcatcttctgttttcttttaaactgagaagtaagaacctgttcaattgcaggagcaaaagtttcttattggcctcattctgatggttcctgtttatgcactggaatcggtaagatattttccttcttttgcaacactgaaatcttcttcctcttttttgtttttctacttctttgttctttttttaattttttttttttttttgtgttatctgcagtaccatgagacagtattttacgtttgtttattaggattgatatttgaaagggagatgaatcgtttactcattcacctgtttattgatatgtttcggtgttgaggaatatgttctgatatatatctacttcattttagttttgtgatgataatcttcaatagaagtatccaatttgtattatctgtttgtgtgctcaacttatgaagtactttgtactttgaattattgttcatatatg

SEQ ID NO: 161984 - DNA, 3051 bp, Cannabis sativa
  modified_base (2990)..(2990): a, c, t, g, unknown or other
atggggaacacagctccattctttctgtgttggtttagaggttaattacttattcaaaaggactcacatcacatgcctactttttcttgattttgtacttggtattaagatcttcaaccgttacaattgtgagcagggttcccccgatttgaaggctggaagagaagttgcagactatttggggacagttcaccatgagttccactttaccgttcaggtaataacaataacaacctctattatgttgcttaatagataactaacatactatatttattttaatatgtaaacaattttgcgatttgtgtgtaccgcaggatggaatagatgcaattgaggatgtgatttttcacattgaaacttatgatgttaccacaattcgtgctgctacaccgatgtttcttatgtccaggaagatcaaatctttaggtgttaaaatggtgatatctggggaaggctctgatgagatctttggtggctacttgtacttccataaggcaccaaacaaggaagagtttcaccaagagacctgcagaaaggtacttggtttttcttcattttggcctgctatatgtggcttaactaagtgtgtgtgtttatgaaagatcaatgactttattactctttacctttcagattaaggcactgcatcagtatgactgcttgagggcaaacaaagcaacatcagcctggggtttggaagccagagtcccattcctagacaaagcatttatcaacactgcaatggctattgatcctgaggctaaaatggtaacatagtttgctttgtttggttttaagatgcctttagtttgattattttttaacatggtcaaactacagaggccaatgttaatcaacctgtattgaatttcagatacacccagaagaaggaagaattgaaaagtgggtgcttagaagggcctttgatgatgagaagcaaccctatctgccaaaggtgaaactcttttcccaacttgtattatcagatgccttcttatataacttcttattttcccccttttctaactattgtttctatgtgattccttgcagcatatcctgtacaggcaaaaagaacagtttagtgatggagttggatatagctggattgatggccttaaagatcatgctgctaaacatgtagaatagcctctttaacttgttttattcacttgtcatttttgaaaatgaaaccactattatcttggaaactcacttgaaatcttatcattcttgctcatttgtactcacaggtaactgacaaggtgatgcaaaatgctggaaatatcttcccacacaacactcccaccacaaaagaagcatactactaccgaaccattttcgaaaggttcttcccacaggtaaaaataacagaaagattaacttaacttgtgcttctgtcattatgctcttctgtattaacttgtgctattggatttttgcagaactcagctcggctgactgtaccagggggagcaagtgttgcctgcagcacagcgaaagccgttgagtgggacgcttcgtggtctaaaaatctcgatccatctggcagggccgcccttggagtccatgtttctgcttatgacaactcttctgctaatagtggggtggttcaacctgtgatcattaacgatgtaccacatatttcagtgagcactcatggtgttgagatcctcagctagtaaaatcttacacataatgatgctagatggaataatactactactaataataataatgatttgtaagtctactgaggctagaatttaagatgagttctttccttcctctgccttgacttggcatatattatcgtataggcagtatgtaaaaatttgagagagtagtactctctctgtgctatggtgacttgaaatatatatgttatccttgtattggtgttcataatataagaagtgacactttcttttgctttgggtacaacatcttcagtttctcatttgcatttcaatgaaaaacaaatttaaagtaacaataagtttgacttcaaaattaaattgaagaaaattaaaagagagctctctgaactgcagaatgccaagtaatttccacttgcatttccattaaacacaaattttaagtaaaaatttatttaaaattaaattttgaagttaaacttattgttaatttaaaatttaggtacttagagcagctctaagtagtttgcataagctaaatttaatgtaatatatatctccaatgagactttattttgcagctcaaatttatcgtgtgactacagcacacgacatatatgtcgtggcactattacaatggcatccaattttttttaatatctatatttatattataaatatttgtatttataaaattaatatttaatttattgtgtataaattaaaatgtacccctatcaatttcgatatcagagagacttttttagtctattttttattcatggttgtatacattataattatttaagacactctgcaaaattttgagaaattcaaaaaattaacacgttgaaaagaatgttcaaactatttattgcatgtgtgactcttttatttgaaggggtgcattgtagaagcactttttaatttattgtgtgtaaatttaaatatgaataacataaattatcattatgtaattgcaatatgatattttaatttaccgagttttatcgattttacaatattattatctttaaattaattagtagttttatttaaatgattatttagatattacaattgtggtgattttaataaattaatataatattaaaataagttattttactaaaaattaatataataataaagaatatttttttagtgtaaatttttgttttgtggttggagtgaaaataatttttgacacaaaatttaatgatagtatgacactaaatttagtgtgtaagttggagatgttaggaggatttgttcaactcttggggtccaaaatagtatgacactaaagttttttggatggttttttgnaagtaaattgatagttgggggggttttgccgcaaattactcttaaagtttttattttattt

SEQ ID NO: 161985 - DNA, 1670 bp, Cannabis sativa
tctctctctctctctcccctttcgaattcccactacccacggaccattcctactcgaccaccgatgaacccaccaccccacggactgaaccctctacggatctttttttttttcgtcagatgtgatttgggaaaaatctgggtttgatttcgtcgggctcgatgtagcccgatgcaggcccgatatctgtccgatggtatcacaaaaaaattgaggatgacaaagacctgatgggcccgatgcctgtgtaaaaaaatagaattttatatggcccaatggtgggctagatagtgggcccgatggtgggccaaatgtggcccgatgcctatgtaaaaaaatagaatttaatatggccccatggtgggctcgatagtgggcccaatagtgggtccgatgggactcgatggctatgaaataaaagagagaagaagagagagggggtgatgtaaatgggggtattttagggatattataaaatgtatcataccttacaaatatcaaatattatgagtttaggagaaaaatttaagtacatgtattatgtaagcatagaaaatcaaatttcccttatataataagttgtggcatgcatagtgatttagttatcttacatgcaatagtattggtttaaatcccaataaaagtttatttttagtattttaattttttttaacctctatattaataaatctttatttagtacttcaatccttaaagtcaacttttttattgttacaatatttcatactatcaacttttagcaggttatatcatgaaaaaaaaaaatggcatacccctcctcacttataaaaaaaaaggtactcttcattttaaactttaagtcggccacatatataaagccaataatatatagttgattgattattatggtctatacgcttacttaaaatcaaacaatgttttataaatatgaagaacatatgaaattactataggttggaatcaaagttatttattaattttattatttttcataatatttttcaggtaaattaattttattatttatcattctaattttataaaccacattaataattatttttatagtttatcattactctaataaaaggccaacttttcagtcttgacaaatatctgctaatatttataaattgctgtatagtgtatggtgtttatattttttaattttttacaaagagaataaattgcatgcctttaatgtatagaaatcgaacattttgatggtttgtaatcttagcgcatctataggtttcatgtatagtataactctcaagtttagaaaaaaaaaattgttctgtcagttgttcttcgttaacaaaattataatatataactataatgtacctacttggaagttggaaattttgaaaatttgcttctttttggaatgtttttttctgtttgaatagagttgacacagaaggttttagtattttttcttcaaaaattatgactctcctaataagctactaaaaaaagtaatatgaacaattgtgacaaacaatgacatagactaattaaagaaaaattatttttaattatttaacattaactgctactttatatatatatctatctattctatataaagtgtgcctatataactaaaattcttggtttttgagaaatttatgggtgagttttaatttttatttaataaaata

SEQ ID NO: 161986 - DNA, 2721 bp, Cannabis sativa
ccgttgccgccgccacggctattgcgtgcttgttctgttccttctctgtgtcattataatatgatctgagccaagaagcctcggctgacgataagttaggtggaatagttgccggattatgacataagccgtcggagtactcctttcccgagctaaaaactgtcttgtctttccggtcaccggagttggaattgggtttgtagtctttttctttcttcatcccaaacaagcccttaagccacctcattgctttacccattttttctagtgtttgatctgagagtgagtgagagagaagaaaaaggaaaatgcaagctaaaaatagagacagatagtggaaagatgagaagggttttgtgagattgaatctgaaaaaccggaaaataaaaaaagtttttgtttttcttttttagttttcttccaacaggtttttacagctcacatagtttagtttaggtacatttccatgttaaggaaagtgatgaaacagagttgttaaaaagagaaattcactgaaaaaaacccatttatatgagaaaaaaaaaatatatatatttaaaaataaataatggggaattttcaattgttcttttttattaagtgaaattaaaaactaaaacctctgtcaaagtcgcgtgaaaaaactgcattacgtgacaaaaaacatagtgctgagcatgcaggagttacaatattatgttttgtttttattttaaagatgaatagtaatagtaaaaaaagaagtaatctaattggaagttacatctaaatcataaaaataataagaaatgaagggtaaccccacattggtatactcagattctgattagaaaagtaaaatagtacttgtaaaaaaaaaaaaattaaagaaaggtaagaagttaataaagagaagaaaaggaaagcaatcgaaaatgctgtttctttcttcttttattttataattttcacttctccaatgggaaactcagtaaaggttttatctttgttccataagaaaatgaacactcatataaacaacaacagaagaggcagtgattaaagaagagagaagactactctctctctctctctctctctctctctctctcttctattacttttctggagcgacgtgtcctcaaaaagaaagatacctcagtgtcctcagcctctgacagagtcccgtgaagccctatgattttatatattctttcttcctcttttctaaaaccccacctttaccatctattcccctgcaatgcaactgtttttttttttctaatttattttattaaatggtgtaacaaattcttttattttctcacttttccctttattttataaagatagtagataaatggggttccttccatttttcttggtatttttttcttttcttttctttctatgtaggacttttccttttccactatccaaacaaactggttgtgaaaagaactcctcttcacttgggtaaagaagaagaagaagaagaagaagaagaagaagaagacaatcattacccttttccgcaattcatcttctctgattagcaattaatgctcagccaatcaaagatggtggtttttgtaattttatttttttttgaatatataaaaaaaaattgattatcttctggtttttggaaagatccttaagttagttttttgagagaaagatccttaagttagttgcagttgcaatatctaactctgcaatttgatcagaattctttttatttactgttttcttcaaaactatttgtttcgttatttaattctactgtcaatgtatatgtaatttttctttttaccacccattttctacccagaacactgagtttggcttaaagtactctatcattaaagcctttctactatacattgctacgtacttttttttagcagaattcagtcatttcataacttagaaaaagcgctaaaatatggtgcaacattttatacattcatatatatatatatgcttaaataattcgtacaaactttaaaaatgactacacatatatatttggatcacgtgttacattgataattatttttttttttttttttgaaagacattgataattattttatgttaatatgtaatattaatacttgtcattatagtgtgtgactgttctatgaaaatgaccatccgaagccattttatacatgaatttattatataaatactaaccaattgatcaacagaggaggagcctctagtctagtctatatagtatatttgtatattttaatgattgtgactttgaatatagagctcaacagtagtgcatttcaaaatagcatatgtaagtgtaacacaatggttcaaataaaagtttgttttacaacaccaaccaaataaatccaaaaaaagaaaagaaaaaaaaaaggagaagataaaaaggaaaatttaaacgtgcctaacttggaaataggaatcaaatgaaaatgcatcagtgaattccaaatgtttaattataatatgactatgttacattacatgttatgaagggaaagagttgaaagaaaaaacaaagtggagtaattaactatatataaaataagaagatctagggaagcagatcctctgtccagattttctgtccattcttctatctaaccaataaaaacaatccatctcattaatgacttgacagatttttatttatcaactccattccgttagtttattatatttcctatatagaatatttatttataataataataa

SEQ ID NO: 161987 - DNA, 615 bp, Cannabis sativa
attataattggggtggagagatctcctgaaatctatatattttttaaagaaaaaaattgattgattgaataattatgtagtagacagaatgtttttgcagattcaattaatttatattctttatagtttatattaggaaagaagatattagcatttaaggaacaaaaaatgttatgtggagagcacatgagagaaaattaattattagctagaatttcactttttgtaatttgtctcctaatactacaaaccaaggtacaaagattcatcttttatatattataaagaaaatatatatgttatgagataccttaaacaaaacccttgtaattgtatattatattaattaggctgttagctagtttgacatttgttaataatcaaaatacactaaacaaaagtgttcaatgttggaatacattaatagagatgtaaatggggcaaaagacacatctcgcactgtcctgccctaataattactcaatagtgaatacatgattaatttagattcatatataaatttttgaaatttattgtatttgcagtgagaatacttggaagttgttaggatttataaaacactccagattttaaaagtgctttaatatatagaaa

SEQ ID NO: 161988 - DNA, 3978 bp, Cannabis sativa
actacaaataatatgtaaccatcatgtttctttgagattatgttataccatttaatatattacaaaaaacattgacgtctaagttaaatacatataatttggaaaataattacgtaattatatatagttatccctatatttaaataatacaatgtaattctacattatttgtaaataaatttcataagtatgatgttgtgtgataatctaatttatataataatgaagtagaatatgtatccaaccctatatataatcccttaatcccaaaaataaaatcaaaggaaagttgtcagttatgtgtttgttgcatttaattatataccatgtgaatttattcgatgattgtacgacgtaatgaagagaaagagaattgaatttgaaaataataaattgctcacaattaaggttgtttgttttttcttctgtccaaacaacgcacgagagatctaaaaccctgtcttcaacccatcaagtacaaatcccagatgcacgaacttccacataataatatacaatgaaaaacaaaagtaatttattttatttttcttgaacttttcagttttaatgtatatatattattaatttatgagtgaagatatatatacgtatatatacatatgtatattctgattaattaaagagaaaaacaatattgcaacagagaatagtatcaagcttcgacttagttgattctgtgatgatttctttaaagtttgacttttgatttataatattttagtcattgacttaaattttaacatttccaaagaaatggcaatatgtgtcatcatgatttgcacgccattataagaagataaggaaaataaataagttaattaggttcaaaaaaataaaataaaaccatgaatatatagttgagatttatctaaaagtcaaaatgcaatataaatagcaaagtcaaaatgcaacataaataccaaagtcaaaatgcaatataaataccaaagtcaaaacacgaacgatgttgatgatcgggggctgctcgctctctatgagcaacgagtcactaattaaaaattattaatataaaccgatgcagatgaaggtcatatttaaatgatggaaagggcgtgttatgacctaacaatattatggtggcttttaaatgggatgaatattgaaagattattgctattgggtaccagtggtgcttaattaatacccttaagatgtgttgtcttacgattacgattgactaccgatactccctaaaaattattatattaaattatatgggacatgatacttaatttgaccaataacgatattaacatggagggtgcttgacaccactggtgtcttttagcatttctcatattgaaaatataagaatgagaatatgaatacgaatttaatggaataaaatttaaaatgaataaaaaagttaataaaaaaatgttattaaattttttcttatcatggaatgatttttctttgcattttaaaatgaaatagtcattccactaaaatagtggaaaggtcattcccttggaatgatatttccaatattttattatgcaactaaacaaaaaaaaatatattttattttcattttattacacttcattacctccaactaaaagtcactaaaattgcaattatggtattagtttttttttttttattttctttagtgaatttaattttgtataattattttttaaagtatattaaataatttgagtatttcgtttgtttggttctataaatattttgctagtttgtattatattttttagtttgtttgtgctattttatttagttattttgtacaacattatttagctagtttatagtatgttgttggctcgttaaggcataataatacaacctcaaaaaatgctattgcatataaacataaataagttttaaatcttccgtttaattatattttaataatttttgatgaattttctttctattattttatatcattgttttcttattatttatttatgagcgaattaaattttgttactattttggaaaattagttaattttaatttagatttgatttatttagtttgattaatctctcatctggtgcaagttatattagctagtatatttctgcttggaatacttagctctaataattagacataacaaattagtttcaagatgacattttgagtgaaaaaatgcttcaaagataattttttcttgttaaaataataattccattttatcctgatttaaacaattaatcacaacattattattgtataaaatgctaatctatttttctatatttatttatttcgttgttaattttggaccaattggttgtttatatcggatcccttaaaggtgatttcaagttattttgtctaaatttctgagaaagcgtgatcttatataaattattttttttaagtgattcatattctcactttgtatatctttagctagacaactagcttgttgactgaaagttctcttacatcgacgattatcattgtatgattcagatcactttctcttaaaaaaataagaaatatgttaataataatttaatttatctattttttttttatatttttgaattgaatagttgttagagattttttttactttgatatcatgttagaatattataaaatgcatgagattctatctcaaaactaattattttttttttatcgacttttaattttggatgagatactcgctagagtttgactgtagctctgatatcatttagaatttagaataagatgtatgagattccatctaaaaattaattaattagctatgaaataagtagttcatcaatcttatatattctattatctttacacatatattaacattatgagattttttatctctaacatataatacatactaccaaatgttatataactagtatattctattttatgagatttttttagaatttattgtatataatcgatattgtgtagtgattacaatatatattattttatgattgtaactaatacataataccaaatgttataattgagtgttttaactaatatagcttaaaatttagaaagtttatgattatactgtataaaatcatttaaaaaagtacttgcactaattttgccataccactagtagacaggcattattctttcttttttttaaaaaaaaaaaaaaaatagaaagattgcattaaaaaataacatcaattttttcaaacaggcattagttttggcgtaccacttatagaggtcaacttcttcaacataattaaaatttgataataataaatttacttcttatttttttttttaatttcattaaaaatgaaaaattgttgcaccatggattctttttatttatttatttatttatttattttgacaatatcccaacagctgtattttcgttttttgtttgttgtaccaaaaaactctttaatttagtaggagcaaatatagttagttgctttctcaaaactctcgaaccaatatagtaattaatgagcaataatatctctataatgtttttttcatggtaaatttaattttgagaaatgctaaaaggcaccagtggtgcctaagtatcgagtcccatgtaatttaatataatagcttttagagagtatcgctaaccaatcgcaacgcgacatgtcgcaaagatgctaagcaccactagtgcctaatagcaatgctccttaattttatatatttatactatattcataaattattaatggtggtacattacaattaaaaaatatttatatgaaatgtgttatacaacagaaaagtgtttgattgcacctatctaaaagaaaaattatcatttccttttacctaattgttaggaaaaatatatttctattattctttttaaataatataatagaaaaaaatatttatacttctattattgatttgtgacactattatacctatattgtaatcatggccgggcgctatgatggtgtgcaaggtgggctactgcacagggcccaa

SEQ ID NO: 161989 - DNA, 4511 bp, Cannabis sativa
ggccgagttttgagctgcaacagtagccatattcgccgtcaatggcggaaaaggctttgataccatgttatggttagtgttccttcggttcatgatgaaaagaatcaaacagtaatcaaagatgaacaaataacagagaggaagaaagagaaagagaatcaaagagagtcattctattattgttgaaatattacagagtacaaagagatttatatattgagtcacttgagaggagtgaccaactgaaaaacagttgaaaataacaactctgcaataacagaaataacgacaacaacagactcagactatgactccctaatacatatcatcttaatacgtacacaatccattgagaatgattttgtgcaacattcaatatattatacaaactagattttacagatttcattacactttaaatattaaaaaaaaaagtcttaaccttataaattattttaagaggaaatttttctgaagtgaaacattctccaaatgaagaaccaaccacatgtctcctgcaagtaagacacctcttaaataaagtaatatgaaaaagaatatattataatttgaaaagaaaattaattattagtatgtttcacctcttagcttctcataaattgaagtattttctccttataaatcttgtattaattaagtacaccaatcttctacattactcaagaacttgaaagaagtgtatctccaagacttattgaagatcaaagtaaaacaaattccccaaaatccaaccacaaatcccattgctaagctgatgaaaaatcctttggttataataagctcgtcttcattttctaggcggtcatcaccaagatgagggggaggagttgcttctttgtcttcctgacatttcttaagaagtggggatccacagagttcgggattcccttcgtatgaggcttcatctcggctttgcagttgagtaccagttggaatttttccagacaagttgttgtttgacaagtctaaagtgttgagacgatccactttagatagacttgaaggaatttgaccaaaaatgtggtttcttgacaaatcaagagcatctaaagataccaacttaccaatctctgttggaatttgtccacttaaattgtttcttgaaatgttcaataacaccaaaccattaagttgagtgatttgtctcggaatttctcctatcaacttgttgctagatagatcgataatttttacaagacgaagagtacttttgtacgaagacaaagtacctttccaagttaagaaaacttggtcatcataatcagttattcccaattcataataatcaacagttgtaaaatatgtatcctcatcttcattctttttcattgaagaaaaattaccaatacaacttggtattcttccagagatgtgattaagtgacaagtccaacacatgaagctttaccaaatgacacagattttgaggtatggttttattgaaatgattggatctcaagctgagaatcataaggttttgaagactttctcctatccacattggtattgaccctgataatttattttttcccaagtcaagaagaatcaattcttgacattttttcatggatgaaggcaaattcccactgaaattattgttacttaaatgtaatgatctaattgaagataagctcccaatagacttaggaatttttcctgatagcttattgtttgacaaaatgagaatctttatgtatttgagtttccacaaacagtttggaagctctccaatcagttgattatcagagatatctagaaaactcaaagagtaatgataatgatcatcactaacattacacatggaattgagacttgaaaatttgtttttggaaagatgtaatctttccactttgaataaaaaatttggtattggaccaacaaaatgatttgaactcaaatcaacttcaataaggcttgatttcaatgaataatctttcactataggtccaccgatttggttgttcgaaagattcaccaaagataattgagtactaaaattccaaaaccaatttggaatagattctgaaattcctgaattggtaatgactatgtgggagagatttttttgtgtttgcaaccactttggaaattcaaaccctaatttacaattcccaagtccaagaacttgtaaatgaaagggaggaatccaattagaagagacattcaactctagatgtttattaaatgataaatcaagatgatatagctttgagagatttgagaaatgagcttcactaagcacaccttctagtgagttcatagatagattcaaaatctccaaatgcctcaaattgccaatacttttaggtacaagcccatgcaattgatttgcattaattctcaactctttcaaagataaaagttgtgtatctttgacaacaaacatatccatcatttcacctttgagattattaaagctaagatcaaggtattctagggcattcatgtttccgaaatcattcggaatagaattttctaatcgattagcacttagatcaagatatgtaagagaagccaagtttccaaaaccgttaggaatggtaccagagaagtagttacctctaagagaaaggtattcaagggaagttatatttttgaaagtgtttggaatagtaccatgtatttcattatcagaaagatcaaggtaggttaaagtagatgtaacaagattcccaaaactattttgtggaaaacttaacatgttattatgaagatcaagatggagaagattgggcatggagttaatcaaccaatggtatgtagaataattagatagaacattccaagatagatcaagaatggaaatagaagagttattgtaggaaggaaatgaattgggtgttaagtcttgaagactacaactagatagattcacatttgtgagttgaggaagttggaatattggttgcatccaatttttgacttcacctaagtctaaattacttaagtcaagaaaatttaaagaagtaagggtagaaagccaatcaaggtttgatataatcaaatcaggactattattgctaagatcaagaaacttcaatttggaaagatttccaagttgagagggaatttttccactaaggagattgttagaaagatcaaggtataataatttgctgagattaccaataaaacttggaaattgaagattctccaaatcaatgcagctgaggcgcaaatagcttaattttttcaacttaagcaatgaagaactgatatatttacctgaaaagaattgtgtgatatataagtgtcacattcatttttttttatcataagtacttaaaaaaaatatttatacctgaaagatccatgtgatatgtgtcacattccttattttcatcatcatcaccaaaagttgaaggtgaaatatcaagactgataacatgaccagatttgttgtcacaacgaattccgatccattcgcaacactctctcttctcttcttcatttccccaagaagaaagaagaggagtgctaccatcaagaccgtgtttaaacttgagaagtgcttctctttcaacatgtttgcacttgattcctctaaccttctctccgaaatttgagtaaagcaaaatcacgaaaaacacaacaatttgggtaaatgtaaccatatttgtgtccaagagattgagatgagagatatatgatcataattaaaccttccatgaacaaatatatatagtaatacaaatggtctttttctaagtctttgtgaatatatgctattgaagttgactatcgtttagtggaataaaatgaaatgattgatatttctttggctgttagtgatgttgtctgtcatgatatggatagattttgtttactttcccaaaaccatatctttcaatgggttcacacctcactacattattttacttcataaaacaattttgtactaaaaatattaaaattgtcactaaaacattatttataaaactatatattattgttttcaaaaaaaagaaaaaaaaactatatattatgattaaaatgtttttgtaaatatattgttgtggctaaaattaaatttttaataatttgtgtttacgtactagtttttactaatagttaattaagtaggtttttattatgacttaaaagagaattaacacaaaatagtaattatatattcttaggggcgagagagaggttaattctccagtactgattttacgtaagtacgtatagtgggcatcatgcatgcatggtaaattcactttccgttttaattgacttattattataatagtttgttcttattataaccaaaaagacaaaaaaaagaaagaaaaaaaaacacttattcacatgtatatatctctcatcagtaccaattaatatattcaacaaatatattctgtccataattttttaaaactctgaatttcattatatactccattcaattgatcaatactgaaaatggataataattattgtagaatatataatagcatactacaaaaaatctctctctctctttttttt

SEQ ID NO: 161990 - DNA, 1667 bp, Cannabis sativa
catggatggtagtggtggcggtggaggaggcagctgggagttgaaggcatcttcaggaccaacggcagtggcttctgctgtgtcaatgggatcaaagctgcagcttccattatccatatacatgtttgtttgtattttctggtaagactttcaatgactcacaaaaccccacctttctcttgtagtgttgtatagtctagtctagtctgctaagatgatcacacatatcaaaaataaaacaaagttagacaaaaacgaacgactgaatgagcacttatgtagatgtatatttgactcaacaatgatcatttttattcattcataacctttttaacagacaaaggaaatctttacttgacatctgttttcaaataaaactcagaaaaacaggaaattcatggaagaaatgaacagaaacctacatcaaacttctccatctgattacataatttggccaagtttacttaatttattgtaatgttttaatgaaaaaaataaagaaaaatatataggcaaactagtccaacctcaagtaaaaggtttctactttctgttgtagaggaaataaaagagtatactgctaaagcagggattggatggatggccttactgggggaggcaggaggtgattaggtaggtttgtacatataaaaatgagttatatactttacaatttggtaaaaaaagatgaaaaacaaaaaagtacacccaaactgaagttagttagaaagtcacaaaagaatgagttatatacttttctaatgtatttccttctttaatttatttattaatcaagaatattaaaaataatataaagagagttttgctatataaccaaacatgattgtctgtaatggacggttaggatctctttgtgtctaaccatagtatttttcaaatgaaaatcggttgagatttggttggatagcatttacagaatgaaaatctcattcctttatgaaactctcttgattgatttttgctttgtttcctaatatagtttctttgagtgaccaatctttgcttctgccacttttactggtgttttaatttgtttccctcataaaaaggcttctttttatcagtctctctttgtctttacccttctttttggttagcaaggcttttttggatcatttacactcgaacaaattcataattctttcttatctataaaacttgctcactaaagaaaaaaaaaagctaactacttggccaggccaatattatcatgtcaaaaccctctttagtactatatttttggataagaaccaaaaggaatcctctaatttcaaagtactgacaaaaatcacactttttttttataattattattattttttgaaacttttcatttatgtttaatgtttatttgaaatttattaaaataacattcacgactcatgggaatatgcttcatccaaatttcatgtagaagtataaatcacactaaagagtgagttatttatattatatctatataataagttacatgtacatttacaaaatttataaatctatattcatttatataaatataatgtagggtaatttacacccaagtacgtaaattataatttatttctaaaaatatggtgggtctcatataaatcaaaattatgccgttttatcatacccttttaaaaataattagttttccttttgat

SEQ ID NO: 161991 - DNA, 9271 bp, Cannabis sativa
  modified_base (9219)..(9237): a, c, t, g, unknown or other
ctgcaaagaaaaagaaaaagaagaagaaaaaagaaaaggagaagaaggcagcggcagcagcagcagcagctgcttctgttgaaacaaaagttgaaaagccaattgaagtgaaaactgaagcagcagaacccaaaaagaatgaatctaagggtaaagctgctgacaaaaaactgccaaaacatgtcagggagatgcaagaggcacttgccaggagaaaagaagctgaggagaaggcaaagagggaagaagaggagaagttgaggagggaagaagaggagaggcggaagcaagaagagcttgagaagcaagctgaagaggccaggcgtaaaaaaaaggagagggaaaaggagaagttgcaaaaaaagaaactggaaggcaagcttctaactgggaagcagaaggaagaagctcgtaggttggaggcaatgagaaatcaaatacttgctaatgctggggtgcctattcctaccaacgacactggtgcacgagttaaaaaaccattataccagaaaaagaagtcaaaaccaattcctcatcaagttaatggtgcaggttcttctaagccagttgaagacactgaggaaaaggaatctcaaccagaaactgtttctgaggtcaattccgtggtatctgagaaggttgaggagacagatgatgttgatgagaaatctgaagtggctgagtctgtcaaagagaatggaattgaagaagaagaagaagatgatgatgagtgggatgcaaagagctgggatgatgccactgttaatatttcagtaagtgcatttgctgatgaagaggaggctgactctgagacgaaagttgctcctaaaaaagtagtgaaaaacacaggtacacatgatctttatttttaattaggatatctatttaccaagtgataaataagagtaatattacaagttagttctgttgtgaaactaactttgaactgtttattgaaaatgaaacaaactttgagctggttatacagctcactatcataagattttaatctttgtaccaaaatagcctagaggtggagtaacacaaaaatgaaagtgtacgaacatagtaaaatatgtttttggcatttgatacttgctttcccaaacctccattaacaacaggattatagcttctagagagcatttaaatttgttattgctgaatttgaaccgataatggatccaatcttgtgaaatttctattattaatggcgtttctatttgtgtcctgcattattttccatgatatgtagtttactatcttatgatatctcgttgtcacacattcaagtcagaatattaagctttagcttcctttgattaacagagtgtgatgatcaaatttttttgttaaaagggtgaaaagtttatgcatctaatcagttcttgtaaaggattttagctggctttattatattttttagttttcattgtttaagcatgttataagttataacttccaagatcgctttttttttattttttttttaaaaaaattgttagacacattcttttttcttgttagagtgtttaccttttgacttacgcttaattagggttttaataaggtgttgtggatggttgatggagcttcaatgggttgttgaaatgggatctttgtttttcagatgtttgtggttctgtaatttttaactagtgttttatttattttgacaactgatcatctactcttctgggttttcaatatttgcagcctcttctgcagttgcaagcaccaagcctgttcaatctcaggatgtggacaataagaaaaatccagagcctgaagtcactgaaaaaaagaagacgaaaaatgctacggtcaaaaaagcaacacaaaattcagatgctacacctaaggctgaaaaggaccttcgttcacccatttgctgcatcatgggacatgttgatactggtaaaactaagctgttggattgtattcgtggtactaatgttcaagaaggtgaggctggaggtattacccaacaaattggagcaacatatttccctgcagcgaacatacgtgaccgaaccaaggaactaaaagctgatgccactcttaaggtgccggggctattggttattgatactcctggtcacgaatcattcacaaacttgaggtcaaggggttcagggttatgtgatattgcgattttggttgtggatattatgcacggcttagaaccacaaacaattgagtcattgaatcttttgaaaatgaggaatacagagtttatcattgcattgaacaaggtgcacactatagctgaacagtactggttatctcccttcaccattttcttcatattatactcatgttttttattttattctttcaattttgcaggtagacagactctatggatggaaaagtacccgcaatgcaccaattgtaaaggcattgaaacagcaatctaaggatgtccaaaatgagttcaacatgaggctcactcaggtcatagggtttccaattcttttctctattgtactgtgtctgttcaattgtacttacaaattcttaaatttgttcggttcatcagattgtaacccagttcaaggaacaaggcttaaatactgagctctattacaaaaacagagaaatgggagagacatacagcattgtacctacaagtgccattacgtatgattcattaacactgggttcagatttcaatgtaacttttcattctctttggacggtctgtttttgctttcttgtctgatgttttatgtttggggtaactatttcagtggtgaaggcattccggatatgttgttactattggttcaatggactcagaaaaccatggttgaaaagcttactttcagcaatgaagtgcaggtttgctttattttctccataccaatactctactcttagacggttaaaactggataaattctgattaaatcttcttcgtttttgccagtgtactgtattagaggttaaggttattgaaggtcatgggacaactattgatgttgtactggtcaatggagtgcttcatgaaggagatcaaattgttgtttgtggcatgcaagtaagtgtctttaatccttcttccagatccagatgagacttttagttacgcatatttgtaatttgtttctggagaattcattattcatatgaaaagttattgatattacattaagaattttactaataattgttaatgtgtatttattttaagggaccaattgttactagcattcgagcattgttaacaccccatcccatgaaagagctccgtgtcaaggtaatctttttcctgagaatctaagaatcttaaaaaagaaatccaattactaattttatattatgtcttttatagaagcctcacctaaagtccttatccacttggaaaagtaactaaattaaatctaacgtgaagaatctaaatagaggaaaattgcaataaaatttatgttttggctctcatatgtgctaccaattttccatcaagggtttttctttaattccatgattcaaattgagaattcctgttgtctcatgtactcataaaagcttcccaggatttattgatatctccaaatcaacagcattattatgtttagatggccacgaaagtgacgaagtggaacatttcattaaacttgaattgcatgcattggactggctaacttgaaaacataaaatatgtgctttccttatttaccgttttgtgtggatgttgtgatattctggtgtcccttaatcttagttctgaactattttaattttgagttactgtttgtttgatgtttagggaacatatctgcatcacaaggaaattaaggctgcacagggtataaagatcacagcacaggttatatttctaactaatcctccatgttttcaaaccctaagcacttcagaattgtcatggttactgttgaaggtcgcatccttaattgattggtaaatgttttatgcagggtcttgagcatgctattgctggtactgctctatatgtagtgggccctgatgatgacgtagaagatatcaaggaaacaactatggaggatatgaagtctgtcatgagcagaattgataagagtggcgaaggagtttgtgtgcaagcatctactcttggttccttggaagctttgctggagtttcttaaaaccccagaagtaaatattcctgttagtggtataagcataggcccagtacacaagaaagatgtcatgaaggccagtgtgatgctagaaaagaaaaaggagtatgcaacaattttagcttttgacgtcaaagtgactccagagtcccgtgaacttgccgaggagttgggtgtaaagatctttattgctgatatcatttatcacttgtttgatcaatttaaggcctatatagataatttgaaggaggaaaagaagaaggaagcagctgatgaagttgtattcccatgtgttctcaagattttgcctaattgcattttcaataaaaaggatccaattgtcttgggagttgatattcttgaaggcattgcaaaggtacccttgttttattttatttttttatttcgtattattggtagtgtcagtgtcgcaaaccgtaacaagtcggtgataaggttgtggccttatttttcatttcatgctttctgtcatagaaccgggcgaaatacaaaatgcaagtagaacttagtctgcttaatttactcctaaaattgaaggtggttatttggagttgttaaattaattgttctaactcatgaaatttgtgttttgtatggactttctagttgatgtgtgtagttgtgacttgttaataaccaggtcttatggcatagggaaagggatcgagagttcttttattttaacattttcaacagtatcagatgaattattagttctttgttaacattgcacatttctctgtataggtgggtactccaatttgtattcctcaaaaggagttcattgatattggccgtattgcttcaattgaaaataaccataaacctgtcgatactgcaaagaaagggcagaaggtggccattaaggtaaatatttaatgcttgtattagtcaatttcaatttgttgtctgttgtgtagcatgataagtacggatttcatgcgttgtcaacattatcagtaaagtaaaatattctctttaaaaattaaaagtgaatttgtcaagttgatgctttgaaatataatatgtatttgggatttgcaaattcttgtgtaacttttgtgcaccaaagatttgtaatcagtatttctgtatgacttgttgagcttttagtctgccaagtttaaattcttgtgaggttttctttatccagatggttcgtaagtttttaaagaaaataatgcagattttctgattttaataagagtgaattaattatgttatgtactatttggtgaaactttcttcatgggtatggttgttatgaagacaatttgagttctgaaaatgtattcatcacctgaaaattgaacttaaagttcaagcttttttgacttgtctcaaacctttatgtcaatcatttcactttaattatcaatatgataagatttggtgttttcattcaacgtggtagttaagagttgcgcttatagctctttttgttcttgcgcttttgcagattgtgggcagcaattctgaggagcaacagaaaatgttcggcagacattttgagatcgaagatgagcttgtcagccatatctcaagaaaatctattgacatcctaaaagctaactaccgagtatgttgaaacgattgttgataattttctgcttccttttatggatggttgtctatgtacatatcttagataattttatggataagtccttgctttgttttctaaccataattcaaattgtttaggaggatctatcaaatgaggattggaggttggttctgaaactgaggaatcttttcaggatacagtgagatattttctttttatatatgaagcacagccacaggacaatttttcggtcgaaaagaccaggtggcttcaactgcagcaaaaaatgtttgatcctttcagcagcggcagcatcagcagcaaattggtcaataaattcactgttctttcagtgttcggtgtcggaagaagtgatctgagctcgatttcattcatgtgttgatggtggtatacaaagttgtgagtgtggaaagctggaagtgggtaagattttacctaaaaattattatatttttgtttttgttcaaagatgttaaacgtgttttgtctctttaaaaatttaattcattgtctaaattgtgagcttatgttgtagcccccttagtggcccttttcttttttaggagtaactttctgaagtagttgtatgttaaaattttgatagttggggttattgcaagaacaatattttaatcttaaaataaattctttcatcacatttgattatgtttcttggttattttttttaatgagatgagtttatagttttgactcattaatattttatgtggtaattatttattttgaacaagcaactattaacgcttgctcaaattgttataggatcaaagccagccacatatcaaggtggttgcatgggcgaattcaaaaacaaaatttcaatttgtgtattgccaaacacttatttgtttgctttttgtactatttatccaaaatcattttatgttttgacattattaacaagttttaatttaaaaaatgaggcatctgtttccatgctaattgtaatattatgacttgaaaccataaataaatttgggtttcttttagatggattggtatggccaactcacttattaaagaggctaattttagttgatatgcttaactctaaaataacacgacaacaacttatttaattaattaagagtatataaatatgttaaatgacttctatgttatagtgcaagtatgtttaattgttattaatattttaatggattgataagttaatcaaaaataagtatgaacttttatataaactagattaaataggtcgggtactaactcgcaaaatacgagttaaatatagagattgtgaatgtgaatatgcatataaaggagtaattgaaaaaatatatattaatgggaatcaaatccgtttcagcatataaaatgttaatattaatgttgagattaattgcttaaaaataaaataagcaattatataaacaatgttaacgctttattcgaaaataacaacctcatctctcaagatcttgtggtcatattcatcaacaaaccaagctcagaatgaaattttctataaaatgtatcccaacataattttctataatttattttttaaatgttgattaaacatgtggtaaaacataaatgttttattgatcatatatatatcaaaatataaaaataaaaaaattttgtaatcttcatcatcaatattctagatcaccagttattggtccagagtgattattaatatcactacaaatatcttcactctcatcatcatcatcatcatcatcatcttcctcttcctcatcagtagaatcaccaagcaactgttgctgaccattattgtcgtttttatcacaataagtgtcgttttcttgttctttattgtcctttggttcttccaagctaataatactactatttccaagcctaagcaaactctcagtgaccaaaatacccttgggattaatatcctgtacggctctttcatgcaaagccttacaagcaaccatagcagcatcaaaaattaccatattgtccttactaccaccacaatacacaatacagtgacccaaaaccctcataatcggctgcaacagctcccacggtaacgaaatacgcctcccctgttcttcaccgagttgactcggtcccgactcaccacaggcccacactctaaccgactcacaaaactcaaccttagaattcaaaggcatctcgtaaattttgctgtagtataactccaaagccactcccacgatccacgcccggcgcgtggacctcaccgtccggtggggttccaggctcggcgacacgacggagatgtggagcgacgtggagttgttggtgctgtttttggtcggcgacgtcggctcgtggtacaggctagggttggacatgtccgggacgttgacggtcaccggctggccggcgcgtgaggttgtttcgtgcgcgtagagggcgagcaagatggcttcgaaacccgcgagtggtctgcgaagggtggcgcgtgagaggtacgcgcatgcgattacgggtacaaatcggatgactacgagttggagtttaggatcgccggattggaaggtgtcgtagagccagcggcagaggttgttgtcgccggtgccggaggaggggtggcggaggagggcggtgatttggtcggagatttgtgggtcgtggaggagagagtgagaggggttttgggagggaggaattgagggaatgatggcggagagagattccatggctgcctcagacttggtgttatgggagtcttgtggcggtggcgctgttgtcggaatatcattttcggtcactttttcagcgacagtttcaagagtttgagtgcttgtatcatcatcatcattggtcattgattttgtgtttttgttaagagaaaataatttatttaaactaattgtgaaaaattaaaatttaaagtgattgatacaatcaaaaagattatttgttaataattagaggagacgtagtaggagcaaaattaggatctttattatgaatgagattggttcctcttaatatacatatgacacatcattaatattagtaatatatatggagtttttgttttcattactatatatggtttttctaataatttgttttaaatataggatcaattttaataaatatggatttcgcatgttaataatttttttctaaaatatatgacattttcgtattatgagaaattaaggaacatataataataataagtaatctgtggtaatagtagctaggtaagcaataattaaggaggtgttaatttgtaagtaatattgtttgtaaattatgtagtataaataacattaaattttgaccaattgattgctttataaaagcttatgtatattttcttataataacaaaatgatgaatgtaggaaagagtttagtgaactgctagcggcaacctcgcccaatagggccccgctgaaactcaactgaagatttttaggtggcgtttggttagaattaatgaaatgggatggaatggaaaggaaataattttcattccattcttnnnnnnnnnnnnnnnnnnnagtattggaatgacattccaatggaatgctcttt

SEQ ID NO: 161992 - DNA, 2347 bp, Cannabis sativa
ctaataatagttctaatcaaagaaggtgaggagtaaagattgtggacttacaatcttgcctatcagtctttgcagcaatttgaacatatttactgatctcaatagcatttagaagcggccctcgagtagaatccggggtcttaaggaatgaaaatgagaaaacaaagtctaggctcacattcatgtagctgggttcataaaggttgtagcttccattggcattctcagcaatatttaccactgcattgttatagtcaagtaatttaggttcatccaatttgaattttctagtctcatttggacccaagtcttcaatttcagcaaaataagcatatgctcgagcagttccagggaatccttctaaatttaatctgtaacttaaccttccttctgtgccaacaactgccgtttgcattactttagcaggtgggtactctcttgtccttgcatctatatcccttaatgtttgtattcttttagtaccagaagccaccccaactaaataattttgcctcttttccagatctgaatcccaaattctgtcataagggtcatctgggtacctgtaaaaagacaattcttttgcatttaacaccacccttttgccaataaaaaacaaaagttcactccttttcaagttgctacaacttaccttaaggggtctttggtcaaggcaccaaagttcactctagttgagaccctcaagtagaaatcatcctcaaaatcagtggcatacatggaaagattcagaggcctcagttcaagggtggagatgaatggagaaccagtagtggcacaacaaatgcaaacatcaatagaatcagacggtgcccttataatcatttcattcacatagactcttgaagcatcaaaaatggtgacagtagaccactcagtagtatccaagtaaagcttaaacttggggtatgtatcttcatttttaatactgccataatgaaaagtagctcgtactaaataccttctcctctcttgggttctcaaagtgtagcagtattttctgttgtctatagggaactctcgtcgtgtttggagctgggttatgttcttttctgggttttctactactactgatgtgccaaggctcatcattccattgtctgaaatccatcctagtcctgtacttgggtcagtgtagtttttggtaccaccacagtctatgctgataaaatcttcaaattcaaaaagaaaaaagaaaaaacacacttcaaaataagtttcatattctatgccatctataagtactcaacagaaagaaagaaagaacatacctttaacttggcacagaacagttgggacaagaaagataaaaataagcaagtagtgatgaatataaaaacccattgatgatggtgatgatggaagttcaagaaaacaaccctctgtctttgatgttttcaagatttagcattttagtgaactagtgtattacaaagactcatgctttttactaatggcttaagattgaacatttcagaaaaaataaaaaattgaactttttctctttgattggtgagtaataatgttcattcacgtttgtgtctttttgaggttttggaatataaaaagaaaaagttaaagaaatataataaaaagatctttacttcatttctggttggcatttcccttaatcagtgtgaccccccatataccttaatcttgaaataattaaattaagataaaaacaaaaccaaaaaaaatacaagtaatgctagttatttaatacattattaaaattatattaattgttatgtttcatgggaatttagggaaagatctaaaggccatgcccatgcataaaaaaataaaataataaaaagcatctaaataataaagcaaaagctaaatctttagcagtatcagaattttataagactttttttaatggaatggaattttattctgcatttaaattataaatatccattctactttaattgcctttggcttatttttatgcacacaacaaaatctcttttggaccaacttgtttagtagctttacactttgaaaaagtatgcatatgatgctccctttttatcttggacaccatatattggtcccccatctatatcatctcatcaatccatggttattataatcaccacacttaatatctcaattggtgtgaacgacagtaaaatagtaaaatgattttttattttaaagaggagtgttaattataatctcttaattaatttttatactgaaaattaggagtgtttacggattagtttagtccgaatttttatagtttttgaactaaaccagtataacagtttttttgaatcttagaaaccaaaccagaccaataaatttcttaaaccaa

SEQ ID NO: 161993 - DNA, 2682 bp, Cannabis sativa
ggagttgaacaaaataaacttgtggctgttgaagatgggctctgtagtataacgaagagacagaattaggtttaggtgggcgaactcgcggagattgggaggtgtgtaaagttgcagcccagccgcccaaatcaaccaatcactacgtggcctttaagtggcgcgtgagggcacagaccacacagcctcataactccacagcgcgtggacaacaaacgttttctactgcacgacgaagcaacaactccaccatcacgccaaatatttttcgattttatcgtacggcaggaatcccaattatatgggttttagtatctataatttaaaaattatttttagtttttaaaaactaatagaagttatttagtaaaatattttaaaaatatttctttaaaaacttaatttttaaaaattagaatacaaaaaacattaaaaggtagtttttcaatttttgaaaataatttttttttgtttaagatattatattttatatttttgcttacatactcagaccatgaaactcataccctgaatcctatatccgaacctaaatcgatttggacctagacctacctctcaaacttggaccccaggcacagacttggacccggacaccgaacctagacccgaactcggactctggacctcgaccctgaccccgacctgaacctaagaccccaaactcagattcggaccccagacccgaacctcggaccctggccctaacccgaacccagacccctcggacccaggccccaaacatagactcggacccagtccaaggtctggatctaggtctgagttcagggtctgggtttgggtttggggtccgagtccaaggtttgatccaatgttggatgggttcctgtcatggtatggtgtagaatattgattttttcagtaaaaaaaaatctaaaacatagtttaaaaaaactgagtcaaacaccattaaatttttaaaatgataaaaaattgttttttgttctcacttttgaaaacgcaattctgaaaactaaaaactgaaaacacagctaaatagcctcttagtctctgatttttttttcttttcaatttggttccctaaatatataagttttggtaagttagctctcaaacattatattttaggaatattggcggcaaaattacttaaattttataatttttaacacttaaccacataaagtaaaattttaatgtagaatctactgaacccaagtttcgttttgctcattactatcatgtgacccttgctccgtttaagtgtcaaattggcctacgtggcacgatccaagtcagctaagtcatgccatggtggcattaaaacctaaaacaaataaactttcaatttagccaaataaaataaataaaaccaaaaaaaagaaacccaaaatttaaaatttaaaataaaaacaccctactactcgagtcatttaccctatccttcccttccaccattgttacacagtcgaagaagaaaacgacgagggttccatatcccaaatgctcttgtcaacaacctcgatccagtgatcaaaactttgtggacaaatgcacatccaggaagaagattcgctatatgtcgtcgttatagaatgagttgttaatttttttctttgcctgtttttttcctttttcgtttgctcatctcctcctctcttcggtcttaaatggtgattttttagcagttggtttgtgggtgttatttttgagagtggatcaacccaccaatgtgtgaaagggcttcagaggtggttcttgggttgttgcataaaattagaaggcttgaaggagaaattttagacattttaagattaaatgttgatgggcattattacctgaaaacaatttgaaaaaaattgttgcgtaatcttctatacctaaggtcttgaacaagggagttcaggttgatgaacaatcttttcttaacaatatggaattacatagaaaattttgataggagtagcagcactagtgttgaagatccaaaaaaattaatgagcactagtggaatattagtcatatctgttatatttgtcgttatcctttcttagttcatttcatgagtgttgtttggatcgatgtaattgatacgccaatgtatgaaaatgtattattttatgtaatttaaggagatgtttacgtcactcaaaattatttcttttcttactcctaattttccccagataatatcaccgtaaaattcaaacgtaaatatggtaattaagtaagtaattaagaaagaaaaacctttaaaaaatcatgtaaatgaaatagaaaaatttgattttttttcttgttgatgagttgctttgggtttcgacacatacaatacacatgtagtggttttagtgtgagaatgtaattaaaaaattgacaaatttaaatgaaatgattaatatatgaatactgaagcattagctaaatgtgatgtctattcatttggttgtcggtgcatagatcaaaataaccaaagacatctatacaatattgtagcattagcaaaatataagttaagaccctatttgtttgttggtgcattgatcaaaagatcaccaaaaaatacctatacaatattgtagctgttataccaaaaattcgactagtacatcagaggaagacacgtgtcaagctgggaagaataaagaactcaaacacgtaactataattacacttgaaatg

SEQ ID NO: 161994 - DNA, 4386 bp, Cannabis sativa
cctcgatacctgcatatcaaacacgagcaaaaacaaaattctcaaaaagctcttgcatgaccataagaatactaacctcttctcaaatggtttatgcaatcaaatatttactaaatactcaccaggaagagaggcgtgcatcagatggagctgcaaccaaattttgattttccatgacactcaatggaatccaaaatacagaagaatccttaaaaccacaaacgcggagaaatgtcccgagttgttgcttaatgaactcaaaccgatcatttgagtatcctatgatatccatcttgttcacagcaacgataatttgctccacaccgaagcttctgatgagttgtgcatgctctcgtgtttgccccttcatggtgtccatgcctgcttcaaatgccccaagggaggcatctattacgagaatcgccgcatcagcttgtgtggctccagagatcatgttgggaacaaaatctttgtgcccgggagagtcaagcacaacaacgtgatacttcttcgaatcgaaatatgccacagccaccgtcatagtgattcccctctccctttcttcagcactttcatctaatgcccaagcataagcaaaggacccttttccctgattgaatgaaaaacacaaattaaatcatgaaagaacaagtttcgaatagctgaaatgcataataattacactcagtttacctgctgtttggcctctttttcatacttgtgcattagtttttgagaaatccgacctgaaaggtgcagcaatcttccagagagagttgatttcccagaatcaacatgaccaacctacaagaacatgtcaaaaaaattaatcatacagctagatcacataaacaatccaaaaaaacaagttcacaatagatgactcacaatagcaagattcaactgaatcagggtgtctttagcttgatcaggaagcatccacttttcaggtttatattgtatctgtgactgagtctttttagatttaacattgtttgactttccagtcttaacctccaaagccatgttattaactttactggcaagactttctggcttgcccttattctctgaagaattaatgttctcatccatgttactctgtctgccttttggttctgaataagatgaactattaaccgattctgcataagcagtatcactggttttgtaactcgcctcccccacagatctgaggtgatctcttgcacgagaatcagatgagacatccgaaatgttagcacttcctcttattttaactgtctctgtcgttctaacacttgattgttcattacgagaagttgtatccttaatgacagctgaagaaagttctgatgtctttaaattatcaacattggctggaacataaaaaaaataagaaaagttaaatttaaatttaaaacaccaaacaggaagagttgcaaagatagaatatgttggtgaacgccgacatttttgcaaggaaaataatctatggtcagagtcaaaattactttttcatattctcattactaacactaacaatgaacaaggaaaagattactttctctcacacaggctacaaattatatgtattacctgatgaaataatcaaatgtaacttacagagtaataaagcataactaaagaataacttgtaatattatgctccataaaaacttgacatgtctgttcaatgtaaaaatgaacttgcagcaaatcatacgaaaaatgaaatttattttttggaaaaggatggatacctttcaaacccattttggatgaacgcaatccaattgaaaccaaatcatcaggagatggactttcaaacttgaaaggagctgtatcaagagtaaaagttcatttagaaatcccattatatgaaataaacagttctcgcaaaacattagtaaaagaaagtaacttctcagacacaaaagatgccaactacaaaaagggactaatttcttatcctacaaattaatatcctctttcagaacaggtgcagacctatattaatcttgtgatagttactagtacaaaatttcttatggaattcatgtatatgcccttggaatttcccaagcttgtggacgttattgccattgtcagtctcaaaaccatctttctgatgcggcagtgatgcaaaaagagacttggccattagggatgcttcagcatgtttgcatatgccttcaactgcatgaaagagatctactctatgaaaggacaatgaatttaaaatcgaaacctatgacattaggtaactgacacggaatgtggatttagaagatgagttatctttcgatcacctaagactaagagtattgaaattaaacaaattcttgcttaaatcctagagcatgaaagagatggtagctagtgttctttgaaatatcaccgtggtggagaatagtgtcttatatgctgacaaaattacataatgcacactttcaacaagactaagtttacaaataattcaatgagtatgatatatatatatacctgcttttttgggcaaagggttgcgaagaaccccacatatatcacatgcgttcatcctctcttcattatcatacgtgcatattgagcaactccatgtctcgggccttctactttctggcgtatactgcacaacttcaactaataaacaaagcacaattaattttggttaaaaatatgtcccagtgaccctaaaaatgaatagaaaattgtaggcatccaatacacttaactaatggctgaaacttggcaatcttttattatgtcttttgagtaagttaattggtagtatgaataaataatctcttttcctttaaatcaatttagcctaaacaagctcgaaatgaaagaacattggagcaaagcatgacaacaaaggaaaatggtagataaacaaatgagaacaaaatgaaggaagcaactaaccattctcttcttctccatcatagtcatattcatcataatcataatcttcatagtcgtcgtaataatcaactccggtattaattttccgaggcatgatttcaaagctgaattataaatatgcataaaactcaaacaaatcacctcaatttgttcaaaacaaaacacattttacaaaaagaaaagaaatagcaatgaacttcatcatacaaaccaagaaaaagccttcttatagtgatccttatgtatgagctcaaataattcaacctgcacaaaaacaccctataaaataaaaataggatcttttttccccctaaaattgttaccactttcaattctagcaattcactctaactatgcactaaagttttgcactttatgttaattttcattcaatgtggcaaacagaaagctgatttggcacagtgagtgctgacgtggacgtgccacatcagtgccaagcatataatattaaacaaaattttatttcaaaaattgaaaaaaaaaaatctaattttccatattaataaaattcatacataaaaaaaaaattgattgttcatgttcaaacctattgaactcagaaatttagggcaagcaaataccaaattcatacaatcctatattaaagatctatactttcaaatcatagaaaaattctaacatttcaataacacagccaaaaattacgaaatcaaattcaacaaaaccaaactcagattcttcaaataagcaaaatcaatttgagatgtgttagtaatacctctactcctctctaacacagaagctcgttgaaccagttcgtccagctctggcatgagcagcgaaaggattcagccccaattcgcagaagaaatcaaagaatgagaaatcggagcagaggaagaagaagaagaagaagaagaattgtggcttttggaaagtttcgaaatttgttgtcttatttaataataaaatttgttatatttctaatcagattagattttaagatttttaaacgatatttcttttaacctaaatttccttttattatcaaagaatcttttatacttttttattaagaaaaaccttgattgattaggaaatacatttaccttaatcaacagaaaaacttttaggagaaaaaaataagctaagtttattaaaaaaaaaaatcatttttaccaattttttttttttttatgtttatagaattctacatagaaattctttttacaattaaggaaacaacggataaaccaccttagaaacctaaaccgtaaatttaaaaaaattaaaaaaaaaataatatataggtaattttctaaaaacaaatatttatgttattttagttttttttttcttaaatcttttaaaatagatttttaattggggtttttcattttaccttttaaatctatttatatatatatatatatatttatactagcaaaaaactacgtgcgaggcaaatatactaaatttatgctagtttttttctat

SEQ ID NO: 161995 - DNA, 5843 bp, Cannabis sativa
  modified_base (1887)..(1904): a, c, t, g, unknown or other
ttttttttttttttttgtagatagtatctaataataactatcgtcactcttttttaggggacaatgccttcgagcaataagagaccatctcgtctgccaatgtggaaaggagttaagtttgcatatttaatcattgcaatgtgcttgtttccccttgcaattgttgaatattgggcttatggaaatttggtgagttaccctcttttcaaaacaaaaagtaataacgaataaacatattaatgaatcatggacatgaatgaaaacaacgaactaatcatatggaatgtttgttatatggcagatacattcctccaatgaaggggtgttaacagctttgtatgaattccacaaaagagatggatcaaaattagttatggggatgacaagtgtattggttgtaattaacagcctaagttcctttcaaatctatgcaatgccggtgtttgacaatttggagttcagattcactagcgcaatgaacagaccgtgccctcgttggctacgttcagcgtttagggttttctttgggtgcctagcttctttcatagccatcgcgattccatttttggcaagtttggcagggttgattggaggtatagcgctgcccatcactttggcttatccaagtttcatgtggattctccttcgacgaccccaaaaatacagtgcaatatggttgctcaattggtttttgggtgttctgggaatggtgctcagcgttttggttgttaccggagcagtatggagtcttgtcaccaagggaatggaagttaacttttttaagcctgagtaatatatgagaaagaaaataatgggcaaaatagaagagcaaatgaacaatagtaagtaatcattatctctgcaagtgttttctattaaaccttgattgagctatcaagacatatctatcggattgatatatactaaaatgtaaactatgtacctgatgttaattgtgtacagataaataaaacatgacttgtgcttggctttcaaacgttcttgaggtcagtttatttatactctgttatcattcccagcacaactcacaacatcctaatgcgacttactagccaataatattgaaaagaaaactctttgatgacttttttccattggctcttgtctccaattagataacattccttaaattaaaccttgcacaggatattggggtaaaaggacaaaatgaaaaatattatgttaaaccccctttatatattcattcacaaaaagaaagaaaaaaaaaacaataactactatattgctcttccatccaataaaaacatttcaattcactgttgccatcatattctgaagaattaacaatgatctggtgagcaggatcactcaattgtatctatgaactaggagagcatgggacaagaattatcatgctttacaaatcaaaatgggggataagtgtgtgtgtgtgtgttacatagacaaaggaagaagcattcttcgtctcttttttctagccaatctcacttgctttgtgattttaatgcacaaaagcaaaagcaatgtgatgcaaaccaagataaaggcaagacgtaagtgcctatagtataaagaaacagctgaaaataccaagaaagctataatgaccagctcccatattacaaaaatcacaacatctaccctgcatccagaaatggggggagaagaaaaagtttcagaacaatatcagaaatgaaatgatgttatccagaagataaattaaaaccaactaaaacgagaagtagcaaaaaaatttctgatgcagtaaagaaaaggtttctaattaattagactattttcataataataataataaactccaaggtggcatttggttggaacttggaagtaatgaaatgaaatggaatggaaagaaaacaattnnnnnnnnnnnnnnnnnnttggttgcatttaaaaccattggaatactgttccgatagaatggcctttctatcatttcggtagaatgactattccattttgaaatagaaggaaaaaccattctaatgcaaagtttgaaaaaatttaataactttttaatcattttttttatgcattttaaattttattcattgtatttctattccaattcttatttccattcttatttttatattttcactcctcccaaccaaagccgttcttactaaatctcatacacaaagttaagagagtataagaaaatacataactaactaatcctatcagagcagcagaacagaacctgaacccagaaatggtttgtcatagctgacaaacaagtaagcattttttttgtataataccataatgactacgaaatctaacctctattgttacaaaaataatgcagaataccatttgggcaatttcttattcctactaacaagtgagttaaaatagctaaaaggtattaatttagctaaaaatgtttgaaatagcactacaagtgaggtataatacctcaaacttttagctctaaacatattctaataaatgtttccattctttttccactttgcaaaatataaaaagtgaaatttttgtgagttattattcaactaattatgagcttgttaccatccaaatcactaatatctccaaaacagaaagtttatcatatctagattggcttaatgtggttctctgaatattgatttgatctaatagattgattgctaaccatcaaccaacacacatgaacaataatacgaagaaaaaggaaaagatttcctggcaaattaaaattgaaaattctttaaaagtcaatcactacaaattacaattcgtagtacatagctcccaaaaacaggtatcaagactaatttcgaatcagattcttacagaagattaaaaaaaaaagattgatgggtaaaagagtagagcatgtaccttgaagaagtgagattggaggtggaggaaaagaaggatacagaagcccagtcgtgcttggatcgaatttgatactctcttagctgctctgcaagatttgatcgagttatcatggctatcgtcctcgtcctggtgttttctgaaaatgggtaatttaggaggaagacgaagcagatcccatcgaatcgaacaaagaaaaagaaaaagaatcaaacgttcttctgtatagcgttgcctttctttccgtggacctcccacactctaactttcccctttatattgatttctcttctggttcaccagctaacattgagtgaggttacagcggttcaatttattgttattagagtaacatggcacataaatacattatagaaaaaacaggtaatttctggtataaataattaagtttaaataaatttaattttttacgataataatatttaagttatatttttaaaatttttattagtatatttcattaaatatcaagtcattatttacgtgttattcttttattagaatatataaataaaaaaaaatacaaatttaatgacgtggaacaatcaaggattgttatgtggcaatttcttgatactttaagtacttacaaaagttctaaaattataatttaggtattactagtgctaaaaattaaacttaagtatttatttgcaacttggagttaaacttaggtatttatgccgcaaattactttataaataaataactttaattattttttttggcagtagtaataatatttaagttgtacttctgaaacttttgtaaatgtctgctgttaagtgttaagtaaattgtcacatggcaatctttgattgatctaggtcattaaaattttatttaaaaaatatttaaatataccaataagaaaataacacgtggataatcacttgatatttaacggtcaggtacttacggagtttcaaaaatataactaaggtattgttatcatcaaaaaataagcttagctatttatttacaactaagaattaaatttgggtatttatgctacatattaaatttattattattattattattattattatgaaagatttcaattttagtttcaaaatattttatttacatttgaaaggaattggatgttatttatctaaaagaagaaaagtattgagcttctcgtgctaaatttagttggttgaagcttagttataagaatactttctattttcataagtgtacctcaggtagaaagaagaaaaatgggatcgctatgattatgggcagatccacataaaggcgggacaaagaagcagtcgcccttgaaaaaaaaatcaaaaaaatatatatgtattttagttagttacaacatatatttataattaaaggtaaaaaaatataaacataatattggttttggcatgatggttaagttatcttagtcaaatgctcaaatcctagcaaaacatctttatttttaatatttagtttattttttgacctccccccacaaaaaaaaagtatgcccctcccctcaactttagttctgggtccaccattggctatgattcctaattaagatgatgggatatatgtttcttctccaaatgacatgggggatattttcgtagagtacttttctagcttgtttacttcggccaacccctctagttgtgatcttaatcgagttttagatgttgttcctattaagattttgtcatccatgaatagtcaactaacttgtcctttctttggtgagatgtaaagcatgctctctttcaaatgaacccttcaaaaagtctcgataatgatggtatgatggcatgtttttattagaagaactgggataaagttggtgacgatattactacagatgctttggcctttctgaatggtaattcgactctcaaaggtattagcaagattctcatttgtcttattcctaaagttaattctccttctaatcctgctgatttttatcatattagtttttgtaatgtcatttataaaattatcactaagacaataactaataagatacgagaagtattatctagtgtaatttctgaggaacaaagtgcattcttgtctggtcgtctgattaatgatgatgctcttattagttttgagtgcattaataatgctttgaaaaaaaaaagttggtgctcaagagttttgtgttatcaagttggatatgtcaaaagcttataatcaggtggaatggtcattctctacaaagattgtggagaagttggggtttcatgttgagtattagaaaaattattgattgtatctcagttgtggagtattctattttgttaaatgggggagtttcttttttttttttttttttttggctcttttcaacttgagagaggccttagacagagtgaccccatgtctccttatcttttcttgttgtgtgttgaaggcctgactgcttttgttagcttactccttgggatttcttgtggtactttggggccgactccctcatttactgtttgttgatgattcttttttctttttggaagcctcagtgattggtgtgtgatcgatttaaattgttattgacttggcatggttctgcttctaatcaaagtattaattttgagaagtctgttgttataaagaagatatgatagctatccttggtgtgattggtgtagagtgtcatgaaaaatatttgggtctttcttgtttttctgttaagaacaagtctagattgtttaatttgatgtgggatcgtatttgaaaaaagcttaatggttggaaggctaagtttttttccatagcgagttgtggaattcttattaagactattattaaatctatcccaacttacaagatgtctcttttcaaactttctaaggattttgtggttaacattcatggcatgtgtgctagattttggtggagtggtgatgatatcaaacagaagatgcaatggtgtacgtggaaaatgttagaatttattttaccag

SEQ ID NO: 161996 - DNA, 957 bp, Cannabis sativa
tttatataaattaatctattaatatatcttaaaataactgggaaaaaaattcatgataattcaatggaatgtggcccataggaaaacatgtgtggctatagctattaaaaagatagcctttggattaaatgggtgcactccttctacataaaagaccaagattaatgggagtattcacaatgatagtagctggtactgaaagcaaattgtcaagataaaggacagacttttaatgcagatttcaaaagcagagttagaaaagagccattattccattggtggtgtttatcacgatatctcttttgctgaaggaaacaaattttgctttgctgagttgtggaataaaaactgtgttccaaagcatagatttttttgtttggctgatcgtttgcttcagcatctcaaaacgaaaggcagactaattcattttggaataaccatggaagactccaggtgctttttgtgtggtcaggatgatgaagatcatactcatctgctctttgcttgttcttacaacagattgtgtttggatttcatcacaaattggctgaacatccataccaggcagttgtcaatagaaggtcaccttctgtgggttaagagaagccggttgagcaagctcaagaaaggtgcatacatggctgtgatttacacaatttgaagagttagaaatgtggctttttgggaaaggaaagtgtggatagtccatcatactacacagaatactaaatttgacgtatatatcagattgatgtatacaggggtctatggaaaaagtggtatagacattaattggtttaatcaattgttttgattgagggtgggtttgtattcgtattggtgttgaagagttaggttgtaattttgttcatagtgctaataatttatcctcttcttattccaaaaaaaaaaaaacatagttggttacttatcaaaattatagtaacttttaaataa

SEQ ID NO: 161997 - DNA, 1837 bp, Cannabis sativa
ttttttttttttttgaataaatgtatttatgtgtgtgtgtgataaagagattgaccacatattaaaacatttactttgtatcaatactaatacaaattaaaaaaattgatttaatgattctcgtatgtttatttaattaaaaaaataatttacgacatagatacttaaatttaacttataattgtaaataaatatctaagtttaatttttagcattaataatatttaaattataattctgaaatttttacaagtaattgactattaaatgttaagtaaattgtcacgtgaaaattatcaaagttagtaaatttttatttttttaaaaaaaaaaaaattagtttaaacataccaataaaaaataacatgtggataatgacttaacatttaatagttaagtaagagttctaaaaatataacttaagtattattatcgcaaaattaaacttaaaaatttatttacaaccgaaaattaaatttatatttttatgttagcctcgagcaacctactctagcacctccttctgcagattactctaattaaaaaagaaaagaaattattttgtttttgtcttactattttatgatatatgtcactcttgttgtgaaaagtgaaaactttgtagtagatgaagtagatacaaacttttacatacaaactattactaagttagcttaaaattaatcccacctaattttgatcctaaagttaagatataacctttttatatataaatatatggttaagtatttttttggtaaactttttgtctaattcgacttttttaactttttttgtttatcgtgtatgtcatagttatttaggatcacttgtaaattttttacaattttttaactaatatacaaaattaaaaataaagtttaaatattttattgccatacatgtggtaagtactatttaaactttattattagcattgtaattttttttaaataccaaaacagataaaaattctatgagaacaatcatgattctactactaaatttttttatacatgtatattattttaagaataatactaataatatgtgcaactaatgcataagagtattacattcaatgactttgatacttatttaaaaaacaatcctaaaccctacttaaattaactcaacattcatcaccaaagaggtggtctagcacttaaggtgatatatgagtgttaagagttttttggtaccttttttggaaagtttaaatgtgaaggtagagacctgcccattccgattctcagtcttcttctacctttaggatctttgacccattccttaggtctcacattttgaccttaaaaaaaattaaaataagtctttacttgaagaaacttggaaattacaatgtatattcattttttatttttatttttactttttaatttatatttaattttataggttatgttccattatgtgttctctaattttaataaattatataagattatatttaataatttgattataaaaagagtatttattaattaaaattattttacaattatatttaattaatgtgtaataaaaaatagtaattttcaatttattcctaattgtgaaatttcagttatgagctagatagatcctaggcgtatatttggtctacttcagctcagagtcggtcttatgaatagataaatactaagtatcatagtacctaatacttatgtgatgtataatatagttattgatgcagctcaataacaaattataaaaattacaaattacaaagggaaatttaattttttatacttagaaaatcttaaaattttttccctaaaccaaaaatttaaaccctaaaaaaattatacattttttt

SEQ ID NO: 161998 - DNA, 4951 bp, Cannabis sativa
ctggtaaaataatttcctacagttgcaagttataatctaagagtttcagggtcacctacttctgatggaggatttatggtatcctactatcctcgaatgatcaactgtctgtgagcgatcccctatccagaatagataatcggaatccaaactaattgtgtcaagtgtcctgctcttagcagcatttcagtcttatcctttaggtagccacattcattggtggagtgtcctacctttccgtgatactcatgcctcttacttgggtctcttttcaacatcatccattaaggcatccgtggggcctttttgtagtggaccacgttataggtttctctatacacattctctcgagtatccattagattggagtactttatatactttgtttcataatactttttggctttctttgaaatctcacttcatcctcgtcctttttctcctctcttgttctgggattggctcatgttctattctagattttctgctattatttgttaaggagcgatactacatttggtctgtgccacttcatagcaagaaaaatgggtttgtgtaggtgcctgcagggatgcagatggtcaatagactatcagagtttattgttctatgggaattggaattggtgaggtgaatccaaaagcataggcagtaggagttggtatcgaaggaactctgaatgcttgcagtaggcttcttctagattaattaagccttaggctcttaccatgaactcggacaatgtcctggccgcttttctttgcatttatccccacagcagagagccaactgtaagtccaaatttcaaggccacaaatttcatgtcatcagttactttcatctttgttgttgcctccatcattcgcatgatgaagttcttcaaactttctcttacttgttgcttgacattagtgatggagcccatttccatgtcatagtcacgggcaacaatgaactatttctggaaggcagactgcaattccttccaggagtgaatcgatttgggagccaatctcttctaacaatcttcagtagacttggcgagggtcaaggagaagcataattatttggcatcttcactaactcttgccgcttgcctcattttgttatcttttgccgtatgagtctttggataagttcacccatcgtacaactcacttggggcatattggagttctttgggagcagagctttttgacacatggctacaggtcctcatccttagaatcggcggggccccactttgtttccaaaataattttttcagtacaataatttgttcttccaatctttaggtgtcactgttcgagagatctcatccacggactttgtcatttaagtggtttctaaggtcattaccacatggcctcaccttctcacttttcacttttttatacttggtgtcaagatgccttttgagattcactatggaccaattgtcatcagagtactatcccctgatcccaccatcttggtttactgaatcactagagtagtttttccttcacttgggctttagtagttttacactagtcccttatggcacaagaagggcctttttgggtagaagggcatctgagcccgaaggcgtcgatggccttctgtgcttgagaaggcctgttggttagattcatgttttttcgaggaggtacggtaacaataagttttaagggtcaccgacctttgccttccctttgtcttgtacaggagcagaggtttcaacttgagcaggattttccttattgtttcctctgatacattcgatcgaggggtcgtcatcataatatccctcatttagatttctgaacatatctcgaaggagagccataattttctatattctttgagaaaaattttcttgaagggctagcttttgtttggtttcgagcaacttattggacacttaaaatactcatgggttttgctcatagtgataaccatctttgtagtacctatccttaatatattctccatcatcatcctcagcatccctttccttatcaatgttttcatgcttgttgtttaggccaacctttcgattgttggacatctccccacacatcgcatcactcgactgcgcgtgctctggcgaaagggggtttacttcctccatgatagcatcgatgccatcttgaggagttttcttgggaaccatctttcatgtaaaaatcatcgtagcaataacattacaggtttatccctttcttcaactctcaacgaaagcaccaaaatgtttactaaaatttttggaaactaaatatttgcgagctaaagaaataataaagtgcataaaataaagtgatggagattttttacgtggttcaagttttaattaaccttagtctaagagtcagtctattagcctctaacggcatatttaatgtgtttacaatattttgtaggaaaccctactatgtgctcttagtttctcttgaaaaagaagaagacttagagtaatattggcagagcttcagctatattccggttgtcatccccccttcatatagaaatagaagggtatttataggctaagggtgggtatagacatgtccatgacctgcctaggatgtttgctcaaatcccactaatggggtaaattacatgcaaaatgagaggtgactattgggtcccttagaaataattatgtctgtgcatggactctataattggggactatttgtacgttgtggacacgtgtcagccaaaagtttaaccttaaaagtgaaggacatatgtcgctcaaatgtttcacctttagaagtagagatctgatataacagtctggcaaaaaggtgggtgaggtgtgcgcactaccatgtttggacacaagggacaagatctgatcttgtttcaaaaaaagcataaccatcgttgggtgatctggattgcactaaaggtagacgtttgcaacactcttaaagggtcaatatccgcaataggccatttgagtacccatatgggtatcagctagggaggcttccatatttggacaaatccgggtttgggagagacaatatgtcttctgcgtccaataagctaggataaggcaaggtggacttttacttatccattagtctttacttgttcccagtccgttagactttatagtgataggattgtaatggaggtttttaattaacgagattatgaggttaatcttttcttttacctaccacttgtcacatttctcagaatcacggataatagaagttaattcaattaattaatcatactttataataaatttattagttatattatataaaatatctaaatttatgtagttattttattatttaataaaattagtgagatatattttttaatattaatttaattatatatattcaaaaaaatataaatgagttgtattcaatttaatttttataattattatttaaactattaaatataaatacattggatgatactaatacctaatatatatcgcttttatattaaacgtaactatctaacggaaatttgttgtttaattattttttttttgttaaaattaacggttaaagctaataccgttaaatcaatcaattaatattttttttatttaaaaaaaaagtatcagttttaaatatctaaatttaatttaaaattatcaacaaaaaattagataattatatttttacatagattttaatttaaattaaatattaattcaattaattattatactttataacaataacaagtttattagttatattatttaaaatatattaacctatttatttattttattatttagtaaaataattaagtatattttcttataaataaatttaaaattatactaaattttatatggttaaaacaatattaaattgtattaaattttaactttttttattattatttaaaataataataagataatggtaattctttaacacatggcatattactaatacttatatatcaatactgtcgggatcgagttctggactaactttaagtatgaacatctccccactttctgctttatttggggaattatgaggcattttgaaagcttttgcccgcagcgttttaaggttggagagggttagataatcaagtcgtatggggaacggatgcgagtgagacctatacgtagaaaccacatgatcggagctaaatggcttaagctgtttaatgctgctatggatgatgattctgcagcaaaaaccacggctcgtggtgaggtctctcggtcaacgatggcaatggttgaggggaatcgtggtgtgctggggtcgagtccgatgaaagtggaggaaactttgggtcaacgtgaggcagggatatgatcatcaaaggttgttaatggggatcctataattatggaagatattttaccagctgctatgcataagtaattatctaatgatgtcaatgaggaggctagtcttttgattcttgacacgaagagtagaagaacgactttggaagatattgatggggcccatgtgaggggtgatgtggcaacatatcaagtggtaaatagtttcaaaagaaacttgagtttggtgggtactggtgtcaaggcccgccaatcattatgaatattttatcttagaattgccatgggcttgggaacccatggactttacaattccttaaggatcttgtgatccaaaagacgtccagtattgtatttcttagtgagactctatccaatcgttctcagatggagtgagtgcgtgtgacgttgagatttgatggtatggtagtcgtagatgtcaatggtaggagtggaggtattgcattattatggaaaattgaggaagaagtgtctttgcttgggtatactgatgcttatatagatgtgagagttgcttctgaaggtgtacaggaatgacgtttcactggtgtgtatggggaaccaaataggagtaggtgtgcttctacttggaatatgttacgtactcttgctaatcggtctaatctaccatgg

SEQ ID NO: 161999 - DNA, 3036 bp, Cannabis sativa
ttgattgatttggtttagtttgaaattttaattggtttggttcaatttggaattttaaaaattcaacattactgatttggctcgagaaaaatggaaattcagaacaaaccaaaacataaaaactccctattttaaccttgagcttaggaaaaataaaacaataatcaaagttacatgaaattactcagaattattattttaaatagaagaaatataaacatttaaaaggccatagacttatttatgttattagcaattgacactatgaccatagacttatttatgtgattagcaattgacactaaggccattcttaatgccttcgtacaaaatgaggcacagcaataacttcactagttcactaattaaatagtctaaaaaagcaacaaaaaatttcagttcaacaccaaaaacctagcctttacaatttaataaaactctaaaaataaacataaaacaacaaaaggagaaaaaagaaaaagaaaaacagagcataagctttcactaatttttctttttaagagaaagaaagaaactcagttctcaattagcaagaacttcccagatcaattcaggatcgaaagagggaattcgagcaagagaacagtcttcaaacatggaatcctctgacactgaaacaggacattgagttaaaacagaggaaggtgaattctcacacttccaaaatccatcttcagacacagctggagaaactatctcctgatccaaattatccccaaaaaacagaggcgaaaatgaagaataagatgaatcaagtgttgttgctgtagctttagaacaatcactccctttactatcctcaccagaaaaatcatgctctgtagtagtactgctgctcctgctgctgttgttagtcttattcttcatcttcttcatcattgatttcttagctttgtttttcttcactttctgacaaatagcttgaatctttgcatcaactgagttcttcagagtattcagcttagtccaatcttcaaatcccaaaattcttgggtccttaagattgggaaaattgagtctagcatactcacctctgagcttatatgcagccctatcataagcataggctgcagcctcggctgtttcgtaagtgcctaaccagactctcattctattctgaggaagtctaatctcagctacccatttcccccaatgcctctgtctaactcctctgtaaagctttttcttgaaaggaacagccatgaaatttgatacatggactgaatcttgaattgggttggtctggtaaaagctagaataggcattgaagttggccttgtttcctgagctgaacttttgaacaaggtctctttgtctatggtagactgaggaacctagtgactcgaaaaccctgttggcggttgccgcggttgccgtcgagcaagatggggttgtggtggtggtggtgccacagcagtgtgagaaaatggaatctaaggtgtttgttccacctgctaatatgagatttgatagagatgatctgatttccataccttcactaaatgataaagctgaatgattatcaagcattctgtccatgattatagccacttctttaactttattttccaggaaaattggagattaaaaaaaaaaaaaaagaaaaggaatcaagagttgaattaaacaaaagggcaataaaaaattcaaacccccctttcccaaaaggttggagaattttagattataaaatgaaaatccaccaaaaggggggacttggatttgaatgaacaaaaggaaaagaaagcaaaagttgtgaactttcaaaaacagagtgataccctttagtaatttgaggaagaagataaggaagagcttttggtttatgaggaaaaagagagagagagaaaggaaaagaaaatattttgttgttgggaaaaagattttgattttacactgtgattgaagactgagttttggtttcttaagccatatatgtgtatttatagctgtagtggtttgtgcttttcatgaacttttttttaacctttctatctgtgcgccacaccaaaaagttcttacttgtttgacattttggtccaccttgcacagctatttattcaatgaccaaattgccatcatggaaaatttaggtattatgtttatttatttacttatttcatttttgcactgataatctaatagtaaaattttggaatttttgaggaaggaaaatagaaatgaagtggtttatttttgtcaaaaccatggatagatttgattaataaattatgcttataattagatagataaactaaggtatgattatgaataatagtgataaatcacatttatttttctaatagaatttgctaatagattgaaaatcaattgagacatgccttttactttagctacgatctaagaaagaataagcagctctcgctaaattattggtagttttgttcgcaaatctcaaatcttttgacaaaggcaattgagacattgttaagaacaaccaacccaaaagaaggctccatttgtatcaaaccacacatagaatcgatgaacaattgaccatcgaactctaacaccattctttgtaattacgatccaacttagaacttccttgacatcaataatttcagcaaggttccattgtgctcttatcataattgtcattctcaccaagtccaatattgttaattatcatattttaaatgaaataatatattaaaaaaaaaagaaacaatgttgcttcatattattgttttgttgaaggtgtttattgtaaattgaaatatgttgttctagaagaaagaaaagaaaactgttaatgtgtgaactgagtaatagtaaactaaaaagaaaagattgaattgaagctgggtttggtgtggtcccataaaagtgaagacagtactgcataagcccaaaaagctactttttttattaattagagaaagacagtcaactttttgtatttaaagtctacaccaacaattacttcatcagggccacgcgtctactttcccatcatcattattattgttattatttagggttttttttttt

SEQ ID NO: 162000 - DNA, 4098 bp, Cannabis sativa
gagagagagagagagaagggaaaatgtgcaggtaatttttagtatactaacctctaaacttttaacaaatattgactgaaatatataatgaattcttgctccacctgacagctcagatgttgacatttcctcatttttcccttctaccattgaagaaaatgctgcatttatcaggaaaagaatgagacatcattcacaaagaacttgaaatggaaagcagagagtgcaccatacaaagacatgaattcgggacttgttacgaaactaaaaaaattagtaggtaattctacctaccttcacaatacttcgaaagaatgttcaggagaagagctccctgaccagcctatcaaacaataatgtagtgataagtaaagcaacaaaaagcagctactacaacgatgtaatgtctaaccaagatacgacacccaaaatcacataagtaaaatgcaattttacatgcccagtgtagacacactaaatatggtggaccaagcaaagatctcaaagaagaaaacagggaccaatttcaattgagaaagatataaatgtcatacttttgattctgtgatttctccataactggcatgctctttggcaacggcaaccaatgcagagctgatgcgtgatttgagttcagggagtactttcttaatatgttgaactagaatctgcaataaattataaagctaattcagagacagagtaaatgagtagtatctgcaaaggaactataaaatcctggaaataaggtatcaataaactagttcacgtttatgacagttgacaataagttagcaagagctgtatttaaaatataaatagcggttctgtaattaaagggaaaaaaaaagaggttttttgctactatatattcatgaaacaataacagcagcatctgctgctaatattttacttgttagctgccacaattttatacctggttcaacttctttgctaattgagggacaccacaactatcagctagaccattatatacctgcataagagcaacagaaaacattaatgagagaccttttttttttaaaaaaagaatcatgcaatgaaattatcataatttcagaaaattataaccatacaggtcggctgcggaaaaacttttcttcagccacaagtgcatccttaatgcttctgttaagcaaaatatcctgttccaaatagtaaattaaaacactcaattcgtgtcttcgccacttgtactataacagcaactttaatgtaaaccaagtatacatttataaaatgtataagatttaaaagataggagagaaaggaagaactgtcagcaaaagtctaactaaagaaaaaactccaaactcatttttgttccaatttccaaaatgagagacaaagattacctcttgactacgattcacaaccccaacatagccatgtttcaggggaatcacttttccaagcaacagattccgggcatcagtacctctgtccataatgtccaactgtaatcacaaaagtaggaaaaaagaaattctcatcgcaattaattgacagcttccaaacactaagagaatgttacaacttgaaaagaatgtaagtggaaacgcacaccttcgtgattactcctatggttcttgaacctgccaaaagaaaacagcaaaaacaatcaaaataattaatgataacaataaaattagatagctaccataaaattcttaattttatcattcaaaaccaatacttaccatcagggtcagcacttccagcaatttgaagagcatctgaatttgccaaatcagaatttgcaggtgtaacagccaagattaaacaggtatcaattttgatataagacgtaatcattgatctaattcgtgcttcaatgtcactcggctggtcaccaacaggaaccttagttataccaggcagatccaccagtgtgatatctagaacatttggcgaaaatatcttcaagcgaatctgtttgtctgatacacctttgtttcctcctgcttccctatctgtctcagcctgtaccaaaaaagtaattttaataataaaaggaaatattttcgacgtccaatagaactactatatattccatacatcaaaaaggcaagcctactaataacacatttaagttacattattaaacaattgtataaatcagaaagtaactaggccagaaatctagggaccagacagagatagctgaagttggtatcaacactcaagttttactgtgatatagcatacaaagatgagggtttgtgtgaaaatttctatatgcatgattaaagtaaagattcatttacttcctcaactcattttctctctctccaaatttacaagctaagaaagtaaaattacttttataatacttccagtttcagcgtattgatattcgctgcattacatttcaactttatggctaatcatttctatataagaaataagaacacatttcaaagttcaaagcaaggccaacaacaaaacatacaataacaaactttcaatagaatactacttgtaaaaattaccataaatgaatctttacaaattctgtgacttatccaatgaccagcagtttgttacaatggatgttgtgtgtgtgttttatttattagattagaaattttctgcattggaaggcctcaaaacagaggctaaccgattccatacatggtatcttttctgactagaaatttatattacagataatagaaggtggtaataattccattatttcataacaatatttgataagaaataatcaagaaaatatattatacaaataaacaaattaaagcttcaccagactaagattgttctgcatatcaaattacatggatttttgaaagctggacatttcaaaactgcaaatgaaacttatttgaatatatatacacatatatatattgacaaagtacagatatcaaatgcagattaagtaaactatcaaaatgacattcatctttttttaaaatcacaacgacattatcttaaacccccaagaaacatgtttctccatacatgaaattcatcctaaaaacattaccacaaggcatagtctttatctttactagataacaatcaaaattcaagcatttcccacacctagaaatgaagccagcccgcattattccccatttatccttctatgaaatatgaatcccacattatcccatttcacattctcgacatttcttctgtgcttaaactattagaatttattcattttattcaggggaaaaaaaaacattaatccaaaaaaaccataccaaacctgaatttccctgcggatttcggagaaatcgtgaaaacgcttcccaggcaagtgaaggaactccccgtattcctcatcggttccatcagcgttcttcttgatctggagaagctgaagcacaagaggtcggcgcgtacatatttcaggacccctaggaagaaagtccctgccaacaagagcctcaagaacactagactttccgctactttggcttccaacaacggcgacctgagggagctggatgctagattggctcccaagctgagcaaagatatcctgaagcttgttaacaatagggataacagaggttcccaaaggtgccgcagccgacgacgacggcggcggcggatgtgatgcctcgtccgccattgatggatcttagagaagcttcctagggtttttgaattgtagatagagatatagagaagaaggatttgattagaggtacgtgatttttgggggttcgattgatcgaatgagaaggattttgagggtgcgcagaggagttgttaagctacacaccagtgcgctgggaaagagagaataatgttttcacgttggaagctttttttgaattacgaacaccgtagtcccccccgaagcagctacaagctcggctggctcaatcgaatcgactcggctcggctgacttcagggaaattaccctaaatattaatttttttattttatttttttttttcaaatttagtgtttgggtttataaagtgatgggagctctagttgcaataagaattactatatgattttttgttgcaatttaggttgcagcactagttgcaataggggtttgtatatataattccgtaaaaatacaaaaa

SEQ ID NO: 162001 - DNA, 2706 bp, Cannabis sativa
  modified_base (2659)..(2674): a, c, t, g, unknown or other
tacaatggtaggtagtggttatgtaaaaaaaaaaggagactaatcatattgttgcatatctatcactcattctttgtatcagtcatacaaaccaaagtttgatttatactttttagttggtgatggtactggtagtaacatgtttgtgctaagtgcttgttttcgaacttttccgtttaaatgtactaaagtaatgtcaatagtgaaggttagctttttcttgaggcagagtgatgctaatgcattgactctctttcattgaacttgaacttggttgacactcgaatcttatattttgcttcttggggaaggttggggcgaaggatcatatgcgctttcaagcttcatatgccactatcctaaaggcccacatgacagctctaaagaagagggagagaaaagaaaagaaaaaagccatggagactgataagaaagaggcagatctgaagaaccccaggaaggtgtaaagaaagcctctgtaaagactataatagtgccttttgccttcgtcttacacactaatcacccagaaaagtagattttttttttgttcaattgcacagggattaaagctttcatgattttgttatgctggttgtttttttttgatagttatattatttgatattgaagcattttgatgagatttttgatatgattttcagaaaaaatcgttctaaagtttgtctcttgtagaattgaaaaacactgcttgatattattaaatgagcttattactggttagtagttacttctgtacttttgctttgaaaatgaatcacgttccctccccctcaagttaaaataaataaatagaagcataattggctaaggaaatttaataaaacgagggaagttatatatatttgcactcccaaaataatgtaaaagttgctcatttctagcttgagatatagagaaatttatataatagattaaaaatttgaaaaaaaaaaaaaaccaaaataagtaaatatggaaaaaaaattgtttttattctttaaatttttttgtttgcaaaaatatctctttattaaaaataataaattgtttttttagttgttttataatttatttgtattatagttgttatgagattatttttcttgtttttgattgtttatagtttatttacaggtatcgtgatattgatttattattgttctttcttctttttattgaccaaagtgtatttttttttaattttaaaattttataaacgtatctttaaaactttataaacatataagaagggtattttagaaaaatttcctaaaaatattactttttttaagaatgatacataagaacacaagaagggcatatcaacaaaaaatgctgagaaggcaactcgatgataacctccttcccagaaataagagccttaacatttaaggcttgctttgctagacaatgagccactctattacaagttctaggaataaaatataaacccttacagttaggattaagcaactcatttcgaattttcaaagtaaaaaattccagatctcctctgttcatcaatgacatgttaactctattgatagcatttaaacaatctgaaatagagaacttgtaaagatgcaacttgtttacccaaagaaggccctcttcgatcgcccgaagttcagctaaaagagggtttactgtatgagacagaaaggtgtagaattagtgtataacactacccaagtgatctcggattacacctcctgagttgttggttttcatttgatcatctaatgcagcatccatgttgaccactagattacccacttcgggtgtttcccaccaaattggaccagtatgatctttaatcatcttgttcccttgctgcaatgttgttacaacttcaataatatccaaactctttggagagaagttgtgcaacattaagtttcgaccatgccagagctgctatgagaccatcacaaacaattcaaagtcaacagtcattaattttaatctaattataattttagctttttattatatttggaagaaatttataattttagcttgggtgtgggcaagtggtctcaaattctaattataaaaaaactagtaaaagtaagttttttttttctccatataaatttatgttttaagattctattaaatctttgtgatgacctaaaaaaaaaataaagaagatgacctaaaaattaagccaattacaaagatgacctaaaaccaacaccactaggatgataagcaccattattacaacaaaaataaagaatctaaataaaacaaaattgaacttgcaaaagggaaaattacaaacatccaaacaagaataactagacaaagcaaatcactaaccgaaaaccactcggtataggaatcaaaacaacatgagggtgcgccatccctcaggaaaaacacacatccacccttttttgattgcagttttcaaacaacacccaagattagcaagcgttaatatagtatcaatttaattttaaaataaatcaaatttattctttaaaacactttaattttataatttgaacatggatccccactcttcgtgaagaaatgcataatattactagagactacgtttatgagtagtttggtaattatattttatttagggttatttacaataatataatatgggaaaaaatgaaagttttgatatatatatatnnnnnnnnnnnnnnnntagtaaaaaattacgtgcgaggcacgtatact

SEQ ID NO: 162002 - DNA, 990 bp, Cannabis sativa
ggggggggggggaaagggaaaataataattcaagccaaagaaatggcaagaaagggaaattcaataatccccctagaaagtaacaccctcgagaaaaggaggagaagttcacatgcttctctatactgatggacacccccaatgaccatcctaatggccacacaagccattgtttcatacaagaagccacctctgatgaagaaaggcattagtaagagggatccaacaaaattctgtgaattccataagaatttcatccacgacactaatgagtgtaagaacttgaaggaagagatagagttcctaattaaaaggaacgagagtcacctacattggtatgtccaagccatctagaacctagcataggtctaacagaataataacccattgcccccaccagttgctggccaataataggtcatcattggtggaccccacatagttggggatcaaactaagtgttagacagatatgctcaaaccttcgtcatgagcaaagaaataaagtcctagctgtagaggaaagaaatctaaaagaaccatgaatagaagagcctgccatcaccttcaatgaagaagatgttgctcatgttaggttcccccataatcctttggtcataacaacacaaatagggaatatgatgccggtacgctacatggtggatgatggggcctcctccaacatcatcttcaagattgattatgaaaagatggggcttaatctgaaagacgtgacaccctgtacaaaaatcatgtacaggttcttaggccatggattttcccctctagggtacatccaatggtcgcttaccatcggtgaaagtcccacacaaaatacagtcatgacccaattcatgattatttatgtggcatctgcattcaatgtcatgatagggtgacttgccctatattacctgaaggcagtcattgtaatctaccactcgtgcatcaagtttctgttgggttttgtgccctaaataaaacccattac

SEQ ID NO: 162003 - DNA, 4386 bp, Cannabis sativa
tttaccttttcacagttgctgcattggtcaccgaagcttaagtcactgaactctgatttgaccttggattttgctggtgcacatatttgtacccaattctcaatgaagtcactgaatcgatcccagtaaagaaaaaagaagaataaagtcaaatatatattcaaaattctaattataaagtcactgtaaaagcgtttgtacgacacataccaactacaaaaaatagcagtactttatttcactttgtaaatattcggttcaactttaggtgacctggaatgaatctatactatactatctcatattacaagtattaagtaacatttgctttatttacttactctaacgtggataaataatagtttatgtttaagattctaaatatatactagcagtgcatgcactttgatagttttaactttcccatcaaaaattcaaagagtgaattattggtcagttttaggtacctagctgtggtcccatcgtctgggatagacatgagtccctttattccaccacagcaactgtgtccaatcaccacaatattctccacctgaaaattcaataataaactccagtttcaaaacagaaggaaccttctacacttcttttatatatcttttagtttttcctcttctatatatataaacagcatatatacattctttaattgaaatgtttcatattcagacaccaaaagcattaattcgatactaaaatacaacgcagcagagcaaactaaaaagtgatatactatgtttaaaaatgcacatttacatatgagccaaaataattgcaagcccttctattaaaatcgaatgagtcattagtaaatttttcaagaaattgaatacaagaaagggatgagtctatttttggttgcgaacctatgtcttatcctaaaccatttaaaaataaaaagactgattataaatactgtagaaaaggattattaattaattaattacccaaaagaaaaggaaacttgtagattaatgttcaaagtcataaggtctagctagcaaggaataggggatatgatgaacattatccattagcaaacaaaagcatctcctagttgtttggtgggcacatggtcttaattagttgcgatgagtactaacattttacacatatatattattaatttagttaggtgttgaggaagaaccatacagacacttgtaaatattttatatatatatatatgtttttttagataataataaaaaattaaagaatcaaggcaccatgattgaaggggaagaacaaaatgatgtgtgtacacagtaaagttagcaccaagaaaaaaggagaggcctacatataatataattaatattcaccttgagatgtaatatcgcatattcaatggccgcgcccactccagagtattttgtctgcaagtaacaaccacttataactataagtcaaaggtacaatgataatatttaatttatttagtcatgaatataaagtttttatttttcttaaacatataattaattgctatatttagagttttagctaacctgacaatagggtggaaccatattggctatgtttcgaaccacaaaggcctctccaggttggaaattcagaatgtgtgaggggcaaactctagaatccgagcacgcaaataccaaaaactacaaaccaatttcagatttttaattaaaaaaaaagaaaaagcaaagtagatattccactaagaaatgacataagaataatattgctcaccttggggctctgccctttggccagttcaccgtacaatttaggattcttcctgaaaaaaattgacacatttccaacaacaaaacaccttatgagttaaccagaaacttaatatataaaaataaattaagagttataataatccaaattggccaaccaattactacgtaaccattaattaagaaccaaacaaatactctaaacaatagctacttcagataaatactataaaataaataattgctggcgttttatgcttttctcctactatatgactactttagaatctttcttgtttagtacaaacaccatacattaaataaaatatatagtttttgctcaatttataccaatgattagaattcttgataagttcttctgattataatttacagtaatatatgtgccaatttaagtaaaggaaaattaatttccgtgtacgatctccacagattttaaccaatatttcaattttaaatattttacatttattttatcaattaatacatataataatccgattaaaaaataataaattaaacaacagtcaaccaatttgggcaagtgggggtgctttgaatttggatacatgtgaccaaaaaatattagaattattgtttttaattaataataaaaacaaaaatggatggaagtatagtaggaaagaaggtttactcgtatttctcagtcttaaagtggttgaacccggttttgatcctctcaatcgggtcaaactgatccgacccggtaacttctaactcggtggtgagttgtttgatcttggcggcggcgacatccccgaggtgatttttctcgctgaaaccgaaaataacggaaaccgttaaataacatgccacgtcatgtgggacccaactttctcgggggagacttatctcagccgcaaaagtcggatcctacgtaatccatagaaaacggattttcgtcttcaaacccgagttaggagtgggagccaaggtgaaatgacataaaaggacactgttttctgacattattacggaagaaaaaaaaacacggtttgtttggaagaaaagaaaagaaaattaaaaaaagaaaaaagaaaaacctgagaagcttggtgagtccagcaatggcgtcctcgtacgtgtcgttacccatgtcttctttctgtaaaaattaaaataaaatagagattaaagactgaactatgaaaaaattgaaacgatcaataaaatcaacgattaaaaattcatacgtcgacaaacagagagagtttcgacgttaaaggtcggagaattgaaattcaaaaacagaaatgctaaaattcagtactgatcataaattgatttgatctaaacaaacaaaaacaatcgaattgaaaaactatatatacaagccgatctgaatatatgaagaggaaacttcaattcgaacctgttatgtaaagattgatcgtacggatttgaatgtttttcttttttcttaccaaaaaaaagcttctactctctcatgtatagcgtgacccaagaggccaatatttatagtgcccacttaagctatttttaactaataatttaatttttttgactaattaaaaaatattaatacatagcccaaaacggcaaattatatatatgacactctaggaattatcttatatttaatatatatagtattggattattacaaaaaaaaatctactactttcttttttaagagagaaaaaaaaaaacagatttacaatctcttttaggattttttttttttttttactttataataaaaataaataaggaaaagaaatagtcataaagaccggatatatgggaaaattttatagaaaatagagagtaattaataacaatttatggaaaaaaaaaaaggataagatgaattaatctatttttttagtaaataaaataaattaatatcaatgccactttacacggaaatggatttgcttttgatttttctgcagtgtttttttttttatttaattatttaatgttttgataagtattaagtgtgcttttaaaaagtgtgtaatttttttaaaattgtgatatgataagtggagagttgatttttaatttgaattataatattattaattattaattaaatataaaaggagaaataattaaggaaagagtgaaagaagcggcctaggactcagtagcggaagaaccggtaatgtaattaagtgaataaacgacagcgtattggggttgcagcgtgataatcagtggtgactagtggaaaggtgacgatgctcataaatgaccaagcttatatagaaaccttttatcataataatggattaataaaacctttttatgatttatatttattattatgtgttcaataattcaataacaaaagaaaaatcaattctgtcagttatctacgagttcgaaatttgtaaacattaaagaattgtattgactttttattctcttcattgatattccattatattgggaatagaaaatgatgtttcaaagctttaagttaaaccaattcacaatttgataatcaataaaattaacttaattgtgcacaatcccaatgaaagcttctggtgatcagaatgttaatgatttggcacattttatcttaattttgataataatttttaaagaaatgctaattacaacttcttattataat

SEQ ID NO: 162004 - DNA, 2045 bp, Cannabis sativa
attcgtgcataacccagtccgtgctcaccttgagcctaaaggcttgaggtgcatgtcctttgttaaagactagagtttttttccaaataaactttatttggagaaagtgaaaaagtaatgggtgtcaatagaataaccctttatccacttgctaagttatcttttactatgcacattgctcatttttggtatggaggtctctattcttttggtatttttgctgacattgctcattttaaatattttttgctatttcttttgagaactgtcctaggaatgctcataatttagctttcactatgcacaatactctgtatttactcttaatggtctttgttgtttatctgggttctggcctattaatgaagtttggttatctttcaataattatacaacaccctttatcaaattctactgttctgtatgcatacttatgtttataactaataggcatattttatgttgtgttgggaagttttgcatcaactaattttttgttttacataatagaatagttgcttgcctccagttaaaaataagaataaacatgaatgcaagtctttgttgttgcattatattctcaatttcatcctccatttattgtagtagatccgtgcacatgcaaagtacttgggaattcctttgttaggtgatgaagtgtatggagggaccaagagcatggctttgtcactgcttcggcctagaactccctctgacattcatggtcaactcttaaagctagtctcgcgattcgaaaggccctgtctccatgctctggctcttgggtaaaatgatatacatgtgtttgcatcatggttttccattttgataccgattgataaaagtggtactcaactcagtggcaataatgcttatgattttgttttgcaggtttaagcatccatatacagggaaaattatacatttcacatgccagcctcctccggactttgccaagatattgagccaacttcgtaaaattagcacagttaaggtatttcttcattggaactgccactgatattgctagccgtgccttgtacatgaaaatgttgtcaaatgaagttcttggaaatataaatgagtgtttcacatgtgcgctttttttaacatgctggtgtttgatctgcagccttctgcttaggaatggtttggtctattaatgaattgaaatctcattcataacagaaaaagaatcaggtaattaattttcctttagcaattatttgtcagatattatttatacatgatcattcaatggataacatgctgttctcgagctaatctttacaaaaaccattagatctctgattcttgaatgtaatttgcagttagatctacgattaaaagtaaattttttttgagagtttaatatttttcattatatttatttcatgaatatttggatatttttatctcattttggtccaaattaatattttttttcatacaaatatctatatgatcttcgtatataatttagttcgtataaatgaattttaatcataaaatcttattctaaagaatgtaagcaaatatgatgtattaccgcgaagtaattttaaaattggtaaaaactttttggataattttatagtataacccttgtagggtcgttttaatacgtttctttctgtttcaacaaccaaagaattttttgtcctatttttgttttcttattacactatgtcttatttatttaggattatttgtaaattttttaaaattttaaataatttataatgctgaaaataaaaattaaatattttgttgaacgtgcgattatttttcttttatgtgcgtggtaggaattgtttgaactatacttttcgcattgaaatcactcacaagtatataccgaaatggatggtttgaactttacttttggcagtgaatcactcactaagttctcaaaaactttgtatgcaaaaaacgtttgaatatttatatatattggatggtttactatgtttgccacatcattatgtgtattttgattgtaattggtcaaataccgtttgattattattattattattgtttct

SEQ ID NO: 162005 - DNA, 4013 bp, Cannabis sativa
gttttgtcttatgatgttgtcgagaatcaaaatagggaggaggatgaaagtttgtgtattgtgggacgatttttaccctctcagataattgatttcgatgtgatgagacatataatgacttccttattccagccaactaaaggtatgtacgttaaagaacttgaacataatcgttatatcttccaattttaccatgatttggatttgaaacttgtcaatgacggtagtccgtggacttttaacaaaacccagtttgtctttgcgaaactagtaccaggtgttgatcctcgagctatgattatcaatcatcttgatatgtgggtacaagttcatggtttgcagtttgattttaagtcggatatggtgcttaaggacttagagaattatattggttcctttgtggaaacagaccctaaaaatttccaaggattatggagggactatctacatgttcgtgtgacagtagatatcactactccgctgaaacgaaaaatgaaaattcgaaagaacgagagtgattagttctgggctacatttaaatatgaatacgtcccgactttttgcttcatttgtggtattatagaacactccaaaaaattttgtccaaaggcttatggtctcccgttggaatcagtggtgaagccatataggactggtatgagagctcaaccttgtcagaaaaattacttgatcgggcctaggtggctgagaacaggggtgaacgatgaagcattcaatgttgacaattcatcagaccaacaactgaatggtgaaatccctacaatcacgaatgctagtcatccaaatcttgtccaaaaaaggaaggaaactaatatggcagctggtgtggtgagtcagcctattagtgctaatattgtggaggatcatattgggggatttgattctgatttatcttaaaaggcagctgttgacatggataatgttcatattgatggacaattaattgtgttggatagtaaaaggaggtgtactttgggtggggctgttagtggtctgattattaatgggccatctgagtttgttgggtatgaggcccattgtgatggggttggtgatggtgagtgtcaaatggaagacttggcagctgttcaaaatggagattcagttttaaaaaaatgggtccatggtgggtactggtatctaggctcaccaaacattatgaatctttttaaagctggaattgttgtgggcttgggaatcgatagacttcacaattccttttaggcgttgctgtctataagaagcccaattttatttttctttgtgaaacaattagtaggaaggaggtgttagaacgattatgggttcaattgggtttcaaaggcgtttttggtgttgagcctaggggatcgtagcggtggtgtggctttattttgacgtcataaggaagaggttaacttgttgagctactctcataaccatattgatgtcattgttcaaattggaagctatttgagttggcgctttactgggttgtatggggaaccgaataaaacttttagacacaaaacctggacctattttcgcaacttaaaggatggttgtcctcttccttggtgtataattggtgacttaaacaatatcacttgtaatggggataaaaagggtggtgatccatatcctagttggctgattgatggttttaatcagactttgttggattgttctctacatgatttgcctcttacaggttatccatacacatgggaaagaggtaaaggcggtgcaagctggactgagttacgattgaatcgagctttggttagtgatagttggttggctatttttaactctgcttaactgtttagcttggaggtgtcagtttttgaccattgcccaattctcctaatccttcagccataaaatttgtctccaaggttaagcaatttcgttttgaaaatgcttggctccgatagcctctttgcgtctaagttgttcaagacatgtgggaaatgtgtgctaattgtgacattatggtgaaaataaaagcttgtggcgataagctatttagttgggatcgtgattacactggaaattttaaggagcgaataagtcgctttgtgacacaaactctactttacattatgctaaagcaaagaagaatttggttgaaatttacactcaaaaagaagtcttttggcaccagcgctctaagcaattatggctctgtgaaggcaatcaaaattgtaaagtttttttatgccaaagctacttctcgcaagaagaataatactataattaagctttagaattcctcgggtgtttgggttgactgggatttgggtctgactaaggttgtgtctgaacattttaatgatctatttttctcaagttcttctcattggtaacattttgtggattgtattcaccccaagatttcttaggagaataatgctaatttattggcccttgtctcggatgaggaagtttagaaggttctttttcaaatgcaccctgataaatcccctggtccccccgggattctattaaaagtgttggagtattgttggcaacaatgtgattcagctagtaaagaatttctttttatttggtacgcttcctgatgggcttaataatacaaacatagtgttgatcccgaagaagaaatgacttgttaatatgggtgatctgagaccaatttcactatgtaatgttttgtataacgttatttcaaaagtcctcactaacagtcttaaggttgttctccctatggttatctccgacacttaaagtgctttcgtactaggaagattaatttctgataacattatggtatctttcgaggttatgcattatcttaagaggaagaggcaagggaaagagggtttcatggccatcaagttggatcttagcaaggcctatgatcgtattgaatggggttttcttcatgccatgatgttaaagatgggctttgctaatcatttggttgacctaattttggctacggtttactcggtccactataaggtgactcatgatggtcgggagttggggccaattatccctcataggggcattagacaaggagatccattatccccgcatttattcttactctatgttgaaggcttctcttctttaataaaacattttgagctgaatggtgatattaaaggctgtaaagtggctaacggggccccattatttcccacatggtttttgcctatgatagttatatctattgttgggctactgagcgtgaagcttcgaatgcaatttgcttacttgggctgtttgaggaagcttctggacaaaaagttaactatgggaaatcttccatcttctttagctcaaatacttctttgggaacgaggcaatgagtttgtggcttgcttgctatgactgaggcggataaaaataatctctatcttggtctcccttgtattatgagtcagaagaagacaataattttgaatttccttaaggaagaaatgtagaaaaatatcaatagttgggaaggaagatttttatcacaagtgggtaaggaggtgctcattaagacagcgacacaagctcttcctagttatgccatgttcgtcttctttttaccccttgaaacctgtggtgagttaaaaaaattgatggctaagtactggtggcattctaattcaaagaattatagaggggtttcttggatgagctggaagcgcctctgtgttagcaagaataatggtggttttggctttcataacctacatgattataatctttctcttcttggtaaacaaggttggaagctattgacaaatgataactcccttgtaagacgggtgtataaagctaggtactttccctatggtaatttcttgtctactgatcttgcaataattcgagctttatttggtgcaacattcatgagactaacgatttgattactgctggggcgcgtgttagtataggggctagcattttagtttgtattgtgggtgatccttggctttcacatgatacccatccttttgtcatgacaattgtacctagtcttgacaatt

SEQ ID NO: 162006 - DNA, 6458 bp, Cannabis sativa
taacagtttggaaatgagcagatggtttgaaggtcgtgaagactcagaaatcacccgtcatgtggtcaaaagcccctgaatcaactatccaagtaccgttgttggaggcagcagtaaacgtgtgagatgtagaaccttgatgacacacaatattgtcatttgcctcggttaagggtgattttgggtgctgcatagactgtcgaagaggattcattgcattgaaacaaaaaaaaaatgaatctagagataaaaaacttagccaaagaaacaatctgttctagtgaagaactcgacaaagaaccctagatgaagagtcacagccgaagcagggagtgccagggaggaagacgtcaaagaaatgattgccggagatggctcacgcgcctacacgcgcgtggcgcgtgtggctcaagcgccactgttctggatcccaaactttggggttttgccgatcggggctgtggaaagctttttggataggaggtgagattagaagaggactataaaccagatttctaagattggcctcaaagaactaaaccctaatttttttaaagaggggcagaaagaaaaaaaaaacgatttttttagtacaaatgctctgataccatgtagtaatttgtgaatgatacttctaatctgatattattgatgaaaatgttgtgtttgtttaggctgattacatagtagaattaggcaacaatcaaggaaattaggaaaaaaaaatacatcctaaactaagctgtcaaatacaccctaaatatagctgtacaaataactcgagctatttacaaagatatttctacataacgtatagattgtatagcttacaaaggaaaaaattaaatcttgatgttaggaaaatgatttcatttttattaaaaaaattgggttgtaggccgtgttgggctcgttatattttgccttggaagtttgtttatttgttggttgattaatgaaatcttgttaaaaaaaaaaagtaaaaatgtaagaattgaaaacatatttatatttatacatgtatatatagtttgaaaaaattcctaaagattattattgaataaagaaagttaccttctaaaaaatgaaagtaaatcaaattctttgcttccagctgtgatcttttcctgtggtcttgttttcctgatgatgcatgtgtgtatgtatttgagtggctgatcatgtgtgcatgcattgcaagctctttcctttaacttgcgagagcttcctttgaactgattttgtcaacaagttcatttgctaatttttatatgcaggaaatatactcgatcaaacttcctggagatccaaaacttggtgaagggaagcctgaaaaccaaaaccatgccatagttttcactcgtggggaggctgttcaaactattgacatgaatcaggtcagatatttgaacgtatatattaattttcacttggtttcataagtatctttcgccaggttgtgtaaacatagtttttgtagtgttggttaattagtacaatatgttgcttggatacaagattgtattcttatccaacattgaattaattgttagatgtgtatatatataaatatatatatatatatgtgtgtgtgcaatgcaatataaatatagaatagttgaaactcataattaataatgaaatacaaaaattaagaaattaattaaatcaatgttgcaacatcaatactcaaaattgcaaataataaattgtagaaatggagaagatgaatatgttacaacacaaagtaacgtaacaaggagctttataaaccagagatccttagcccccaatattctcatactcgaggacttagttcgaggatacaacaggaaaggtgtctcacctcgttgcttcattttgcttcttgggaggtgatttgtgataggaagttagtcctatccaagttatactttgcacggcaagagccaaatagtagcaatgatggaaaatagtagctgatatattgataatagaaaataaagtgaacaaggttgctgggtattatagatacccaacactcttctaaaagctaatgttcacttaaccaaacaattctctacctagatcccttccttactcatatagcaccaattctccaattataatacccaattatcctttttatttatcttaaggtctatcaatacagccgcccgaaattcatcttctgaaggtgaagaagatcaacttcaatctctctagtccaagactttgctctttttctttcaaaaaaccaagccaataaatgcaagttattcaactatgaaagaaggaccatcatttagtaaagaatattcggaataaataattctttttattgattcctctaaatgaaaaaaataaataagtttttttactcggaactatgatatttgtgaatttttcctactgaacttttctcagttgcaaacccctccccccaaactatgcaaatcattgcaaatattcccatcgagttacattcttataatttttttataacaatttgcttatgtgactataatctatggtataattgtagtacaatgacttatttaataactttaagttacataagatttattttattgacattaaaaatagaataattagtaatttttttttcctaaactttcgacaatgttgattcttcctcctaaaatatacagcttgttaaaaattttcctgaacttttacatttacaaaaatttcgtccttctgttaggctccgttctattattcagtttaaatgctaacatatctttgttaattaaaaaatttgtcccctaaaatttaacaactatcaaatcgtcaacattaaacatttttttttagtaaatcttagataattaatttagatcttcaaaaaaataaatcattttgaatgatgaagaaaattaaaagagaaattaaatttttaacattaattgagcgatttaaaaattatttatctttttttaaaaaaaaaatcattttgatataaaaaaaatatattaaaaattaaattttacaggaacaagcttgagtctattttttctctataaatctaaatttgtttaagtaatcatatcctttttctagtttaatatctaactttttttcaaaataattttatatctttattgtttaattaattttctttattttttaagatatgagtttataaatataaataaatgattttttctttaaaaaatcttagtttgtttaaattatttattcaattttcaataattttagtttagttttttaatatacgtgtttataaataagataaattttgaaaatattttgtaggaataatttaggttttttaagtaaaattaatattttttaattaatttaatattattatcaattttttttaataatttttattgattttctcggaattaattgaatattataatttttaaaatttatttttttaataatagcgagaaaatttttggaatgatcaaagttcaagagataaaaatgataacttttaacggtaaaagaaacaaaatctaatagaagggacataattatataactattatattttaaagaaaatttttgacaagtcctatattttagggggaagatgtattgtcaaacttttagggagaaaatttctaattattcttaaaaatacaaacagtaactctaagaatgcacgtaaatactctcataatttatcattagactgttaattacgtatttattttttatttggactgttgaattggactagattgacgttatgttactgttatatcaataaattgtttaaataaatgacttgaatgcaacgggatatttgcaacaatttttataatttaagaaaattttgcaataaagaaaagtttaggaggcaaaactctacaaggaacatagtacttcggaagggataaatcttatttattcaaaagaaaatatatacatatatatagcttttgagtcttgaaactgttacaactaattagctaaaaactaggaaagattgaaaatagataggaactaagaaatactcatgtttgggtgcacaaattgtatattactaacttgcaactcaattcttcaaagtagactcttggaagtgctttggtgaggatattagttgacgagtaggagtgtagttcagctgaacaatcgagttatcaatcttttctgtgatgaagtattgatcaatctcaatatattttgtttggtcatgttgcactggattcttagcaatacttatggtagcgtgattgtcacaatagttataaatcagatggtactctttggatccacatgccttcccaaattctacttctgtactacttttggcaaccacgacttgcttcttgcttctccatgtaactagatttctatctgtaatgtatcctgctaaatctgcatcaatgtacattttgatgtctctgtagtcatttcttttgaatagcagacaatttttaggattcatcttcaagtatctcaaaattctcatcacaaagtccaagtattcttcatttgggttgttcatgtactgacttacacttattcttcaattgggttgttcattttcttgcccatatacttttactcaattgcattttgagatctttcctccatgtaatcatgtggcctccaaaatttatacttagtaaattttgggggtgaacttgaattgaatgcattacttctccattcttcaatcaacgtggcaattcagcaggggtctcgcatctccaaatctaccccagggacgtcagatagggcaacgttgggtgctctgcgagacaaggaacaactaagatgggttctccacgatcaggtttccctacgataaaagtacctaagtcttctgaactctatttctccatcatttgggtatcgctttgagggggttacttggctcattttgatgagatttatcaagatgcaaatggtatcattctctgttgtggaaattcgaggacaaatttgaaattataaaaagtctcaatgggttgaaagaattgtgttgaggcagagacaattttcaatcaagatctttacttcaacattgaaattaatggctcttgtaattattttctttacttcatttgggagagaagcagttgcaattgcaaaggttgattgcaagaaaggtcttggtaaaactattcatttagtatctaggtgggaatttttatataatgttgcatagatcaccgccatttcttgttgcaccattatccccatcatcgtactcagcaaaaggattgacgaaatggctgggatcgtatttgcactagctggactttgctttgaagagatgcttcttgtcattaattattctgagagagatttttaacaactgttgggtgatttacagcataaaaataacttttcttccaaaacccgaataattcaaaaaacgatgaaaaacactaaaattaccaagaaataacatcctctaactatggagaaatcaataattttagagcctaaaaggctcttatcatccaaatgggtcaagggttcgggtctagatcttgggtttggggtctgcgttcgtattcgactccaggtccgggattctggttcgagtttggaatctaggtctcgtttcgagttcgagtctggggcatgtttctagtttggatcttgatccaagtcgtggtcggggttgggtcaagtttattgtgaagaatttataatattacataacttattagtacaagtcaatactaaacatagtgttgtattaaataatactaatataataaatacaatctaacacaacattatacaataaaatacaatatataagagtgtatcaaacaagctctaagaaaacttctatgcaaatagcttcggaatgaagccttttagatttctatctatgtgtatttcttgatagaaaaaggcgtgccttgcaagtgaacataagatccacctgtgtttagtcaacccattgaaatttaaacacccacataatggaggttaacctttaatatggttttgatgggattgaagaagataattttggagttgcaaacatttttaaccccttatcgacacataataaagtagtttaaaactcaatccgcataattaagtttacagcaaataagaattttaaatttaagtttgtgtaacaccatttacacaggtaaaatggtgatatgtggttgcagagtagtaaccacatttgtaaatccaaaatactgtatattacaagatattgacaaataattatttttgtcactgacactcaattattttgggaaatttgacatttaatgctaaaaagttatggttttaaaatattcccactcattacacattttttaactatacttttaattttttttttttctaatcctaaaatacccttctatcaaaaccaaaaaacttcaccttcatttccctctctctctctcattctctcgttttccctcagccaccaccacccaccacccaccaaaaccaaccggaccaccacccacgacgaccttagccgc

SEQ ID NO: 162007 - DNA, 2360 bp, Cannabis sativa
ttttttttttttttgagtaaaagatcttttcttcttagtgttactaacaactcattttgttactaatttttaatataatttagcacatatttattaattatatatatatattattattagtacgtcttagtctcttcttagagcacactcatcaataacttctttagccaatttttcaaagtatgttgttaaaatattattttttataactatttaaatattatatatatagttgtatgtatctcatttttgttgtatgtatctcatttttctcgaagtatcttgggagtgctagctctacaatttatttatatatatataccatataaatatttaatatgagaaataaaattataaagtataaccactactccatctgccagtaaaacattgactttaacaattgacaatattaataatagtacggtatattgatatttgcgtaacttatttacttggaaccaaataacaaaaggttaggttgaggtaatacttgattaattagttattctatcttcatcgtttcggattcggagatctcgatataacatcccgactctctatcctgtatgatacatattttgatgcactatttttttaaaaaaaaaaaattatatttttacatttaaatttcttttgaatttttattttataatattttataaaaataatacgaaaataacaaaaaaaaaaattacggtaacataaaaataacatcaaaacaataacaaaaaaataatatacaaataacaaaaaataaacaacaaattaataagaatacaacatgaaaataccgtattttctataaataaaatcaaaaaaatcataaaattatttcaaattttgtgaaaccatatttttgtaatttttttgttgtaaaataacccctattttgattgctccatctgttagggtaagtttggaaataagtgtaattacaccgtatttaagaatagggaaactttatttacatttaacaaatttttaaaagcactctacttcaataatttttactttataaaaaatttatatttttaattaaattaaaatttttaaatttttttcttttaatttatattcttaaaaaaaaaatatacctattattatattttaaatattatgacaataaaaataaataaaagattatataaatttttataaatgatttaaaaaatacaaaaataaaatcaaaataagtgttgaaattaatataaaataatgtgaggaaattttttttaaaaaaattaagagtattttttaaaaattatttaagtttatttttttaataataaggcgtactcttctaaaaatataagatgggtttggatatgaaatagtaattatacatgaattcttaatattttagtatttataaagaaaaataatattttttagtagtaaatatttaaaatagaaaaattttaaataattacagaatataattactcttaattcttatggggcatgagaattgaagagagtacactactacaaaaaggaattttagaaattattttttctataatttattttaaaaagagaagctaaaggtgtcaaaacacctatctaattcaaaattgatatttagagatattattttaataaaaattgtaactatatcatttgttaataccatttaccttcaattatgtaattggaactctcaattaccttcaattacacaattagtataattatacgtgaaataaaaatgtcaaattatataattaactctaacaacactcaaattcaattgcactataacttttcacacacctccagaattataaacactcaagaaatacgatcacaaatcaatcctcgtactcgagtatgcaatttttatttcatttacaccaaacattatttttattattattattattgtgtgtgcttttcctcaattttcaaagatttttgacaagttttcaaaaaataattaatatgacaacttttggaaagattctttataattatttgacctggccaaaaaaaaggtttgtgaaatgatagtctttttcgtttccttcttcttgactaggattcgattataacaatggtatatattgttacaccactcatatctttgttcctttattaattgctctctttccgtattctaacctaccctattatattctatatttctatcttgtattgacaaaaaaaataaaagaataaaagtatattttcatttggattgactactgtcctccatattcttaatggtaaaaaagaaatatgcactctctatcaagatgagttagttgtgtccttggttggttaggaaggttgttatgacagctgaaggttgttatgacagctggtgtagttagttagagtttgttagaaattagtta

SEQ ID NO: 162008 - DNA, 2108 bp, Cannabis sativa
gggcataaaacccaacaggtacaaggttactcgcactttatacttaacttttaagataatttgggattcacaccttttatgtttttgtagtttttgaacactatatccttcaagtatatttataaacatatttctaatttatatgtggtgtatgcgttttatgctattacaaatgcaactttgtgcatctattatttagcattttatatgatcattattgcagtttagtgcgatctttattgatgcgatttgttgttatagctcggtgcaaattattgctcatgttatttattataatttaaatagaattactatgtaataactacaaaaatgataaaagaaattaaaaattatgcaacaacgtgagtaatcactatgttttattagtaatactaaggatacatacatcctccatatgtttaggtaattaaaaaactaaaattgactaagtatatacatgggagtaataatgataataaaacttcagatgcaacgtattgtacgcggttgataggttgcatactttacttgagcttgatcacatttttcttccaataaatctagttgaagaagttaccctagcgcattgtcctcgatgttgaaaacaccatgatgaagggaaccaacacctactttaacagtgaccaaggcttcacacccataagaaagcaagaagagggttttgccaatgtttgatctttgtttggtattgtacgaccatgatacctatggtaattcttttagccatacacattttcattcttcaagttttcctttaatggtatgcttgattatcttgttgagtgcttcagtttgcccgttactttgaggatatgtgactacaaaaaaaagctttttgtatccccaagtcatcgcacaatgaacgcatttctttacagtcgaaatgcttaccattgtttgaaattagtttgtagggtatgtaaaatctgcatattatcttttgaaatacaaactcgtagagctttgtaattgtgatggtggcgagtgactctactttggcctatttggtaaaataatccactgcgacaactacatacttgactcctctcttgccttttggcagttcgctaattaaatctatgcctagattgcaaatggccatgggatgatgatggagtttagattgcttggtgagctattgaaaaatgtagtagtgcgcggacatttattgcatctcttagcaaaacttatcgcatctgctcgtagtgttggccaatagtacccttgtcgcataatctttagggccaaggaccgctaattccccaatgcacctcacgaaggttgtatttgcattcatcaccattgatgcactttagaagcagttgattaaaacttctacaatatagtttgtcgtcatagataatacatcaagcaactttatagcgtaatcttttggcttcaagcttatcagggagtttgccagttttcaaatagttgacgatcaaagtcatccatgtaattcgctcgacaacatctattttcataacttcttctcgattgatggtgtatttaatgagtatatcgacatgaattatgtcaagtaatttgacttcttgagttaaggccaattgcgacaaagcatctgcataggagttgcaagcacggggtattcaattgataataattttcctaaatttagataacaaatcacaagtataggcgaggtacttggctaatcgcccacctcgagctaagtattctccattgacttaggagaccatgatttaagagtcattgaatgctttgagatattcgaatttcattacaagtgcaagttttagtcctacaatcaaagcttcatacttgaattcactgttagaggcatcaaaacgaaaccttaaagccgcatgaactttaaacttatttaggttgattaacataattcctcatcttgaccctttgctgtttaaggccccatcaacatacaaggtctaacctgcaccttctagtacatctaggttgactcgctcttcagtaatggtagctacctctgttgggaatatttttccaggatctagatttactaataagtatgtttcattaacatcctaaatatgaatttttctaataagatgaaattaaacaca

SEQ ID NO: 162009 - DNA, 1552 bp, Cannabis sativa
tctcgcattggacgccttgtagtccgtaagctcatgctcagaggctactctgtcaaggtttctcaattaccctttttgttgtttgttcttttggtctttgatgattgattttagaattatgtgctgaagtgattttgatgatgagtaataatcaattcaaataataaataaactcattcgaaatccaataacaaagaacaaaattctagggataactatgatttgtcaattttgagtattcatttcaaatatttttctaacattgtgtataggccctggtgagaaaggcagatgaacaagtggtggacatgcttcctaggtcggttgagattgttgttggggacgtaggtgatccctccacactagtggatgctgtcgaaggctgcagcaagatcatctactgtgctactgctcgctctgccatcactggagacctctttagggtcgatcagcgtggagtttacaaccttagtaaagcgtttcaggtactcgttcttgcccacatttcttttcatgggtttgtttcagtattactttaccaatttggttttaaaaatttcttacatttattcaggactataacaataagcttgctcagctaagagctggcaaaagcagcaaaagtaagctctgccttgccaagttcaagtccgaagattcattggttgggtgggaagctcgtcagggcacctatttccaggatgttgttgcttctaagtatgatggtggaatggatgctaagtttgagtttacagagactggagaagctgtcttctcaggttaaaaattgattatataactgaggccatgtttactttgatcaatcattcatgtttattttgaagcaactaaaataatttttgtttaatttgatattccttattcaggttatgttttcagtcgaggaggctatgtagagctgacgaaaaggctttcacttcctctaggtcggactcttgacaggtatgtaatgtatagcattgttcacattctctattgtgttcttactttttgccttagccattaggtgttaagtatataaattgtctttgatttataggtatgaaggtctggttctctctgttggtgggaatggaaaatcttacgttttaattcttgaggctggtcccttagcagatacatctcaaagtaaattgtattttgcacgatttgccacaaaagtaggattttgtagggtaaggtgttgtttcttttatgccaccaaattcttctattttttcttctgttggtatgtttggttggtcatgaccacaattttgataattctatcatccctaaaattggcaggtgagggtacccttttcatcctttcgccctgtgaaaccggatgatccaccactagatccatttcttatacatacattaaccatacgttttgaacccagaaagcaggtttgtactttgttctgagattatggagttgccatgctgcctacttgagagtacatttacatacttaaattgaatgaatgaaaatgaacatatttagcataatctttggaattgtttttcagttctatcaaatatttaa

SEQ ID NO: 162010 - DNA, 5317 bp, Cannabis sativa
tgccccttctgttagattctgtttttttactgttaaaaattaatacttttaccctctaaattttgaataatacaaaattttgccctattttatcaaaaaaaaaaaaaaaattaaaaattattaagaaactatatacatatattaaattaattaaaaaaatattaagtttttttaaaaaatcctaaaatatttctaaaaaaaatattttcaaactttattttatttataaacacgtattttaaaaaatcaaactaaaattattgaaaatcttacaaataatttaaacaaactaaaattttttgaagaaacaaatcaagcttatttatatttataaactcatatcttaaaaaagaaaaagacataattaaaattcaataaaaatataaaattattttgaaaaaaggttagaaatttaactaaaaaatattatgtttacttaaataaatctaaatttttagagaaaaaaatagactcaaattaaaatttagtttttacaaaaattggatttttaatatttttttatatctaaatgaattttttaagaaacaaacacttttttaaatcacttaattagttttaaaattttaatttcctttttaattttcttaattattcaatatatttttttaagatctaaattgattttttaagatttactaaaaaaattgttgaatttttctcatttttattttgagagggttcgatttgataattgtcaaagtttaaggagcaaaattgctaatttataaagacacgtcagcatttaaacagaataatgggacgaaacttagtagaacgactaaatttctgtaaatgtaaaagttcaggagaaatttttaacaagccgtatgttttaagggcaagaattagcattgtcaaaagttcatagggtaaaattgctgattattctatttattaatcctaatcaaattaaaaaaataaaaaagaataagtaataatttcaccctctgaacttttaataatactgattctatctcctaaaatataatacttgttaaaaatttcccatgaacttttacatttaccgaaatttagtccttttgttaagtttcgtctcattatatcatttaaatgctgacgtatctttgtaaattaacaattttgtccattaaactttgaaaactatcaaatcattccctaaaaataaaaatgagaaaaattcatcatattttttttagtaaatcttaacatatttcaagtggccataggtaggtgtgtgttggaggtcctgggttcgagtcctaggtaaaaacataattgtaatatataaacggttaaataaaaaaaaaggagaatcaccgtatacgggatttcaaaaaatttatttaattttacgataacttttaaattttttatttttatatttgtgttttttttttatttttatgttaactttaatttttagaattcatttttacgaactcttcttctcttttctctgatgattgacttctcttctttctttttttctagctgaaaaatcagatcaaaatgagattcataacttgtttataaattatggtggtgaagaaaccaattctaataagattcattatgatgcaattccttgagcgtgtgattcacatcggtcaaatctggtaaggcatcatcccctctgtatgccatccataacggcaatgactcagctatattgccaagattgaattcaagaggtttcagataaccatattgcatcaggtttttttattactccataatcatagttgaagaaagtaccctttcgaattactaccaagccacaaaataaaaaaaaaaaagattaaaataatagtaccagaaaccagagtcatccttcaatttataaagggaaggaaaaattaaatattacttatgagtggtaagagctaatgcctatgaaagaaaatcataacgagctaagagttaatattacatactttgaaagagatggcgtatgttctttgctgatgatgatgggtatgttctcaaaattatgatgaaaatgatgaaacattacagttgtagctttttgggagatttcttcacagctattatgaatactagtgatttttaattatatgaagagagttcctcgtaaaatctccaacttacagtcatccatatatgaatcagctcgtctctcacctgtctcccttaactattatacctataaacattaccaaggcaaattcaaattgtcatgcttcatcattttgctgaaattgtttttagcaaagactgtgatagactcaaaaaacttgtgtttgacgtgtacattcagttacttatgtactgtaataattcacttttttggaaaacatggaattgagggatttcaacattataaagatcaagcaggggcaagtgataaagcatttaatgtaataatcctaactgaagttaatgacaacataatgtatatacaaatgcactaggttgaaaggggtattaagtcaatgcacccgatctcaatggacttctcgtaaaagtaacaaagaatcaaatatattgtaaccctatgtaaaaaatataaataaaaaaaaattctatactacaaatatgttatttaacccttgcaataactcaatatcatacaataactatgttagcaaccccttcaacaactatgttgcaacccttacaacaaccatactaataacttaatcttatacaataactatgttaaaaactctcacaacaaccatgttaacaacccaatcttatacatcgaccatgttaacattccaatctcataccacaaccatgttgataacctctacacttagtatcatacaataactatgttagcaacccttgcaacaactcaatctcataccataatcacgttagcatgtcttgtagcaccccaataacattcaaaaacaatatttgaaacctttatagcaatcatgttagtagttttattttatacaaaaattatgttagcaacttaatcttaattttatacaacaattatgttagcaacccttatatcaaccatattagcaacttaatcttatacaacaatcgtgtcagcaatccaatctcatataccaaccacattagaaacttaatctcatataacaactatatttacaagttaatctcataccacaaccatgttaacaacccaatctcatacccaaaccatacttacaacaatctaatattatacaataaacatgttagcaacccttgcaataactatgttaacaacttaatctcaaacaaccatgttataaatctttacaacaatccaatgttatacaacaaatttgttagcaacccttacaacaactcaatctcatactacaatccttacaacagcccttagaaacttttataataactctatttcatacaacaattatgttggcaaccttgttagcaaataaatcttatacagcaaccacattcgtaacttaattttatataacaattatattagtaactctaattaatctcataccgtaaacatgttagtaacctttacaacaactcaatctcatacaacaaccatattatagcaacttctacagaaacttaatatcatacatcaatcatattagcaactttacatcaaccatgttagcaatccttacattacaacagtcacgttagcaacatttacaacaacacaacctgatcatacaataatcatgttagcaacccttacaataactcaaattcatgtaacaacccttacgacatcttatacaacaactcaatttaaaaatgataactaacatcatacattcccctattaaggctatagagtaaaataacttccatatcattaaaattatttttcttgcaaaacaaaaattaaatgaaccaattcatggtatgtatgcaattgagttattgtaagaattgttatatgagattgagctagtgtatgagattatatgtttatatatataccacacaaatctcatttttatatatattataataataaaaatattagtttttcttcacttgttgatgtcaactgaaaaaaattagatcagttaaagtactaattattttttctttgttttttccaaaggccataaatgataagtatggtatcattctttttttaaaaaaaaaaaaaaatggaagcatggtatcattctaccctagagatttatttcttctctttaatttttgaatacataataaaatttgtaatagattaactaattttgatgaattataaaggaagttggtgatcttatttttttgaatataagagtttgtgattaactacaattatagaagaagttggtattctaattaattagaaaaatgaataaacccatcatcaagacttgaaaatgtgtgatagtaaatacatactataagtaaacaaacaaagtctctagaaaaagtaagcaaaagagtgagctaatagtaaacataaagtataaaccgtatttttgaaaaaaaaaaaaaccaataaattatatataaatgaaataattttttaaaatccgtataagtgaataaaaagtttttttgtatatgtaataataaaaaaccgcccccaaaaaaaatattaatttatatcttaaaaataaattattttgaataattaagaaaattaaaaaagaaattaaaattttaaaattaattaaacgatttaaaaaattatttatttttttattaaaatatccatttagatagaaaaatatattaaaaatttaatttttgtaaaaactaaattttaagagaacaaatttgagtctattttttttctcaaaaaatctagatttgttttagtaaacataaaatttttcagtttaatttctaacttttttttttcaaaataattttatatttttattgaattttaattattattttttttttattttttttaagatatgagtttataaatataaataagcttcattttatctttaaaaaattttagtttatttaaattagaatttttaataattttggtttgattttttaagatacgtgtttataaatgaagatgcaaaatggtcctaaatctaacaattaagttaataaatgtctatttttataaaaaattaacaaaatgtccattcagttaaaaatttgatgatgaaattacaattgtaaacttgaattattaagtgtttggtatagttattttgcacaatagtatatcatttttatgtgcaatagtatgttaaaaaaactgaaaggtagtatatcagtttaagattgtggtatatgattttaatgtgctatggtatataatgaacgaaagacggaaattaaaaaatatggaatattagtttaagtttgaggtatagttatatttcactaagaaatattg

SEQ ID NO: 162011 - DNA, 2124 bp, Cannabis sativa
  modified_base (612)..(613): a, c, t, g, unknown or other
  modified_base (1127)..(1130): a, c, t, g, unknown or other
  modified_base (1258)..(1286): a, c, t, g, unknown or other
aaaactatcatatgagagataataagagcattgtgagaaattatgagaatatatattagagttagtctcatgttggaaataaattgttatatataagatgaataggctattcttcccattgccaattggttttgagatggaaccccattcactttatcctaaattctaacatggtatcagagtcacttgtgatccattgtgagctcaaagtgctaccggtttaaaaagctgtttgtgatccgttgtgagccaaagtgccaccagtccaaaaagatactttcactgtctctcctttaacctccatttgggacctttcggccaatgtgtgccaattttcagtgttaggatctttgacctatttcaaaatccacgaattttccgacgtgtacacccacaaatttcctgatatttggccttgtgggattctttcaaatgccacgttcggtcttgtggtctcttaaaggttgttcgttatacccacactttcgaggcccaaacgtgaggagggtatattagagttagtcctacattatttatgtgtagaaataaattgtcatatataagatgaatgagctactcctcccattgtcaattgattttgagatggaaccnnattcacattatcccaaattctaacactataaaaaattactgtgtctaacacctccagtagaaacaatttgcctaataaactagttatttatacaaaaactagaaatagatgctaaacatttcacagctaaacaagcaaaatttgggatgaaattcaggtaaagtgtaacacctttataacctagtgagggttagtttagtgattaacatacttagacggtatggttgtaatatttatataaaatattatgacataattgaacataaatactttaaagtgaattatgtgtgcataagacccgtacgtttttgttaaatggataattttgtaatttgaccatttgagggtatattcgtgaattttggatttcattgaggttggtcgtatttttagtagttagcctttacttaatgtaattgcatccttaattttggatgatttgaattaatgaagtagccattattactctcaaaaaaaaaaaaaaaacccctttttaataatttttattttatannnnatttatatctttaattgtattaaaattttttaaatattacgacaaaaaaataaaataacaaaatatattcatgatacagaaaaaaaaatataaaaataaaatcaaataactattaaaattaacataannnnnnnnnnnnnnnnnnnnnnnnnnnnnatttttaaaaattatttaagttttattatttttaataataaggtgtacttatcattttatgagatgcaaatagaactccccttaattatattgcgaatacattattatgtctcatattgtaaatttcaacaacaaattataaattcaaaataaaatcttcaaatggtaatatcaaaaaattgccaatttatgaaattctcgaattttttcaagattaagtgaaagtttataatttcactatgattagtggaattattattgataagtgtttacccaaattttgacaagggtgacatatgtggcacaatactacaagagactaaagtgatgaacaatactacaaccctcataaaagaaggatatacatagaccctcaaattgagatacatatggggtaaaataggcatctacacccccgagttaggttggtcgaccccccacaccccagggtggattaggtagccacctgcccaatagtgggttagacggtcaccccctcccccttgagggtaggtcatccaccctagggtgggtgggttcgtctgaatgactaattctttaccccctacatttttgtagtcctagtatcataccttatctttgtttggacatgaatagtgcaatgctttgctccaagtatcaaagtttgtctcatgtgctctatgtttgtctacggtcatcactcaaacttgtacatctacaagtatcaaggtgcaaaaatactaagactatatgctaccaagctttaagaacaacataagaagcaaaggggaacgtcccaaggatacaatcccagagtaggtgtatcccaccctagggtcggtcggctagaccaccc

SEQ ID NO: 162012 - DNA, 4730 bp, Cannabis sativa
  modified_base (4259)..(4259): a, c, t, g, unknown or other
gagagagagagagaggaaaataattgaatatgaacaaaaaaatatgaacttttagtataatctacaagatataataattcatcttcagggcataatgatggtgtctttacgattattctaatacaattttttcaaaacctacaatacttgcattcttttcagctgtatatatgatgatatggatcatcataaaatgaaaaaacaaaaggatatacactaagaaactgcaaaaatgtatgtataactgagaactgataagatctgcaataagggtcttcagttgtgtagagggtttggtccccctggaactgcacgtaaggaagctccaaatttggggccaatcccatatgatcttgattcctctggagattttgcagataaatgccatgaaaactgagaagaaagctctgttctttggtctgccttcttggctgattcacttctaactcggttgatgtggcgacaacttgataattgactgatcatgagcaaggttatcaagactagacatggaagcttgtgattctgaattcccatggttcttcagactaaacaaaacttgtaacaagtgtggaaagaaataaagaaagcaagagaggaaaatagagagagagagagagagtttgttttgaaatggaagctagttttgaagtcttttaatatggtatcaagcaagctgtgtggagaatactgccaaattctaacaattgttttttttttttaattataagaaatggcagaattgtccatttcttatcaataaattgctaaaatgtccttgtcacctccactactatatgcatatctactcaatttttgaacttgtactaatgatagctggttttttcgcctgtgcaggtcaatctttgttctttggctgatagctttgaagttattagaagcttaaaagaaaatggtttttctcttgtaatacaaaatttacaagacatttaatatgttaagtatatgctcttctcattttttttcttttttttgctggaaatatgcttctctcacttgatcataataaattcttgagtttggtgagatgagataatcataaggttaatgtggtccttttctatattacggttgactttttcttaattggatctcaccctctctctctcgagcttattattttttttatttttttaacaaagcttatttttagttttaatagcattaattaaacatagtggtatgtaattattgggggagaaactaaagtttcattcaaagccacgtggggcaagatttcgcatcacaagtggcatacattcactgacttttaatttaaggtcttcagtaaaaaaaaattaggagaacagattaagattatagacatatttgcatactaattaagtgagatattccaagaaggtgatccgggtaattaatgataatcttatccaatatgaaagagcattactattaagtattagtaagtaactgtctatcactatttagaagtgatattatcactatttagaagtaatattttttgattagttagtgtatttcttaaaaattattactagagttagatatttaatttttgtaatagtggtataatattattaaaaaatgtattagataccaatagtactacttaattaataatatttctctaaatttaaacaatgataattatctcattcttacaataataagttacataggttatacttttattattagagcattactattaagtatttaaagtatttaaaatgttcaataataatcgaattagaaataaattgagactacatttcagcgtctgattaggtggttggaagatattaatacctatactttaaacaaagttcagtttctgttgtatatcacttcccaaataattataataatacaaaatcaatagtaagaacagagtctgcagtatgtccacagactgattctacaacaccattggtaaaaaaaattacactaaagctaagaaaaatttaatctagggggctgacattatataaatatatatatatatttatataatatgaacatattatataataatgaggttgaatttgaagtttgaaacttaaggcgtgtttgaaataactggaggcacatgatgattaattgattcactatagtttctcatatgaaatgccagcagtatttgtccttcaccgactaattaaatatatttatataaaaaataaatattcatcaaattagtgtgaaagtacatattatataaaatatttgaccagaccaggttagttgcttatcttgagtggaattaatttctttctttttttaatattttttcatggaaatcttgtatggaattaattaataactgctgctgatgatgatatgatgatgcagagcagagattcttcttttatattattatatcacagaaattacgtaattaatgccttgtctttgaaaatatgtaaataattatataaatatatttttttaatgtgctaaaataatattataaatggcccttaatttcatttctcctcgacctgattataatatcaatatatgctattttacagtagtgggtcgttatggagatttaaatataaatctctgcttatttctacttatataatatatatactgtagatattattcgtctacttactacatttaattgaattcaatcactgtaatgtgaattctattatgtcatgtgttaaagctatatttcaattattgtaacttgtaataatacgtagtacaattgattaaatatatgtacgtacgtaataattattgtaatgtattatgtacgtatcttacataagtatagtaataataagacagatattcatacaattatcaattataggttaatgtatggatatgacaaccaaattttaggcaacatgtggattggtttttatgttattaacaaccttgtcaattccaaattctatatataaaaaaataataatactaataatagagaaactttgaccaccttaaatcaagtagaaaaaaaatttcaaaaaaaaaaacgaactatcattggttatgagtatcagctcgaatacataagttaatacatgcaataacgatagccactatgattcttttttcaaagaattaattatttaagtgctattagtttctagcataggagtaatgaaatgaaatgtcaataaacttattagaaatatcagggagaaggatagagggattggagaattcttttgtttggcaagagggagagaagaagggagaggagagatggaaggagagggtctccctccgaacacattatttttcatccctaacatggagaaattcaaaaaaaaagacaaaaaaattatacaaaatatattttctacccttaaaaaaataatatataattatattaaaatgataaaatagtaattttaatatttattttactctctatctttctacatatactcctaacaccaaacaacacaaagaataacaaatatcctctccatccctcctactccccatcatttctacaatctccatccatcctactctctctccttcctaccaaacatagcctaagacttcgaaagaaagactgatactattgatgacttgattataacttcaaaagaatcttaatttaattgttgaggtccaaatattgcacggtggtgacttgccaaaaatagacaagtgcctcgattcttcgctagatccccgcctttttgagggtccttctgtccgtcttagctaatttggagctctgagggctttcatgcagaagactctctgatacttaagtaagagaaagaatttagtgagaaggaaaatgagagagtgagttatagagaatggactattttattacttattaattctacctatatatatttataccatttgatcgtaagggagggaaataactagctcaaccgactcaatgatattatttgaatgttggctcagattttccctattaaacgatcgttaggtcgatcacctggattgatgaagtactcagccaaacccatttctcgttcatgcggatcgataatatatccatcgatctgtcgatcgatctcgggtcttcttagcaaggcaggcccaagcattttgggggcaaaattttaaaattgagctctttagaaaaaaaaaatcgtatatattaaaactataattctattactagctttttttttttaagattcattcataaattttccattataatttttttatttatgtatacataataggaaaaaagaggcaaaaataggctttttctttcaaaaaaaaaaaanaaaaattgggccttaaaaaaagggataagttgacaaaaatacctctattttgtatccattaatcaaaaatatcctcatattattttttttattaaaatatacccactttttttaatggattgcctaatataccctcactctctacttaattctagcacataatttacataacataatggattaaatgggcacatcatccataaaagtgggtatatatctaaaaaaatttaaaaatggaggtaaaaattaaaataaatatagcaaagtaggtatacaatgtaatttcctcttaaaaaaatgggggccttatgcaagagaaatttacatgatgtactaacttttgctattattttacaaaaatatgtcaggcggtacttttgacttttttactgtatttttttataagtttcatactgtagtatactgtgttaagttttcactggtgttttactggtgttctactgttgtttt

SEQ ID NO: 162013 - DNA, 3579 bp, Cannabis sativa
tctattactctttgttctgatgatattttctttggacatgtagcttcattgtgaatggaaggggagtggataagcgaactaatgtttatgtggtttgtctctttcgattttatttctggatcattctgtgtataagacaacaactgtgcacctcaaattgtttagaggcttaatatatcagctcgttgatctctctgtacttttttttcctaggatgctgggccacaagtgccaactaatgtgactccattgttaaaatatggaacaaatctacttcaagctgtgggccagttcaatggtaagcttgtacagtagtcttttagctttgaaataatggtcacatatcatcgtttcatgacagtgtgcaactaattttcaggtcactatgttatcattgttgcctttatgaaagagacgaaattatctgacattccagtcctttcagattatgttcagcctcttgcaggtggacttcagtcaggtatgcttaaacacaaagataggaaatatttttatcggctgtttatatcctattgtatttatgaattctaggagctaactggtgtatattttgtaaagatcttgatctgatcgaagggccatcccgaatatcacttaattgtccaataaggtataccattctatattacaaaatctaatttattagctcttatatcttctatttgttaataatcctgatagacttgtatttgatgttaaatttcagataaatattatatcatgttcttacaattcttttttccttcatatctaattgaactgataatcttttattaattcatttggctatatatagttatactcgtattggtactccagtcaaagggcattcatgcaaacatcttcaggtgagtgtggaaaatacaatcaagatctttgtgtaatttaatgttttagattggtgctaattattgattccaacagcaattttaattttaatgtggcagtttctctaaaatgttctacatataactatactctaaccacaaaagattttatatgtaaagagtttctagtttctctgataactaaatgaaattggaacaattttaatttttattaagcaatggaaaatttggtctataatttttcccatgaaaaatgaacctatctcgttagtattattccatgcactttttttcttttcttttgggtgcagggattgcctagtttaatttttttttagcttcaaaattagtattttgacattcttgcggtaattttggaatgtcttattatgcagtgtttcgacttcagtaactacattgatataaattcaagaagaccatcttggcgctgccctcactgtaatcagcatgtttgctactcagatattcgtatagatcaaaatatggtcaaggcaagtggctagacatttgttccctatgtcttgttgttgttgctgtgtgtatatttctgatgttttctttctctcaggtcttgaaagaggttgggaacgatgttgctgttgttattatctccacagacgggtcatggaaggctgtcatggacaatgatgatcagtctgataaggctcacgattcaaattgttcgaagcaaacgattgagctgcaggagtctaccgaaccaaatgacattcataatattctggatctgactggtggcgatgatgatgaaatggatatcactgttagtaacattgatgacttgaaaccttccaggggtgaactaaatgtcctgcctagaaatcagaatgttggtgctcctcaagtagaggatacagattggtctgctctcttcaattctccagacttgtcgaccgcagtttggtcagaagccttgttcggtccaacatctcagtctactccagcaacttttgtgcagactcctcacttggctgatgtttctccggtacctactaatcatggagctggcagtcttgtaaataataatctcatagcttctgaaatgatgaatcatttttcttccccaaattttcagttacaacagatgcagtctacaaacccaaatactaatgagtatgggagatttccaacatcttccccagttccgaacaggacaccaatcgctattcaagccctcgcagcacagccacagacaccacaaacttcacagcaaatattaagaaacaattcaaatttcttaactcccaattcttctgctatggcatctcagagtgcacctacaggttataacacagtattcagtgatatggagaggcggcaacattttaatcaatcccttataaaccgacctcaagcacccaacgttgccccatcttcagcacagccttcctacgtaacacaggtaaacactacaacgaccacctgtgaaaaagcttgcactgtaaatggttttaaattgttttccagcatgcttgatttgtggataattcattttatggaaattctttctaacatttgcctttttcaatccacagaaccggaatcatcaacatcaagatcgttcattttcaggtcaacgtccaaatggttataggccatcgacactctcaaattttcaaaattcacacctacaagaaactttcaataatgtaaggataccacagtcacatgccatccgaccttcacatatgttacgaagcccagttccctaccaaggagttactcaactgggaactcctcaggtatcacaagttagcggaaatcaacaagctagaatggcgggtttggctgcccaaagagatgcacatgcagctagacaggattcgacacctgagcagaattggcttgctgcaacagctcgaatgcgtggaagctcaattccacctgcacttaataatttgattattcggcctactcaatcaccacaaccgtctcaagctccaatactaccatcagccccagccacttccccgcaaatgatgttgcctcaaatgaccgctcttcttgccaacaacgacagaaacgttcgagcacttcaacctcataatcatatcaactgaaatgctgctgctcaaagtgggtgtgtaaataaatagcatggaaatttttgtagctcgttgtctccactccatgtataaaaggtttggaaatgtttgggaaccaaaagctttaatagtcttctgttatgtatgtagctatagtttttttcttttcttttcttttttgtttcatatgcagtggaaaattgggttgtctaaatgtgcagtgttccaagcttttcgaatattaattttagaatgaaacttatatatagtcaaaatgaatgttatacttgtttagcctctttttctctttgaggtatccctttcagtcattattttttgactattgccaagaacaaggttagttctaatgatcttttgaagcttattaggcttcaattcatctctcataattggggtgttttgggtttgatttgatttgcccaaccattttaaaaggagtaattacattgataaggcataaagccaaaaaaaacaaaggcaatataaagtaattagtgttggaacctgaggggtaaatttggtcaacaaatttgagaaacattaaagcaataagagtaggggtgttcataaaatagccgattcaatccaatccgcacgatccaatc

SEQ ID NO: 162014 - DNA, 4884 bp, Cannabis sativa
  modified_base (4702)..(4704): a, c, t, g, unknown or other
aaaaaaaaaaaaaaactgaaaatatataatctgaaaactactgattataatctgaaaactactgattagttgttagtttaaacgtgtggtcttacttctgtgggcagaatggattgttaaagtttggcactggccttgcatggggaaccattgtcctccttagctgtttcaaggccttttcttcttcttgctgcaataaaagtttacatcaattaagctggtatagttattattacattagttattagggatttgaaagaaagaccaaaactgaccattctggctgcctcactctcttctctgtatctcttatacatcacttccttctctttaatctgtcacaaaatgggggaccttttagtatctatctatatcttgtagatgcaatgtttatcttcagtgaggttttagttaccttttgatcaaattctgctctatccacagctctatgatccacatgaagagagaatccttgtacttcagtcaaaggcttgcgcaccttttctgggactggaatgggatctctgtagcaacagacaaaatgataattcgataatcagttctatcttctaataactagttatgatgatatatttgtgtttactcttcaatcaagtggcgggtccttactctttaaggactggctgtgccttgaatactctcatttgagcttcttctctttctttcctctccctctcctccctttctctttgcatttcctcctcatgcctcaccaaactctccaattgaaaaggatttggctttgtgcagtttttgggctcgggtttgggtggaatctgccatgaagcatacaaatattaatcaaatattgtagagtggacgctgtgctttgtaaatgagtgtgtgagaaacaaatttaagtaccacagggtagtccgtggtataaggatatggattagctttgggaaccctagctcgctcttcttcccactgcttgtgcacaacttccataataaattttttctctttctcggctcctctttcctaataaatagtaagacccagaacatagtcgtatgaaaactgtctacaagaaattcttctaaagcaaaggaatgaatgaaatattatttcttgatgtgtacctctgtatgcagatgaaatggatttggtgttgtgttttttggaagtggattatggcgaggttccatgttcaaagataactgatcatatcatagaagtcagtaacaattaaaattcagaagaatcagcattatcaagtgtagtgcaagtacataccttgtcaaaaagatctgcaaccgttgaaggtggtggaatcctctcatgagtagcaaaatgaaattcttgaggaactgtgatatgtttcttgacattacagaacatacccaactcacccttactttcaaatatctacaatatgggaaaggaaaaagacccttaatatctgttttgttctttaaggcacgggaaaataaaatgaagacaagtttatatataccttcttgttgagaggcttagccttgaatttaggtagtttttcaagttcctcctgctcaatttcccaggagcttttcaccttggttggtcgggcccttagcgatgtctgaagtagaggagttttaggttcagttagatgacccttccattgattattctgcgatgagcaaacagaaatgtcagctaatggacattaccaattcttcaaagataaaataaatacaagaaaaatgttctctgcctgatgtgacgaatctgttgaaacaactgatgccgattctgcattatggcttgcccttacggaagtctccaagtgaaattcctataacaattacgaaacatgaaaacttataagagtcaacttttctcttactaacactcatttttaaacgtttgcttaccttaaattctggcagctggggtgtacttcttggtactgcaggtaataatggggcttgcaaaatctgtttcaaagagacgattaaccataaaacatacaagagcagaagaaacacttggtcaagacaccagcagaatatataaatatatgtataccttcttgttcaagggacgtgctttaaactttggaattttggccatcatctcttcttcaagctcagcagtgcttttaatcttaacagagcgtgctctttgagatgtttcaaactcaggttccttgggcctcgtcaatgtgagtctaggcttcgtctggataatagaagcataaacaacatgggtatcaagtaatatgggattgaaaagtgacaagaaagtgtaaaaggacaacaaaaatctggggcttcattttattaacgaacctgagtgtgaggcaacgacaggtctctggtacttgattggaacttcttcaccatttcagcagctgaaacaaatggaggagcttgtgctgctggtgctccttctcgaacataaatctattttaggggtaaaaaaattaccagttaaaaacttaaatccatgttcaccaaatttataaagttttcaaagaattatagtgagaaaaccatagaacaatttaataaaaatcacaaacctttctttcatcttttttagctctattcacagttgatgagcagaagttagaactgctactcacaagacccgattttgtcttgtggggcagattatgaggtttgaggctaagaatctagattttgaagagacaagacaagacatcatattagttttgaaatgtgaaaaaaaaaaaaacaaaataagcaaccggggaagacaaaataagaacaagtgtagagaagcagcttcataattacctgtctagattgtcctccttccaacttctgtcgcttaattgcctgattctcttgggccagagtgagagtcccaccagtgtttttcacatttgtttcactacaaggtttgagttgaataaccaacataaatcagtaaacacttgaaggcccaaaacttaaaaacctatatcagaacaaagaagaatgcacttaccttttcaaacaagatggtttggggtttttggattgtgacgacttgatctgactttttggcttcaatgctgttgggtttctaactaaactggctatctttttagctgtctgctgcttcttggagttggtcccaaggatagatggcacaggtgtgcaagcttctttttctgcctgaacagaaggtttcctattctccttatcactattagcttcgtttttcacaccagaagaagaagaaactatcctagctgatgcactgagataagcagagaaagcacaaacaaacttggaataagaattttgacactaattactctgtacaaaagtactagtttcacggcatagattcctggggacaaacctgtaatgtttctcagtgctcttgctctcttctttgctgtcttcctttaaacctttatcaacggaattctgaaaagacaaactagatcagataccaaaacacaacaaagataagagttgaaagagttcaaaacctacatacctctatgacattttctactttgctctctacagtggctactttctttaagtcaacaggaagcagcacggtttgaggcgcagtttccaaagtatcattacttttcaaatgggacgatgaattagaagtctacaaaacgtttaaccgtgaataatatcaataaataatcataaattagttcttctaattgaagatgaaagataaaaaaacagaaagtcacctccttctgcatctgatctgctacactaaaatcgcataagctttccacggtgaaagatctaccagtcttgattctaggcataaaagctgcatacatttgggccaaaagaatactttgaaaagttacaacagaactccgactccgactcaaattctgaacaattttttatcatctttgtaaagcaattaactaaattgaaggcaaagaaatacccagaatttagtaattagcataatcaaactcataagttccataattactatatcgaaccaacgttactatctcaaaacatgaaaatatttgatgaagaagatcaagaaatctttcgttcgttcttggtcatacaagaaacttagtcccataggtcttaacaccggaaacaaactattcaactaatcgtgaaacttaaattaagataatcaagaactaagaaaaaccctagaaactgagatgaaagaacagaaacgattgaaggaaaaaggtacatacgagaaggggcgtgagtgagggcggtgtcgaaccagagctcggccttgcgcttgtcctcgtctgattcgccgtttacgaaatcaaagaatcgaggggccgagaactcgtaggcctcgtcgatcatggtggagatggtgaaatttgttggattgggttcttcagccaccgacatggattgataataagaagaagaagtggagtgattgtgtgtaaaatgtgtgagaggagaggagagactttgattcgctctgtacagacagaatcagaagaagaagatttttggggttaatgaaatgtaaagatactgaaaaatctgaaacgttgaagaattagagaagagagttaagggatctaacggtcatatttttcaaatttgggtaagcctcttaatgcaacgatcacttatacgaccaataggtctccccacctaacggctatatttcttcttattgtcttaatgtccttttacggtgtcgtttcgcataccaattatgtttttatttttattttatgtaaatatattattattattannnttattattattattattgtattattttacatttataatatgattcatggaatttttttttatattattcgtcaaatttgattcatagaattagccttctgtaactaacggaaatggaactaatatacaaatacagtaatacaacttgaaagcgatctactggaaacaaagggccagaatt

SEQ ID NO: 162015 - DNA, 7757 bp, Cannabis sativa
  modified_base (1254)..(1255): a, c, t, g, unknown or other
  modified_base (4567)..(4568): a, c, t, g, unknown or other
ataaaacccaacactaaccacttgtattttcttctttctagacaatatgagtttctcggccgccgtggcatcctatttgaagatgaagacacgagtgcccaaggaagttgaacctctggtcaaggaagttgttcaaggtattcctacagcttcctctactcttatgaggaaggagcttaggaagaagagtagacctacaaaagttgttctccctactcaagatccttataatgagaattccaaagttggtagagttgatgcagaatctcccattgagatttccccaaacaaggctaatagtgatattctgaactcgggttcagagttggtggagcagctgcgtgcatatggctcttcggttcttgccaatggtgatgccttgattggagccaaggctgagaatatccccctgtagaagttggttagctccaaacctctggatgtcatcgcccaaagatgcttcaccgacatcttcagggtaataactcttcttctcttgttttgaaccagcttttttttgcttgtcatctcctgactttgtcttcttgttttcaagcttgtgttgttaatgcttatactatggataatgaacacaagaaggtggttgagcttgctgaaaagctctcaaatgcaaaggagcgagttgttgctgtagaagatcaggttgttggcttaagagaaagcattgattctttgctttaaaccctcttgagttgaaatgaatctaagaaattttcttgattggacgccaaaggcacatttcagaggattgagcttcattcaatattcccacaggatgttgaagcattcctctaaatctttgatgtgttctttaaatttctttgacttgaccagcatgtcatcaacgtagaattccatattgttctccattaagcctaaaacatatggttgactagtatttgataagtagaacctgtattcttgagtctgaagggcattactttgtagaaataaagtgtgatgtcagttcaaaaactagtatgctcttcatctagtgcatgcatgttgatttggttgtggccggaataggcatccatgaatgtgaggagttcacagccagatgtcgcatccaccagttgatcaattcgtggtagagggaaataatctttgggtatgcaagttctccacttaccattcagtttaggcaccaaaacagggttggatacccaaactggatagaaagcttccctaatgaagttgttctcccatagtctttcaacttcttccttgagnnctttggaacgctctttgtcaaggagcttgcatttttgctttataggttggaagttgactttttctatgttgagggcatgagagataaccttggggttgatcctgatcatgtcctcatgtgaccaggcaaaaatttcttgatttcccccaaggcaagcgatgagcatcttgctcaaaacctccattaggttttttccaatcttgacaaccttggtcgggtccattgtgttgaggggaaatttttaagttcctcggtcagaccaactcctgagtcaatttccccaaaatgagggtcaatgttgtcctcgtcttggatgcaacttcaagtggtattaggtgttgcctccatcttctctgtattttgaactttagaggtcttcgtaatctctttagctttcgtgggagaggccttgtttgtccccctggtgccaaagcagcagaggaggtcttcttggtgagtgataacgaaatgttatagcactcacaggaagtttcttaattgctaaggagacaaccaatactagtcgctgttaggaattcaatggaaaaattatatattgatgagatggctcgtaggtcgtacaaggttggctttccaagcatgacgttacacagcgacttcacatccaccactatgaacttgggaatgatggcagtctaccttggggcagtgccgactgtgagtggtagtctgatcttgccacatagagctatgttggctccgctgaaactatacattagttgttcgcatggcttcaagtcttcaagtgacaaatccacctagattagggttttttgaataagatgtccgaggatgctccatcatcaatcattacccttgccaccatcatgttgtctatatgcacctcaataacaaagggatcgttgtgagggtagctgacatgatagaatattgagtctccaaatgtcatgggaacacactcgtaacgttgagcctttggatgatgttcagtaacctccagtactttggttcttggctcatgtcacaaagacctttcatacctatctaaggccttccttgagtactagctagatgagggcatccaatcacaatcttgagcctacctgcaactggcgcatactatagattcacattgcccccagctgaagcctcaagtcatacatacagttgaagagcagcatgtttctatcttatgagaaattctatctcctcttgcaactgattacactcatttgtatcgtgatcgtaattgttgtgatagcaacagaatttgttcgtgtccttcttccataactctttgaagggaagaggtttgcgatacgacactattcactatgtggttgtatagatcttctctcttggggctaagaggatggagacagtggtgaaacgaggctcatactctcgcaaggatctgcccctagttttggctttctttccaccagggaagttgccttgtttcccaccattgttggctcttttccctccatcctaacctcctttcttctctttactctgcgctttagtgtcaggggatgaagaacttggtgacttcttcttgttgcattttgagccctttgctcaagtgacagcttcttctagcttgataaagtcatccactctatcaagaaagtcattcatggtgtaaactgctttgagatgaaggtcgcaccatagatgaatcatctctttgagcttggatacaagttccattacccttgcatcctcactaagcctttttgtcttagcaactgcctctaagaacagttgtatatagtccttaaggggctcatcttcctgttgcttgacatccaccaaatcgttgggctcaatttggcgttgtcaggaagaagagaattggataccaaaagcatccaccggatctgcacctgacatcgtctcttactccctgcagataggtctgcactttgaagtaatggatgtgagatagtggatcttccttccccgtgcatcaatgctaggaagagttcttaaactttgaagggattggtagagctttgatttgatcaaagggtgatgatcattgctctcttttgagttcaaactctgacaacttttgagttatgattcctgtcactaggaccgctaggttgtcaaactctgccttgttgacaccatggattgtggtctgcgtcctagttagaggttttgttacccgatcagggtctcctgtagaatctctcacttccaccaaccgtcttctggttaaagtgtcacgcaggtctctttgtcttccaagtcaatcatggactctggtcgacttgggtccctttcatctcggaagtattttttagtatgaagcagctcgttggtccttactcgtcggatctcatagcctttggtttcaaagtaatgtcttcgactatcccttcatttcgagtagcaggtctctttccctttacaagttttcgaggtctggtgtcatgagagtgtagaggaggacatggtggaagagtcctaatggctctctcaatattttgaggtcgctccacatctggttgagggcccattggttggcgcccacgagtttgagtccttttgggctcttgctcaaagtttgttgccctccagggagccttagcacctggtgtttgcttaatgcttgcacggtttctaggcatggtagttgtgttttgtgaattaagggtttccccttgagctctagtttccacgtgaccagttggtcgatagggaatctctctcacaaacttgaaagacctctgcagggggtagtttcgcgaccagagtgataggcttatctaatctgttaagacaaattagctctttgctgctcctactcaactcgttggctctcaatgtttcgccagttttccatgaaccagtgttgaaactactcttgttgattgtcgagagagtctcgtagttgttgttgtagatcagccacagtttagctaagttgttccacttgaggattggcctcctcagggttttccaactccacgtgtggctctccaggtgggatttgcttgtcgattccagtatcaggaacatttggtggccttgggagcaagctatggagctagtttcagagcctcctcctagaacctgctgtgtaggagtagtctcagctccagcttcagcaattggcgtgcccccagtttgctagccagtcgttagggctcctctgtcgacacttgaagagcatgttgcaaccatcttgtaagtgactttcttgagctgtggctctcaatgaaagcaccaaaattttgactcaaaaatttggatagagactgtaaagccacacccgctccatagattggcgagaatgagatatatgttaagtataanngagagacacaacaatttatagtagttcactccctgtatcacgagagtaatggagctatatctacttcgagtttttattctcgcgagtcggattattaaaaaatggctaagtctggatgctctaatatctagagagacaacctagagagagatgctctaacctcgtggctacttttctgaatatgaaaaatgagctagaggagctctccttttagaggtgaaggaggtcctattaaatgggaataaaataatccaaaagaatatggaatagtacatgtgggctctttttgaccatagatgatgatctaacagtgaaaattattttctgaggctgatcatcgattttttggagctcgagttacaacgacgtgacccactctaggtgagctgtagcttaaatttgtaactctcttagggtgaaatttagagtcgatagcttcagaattgatatttaagtgtgagacactacttgatagatcattgaattaacttcaaaatgcaagttgaatcacgccaatcaaatcaatattgagtgagttatggtcattatactgaaggttgatctgggcccaacgacgaggttgacatgtgatgttaacctggacgttgggtgagtgggaaagcgtgtcaggaatgtatttttttattcctgagtgatattttgacatcacttagtccatttctatgttctggtgaagcttgtgaccagttctcagagatgttgctattctgtagagacgggagactcaaaacaacttggttttcgggtaaatcacgttatcagaaaagtgaaaatttgatgttttgaatttgactgttatgacttcatggctctgaattattctaagaaaatagatgaataatcaagacagaaatagaatctgataagcagacctagcgcaccagcccatttgtcaacttgggcactatgtgcttattttgaagcttccatgatgtcatttttgtacttgcaagttctagaacttgaggactaggtctcctaccctatttttgaccattttgaagagaatgcttggagtagaattagcatttgagtcatcgaaaccagtgcaccaggttgatttttgcgctaggcctagcaccaggtcaacctgggcattgggctcaatttcaaggccctcgagattgtggttttctgcccaagttttcttgtatcttcttttttttgatgattgaaaaaaagaccataacacttttttcggaaagctgattcgaaaggactcaggttgacaatatgtcaaccttggcctgggcccagtttcaggtcacctagaagatccatttggtcaccgcaaatagttaaatcttaattttttctaaacacggaggatatgcccggaagaattctcagaaaaaatcctcaaaaatggcccaggttgacaaaatgtcaacttgagcgatggattagccccaagtgtcaacctaggcgttgggcccctattctggcacccaggatgcgatgtttcttcccctaaagtacctatctctccatttttatgaagacaaagaagatgcatgagttggattttggatttgatgcttggaagtggcccagattaacaaattgtcaacctgggtgctgggtgctgggcattaggtgctcaaaaatgaatgttctctaaatctgattctagtgactcaaatatgtttgtggtatgtctatttcatgtcccaatacaaagtttgacccatttgaactaatacggtcccacaaaccgaaaccctagttgaggatgtcaacttgggcgctaggtgaaaccctaggtgcctaggttaacttctgaggtgctggttcgtgtatttttagctcttggggcctagacttggttgatcgatgtcttcatggtaaagaatactaaaataaagtgagttagaaatgacttaacggaatctaaacttccattccagagttcttggagtcaacctgggtgcaaggctaaggacccctcccaggtcgagtgctatgactcaggactactgaactctgagatgttatcttctttttatgtgtcaaacattgatgcccacatcaccacagaaattttctgggttaacaagaagaagcccaagacgtccggacttagtgcaattctctgtaagtcctaacatcgacatggcttaggcaccaagtcctaatgttgcaatgtgttaggcaccttgagaataagcccaagacctccgtgcttggcacaattctctctaaaacctaacaacatcatggcttaagtactttgagaataagcccaaaaccttcggacgtggagcaattctctctaagtcctaacactatcatggcttaggcacctagagaataagactttctaggcttggcacaattttctctaagtcctaatgttggcatgtcttaggtaccttgagaataattcgaagacctccaggcttcgcgcgattctctccaagtcctaacgacaatatggcttaatcaccttgagaataagcccaagacctctaagcttggtgtaattatctttaagtcctaatgtcgccatagcttagggaccgaaacctaatgctgccatgactttggcaccaagtcctaatgccaccatggcctaggcaataagtcctaatgttgccatggcttaggcactaagtcctattgtcgccatgtcttaggcaccaagcattaatgcgaccattgcttatgcaccaagtcttattgcctccatggcttatgaaccaagtcctaatgtcaccatggcttaggcaacaagtcctaatgtcgccacggcttacgaaccaagtcttagtgtcgaaatggcttagggaacaagtcttaatgtctccatgacttaggcaccaagtcctaatgttgtcatggcttaggcaacaagttatatttttgtcatggcttaggcaccttgagaataagcatgtgacctccaggcctggcacaattctttatgagtcctaatgccaccatggcttaggcatcttgagaataaaactatgagctccaagcttggtgcaattctctccaagtcctaatgcttctaagacttaggcatttttaaagtaagaccaacgcctttgggcttggtacaactcattctaactgtcaacgccagctatgctagcacacttaggtggtgtttggttaggaggaatgaaaacataggaataggaatgagaatatgaataagaatag

SEQ ID NO: 162016 - DNA, 3066 bp, Cannabis sativa
cgtagaattggctcagtcacaaatcaacaaatgggaagcaaacgacaccgtttcaatatttaacggcgaccgtgaaaatgcaaaacagtaccttaacgccgttaaggggttacagtcagccatgcagaatttcatttctcagaaatctgcaacggagaaactaatcagagcacaatttctaatggaaaccgccatgagaagacttcagagagagttttaccatatcttgtcctctaatcgagagtgtttggatcctgaatcggtttcgagtcactcttcgtcaagaacttccacgatttcgagtttctctgatttcgaagatgagttggaagacgagttgagagtcacaaccgaatcgatttcggaagttgagcgggtatcgattgcggccatggcggatttgaagtcgattgcggattgtatgatttcggctggttacgccaaagagtgtgtgaagatttatacgaatgtacggaaatatattatcgatcagggtttgtaccgtttgggagtggagaagatgagtttttctcagatccagaaacttgaatggaatattatggagattaaaatcaagagctggcttaaagctgtaaaagtcgccgtgaaaacattgttttacggtgagagaattctctgcgatcaagtttttgcttcttctgaatcgatcagagaattgtggttcaacgagatctgcggtgaaggtgccacgttgctcttcagtttccctgaattagtagcgaaatcgaagaaatctccagagaaaatgtttcgaacactcgatttgtacgaagcgattacagatttatggccagagatcaactcaatcttctcctataaatcaacctccgccgttagatctcaagcttctaactcactcatcaaattaaacgaatccgtaagaacaatgatgacagatttcgaatcggcaatacttaaagactcatcgaagaagaaacccgttcccggcggcggaatccatcccctgactcgttacgtaatgaactacatctcattcttagccgattacagcgaggttctttcaatcatcgtcgccgattggccgttaccagtccacgcgccgttgccggaatcttacttcggaagctcgaacaacaacaagaacgatcacgaaacctcgtcgtcatcgtcgccgggattgtccgtacggatcgcctggcttattttagttcttctctgtaaattagacggtaaagcaacattgttcaaagacgtttctctcccttatatatttttagctaacaatcttcaatacgtcgtcgtaaaggtccgaaactcaaacctaaaattcatacttggtgacgtttggatttccaagcacgaagccaagttgaaacaatacgtgtcgagtttcgaggccgttggatggagcacggtgttctcatcaataccagatgatccaacggctgatatttctcctgaacaagctaagaagatattcaagaaattcatatcaagtttcgaagaggcttattgtaaacagattagttgggtcgcacccgacccgaaactccgatacttgattaaagcctctgttgcggataaaattgtgggtccgtacaaggttttttatgagaggaatcgaatcgggttggtaacagtttgcgggtcggattctgtggtgagatatacgcccgagaatttagatagttttttgtgtgatcatttttctttgggactggaaatgtagagaattttccttcctctaattaattaggtttggttttatgttttatttgggaggagaattttcgtttgttgagagctctctctttgtatttgtttttttaatcttctttttgtgaggaaatggaatattgtaaagctaaaagcttagatcatatagtgtaaagatatacatattattcactatacttgatttcattaagccattttcagaaagccatgaagaaaatttgaattgggtgagcatgttgttgctttaaccattcattcctttgaacatgaaaagtatatatatatctcaatgacaataatacacataaaagaaatatatatatacaaatacaaatagtagaaacctaaagtcgatatccattttgcccatctttggctgcatacgttctcgttgcttttgcttcaacttcttactattctctttttctatgtaagctgttgaaaatagttggtgcaaaaaatagaaatgaactaatttatccaattaaaacttgggttgaatcgcggactagatcactccttttaagacatttgtggtactgttcataattgtgcaagtagactgttagtctcgtcatctcaggataaaacaacacagtcaaatacactgtatcgaaactctattacattatagaaaaccgtcaaaatatcacactcaaaaaacgtacaactgctcgttatatatcatatatgttttttcaataagaaagggagatatctttctcccgttaattctaatgcattatataggcaatgcacataaagtagtaacggaaagaaacacgttactgaagggaatgttagaacgtgggatagcgtggaatcgaggtaatgatgctaaaaataaaaataaaaaattatgtttaccaattaattaaacacgtaaaaattgttttaattaattaaataaataataataatttaataaataaattttctccaaaaaataaagtgacaccacacttgccagcttggcacggtcggtcggatagaaggcggtggcggcgtgtgcgtgtggtgttccaatgtatgagtcctcacccatacgcattatatacactttcaataaaatatttttatttcatatgagactccattcactcacacactttacttcttatttttataaaattttagaaagttccaacataagcctataagccgacaatgcagcatgctattagtggcttttaattgtttgttataccgtaaattgttttttttcaaaaagactaaaaaaattgctggagaaaataaattttggggtaagttgaaaaataccacttttattaatcaattaatcaaatttacctttaattttatatttatttgaaacatacctctttt

SEQ ID NO: 162017 - DNA, 1854 bp, Cannabis sativa
ttaagaagtatttaaggtgtgtggggagtcttaattggtgacttttaatgaagacataacacacatattatataatttttctagaatatcaaattcaataaaataaggtcggcggcaccttatgatagtaggttttgcctctgttatttattggctattttatgatttttgactctcaatttttactaatattaaattttctttttgtagaatttattaggattacatcgtcctttatgaatattttaaaattattttttttttttttaaaaaaaaaagatattgttgaaaattaaataatgtcatataaatttcaaaataaaaaaggaaagtcatttagctaaataaattattcattaattcaaaaaatatacattgctaattcatgtatagtaacattgattgtcacgcgtacatgaatttagacactcctagaaatataaacaataaatttgcaacttcttctaacaatgaatcaaacttattgaaataagaacatctctaatattaatggtagactcaggaattttactgaagagcatctttttaattgatacaaatttgtatttcaatgttaaatatagtataaagtaacaagaaaaatattgaatttaattattaacacactaaatataaattttattgatagaaattgaaaaagtaaaatttaaataataaagtaacatgcttttattggaatttaaactcatgaccttcattatatgtacgaaatagttttatcattataccaaagcttgtattatgttcataaatatcacttttatttagaaatatatgttgtaattagctataatagatatatatatatatatttttcgatttttttttttttcaagagggcgactgccccaccccgcctttatggtctcaaatagttttaccattaatggtgcatcattttacctaatcggtgtgaaatctttacattattttactttaataacacatcaaattatgtaccaaattagtgtgcgctaattctacaatattaatagtgttagattttgaatctacactaatttagggtgattttaacccttattttatttaattttaaaaaataatcttacattttaatctccaaattataatttatcacaaaaataataattaatttaaaacattaacgtaatgaaaaatataatataatgataacaaaaacaataatattaaataaaataaaaataatataatactacgtaataaaactaaaaaattaaaaaaaaaaatattaagtaaaataagtttattgtttttgttttttccttaacattttataagtttaaaaaattatagtagatattttattttattaaattattttatgattttaaattcttactatcaaacatgatatacttattataaaataattattttaggttattaatataaataatacaaaatttgagatcttttatgtaaaatatatttattttgtagaattttttatgtgaattattggaattgttatattaaaaataaaagattctataccaacttagtgtgtttattaaagctaagaatatctttgatcaaatacaagatacatctgcaaaggaattagattgaacaacatgtgtacgtaaaaaaaagataataagtatattttgaccaaaggatttctctctattttgagagggttaatggattttccaacggacgtctaatgtttatttttgagtctatggggatgaatggatgatgtcctttccctcaggtcttttatgtgattgacttactattttctgtttctgggtagtagtagtgatttagagcatgtttggtattgttttttgttttttgttttaaaaaattatttttagaaatgag

SEQ ID NO: 162018 - DNA, 3289 bp, Cannabis sativa
ttctctatccactttcttctccatcagttccttctttggtagtgttaggattatttgtgtctttcatttgaataactttggagtctcttgttatgtgagtgtcgttacgatatctacaattttggggagattgatcattgaaatttgaatgtaattggaaatcctccttgaaattttcagtgaggctagctaattattcctttaccgtgtggtaagaggcttgcaacttggatgcatagtaaatcattgtgctggaatctgatataagtgatctatgaacaaatccaaaccccgacccttcaaaaccccaaatgaatgatcacaaagaaaataagaagatgaagaggtaaaagaataaatgatttcgcttgagcaatgatatttaaggcttgtttggtatgcagtatatatgttatattgtattaaataataaataatatttttatttgaataaaacaatgtattatattaattattacgacaaatttttttaatacaatgtaagttgtattatttaatacacaacaaataatctatattaacttatattatactatttataaaggatccgagttcaatcccaatctccgatccagctccagacccgagaccacagactcggacccaaacttgagacccgaactcgaattcgagacctggacctagacccgaacccgaacttgaatcaagacctggatcgagatctcgaacccgagacacgaccaaaagtcgatgatgaggtcgagtttattgaaaatatattataactttacacaatttattaatacaagtgaatactaaacataatattgtattaaataatactaatacaatattatataatataatacgacatactaaatgaacccttaaatacttgaattgttaaaaataaaacattaatgctagaaacttgtcaaataaaaatagaggtttataaaagaaaaaaaatagatttgcacctaagagttgtattcaatatgcattttttaaaaagatattttatttaatgatgtcaattatttttttaattaaataggcacatgtatatattgcataatatgtactcttataagtcagtcataaatattaaaagaaactatttgtatacaaccacttgataagagggtgggtgtgtgttaaaggtcgtgaatttgaatcttaaactatacattgttgtaatatataaacgtttaaataaaaaaaaaatatatctgtatactatatgaacaaaataagtgtgccaccataagattattatatgtattcattttattaagtgtataatcgtatctgattgggttgaatgagccataatttaaccagcctattttcgacctaaaatatgtaggttactaaaattataattcaaactaattttgactccacttttttatattcattaatcaaaaatactttatattttattataatatacacacttttatgagtgggttgcccaatatacccatactctctacttaagtctaacatataatttacattaacctaaagaatctaatagaaatatcatctataaacgtaggtattgtatatcttaaagaatataaaaataaaagtaaaaattaaaataaataaaataaaataagtatacaatgtaatttctctaaatatgcagccctaaaaagacttgatcaaattttaaatcaattcaaaagattgtcgtttaacgttgaaacgacataataattaagtaaattactatattgttacaaagtgaaaagcacgtgttcggttccggagtcggagtcggagtcggttttggatttggattcggactcgctatctatatataaatcaaaatatccagtaaggccaggacacttcgttgagatacttgccctctctccaagccaagctccgcaaaacccaattccctttcctcctttctcatcgatacttgtaccacccaacatcgtcaaccatgattacaggttcaataacctttctagcttcatttctatgtcttaaattctttgatttactcctgtcccaactggggatttctattttcttttggagtatttgctttgctttgcttgatatttgatatgtgaaacgagttgcaactttacttttctttttttttttccttacctttatattttttttttcaacaatagagattatctttatatgatacggggccttcatattcttcgtttatcgatgtattttagaagcaaaaataactgttttttgtggaatttatttgagtattagatctgggtaatcgagactaataaatttctcatatgggttttcaaggagttttagtgtatttaatgctgagttgttattattcgttttaaagaaagctaatcatactagagctctcaacaaaaatgaaacttaagtcttattggataacaaggtcttttaatcaatgtggacaatgaactttagttgacaatcttcaaagatttaagaagaaatgtttttgacacttctaattacttttacagtgagtgtaaaatggcaaaaggagctccttaaagctgtggaaattgacactagtcagcccccttatgtgttcaaatgccagttgtacgatctaacaggggtacctcctgagaggcaaaaaattatggttaaaggcggcctgctgaaggtaaaagttgggtgctacatatgaagtgtcttagtgaagtcaatctagttatctttttttcaatcaagatgattaatgttattcctctaaacccttatgcacatggttgaataatactttacgtgatgtgtctaaatcaaaattaaatcactgatttgtttcccaaatgcaggacgatgcagattggtcaaccttaggagtaaaagaggtgattatgtttgcggtggtctgtttgtgttttactgtgcttttgcttacactgatttaaaaaacatttactattttttttgttgctgttggtatagggtcaaaaattgatgatgatgggaactgcagatgagatagtcaaggctccagaaaagggtcctattttcatggaagatcttccagaagaagaacaagccatttctttggtatagtcacaataattcattattgatgtgctatgcaaatttggggagtggtttattctcttttgctcattcaacttactaattggcgcactctcattttatgatattaacttttatgtgctgtttctctttgaccacattctccaaattgccttatggatacttgtttttatttagagtaatttacggcaaaaccccatcaactatcaatttacttgcaaaaaatcatccaacctcatatttt

SEQ ID NO: 162019 - DNA, 2797 bp, Cannabis sativa
tttttttaaaaaaaaaaataatggagttttgctagtaattatccaaattttattggcagaacaaaaaaaagtaaattggttattaaactttggtaataactataaccaaagtttaaaaatgatataattgctaaataaagattagaagttcaaagactttattgctaaaatcaaaattgtaaggtctaacatgtaataagtagtacatttcaagggctaagagactcaaatatgaaagtaacaatacattcatactattgcgcttttaataaatttttttatatataatggtgtacactataaatatttaagacatcctgtaatattttaaaaaataatgttcaaacagtctattttttaacatattaaattttgatgaatttttttaaaattttacaaaactacaacataaactacttttaaaaaatattaaaataaaaaattctctttaataccgaaaaatataaaagtgcatcggtgcatcatacaattttccaaaactttatgtgaaataactaagaaacacaaagtaacacccacaactacttaaagaaaattcagttcaaatgtatgaaagttaccaagtgtggagcctttttggattttggtggttacatggtgaaatctttgctgtgaagagtaggtatgtcatctgtttcattagatgtttaagagccaaattaaacacacaaatgattttatataattgatttgcagtataacacacttttcagtgcaacgaagtctctttattttattggttaaagtaagtatgagacattacaaaagttaaggaaagtaaaaacttgaagtttttaaacacaaactttcatgctgcattcatttgatattgatatatttgttcctagccataagaagctgctacatttgattttgattctagcctaaaggcttacaacaacagtatttatgagaaaaaaaaaatgaaagaaagaaaggaaaaaaaaaaggggtatggttatattaactcttcccagaaaacttctttagttgatccgaaaacacaagtgttggacatctcttcttttgttttgtctcaaaccacttgtttgttttagatagtaatatgtagttaatcatggctgagcttgatcctgttgagccttataaagtgatgaaatatcagctacagcttctccaacagaaagatacactccattcaatccaaacgactccaaaatcttcgattgttgtagcttctcagtcaccgttcccccgggatttgccaagacaagctacaccgaaaaaaaaaacacaattttagcaccaaccccataaaacaacattgtcatttttcaaattgagaaaaaaaagtttgagtattggattacctgaagtgattttttatctaacatctttctgagctcagctaccatttcaataccactggtgtctatggcagttacagctgataatgataattagattgtaagtgaaagaacatattaaaacatgtgttattagtattagaaattaggattaacatatgtacctgtcatatccaagattatggttttcaatgtggtgccattgttagctgctattttttcttcttcttctctaatcaatcttaatatcctgcagttaacaaaaatcaaccccattgagaaaaccatggcaatgaaaattgattaaagtaatcaactttatgtaaaagggtattgaaaagaactaacctttcttgaaggtaagttgaatttgcaaagtacataggtgattcaactgcgagtatgagaaatgaaggaacccttaaagcttctctatatctgttgatgctgtggtatatttgagttccgggaatatttcccaaaaccatggtgtttggtctagtgacatgaaggaggatcttgaaaactgagactccaacctattattatgtacagaacaagtgagaataaggtttagtatatgctaattcatttctgtatcatttattaagaatgatcaaaataagacatggtatcttaccgcgatggcaagaccgagagggacagaaatgaaaagaacaccaaagaatgaagacaaacaagccaagaaatcgagtttgtcaactttccacaaccgccaagcagcctggtaatcgattagtcctatcacagcggttatgatgatagctgctaagatgacattgggagtgtaatagaagaggggcatgagaaacaacagagtcacaagcacagctgaagccattatgatgtttgaaacagcacttttagctccagcgttgtagtttactgccgatctagagaatgatcctgaaaaaaagaaaaactttttttactaaggtgtttgttctaatacaaattattgattggtgcctgagaaaacaaaatccttaccagtggtgacatagcatgaagaacaagaaccgaagatgttcatgattccaatagccatcatttctttatttccatcaacttggtaattctgcaatgatgcaaatgttctcccaactgcaactccttcctgaaaattcaagaaaacaaacataattatgaggccatattgttaagttttatctagtaacagaaagagctggtgtgtttttcggatgacttacagttagagacaagatcccagttataatgccagttttgatagcaagagcaagggattcaccactaaagtataacatgttagcagaaggtggattaaggcccttaggcagatgaccaatctgttacagaaaaacataaacaaagattattataatgattgaataacctttgatttatgaaatgaaatgaaaaattgtaataagttcttacaaatgaga

SEQ ID NO: 162020 - DNA, 2735 bp, Cannabis sativa
ggggggggggggggtccccccagccgccgttgtcactggcttgagcatagtttggtggacagaagtttgtagcagtgatggtaatggaagtgcccttgagacaccattggggcaccttggtcccatcacacactatctgatagcacccaccgcatgattttccatcgttgaacaaagcagtgctcagagcagccgtctttgttccatacccatcagtgtacaggtttccataaccgcatgcaccccctaattcatccatatatatatatgcattcattaatatatcatacacatgcattcatgtattattcattacatatttaacaagtacaggtactgtaactcacccattgttcctgaagcatcgcttccaccatagaaagttgcatgggcttgttgccaagcggctgatgttcctctgagctgggttgaaattactccaacaaacaataaaacacaagaaacaacgtaatatgtctccattgattatctctctttttctttctctctatcttttatatctcaataagctgcttttaatggctatttataatcccataatgtcaatattgtacggcttacagaatataattcataatagaaattggaataaaaaattatgttaatgaagccgttgactgctgatcatcactaagatggtaatgtgcatcctatatataagaataacaatgttagccgtaatttaagagcttgtgcacttgagttatttatcaatttggaaattagtaaacacccacttgattcttatgatcttgttgttcaagtcataaacacaaactgtagatgcctaatagtgtttattacattaaaaaaaaacataataataattctatacgcacatcatgcctatttcccttttttttttcttattttatatctgtgttctaattataattccttattacaacctcttagttaatttctatattttaaaattacttgctaaaatatttttatttttataataatattgtattcgttatagttacaatattattttgtaaattttttaaacattctgaataatttacaatacagaaaatagaattcttgatatttcaatttaccacgtgtgttcaaaaaccttcaaatttatttttagcattgtaaattattaaaaaaaaaaattcaaaaaattacaaaaataatgttgcaactataacgagtacaattataaaaaaaaaaatatattctgtattttcaaacacaaatattgattaaaaaattataataaaagattaatgatgtcacttctctttatatataatatatctatatatatatatttgattccgtggtacttctatttgttttttctttggcatttatttctttcgattggttccacagtacgtttcacacttcatagtacaattgagaggcaaattaccaataaacatgcagttgacttatcaaagattgatagccggtggttttataaatttgagttcggatacttttttatttttattttatataatgataggaaattatctgaataaagttattgaacaagagcattcgataatcctactaaaacaataaagtcaaagtcgtacagatttaagtacatttaatcgagtaatatgtgggagaataacgtggtacgcgtatatgcaaatgatgggaataacttgttgattaagaaataggattaggaatttaatttcaaggtacggtggatggatgggagttcatcttatataagcaatgattgaagtgggagaacatgagttgagtgccacattatgtgccatgtctagtggaactcctcacccatcctcaaccacatttgccacacttacacctacacccacatggatgatgcaatccctgatgatatatatattgatatatacgtacacccagatgaacgatcccaatattatgataatatataactaactccatgggctaccaagcaaaaaaatatatatatctcacttattataagtataagacctctaccttatctataaaccattcattcatgaaaaaagaattgtaaacatcatcagcaataaggctgatatctaattaaattattaaaccattattgttgtttattatgaatgatcttatttggttaaactgccataagttaaataagacaaagcacaagttcaagtgtttttcatttcatctactataatagttacttgtgatagtgaaattctccatgctacaaatagttttgtgcctctgatccaaaggtaagaaagtcagaggtgaaaggaaattgtcctttattatgtacaaagaatgtagtttattctttgatgtagaacatataagaaacttgagagtttagactagtatatggaaactctaacaaatactaactactaatatattgaaagtggtaactcctttgacctgcataaccagagattatataagtggatagtgctggaacgatgataaagctcgagtgtctatcgaataccttgaaattggatgagaatcaatcaacatgaggattttggagcaagtatcgagcattatgcagaagagcatgagcctcctcatttgaggcatcaagcaacctgagttctttgatctcgtccatccatttctccgtttgttctttatggatcctgcaaaattgcaaattaacaataacaattattttggttggagcagagcaagagtttaagttaaagattgaattatatagaagtgaatatataataggtactactaacgtgatcatc

SEQ ID NO: 162021 - DNA, 1587 bp, Cannabis sativa
tcacgagtgttacaaactgctctcgtttccaactttaattcattccaaagaacgcatttttctcagttaaacccagttagtttccgtagaaacccagttcattgctctgtctcaacgagtgaaaacaccaaaacaacagtgacccagaccatcccatggggctgtgaaatggattcttcggagaacgcctctgctctgcagaaatggctgtctcagtctggtcttccgccgcagaagatggcaatagaaaaagtgaacgtgggagagagagggttggttgctttgaagaatattaggaaaggggaaaagctgctctttgtgcctcccacgctggtcatctcagcggaatcagtaagatcttctcgaaaatattgcaactggggtttggttttctgctgttataatttgattgatgaacttgaattctgtcattaatcacaatatttagtgattcggctgtcaatattgatttgttcacctatttaaattcttattacatgtgtttttgaaattcaaggaatggagcattgcagaggctggtaaagtactaaagcagaattcagtacctgactggccattcctggcaacttatttgatcagtgaagcaagtatcatggaatcttcaagatggagcaattatatttctgctttacctcggcaaccatattcacttctctactggtaagcttagcttatacttatattattgtctttgcaagtcatgcaaatcgtcaatgctataattttgcctttcctgcgaagggtctactctcagtttttcctctacagcttctttatatcatttcaggacacgtgaagaactagatcgttatttggaagcatcacagattagagagcgagcaatcgaaaggattacaaatgttgttggaacgtagggcctcaaattagctgtttggattttcttttatgggccatttttggcaacaaaaagtaatcctttttaccaagtttttttttattatttatttaacttgcttctttttcttcgcagatacaatgatttaaggcttagaatattttcaaagtaccctgatttatttcctgaagaggtattaaactcatattagtccttgtgtaaaaccaacttaaaactttccaagtcctttatgttcatttttctgtagttacttgcaacaattccatttttgaatgagcaatcatattattggctttgaagtttagaatctctgttaaccattctcattatgtagatctaacatagtcaacatattagtttgttagttacttaggggagaaagttgaattctgtgttgtgacttggatatacaaaacaaaagattttgtagatttttctttcctagacttgtgtagagattgggaaaacctattgtactagttggctggtagctcgtagttttatgagtccatgtttttaatctgtgttagtagtttttgttgttggagaaggtctttcccaagtgtttatgttaccaaggttttcgtccgccataagcaagggatctcaataaacataggagtaggatagtcctagacatttgacctttgtctctaatttttttgttttaaaaaaaataaaaaacttag

SEQ ID NO: 162022 - DNA, 1327 bp, Cannabis sativa
gaagttcacaagctatagccaaagtgttgttcattggcttccaccagcaggtggtacttataatatggatatagatgctgcttatgatgctggaggtgcaattatttgaataggagcaattgtttaagattattttggagattattcctgccttttctaagtcaattcgaaaggagatagagattactgcaatgatttacagtacaaaatggactctttcaactcaattaaaaatacatttcattgaagcggactctctcttagtaactaatgttgtaaacaaattatcttctactaattctgtaactcatttctatgatttggtagacaatacttcctatttccttaaagcaatagtatcccatgttaaacacgatgccaataaaaccactcgtggcttagctaagtttgctctttgattggatgaaagtaaaaattgttcttgattggaggaaatactttctccaatctaatctattgctgtaatggattctattcattattaatagtatttttttaaaattaatttctttttaaaatataaaataacaaatatatattgtaaatatttctctttcttccacattaaggaaacaaagagatcattttctttttgtttttagtcaccttatcattaaagggtaagtgatgaaggatataaattgtatggtatgaaatagagatttaatttaagtacaaatttgaacaaaagaaacaaaaaacaaaaccttatgcatcacttattcatgtcccacaactccataattaataattcaatttttcaaaaaatacaaatggaatgaaagatttgggttttttcttataaagatgtttcacaaaacaattgatatttttctaagtaatatttctaataacattcactacttcttataaagaagtttttaatcacacaagttattttatgtctgtaaattataaattcatctgtttgagaaaaagacaccaaatttaataagtggtagagttaaacgacagtaactatagacaaaaaccagtgtcgttttaatatattaatacattatacaaataatcttcttgtacttttcgaatcattttgctcttttcccaaatgtttgactattgatatttgatattgaccttgacgacgaacatgtgaccttaaattattttaaggaaaataaaatcttttttttttactgaaatttaaaaatttattttcaattctcttaattatatataaaaaaaatagatagttagatagttaacatgataacaaacaaaacttgacagtgatagtgtgaacataaatatttatagaaacaaaaataaggtttttttttttttt

SEQ ID NO: 162023 - DNA, 2976 bp, Cannabis sativa
attaatagagaaatcacctaactcactagatgagcacgccacccaaaccacacttgtagcatcccatatcactcccccaatctggcaaaacccttcctcggtgccaccgaagcatcagtcgctagagcaaaagaatcaggccgtggtggtatccatcgagtaggtcgatcggcttgcacctagaattgcaaggcccactgccaaatgaagacccgtctaccatattctttaaactccaacatgtgataatgggctaactcttggataacatctaatctagactgcttgtggccaaataatactgagttgcgatcataccaaagcaacgaaagagttgtcatcaatagttcaaaaacctcacgagataacttatcatagagaaaaaagagaatttcctgcattggtctatgtacatctcgacgaagcatcaactacacccccaaccgctgccacactggagtcaaaccagagcaggaaaaaagagcatgcaatatgagctccggggggaagttccgggaatgcaaagagagggaggaagcaagggagttcgctatgtgatagaaagaaaaatcccgtcatggtggaagagtcaattaaaggtacgtcaaacattaatttggatagtgagttagtggatatagaggttcatgagtcacataagctggttacgggcaaggaggcggcccttatcaagccccctccgtcgccatgaggctcttatcgtggaattgccgggggctatgcgaaccccggtaacccaagcgcttcttgcttgggtgaggaggtacaaaccggagtgtatcttcttgatggaaacgaaaacaaatttggaaggaataatgggaatttctagaatgttggggtatcagtactcttctattatcccttcggagggaattcagggtgggttttgtttgctatggaatagtgaggttgagattaaggttattgaagctaaggaaggtgtgtttgaagtagtggttacggagccgatcactaatctaatttggaatttgtttgcggtctatggtagaccatatgaaaatgaaaaaagagagttctgggagatgatggaagcaaaggtatccacctgctccaacccatggttgattgttggagacctaaacttgattgcttacccgtgggacaagaatggaggttaaagggtgtcgccgagggatacaaagactctcttaaactttttgcagaatacgggcgggatcgacttggggtttcaagggtgcaagtatacgtggcaaaataaaagattcctaggggggttaactagagaaagattggatagagctgtggctttgggagagtgggtggtgtcttttccttctgtggtagtgtttaatgccccgatcacggtttcggatcatggtttcattctcttcgacaccattaataaaaggcgaaggggggtcaagccttttagattctttgaagcttgggcaagggaaagttcttgtgaggaagctattaagattgcctaggtgaatcggggagtgggaaatgccaatctcagtggtcgtctttgtgatacgaggactgcgcttcaaaggtggaaaaaagaatcgtttggggattgtgataagcaaattaaggaagtggagaacagaattgggtggatccaagatcagcctctctcgaaggtgctttaagaagaggagaacagtttaatgaaaaagatctctgaactttggattagaaaagagggaatgtggagacaaaaatcgagggaaatctggctgaagttgggtgatagaaacacaaagtttttccacgcctccacggtaattcgaaggagaagaaatgagattaaagcggtgaagaacaacaacggtgtctgggtcacaacagagaacaagattgggagggtttttaatgaattttttcatgatttatatagctcggccaatacgaatcttgataactccttctatgagcttttgtctcctatggttacagaggaggagaatacattgttggaaaaaattccttctcatgaggaaatttggagtgttgtggcggctatgcatcctctcaaggctccgggtcccgatgggatgccgggttatttctttagaagatattgggagatcgttggtaatgaggtgatccacatggttcagaagttctttatttcgggtagaatggagggccaactgaatcatacattcatctgtttaattccaaaagaagaaaatgcttgttcggtagacaaattcagacccattagtttgtgtaattttgcgtacaagatattgtcaaagattattgctaccagactaagggaggtgataaacaagttaatttgccctttccagtcagcttttttgccgggtagacgaattgcggagtcgtctattctgacccaagaactggtctacaccataaagaagaagaacggaaaaggtgggctcgtggccttaaaattagatatgccgaaggcctacgacaggcttgaatggaactttctgagggaggttctcagaggcaatggctttgatgatcaggttacgaatatcattttggagtgtgttcgttcgatttctttctctgtccttattaatggtgtgcctcaaaaaaagttctatccggaaaggggtctcagacaaggtgaccccctatctccattcctgttcctgctgtgtcatgatgtcctctcaaaactgattttgaagaagcaagttccggggcagttacatggaatctctatttctcggtctgctccagaggtaagtcaccaaatgttcgcagatgacaccatcttgttcacacgggcaaatacgaagatggccacgataattcttgaatgtataaacaagtatgaatcatggtccgagcaaaaatgtagcttgatgaaatcgagtattcttttctcgagcactatgaacagtactcatgtaacaccctaactagcataggcgtattacatgattttaaacatactgtgcagctcgttgctcatca

SEQ ID NO: 162024 - DNA, 2818 bp, Cannabis sativa
aaaaagaaagaacagctttaccttgttcctttttgaaaaacaaaaaccttataattaagtatattaaattattaataattatggttataagacatttatacctttttcgtcaaaggtaataatattgatacaacaagattacttcttttcacctttatcaaaactcctttttcagcataaacccattttacaacttttactgtaaaagaagagaaccacacatttatacatgttgactgaatcaatgaagatataaaccccattttacaactttatatgaaatcgatattaacgatgagtattacctttgtcataaaggccactagtgtgtcctcatttcctcatgcatatcataccccctgctttttcttatcaattatatatcacctttaattataccaatatatatttattataattatacattgttatttttaattaaatttttggaatcgttacacattcccacttgttgtatatctaagctaacacaaatatcacaaccctacgaaagaaagaaataaagaaagaaaagaggttcaaaagcagtacaataatatatatatatatatggaacacgtatataattacacaaagcaagaatgcacgcatgcagacccaaaatatgagtcaaaatgagaaataacacccatggatgagtcacgcgtgccttggcagacccaatataccacacaatatatatatatatatatataatgtgtatatattatatatatatgtacatttatatatagtagttttttgcagaggaagagaacttataatatcacataaaataacaagaaaaatctaggaggatcgaaaacaataaatggtaggcatgtactcttgttgctatatatatacataaatatatctctaacgtttgttacatatatttaattttttaaagcatactcccttatattttttatatgaatatgctgagtgactaattaactagtctctttgcttttcattctgacccctatattttcttcccaaaacttttcacaataattaaataactaattgaatagaagtacgtggtctctgcccacatgagtagaattagataataattttcggttttatctttttgagtctagaaaatgtaccttttttttttacaaaaagataataagaaagaaaaaataaaaaggttttctccttcttgttttaacccatttcaatggacaaatgcaactagggctattaatttcattgacagttaacatcatgaaacacagtcagatacaatgcttcttgcaaggaaatgaccaaattattcaagagtaatcaaatcaagcacattcatgataagagtataattaacttaagaactaataaagtattggtaaatacttattttgtatctcttgttttatccaaatgcaaatttagtactttatattttttttaaaatgctcatttggtatcatctaacttaaaaattaattatacggtagcctaagaatcaaaactatgatataaaagtaaataaattctatatatgttagatattgatatataaaacataaaacattaaagcatgtgaacattttattattgaagaaaatttaaaatatataattctaaattttatatttcaaaagagaaattcacacaagtgtataggcacaccacaaaactttatttaattgagactacaacaaaataattctcaataacaagactacaatatataagattaattgtcttattttatttactttttcgatatcaatttaacatctaaagaaataggtatttataataacccaaataaaatacaaaccacatatcttaatttaattagttaatcatatccatacatgattatatataaacttaatttacacatacttaatttatatatactcaatatagatttagttttatttaggagttaatattgattttaacactcccctcaatgttagctcattctttaaactattctaagttgatggcgaaagttttcaaactttctagttgctcatatgtcttcacttgtttcattaaaatctcatcttgtagaactttttcttgaagaaaatgatagtttccacgtgtttaatccttgcatggaagactagaatttttgccaaacgaattattgattacttgtcacagtacaataacattgcaagaactctctttagctgtcattactgctgctcgatattctgtttcagttgttgacaaagcacaatcaattttctcttactatatcaagaaatcattcaagatacaattagcatcaacatatatcccatacttgatccaagtatcatgattccttgcataatcaacgtcacaataatccacagtttacaattaattgtcacctttcttgtacataagtccataatccattgtacattttatatatttgaacatccgctcaactacttctaaatgagacttctttgaattttcaattttgcatgtatcgactcatgactctaactaaataagagatatcaaggtgagttaaggtcaaatagcttatactgcctgcaatctatcaatgcatggatgcatcgatcctccaaattctttttctttgtgcacacatacactacaacatttgactttattagcggcggacaactccgccgctaatacccctaaattggccgctatagagtattaggggtggatttcggccgctattggtccgccgctaatgcgtggccgctattataatagtattagcggtcgaaatagggtccgctgctattaatagcattagcggtgagatcccaccactaatactctttgtcagtttcgtgttgagagagagagagagaga

SEQ ID NO: 162025 - DNA, 9554 bp, Cannabis sativa
gcttaacgatgcttatagactatgtaatgagatttttctactgtaacttctccacaatccaagacttggtaatcaaattcgtacgagaaaggaaacagtttaaaagtaaaagacagtgatctgaaatatttcagtaccaaccaagatagaaaaagttttctattgaataactgtttataagtgatgaatgagtatacatgaatatgctgatagcatcatcaaaattgtatataaaaacaggtttaaccagttccacttcaagattattggagagaaactcaagtgaggataactgaccatatgatcttggcaaactgttttacagggttgaaatttgctcttttgatcagcattcagtaaacctgtctaaccaatccaattttgttttggagggtctgataaatacaatctcaacaagaatttaggaatcaaaggccagttttcccaaagcggtcccagttggagtttaacataccccaaactttctcatcaactctatgctctctgcaatagttgaacctgaagttccaacaaatccaagcgaagcacagctgcaaatggtttcctccacgtatagaagcacatcgggtaagtttgaagggccacaatgcttggtcaccttactatcaacatcacgaatttctggaagaaacccataactcatcccgtgatttccttccacaagtctttttgatgtttgtacaaccaactgatcactctctttgagaaaaaacagtttaaaccggcgtgaatcttcagccaaatcacccaagtaacttccagtccaattagcttcaggaagatcagtcatcacaaaaatatgaataggatgaagactctctccaagagattctattttctgttttaatcccataaaagtagtcttccaatggttcttgaactgtccatctagtaatctaagctgtgcacaaaggaaaggagcttgaatggtctcacgagcaaacttctttcctgcacttacaatttcagggacaaatgggagaaattcaatcttatcaatcagattttgtactctttgatctcttggggattcatgtatatcaatgtatgactctgaacctttgtaaggagcagtaaaaagactaccaaaagccaacacagtggcagagtcagcttcagaaccaggtccgagatgcttatacacatctcgccgtctcctaacataggaaattttctttttccttttgagctgatcatcaggttgaaaagaatccaatgctccatcctcatttccattttgatatgtccaaactgtagttctgcagtcttcatccacagcatataaacacttagctacactaccatcaagcccagataaaaaagatccacattgttttaggctatcaaacaaagaatattgccaatccaattcatggaaacaagtactatctatatccaaattgcaccacaatgaagcaaagatcctaaaatctatgactctaactaaggatgaagaaactaaagatgaaatgtcaatgatgtcagccatggagacatacctacaagaaaagggagatacatgattacgaataacatttatataaatcacaatcaccacaaacaagcaatttaaaaaaaggatcctaacaccattaaattcgatttcgatcacagaaatcaatccgaccgaacaaggggttaagtgaatttctcgcattggtgttataaacatgaaaaattaaacaaaacccaattgaactgtcaccctaatctcaacaaacaaaggttcaaatcgaaatgacatacctcttggtgcgaataaggtcaacgacatgatcccaaaccgtgaagcgaatctgattcggttccaaaactctgaacttggggcaactaccgagagcaacggcatggtgatccaaaatgggaggaataagtaaggttctgttcaaaatggcagagattagaagggcgttcttgaactcggagagctggttgctgaaaccactgtggggggcgtaccagaggaacttttgtccatggaatgagttgcaaggggaagaagatttggagagaagggatttaggggtgagaaagtagtaagaaagaaagaagaggaagaggcagaagagaaaggtgagggagagtagtggggatctgagtgaagaaggtctcttggagttggatggccatggtgatggtctggtggccatagctctgtttgggttcaaaacattcatcatcgctctcatttttctctttcattgctctcttacccaattaggctaccaacttattttattttatttaaattaaataataactatatgttattttttgattggtatatttaaatttatttttttaaaaaaataaaaatttaataacttgtactaatcagatatttataaaagttttaaaattataattaaggtattattactgttaaaaattaaatttaagtatttatttataataaattaaaattaaatatttataaaaaaatgtaaaaaaaaatgaaacaaattcaatcaaacaagttcataatgcaccttatttcaaaaaaacacaatcataatgcaccctcaagtattagtttacacaactaattgatgagataatgtagagtaggctaccaagttattatacacaatacaacacttgtatttctcacttatatttgatgaaatgttttttttttcattagattttaatatatatttaccattaatacatacaaattagaacaaataggatttcttttttccaaattataaccctcttgattgttcaaaaaaaaaaaaaaaccctcttaaactctttttttaaaaatatttttgttacaatattaattatatgatgttaattcgatatagtttaatatatatttagaagttaatactgtgattcatctatatgtttttggtgctacattaagaaattttaaaggtgagattgttgttgatatatcaattttttttgagagatgcttaaaattggaaatgatgtagacaatgatttaaaagtatggtttgtaatagtcaaataatttttatattttatacttcggttcactttatagagattaatttttttatggtggttatagaattgcaatctactcaaattaatgtttcggatttttattgtttttcagcagacatttctcttttagtgtcaagtttttcaggagtgttcatattttagtcatatgtgaatattgttgttcatattttagtgtcaagttcaatacaattcttttatggtagtcaaatgatcgttcatgtttattaatttatatgaatattgttgctaattagctaaatatcttttttctttggacactgaatatatatggttggaggaatttacaccttctccaatgtctttgtattatgaatcttttaattaaaaaagtagcattttattaaaaaaaaaaaaaaaaagcacctagctattgctattagttagcatttttaaattatgataatccattcaagaaacattagaagatgaaaaaaaattattgaatttgtttctcttacgaaaatcacatgtttttattattaatcgaacctccattctcaaattcatatggccccctgtatttccatcatcacaatttcattacatgtggtcaaacgtttttcttttctttctttttttcacatccatttcttttacgattaaaattactcatgcaaaaatgtacatatttttttaatagaaaatataaagatttaaacacttaaaaacatgtttccagatgtaataagaacaaataaatgaaaactcaaaacaaaaattttcattcgagcaaaaggggggaaagaaaattgcagttgagaaaaaacacgaccacatatgaaaaaaaacaacaaaaaacgtttccatatataactcaatttcaatatgaattccttaagataaacaaaacttcataataacataactcaaaaaactcactcaacagacaaaattgattgcgactgcccttagtactacttgttgtatataagataggaaaatatacacgagttcatggagaatgtgaaatagggaaatataaccaagtgaatggcctactatcaccctacataagcaaacacttatgggtctgaaatctgaatgaagaactataaacaaataactgaaggagcagacgccaaggacagattcaaataccctttttcttctttcttttcaggatatataactatactacatagcctaaagcccaacacctaaacaaagtttaaaaataagaaaaagaagctagatttattagttcgatcccacaaagaaaaattaagatggaaagccaaaccagactgcacatattattagtcttgtattaacagtaacctgtagtgcttatcaccacttggctgatctacaatcctagttttagggatcacttccatttaaagtgcatggattgggctgccactagaattcatgtttgaactgctagagccaggatttgcatggaatgctgactgccgagaagagccatcaagcagcttcagagagagaggtgagggaccatcatcaccgatagactctcctaaactcagtttggacatgcctacaagctcatcaacattgattgggctctttgaatgaactgctgttggcttcagcacctcgtgagtctctttgtttacgtctgtgtcgttatcataatgtgaccaaactggaactggatatggaaaaaatggagaaatatatgcaggatatatcaccggatagcaagactgagggctattatcaagctttggaggtgcaggttctccatcatttgagttggttgaatccattgattcacattcttcatcaagagcagggggatcaggcaaggtgttatcgctttgaacttcttgttgtggatggtttacagacaagaagtctcgaggcaccatcgaagcatcagctgcctgtaaaaagggcaatgatagcatattaatatatgtcatctttgaagatcaactaaaaaattagacataagaaaaaatgacatgaaagaaggtactgacttcatctgctataatatcaaacaagctcgatcgtctttttctcctggagacattagtttgcctaatgaaatatttctgggcatggcttgccacttgggtaggtgtccttgagataacatagttccgggcaattccacgccaatcacctttcccaagcttctgcaatccaagtagaaacatcctatgttcctcctcagtccaaggaacacctgaaaacttagaaattaatagatattccaaagacaaattgacgtgtatggtacagccaacaaaagtaattattagcactatctcctgttataatccttatcttcaaatttcttggcaaaaaaataaaacaatattatactacagctacaagaagcacaacataagacatttatacaagacaaaatcttcttccatacttacttttacccagttcaaggacatcttgtactaccagtaaaaaaaatccacttcactaaagagacaatatatacatttaaaatcacaactcaaagcacttgagctctacatttaacttcaacttgtattatccaaagaaaactgttcataaacaaatttactgttccagtcaaattattcataagaaaataacaacaaaatcccaggatttatgatatgacaaacaaaatccgattaaaactagttaaaaaaaaatattaacttggttgcttctactctaagttccaaagatgtaccaacacatagtcaaaatttccaaaatgaaaatctcaactaaacaactttactgaaagaacaataatttcagcctgtaagcgtgtgagtgtgtgtaaatacatatgaaccgaaccttttttcctttcacgacaactggaagacgacccgggaacgaaatcctcagaagcgtaaccatcggcagcagcaccgtggtccggtgtgtcaccgggagaacccggaacattaggtccaccctgtaaagcacccgaacccgacccagcatagtggctgagatttcccatactagcactctttcggatcgacccgtcagtcaatcggactccgaaaagcttaactccacgattcgggcacgtcctcgagttgtgtccattgtggcagcaataggagcaccgtcgagtcatggcttgggaactcaaatcagagttccaccaacaaattcaagattcagatcggcaaatgttagggtttggtttggtttggtttggtctggtcaggctttcttttttcctcctacaaatctttctttctaggttatggaaacaattcggatccggatccaaatatccgaattcacgtgatccgatacgattattcgggttagggctttagctaaagtatgattgtcgatctcctcagctttcgcagttgggaagagaaagaagaaatggaagatgaaactctatatccatataaggataaagggaaaatgattcgctacatctcatttcaccgtttccaatagtggacccttcaatcatcaccgttcagtattctgacacgtttaattataaagtctttctcgacgactacgcaattgtttttgtcattttccaaacattatcctaataaatcgtttaccttttcattaagacaaaatcgcttttttttttgtttttttttttggtttttaagacactattttttttattaataatgatgtcttttttccaattcataaattatattcatcctaatatatatatgttttttttatttgtttttcattatcaaattattagtactcgagatacataaattttatcaataatttataattttttaaaataaagtttcaagtaatatctaagtatatatagaagagtttatgaacttttcaaaaaataaaacaagtgggcaaaaaatatatagatttatattaatacttattttccatatattattaatttaatttattttgcatagtgtatattgtacttatattgaatatgctatgaaattttaaaaaattctaatgaacttatattataaaaaaaaattaaattatatttgaagcttgtaaaattgtatatgtgtaatgcacactatttaatacatgttttcgacttgctttaaaaaaaatacataatagattatttttaattacttaaaaaaaaattctaaatagctataatatataataatataatttatttattttttttttagaaaaatctagtataagatgttggtaaatcataaaataactcctttagactatcatcaatgggagatatattcattgtgttgtatttgatataaaaaataattttattatatattaaagtttttataaaaatattaaattttgagtaaaaatttacaattttactgtcacacggaattttttacaaaatattgtttttttataaaacaatcgtaaaacaacaaaaaagaacaattaaaaagtgaaacaactaaaaaataatcgaagaacaacagtgtaaacttaatgtagtacacagtataaaacttacacagtatttttttaaaaaaattctgccccatattaaaaaaagtaaaaaaagtttgaaatttcagtggtgtaaaaattcctaatatatttacaacaatatttagcattttacttcaatgcacaattataaaattatacaaaaattaatatttgattgatactctttaaatattttattgaaaatataaaataataatgcttttttttttataaatataaaaagtttattattttatattatagctaaataattatagcataataaaaatgacataaaactaaatataaaagtaaactgtgtattgtgatgtaatttttgaattatgttatattatgtgtcaaatttgacacaagtacaatatttgacacattattggagcataatttttacaaaataaattatattttagcaatgcatcaccaatgctttactagggttgcacattgagcaggtaggtcgggttttgaattttttgggtttcgatcgggtttagtaggttctacccaatatacctaaattttaaaaaaatatatatttttttaaaataattataaatttagatctaatctcctcagcactcactcccatcatcagacaaaaaaaaaatagatctaacctcccctctctccctcatatatatataaatatatacacaacatataatatatatacgatacatacactgtaagaagaagcagaagagaagaagaagaagcaaaatagaagaataagaagaagaagttgcgtgaggagaggaagggggaacgggatgtcgtggatcgtgagtgttacatttagggttggatttagtttaacttatatatataataagaaaaaacataatgtatcgggtgaaggtttcacctgaaactcaatatttaaaaatgtcaatccaatacccgcctggaatatcattcgagtggcacccgaacctaattgttttaattatttttttagtaccgagtttaacgagttcaagccaggtgggtgcactgggtgtgggccgagattttgagcctaaatgttcaaccctagctcttactagacattctcttatgttttatatagcaattatatttttgcttatacttggaccacgattattaggtttgtaaatttgtaatgtattaattggttaacttctccctttctatattaggtagtttgggtagctaactgtttggtttttcttcttttcatagaaattatgcctaagaaaattcaacaagatgaggttgagatggcagaggagattctggagcagaaggatgctctgagattggttttgaatgatagtccatgggagatggaccaacacgtaaataaattcaaaatatataataatttaaggaagtacgagacccatcgagggcttcaaagtgttttgggattaaattctggaataggctttctattcatggagagaagcctagtaagcgcacagataggggcttcgacatttggagttaggctcacgtggaaatgggtgcgcaccttattttaaagtactattttgctaatttatgcgttgtagtcagagtggcgcccttctagttcatcctctaggtatatgaactcttgtcaggatagtatatcctttgtgctcatcacaacaaaactacgccaacattggaggagatcttgtatttttagaagattaaatcccaacccattaggggtcacaaggaaaaagtgagcttccatcgattggaacgtcatactaagattatagcttgtcccgtgagttccatgaagtacactcataatttttggtaggggtgtatgtcggtcggtttatgctataattttttcaacccaatataaagatcgggttacaaaaatttaagtgcaacatgcccaattaagaaaaaaaaatagtaacttgcccaatgaaattggtcagtttggtcgggttaacccgtccaaaccgaccattaatatttgtttttaaattttttttatttttacattcaattgttatattttagttacttgttataatgagacaaatatatatagattgaatttaaagttcaaatcaatcaccataaaaaatacattagtttcaactttatattttttaaatagtcatataaaatat

SEQ ID NO: 162026 - DNA, 2121 bp, Cannabis sativa
tctctctctctctctctatactcctttcctttctttctttcttgttcaaaataatacaaaggaaatggccgcgtctgtaatcttttattcgattttggtcgattcgaacgaagttctctaatacttcaaagttcgttgtcgtttttactacaaaagaaaaacttttgttgtcgttttaccgctacacagaaggttcgtgtcgtctactctcaatcaggcgaaaaacgacataattcgaaagtgtttggtgtggcaaacgacataatctttaaaccgacagttttttttatcctcctcttcaaaaatataggaaggaaagtaatggtgcagtctttttcttaatttaatactattatagttataatttattttatttttaattatatattttagttatagtaatattttattaaattttgaaaaaagttgagatctttcgtttctttgggtaggaaaaagaaggaggtgtcaaagctctgactgatgctcttgatgagattgcagcgagtaagctcccttcaaactaggagacttcagagatggtgagtcaagggtgaggattacttactctgatttataagtataggcgttgatgagttgatgaaggttaatcgattgtctgcttgtcgatcttggtcggagcaagtgcaacaaggagctacggtggattaccatgatgttgcaaagaagtttgggggaaattggaggagaaccaggtcaatcctccatcaaataaacttcaatacgagaaacctttaaaacagggtgattagataatagcaaaaattgatctagaagaggttgaggaagaggcttccttttggcaatcttctatagtctacattgtgatgggaacttaccctttaattttagtttttgaaggtttcattaagagagtgtgggaaaatttggtggtagattgtattgtgcaaatgcacactaggtatactttggtaatgtttagggatgaagttacaagggatttggtgttggagagtggtgttatccattttgataagaaacatgtgatactttggccttggtctaaggatatggacactttaaaattggttaaatcgatcttgttaaggattcctctaaatgacctaggccttcaatattggggaaggaaaactctaagtgctttggtgagtataattggcaagtcgataatggttgacaaggtaactagggatcgatcaatggtaaagtttgctagagttcttgtggagatggaaatctcagataatcctccctcaacaatctgccttttgaaagaaaatgggcaattggtggatcaaaaggtggagtatgaatgactccctactaaatgtttagcttgtggaggcttaggccatggagttatatcatgttcgaaaaagtcaggtaaggtttcggtaaagaagaataaggcaattcaaaatatgaaaaaaatctaaattggctaattttgatcgttgatgatgatacaacagtcaaaaataacttctaaggttgatagacaattttctgagcaggtcgtgacggcggaacctactttgggtaagccattgcttatttttgtaactctcttggggtgaaatttgaggccgataactttagaattacgactaaagtttgaacatcacttgatagagcattgaaatagtttcgaaacacaatttgaatcacatcaataagattaatattgagtaagttatggccgtgttactgaaggcatttcataacctagtgcccaagttgacatcccagcgcccaagttgacatatgacgtcaacatggaggctaggtgaatgggaaaacatcctatggatgtacttttgatgtctaagtaatattttgacatcacttagtctgtttttgtgttctggcaaagctggtcactagttctcagagatattgttattttgtagaaatgagagacttgaaactcttcatttctgagtgttcttcccatgttggaaatgagaaatgtaaagttgtgaatttgacctttctgactttatgggatttagttagggaattttgattttatatacttaaaaaattaaaaaaatttattattaaaccaaaaacttaaaccctaaaaaaactatgatttttttttcaaaaccccaaaaa

SEQ ID NO: 162027 - DNA, 2831 bp, Cannabis sativa
  modified_base (1816)..(1816): a, c, t, g, unknown or other
catatataagctgaaaattcaataaataatgtataattgtactgtatagatatatgaatatttttatggagtattatatcacggtgcccaaaatttcaaaattaccatatttgtgatgatttagtatattaattggttcaatttaatatcgaatttaatacactaattttcatattatatggtaatcttaacatcatatagctaacactgagttaacaccgtataaattattgatattagtccaacactttctataatataagtagtatcttacaattagttagcgatattctctaaaaactatttttttaagttatatgggactcaatacttaattagaataatatcagtatgacactgaagaagatactagacaccacaagtacttttcaacaattctctagattatattatattaaaattatagcacagtttgaaaagagaaaaaaaactagattatatataaataataagagagaaaaatatataaaattcaataaatatatgtatattgaaagtatattatatatgtttttttttttttaagtgaaggacttaaagagaaaacatacatataattttccaaataaaattatgacaagtcgaatattattaactatatacaatatatatttagttgaatttttttatatatacaattaacataaatattatatattgtcatacaaacctgaatggtgagataacgaccaacaaaatcagaagccaaaacactaaaagttggagagtcaaaaatatcaccactatcattccatgtaataatagtcacagaagcctttgtaccacttatagttatatagggcttatcagctggtacaacaaccttctctttatatattcccggcttaaccaaaataaacacaagctctttattatcagacgggactgaatcaatggcatcttgtattttggtgaaatcgccttttcctgattggtcaactctcaatagaactgccgagtctgattgaggctcggctagaactaaaggtgatgcaagaacgaaaattattgataatatggtaacaaaataatgaattaaagccattttaggtgaacaagagaagaagaatataatgaatgaatgaatgtttgtttgttgttttgataataataataaggtatttataaggttatccaatcctaagtgattggcatagaattaggttaaattaattatagaatattaatgtaaacgtgtggttttgattggttcaaatagaattaattagccggcgccatggaaagaggtttaagttaattaatttgaaaagtaatctcttcaatgattgtaatgtatgatatatgaaaattgaattatagtttcacaagacttgtaatgcaatatgagtgtttcacaagcttatatatgtataatgataaattgttggttgtttattgtttattagttattatatttataggtatttttcgtattttcggacatacataatttcgactcgaacccgggaccggttcgggtccgggtcaaggtctgggtccgggtcccgggtgagtttgggttcgggttcgggtccaggtctgggtctgggtctgggtcccgatccggtctgaatccgagtctgagtatgggtccgcgtctaggtccaggtcctaagggatccgagtcttgaattaagtttttttatataataaattgaaatcgggtcggttcagatccgatccaaaaaaaagttaggcggggcggagcagatctgatctaagatccaataagtatctgaatgtttcggatcagaggtgatccgtcgggtcggagcttcaacccgctccaactaantggatctttttgacatgcctatatagatattagtggggatcaccataatcttgagtgtatgaaaaagaagatatatatatcctcactcacaaccttagcgtagattagtggggatcgatcaccgtaacttgaataaagtattatcacgtttgttcaaaatcttattttccttattcttaagaactaagggaactctcatgaaaatagctttggaaattatcaagtcttatgattttctaacaaagtatttttttttgatagaaaatttcatctcaaaatgagcatctcaaacctctttatatagtatttaagatatcaccatttaaaattcgaactcataacctccaatccatgaatgttatagaccaaataaagaaatgtaactcatgcacacaacataactcttaaagcattaagaattttaaattaaaatgtgtaaaaaaaatttatacaattaatattagtgataattttgaagattactcatagtaataagtaactttttcatatgttataaaatgaggacaactaatatatatcatcattgattacatattattagtttattacacatatttaatttatatattatattatttttaagatttaatcggtaattttctcataatctaaaataatattaattaacccaacaataatgcataatcaaaaatatgtgtatagctagcaatagcattgatatgattcattgtttggctgtaatctaaataataatcaattaatcatcattattaaggcagttacgttatttggcgacttattggagcttaactaccacgtcatcattggctataataatgtccactaatgatattatgacaactgtaataaagaaattgactttaatatataaaaaaaaaaaaaaaattgtgatgctattgcagtattacttacatttgtattagtacgtgctgttttatttatttatttttaaaaataattatattaaataaataaatagggatatgattttgttccgttattgtactttcac

SEQ ID NO: 162028 - DNA, 1908 bp, Cannabis sativa
agttaacatggttgtaattttttcttttctgataaaggaattgtacacatttttaagaataaaaaattttatggccaaatattctaattaataagtattacaaaataaaatacatacccagtacagttctatcactattattattatttagaactagtttaatgaaaattacttacaatgtttattcttaatatgatattgcatggcatattctctagaaattcttttgagattcattcatatagtgtcaagctatatatatagttctcaatctatatttaagatataaatgtaaagtgctcatatatgaacagtatatagccagtactatttattaaagtttgaaaactgtcatttgaatttgaatgatccaccaacccatgagtaacagtctgcaatatatatttttattgggcatttatgggtcataaagtgaagatttagctagtgaaattgtaaagaacatttggagtagtctagcaaactattacaaaaagcaactctaaaatgaagttgttgtgctaggaaatgtatgctagcttccttttgacattttattaggacaccaaaatgtccaataatttctataaaaaatattaataatttatatattattaaaattattttaaaaatataaaaacataattcaaaaaaaataactaaataataaattacaaaataaaaaatattttttccttgatcctttccttttctattcacgttgttcttttctgtaatcctaaatatagtcacagttctcttattctctcggtagtctagtagtaattaccaactccgaccaatgattgaacatcggtgagagaagtataccgaccacagaacccccacaacccattctctctccagtggccctgtccctctcccacgattaaacttcctcatcaagaagtgattgatggtctctttctcaaaaagtcatagtcgcccgccccatccctgagcctcgcctacagtcctccaccgaggtcattgatccctcaatcccattcgcaaaccccactgccaaggcaaccaactctcatttgtttgacgtgttgcatctctctctttactcacagaaccaaacaccccgaggacaatttgagggaccattctcgtcccctccatccttctttctcccagccacgatgataattacagaggagaaaatagtgttcacatggttgggtgacgatgatttgagcgtttgtatagaggcgacaatggcacgaggttgggtggtcacggcaggttgacttctacacagttttgacgagcgattgaagagaaggtgagctttctgagactgatgatggtggcttgttttatgaatggtttggaggaggacaagacggattaggtgaaggaggaggaggtgagttaatatggttacttgtgataatggtggattgtgggttattgttcaacttatatattttatatttttaatctttcaatattgagaaatattttaatctttttgtgttttgatgtttatagatttctacaaaactccaaactctagcaagtagattttgagttagtttaggatttaggaatttttgcaactatgatggtggttttgttctgtgtagatgtgatgaccgcataactagatatgaaaattaatataatattattggtttaattaattatttttatatgattatttatgtattagcagaaaataagtcttattgtcaaaaataggcaagggttataatttctcgattatagagattttattagattctgggtgtgtcatgcatgacatatatgaatttagcattttcacattttatgtccagtaacagtggaatgcgataatttgaccattagagtcaacagtaacagtgacatgcgatgatttgtcgactgcttccatgaagtcaccattactgattttga

SEQ ID NO: 162029 - DNA, 2846 bp, Cannabis sativa
  modified_base (2625)..(2641): a, c, t, g, unknown or other
aaaaaaaaagaaagaaagaaattcgagctgagaaagttgagagagaaaactttacgtaaaactcatatatgggaatgctccgtttggttagtgagaaaaacagaggaattacacaaagaaaatatgagaaaatttctaaatcaataagtttcgagctaagaaagttgaaagacgaaaaatttaacgtaaaaatgcataaataaaatgctgaaaaacagagtaattacacaaagaaaatatgagaaaatttctagatcaataagtttcaagctgagatgaaatctgtttggataggtggataaaaaatttctagctgagaaaaagttgaaagacaacaaacttaacaaactcatacatgaaaatgctcagtttggttactaagaaaatgaagtaaaacagagcaaagttgaaaagtcggttagttaagtaaattttcggttcttcttttgcaaaaacacgaaagacccaaagtaagaaacaacaaaattcgtctaaaaaaagagtcttttctccttcccatcaactcaatcacacaaaattctctttttcccacacattctcggaaaccaaacacaacaaagaaaataacataacataacatacctgagaaagtgagaattaggatcagaataattgggtaacaagagaacaagattgaagaagaagaagagttagccattactgatcggagaaacaaccaccaccgccactagagccacccaaactccaaacgacgacgttttgtttccctttttctctcttttccagctaaatctttacacatatatatacagagaagagttttaattgagtatacgtatgggctttgattttgtgtacgcggttctgttcacataacggtgggccttcactcgctttgttttcattagccaatagtttgattacacgtgtcttatcgtaggaatggtctatctcagtcaacatgtgcttttttaccgacatattatttgtttattgaatttaaattttcattaatttttttaattacgtgtaattttattatgagagtaaataaataaaaaaaggaaacctgaaaagggaatgtgagaggtcaaaccattcgtctatattgattttttttttttttttttttaattttccatgtttttttcatgataatgaaggaaattcttatttatgtcgtattcagttgccaatttttatttatttatttttataataataatacttgttagtgaatatcccactcacttgttaattttctttgtttttacaaaatcctaaaaaatgtaatataatttttttttttcaaaataaaaaaaaaatatgggctctaagaaccttcttgcatgtaactaaatatgaaaactaaaatctctaaactaatatgaaaactaaaatctctaattatcatatatttggtataatgtttagttatactttttttttgaatgaatgtttagttatactttaatttaagggagaattacattacttttaattatgtgttttaaattaattacacattatcatttgtaaatagtatatgtaatttgaatgtgtttaaatcatacatttgttattggtagctagtgtaaagtcatcaacatagatagatataaacttttctttaaattaattcaaaataattaaattaaaacaattaacttgcaatatcaaaattttattgttttttctctccacataatcttgtttatattatttacttgatcattaattaatttataaatacacatatttacatgtttaatgagattatggaatttacaattattctatgatttcaccaagtatgattttatctttatacaaaaaattaagggtaattaagaatttaagatgatattgctttggaaataaattatttttattatgaataatgtttattctttgtatattataatattcattcaagtcccatattaaagttatttgtatagaaactttctataataaaaactttccaatattgaaagaaaaaaaaaacataggtggaagaataaagtaaaggaattatattttatgtcatttttatataacaagtgattagtgaattttccacgtggcaattctatggacaggtgtcaacatcagaatctttcattggctgaaaagccaagcataaaaaatgttttagcttttttggaaggtcccaacaggatctcaataaatatgatgagaaaaaaaaaactagtatattaattagggttaataatattttagttttatattttataaaagttatcagtttattattaaattttattttataaaataaaaaaaaaaattaatttagagttttatttagtacaatttaaaaaaaatatgagctccaatttattatttgacaaagcgaaggatatcaataatttttataaaatactgaatttaaaaggatagatattttagattctgtgttttgcaaaaaattatcaattggactctctattttgttaaatagtaaaatagaacttatattttttaaaatagtaaaaataggaccctgagtttaatttttaataattttattttttaatataactaacattaaggtattttttaacacgaacagatacagaaaatataagtatttttgtcctaacatctctagatcaaattatnnnnnnnnnnnnnnnnnacaaaaaattagttcagggtcctatttgtataattttagaaaaatacaagatctattttatcatttaataaaataaagagtctaattgataacttttgtaaaatacaaattctaaaatggtatttactcaatctaaaataatatttagggaaaaaaaacaaaaaaatacaaaaaagaaaaaaaattacaaaaatactttgggccg

SEQ ID NO: 162030 - DNA, 2088 bp, Cannabis sativa
cggacccggactagaacccgagactcgaactcggacccagacttgaacccaaatttggacccgaacccggaccggggcccggacccgaacccgagacccagacttgaacccggaccgggactcagacccggactaggaccgggacctgaacccaagacccagaccaggacccggagccggatctttacacaatctattaatacatgtcaatactaaacatagtattgtatttaataataacataaaattaaaatggatataaaattataagttaatattaaatttttttaaaaaaaatagtcgggtcggattagattcgatccgaataaggcggatcggatctgagtatttgatctagtggggcggaatggggtagatccttacatgatctggatcaggtcggagcatagtccgatcagatccgacccgacccattgacactcctatttcctaacagaatatttgaaatcaatcaccaatgaatgttgattactcttgagtacaaaattcaaaactattgagggattcataaaaaaaaaatataaatatacatatatatatatatttagaaaataatacaataattttaaataaaaataacatatgtcatcgatcttcaagtaacaatatatttcccaatagtagtgctttttcgcaaactaacatgacccagctagcttgcataaaataattatgaaaataatcaattagttaatttgaatttctcttatctacatgcattccattgtaattagggaattggcattattataagaaaataaaataaaaatttatgttttttcaaactttagagaggaaacaagtcccctatagtctaatacttaaatccgagtgtgttgaattcatttgaattcactcaacctttatatatgaattagagtaggcattagtggtgtctagtgtggtgtagtgtctcgtggtacatccatatggggttattttgcaatatgaacatgtattagtgcttcaccacttatcaaatcttgcaccaaacaccttattattgggagctaatatcatattttttcactaaaaattccttaaaatcccattaagctcttttaagagaggtaatctggtaatttatgaaacaccttatcaccagtatgatagaaacccaactatgtactctcttattctatgaaggcaatataataaataatatttattcatactttcttgtgtatgcttctatgttgtctatgtgctacatgtttattgcctttgttagtccatttgtatgccattttcctatatgtttacctgtgcattttgtgggattaatccttggaatgacttcggttatgtttgctcatacttcgtgatttcactcgtacatgtgcaagacatgtatcgtatctaaccattcagtttgtttgcatgcaagcgtgtttaggctgacttgctagctcggtgtgctagcaagtgtcacatgtcccatctacttaggagtgttcaaatagccagtccatgacagttgatatcatagccaagtgaaagggaaacttggtaacattttcgtgatggtgagcaacacttagagaatcgaggctctatagaagcacatgagggaactagatggcctagacgagagggtcaagaatctatcctctgaaagtcatgactcgaaggcaacggggacacaacaatagtttgccaccttagctcaagattatgtcaacttgtaagtaagggtagtcgcgatcaagcgaaaagatgtcactaccaaaacatcacatgtgccttagaaggagggtcgcatcagggcattagaataagcaataagagacatgcaaactgccattattgggtgtcaaaatgggcaaaccaatttttaagtcaacttgaatggcacaatagaatattgtcgagcgtctattgttgcactttggcaagagttagcagaggtgtcaatcaagataaatcttatcatgatagcggtagagcaagaacatatcgaagggcatggaggtatggagtattaggactgtacatcggtcggtttgggcggtttattctatatattttctaacccaatttaaagttcgggttgctaaaatttaagtg

SEQ ID NO: 162031 - DNA, 1351 bp, Cannabis sativa
gcttaatttctatatgcatgtaaaaataaattttgagttttatttttgacacgataatctgttattaaaattgggaatttgtaagaattccctataactacaataaaaattattattgaaaggagaaaaaaaaagttaacgaccccacataaggatgtattacagaactcataataataatgctttttaaaaattgttaattattagtttttctgattagtttttctgacggccaaaaaagttcagggaacataatttagtacatgtcaaagttcgggaaaaaaaattactaattagccttttatcaataattgaatattaccagaccaaaaaatgattatcgagtcatataaaaagtgttaaaaatgagaagctgaaagaagaatttgaggtagagtaattgaaaagttggtacgaaaaatcattaaataaaatcagtgtctttggtatcaaaagcaagcaaaacaagctcgactaaaaccattacttattaggcaaaatatgcccacttgcagattgtagccacagttttaaacagggggtaaagaaagttgtatctcaaatgtatctttttatttttagagcaaaaacgtagtctgagcagatgttgtacacaagaccaaaatcccaaatctactacaagaacaagccacaaaagaatagtctcttttttgtattgaaaaaaaacattgctcaccttccatttttccccatttgttcaactttcctcgagtttttcagaaactccaagaatttgatcgcttaataagaggcttcatctgcttgtcctcttctaaggagatcatccccaagtgagaaggatcctctaacatcatctttgccaccaaatatccagcaattgaccatgtttggtgtttcctcgcttgtttaccaacatatctaccaagcttcccgtcataatattctggccagccatcctttagtaagcggctctcagcaagctcaatagctctccttgcaatctgtggacgcccggttttgatgcaagcagccgtcagaagccacagcagaactgcactcaaaatgaaaaacagaagatattgcaaaaacgtttttacgagtacaaacatatatgaagctcaactttgaatcatgtttaaaatagagtatacacagttaaagcataagacaaaggggttgcaattaatagagtatacaaagaatattatgaagtaaaaaccttgacatacagtttaaaatacaaacaaaacaaaaagttagatttattctcttaaatgaatggtacagggtatttccgtttgcataattgcttgcagtacagtacgtagtacgtgtattgtggacattatcccacatggaataaatagta

SEQ ID NO: 162032 - DNA, 2818 bp, Cannabis sativa
tttttttttttttttgtagtatgagaggaacacatactcaagttggtcttgaattttggagatttttcttgccattagaaggaagaagaataaagggtttcttcaatgtgtggctcaatggtttggtttagtatctttcatagggttcaatttatgccattctcgattgataataagtgtatggaatggtactcaagtcatgacaaaatacatgtgacatttatatcatttcatgtaaattaaccatatatgcatgggacacaagaaaggacacctgtaaatcgacctattcttcaacataagttaaagaaaattaaaaatatatatatacactggcggacccaggatttaagttgagggggtgatatttttttttataaatgaggggtgcgtctttttttttttctacattgcacaacatgttaaaagttaatgcaaatttatattttagtattaaatataatatacagtaaaaaaaagtaaccataaaatatatttggttcaataactaagacattaaatataagtattattggtagaggatcaaaaagtaaaataaaaataaacatactttattaggattagaactcatgacctcttttagatggatgaaatgactttactattatatcaaagcttattttatgtatatagatatcacttttatttataaatatatgttttaactaactaaaatgcatatatatttttttctcgattttttttttcagggtgggcgactgccccaccttgcctctacgtgggtccgcccctatatatatatatttacatataaattatatattcatataatgatctactgcataccaaacacctttagccaaggtgattgggcttgtggtttcaagcccaattagaggtttgagttattaatctagcaaaatttctttatacattagtttcatttccacatatctaactcaattatcttaactaataaccaattattggttagttagtttgttatgtctagcagttggtttcaagtcgttaaaacaatcatttcttctattacaattgacttattctctaagtagtcagtcaccatatttaactagagcttttaaattatttttgagttaaggttcaaaaaggttttacaacgttttgaaagattgatagagagttaggattgaaccgttgatttagatgtttcaactttgatcaatgttcttattgttctttgggttgaaccgttgatttagatgtttcaacttagatcagtgttcttattgttttgtattatatatttaattttttgaatttttttatttttacactttaaaattgatttttttttttatatttttacaaaattttacataaaaatcttcataataactaacgaaacaacttaaatcgcaattaaaattcacataaaaactaccggaaaaattactaaaattttttttaagaaaaaaaagatagaagttaaaaaatagtatacgagataatttctcttaacttttttttattttgttttttaaatttaaattgtacatttttattgaagaatgtaaataaaataagatgaaaaacaaattgcctctaaactcgatcctttttttattattatttataacaacattacatatgcatatatatctcaataaataaataatttgaaaaatacaaaggcataatcaaacacaatttatgatccaaaagcataaaatgataatttccaaacttatatttttatgtggtagttttagaaagtatatccatagaagaaaatagtgtgattattatgttgtaatgcactcttcacacgaggtgcctcgaatcgacaccattaattaaaatatttattaaatttacaataaaattgaaataaatctatttttgttttacatagaatttaataaaaaaaaaattaatttaataatattttttaatttttttatattaattttaactgaatatactattatataacaaaatatgttttattaaattttttttgaaacatctatatatatacattcaattgtaaaatttggaattcgatcataggatctgtacacacacgctccaccctactctctagggtcatttgagctagccttaaatgattatttttatagttttttaaaacgtaaatttgtaaaattatattttctttttcaatgagaatcaaaaaaattaaaaaaaatatgggggaaataatttatggtaattggttacctaaagaagtaacttgttacctttaataatttttttttatttaagcgtttatatattcatatatataattagcactcgaacttaagatttttaacacacacgcgcttttctatagccatttgagatagccacaactgttcaaccctaaacaatgttccccatatatacttgaaaatttcctgtaaattatatatatttatatttttgaacgaagccatattatattaaatggactcatggagactaatatttgccacaaaataccatatttccttttttgaacccaaaataccatatttagatgaaaagaaaatcactaacgatatgtagcccactgatggacatggataacatataataaaaaccaagtgacttcgataaaacataatacataaagtaacatatataaaatattaataatgcctatctgaaaagttaagagagggaattgaaagtaattaatagtttgatgatcatgtgtaattttataatttatatctacatataatataaagaaaagtacacaaaagtctaaatatcattttatattttttttattgtatttttttttgaataataattaaattttattaaactaaatcatccaaaa

SEQ ID NO: 162033 - DNA, 3095 bp, Cannabis sativa
  modified_base (3036)..(3070): a, c, t, g, unknown or other
taaaaaaaaaaaacaaaagtattacaaaaggcaccttaaagtttcacccaagtcacaaatatattaggaaaaaaattatctagatttgacttatctagcttttctttctacccaactcacaaaagtcaacccattatctctctcttcaattacaaatgatactagcaagtctgtttgctttgtgaaaattacataaacaagtagtttatttaagggtgtcaacaccccaatttgcttttttgtagagtttgttattgaacttttttacttgataaaaatctctctcaaattctaagaactatgaaaaatttgttccttctcttgcattgttttatagtttgcttacatggtcacaacttataaacttagttacaatgcggtgatctaattaattgaaatcgagtttattcgtgttaaacttataaacactaactttaagaatgtatatataaatgggcaatacaaattttttatttatttattcttaaaagattcattaaatcaatatttgtatattttttaatttgaactttcatgagtgtcctaattttctcgaagtgggtttctctttttcctcctgttgggtttctattttttggggtctttctctttgggaaagggattttggggtagtggatagccgactatagtcttgatttgtgcagtggtcatctatggtgtctggttcggctaggtagttgtggatccggtggcttctgatagtgtgggtgggggcctagtcttcaacttttgggtctggatcaagctgttttgcgaggggtctgggactagtccgatcactatgggagtctaggtctgaggcgaaatagtggtttgtggtgtttgacggttagggttttgatttggctggggtggaggttaatggtgttgggggtttgtgtccagaattaatgttggggaacaaagctcgtgggagacttcaggttgctgtttggcatgtgctaattttacttttttttgatgttttttatttttcttttgtttttttttttatgtttgttgttatatttaatggcgttgcgacaccactctactattattatgggagggttaattttgtttatagtgaggaattttactcggactttttgttggatcgttggtatgctctcaaatgactcaaaacactttagtactgattgtatggttagatctctccagtattcagttctagggaattcccatattattattaacctcatgttatgtggatcaagtcttctttagaattatcatagacatggctagttttgctatttccttttattctctcttgaataattggtttgtcatttcctaatttttattagaagatctttggttgatagtcattgataggtttatttgtcatggattcatttgggttagaaatctagtattcttcacgttttttgccactttatcatcgctagcagcttattggacttttagttgaaggtgatgttaggcttttattcttataaaggggatcacgtgaaaaggatcccttccccactctttaggtagtttggacaatcctaaggatcacgtaccagttataaggctcttatgcttcatcgttccttaattgggtcatcaaggtatgtacttcgagtgttctcatcaaattaacgatggcatcaccataataaattagcttcctaatgagccaagcataaatcctcccacgaaggggtgtggtgggttatctttgagatttttgttagtgaatatgtatttattttttatatatatgattggctatgattttttttagacttctaatttcaatcacacacattatttatccaattggttatggttatatgattggctatgagttttaatatttaattttattgtaaacttatctaattatgattgatgtttttaagttattgtttttatataataatattattataatatattagtggaaattgcttaaaagattatatattaaatgaaaaagtaataaataataatataaatagagaaaaaagtatttttattattttagattagagaagatatccgaatttgagatttcttttttctggtaataaaaaagtacaatactccatattaaagaagatattttaaggctcacttcttagaaggtgaagattcgactcagtaatattaaaatccctgaacctaacaaatttctctatctactattggcgactctgtggatagtcatgatggcttttcgactcttgtggaggttggtagttcaccacctctacaagcgccatgattggtgtctcttggagctgtagagggttgtgacaaacctctatagttctagaattgaaagtccttatttagtcgtgctccctagacttcttcctttttattgagattaaaattgatgcttctaatttacaatgttttcttatgaagtttcacttctatttttctattaattttcctacgatgggaactgctggtggtatcctattagcctgaaaaattagtttttcctttgagatctcttgtcatctctaagaatcatatctccaagttagtttatttggacccgtactgtggctcctttcgtgtgtttatgggcctccttactcctatgtaaagagggattctagatgagtttaatgaatattgagaatagatttgggggttcatggctcatctttgctgacgttaacttttttcttttatgtttctaatcgggttgggtccaagcgcagggaccaattttttcttctatttctgatttgacgtccaagcagggccttgtggagatcccaattaaaagggtcaattttacttgggacaataggggttgtgatgctcatgcaaaatcagctttggacatggctcttgtcaatggtgattggttcagagttttccccaatgcccttcttaagtccttgcatacatgtaactcagctaatcatcctttgtgtcttcatacccggagccttgttgaaaaataaaagcgtctatttaattttgatgctacttgggctagagactcgaggagccatctcatagatatggaatctatagctnnnnnnnnnnnnnnnnnnnnnnnnnnnnnnnnnnntcgagcttggttgaatagagataaa

SEQ ID NO: 162034 - DNA, 4308 bp, Cannabis sativa
ttctttcatatctatttgtgttaatttctataactttttagtcttattttcaaatatatttttttaaatagtgtagatttaattttattgttagaatttgaaaggaaagaaagaaacaaaagttaaaaatatgtatttcatacaaaataaaataattaaatggagtgttttactaaaaactctatttaataaaaagttgacactgacagaatgttgaaaaataagaaatataactgttcaacaatgcagcaatgagtcattgactggtgttctttctgttttcaatttattttcaggtacaaaattaaagtatctacaaacaaaatcccaaaaattaatcactcagataattctacatacacaattcaaagaaagctacaactgatcatgatctttggagcaacatcccttgctgtcattgttgtgaagatggtgatcttcatcttcttgatcgctgtcgtcctcatcaaacggcttttgcttgtggaatatacaacactttttggaacttttcttttgcataaactcattgtccacagtcccctctttccaagttacttgctttttctttcggttaaggcgaattgttagagtctgcggctgagaagaagaagaagaagaagacgtggattcttcgggtttctccagcgtaacggttgttgtaacggtggcagatgacgatgccactgctgctctggtggcggagcttgcaggtctagccatgatgttaagatttgtctcttctgttcttacttctttgtattgaaaatgggactttcctcctatacttcagtgacaaatggcaatctgcaattatggaatcgagaatctattctcagcaaaatcaattaacctataatagtgaaatgaaacctcaaaaaatctcgtaaagttttatgttgtaagcttcacaaaatgcatattttgctaagaatataattatgtgcatagaattaatcaaactcattatgaccttatagcttaatcctcagatcacctagctacttgcagatatactatagcctaacattaaagtttcttccctatatttcatatgaactaatagaaacaactctggatgaatttattgacaatcctaagcttataatatcaaagctgctgaaatccagcaggtgcagctcaaattcttacaaacaaggtctgatatgttcgagttcctcctagctatttacataacaatagctacactacagtatatgagtgctcatctaatctaattcaagctttttatgctcaaccaattcgattcatcgtcccatacaattacgaattgcattgattcagtttttataaatcagtataaacttttcaagcttaaatgtaaattttcaagaaaataaatgaaaaaagtaccatatattacataatattgaattataaacaggtcttaatataaccagtataagaaataaacatcacaccatactacagcaataacattaaaattgaaatcacaccatagtactaatctagaagaaggagacatcattgtgattggtttagcttaaaatctttcagaagctacagttaagacctaaatattatatacttatacatcacattgtctataccgagatgatgatattaatttaatgaaaagaatttatatgttactcacatttctgtgcctatatatatgtacaagaaccagtttctgcaaattatgttattaaaaaaaacccaatattctcttatcacagtattcatgtgcaataatcgttctgaaataaatactgaaacggtgttattgtggaaataaataagatgatagattactaaatatacataatgcctcaatcaacatagtgaacagagttgaacagagatgtaaggaagaaggaaaaatagaatagtaaatatgtcagcatttgccacaacataggtatactacacagttctttctcttcagttagatttgggcaccacctatgcaataactgatcaactatattcttgagcttataattcatatgttaggaaaagaaattgtggggactttaaatatgatatggagagctgcaccaagtagagaatgagtttggcatgtacatagtaatggcaacttcagagcaagttaagaatgttttatgcttcccctttatcgagattttgagatttcattcaaattaattagcctaacagacatttctttcttcttttgaataattgtatagagcattgttgttaagtgattgttgaaaattttcttccgtcttttgttttctctaaaataatttttaaatagcaatggggatcataaagaggatattagatagatctattgctctttgcataaagtttatgttcctcccctctaattaagtttgcttcaaattcggctaactagataacatctaaatcaagtgctaaaaccaaaccagaaactaacaaaaactcaagaatactcaaacaaaatctatcaaacaagaacactataatttaaactagttcaatcttcaatttagagatctacaacccagattctgttggaggtaaatttctaacaattcataaatgatcactcaatcccttgagacaaatgacaaatcagttgttagtttctggttttagttttagtacttcaggaatctggttgattgaattgatttgatcatatataaaattttccctagtatcaatagtttaccataaaaacttttttcatcatttatgttttctcaaaagaaaaataaaagcttgtggactatgacaaactccatagttttcctgttcagaaacagataccctaatttatacctgattaaggcatatttcattacttatttaaacataaaacccagccaccataaaaagatacgatcaaagctataaacaaccaaaaaccaaaaaaatcagataaagccattaagaaagccaaaccaaaaatgaaaacccttgaccagaaataagaaagcccaaaatctaggtcttggattcaacagatagattacggaaattgcaatagtaatctatcaaagaggaatatacacgaatcatagtaaggaaatagaaatgagaaatttaccggtgggaatgaaaatgatcggagaagttggtgtcggaggcagagagagaggttttcacctaaactattatttaactttacttagaaggaatgtttgtaccaatttaaatagtttggttttataatatatggagtttctaggctaatttttttttttaatctaaaatacatgatcttattattttattttttttagtttttggcactaaatttttcaattaatattttaaactcaaattttgttctttcaaataaatttaaagtgttatttgcttaattgttatgattgtttatgtgtacactcacacatgtatatgtgtcacgtttatattgggaaacctaatattattatttcaaaattcatattaaaattataaaataaaatatttaaaaaataaaaaaatatattataaattttgaaataattttttttataatttttaaatatacgagtttggagggttaagtgtgagtggaatgatagttgagagggttaagtgcaagtgaaatgatagttgagagggtttagtcgcaaaaaaactgggatattagcagctaaactacctcaaatatataattagtgacacttaatcacataaattgatttttggtggtaaaaccctccaaacatcacttctattaattatttatcccttccgtttaaaatgctctgttaagtgtcactgtgaatattcaagattacattgaaatagagttttagttagggcacaaaaattaacaaactcccatttgtactaatataaaacaatcagtacatttcaattaatcctgaattctctttgtgctttttaaatgcagtctcggtcaaagtcttggtgaatgggtcagctaggttgtcttcagtatcaaccttttataccagtacgtctcctcttaccacatattctctgatgatgcggtacttcctctcaatgtgttaactcctcttgtggcttcgaggctctttactgatggttatagcaccagtgttgtcacaaagtaacacttgtgggtttccatccctaaaataacacaaagttttgtgaagaactttcttagccagattgtttacttagcaaccttagcggcagctgtgtattcgacctccgtaatagagtcagatattgcggattgcttaacacttctccaaacaaatgttccaccccaagagtgaataccatcccagatgtagactttctgtcatcaggacaagcctataaatctgagtcggtatagcctacgagatttaaagcaccaccttt

SEQ ID NO: 162035 - DNA, 3531 bp, Cannabis sativa
agagaatacaaagagagtttgggaatatggagaattgaatgagctatttgactttatgaaagtataagctcaagttttagtgttcttgagagataaacacatgagagaatgaaagatctttgattgaaactctaaattctattctactgataaagataaaaataaataaagatgagagatgatgttccaagctgaattaggaacaagttcccattgaactttttctgaaccaaggataatttctagtgtttttattcttatttttcttttacatttcatttgaatactaattctttgattttaagtggtgtttggttaaaagtaatgaaatgtaataaaaaaaataatttttattccaattatttgtttaattgtactttaaagtaatgaaatgtcattctaataaaataacttttcctttattttggtgaaatatctattccattttaaaatagaaagaaaaataattccaatacaagatgagaaaaaatttaataattttttattaattttttttatgtattttaaatttaatttaaatccattccattcatatttctattgcaattcccattcttattattattcttatatttttattctttccaatcaaacactaccttaattctttgaaggtgttttatactctattttagttaaaacttcccacaacattttaattttcttatactcgttttgtatatctaacaattatatcatttgattaatattgtaaggaaagatgagaaaaaagataggtcaaatttaacacctctaaatattagtaaattgtaataggtgtcatttttctccaatttgtaatttgaagacattatctttctaatactcatttagggatatttactataacttctcactataaaataagaagtctgaaagcttagtcaaaattcttcttcaaaacaactacttacgaaattcataaaacgaccattgataaatctcaaggttgttcactaggtgtggatccatgtcctcatttaccacataccccttggcacacctctaccacgacctctgctgggtggagaaactaccctgactccatcttgtcttagcatagcatcatcaagtgctctgtcatcagacaccatctctttccctactgccctatccaaactctctgccaagatattgtcattttgagaatcaacctggtttgcctctcctatctgtgcttcttttggctcatcagctttctcccatgcaacttcaacctcctctttatcaacatcagtaatggcttcctcatttgaagcttgaggcaaatccccaacatcagagacctccttgatggctggaagagattcaagattttccaacacagcagaagcctgcccttcggctcactcttgtagagattttgaaccttttgacttcttcagttaaggtacaaccacatcagagccactttccccttgggtagttgattcttcacgagaaccaaattaaaagaataaaactgatgttttcatttttaaaggacagtctgtatcatagatagagaagaaatattgccttgagtttctatttttatgaatgttacgggtttattagctaattctatctcggacatctcagtatcaacttgggattcttctggtttgagaagatgtggcctaattaatttccagcacaacaaacatattagggttgagatatgacaataacaacacccttaattttgaatgtaatgttgactacaagtgagatacggtgatgagaacggttgtaaaatcatatgataagttttctataaatttattaattcttataacaattcgagggggtcaagcctaatataatgttatacaagtcgtgtctgacttccattataataacaagatttagtaaatacgagttggatcagtccgcttgtacacacctaatttttttatacaaaattatataaaaaaattgatacaatttataacttagttgtcattaaataaaagatgatttattttatatataaaattgtgtagattcactcatttataaaaatgagtaactaactcattatttgatttattttatatatacaagaaatatattggagtcaaacctagcatatacaagtgaaatatgacaataataacacccttgattttgaatgtaatgttgactataaatgagatacggtgatgagaacggttttaaaatcatatgataagttttatataaatttattaattcaattctatctattttcttattattaattaataaattttatttgacatatttttttttataaaagaaaattgtgctgattcacttatttataaaattgaataactaactcattgtttcatttattttatatatacaacgaacatattagagttgagatataataataacaacacccttaacttagaatgtaatgttgactacaagtgagatacggtgataagaacggttttaaaatcacatgataagtcctctataaatttattaattcttataacaattcgaggggtcgagcctaacataatgttatacaagtcgtgtctgactttcattataataacgagattcggtaaatacgagttggatcggtctgcttgtacacacctaatttttcatacaaaattatataaaaaatttgatacaatttattacttagttgtcattaaataaaagttgtgatttattttatataaaaaaattctgtagattcacttatttataaaaatgagtaactaactcattgtttgatttgttttatatatacaacaaatatattagggtcaaacctagcatatacaagtgagatataacaataacaacacccttgattttgaatgtaatattgactacaagtgagatacggtgatgagaacggttttaaaatcatataataagtttttttttttaataaatttatcaattcttataacaattcgaggggtcaagcctaacataatgttatacaagtcgtgtctgacttccattataataatagaatttggtatatacgaattggatcggtccatttgtacacacctaatttttcatacaaaaattatataaaaaattagattaaacatctgtcgtgactatccgactttgaggacccaagttacaacattatggaagaaacttggaccaaaatttccaagctttcactcaagaagaaaacaaaggctaggtttgtgtctagactctcttcttgagtgaaagcttggaaaatttggtctgagtttcttccataatgttgtaactcgggtcctcggagtcagattgggtcgtagttccaaagaaattttcctccgctttttcgaactccattgatggattttgggtagaaaatcaattttaacttcattgaagttgaaagttgaccaatgtaagatttatttgaggaagaatgggttgaaactgaaagggaacaaaagcacactccttcgaattattctttttattaccaatctttttcatatatttctgaaaatttttggttaataaagcaatttcatcatcacattcactatcagaaatttcatt

SEQ ID NO: 162036 - DNA, 3393 bp, Cannabis sativa
ataaccgcttcgcgaaacttaaaatcctctccccttcttggtctcctcttttgctttattgccccttctccaatggcaagaagtgtatctatatctgatgcataatcatcagtctcatgaaaactcccaaggtttgcagcagaagatgatggtgtcaacaaagggtcatcaactcgggtcacattgtcatcttctaatgcaggcttctttggttttgcaggaaaaaatgtcatcttgataggaatagcaagtggggacaaaagaagaagaaccattatggcaaccattacataacaaacagaatcactaatggataatgtatcatataagattgtggttgtgagaagataaattgcaacaatgacactaaaagcttgagtgaaattaaaatgaagattgattgaagaatcttcttcagaagctggattacatgcctgcacaaaatacatcatgaccaaagacagaacaggaataccaagagctaggaacagtagtagattcaaagaagatttttttagaaccatactgaatataactgtgtaaactgcagcactaagaccaacataacctttgagaattccagcaactgtgcccctgttgagagggaaatttctcatgtttgttacaagcactgctgtaccgaaccaagcgttgctgtttgtagcgatgcaaagagtaacaaacaactgccatagcaatgaaaacatgaggtgttaagtctgtgtcctcacataaatatattaggccaaaatcagaactgaatataagaatgacaaacacaatcattgacctcctaattcaacagccttgctatgatcaaaatcaaaatagttcaagaaaaagcatcaagaaataataagattaagatcaagatcatagtcatcatatcaaacagcctcaaaatcagtggaacccatcaattaatacaacaaaaacaataaactaaacaagaatttgcaactacaaatgataaatttcgaatgggtattgcaactcaccaaccagtaaggcaagttgggaagagtttgactaacagctagccaaataacaccatagcccaagaaacaacacactgtacccaccaaaagaacagcccaaggaggaaacttattacaggcaataccaggaagcaacccaacactctctcctatatcattagccactccaagtatggttacttgttgctgattaaaacccagaaccgatttcagtgcagatgaatagagtggaaagttataagcgtttccagcagctatttcaacccaaactgctgctgctaaacccacccatggtggtctacttcctgcttttaaaactggaccagtcatcttcaacaaacaccagtactcctctgctgtgaatattatactgagtttctgagagaaatgtatttatatgagtttttgctaagagttgcatagtctgagctgaggcaaccatttacatgtggtcccctaaatgttaaaaaacattaaatagaaaaggttggatcttttgacttattatatatctaataaaataaccataatcatcaaccatgtggtcttaaaaaacacaagaaaattaaagaccagaatcaatttattttatttttcaaagttgttaatttcagtttatgttagtacaagccaagaataagagtacgaaacagaatctggggtcagtaaaatgagcaaccccattataaattctttctaggatgagcttaattgttattataaattataatctttaatttaacaaaaattaatagtctctctctctctcttcccatttgaaaaagaggcatggacttaatatttagctaccctaatattaagagaactctagttttgtcaccattttagatttgattgtattgaaaacatttgtttttgttttggtctagaggacagaagacatataatataattgaatttgtatgataacattattgaatgcctttacctacctaactaaccacgtttcactcccagcaggctctgcggagtaactggtttttaattgattttaaaatatcttcttttttttttttttaaataaaagttcaaaaataatttttttcctataatatactaaatttcaagattgaataaactgacaaaaaatacaacccgaataattttacgaaaaattcaaactgcggattgaatattattctaacccgcacaaataaactgaataaaccgatttatatattttttaataaaattatttataacataatatattaattatgtttaattattaaactattttacatttaaaatttgtattttatagtgtttaatttaaaatttagaatttattgttgataattttgattgtatttgaatattgaagttgaacctcgtaacgagtttttttattttttattggacgagttttttattttttattgaacccgttaccattagatatttgtaaccgacatttatgttaagttagtaattatacactataacttgaccgaaccaactaatgtacacccgtaaaaattatgacctacccaatagaacacacagacatatgctatgcgttataatgggaactcggaccatagagggcaatcaaataagtgaccttatacaacgcatcccagcctgccacacaggcacacacactcactcagtagtcagtggtgtgctcactcagtcatattatatgaaaccataattgttattgtgccagtttgtaagacatgtgtcacaagtacatgtgctcattttagtaccaaaatattcacaaatattattccaatcatgtaacacacaaatacatttaaaacttccactgttacactccataccaaactcaaattcacacttgtcaactaaccccaaccccatctctgttcttgaccataataaatatttgaattttcaaacataattattccaaaagaaaatgtcaatttcaaaagagctattcagaagtttctagttaaaggagtagagttgatttcaatcaaaataatttcacagttatgtacacaacaaagtacaaacaatcgttaacaaaaacagtctattaattgttttcaagaattaaaaaaatcatcagaaaacaatactaatatatcacacaattactactaaacaaacaccatgaccagaacaatcaagaatcttcggctttggacatgacacagagccggctaggccgcggctcgaatgctatgagccgccgttgactgtgcgaagacggtcttatcggagacgataaagctctccgagccaattcctcgccttctactccaccaatcctcactagtgagttcagcatcgccgatcttctgtagcttaacctactcgaattacacgacgcccgaaattgatcgttattagccgcctttatcgccgtcaaaatcttgtggcgggaacacctgaacga

SEQ ID NO: 162037 - DNA, 3225 bp, Cannabis sativa
ggattgcaatggcctctattcccccccccccccaattagattgcacaaccttaattttagtattaaattgcagttcaacattagacttaaactgtttaaaaattatatggacttcagactttgttttcataggatatatccaagtaaatttggagaaatcattaataaaactgacatagtatttgaaactttccattgaactataaaatgatggcccccatatatctgtatgcactaactgaaaatagaaagtagttttgggaacataactactgaaatacatactatgtagtttgccatattggcatgcttgacaaaaaggaagtgaattatatttagttatagaatgtagactgctaagaacatttttaactatccttggagaagcatggcccaacctatgatgccaaacttgagcttcagagagtgttgcaccagtattatctttaatgcaactgtaagcagcaggggtagagagtggcctcttattgaattgagtggggttgacatttgtttaagggagatccaagtgatatatgccatgcttaagatgaccctgcagaagtacttggcccgaagtcttgtccttgaccatacatgcatgagaatcaaaatgtaaggtaatactattatctattgtaagtttagaaatgcttaacagattttttgtgatagtaggggcaagtaacacatcattgagaattaaatttttgtttggatgaaaagtagagaattcagattggctatatgagaaattgaaagtctagagccattaccaacagttattttggctttgcctttctagtcatgggctgtgttgagattctgagcacctgaagtcatgtggtgtgtggctccactatccacatactagccattgtccttagttggggtattggaatcataaatcagtgcttgtggattgtggccttcaggctgagaggtggtggagctggtttgtgagtcaatgtcatatcaatgataacatttgtatgcaagatgaccaatcttgccacaaatttggaaaacaggacgagaaccacatccatggccattagatgcaccacgaccattcgattgagagcctctatttcgcatgttactacggccctgtgattgtccactaccacaattgttatttccattggagctagaggcattcttgttgaattgagcataatttgcttgcacattgtcgagattttgtgaattagtttgctcaatcctcatttcttggttctgcaacatatattgaacttcttgcagtgtaagagcatcagctctggcagtcaacagaataaccaccgtttcatactcgtgaccaactcctccaagaatgtacatcacgaattcttgatctaaaagtttatggccaacaccagcaagagaatcaacaagattcttcatcttcaagatgtactcgtcaatactcagggagcctttcttcgtgttttgcatagagagatgaagttgcagttgtctggctttggattgagtggcaaagaggcttgcaaagaccgtccaaatatcagcagcagattcacaatgaagaacatgtccaagcattgcctctgagagggaattcataagccaactcattagaagagcgtcacaacgaatccaatgattaaaaccagggttcatcgtgtttgtacctgcaagcagtggttctggccgtggagtagtgcctcgaagaattccttcaaggccatgagcacgaactaaaggaatgattaatgaccgccagtaggagtaattatgtcgatccaaactgatattcaatggaagcaggggtttagaacttgaaactgtggagcggcaacctatggttcaattggagcttgtggtggacgagggggagcgttgttgcgagtatcgtcaggatcagccataggtatgataccatgtaaaagttgagaaagaaagaaaaaagtgaagaaatagagtgaatgggagaaaaagctcaatgaagaagatgagctgcaattgtattatatagtgttcgctgttacattagacaatcaaaaaaacgtaaagaattgagtaacaaacatttgtaatagaaaaataacatataccttaaccgctaactaactctaacaataataaattaaaatttaaaattttacaaatttatatatgtactaaattttttaacaatatattatattgtatatgtattataggtaaatatataacacatatatatatatatatatattatatacaattattcacttataatttacactattataaactatacacataattatataaatcaatatattaatcattaaatatttaaagaaggaaaatatgactaatgaaactaaaaaaccgacctgttaatttttgcaccgatttcaattagtattctaacagtttcaatgcctgttattgtttcagccagcagttccaagtctcacccaaaacttaaatcatggatttttttttttacaaaaacgaaaaaaaagaaacaaaaatgacaaatgataaaaatatggtaaaagaaacattatctgacagtcgcataatgatcggatgatggtagaatggcggtgcacgatggtggaatggtagttttgtgagttttataagagaaatgggtggagggggcggaagaaaaatgagcggatgagaaaaaatggcaaccaaaaaaattgttttttgagttatggggtgggtttatataaaaaacattaattgagaatccgtcgataataataaaacggtaagaattctctaataataccggcataacccacctctaataatctgtcggtattgctattttcaaaatttgggcggtaaaactcccgccctcattaataaatggcggattttccgttggtattactttttttttttgccggtattaatgttttttttttaaaaaaaaatttattaattattacccatcagtcagtaatactccaattaataccggcagaaaacctccgcgagtattatttctgccggtatcacaaaaatttgttgtagttagtaagttggatttataacatgtcatcaatgacaaaaaaaagtaaaaggaaaatattattgctatgaggtatattattaactatattatagccataagcatgttaggaccatgagttaggggtgttcatcaaaccgtccaagccgttcaaaccgcccgcaccgcatcacaccgcaaaaaaatgcggtttgaaattttttgcagtgcggtcgcagtttgaa

SEQ ID NO: 162038 - DNA, 2891 bp, Cannabis sativa
  modified_base (2839)..(2845): a, c, t, g, unknown or other
aaaaagtgttaccaaacgctatcttagtaaagtatataaatacaagaagattgccacaaaagtttagagaaagtcaaagtttgtattagtcaattgttcttgtatttttaaggtattattaattgattctattatatgatgacatgacctaaaatttttgtaagtgattttttatgtgtaaaaaaaaaaaattacttttagattattcagatctattttaataaattgtctgtataattaaattgaaaaatatttgcagaatacaaaattcaaatataataatcatattgaacctatctgaactttctagttagctttaacatccaaatccaatatcagtccctaatatatatagatcattttcataatacgtatgtcaaaattggacggtcttctgataatcatcatagacgaacaattgagagtatgacaagtggcaatgtatatggcattcacatataaatatataaatgtatacatatagttatatacccgacgagagccggcttcacactatgattgtctacattattatatacttattatatatttaacacaacataatattgaccacttcaggtgtaaacaatcaacttttacgtaatcaaggtacactactagcttattatgttctacttaattaattggtatcatcgcactatattattggtatataaaaaaatggccgctattatttatttcgttaataatataaaatcaaatttattaattatgtatagtatgagccatgaggctatagactaaatgttataattaattatgattaagttaacatcttatattacgttgaaaatgacgaataagtcgatgcatgcctttagatttattatatatgaacacacttgaaagtggacagagaccaaaagctatagatagatatgggagagaataacaaggttgagatcatcagtgaagaaatcataacaccgtcatcttcaactcctgcacacctcaaaacctacttactttcttccattgatcaattttcacaagcagtttatggccgagtggtttttttctacactcaaaacattgatgatcataatgctagcaacaacaacagtactgaaccttattcatcatctgacaaaaaatcacagcagctaaagaactctctctccaaaaccctatctcgattctacccttttgcaggaagaatcgataacaacacatcagtagactgtactgacgaaggagctccatacgtggaagcaaaatttaatggccttctctcaacttttctagacgaccaaagagacaaccctgttataatcgaccaattctttcctgcggcgatcctatcaccggaggcagccacgtggccgatactgagagttcaagccactttcttcgactgtggggcattggctgttggggtttgcttgtcgcacaagttatgcgacgcgagatctatgagtgtgttcatgaaaagttgggccgagacctcaaaagggttggttcaaccagtggttccaattttcaaggtagcttcctactttccaccgggagattatcacactaaactaaaagttcctccttctaataataataataatatggctgaagaattggtcacaaagatgtatgtgtttaataaagagaaaattgttgaactcaagtcgaaggtcgctgacactcgtgtgcagcaacctagtagggttgaggtggtgactgccctaatttggaagatcatgatagctgtttcgcaatccaacattaaaaacaagcttgataagactacttattttgtgacacaaactatggatatacgtaaacgggctgagcctgctttgccagaggagttggttggaaacttggtaacaattattcctgtggaaacaaaactcaatgagcctgagctagctgatgtggtagctgagttcagaaatggagtgagagagtttacagagaagaaaggaaagagtcttagaggagatggagctttgacagtgattcttgaggttgtgaaaggactgttggagttgttgggaagagatgacactgatggagttatattcactagtttgtgtacttttaagttgtatgagatagccgactttgggtggggaaagccaacttgggtcaatattcttcctcttcctaatggggtagtgaagaagttggtgacattaatggataccaaagatggaggtattgaagcttgggtcagtttggataaagaagagatgtccttatttgagtctcatcctcaacttcttgaatttgcaacacactattactccatcgtgtgaaacgttacttttgtttttgagtgtttttgtatttagttttgaatgctatatatgttgttaaatcatcaagtgactaaggtggcatttagttggaggtaatgaaatataataaaatgaaaaggaatcaagtttcattctattcttttgtttggttgtatttcaatgtattagaatatcattccaatagaatggcttttctaccattttgttggaatgactatttcattttgaaatagaaggaaagatcattccaatgcaaaatgagaaaaaattaacaatttctttatgcattttaaatttgattctattccattcctattcttattcttattttcattctcgtttctattcctatatttttattcatttcaaccaaacgccaccttagtatatatgaatatgcattctcttttataaatcacaaatgccatattttgcatttggtttttaaattatatttacacaaacttgaattatgtgacaaaaaaataaattgtactatttattaaagatgtatctgatcacttaaaaatattcaacttcgtaattgtaacaccctaactaannnnnnngtattacgtgatttttaaacgtacggtgcaactcgttgctaatcaa

SEQ ID NO: 162039 - DNA, 5109 bp, Cannabis sativa
taactaagcgggctttacagacatacactttgggaaagacaaggtcttggaaaataaggtagacattcgatatgttgacaccagattccaaattacagatgttcttactaagccactacaagtcagccacttcatctacttaagggacaagttaacactttgttgcccagtgtaacttgaggggggatattagggataagttagttagttgtaaaagtagttaggttcttttttgttagtttctctaactaactacttgatagttgtatcgactatatattataattaactcttctctttcttgatcaatatataagtggctaagctcatctctttcgtgtgagccttttcatcattttcacttcttcatctccctctctctttctctcggtattttttcatcctcgagcttcaagtctgaattctgtgcatcattttgtctaccaaactcacaatctctctttgaaattcactcattactaatttttcatgcccaaataattgaaaggaaaaaaatcttttacaaagtctatcatatgagtcaaaacttcgataaatcatctttcatagctgctccataaattgttggtttttctctattaacttgaaggcttgaactttcagagaacaattgaaaacctttcaataataaatggattgattgaaattcacctttactaaacataagtagatcatctgtgaaacaaagatgagtaattaagcttcatattttcatacctaggatgaaatttgaaattagattggtgagctatcttatctaaaattctagtaagatattccatttcaatgacaaagagtagaggagacatgggatcctttgtcctcaagcctcttttagactctataaaacctatgatctccccatttatcatgaaagagaatcttggtgttgacacataatccatcaccaatttcacaaatttagtgggaaatttaagcgtcaaaagcatgttcatgaagaaaattccaatcaagcgtattgtacccttgttgaaaatcaatttcaatcatacaaactggtcttgcatgtttccttctatagcttcgcaccatatcctggcacatcataatgttatgagcaataaacctacccttaacaaacccactttgattcttagaaataatacaagaaagaacctctcaaagccgagaacagataagtatagtagccactttatacactacattacaacatgcattaggcctgtacgtactcacattcattggacatcttattttcggaaatgagagttactgtggtatggttaatctctttcatcaatctacaagtgtggagaaaatttaaaactgcagtgactaaattctcacttgtgatatcctaagtctgtatagaaaaaagcgctactatagccagcaggaccatgagccttctcatctagaatagaaacacaaagtagcttgacctcatctttggtgtatttccataaccgaagctctgcttgactatttgacaccaactttccttcttgcaccacgctataatcaacttgtcttctatctactattctcgaaccaaacaaactagtgtaaaagtcatgaaaaacttgggtaactcctacttggctatcagatctattaccatgaagatcctgaatagaatatatagaattttcaatccttctacttcaaatgcggctatgaaatatcctggtattctgatctccccttcgaacaatctacttttgctttctgtctcaaaaattgaatttaatgtgaatgagcttaaacataatctttccttacaatgatttcctcatccattaatttcctattatgagggtcatctttaatttttccttgaatatacatcaaggaagattgcttctttgcctctctaagatacacatctcctttaccctctttgttaatcctattgtaaatttatttataaaaatattctgaagtgaaccaattatgtgatgtcatgtgcataataataaaatatttttacaggatttaaataaaaaaaataagattataatatgaactaatttaatcaaatttatatcattttccaacaacaatttatgtaaaagagttagaaacaagatatataagtagatgttattttgacaagcatatgctgtctaagacctaaatggttaaattaattattttagtatattttaattatataattaaatcgcataataaaggttcaatttcaatttccaaacataacattaatatataccagtgattaaagaccaatatgagtagtaagtttatgtttatacgtattttcttcaaatgaatgtgtctcttatttgaaagatttcttatttccctttgttgtttttgtttacttcattcatcacctaagtttattgtcactccagatcagcgtggaagtcaaaatcattgctggttttcctataaggcatgtcattatgcaagaggttagagcttacaatgcagcttgggttttcctggataggtattttttacacattattttaacaaggaaaatgttttcattctaaataagcatttgcatagagtatctatagtgacaataaaaaaaagagcaaagaatgaaaattaatttcaattgtattgattgatttgttaataacagaaactgagctatagatagctcgatatacaactcataactagaaactgaaaatagttactaatctattactgcacttaacacataatagtcaacaaaagttgactttaacagactcaactaattaactaacttgtttattaattgttgatactccccctcaagatggagagcaaatgctcattaatcccatattgtctttgaagctattgaactgtgaatggaagagtgctaattagtaaaacacattactaatagttgatctttaaattacacatgagttgtcttgactattccctgcttgacttttttttgaaccaaatgagagtctatctctttattcttagttctttcttgaaaaacagggttagctgtaatgtgttgtgcagccttgttatcacaatagagcaattcaagcccattatgctcaatgtttagctccttaagaattgataacaaccagacaagttccaagttgtgtttctcatggctctatgttcagcttctactaatgatctgaatagagtattttgtattttactttcctatgagatcaatgaatcaccaagaaaatacaaaattcagtagtggatcttctggtagctggcatgctgcctaatctgcatcaatgtaagccttaagatttactatagaagttgcagggaaaaataaatcttgtctagggcatgacttgacattttatagtaccttttgtgctatttttagaagtctagacttaagtgtagtcaaaaattgactaacttaattacaaataaggatatattaggcattgtaatggtgagataccgaagtttaccaatcatcctcctataatgtcaagaatcttcaattgtatcatcttgacaaagtttgagattagcttccattgcaccccaaatgccaaagatgttcaagtcattgtaaggcatatggtgtttgggatatgaaaatccctttatgagatttggccacttataaaccaaggaaatatttaagcttttctaagtttttcagtttgaacctattgtttaatctactcttaagttcttccatggcctccaaattgttgcttgcaagtatcacttcatcaacataaacaaggaggattataagactatccaaaaaatgcctcatgaaaaaggagtaatctattgatgaatgattaaaacctttctgaagtaaagcatgtgaaaatttctcaaaccattactttaaatcctgctttaaatcatatagtgacatgtttagttgacaaactaaattacgtggaagatcccagtatagtcataaacacatcttcatgcaagtcttcatgaagatgccttccatgaatggctgcaagagtaaagacaagtttaatagtgacaagcttggtcactggagaaaaagtgtctatataatccacacttctttcttgttgtaccccttagcaactatccttgctttagacctttcaattgaattatttatattgtacttcattttgtagacccttttagataccattacatgtagtctagtgggtaaattaacaatcgtctgagtatgattgttcacaatagctattatttcactatccatggcattgtcccattctcgtataccctgttcttgattgaagtattcttgctggagatagccaaaactgtagctcaaaaaagaggagtaaatatgctataattgagtcctgagaaatagggtaaggtgtaacagaagtagattcctatgaaaacacatatatagaattagtagagaagaagcaattataatcctttaattgtgaaggcttattagaagttccaacaggcctgttgtgaaatgttgggataggtaaaggacaattattagacttatcagctggagaatgaaaaataaaagaggtgaggagaaaaaataatgatattcaggggcaaagactcattattgagaaatggaaatatagtttcatgaaatttcgcatccctagaatagaaaactttattggagtttagatcaagaagcttttaggctttcataccagtggagtaacctacactaaatacacaagatgcaactttgggggaaaattttgttctagtgacagttaaggttgaggcatatgctaggcatccaaaagctctcaagtgatatgttagtggcttagacttaagagcctcaaattgacaaacattttgaagattaggtgtgggtgttctattgattaaggaagcggcaatggaaacacactcatcccaataagtaaaagaataaaggattagaataaaagggccatagctacatttaacatgtgttggtattttcttttaataatagaactttattgtggcctatgaacacatgaatggtaatcaactatctcaagagaagcaaatagctcaacaaattgtaactccttggcattatctatcctcactcccttaatattctttcgatattaggttttgacaagtttaataaaattggaatagtaacttgtgtgacagtcagtagtc

SEQ ID NO: 162040 - DNA, 3811 bp, Cannabis sativa
ttataatattcaatctcatattattctcatataatagaaaattttgttataaattaaaaaaataatatcaagacatcaatcatgttaaaatatacaaatcattcatagattaactctaaataaactacaaaatatctaaaaaaaaaatatactacttttattaatcacttaaaagattgaaaaatataggaggagtactcttaatttttttgtgagagaaaaagagtgttaaaaattaagatataaaaatgtacacttattatataaatatttatatatatacaaagataaaaaaaaaatattttgagaacaaaattaaaaaaaaaaaatagagacacaaagagaaattaaaaaaaataaaaaagaaaacaaagaaagaaaaacaaaagtcagcaactgacttgaaaaataaaaagaaaaaagagagccaaaattgactaaaaatatataaaaaagacaaaaaaaaaagtttttttgaagctttaataagtaaaaagttataagagagaaaaaaaattaagaaacgtataaatataattttttttttattgaattataaatgtaatgtttgaaaaaaagttagtatttactgtaaatttctcaaatagaaaaaaccataaaatgcaaatgtaaaataaactaaagaaaaaaataaaactaattaagctagaaataaaaatatgaaatatagatttgaatattgggtttacaaaaatatggcatatcaaataccataaaaaatcttaaatgcgaaaaaataccatagaaaagtggtaaacctaaaaataccatatttttgtaatttttttttagaaaattcaatatttcatgtaattttcacaaacttatatgaggcaaattttgggctcaacaatgttgatttctcttgcaggaatttaaataattatttctattttttttttcttaaaattatgaagtgacttaataacattgtaacatgtacaataaattctcaaaattatttcataaaactttaagcattattttaatttaattattagtatatttttttcataacacttaacgttaaacatctttttattagaaaaatgtcatctatttaattgaattaacattataaaagcaaaatatataatctaaaataaaacaaagcatatgtgccttgcatataacgtccctattttaagcctctattggacctttagatttacagaacaatgactctcatatatagagacgtcactttgactgcttcctagattgatgtctggctctatagaccaacacgagtattttcaacatgttttgtcctcactcgcacgcttcttaggaaaactttcaagaggtcacccatcctgaaattaccccaggtcaagcacactcaattgtgaagttccttcatgatgggctaccagaaaataagattcagcttattgatattggtagtaccaatcaatctatttggaccctcttcaactacgtagtcccatacctacacagtctcaggatcatcacacttaaccttcctcaagtgatgtaggattgcacagtttttgatctttttccttacagatcacgggactctatcacaatcacccccttacgggattcgacattctcgtcgactacacttccagttgggtcaaggatctgataccattgttatcaaagccagttttatcagtcccaaacattctcacgagttacacacattgactaaaaggactctgctagctacctagtaagtctctttctatatgcttgcattttatgtatatttgagtaattttcaaatttatatttttacttcaacaaccttagtagcaatattcgagtttaattatatatagaagaaaatattactactttatattattattattaaaaaaaattacaactcaaaatagataaaggagtcatagtggtattttcttccaaaattttaaatgtaataaatggacataattttattaaagttttgcttattattttattttacatgacttagttatgtacttggttatttatttattctatttaggaataaaataaaaaattatttgtgaactagttatgtaagtatggatattttattttcttaaaaatagtgataattatatcttatttaaatttatcttcttttaaattcttagaaaaaaataaggaacattaggaaatcatgcctccaataagatcagttcgaatcaacggtaatagaaataatcacgtggatgcaactccaatacccacaaggggcggaggctgagatgatgattgacgtggaggctgacatggaggccatagcggcaggggaggtaggcatggaccactgatagcatcgatagaggaagtagcacttgaacaacaacaaggacctcctaatgcacaagttgaaatacttctagaaaatcctcgtatacgcgaggagttagctcaagaaaatgcaaggctatgagctcagaatgaggaattacgctagaatcaaaatccactataggaaacctagcacttcagccaaccgcattgaatctagaataaatacaatgtttcaaacttgtgttggagcgattcaagaaacaacaacggccaatattcagtgggggctcagactcacttgaagttgaggagtggttgcactcaatggacctgaatgatagagaatgagtgtcttgtgctaccagcctacttaaaaaggatgcacagatctggtgggaagtagtaagacaaagccacatcacaattactatgacctggttggactttgtagaagtgttcaataggaagtactaaagtactgccatactagctgtaaaggaagatgagtttatgaatctgaagcagaagaacttcagtgtcacggagtatgcaaggaaatttgactgtttggtaaagtttacataagagatcataccaactgaggtcctccaggtcaagaggttcttaaaggggataaaccccatgattaaaaaggatataaaaatcatggttgggaccaacacagtttatgctgaggtgttggaaaaagctctcgaagccgagttgctcgaaaatagtataaagaaggagaatgttgtaaagtgggaaagccaaagaaacaatagaggaagtcaagagaataagaaaaaacatgaggaaaatcacaataatgatcatcatgaaaagggaaaaacaatggtgcaatataaaaataatgaggtgaaaaagccctatgtagaattcccaatttgttccacatgtaataagaaacaccttggtgagtgtaagatgaagtcaggagtgtgctacaactacgggtagccaggccatctgaagaaaaaaatacccaaaaggacagaagaaggaaaactaagatgctcatgctcaagtgtttgctctcattagaggagaagcagccataagcaacaatgttgtctcaggtcagatttctatttatggaatgccttgcaatgttctctttgattctagagctacacattcttatatagctactgggtaattgatagtgtagacaagccatgtgacctacttagatgtggttttgtgacggaattaccctcgggagaaaccatgctatcaacaagaagaatgcaaaatgtacgtatcagaatcaaaagcgaataactcatgggtgacctaatagagctggaaatgaaggaatagatgttatacttgggatgtattggctatctagttaaggtacgacaatcaattgccgaaagaaattagttactttgaaacaaaggtcggagatcaatttattttcaagggcaacaagctagcccttaggactccattaatctcttccctaaagtgtaaagcccgcttagtt

SEQ ID NO: 162041 - DNA, 983 bp, Cannabis sativa
tttgatattaaaatattattacaattacatttcatcatcacaagttattaatatagtattattattaatgccactttctaattctaggcactcattatttttctcctcgacatttgaaccatcttcttcgtcatcaacaatgaaattatctaaatcttgagtttcaagattcacgcaatggatgtttagaactttatttgggtcaaaatcatccaactgtgaaagttgtacaacaaattgtgttttggctgagttattttcctagacaatgaatgtatccccatcatcgttttagaaattccacacattctacgggatgtaatcattgacaagcatccagtttttacctttcttaaaattagggaaatagtatatcaacttagcctgagatacaagtataaacggttaactttaggatcattcccgtttgacagatatgctagtgaagacaacataactatccattctgctccaatttgtgtcaaaccacttacaccaaaataataaaacactacagtccttcaaataagtaaactctataattttttcaagtttgacataaaaattatgtccatcttcaccgggcaccataatactactattttgtgtttgtccattatcatccctctcctccacccaaaaatttacaccattcactatgcacttaggataaagataaattgttggataaagtatttatatatggttctacaggcgggtaatgtcatcgtcgtcgttcttctgagtcgagggatggcgtggtgatgatccagcaccaagaagagcaaggaatgttggaagtggattcacagtaggaaagtttaaaccatgaacaacaatcaagatactcaaacttatcttggagtcactttaggtagagttattgtgttacatattgctgcttcaattactaactttcttcttgtgcctcctgaacctaacgttgtaaggcctcatattgttccatagtaacagtctgtgag

SEQ ID NO: 162042 - DNA, 748 bp, Cannabis sativa
  modified_base (653)..(675): a, c, t, g, unknown or other
  modified_base (713)..(716): a, c, t, g, unknown or other
ttggccagtgttgtctttaagcactaatcttaactttgttttattttttaagcctttatgaagctcatcttttcgcaccgcaactccaaggggtcctcgggcgctctccgagagtagctaaaggcccaagaggatgagcttctagcgaggggtgaggctcttacaaactcagaggctcttctcaaacagaagcaggacatgatttctggtttggaacgcctgctcagcaccaggaaccaagagaataccatgcttgctgctgacgtctctaggctagtggcaaaactctggaggagtaatgatgaactaaagcttacccttgatggcccgcaaggaacgagtatgttggcttgtctttggagattaactatgaaatcaagctgcgcaaccccatagttgatctttcttacatgggagctcctgtccttgagcgtacactagcccaaaggaaagagttatatgaaagcaggatggagacagaacagatcactatctaggtagaaggatcgtcatcgggccagtttgtggaggccatgaccggctaaccaactaaggaggtggccggataaggcattaacaaggtggtcgaccagcctacagaggctatggtaggccctctttggcaatctggtgttggaattattttactaggnnnnnnnnnnnnnnnnnnnnnnntttcattaacattctaatatgaatttctaaaataatgnnnnaaacacataagggtttaagaaaccttacattg

SEQ ID NO: 162043 - DNA, 1166 bp, Cannabis sativa
aaaaaaaaaaaaaaaaaatctagcgattctagagttaaaacaaagactcaacagtgtttgtcagagacccacgaattttggttctgagtttctaaagagccctaaatatgatacaaactccctaccagaaagggaaaaagaatttaattaaagtaataaaggaaagtgaagtgaagagaaacttagctacagtatgtacaaatttatagtaatgaaggtgtagatagagaggaaaggagaaaggaaaccccttaaaagaagacaaattggaaaaaccaaaccctaattttggagtctaaggagagagagaaggaggctgttctccgtctttgaattttctgagaccaattctctgttcctctcccaattttaatttatttttcattttcttcatatttatattaatagaatatttatttattaatttatttattttataaaatatagaatattattggctgtttgttagttatttttaagatagtcgcgtaaaataaaatttgtgtaaataagatgagagaataagcaattgccaacacttttttcatgcttgttatttttcgtggttgttttagcctaatcaataaaaactttacagatattatgctcaaatttcattgcatggcgccaaaaaatactaatttcggttttctgttgctcctcttttaggatttaatatatgttttttaaagcaataacttgcctaaaaaatttggattttttttaatataataattaatattattgttgagagtcaaaaaaaaataattttaaaaaaaaaatctaattttattttctatttgtaattatatcttactctgttgtaatattaccaatttgcattatatattgtagacataaattagaaaatatagataacaaagatttagtaaatctaataaaaacaccccactcttacaataattttaaaaaaatccaacaataaacatctcttagcgaaagaaaactcatagcagcatgattggtctaaagaaaatatttggtaaaaataaaaatttaaagtttatcgaaaaaaaaaaatgaacgataaattgatattatttattaataaaaataatgattgctctgtttatgtttttatacataaaaaaaaaaatagcattaggtgaccatcagaccaccatcggaccccatcggaccatatc

SEQ ID NO: 162044 - DNA, 2662 bp, Cannabis sativa
aaaaagaaaaacagagttaacaacatgagttttctaacaggatcctcaggaagttcctggcagccaatcatgactggagataccacagtttcaagttactggctgaactggagagttttgctttgtgcaatatgggtcttattctcaatgactctggcatttcttataatattcaagtttgaaggttcaaagaaaccaagacaagacattggagaaaaccaacatgaaagagattcagggattttatatgaggatgaaacttggaagccttgcttgaaaaatatccaccctgcttggctgctggttttcagattggttgctttctttgttcttttggtacttctcattgtcactgcttctgtggatggaggtgccatattttactactatactcagtaagcaacaaccccattaaaattgtatgcatgttaatataactttgtctctgatttctttcattactgttcatctcttcaaagtcttaatataacattttctgggccctttagtttcatcctagactttgcatattgaacattattcacaccattaagattttagagcaataaagatgaaggggcttcacaaatagatgattaaaaagggaaatgtagttaagaatttgcttctggttatatgtgaataatgcattgtgagaaatcatggcactaacaggtgacatttatgtgtttttggcaggtggacttttacattggttacattttactttggggtaagttatatagtttgatggagcttcaatgagctttctctctctctttgcttatgagtctaattttctttatttgtttgtgattttctgctcctgaattccacatttagctcggatcattgctttccatgtatggatgttatcaaaatcataagaaagctagtggtgataaggtggataatgttgaagttgatgcagagcaaggcacttacatgactccagcacttgttatagcaaattcattcaatagaggaaagaacttaaggccccatgaagatcataactctcgcaagcttgcaggattttggagttatgtattccaaataatttttcaggtacattgtttaaatcatcaacttttcataaaaaactttagagacttcaatattatgattttggttctttgccttaatggctatattgtcttgtttcttccatttttcataaccatgttttactgttacaaagatgaatgcaggtgctgttatcctcacagatattgtcttttggttcattattgttccatttcttaccatcaaagattacaacttaaactttgtaagtctccttacattctaatgttgactttgaacaaatgtacttatttatccattaaaagcaaagcagcttcttttactaaaaaactttagtctgtaatatcaaccatgtaaatacctggctggtctttttctctatttaagaaatatttgtgtgttgctaaccatgatttcaccttttattgcagctgataataaatatgcacacaatcaatgctgtcttcctacttggtgagactgctctaaattgcctggtaagctgatgattcaactacttaggtcagaatagggcttttgctattcttctcatggaagacataaaaatcttaatttttgttcttgttcttttcagaggtttccttggttcagaattgggtacttcttcctttggacgatcttttacgtaattttccagtggattgttcatgcttgtgtaaaactttggtaaaaagcacaatccttgagtatttaagcacaatcaaattcttgtacactactttcatagatgataacaataatgtctgtttttgttgtctgaaaatcaggtggccatatccattccttgatttgtcatcaccatatgctccactatggtgagtagtctctcataacacatttcattgcatttccaccaaaacaaaaaataataaaaagaatatattgttggttttcttttccctaaaatctgtggattttgtaggtacttatcagtggcattaatgcatatcccatgctacggtgtttttgctctaataatgaagctcaagcaccatgtatactcaacaaaatatcctgattcttatcaatgtgagaagtaatttgtggtagaagaagttcagcaaaggcaagaaaaacaacaacaacaacaacattctttatggaagagaaatacagaagtcaaagattagagagatcacatagttccatgtattggacaaatttatagaatacattgtttgttaaggtaagttttggatgtcacacaagataaattgtacaagagaaagaaagaaaaaaaagagtagacatttctttgtttaatttgttcatagaagcactcctacagaaatggcatagtttgtaagtacacaacaaaatcaaagcactagaaatataaatattttttttctcctatctgtctttgtaaagaagaatttgccaaactctggccaccagcttaatatgtatgatatatctagtatattgccatttaagaaaaggtattctcattcgaagattattgttgttttatgaaatggatatattcgtatggctaattagtatttttgtcccttgaactttaacatgtaccaaattgtgtccctaaacttttaaggtcgttaaaaatgttctctgaactattgagattgtt

SEQ ID NO: 162045 - DNA, 4021 bp, Cannabis sativa
cctccttaaccctaatagcagcagaatgtccctcagccactaagagtaaaagataaggggacagggggtccccttgccttaaccctttagatgaagtgaaggtatctaagaggctaccattaagagagatgcgataagtgacagtggtaaggcatctcatgataaggaagataaatctagagggaaaacctacatgagacaggaggctcttgaaaaatttcattcaacactatcgaaagctttttccatatcaagcttaatagcagcccagccaatcctaccagttttcctagaatggataacttcattggcaataaggatgttgtcaaagatttgtctaccactcaaataaagtactttgattgcaggcaatgattgagtggaggacaactttgagtctgttagcaagcaccttagatatacatttttatatggtgttgaaaagacttatgggacgaaaatcacgcaaagttgacgcattcttctttttagggattaaaaccataatggtttcattgatagtcgagacgtccccattgtgatttaaaaaatccaggatagcatcacaaaggtcaggcctaagggtatgccaatttttctgataaaagagagaatcgaagccatcgggaccaggggctttatccctagaaaggctaaacatagctttcctgacctcctctagggtaaatgactcatccaagaaagaaatctggagaaaggatagatgatttgagattccatggagaacatcggtgatggcattttggttagtttcctgtgagtgaaaaagattagagtaaaactggagaaaatgagaaaggatggttggggtgccagtggcctggaatccacctgtcaggataatacttcgaatgaagttttttttttacggattgaagccttgtgataaaaaaacttagtgttcttatcacccgttttaagccaatccacacaggctctttgcttccaataaatctcattcttttgaagaagagcttccaatttggattgcatgatgttggcctgagatagagcagccccagagggttgatctgagcttaggagaagattaagatccttttgagtatgagcaatttgctcttttatcggatcttgagacagattccagtgtttaatcgcactgacacaaatggattgtttagagaggagattggaaggtgatagtgttggaagacttccaagaggagtcgacagccgagtagctgaagcttcctacagacttgctctgttgctattctaggtgaataccttctaccttctacttctcctgcaattgcacccttgtttgcttcatgttgacctttcttctcctcattttgtcatacgcttttattaccccaatcgtccctcattaattgccctgatgtcatctaaaatccccatgattacccaaatctttcatttccaacggctcttcaatttgctctctctctcaaagcttcatttaattttgacggtgcatgttttgtcaaaaataataccaccccgaaaattttacgaccatttctcccataatcacacctagaacagtaactcaaccgccatattttgccctttcaggtgctgcagaaggataatcatttcccttctagacctccatcatctagctcaggtagaatctaaaatgatgatgatgcaatcttcccaacatccaaggcgacccttaatctccagatatttctcttatcttctgtctattctcttttgctatttaagctaccaaactcaaccacaagattcctcatccctgtactgctatcttccttcacttcttattcacgatcccatggcttcctcatctaacacctcccaatctctcgcttccctcactgatgaagaaaacctaatctttgagtttgatcatatatccctcaatcatcctgaggactcaagctcccactgtctggtttttaaaaccttaacgcgctaatttgtcaagcctgcttggattgaaaaggccatgcgtgaggcctagaccctcaggttccccgccgaaacctctaaatacctctctggcatgttctttgccacattccaatgtgaaggggaccgtcgtcgagtcttggaggatcattcgtggcatttcgatttgttcttgatgatctttgctaatcttgatggtcttgatactctcacacctgaccaactctattgtggccctttctgggtgcaagcccataacattcctttagggcgcaaaagtcttcaactagcccagttcattgcagatgaactgggtgatctcatcgaaattcatcctctgtccctgttggaaagtttcggcccctacctttgcatctgcatcctcctagatgtcaccaagcctccaaggaggggaatgaatatccatttttggactctggcaagaaccaaatggatcagtttcaagttcgaagggcttcaaaacttttgttacttctgtggcttgttggaccacacttataataagtgtaggaaatatatccttcgttgtgataatttcccagttccccctaaactgggttataaggaacacctcagagtccctgccaaaacaaacctcaagaagaaccctttcaaactttcaaattccacccccattaacgaatatgttcctcgtaccaccaactctgatcagggcctccaacaggcggttgatcaatttctgaatatggattttgattttgctgccccaatcctcaacagtaccaatccaattagctcatctaaacttcctccccaacatactgatctacaccaaaccaccaacccagttatcccacaacctattatgaccacttcagttatcacccacactgacaagggtaaaggcatagccattcctgaatcccagtcaccccatccaatagtcagctctaccaccagaaataaaagtctcaccatcagagaaccaaccacaacccccatcactgctatcatttcagggtctaaatgccctattaccagacaaactgcccaaattggaggttctgttgagagtatgcttaagagggctcgagctactccaaataatgaagttgttgttccttccctttctgacaatgaagaaacgccgggtgttgttttgccaccccgtcgaggaaaatgagtctcataagttggaatgtttgaggtttagggagccctcgagcattccttaatctctccctgttggtcaagcaacatcgacccattttgctttttattatggaaaccaagctccaggctggccgtggaacacatcttaagaatcagcttcattttgactgtgtttttgaagtgccaaggagtggtttaaggggaggacttatgcttttttggaacaattctaaagatgttaatgtacttacttttttccttaaccatatagattgtattattaatgtttttaatgataagaaatgccattttacttgttattatgggtccccttatctttctactaaacatattacatggactctcttgcatagacttcatgactctgcccctctcatgccttggcttattatgggagattttaatgattatctttccattagcaataaaaactcttccactaatcctccctctcatgctatgcataattttttattctttttgcataaatttgatttattgcctcttattcatacgggaattgaatatacttggaggcatggtcaacttcttgagcgccttgactggtgcattgccaaccaatcttggaattatcttttcccttctgcttgtctttcacatttgggattctacggatctgatcacatagccctcaaagttctgattggggataatctcaaaactacccacagaagctcttgttttttttttttttagaatcactggtaacctccacaattattatcaataaaaaaaagagaaaaagatgttaaacatcttaaattaaaattcttaaagcttataggagttatagttattatagaatgagttttatactcatttaattgagatcataatatttatggaatgttatgtattagaatttcaaatagtgatatgc

SEQ ID NO: 162046 - DNA, 1728 bp, Cannabis sativa
taaaaataagattttttgtagtaacccttcctctaacacattaaaaatggtcatttcaagataagtttctgctcataaagatggagacttttttggcaaaagttttgggcccttattctcttgttcttgttcaattggagtggaaatgatatatttactccaacattatattgtttatatatatggcattagtatttgttcacttctttgtgtccaaaatctctctactcattgcacattataattattttcatgcaaaatctatcgaatccaacccaattcatttctttggagacagaagagagattatatatatagaacactccctaacaaattccatcccatcttgtaagttttgaccccacaaaggttggcattttaggccccacctaatacaaattgtccggttaattaataaatcaaaatatcgtccaccatggaattcaattctattccatagacatatatatatttagttgaaaatggccaacttgatccatttttgtgtaattatatagtagaaaaacaacaatccatgcacgacaacactacaaaatttttgatttttaatcacaataaaacttctgacaaaaagtacaaaaattataactaatattgtgactaaaaaattcgtggctaaagatattattaatcacaaaagtcgtaatttgttgtggctaaatgtgtttttaatcacaatacgtgttgtgactaaaactaaattagtaataatttgtatttaaatactatgttttaatcacaaataactttttgttgtgactaaaagtcacatgtagtcacaaaaaatttatgttgtgattaaaaaatgtcactaaatgtaactattttttaaagtgcatattataaaaatatataatagattgttcggtcaactaatcaattatacgtcacataacttgtgtagctaccggacccggcgttgaatataagcgggctaggtcagtgtctagggctcacctagcccagagacccaaaaaataatattctttcaataatatgtatctttttttattgattttgaaaaatactattttttttttaaataaaagctcaaaaatatattttttttctatgacccagtaaatttcaagcccgtttgtagctactaagaaaattacattgtacatccactttattttacttgttttaatttttatctttatttttatattctttaatgtatacttacttttataaatgatgtccttattatacctcttaggttaatgtaaaatatgtgctagacgtagagagtgtgagtttattgggtaaacccactcataaaaatgagtatattttaatgaaatttaatataaaaatatttttaattaatagataaaaaaaaaagtaatcttcaacttatcccaaaaaattaacatacttacctacgtcgaaacatttacaaaatcaaaagaaaggagtatttatttactcttttacgtacccctttaaatatctatcattcattcaaaataaatatgtgaaaaaacaataataatgttagaaacacaaaacatttttagtaaccaataactatatatacataatgtgtaatattggtaaccaattatatgattacaactaatatataaatatatatatttatagggatatgattttgtcccgtgatatagtttcatgtacggaatgtattccgtagtacatgagatgggtctcagggtacattaaatgagtgtcagggtacgt

SEQ ID NO: 162047 - DNA, 6708 bp, Cannabis sativa
ctccacctcgaacttgagctctaccgccttgagccattaacacaaagcaaaaaccaaatcaaagagaaagcaaaagaataagaagaagaagaagaagaagaagagctcacgaagttggctctgataccataatagctcgaaagaggaagaacaggaagaatcaaaagacagaaaaaaaaatataaaaccagatctttattaaatgaatgatctcatctgatacaaacaccaatggaagctacttatacatgtagctttgaaacaatatagctaaacaaattcaaaatgacagttaatcaaccaaccaactaactaactaacatcctaaccgacactctaaccaactaacaattttcataaccaatcttgatacatctagatcccaagccatcattatcaaaggcttcctatcaaagaactggtatacaccctttaacaaactatctctatcttcaattgtatgaaatctcaccagaaacacaccatgcgtgagtaaactaattcaatcaatgttactcacgcatgcgtgagtaaacacaccatgcgtgagtaacctaccatgacatgaattggacggttcgcccccaacatataacaaacaagagtagatttccagtcgtgaatttcatctattatgttttcttttaggatcttagcacatcctccaatatctcctatagctcaaaattaaaaaatagaagtagagatttacgattacctactatatttttggcactcgccattactcccattacctctgcaaagaaagccttaacctcaaatgtgtggaagatttccttgtcggatgatctcggcagaagctctacatcgacaccatcatctccaatcatagatttcgtaacaatcgttggtaatggctcttcacccaaaatgaaatgttgttgtgattcttgttcggaatctgaaacgtgaagttcttcattcccgattatatcatcaatcttctttgttttctttaccatatcagtaaagcttggccctttcctcttggttccctcttagtcgcctgaatcttagcagcatctcttcgcaatcttggtctccccatcatggctaaaccctagcagagaagagttagagaacaagatttgttttaattttggcttcaagattctcttttaatatcttaagaattatggcttaagaagggataggagatagagattggtttggggatttgtaaatggggttgctattatcattgtaaaagggaatctgaggtagacagatagagttgttaataggtttatgaagtaatacgatcttcctgagttagaaaaaaaaagaattttatttcagtactttcaataaaataattgcctacatgaaaatttatactcccattgaaggtggctagtcatcttcatgttatgatctaatttaagttgcaatgttgaaataaactgtgtaagattcatctctaaagctaaacaatggagacaaaaggaaatttcttgatgctcctttagcaacaaagctaataggatggtacttgctgagtcctttattcattgcaaaggtggctcccacacttgatgatttcttcaagttacagcccagcttcaatctgccacctgcctcattgctcacactatacacaaagcaacctttcttactttgcaactctaatgatactgactcatttcttccgtctaatccagaaacaacccggaaaagtgatgtagaagttttgtcatttgagggatctgtcactgtgaggtcattgtcttctccttgctccattacaatcattccaggaaaatcaaatggctccaacattactgattttccaaagatgtccttggttggggataagtctgaagaaggcgagtccgttatgatgagtctgaaagtggcatgaagagaagagtctgtcccagattcaggaagtttctccatagtgataaaattgtttgagtttgttaagacgagtgttgagtcttcatggtcttgggtgaacgacaccaaataatcattgtaagaggaagggattggagtaatccaatttgaaggagagctaattgatccagtttttaggttccaatcaccactgctatgaccaacaagtagataagggccgtaaagaatggcctgtattgtagcatactcaggtcggtcatctggatcatttccaagacaaaatagtcagcatatatctataaagttatgttgaaaaacttggtaaacatgtgagtttataaaggtggatacccagtgaatctacctttaatggggtctattcttagagtaattggtagctgaagtgttactacgtcaccagggctccagttattagtaattgaaagaaaattacctacattattataaaatgacaaaaagttaaattttagaagctcacaaccaacgcaaacactagaaatttatttgagattgtaatccactgaacctggagctggtggagaaatttctttggcatttaaggttgcctttgcgccacttgtgtgtgtccaacttggcactcgcagctttaatgtcgatgactttcgtgactgcccaggtgtaattgtgaaagtcactcgaaggtaaggatcccatgagttaacttgatcaactttctggttaaccacaacttttccaagtttccagtcaagggaacttggtatgtattggatgacataaagactaggaacttctccattttcttcaaaatatattgaatctcctagctttgaaaatgattcaattcctgaaatatgttcaagatcaacactttcagctcaaccttttaattaaagaaattaagtactaagcacaatgccttacctgttccatagcagcaccagaaagactcgaatggctttccccatccgtggtagcttttgctcttggaaactccgtaacctagtggaagcatgtaaatcataactcctggttctgttcctctttggattcctagcacaccatttgtaagagccctctcatagtagtctgcatatgccatttctttagtccacctaaacagatggcgagagacctgaacattgtaaacataatgtacaacacttaaattagcaagcatattttcaccataatttgttgttatatgtaagtactatggcaagttataaaattcaaacgaaaatgagatacctttagcatgttgtaagttgtgcatgactcttcattctcagtttgtagagtgtttgccaatctcttagggtcagacctgctcacaacagattaaaagtacatccatcgaaaaagaaaaatgaaaaataaaataataaaaacttcttagctaaaaatgaaagatttgaaaaaagaaaagttattgtgaacgaatttaatttgaaacttaaagaggttaataataataccagaactcgttgactgatgttcctccagttgcatagctgtgagacgagttcacaacctccatgaagaatgttcctatgtcctaggaatcgataaaagaatatgttatcttaacacactatattatcttaacactttttgttatgaatgaacgaaaatataggggagagaaaattaaaagaaaataattagtctttttcttttgaggggtgataattgtttgatggggtagaaactagaaaggaaagaaaattaattaaattgttacgaaaattactatattaccctcaaattattagtttatgacaaaaataaattagtaatttaaaattaattttgttttgtaaaacatttctctccaaattagaggagaaatccatttaaaataaaataaaaaataatttgtggagaaatttcttagtgggtccaccgcaaatttttctctccacttttcttttctaccaaacaccctattttatttttctttcttttgacatttctcccccatatttactgaattaaagtccacttacaaaagtttattaatagaagttcaatacaattttaaatgaaccacaacaaaacaagtagcctaggtaacagatagagcccatataagagactgataaagtaaataattaactaccaaatggagctatagaaatgatgtcattagctccattgaaaactgctgacatatgttgtaaaatgaataaaaaggaattaccttataaagtggatcaccagtgatttcgtatcgcaattgcgaaccaactacaattgggatatgtgaattagcatgaaaaccagatatatcatccgcctacaatcaaaagacaaaaattggtgacatggaataggcattcattaaaaatatgaagttctatatccttaagtagtaacagatatatatacataaacatattgcatacctgaactgcgagcaagcctaagaagcatggtttatcaaataggtgagccaacagtaaatgctttggatttgcctgatcatattaacatgaaatttccttgtcaagtttttccattgtcttatcacaataatacaagtaaattccaaccacagaattacctaccgttatgctgtatagtctatacagcacatcgttcatgccaccagtttcttcattgagtgtccggtagtgtctttcaactgtgtacttggagaccacattttgaacacgcttgtaaaagtagtcaaccatccaagtcatcattttgaaagcttgatcattactagctaatgtatattgatccagtagacctgctagaatctgtcaaagtaaacaagtcaaaaaaaattatattctataaaatttgtttaggcctcttacatccagtttaacaaatcaagtaaaactcaaccttgtgaatagtgtaatatggagcccagaccggttttatggcctcaaaacgatcaaatagctcagatggaaaagcagaaagatacccagtgcccaattttacttgacattcagatagatgagacactacagcagacattttttgtttgagagtatcgttatgtgtgcttgcccacatttgtgctgttgcactcaagtaatgcccttcaacatcacaaaatcaagctctttgttataaaatgtacaagtgaacagaacaatatagtgaagaaatattgactactgtatcataagacataatcataaatatatagaaatttttaattttttattttttaacaagggaaattaaaataagaccaacctacaaaatgaccccggagctctttgtctggcccttcccaaccagagtatggatttccaggagttgccaaacctgctgtctttctgaagctccaaactaagctatccacatctaatatcaataaatactccaaatttgtttgctgtgccattccatgtgtcgaaacaggattcagtctcacatcatgcaaagatatttccttgagaaaattccctgaaccatcatgaacacctgaatttttcagtttcctgtacatcattgtccattcaagttcatcttcttccttcaaaatctttcttggaagcaactttgaccaggctgaatcatctgttggtgtcaaatgatagtgtgagaacatctcttgtctccaactctcattcttggatattaaaagctcgtatcgaagactgtgtgatgagagttcagtaggaatattcgtacactctttacagtaaccaaatccagataacacagtaagtataaacaaaacaaaaagctcgaaagatgcaaaaattttcattttcaccaaaaacccagattggaaactacctaaacttaacaaaaaaccaaataaactaaggtctaaaatcaataggtgtctcatttaacaagtgcccaggaagccataaagacccagtactggcaggaaaactcaatgagaaccgatatcaaatacagaaaacaaaaactcctagtccaatgaacatgactggagctgtggagaggaagaagagaaaaagaaactgaattgtgctttaaaagaagcaaatgggaaaatgccaagaacaggtttttaaatttaaaagtttaacaacatgtgaatggttctgtatacagctctatccaagaccatctcgtgaaagctaagaataggcattgagtaaagtaaaatacccacaaacatcaatccacttataattaactgctaattaagatattttactttgcaactactcaacattccagggccacagagggagttagagagaaaaaaccaaaaaagagacagctgatcatatcacggatacaatgctttttctcttgagtttgacattgtgagatatagattattagattgcattgaattttgataccacgaactatttttgtataatatttatacaaatatgaagacgtgagtgaccaaactaaaagcaagacgactcttctttttctttttctgtttttgccactcgcattcgcatgactcatctcatcttaaggcacaaaggattctacaaaatttgatgacctccacatcagtataggtatagctcagtaaaattattgttatatcaaggaatttttttttttttatttgagctctctcaattttttttaatataagaccttgtatttttatgaaaaatgtatttgatagtttgtatttttaattatacttaatcagtattatattttcaaattgttcatatttagtactctaaaataaaatttaatttatataattttagcaatttaactaaatagacataaattatagggaaaaaaacaaaaaaatacaaaaaaggaaaaaaaattacaaaaatactttgggccggcccattaaacatttatacagtccacatacaaatatttataaaaata

SEQ ID NO: 162048 - DNA, 1469 bp, Cannabis sativa
gggcacaaaacccaacagggacaagatctgaaatggtgtcaggcgaggcataaccgtcaaatgcatctttgggttaggtcacaaggagcttcctagactggaagtacaactcgagacttcctaaaatacccaactcctgagaactcctcgaaggcctgggcttcacatatgcttccgcataccgaaagcattaggttacagcttcaaggatcgattcctcctttataacgggtgtgctctcctggataccttgatgcgttccctgatcctatcttagaagaaaggggaatctaggatgtttccatatgatcttacatggcaccctcttactactttcatgtaaaacctatccataaatagggataatatttatcccccaagctttcaggacttgaaagtacttggagcttgtaaccttcccctgaaggttcgttttgtatctaaactcacggattggccatcaggagactgaagggacacatttcgtaatgatcactactggaggcatttctgcagactcaccgaggcaaaaatgtatgtttagcagggtcgtgtgactcccgctctccattttaggagcgtttcttgggaggaaaaatgacgagtgattttgaaaacatgcatgtccttaggtgcattggggatgctattgcaaaatgatgagtaataaatattttattccttttttcaaatatattaaacatcaacttttcatatccccaactgttggatgctcttgatttcaatctgtttgatcaagaccgtgcattttgaaatcctttcggccgttaccacccatataaatggggcttttgacgattagagtcattttcttcacttcaacctttttcgaactagagataacttttcctttctaacacacacttctcacttagaaacccttaatattttcacacatcttcgccctaaaataaatcatttttctcccaatcctcaccattactcccccttgacacccactgttacctcatgttgtcctgtaaccgaagctaagagggtcatcgtcgctttgcaactagtggaatcttagcacatcaccaccaccaccgactctttcctcgctgtacaagtaagtattcctcttctttcatgataggaggatttaatcactttcacacgcgtagaatataattttaggtttaggatttgtgatgtctaagatttatgtgctgggttcatagatggacagttatgatttttatggtttcatagaggtggtattattattttaggtccacactagaatgcatgttcaaggtttgagtttttttgggtgatgagagtttcacagaacatttttttatttactttttctctggcatgttgtgtgcattcgctttgctttgtctttgaaaagaaaatcttgtccttgttattgtcatcatgcatgtgggatcctgattcatcactgttatcccaaatttggcactctgacgtggcatcacgag

SEQ ID NO: 162049 - DNA, 6231 bp, Cannabis sativa
  modified_base (3846)..(3861): a, c, t, g, unknown or other
actatttcatattttcatttatgaatgtcaaagagggcctaatattctttttaacactagaaaaagtaaactacacaacagaagtagctaatagcagtctttgcaacaagacatgtggtattgccttgaggaaaagctacgaatacaacatgggttggacaggacacaaaaggatagcatgggacaacaaaacgacaacatctacagttgctaaaattctatatattagcattactatatagccatagattttgtattatgattacgcagcttcctcttccaaatcaagtccagtattttcttgccgtattggtggcaccgcatcttatacgcatgcatgtcgattatatttattagagccttccggacctgaccctgctcgcacaaccaataatagctaattaataataaccaaccaaagacagtattctatcagaaaatctcaaacaaggaatacacaagagtattatttatccaccaaccttagaagccaacaatgctgattggatcacatagtttccatatggatcgagaaaaagcatagaaacattttgattttggagcatctccataatcacattcatagcttgcttttcatcacactccttcaagcacctctccacaacattactgccatatttactgagtgagagggacacatagcttccttcaagctgacgaatgatatgttcagtaattactggtattttccgaccgagtagatgttgaactacatagtttctgatataaatgaggccccgtacaaaaagaaaattatgtcagtgcaaactgtacactgttgattgagggaagtaaaagcatgaagtgattatagaggtacaaacccgtaacgatgtgctgcaaggagtaacgctttcaatactatctcagccatcaaccgcaaaatgatttccccctctgcgtgttcaacacaaaattgcagcacacagcacccaaatttgtccatggcaatttccacacagtaatcaagcacttgagtcagaagacactgcatgtgaaatattaacttatcaggtttagccagaaaatacagaaggtagatctttcaccttccagatgatgatgcaagaaatagattgaaagaatcatttataggtttcctgcgcatatatatgacaaaaccttttataattaggattagggacgtgctagtaccctacaacttcatattgcaaccactacatgtagtggtagtagtagacaagtaagaattgtattctaaaattaaaaagctaacgagactaagtaatttcttgctctagatataacaaaacactacgtgattttactttctctcacaaaatgtttggtagggtggaaggagaatagagaggatgaaagggagaggagagtagtaagagagagaagtggaataataagtcactatttattcaagaaactactaaaatattttcataattatttttttctttagaggacaattttgtaattttgaataaattagaatggaaagcatcaatccttctattaaaggattttaaatggttcatttgagtggatttgttatcctcccaattttcctttctttcctatgattcttctggccaaacaagaggatttgacctctctcactcgtttccctcctctcttgtccatgcctcaacttttccccctcatcaaacatagtgttagtatatcaatgctacataaacacacaaaaaagaaaaaaataaaaagtcatgaccgaccatccagtgccatttaatcttacgaaatataccaaggaacaaaacaactgaaaaagaaattaccacacattggagttggagaaaacacttgagcacataaaacacaagggcatggctctctgaggacggaaactcgagtaaaaaaactgttcaggaaacagaaccttaagaacatgtctattggattcttagtttttttaattttttcttcgcaagaatctatgtgtgtactagaggcgattaagattataagtacgtcacatcctccaagggaaacgatacaaatcaattttataaaagcatgtttacaattacaagtaaagaaagagtaaatttaagggcatcggttaatcaagaacaagagatcgtttatctcagctacatataaaaaagacagttggaaaaatagttataatcctgtctcatctggtttacctattcccctaacccctggaaaatcaacgagatactgaaaacaaaattgaattactcgttagtaaaggagatagcctgataagtttatgaataggagactcttaggcattgtcaattataacaacagaatttttgggcacaatgtcaccggtgactaatatgaagttttagttacaaccataatatagctccattcaaatattattgaagctatttatgaagagacatgattaaattaaaaatgtacaggtcaagctgaccccttaaattttttttactgttaatagttattcagtgactaaagaaaaaggtatagtcgataaaggcaaacaataacatcaagtagatgtcctgactcaagaagtgccatgtaaaaaacacatacgaattatctccttttctttagtgaaaatcagttccattactttactagagcactaaacaataaaaagacattacctccttttcttcagaatcaaaatgtctaatgcactgctgaataacatgatagccattagcacacttagtcaaaggaaccacaaaagggtgtatagccttcaaaaaaatcaacctctgaaatttaaaggatagatgatctaacaatttctgtaccacgcgagtcctgccacaaggaaaaaaacaaaaaagaagcttattagttattatgcattaccttaactagaagtaaaattctaataaaaaagaaaaattgtacatataagccaatgtctttcaagacagaattagaacaagaaacaataaagaattaaaaaagtactatacccatgcatgtttatacaaattccaaaaaattgaaatttgagcctggtcatcgcataaagaatcatggtcctctgttcatcggtacaaagagtcaccagactctgaacaacataattcccagatgggtcaatcaccaagtcggacatatcttctaaaacctcagcaagaataacatcgaaagattttctcctcttctgcaacatcacttgtattatcttagacccagattgatccttacacaaaaacgcaaccctgccccgcagaaattccactgcatcttcatccctccaacaaagaggactacttcccagaacattaaaaaagttcgaaatatgacattgtgattggcagaccgccgccgttccattctctaaaccaaacgaatcatcagaaagcgaatcattcgaattagaagaggcaatcattcctaagtgagtcgacggactagaatttatatcagaagtaggatagttttccctggtagtactgaaaaccgaacccgtactcaaaattgctctagtactggcagtagtagtcataccattccttagaaatggattgacaggatcaccctcgatgccataaccaagaccataaccattttcagtggattgtgaattttcggattgccgaaataaacgtctccgcagatcggtcacaactgatcccacatttaggctggaaaacgcttctagggtttgatcttgaattaaaccaagatcgctctcaggctgcctagtcaacccaaaatccactgctccattccaccgcggagggtcccaactatgataactgccatggttgtcgtctaccatcgttaaaaagtacaatcttgaagaaagagcagaagaagaaaagacacaaagcacaaagagaaggaaagagagagagagagagnnnnnnnnnnnnnnnnagagagagagagagagttgaagggttttgtaagctatgtaagatgggttttatacaagggagagttgatattgatttcttttattattttcttttcttttcttttttgcgttttaatttttcgaaagaaattgtttgtataataaattaatttcgtttattttttgagaaaaagaaattaaaatttgagttaattatattgggaaatttggagaaaggattgactgaccggaaggagtgagagagagtgttgttatgtaagatagcgcgactggaagagatttgttaggatctgcatttgcatgcaatttatagaaagttttcgtgctacgaaagccgaagccacagattttttatttattataaaataagaaagtgtgagagagactgtcttcacctctgtcacctacaaaagtaggccatacctctcatgccacgtggctattttctattcgatatgcctatttcaagtccttttacttggctttcataaaaaaaaaaagtccttttacttggcaaacaagatttgttttatttattaatttattttttattttactttcatcaaaataaaaataaaaatgttattatttgtactttccatcccatagtgaactagacgccgaagtttatattttatttttcgtttacagttctcagaaatttacagtaatttttttatgcaaatatttttaatagtgtaataataatttaatcaaaaaatcattaattattattattattattctaaaatcactctaataattaggcataaaatggtgtggcgtgacaaacatggaggaggttgagcggacgagggaccttcgaggagactctccaaaagccgttggtcgacagtatagaccagatggagtcgtccagcatcaggcatatgctagacagggtatgctgaccagtagtccaagcaactgagccatctcacaaaaaacgtctgaccagcgagttcacaggaggaaacgctcatatttattccaacaacttattttcttacaaataggtcaatcaatattcctataattgagtgattgagaggatttcgtgggattagctcattcaaatattcaaagttttattatgtaattaaatataaatactctacatccttctccccataaatagtggatcatattcactatcctgagaccgaatttgatattcccaagagagctattatgctatcaaattatctatatgttatcccaatttttacctacctgatgtggcacctccacgtggccaaaagcaaaagacaagtagagaacaactcatcactaagtaaacaaggtagtgttgtacgattcctcaaccttcaagatatcaagatcacaagaaggaatcaaacaagaagaaccaagcaagtcttcaagaccctggctggaccctagctggccagccaaggatgacagtatgtactggacaaccttcaattaaggttggccggccaagaggtgtactaaattctgatcagcctgaatgggtcgtggtttctcccataagccttttaaaagattccaaatcatcttcagcactcctacaacttcggaacggttcaatctgcccaaaattttagggattcaacaccagaatgtaacttttctattttctaaggatatttctatttattatatgcaacaccttataaactctaatactatataaagggtcttaaccctaaagaaaagggaactcaacctaaattcatgcatgcacttaaaagctcagaaatactaaggcataaaactctctctctctctctctctcttctcatacttctcacctgcaacacacattctcatcattataatactgaagagagccataactagaaattaggtttcaacctgtaatctgcatggtattatctcaagagtgaatacaactaaaatgagagtaggtcattacttaatcaaaggggaagaacctctataaaattttgtgtctttacatttattatctttccacatttgacagcataaacgaaattagatcttagtcagactccacgttagttggctaaacttacagtcaatattttggtgctttcattgagagcctgaaattctcattcaaaaagctctcactttgttttcttaatttccattttgcatggctgtcatgagatgtgggaattttaccgaaccatgagactctatgggcacaaatcccaatgtccaagtgccacctactgtgaccaaccaaaacatggctgctcggccaccatgttttggcacctctaccacagatgtaacaccttaatctataggtacgccacgtgtgtggttttataaactagtttaatactaatagaataattaattattaaaaattgtgataatattaaaaacttgac

SEQ ID NO: 162050 - DNA, 7249 bp, Cannabis sativa
  modified_base (4330)..(4332): a, c, t, g, unknown or other
  modified_base (7072)..(7072): a, c, t, g, unknown or other
ttttttttttttttttttatgagtattactaaaaagtattattggtggttagcatttttttttcactgtcatactgttattaatgtaattaagtatcgagtcttatatataatttgaaaaaataatttttagagaatatagttaactaatcgtggagtgccacttatagaagaaggtattagatactgctcaataacaatactctcatttttattctagcaagtatatttacatgatttttaattggattaatgaataggattcatctaatttaaatattaagaatctttgttgaatagaaaatatttggttggtcacctaaggtgtcaatcaaaattatgcaaaaaaatcattaaaaaaattagtcatatgcctagtatatcagcttagagcaacttcaatagtgaaatttaaatttggtgttaaaccaccattaatgatactatttcaatactatgttttttaatttcaatcacaacactataaattacataaaatttaattaaaaactaaaaaaaataaaaagtaattttagtgcggtttacaatttcccactaataatagtgagataccgcaaacaatcctatatataaggtagcttttagtatttgattggattaattttagtgagaaacaacactaaatttgagtttttactgtcccgttagagatgaccttataaaattgaagtatgaattgctaaacaaataaacttgtacaaaagagttgttttcgtaagtttaaacaatagacctaaccaagcatatcccactaattaagaacgagcgtccaaaaatttaaacaataaaactataaaaaaatcgaaaaactaaacttttacttaataggtttaactaaatttcagtaaatagtaacattagggaacattactattcaaaaatttgatttttatttatagcattatatgattgattacatgcttagaattagagagacatgtctcttaatttctcttaatgactctaagcttgacaccatgcttgaagtttagaacaatgccaaactcaagctctagaggggtttccatattgggagagtgtctaaacaaatactttcgatacaaatgaataattgtgagctttatttcttggattgagaatttttggccaatgcatgaacgaggccctattccaaatggtataaaggcataagggtgccttcctttctcttcctctccattcggatcgaatctttctggcttgaacttctccggctcggggaagttcttagggtcttttgacaaaactccgggtgctaaccaaacccatgttccctattcatccaccaaaaacaattatatcaaactattaaactaatatttcaaacaaaaatttgtttacaatatttcatagataatgtttaaatgagcaaagagctaaagggtttagagatatcccaactttattgtaataaaattaattgtgtaagtttattttgagagtaaaacatctaatgaattcaaaaaataaatatatgtaccttaagttgtgaaatattttttacaatatcgtttaaagcattactattaaagtactttagttttcaaatactatactgatatattactctataaatgattagtgatttactattttacttataaagctaaaatgtgtgagcttccatattaaattacaataatattgatataacattttttataatttataatggtggtagacattttaaggtgtggtttaaaaaagttattggcaacgactattttacgttttgattttatacacttaactccattattattttttttttttttgcaaaatcctctttaagtttttttttttttttgacaaatttaaggcgccagtcaaatatcaactgaattattgttgtattggcttcaaggtttaactatcacatataaacaagtgtacacagtgtttatccagttgatatatgacaaaaatatttaattagcgtctcaaatttacaaaaaaaaaaaaaaaacttaagaggatttcgccaccaaaaaaaaaaaaagaggattcaatgtataaaaattaaaatataaaagaattttgcaaccatttacctaatttaaaataataaaataagtgactagtaaaagagtggataccttagggagagtgtaccctccaatctcaacttcttttgaagtctctcttgcaattaatggagaaaccatgtaaaacctcatcgactccttaatcacctgatcaagataagggaatcgagtttgcagatcatgagctgtcggaatcagatcagatggtccaaacccatcaatttcctccaccaactttcgctccacctcagggtgaccggccaccaaataaacagttgatgacaatgtaaacgatgttgttgcggacccagcaagcaagtgctcatatgtgacggcactgatatagtcaggactgaaaacattcttcgaaacggaatctgaatctctcgaattcaaaatcactgaaagaaaatccttcgatcctctttctttctcccgcattctcttacccacaatatcattgagcctactagcaatatttcgattggtacgatcgaccttccaatccatcgttccaggaacccttttgaggatctggcgaaagggttcttggagaatcggtatcagaaggcctaagattatcgaaaatgagccagacaagtccatcttaagttgggtagttgagtagatgtgttgatttatgaaatcataaacttctgtgtcgccatcggatgtgggttttggattagagaggttgaaattgactccgaaggcggcttggccaattatgtcagtggctaggccgagagagagtttggagaagataatgtcttggtcttctcctgtgccatcaggttggtcgagggtttgggtggcagagttgatgaagtcctgcatagtggggatgaggccggcgaggtgagatggttggtacactgataagattgtgtttcgcattgttgaccatcttgtatctctggaaatggaaggtacattataaatcaattttgtttatataagggtaaatattatttttgaccttgtgttttataaaaatttcaactggattttttgttttgttaaatgacaattcagatcctgcgtttttcaaaatagtacaagatagaccctaaacttaatttttgtcaaattaaaacttaatagtaacctgacttggaggtattatgacaagaatagttacattttttttatctgttcgtgctagaaattggtttcaagttggttatataaaaaacgaaaaattacatttaggatctatttgtattattttaaaaaatactgggtacaaattgtaatttaacaaaacagatagtccaatctgtaatttttgcaaaacacaaggtttaaaattgtattaaccatttatatagcgatataatttgtaattagtgcacacatctatcaattttaaagaattttcgaataataaaaaataatatttaatatagataattcctttcgtatttaaaaacaaaaacaaatggcatacaaataactagttgcttaaattcaattatatttttcgtgtcctgaagtgaactattaagaattttcaaaaattggtgagatatctactcttaagcatgcatcatcatactaaaaaaacaaattaaattatgataccactaccaattttaatataataatatataatattttgagagtacatataaatttcttatgaacaattctaaaataatataaaccctatataattattttaagaaaaacaaaagaattaaaaaaaaaaaagagaataggataccataccttgtgaaaaagagacccttttggtgcaaaggagaggctgcaataggagaaggaatgcttctatttggaatgtctttgaattttttaattccaacttctctacaaagctctgcatctcccactattattaatggttgtcttcccatatggaacctatccaatttttccacattatttactcattaattttctatatttagcaaaaatcaagagatgagatgaaaagtcaacttaataacctttattcaagtcaaactatagaagatgtaaataaaaactttatgatctccactcttatatggcatatttatttattattgacatcacattgttgtgtttgaaaattaaacaaattattacaaaattttagtcaatttttgtattcgttataattttaatactatttttataaatttttaaaattttttgaatagcttacagtgctaaaaataaatttaaagtttttgaacatgtgtagtaaattaaaatatcaggaactctattgttgataccgtaaattatttaaattttttnnnaaatttacaagaataatattataactataacaaataccattaaaaataataataatatagtatgtgatttcagaggtgaagattaactaagagatttaattatcatttctcaaatttttttaatatgactaaaatattttgtcaaatttataatttctcaactttttatttggataaagacatacaaataaaaatataaaacacataatttaaaatggtataaattctattgcactaatacactaaattaatagctagaataatatatatcataacaaagtttatgcataaaataatggtttcataattttaattcttggatttatattaattattatgataatgactcctaacaatatttattgattatgacatcaataattaaaattaataacattatatatatatttattctttaaaatatgtaaactaacatagtggcctctcttctcttaaccatgaaaactattcttaataaatatataatatcatttttattttctacctttaataatgtattaaaagatgattatataataatatacatatttgtatcaaattcacacttaaaaaatgtctttaattattattattcctctttaaagcattagattactgattttagaaaggcttagtgatcataagtaaaaattaaaagtttaaaaaaacaagattatcaaagtatatatatatttatataaaatactaagaataagaataagattaataattaattaattaattacctgaaaatagggccatattgtttggcaagaacagaaaaaacattaggaccatacttagccataagaggaagatgaccaactaatggaatagctgttgggcctggcactcttctcacggcccagtaaggcccatataagtagcccaaaacaagccctccgaccaccatagccaccaccgtacacgtggcagccatgctctcaccttccatacccataattaattctatcatatctctctgaaacaacaattttttcttagaaaatgaagaagaagaagtgagttgaagaaatggggttttgaaattagatcataaataatatatatttatttatatatatatattattagaagaaattagatgctgttttttgtatagatggtggtttggtcacttggtgtttttgtcgggtaatgaaatgattctattcaagaatattgtctaatgattctttggtctttttggtattgtctactcatattttctttaataaataaatagagaatgttaaaaagtataactagtatttatagcgtgttatattgttattgatataattaagtatagggtcagttttgaattgaaataggtgataagcaaaataaatttttagacctcactgtaaagataaataatatttttaaaattattaaaaaaaatatgtatattttttaaaagacatttttttttatttaggcttctaaaatgagtaggccctaagcgcgggcctaacctgtctatgcctagcttaggttcgatcctgattgagtattgagtaaaaatagtttttaaagaataccattaatttattcaaaaaaaaatatcgttaattaatcgtaaagtgttacctatagaaagtgttaggtatcaatagtgctcaatagcaatgctcaactaaatattatagggtatttttatgatacacttcattaaaatgggtatattggtgtaattcttaactgttttgacatctaaaagaattttttagtctagtttttttttttcatagtcttgtatattatagttatttaagatatactgtaaaaattttaaaaatttggaatactatataatatagaatttaatgttcaaattgtctatttcacacgtgtataaaataaaaaaaatcatgctgcaacaaactttttgaaccctattttcagcgtattagttttttttttttttttaatttattaaaattttgcaggatgtcttaaataattattatacaaccattaaaaaaaaaatgtactaaattttttttagtctattgcaaaggtacatcgatccacttttttaaaagtgtattgtaaaattttacattattatatataaagactgaaatgtaatttcttaaagtacactcaaaattaattttattttgattttgaaaagttcttcaaaacaaatagtggattatttattttattgtaatttagatatatgatattatgatataagtgcataaaaatcattggcacctttttttaaaaaaaaaaaaaaataaaacacaaagaaaaattaatagatgatttatgcccttcaattttatttagaggatataaagaaaacaaaataactacaatgttatatacatttaattgaagaacaaaatatgtaaatcataataaaataaatagagaaacatgaaagaaaatcggcatgtgaaataagttttttgacttgtatttgtataatttttagactagaaattttttatttttaattaatgtgagataaactgtaaaactcattacaaaaaattataattttagtcacaataaaatttatgattaaaaataaaaaagtttataaataattataaattattattcttatattttgactaaaaaaagttttataattaaaagtactattcaaatttgttttttatttaacttaagtaatgtaggaataataaaatggattattgtatatgtattttgacaatattatgactatgacttctgttgtccctgattttgcccaatatangtggaccaaccagacagggacacgtggaccaaaagatcttaacatttaaattaattgctaagtctttatgaagaaaggcaacatccgggacctgctttccggagaaggcatacgaagtcccctatgctcccggaggcctaagtagcatcaaagcatctccgcgaggggtcaggcttc

SEQ ID NO: 162051 - DNA, 1022 bp, Cannabis sativa
ggaagcctttacaaagatgtcacattcaccaacaaacatttctcccagttttttttttttttttttgcgagaaacctttgtcagtgcatttgtgcaccgacataggtattccacctacgtaaaataggcatttggacgtcggggactaaattattgttatggtatttaagcgccgataaaggtgagctttcccaaagtaaaaatgatttcaatgaataaacattgtcgttgtaatttgctgccagcaaaagtttgtaggcgcatacaatgtacattcgcctgaaaaaaaatgatttttcctataatgagctttaattaggatgtcagctagttgatcatgagctcaagtgtgcttgacaaacaagttgttgttaaaaattctttctcgaacaagtataagtccaattcgatgtgttggagtgaagaaacaaagtggcttccatgagaactgaactttgatttttgcaccaaattgtggggaaatgttgttgcctgagaccaagcttgaagaaaaaaaaaatagaaccacatgatttctattgtagcacgagcaagattgcagtaatcagtttcaatgctagaacaagaaatattactgttcttcttggaagaccaaaatatgatattgggaccaagaaaacacaaaaaattgaagctaacctcttatcatcaagatcagatgcctaatcagcatcacaaaaactagttaagtcgagctaagataggcctatagaaagacttccttggaagcctcatctataacaaagcaatggttatgatggaactaaataaaggcatgattatttgaagcaaacatagagacacttaagagatttttagttattttgggagcatgaagtaaactatctagatgaaattttttagaggaataatgtaacgccctaaataattaggcatgctacccaaaatacttatacaaccctaatgctctaatcgagattactaatcaaaatagcgcagaatttaaacttttaaattaaatagaatgaaaataaaacttg

SEQ ID NO: 162052 - DNA, 4564 bp, Cannabis sativa
agtaggatacatgccatataagtgaggaggtacctgccataaatctcaacctttcaaacaattgctagtttctaaaaattaaattaaagtgtgccgataatcacgtaaaaattaaacccgagtgatgcacgccacaaaacaccgtgacattgacatctattgacattttgttataatgaacttgttagctaaatcagtgtgttgaatggaaaactcaagatttacattaactatagtaaacaaaaaactccaaatatcttcttaccataggctggggtccgtacggagtcattactccaccataatttggatcaccataaggatatggtgttagaacctgcaaaatatgtaaagaacaaacatgtattcttgagatcaaccaaaagaaaacatatccatatagagaaagaaggaggtggggatacttacaattgagtgaccaacaagttccatttgagcatttggatcaagatgttcgcccattgtgagcatagtcgaggatggagcagttttggcatggtgttcggatccattagtcccatctaccataaatttgtaagagtacaatagttatcatgagttaacataacttccgataaaaaaaaacatgataaaccgcaaaaatagcataacatgagattgaaactcagccgttcacatagttcccccctctctcccgcaaattctagcaaggagctgagtgaccctatagctctaattggacaaaaacacttataaaaatatataacgaaactggtgtagcaattttggattggtttgctcactgtaatttggcagttttgagttaattggtagccactagccaatgctgctgctgctgctgtctcgggacgagcagcagtattcaaaccattaacagatcttaggaaccaatgttttgctattctattcttgcaggtgaagcaagtgccatttgtaatgtattttgttttctcttttctcatcaaaacctaatgcttactcactcaaagtaaaattcgattaagggatatttatcagatgaaccccaattgctctaatgagatgaaaacacttgaaattgaaacttcaagtttaaaacctcaaagtagataagatattctattcttccaaggaaggcaagttctttttcatcaaagcctaatattataatcataagatttataacacatgataaaaagagataataataagggtaaatgacgacataagtacccaaagttttaaatttataagcggcataaacttaatatttatttttagcggcataagtactcaatgtttataaaactgtaattttcttccagaccccgttttaaatttattaaaagaatatttaaaagtaactgatactacatgtttctatctaaatccaattatctagaatttggacctcatatgtacaatgtttaagacagtaacagagtctatactgactaaattagagaaaaaatacagttttccaaacatggatagagtacttatgccgctacaaataaacattgaatttatactacttacaaacttaacacgttaggtacttacgccgctatttaacttaataataataataataataataataattcagattatatctaatctaccagattgtgaagctgtagttgcagaaacttctttgtggtaattagcaccatctccaccatcatcaacaactctaccatttgcatgttctaccacaaaagatgattttgaagtagtctcactttcacctatggctgttcctgtattattagttcccatttcccgccaccatggttgactgtaaacacttgtctgaaacacattacttccactgagttgtggcctcctttcttcatgttcagctttcccaggcatcattcacaaactttctacacctattcaaaactaagaaacaaaaaaaaaaccaataaaatttagtttccatttatgtaaatttaactaaaagttaggatcatcatcatcatccaactaattcacaagaaaatcattagcttcaaaaaataacaaattgatttaaacttaaaaaagtaatttttggttacataaagaagaagaaaaaaaatgcatgcaaacactaaaattccaaaaagaggaaaattttaacaacttagtcaaccaataaatttgacatgcaattctcaatctatatataaatacaaatatatatatatatatatatatatgtataggtcaaatttccaagtgaagttttagtatattatcccactaaaatttgtgatctttacaagcaacaaataaaattaaaaattcaatctttttttctgtaaataggatttgagtatgcttatcattacaaacccaaaattcaatctttttcagttatattgattcaacaccaaaagaaatcaaagcccagaaattcagaatcaaaattctccatgaaaacagaaagcaaagactttaaaaaaggagttaacagaaaaaggaaagttaccagaggaaactggagggaaaaaaaaccctttcaatggattaacaaggtgtgaacagaaaccctaaccaagttttgggctttcagagcttccaatagagtcccattttctctctctctctctctctgcaaccttaaagagagacagtggaagatgacggatacaaaagcatttaaaataattattattattattttaaataataataaaaataattacaataaaaaataaaataagcaaattttattttgttttcttttgttttgttttttatgtgtatttttttaattaatttatttattttggtgattaatccacgtaaagcaaaggtcactttcttggtgacatattaattaccaattaatttgaaattaccaaactacccttattcattttattttatttctttttgtgttcctttattttataataaagaaatttgaccttttaactaatcaccactatttaactagcattaaactattttactactattagttaatttattataatatcttctaatactttttgtgttttagataatatcttgttaaatagcattatgttattagttaatttaaagaattattttatatactattttttaaatttatggtttagattgctcaaatagtttttatgtaagttgttatataaatttttattgcgatttaagttgtttcgttagttgctatgtgtgttgttgtgtaaatttgtataaaatacaacaaaactgttttgaagtataagaattaaaaaacccctctccataaattttttcatacttttttgtattttttttttttaattttaacttttaattatttaagttaattttgactaaaaaaacaaaagaataaatgataatgattttttttaataaaaatatcattggaaatcatttttagtatcattaatcattatataagatggaaatgatacaattgttaattttttgaggttagcactaaaccatttttaattaattaatagaaaattaaagtaagaagataagagtgtttatattaataaacttaaacttgtttaggagaagataggaataaacaaaaaataaataaatactatttaattgaaatcaatttctatcttatcttcaattattcttctttatcaacaagctttgataatattatataagaaattagtaaaagttgtcaaatgtaagtttttttggttaaagaattttttaaacttagcttatgactagaaaggtaatattataatgtcatctttttatttaaaaaataataataaataaataaaacaaaacacatgttttgagtttttcatgacttttggttgaaagttgaaaattatgtgaaaatagtaaatatttcaaaaaaaaagtaacaaaatagtagaaatattaaccaaatttagaccaaaacaacaaaaaattatgtcaaaaagtagttgtggaatctcttttggacaatctttaaggaaaaaatcaaaattgagtcatttgatttttttttcttttttaccaaaatatggtattaaaaaaatatgcaaaaacatgattagtaaaaaaacttccttttagggaacatggcaaagaaattattatcaagttttttttttttaattatttatcttgagatcaattaaaaaaatagatgttaaaaagtattaatggtatctaataatttttccagtgtcatatcgctattaaggtaattaaatatcaagtcaaatataacatataatataagataataacttttaaaaaatattaataataaatcgtaaaatattacatttaagtgttactattatatgtgcctaatatcaattctcaatacatcataattaataataactaataatgttgtatagaatataaggagacattatatgtttgacatactttttaatccaaaatttaatatttttattttaaaaataacaataaacatgtataatgataattatcaaaagagtgatgaatagagataataattgagttttttatatttaaaaaataaaataaaataaagtaacattaataatgctacaatttcaacatgtgaacctcaattccacaaaaaaaaaaaaaaaaaaaaaaaacaaaaaaaatgaaa

SEQ ID NO: 162053 - DNA, 2229 bp, Cannabis sativa
  modified_base (2189)..(2190): a, c, t, g, unknown or other
tttgcaaaggtatttaccaatgatattccaatattttatggtagaaatgggcgtttgatccatcagaactaggagccttgtcctcagagaggttgaacatggctttcttgacttcatctgcagtgaagaggttgtctaaggctgaaaattggcttggagtaaggtgattagggatgcctgctaatatgttggggatagtagtttggtcctccccttgaatagtaaaaagttgagtgtagaaatcaataaaatggggaaggagagaagaagttcttctagccaaggaagcatcctccaaagtaatggatctaatgaagttgtttttttcctagcagaggctttgtggtggaagaatttggtatttgtatcccctgacttaagtcaattgactcgagatctttgtttccaatagatctcacttttatgcaagaggctatctaggctggattgaagagctttagcgttggagatgtccttggcaataggattgttcgattgaagtaagatttcaaggtctttctgtgtggtataaatctattgcttcagggaattctgactcatgctccagtttctaatatcctttatacaacttttttgtctaaagatgaaatcagagatggtggtggaacgattattatgtttggaattagaccaggaggagttaacaacttggtaaaagtgttaatcggtaagccaatgattttcaaagatgaagttgttttgattcctcgtgttcctaaggtaatcgtcaagggtgatctttaaggctccatgactcgagccatagaaaccaaggcagaagagggaagctaggggaaaaagagactgctaggggttgttggccacacaccagtcaagacgctcaagaaaagtgtcatgcttctaagtgtacttgttactaatatgagtgagaggtaacatgctatacttatgtaggaaagattggaagttagttatagcatgattagggggactggtgttagtgtttctatcattaacagaaagatatcgttgaaatcaccacaaataagccacgacaagttagaggcagaatcaaaaattctatctaaaacggtccaagtagaagatttgttactgtgataaggggaaccatagaaataaaagaaatgccaattcatattatcattaatattaacaataaaatctatatgactaagggagaaagttaaaatattaacattaatatcattattccataaaagtaaaagacctccccttaaattgctcctaggaacttcaaaagcattatcaaaacctaatctattcttgatgcgagtaccttgaccagaattgagcttggttcccataacaaaaacaaaatgggttagtgttgcttcaccagcagggagagattacaaaatgctcaaggactccccaggcctcaagcattccaactgagcagactcattttcctcggcggggttgcgaagcaacacctgccatttcctcagggtggagagagttgggatgacaacatcatcattctgagcagctctagcgcgcttgagcatgctcctaacggaacttccaacttgtgcattttgtttggtgaatgggcttttgacaccagttgtggttgtggtggtggcagcacttggttcttggatagtgatgcctctgctcaaacgcctagggcaatggagacgggaggagcaggggctttaggatgggctatcccctttcctttatcagtatgggtgatcactgaagtaaccatgataggtgagggtgaaagagtggagaaagccttgttcaatccagctgggggtatgaacttcagggggtgcaatggtgatgttctggttgagggttgggaccgtaaagtcagaacaaaggttcaaaaactgatccacgacttgttgaagcccttggttagagtcacttccacaggtcagatactcttcgataggggtggaatttgagagatcaaaggggttctttttaaacttagttttatcaggggcatggagggtatccttataaccgagttcaaagggaacttcagaattatcgcatctcatgaggtatctcccacatttattataaatgttatcgagcataccacaaaaatagcaaaaattttacagcccttcgtatttaaaactcagccatttagttttggctatcttacggaatcagatgttcatactgttggaaatattttaccnngatctagatttattaccatgtatgtttcattaacatcct

SEQ ID NO: 162054 - DNA, 3642 bp, Cannabis sativa
taaaataaattccaacaattccgtggtcaggcaatgacatggtcacgaaaggatccaccctaacagtgtttgaggacgcctgaagattacgagggctcctaacgatttggtctaccctttctatatagtctttcacagggtatttatgacggtctaagctcaaaaaatatttatcgactcccccctgattgcactaggacatgcgtagaggctggggtatagaagatgtagaagggtttattgcctcttcctgaagtactagctcccagagtccccacatcttgatacgctacaacaaacctctttaatatttcttcttcatcagttaaggggtttggatggcgggccagccaatcaggttctaggagcttgtcttctttagccactttagttataataatggccaagtttgtggaaataacttccttcacctttttcggagcttggcgccgcccccggaggttaacgaggttgatactctagaatttttcaattagtccagacctccaaagtaaatcggtcgtgaccaactccttaacttttaactggtcctcagtaaaggctttgcactaggcctccttcttggtaattttagcagttttagcactctggtatgatagtcctggcaaaaagtcaaaagtacacaaaaattccatcaataaataaaccaagtcaaaagtatacaagtattgtgcaccaacaatacttgttaattagaagttcaactagagtgagggcaccctttcaatgggatcccaaagaaaagaaccagtattcttggaggtcgtgggcgtggtcactttgcctaatgggacaatgagaattaggatgcttgtccaatctgtagaagcctagtttcttgttgtttgtacttattgggttggccttcacactgtaaaagtacaagatttcctccagggaaggcactttcagattattcatcttggaaaaaatataccataccacccagccaaaaacttgtatgatgaggggatcatttaaaaaggggctatctcaaccttggcaataaagtttgcaaagtaggacctcaactgaagatgcactctgttggaaatatgggaccagctccaagagccgaatccccccacgctcgtggatgcagattctctcgtggtggacatcctatgccacataaaccctaaaacattgcgaagtccagatccgttggcatatgccaccaacattccgtaagaatggaaatagttcgccttttgatccatctcctagatggagtcattgaaaatttaggtagagggaggggtgttggccttccttttccctttagccttcacggaggattcatcctagatagattcgccctctgggatagtctgaaggaccacctttggttaggtacattagtaggaacctcggcttgggttccttccatgagcatctcttccgcgaggtcagcaggtacatcttcaatgatttccacagcgcaaaagtgaaaatcttggttcagatccattgctaccaacacaaacacgaacggaaaccaagctacttgaagtgatacactaagatccaagaacaaaattttgccagagtttcattccaatcgacaagccccaaaaatccatacacatgcataaacatatgaatctcaaatatccagaaaaactatctagacggttctaacccccctttcacggagaagcatttctctgtcaggtccatcctaaagttgaaaaaaaaaaattacatagcctacttgactattcaacatgaaaatagtcctaacccaagcttgaacaagaaatttctatctcaaacaagaaataataaaaagttcaaccagggattaaagtacatatttgttgggtgaagaggagacagggtgttgtcgtagaaattttcctgaagccttcgagcccgatcggttagatagttgcaactagtctcaaagtcaaaaccttcgtctgctagggggtatattaggtcagcttgaaggggttcgatatctggaaatagactcacgcgaagatttagcaaaagttgggtcaaacactcacaatcttcttgaatccactggtaaaggaacaacaagagaggaaaagcttgcagaggaaatatggagtctagtatgaaatctaagaaaatgaaggatataaaaatacaaagtgtggaagaagtgagaaaataaccgttggaaccaatttatacttcaagagaaagtcaagcctttttaaaatcaacggtccaaatctccttcacaaagtattattagatccaacggctagagagttgaaaggttgaaagcatttactttccatgatttgtctcgagtcgagtgagcaataatggaggatcttttcaaatcaccttaccatcggttccatctttttttgacaaatgcaccccagcacacacatgatgaaccaacaagggcttttaatatgccacatgatcgtgacataacatgcctcgatgatccatttgctcctgggggattacagctcaccaaaaagaaacgtctgtgacactaacagttagcatgtgtcaaaggtcagtcctgggggacccgatgaggggttacaagctctcagaactcacaaagtcccggaagcttgggggtaaatgttatctgtgttttaaagcaggagacacgagacacaattagaggtaaagatttgttaacctcttagattaatgatgatgaccattacaatttctcgtggagatgtcttattaatccaagaagagcttaatgaaagcttgatgtagagagctatcagtggcccagttagtgtctccgggacgtggaagcatcatactcatcctcggaccccaagaagtcttgaaacaaggttttgactacttgacatgtggataaggactctctgagttgatcgcggacgacagctcctacgcaaatgcggatggccacctttgatttatatggaaatcgacctacagatggttacacttttttctgacacagaatcaaatattgtcccccatgtgccaggccatggtagtgcacgtacgtacctctggacacaccttttttcctaatagctcgcctagagagtaatttataaaggagaaatctttgggcaacacgtgtccatgatctagatggtactggtcaccatccctgcacactacatgattaagaaggttcttcaaggctagacggtcagatttgaagttgtattttcctgcccttgcaatggactgtagtacaaaactctaggtgggtaaagggaatgcccttacccacacgtaaacctataaatacccctatttttatgaacaaaggatgaacaaaatttgtactagccaaacctctatagaaattcctacaagctttcttctcaagagaaacaaaaggagtgcagagccagggtctatactatcaacacatattgtataatcaaaatacttacctaaaggaccaatataactagcacgtggactaaggattgttaacatccgaaccacgtaaaaatcgcttatccactattaatttatttatttatttctgaagctctattcatctagtttttgaaaatcttggcaaataaatatatattatattttttgcttaaatgttggatgaaattattatataaattggaatcaattttagcatctaaataataatatgagatttta

SEQ ID NO: 162055 - DNA, 1975 bp, Cannabis sativa
aaaaaaaaaaaaaaacaataaaaaccctcattgttgggttttcctagctgaccaaaggtatacacacacaaacacataaatttattcttagaaaaccttctccatttttatgttttttcttcttccaattcaagaatcaaagctaggtgttgatgcatttctaatagaagacagtgaggagtaatggtaagtctttcataatttattaattagtaatcctttaagtaaaggaattagatagttagatgtggggcttgtgtagataataaaattattaatttgttttgatttgtactaagttagggttagttctttgtaattttgaattattgatgttgagtggctgagtttaagcttgaaaattagttttgagctttaaagtttaaaacttgggagctttaatggtaagttttatgttgtggatttaatcatatttttagttgctagtttagttataattataattatagactagtctagaaaatttggtgataattagataagttttaatcaggtttttagagctttaaaatcaaaaaaaaaaaaaaagcaaaacttgctcaaacaaatggaactctgctttgatagtttcaagtaaggccaatttttcatattttagccataaattttacctcgatcttcatttagaaagcttttgaaaagctctacaacatgattcataatttagagtgaaaaatatgttttttattttagggtattttcaccatgtagtttgataggaaaaccctagattgtatacaagtattagagatgttttagaatagacacttacaaagtttactgctaatgtgacttaggccatcactccctgacatgaattttcactaagattgactggcacactcgagtctggatttgaggtaagaaaagtattcagatgcacatatacacatgtttcagttatgcatgtattatgatactatttacctagtatactagagatagcagtatggatatacatagagttgtatttagataccaatatctagtcctagagggtatcgaatagtataaattaatgctactaacattatgattggagtgttgggattagtttggtattatggttaatcatactataaacacgagcgtatggatctcaatatatgcattgaatgcaattagtagacttatggtaactgagtgtatggatatatgttgtatttatatgtatgctttcttactgagtctgttgactcacatatacattgttatgtgtaggtaagggaaaatccaaagttgaatagcactgagttgggagattggtgaagattgtacatatctacttgtctagacctggagggttgcgtttctcgaaacaaccactagcatacttgtgtaaatgtcattagacaatactttttctatcttatgatgtaaaatattttgtaactagatttatgtgatcccagattataagtatttgttaaaagtgtttgtttttagtaaagttttaactatcacgaaaagttaggagacaatatcttgatagtacgttgttggtcagcatggcagtgggtagtggaagtagtagtagttgagtgtcagtcaatactgacagtcggtaggcagtgtctctactatttgtactcgttgtaccatcgtgtacaaccactactcatcctcaggctttgcaaatgtgtgcttgcttggacggaattttcctttgtcataccgtcctagggtattctccttttgtccacaaggctaacctgacactttgagaatttgaaaaatgttgggttaagactaagctcatgaatgagagtgtggggtgcatagtccccatggagtacaagaggaaggggcagggagcaaagctcctcgtggtgaagagagagagggctagggaactggtagtgaaggagggggcaggtgttagactttttatttgggcttacattaagttttattggttttattaaaacttgggttgattggatagttctttgct

SEQ ID NO: 162056 - DNA, 2857 bp, Cannabis sativa
aaactaccctagttatcgtagattcacccgcactaaataacacactgtcatacattcaacctataacttttcctttttttttttcctttccacttcctttctcgaaatcaatttactcttttgcctgtttatccgtacacagtgaccaacagttctttgttttaggagacaagaaaggaaaaataggaaaaccgccgtggaaaaaattatattaataacaataaatggtgggaaccacttattatgtcaccgtacactctgagagagtgggacccaatcgaggtggccacacacatggtgaggagtgatggtggtggtcaggtcagctttatcgtcctcacaatatttcactagtctacgatcttccttcaacagttacataacacctcacacgtgcgacaaatgtgggtccacacatttctccccgaatcacgttcgcaacgcagtcctgttttggcaattcaattaaaataataataataataataataataatgaattttctaattttaatttaaaaataaagaaaataataaaatctctctcaactttgtacggttgacgatgacatggcagaacaaggaatcgccaccctgcatcggatcgtggcagataagatgcatgtcggttactaaaacagaaaataatataataataacatagatcctgtaaatttatttttattcccaattatactccttaaactttacatatttacatttttgccacaaaccaatcgagtattattaaatttgattttattttggttctgcagcagttatgcttcctaaaacgttactctctctctctctctctctcttctttctcattagattttaaatattttatttggaaaataccttttttttttcgtttggtctggaagatttgactttcttttttttattgttaatattaataagcgagaaaataattgaatataaaccaattcacttcatttgaattgcatgcgatgccactagcctcttcttttaccctcttcacctttttttcttctctgtcgatttccactctctctcgtctttcaaaatcgagaaaggagaaagcaaaaggaacataatcacagcaaaagcaaaggtttacctacctcatatggcagttgcagcttcctacaatactaatctttcatattaggtttcccacaccagtaatctttctcgttaggtatgtaaagtgttttcatatatatatatatatatttatatgtacatatagttttgaacaattgcgctctgcgctttttctttattattgctcaactgattcagtttttcttttggtttagaaatttcaatctactaaaatgatgaactacgtcaatactagaatggattcatcggcgataattcctgaaagtttattatattgcgatcaatcgcctattcgggatatgaagtcctccatgaacagggccgatagtgtgatcacttactacaatgttcctgctcccagaaaacgatcgagagattccatgagcgactgtttttcttattctcaaaagcgtaaattacccggtgaatctccttttctcaaccgagacacaagcccccagatccatgatcatccttccgatatcaattgcttcatttcccaacatgtaattttttttccttgctactttttctattttgttttgtttcttctggcgatttctaatgtaattttctcgatcctcacagacggaaaaagtgagattaattttggaacaccaacggaatctgcaagcgagaatgcttgtggcagcgttcgaagaacagatgaagaagaaactcacagaaaaagatatggagattatcaaaatgacaaaatacaattgggtccttgaagagagagtcaaaagcctctgtatagagaatcagttatggaaagacttggctcaatcgaatgaagccacggccaactcgctccgctcaaacctcgaacaactcctcttggccaacgttagcgaagacaactacaaccacaaccccgaggctgttgccgtcgacacggccgacgacgccgagtcgtgttgtgggagcaacgatttcggaagggaaccgctaaacgacaacgaagaagtcgaggtgggtcaagttggaaagcgaaacgacgtcgtggcggaggtaaccggaagagagggtgggtgtgatgacgtggcatacggcggtggagggaggatgatgtgccggaaatgtggggtgagagaatcgagggtgttggtgttaccatgtaggcatctttgcctttgtactttgtgtgggtccacacttcgtagttgccctgtatgtacttctgtcatgaatggcagcgtgcatgttaatttctcttgataattaattttattttacccactacaaaacactttacaaaaaagtaagtaaatgaaataggactttttttttcttatttgttaatagtaatttaattcttttttatgctcagtaattaacggatgcattcttcaaaacatctttacaagaaacagccaaagaagcgttggataccacaatagtcgtaattaattggttttattactaaagccagctacaatatcataaaacattatgaaatatattgatatgtatatatagaacttggaatttactttcaatggtacccaaaatattctttgcgaatatgttatcaaggtttctaactttatacaagaaaaccaaccattttttctatttcatgtttgtttaaagataaaaaataaaaagaatatgtattgaggatagatgcgatgagattatatttggttctttccttttacttttatagctttatgttttttttttttttttttttttttttggttggccatcagaacacttgcttagtttgaaaagatttt

SEQ ID NO: 162057 - DNA, 2686 bp, Cannabis sativa
caacattagtttatttctccaactgttattacagttataggtgtaactgaatctttaaagaaaattctgttaagattggtattagttattgagccattagtgtgttgtcagcaactaattctatataaggctccatgtctttgttattcaacaacagaaataaggcatagacagagagagaaaagagcctttcagctcaagtgagagagagagagagagtaagaagatcgaagacctgaagaaattggctgaagatcatggtgtcatgatggattgaagagctcatgaagagccaaagtctcttagattgttcttcgtgattcactgcattgattggtgtttataacaagttgattcatattggagaaactccttgggagagctagagtaggactcaaattaaggtcatctcatgtaaatttctctttcaattatattaaatgaaactttcattcctatacataattaaacaaaaaaaaatcttccaagtgcccatctaagatttttgtatttggtaatggtatatcactgcgccttgaattacaaagtgatgatacaataaattttatgttttatgaaataaattggcaacaatggtatcccaaaacatgagatttcaatagcccagagaagaaacaaatgaatctcagaattaaccaaactgatactcttcttcatctaattgttgccctgcaaaatatcatttccagtggaagactcaagattaaaaagagttcggttatccttagccaatcccatttgttgaccacttacagaagcaacaatgactagtattaaaacttacttgaagaggctgaccaactcaattcaaaactccaaaaatggatattacaaacggaaacattgctttttataacttgaaatgcctttccaagacctattcacccaatcaaataaatgaattccacttacactccaattcaagttcaatagctaatttgaaacatcaaacagccctataatttgaattgacgaggaaggcgtccacatttggtctgtaatctcaaaatttctcttgcaaaagcttgattacccgttaacaaaagtccatccaaaactcgatggaacatcaacctacggggtagaaatcctctatcaaccatctcaattaacaatttcccagcaatcaacaaatcttctgatctcttcctcacaaacattgcacttatcaaaacattgtaggtatccaaattgggcaagcaattcgcactgctcatcttctcaaacacattcaaccccttttcaatctccccagcctcacaaaagtaacggagcacaatggtgtatatctgtacatttggctcacaatcatcacccttcattcggtccataaactccatcgccctctccatctgacccgcatgacatagtcctctaatcaacactgtataagttatagaattaggcacataacccttcttcaccatctcctcaaaaacagctatggcattttcaacactatctttcttacacaaaacttgaatcaaagcattgtaagtggcaactgaaggaagcacaccctccccaaccatctcattaaaaattttccgagctttctcaatctcaccaacaacaccaaaaccatgaactaaagtggtataggtaacaacatctatttcacaatcccttctcttcatttccataaaaaaatcccaagcttccttaatctgaccagctctaagataccctttaagcattatgttatatgtagtcaaacttgggtttaatcctctcttcaccatctcttccaaaatctccaatgccttgggagttcgcttaaccaaacaccacccatttgcaattatattataactaatggtatcaaccttaaacttagtcctgaaaactttcaacaaattataagccttttctaccctatttgacttacataacacatcaagaaaagcattgaatgaattcaaatcttgaggacaaccatgttcgtgcatagacaaaaagaccttaacagctctatcaggcttaccagcagcggcatacctctcggcaataatggcgaaagttttgggttcgggaccgagccggcgagagcgcatgcgagcaactagggtccaaactgtcttatagtcccgcaaacgggcggcgaggtcaatcgcatggtcgaatgaagaggaggagtgagcatacttagggtggcgatcgaggaccctaaagaattggagggctttaggtccatggttccagagtcgtttaaggatcttatcaactaggtccggggaccaatctaaagtggagttgagaagagtttcgggtagagtttctggggcagcttttagaatgagttcggccatggcagcaacttgttccagctctgccgccgcaggtggcatggcagagagtgagcgacatggaatagagaatatgggttttggaacatggattgggattttcttttgtggggttctacaaagcatggtggacatttcttgtaggtttgcacattttccctccgtttcctcgacaaccaaacagataaactaaaagagaattgttgacaaccgaatggacttgggttgtgctttgctttccctttatatttttctgccaaaaaccaaaaactgtacttattataagaagaaaaaatttatttttacaagtaacatccaaactaaaagtaattggcaatattaatgtttgatttgactca

SEQ ID NO: 162058 - DNA, 2204 bp, Cannabis sativa
gcacacgagattattatattttatacccatgttaaattttttaaaatttgagagaatatcataaataattataatgtagaaaattataaaaaattatattatgatttattagtatattagtacttacaattagaggaataaaaggtagccaaagataagaataccagcctgtccaaatgtaaacaaattcattatggtccaataataaataacaaaaatataataatttgaaatatgcacacgtttggatcttatcattctttaattaaaaatctaaactgtgataattagggatgcattgaaataattaatggtataattaataataaaatgctcaccatgggtattgaagagtaagaacaccacagcgaagaaccaaataggaggactgagattgatcaagccaaaacaaaataataattattattatattattagaatgaattaaaataagtcatcatttgggaattaataatatataattaacaaattaatttttaaagattatatattatattaataatttacctgattcctacaacgaccttgaaatcttcttctagagatctgttaatgtacttctgaaagtcaaatttttgatggctttgaggggccaaatgtgcctgaaaattattaattgttataataaacctcaattaatttagttattgatcttttatgaatattaaatagttaatacataacaaaataataggcccacatttaatggctgatcatttatcctaacactatatatttatatctcactaatatttaattaaacaaagagtttattaacttaaacttaactctatatttgtttaaaaaatatatataggtgaaaataaatagttaatttttccttatttaattaaattatgctgaagcatttataattaaagtcattactttattattttatatttttaaattgtatatatctaatactttagagtaaaatttaatcaatactgttttaaacaataattctcaattatatgtaataaaataattatatttgacttcaaaatttataaaattttaaataatttaattatattgataaaattttaaatttagagtactaaatatgtaaacacaaagcatccaacttgtatttagataaataccaaatatctctacatccatatttaaattgtatatgtatgtaatttttttgctgaaatatatatgtatgtaattagtgcaagaaaatcttaccattataaatccatgcctcaaagttaaataatcgactttaggaactgatctaacaaattgtctgaagaaacaaacctgcgaaaaataattaattaataattaaagagcaggctacaataaccaataattaataaattatatattataacttttctaaaaaaacatatatattatattatatatataaaataatagatatcatgatcaatcattctcttaccttaaacatataatttgacaaactaataatacaaaattaaggaaaaagtagtgttcaccaaatattaaatataaatatgttattaaatgtaaaaacaaaataatataaaacacattattatgctctagacaaagatgaattattggtggaataaaattaaaatataaagtcaaaaaccaattatatatagagagagaaagaaaatttgagctgagccataaatatggagtaaaggcattgtcattttcacaccttgccatatacagaccgttgttatatatatatatatatatatattaaccttaacacgtcaccatatatataaaagcattatgattaatatattttaatgtgttttaatcattttgttaagaggaataagagatagagtttaagcttgtttaacataacttgggaagcaaactataaattgaatatgaatggtttgactaattatatatgatgagaatatttcaaagccattttaaccattgaccaaaataatcttgttgggtctttttcatgggagaataaattaataaagcacatttaacattttgtgaatataccaccatatgtggtttgataagtcccaattaaattcatctatatagagtaatgaatatttagtgtttgaaaagaaaaaataaaagtcaacactttttatatatataataggacaccatagctcgatatagtagcttatgacttctcagcccaatccctctaaaaaagaagaaaaaaccaaaaaaaaaaaaaaaaa

SEQ ID NO: 162059 - DNA, 3453 bp, Cannabis sativa
aaaaaaaaaagaaaaactattatttttttacatcatttaaacataatattaaataagtgagacccatgtcaaaagtcaattccaatctcttacaatacatcaaattttaatagtcataaaccctcattttatatgtaataggactcattttatttttaattccttacaaaagatatttttttatagaagagtcttacatatttatagatgggaggaataattttcatattggaaacacatttaagcatgtaaaattacctgtaataaggtataaacattagccctctttcaaaaaaaaaaaaaaaaccaagcatgtcatgcattataacagaccttcatcatatatataaagtacagaagaataattcttttgataataaaaaactaaaacatcaaataattgaatgctactttgcaattaaataaataaatagattttaaaatgaaaattgtagcaaaataattaaagtaagaggaaattaattggaaggcaccttcaacttgtccaatgcactcataatatataattatactattacatataaaactatatttgtgcgcatttatatgaagtggagcaagaatgttacatataaaggaatatataagtttttttaaatgaaaaaaaacataaataaagattaaattgtatatggtgtggagcatgtggatcaacttataatgaactattatttatatataggtcaacaatggcatacatatgtaatattaccagggcacttggtgatgcacctaacgcccaggttgatatgttctattcttgtgagcaataaaaattcgaagtagacgtagttctattatcgttgtgacacaagaagtgaactactataaatctcttgtgtctctttatttattttacttaacttatatttcatctcgctaatctagcgactaggggtgttcgcgtgcgggtggtgcaggtttaagttattttttcaaaccaaactgaatatgcaatttttgtagtttttcaaactgcaactgcaccacaagaccttaaaaattgcaaaaacccactacaaaaatacagtgtgatgcgtttaagtagtttacactattatcattatcaaatattaaaataaaaattaaaagattagtctaataaagtgtcgacaattataaaaggaaattattatcttattaaacttttaacgacataacatatatactaatcaagttattgcattaaattgtctctaaaaaaattatataatatacatatatattacattatatatatcaagaataatatgttaacaataagaggttagaaaaaataaaaaataagaataatttatatgaatatttcttaaatttaattgtatggcttggactttataaagatatgaactgctcatgaaaagagaaatcataatgtaaaaattagtatttttgtagtatataatgcagtgtagcttgaactgcgattattaaatttaaatctgtaaactgcaccgcaccgcacgatttatagaaaacacaagctgcaaccgtaccgcaaaagatttcaaaccatattttttgtacgatgtgatgtggtgcgggcagttttaacacctctactagcgagcgagcgttggctaattttttgtgtcaatattttggtactttcattgagagccacaacttgagattcccaacaagatggttgcaacaagatcaacatgtgttgaaagaagcaccaccacttggggcacgccagctgctggagccagtgctgggacaacatctgcatcgcagatgaccggtgaaggccttataaccaattcatgagcccgtcctccaagaccactgacaactgctagtattgatgttggtaggtaagtttcacctgatgagcctcacgtggagctagaagactctgaggaagtcaacactcaagttgaaaaacttagccaatcacttgctaacttaaaatagcagcttcgtgaatctctcgacaagcaacgagaacagttctaaatctagttcacataacattatagaagcgttgaagctcaatgtccagagcaagagtagcgaagagctaaccatgcttagtgaattcgagaagcttatcgctccaacaatgtaacagctcccctaaagctacttccactcaagctagagaacaaccacatctaccaactggccacgtgggtttcacacaaggggaaacccttcacgtgtggaatgcttctaccgtactcggtagccgtgccactactcagcatgcaacaggtgctgaggctccccaaagggcaactaattacaagcgagtgtccaaaaggacttagactcaggaacgccaactgatgggacctctgcctgatgtggagcagtcgcctgttagggaaacaatctatagacaagagacaatatgagtttgtgaatcgatgtatattatggttgttatgatttgtatatgttgtatgttgtatgctaatgtctcaagtacaaatgaggggccatggttgggtatgaaatacgaggtaaggtcattaaatgtagagataccctaccctgtatttgtctgtttcgtgtatgacattgttatggtgaggtttgacacaatgaagttgctgttaaatgtagagataccttattccataacaatggtagagctaagtgtgcccaaattattatagggtcagtttaggcccaggttacgtatgtaatcaccatgatatgataattggcatggtatggttgtgatatagttatttcatagattgtggttattctatgagtatgatataagagttatgatgtctaaatatgatgttataattttttattagcatggacgtatttgatataattttccatgtatagaattatttacttattgttattagttaaagtataatgttaaaatacttaatacattaagaatatgatggtattgtatatagttgtattgttgtgaatttaagacatgtatggtgaatgttaatatgtgctaaaagtatttcgttatcgggcttttagctcactcccttacttttctcctacaagcaatatatagggacattgcaaataagtttgatgagctgggttagttctagtatatatgttgcgagggactatggaggaacaaacggtctagaacactagtgaagccttgattttattattagatagtaaagtaatttgagctcagtaggatgttgtatatttattttaaaaatacactcaactacttattattttttttttaaaatatgaatcatcattcacattttgcatatttattataaaatcttttgtgtattttcaaacaattttgagtcttttcaattaatgcatcaaaaatagtattttgtaaaatggtaaataccattttggacccttcgttttgcaaaagttacagattgaaccctgtgttttgttaaatgacaaatagaccctgtattttccaaaatagtaaaaaagggaccctgagcttaattt

SEQ ID NO: 162060 - DNA, 3953 bp, Cannabis sativa
tctctctctctctctctcggtgcaggcgaacaaccccctctctagctcacactttctctctagcacctccccctctttctcgttgtttctctctcttggtacaggtgggagatctgatggatttgagtctttgaagaatagagggagatctgacaagttgaggatgaagacaatgatgtcggttctagttttagacaatttggggaaattaggaagtatccttcattttggccaatcgccataggaggtggctcattagcgttgagccgagagtagcaagggcgagagaggcatatcaaaggagaaatagtggagatatttgggttttttgtttagttgagcagaagaaaaaaagaaaaaggataaggaaaaggggaaaaaggaaaagaaagagaaaaaagaaaagaaaaaaataaaaatagaatatttttttataatttatttatttttatatttttaaattatttttataatatttcaataattaatattacgtgtacacgtgaacagtctattgtggcacttaactaaggattttggatggaagtgtatcgagcaaaacggaacctgagtttagtaggttttgttgactcagaaatctaaactagactcctaagccacacccgctctctagattggcgagaataaaaaaagtagtaaagtaattaatgagagactctaatttatagtagttcactcttatatcgcgatagtaatggggttacgtctacttcgaatttttatttctcacaagatggtaattacaacaagtgtttaagtatcagaagcttcgaattctagagagaaagtctagagagagaagctctgacctaatgggtagttttctgaatataaaaaatgaactaagggaaatctccttttataggtgaaggagatccacaaaagtaggagataaaatacaaataaagtgtttaacactcactcgaaaagttcatcctgcttggttcaaaccctaacttcagaatcctaagtacatgcaaaatttataaggttcatatttccataccctatctgtctaggcagtaccaatattcccttggcgagaaaatttcaacataacactatcttagaaatgcaactctacgggcatcattttaccattaacaaatatcaaatatcatagacctagcttgaactaagcgttttatcctagatacgaaatagtaagattcaacaagcgtcaggatacttgcttggtatatgggtggaaaatgaaagattattgtggaaatctgcccaggaattgtgtacctagttaatcacgcgattgaagccggcctaatcgtcataatcctcgtcggactgggggtggaatagttcaaggtttaatggctatgccttggaaaacaagctaaacaaaagttcaagaaatactggatcaggcagtcaaagacttcttgcattcaccgctgggaacgatcgcaaggttaaagtttttctagaatacgaggctctggtttgatgtttgaagacaaaggttttgaaaagtctgaagtagtaaaaaagtagaaagtgggtttgatgaatctatttatatttcagccaaatccatgcaatttgaaatgaatggtccagatcctccctccaaaaatcacgatttgatctaacagatgggaagttgaaaagatgacatttaaaacttgctcgtggcattcatttttcatcattgcccgccttgagtccaacatgcattaaagaatgattattttaatcgacttgccattattgtcacttcttttgaaaggcacgccccctacgcgtgcctattgtcaacagatgtattaaagacgcaacatgtgtgccatgcccgtggtaccattggttcttggtcctttaattggtgaaatctcaagaagtacatctgtgatcctagcaatcaccacgtgtcatgaacttgtttttgagatccaaaagaagactgcaagctcccacaacttcaagagtcccaaaagtatgggggtaaatgttatccgtgtttttagacaggtgatgtgtcataaaaaggaagagataatctcattatctcactaattaaaacccctcacttaaactaagccacgaagaagcttcactgatatgggaataggtcaagaccgagaggtatccagagatccaccttgccttactttagcttcccaaacatggaagacttattaccactctaggaccaggagtggtccaagctcaaaggttgcccaagtgatactcggacgggtactcgaagggcctatcacaaaaactgaccgcccaaaaagatcttggacgtctaccttgaatacaaactcgaatcgcccaatgacagttatgctttttctgacacaagatcagattaaaccttttggcaacacgcgtccattgcgtacaatggtccgttattgtccagctgcttcgatgcacgagcacaaatccttccaaggagcccaacaattagctttttgcatgtattttacccccattagtgggctttttatagaaatcctaggcgggtcatgggcatgtccatactctccctttagcctataaatactcttttatttctatacaaagggggggatcataacctagatagtcgaagttttgttaatattagtctcagcttttttcttcttcaagagaaataataaatacaaagttaggatttatatcttaaacactaaaaatatcatatacgccttttaaggttaatagactgactcgtggactagggttaattaacacatgaaccacgtaaaaatctctatcttcttaattattattatttatcatttcttagatcttattatattagtttccaaaaatctctggaaacattaactattaagattttgtttaaataactatttttttttgtaagattttaaataactatttaaattttatacttagaaatataaaataaaaataagatgataattattttatttttttcaccttttttaattagtttttaaaataatatttaaagttcacttgttcaattgagaacactacactttttttttttttgctggcatattctctttaataatatttactttagttagattatttttgaactccccgtctcaaatgccccttctagggcgacacatcgggcaactgagttttacgggttttgttttcttaggttcaagtttcaggtgtgtagagattgtataccacacccactcgttgaggagtacatgtttcaggtttcaggtgcgagtcagtcgagactgggtacaggttggtctggggcaacaaaaatgggctttttcaattatttttttacattttcttttcttaaaataacccaaattttagagagggagggagggaagggtcggcttgaggggggagattagggtttcttttatctttttgggttgaggtatattaggtaaagtaaaaaagtaaaatttaaaaaaatacatatacttttaatagtgtattttgagttttgagctggtacttagatttcagaaatgttaaattcctctaacctgaatccggcctgatgtggaactgggtttcacctaaacctgccctacaatttttaaaatctattttcgagttttccaagttaaggtcagctgaatttctcaagtgagtagattttcaggtacaaatgttcatcctactcctacctaaaagttaaaacatcccaatggctaaaaacaaaagtaagtctcctatatataattaataaattaaattaatgtgtcctaaataaaacctctttatctttggaaagaaaaatgaactataaataaagaacaatgctacccaacaatccttattattattcttatgatgccaggctttataaatagtgtaaataccattttggaccctgtgttttgcaaaagttattaatttgactctctgttttgttaaatgacaaaatagaccatatattttctaaaatggtacaaataggaccctgaattgat

SEQ ID NO: 162061 - DNA, 2070 bp, Cannabis sativa
catttgatttcgtctactctagagatctagatatggtctctgcccctgcgcttcttgtgctcgagatcgagcgtgttcttaagcctggtggagttggagctgtgctagtcgggaaaggcggtggttcaacacaaaatggccttatcagatcggctaccgctatatcttcagtactgaaaacttccagcattgtgcacgccattcgattaagtaacctcactctagttgtattcaagaaaagaacggaaaatgctggatacttccagcgataccgccttccagcagactgcccgtctctcactaacaatagacctttcatagagcaaatggagcctcttgttaaggatatgcagattggtttcgagaaaaacttctcttatctgccaaaatttgtggacctttccatgaagaaacggttggtttatgttgatattggagcagggaagcatctgaactcgaatgtgacagattggttccctccttcctaccctgtggaacgcagcgctttcagtgtttattttgttgatcacaacacttcggttttgatgtcctatgttaagaagcctggcatcagctttgtttatcatcctggtctttctggagccaacctgaatgttagtgttgatggggatttggagccgtatttgggagatacaggtttcgattttctagcttggttcaaggaaacattgcaatatgcagattttgtggtggtgaagatgaatgccggaaaagtggaattgaaattcctcgcagaattatttgaaagcggggccatttgctatgtcgacgagctgtttcttcattgcccagtttttatagatggtgaaggtgcaaactccatggattgtatggacctgttcagtgaccttcgcaacagtggtgtgtttgtccatcagtggtggggaggaggtaactatagttccacttccactggtgtttggtgaaaactgaaaagcaggattggttctgtgtttaagttggcatgtcttaggtgtcatgaacattgaagttgccttatggttgggcgcttcttatctaaataagcaaccattttgatgtctgttctgtgctgtgttgtgttgtgtacttgtgatattttgttcgagatgctttgtagttaagcattttgaactaaataaaaagtgaaaaccaagctcacttatgagtttgttaataatatatattgtgtttgtgttgtgatatggatacttctattctattgcctttttcatttctttagcacataaataatgcgttggattccacttttagaagaacttcataagctgatcattatattagggacccatgcttaataatttacactttttttgaggcttttttctaattaagttatgggcatgctttttcatgagtgtaagcagcatatgcatttttttttgttgttgtttttattcaagtcatggacatggcatgcttttacaattgcaagcaatatataagttttactagagttattatgagcatgctttatattttacaaacaactacggtataaaacttaaaattgtgatatatattgttttcggaagaatttgggctataccaaaattatgcgagtatttaaataaagttagaatggttaaaagtatatgtgcgagtgctcacttagaataccgagtactcagaatatagactactaaatagacaaaaataaagagaaaaagaagagaattatagtggttcagttagagattggtctgtttagtccacttttgtaataatttttacttagtttatttgattggatcacttctttatatagaaagcaagtgtcatttaggattatataactgatcggttgtaaaatgtttttacaatagatgctagtatttaatcaaattaaacgtttaaagaataaatgaagaacaatttcattcgttcttgaattaagtgcagtaatgtatgcaacttgataagttgtgagtttcctgttcatattccaacacacgaacttggaggctctacggtgtttatactcgaaggatggtattgtttgaatgtttgcattcatctttgattgcatttgtcggacattatgcgttg

SEQ ID NO: 162062 - DNA, 3143 bp, Cannabis sativa
ttttcatcattcaatgcagatgctgttgttgttgtatcgtaactcaacttcgattcttcgtcttgctgctgctgctgttggttttgtgcctcagccaattgacatgttttatcaactagtttagtttgttgttcttcagtcacttcatactgtctttcctcagattcattgtgttcttcattcgatttatcattttcagttcgcttcaagcttattccaagcggctcatcaaccgcttcattatgtttttcttcggtttctccttcattacattctttgttcaagttttcactttcatttctttcaaccaaaacctgaggctgttgctcttcactcatttcattctgtttttcccccgcaacattaccttctttgttcagtgtttcggcttcttcatatttttctttggtgatttgttgtactatttcttcattgttcactaccaagcttgttctctgcattgcagcctacaaccatttaagaacacaatcttaaacgaaacttatgttcgtgttggaatcgaaatctaggcacaaactaattacaggtccatccaagagttgagttagctcacaatcaatgtctcgaaaacttactaaaaatcctcatatcacttacaagagttagggcgacactaaaaaaccgctaaacttgtattcaagtgttccgaggaggctcttaacgatcttctgattttctagaaaaaatttgtacttgtttgatttggctccctacagtttctctatcgaatgtataccgaaaatactaaataggaaaattgttcataaatttcctcaacaaaatgggacccctttaaggacaaaacatgatgaatgatgagatataatcctataacaccactcattaaatgtttttaaacctaagagtaatcaaagataacatataggaatttttaattgtttccccacaaagattacaaatcaaatgctattatttattcccaatcataacttatcaaataaccattagcaaaccaagcaatacatgatcatttcatggcttcttagaccacttcaaagtacacaaatcctaaccatgtccaatacacaagactttccctaaactaatagatagccaagcaattctaacaaagaactttagaaccatgctttagctagctactcaaattatcaaattatgaactgttacataattttaatagaaacatatgcaaagttccatttagaaaacaatcatcataaaggaattttaccccttgatggtagagtggctaaaccagggaaaacgaaaaaaagaaatagcattgaaatatatttttattgaccaatcagaattgcctgaatctaatcaaagggaagaaatgagtttggatattctaatgatttagaaaaatgtaaatattataaaattggttaaaaggagaatattatttatcgaacctgttcgtccatctataagaaaatgaaggaaagtttactgtatatcaaactattaggtatttcagtgtgttattagagtgcacacacgattgatcaaaggtaccgaaaaaatatgctaaaatcacaatgccaagcaaagatgaagcacatacctcattttctacatcattcacttgtctttctaacttagattgctcttcagcaatttcggtctcctcttcctttcctttgtcaacattttccaccaccgccacctccctctgcacttcttcatcttcccttttcttttgctcatcattctctttaatgctcacaccctgctcttcaattcgtcttcctttcccgatctcttcaactgccaccttcattttgctttgtgtccccactttcttccccgattttcgacccctttttctcttcttcgactccaacccctcatccggaagaatgtacactccatcattcacaaacaaaacctctcttctcccacaaagttttcttaaataatgccttagaaatggaccaagtgcaaaaggcataacacaatattccctctcaataaactcaaatatttcctcataacttgatccatttccttcatttaactccattattgccctaaatatcatctgttgtttcataacacaatcaccattagcattctcaaaacctaaatttatccccaattgcctaaacctatctaaactacctaaatgaaaaccaaatcaacccaagttcaacatctaattattacattgggcatttaacaaaatgcataaagttatgatcttttaaggtatgaaattcacatgaatggtaaagttaaagatctaacattgaaaaccaaaataacccatgttcaaaggttggatttttctcacataaatggtaaattaacagcttattattacatgggcaattaacaaaatgcataaagttacgatcttttaagatatgaaattcacatgaatggtaaacttaggatctttaacaaataaaagttagtatcgaaattacaagaatgtgaaataagagagattagattaccagggaatatggagggtgattgggtgtgtgaaatttggagaatggagtctgtgacgaactaaccaaacctgtgagcatctccattgcacgtttcagtttcaatttggcattgggtttggagttttccattgtttgttctttctttcttgcaatggagaagagaactgtatatagtatatctatacatatatagaatatgttatcactactaaataaataaaagtatagaactatagatataaaaatatgtaatttttgttgtagtgtagcctaattgtatcacttgtttaattgtagttttatttctactcaaatgataaatataaattaaattaaaatttttttaattttaatatttatttttataattttttttaaattatgtatattttttttctaatagaatttggtataatttttttattttattctttttataatatttaaatataatttatttttatttaatagatatattttaagaatattaattttatgtaaaataaaaattattaaaataaagtgtatttataaatttttaaactgcaaataaattattttattaaaattctactttgatggtgtgctaaattatgatgcaaaaatcttacataatcaaaagtgatctaaatttgcatcacaatataacataatgcaaaatttacatcacaataa

SEQ ID NO: 162063 - DNA, 780 bp, Cannabis sativa
atctaccgaggacaaatacatatatatatttatagctataggtaggtcaatgtgtagaatgaaaattgcaattagtgagtacactccagagtaattataattagacaatttgcgaaaaacttaatatgtctttatattttacttataagatcctatatatagtttggttaggtcttacaatttgctttgaatatgagattgttcctaaaacaatatttactagaatttttatatgggacaatttgtaagggaacaacttgttgggttttgtatattgaacaataaaagtgattagttatgctatttactaatttcatattaataataccaacagaacagtaattttagttaagaaaattatctcatatttagagcattgtcatttagtattagaaaagtttaatgatatatgaaatttattttacgcagagaacatgaaaaaggaaaagcttgcgagtttgttggatcatattggtatgccatgttcagagcatcattttgtatagaaaagtttaatgaaatattttgatttcatgttttagtgttgttaatgcatagccaacttgtgttagtagctaagtgcccttttatgattgttacttcatttattgatctgtgttgatttgtggtgggtatttggggatttttatttattcatacttattgtagagaatttaaattttcaatcagaggattgaggcagcagcctaatagtgaagctcctcatatacatgtgatggtcgtccatctccattgctgacaacttggtgatttttctat

SEQ ID NO: 162064 - DNA, 3332 bp, Cannabis sativa
agagagagagagagagatggaattaaggttagtaacttcacaagaagaaaaaaaaaagaaaaaaaagacaaaatatttttttataattttaaattattttttataataatttaataattaatattatgtgatcattcaaaattggtcatgtgtggacactccactgtgttacttaacaaaattttttgaatggaataataagtaacaaaatagaatgggagtttggaggattctactgtcaaaaaattaatttatgtggtgtgataaattgtaaattcatgtgttttaccgctaattaaaaataacgaattggatgtaaatatttctaaaagaaacatgaattgaacaaatccataggtaaaatttcctatgtgagatgcatttccttgaaaagagtttttgagaaaaggcctctctcaaccaaatggtcccagaagatatgtaggatttgattgtcactagcataagaatcgttcatacttctataaaggttgcgatttatcatcaaccttctcttatacatttcatctaacaacaccatagcagcactagacttctcagctttcatgttggcataagctagagtggtgaatatgacactgtctcctgaaactttttgcccttgcatagaactgtataacttttcagcacaattaagcctttcccttttacataaccttctaattaaagctctgtataaagaaagatcaacacatagacctcttcttgcgaattcctctgggagttttgcaatggcatcttcattatctttattacagaaaccatctacaatccatgaataggtgcaataactaggggagaatccggcatcgagcattgagaacaagagttctttagcattctccatatcctgcatcttgcagaatccatgaatcagcgctttgtatgtgaactgatctagctttagtccagcatccaacatcttctccttcaccttcattgcagacttcatatctcctatcttgcaataagcattaattaaagtattacatgtaatattgtctggttcaacttttctttcattcatttcaaccaaaagtttatttgcatccctcatcttgccttgcttacacagcatgcgaagaatcgaattataagcaactactccagggtataatcctttggccttcattacctcaagcaatcttaaactttcttcaacatcattctctctacaatatccatctactaaagttgtgtacgttatatgattaggggcagcacctttgatttctcggaaaagcctcacagcttctctcatcctaccttctctacaaaagccataaatgagtgagttataagttacaatatcaggactaacacctgcgctctccattctatgttgaacagacaaagcttcatagtgcatgctccttttgcaatacaatgatatcaacgtgttataagtgaaaagatcaggaaaaatacactttgactccatctcactcactaaactctctgccttctctagatctcctgaattgcaacaagcgtgaatcagcacattgtatatgtgaatatttggaacaattccaagtcgaatcatcttcttgtaaaccttccaaaccaaattagttaatttatccttgaccagagaattcagaagcacagtgcaggctggcaaatgtggcttaagcccatgtaacctcatatggtcgaaaacctgaattgcatcttgggtcatcttcatattcgcgtaaactatcacaagccaactaaatacatgagaatttgcatctgagtcaccatgggtgctgctgaccaaggcattcaaaactgaaggtgaagacaagaaatctctctgggcaacttttccaagcagttcttgtgcagatttgaactgtctgtgccttgttagaatgttaatcatagtccatgagcactgcaaggaatgcttgtaatttgatttgggtattgattcgacccatttgtagaaagcccaagtgggagaaggaccatagccatgaagtgaaagttgcagaagtatttggtggatagtagttgagttgagactaaaaccgaccttgggattaaagaggttgttccactggccctttattacaatggcacaagcacccagaatcaattgtgtctcaccgataggacaagttaaaccaaccatgggcacaatcaagctcacaatggacttggagagtttgcaagacaatagtagtctgctatttgtttctggcttggtttcaaaagtgtaatcactttcatttctaggaagctggagggaaataaccttgaaaagaaatattgatcaatattattttgtgcagacacaaacagaaatggatagagatgaaaagcttacaaatggaggaagatggtttggaaacgagctcacaaatgacaatgatattgaagacgaatgcatatgataaatacaattacatctctattaaaagacaatttatgaagaaacaatacaaatataaagcattttcttatagctaatagacaacatatttccaaactagtaacctagatatgtcttttcaacactacaattacgagagacataaagcattgcaacttacaaaacattagcagaaacatggacatattttactttaatgtaattccaagaaatagaaataaatgattctgcaagcaagccatacgtatctcatgttcaagcaagccatacgtatctcccagtaataactagcttaatccaacttattaacaatgagatagtgaattgtaggaacacaatctaaaaaaaaaaaaaacatgttcaaggactccacattcatcatattgctgtttaatgggatactttataactactcatacaagtaatgatgtattgagagagagccttaatatgggagtttttcttgttcatgattgcagtatattggaaacaaatgattcaagagcctttacggaacgattttgaagctggcgacaataggaaaatggacttaagtgaatgttcaaaagattgttaaatgttgagaagaagattaataacattggagtttgacagttatgaaagtgtcataagattctcgagtatttgaacaaatttggggttggttgtgagttgtaggaaattggtatgtgttctgattctagttgaaaaaaagggtaaaaggagcataacccagataaaaatatacagtaatatgagccacacataaagtgaaatcatctagacatctgatgaggaatttcttcgaacaggtggcgtgcaaatgaagccatgaacacaacattagccaaacaagtacgacacttgcaattcagcggaacacttaaagacgcatgaagagcaagggtagaaacaaatcataccttgg

SEQ ID NO: 162065 - DNA, 1793 bp, Cannabis sativa
tagacaatgtgagagcaaactttcatgaagccctcaccacttctttttcagtccctaaaatttacagcaaactatatttagagttcaaatctagcttctcacatgtatagagtagaatcgaatgcatgttcatcattggaatctcaaaagtgcaaatcaaaggggctagataatcattgctcattaactttcaaattcgacaagaatcaataaacaataatttttcctctctaagaactatttcatccactctctaaatttcttcaagttcttctatttctctgtttttttctactttgtcctacatcatcaaagcttcaaaattactaggaaccatccactcaaaatcatttcagctaacaaccagctctaaacagtagcaacactacaatgtaagagcagaaaataaatagtttccaactcacatcatacaccatgaggagattaagtattaccattttacaatatataccacaaaattgttcatcggcataatcagcaagtagtattagcactgacttttccagcaaaaagaagcctcactgtaatagtgaagttcctaccaaactaaaaaagaacaactccaaaagctgatgtaatgtgatgaatcgcacagcagcactaccaaactaaaaaaaaaaaagaacttagcaaagatactgtttgatttatttttaccatacaatatttggagactaggaaattataacaatctccatgtagttacccaggagggactcgaacttaatctactactgtttgattgaaataaaaaagtgaagcactgcaaagaactaaattcacattatcatcatcactaaggtacattgaattgatgggtacagcttatcaataacctaactcaaaaattttaaaaaggacaaggaaaagttgtcaatcagacctataaaaccaacaatcaaacgaaagaagtactcgaggaagcatttacctttcagctcaagctatgcaacctacttcaataagatcgaacaaatgtactaactaaccaaaaggtaagaacatcatcgaattaatagaccccttaccaataatcatataaaaaaacccatgtctcaatctcaatgtcactataaaccataacagaaccattattgaaaaacagttgtgcccggataaaaaaaaaagtaaaatccccattaacaaagcaacaagtatacaacataccatgtaattagtgagagaagatttgccagcattaggggcaccaactatcccaaccgacaaggacttctgatcctcctctttcactatcaaatcctggtcatcatcctcatctgccttctccaaagccgcctcgagcagggctttggcaagcactcttcgtcttttctcttcctcctcctcaattttcagcttccctttcttgtggggttcttccccaaagatcacttggtcggctctcgccctgtattttttgtcccatgtgggttgagccttagcatctgaacccaagctcggtactgtaaaatgactactgtcgaaaactgagtctgcgccattttcagtgtcggaaaagttggtgttgtgagtggggtcgtccttttgaggttgggcagcgtagaatctaagggaaacgttttggtatttcggggaaaggactgtgagtgttcttaaagctctcaaagttttcattctcagcatctatggagtgagcatatggcctggccaggcctcaggttatgcttcttcaaagaggtgtatactgtaaaatgaatggaggcttatggttggattgctgctgaggttttagaccaaggggtttttcctgt

SEQ ID NO: 162066 - DNA, 3987 bp, Cannabis sativa
ttccaagggatattctctgggtctgacagtggtcagacgcttaattgtaatcatatattccatgagaaaatctcttctacggataaggaggtgctcctcattgtccctactcatgaggaaatccgaagtactcttttttccatgaacaatcataaagcccctagaccagatggaatgtctgttttgttctttaaacactattgggagtcggtgggggatgacttctatgaagttgtttctgacttcttcaggtctggcaaaatgcacaaaggtgtcaatgctacgaatattttccttatcccaaaagtccagattccgataagaaccaaccactttaggcctatttctctttgcaatgtgatgtatacaaggtcatttttttaagatcattacaaatagaattaagcctattttgcctaatcttatttgccccactcaagtcgcttttgtgtcgggaaggaatatacaagataataatgtgatagtgtgggagattatccactcgttcagctagaaaagaggcaaagaaggttattttgccataaatattgaccttatgatagcttatgataggctgaattggaaatttattgaccatgtgctttcttgtcatggaatacctatgaagttttgcaattggatctcctagtgtattacagcaaccaccctcaatatttgcctcaatggggggcggtgggcacaattaaacccttttgtggccttcgatagggggatcatttgtctccttacctatttatttgggttgtcgaagttttctcaaggctattacaagatgtcctctacaagaacattattaagggtataaggctgagtagaggtggttcggttctctctcatattttctttgctgacgatttaattctggtgggcaaagctaatttgaatgaagctataggctaatggcattgtctagagaggttctgttcttggtctggccaacaagttaataaacttaaaacttcgatcttttttagtaaaaatacttccagtggcctgaaacgggagattagggaggctttgagaattggttcaccaaaaggaaatttaaagtatttgggccttcccctattcagataaagacaaaaggatgttgatttcaatttcattatggataatctcatttctaagttgcaggggtggaaagcgaaaaccttgtctaaggcgggtcgggctactctcatcaaatatgtgggcttgtcaatgtcgttgtatgttatgcaaactattaggatctccaaccgtcttgctaccaaaatcgataacatggtgcgggacttttggtggggttttgagaaagacaaccccgggctttaccttaaagcttgggataaactttgtcttcccaactctcttgggggtcttggattcagaaaaattagagaaatgaaccaagcctttctggctaagtgggggtggaacattcttaacggatgtcagtcactgtgttctataggattttaaaagaaaaataccttaaaggaaaggagttcctttactatggatataaagactctgattcttggttttggaaaaacattgttaacaccaagcccatcttaaagaaaagtgcttgtaaattggtggtggatggtagtgacacacgtatttggggggagctttggatccctcacatgaataatttcctccctaagcctaataaatctcctgctatggaccacagtattgttgcaatgcttttttttctaatgatggtgattgggatatccacaagttgaattgtctttttgatcgtgagactgcgtctgtgattttaaaaggaggtgctcgctccctttggcacgagtaaagataagtgggtgtggactcttgaaaatgatcgtcgtttctcttgcaaattttcttatcttactctggccttggaaagagctcctcattgtgaggttgctcccttactctggaataagctttggaatagtaaagtgttggagcgacataaggttctttggttgtgtattctttcaagtgccctccctgtcaggtccgtgataaggaaaagatttcctattgaggatgcgagttgtcctttgtgtgggagggaggaagaatctttagaacacttatttcttacctgtgatgtggcttttcatgcctggggatcgtctccttagggtatttatccggtccatgacaccgacattcgtatgtagaattgggtcaaattcatttgataccttaaacacaaggggattgctgctgaagagattttcctgtatgcgtctcttgtggttgataccatctggcgcactcgcaacgacaaggtacataataactatactgttgatgtgaagaaatgtattgactctattcgaatttcttttgcaaatttacatgctacctttttcccttcccctatcccatgcctgaaggagagctggtctcctcctccttaggattggatcaagctgaattgcgatgttaaagtggggcttgatagcatgtgtacattagttgttgccaggaaccatcttggtaggttggtttgggtccaaacggctcgagtggatttttttttatgcactttgcggggaagcagcagcttactgtttggctatttcagctgcgaaggatattgatgccaagtttgttattgtggagagcgactcgagggtagttatcaatcctctaaatgggaatgagtctcattgggttattggaaactatgtctctttttgtaatagttactctcctttgtttactagttgtatttctctaatgttagtaggacttgtaattttgctgcccataatgtggctaagtgggtgtttacccacaagagatttggttttattacgttatcaaccatcccgataaacatattatgtaatgattgtgaggtctaactggttctatttataaaagtacgcttttcttcaaaaaaaaaagagagacaaattaaacaacatgttaattcttcttaatacgcaagaatactgaacttcgggttccagtacacgtgtcatgaccatatttactgcttaaaaaatggggataacaattgtcctatataaaaagtgtttttctttttaaaattttgaaacaaactttttaatcattactatttttggaaactgcatcagtcagctcttgcattaatccaagtaagctatttggggtttagacagtttttgccttcccaataaaaagctaattatgagtttaagcaataaattcttgtcctttgaactgactcatgagttaagcaccatagatttaatttcactttaatcgtacgatgctcacgaggcagatataagtttagcattttaatccttgcagccacttccgctattgttaagacttatatcctcatttctcttctgaactttgtgtgtatgccctctttgtctctatgttatttctttcgaattttagcaaccatgttttcaaacctaaaaaatgcatcattctcgacccttggattcgtcgagctctagggaagaactcatccagtccatcattaatttctcatcacggtatgatttcttcttcccctgtattgcattttagaatatattccttttcctaaattagtgattttgatagggcttttaatttggttcgacttaacttaggtttttagtgatttttaagatctttataacttcgggttttcattttccaaaatttttggagtttttttttataccttttccctttttcaaaaggaaaaagtgttttcatttgactccaatcttgaaaacccaaaatttttggatcacaaaattcacttttttcccgctttaccctaaaaatcgaatcctaaaatctataaaacaaaacttgagaaaatgatgagaaaatccgtgaacaccctgagaagctaaataaactaaatgtctctacttgatttagatgattcatagatgaaataattaagagtaaatgttcctatctgcgagagccgagatgttgcctagctcgagcctcttcatctaattaaatacc

SEQ ID NO: 162067 - DNA, 3766 bp, Cannabis sativa
  modified_base (3728)..(3729): a, c, t, g, unknown or other
aaaaaaaaaaaaaaaaaaggtccgccatgagtgtaatatgttcaatgttttcaattttttttttttttagataaatcaacaagtttattattgatccacaaacttttacatttatattacaaagaaagagcatctttgcttagaaagatctcaacaaaactatttgtacaccttttacaatttttggaaccattctctatcttcttgaccaatcttttttggccaaactaaacatagagtagaattagtttggccaaaaaagattggtcaagaagatagagaatggtttcaaaaattgtaaaagttgtacaaatagaatttcatgtggttcattatcttcaaatttacttaagaggacatacttacttccaattggccgtatttactgtattgacactaatgatgtccaatatttttataggtagtactttatgattggttagcaatattattttttaaaatttatctttttagctatgggacttactacttaattataccaatagtagtatgataaaaaaaaaaaaaaagacacgagtgcgcgtgccttctaacaatggtcacttcttgattgaatgatagcaaattttattaattaagaaaataaataaatgaaaacgattcgtacacatttttctttcgtacaatattacaacaatgcattatagctaattaaatacatgtccaacaacaacctatttagtatctagtagtatttagtatattaattattaattgaaattaattttcgtatatataatcttaataaatataatatatagatgagaatgagattaatattacttacgtttcttgtaaaaatgtcatacaataaatttgaagttggaagttgagtaagtacgtagtactaacaatagtcatgttgattacatgacttggtcgttctaacaatactcctgaaaatgctgaataatatatatatatacattttttgacaactgattaattaattgttacaatttaatacaaggcaaataatcactatataccataatagttactgtataatatatgcaccttacctaataaaacaatgtactcatttatattatttacacttagtaaaatccttacccttaattgcatatatatcctgatcataactatttatgattttaaaaaatgtacgcaagaaacattgccatataattttggcttgaattgtgttatatatgtttgtaaaaatcaataatattaattttggccatctttatcagttggttaatttgtttgtaaatttactatatacaagtccgtttgactttgttttcgtaagcttttttttttttttttttacttttagaattaaaaataatattctaaaagtgtttgaatataaaataattatttttttaatttaaaagtacttttgggagaaattataaatatcataactaattctcccaaataatttactcaacaaattaaaattaaagtaatttatataattcttattttacttacaaaaaattttcttttaaatgattaatatattttttttttactgaaaatatcaaaatattttgaaaaatactttttattaaaaaaaaaaaaaaaactacatatattagttatccatacactaaaaataaactaaaaattatactttttttttttgagaattaaaaaaaaaattatacttattaccttatatttcttgttgtaagtaaaagaaaaaatttaacaaagactttactaggctataaatttattggacaaaaagtaaataaataaataaaataaaatatattggggaaatttcatactcaacctatatatatagggatcaaaccttaaacaataatgtattcacactatattgatcttaatttcttaattaaggtttacaaaaaaatggtttgtaaggttttcattcttctcactctcttactcacggttgctcttgttcccatcttttcagatgcagcagccagagaccttgttgagacttcccctataaatcaaaaagctggtcagcatgttatacacaaataatttatatataactctgcaagttatatatagtatatttatagtcttttttataaaataattggaaacttgcatgatcaattagtttaaatagtaaaatgtagtactatatatatagctaggtggtgtactagtagtaaattttgggtgaattaattcttttaccagtacatatacatttatttcaaggcaatattagacatttataaatttgttatattaccatttatactaaattttttatgactattaattaattacagaaaaaaatgagaacagaaatgtggaggaccaaaaatctatcattattcatggtgttccacctcatgaggggggatatccaggtggagtgattccgggcccaggtggagtgattccaggcccaagaggttatccaggtggagtgcctcctggcccagggggttatccaggtggagtgattccgggtccaggtggagtgattccaggcccaggaggttatccaggtggagtgcctcctggcccaggaggttatccaggtggagtgattccgggcccggggtatccttattatccaggtggtgtgattccaggtcctgggggctatccttatccaggtggagttattccgggtgcaggagtttatccagggggaggatattatcccgggggcatatttgggtttaataattgttactatgggtgctgcagggttagctacgatgggttaggctgtgaaaggtgttgcggttcctatgctgaagccattcatgctaacaacaactgatcacccagaaatcaacatatcaaaatcatcatcatatacatatatatgtttcaataattaaccaataagcctagctatatgagaataccatcacaatgtgatttatatgaaagctagcttaattgcttattatactatatttagatcaatgtactgttgaagtgttttgttcattgttcaataataataataaaaaaatgtatttatattatagtcggagaattattccatatattattttttttaacattttttctttttaaatttacggtttaggtttctaaagtggttgcagcgctagttgtagtaataagagtttttatacgattttttgttgcaatttaagttgcaacactagttgcaatatgagttttacgtagaatttcgtaaatatgtaaaaaaaaactattttgaaggataaaaataaaaaaactcctaatatatattgaaggcgctcaagaacataattttggttttcttaaaaagtataactaattaatgtgctatattttttttttgtttaattttgaaatgagaattcttatttggtactttaaggtaattaatattatccataataacaggatcttatttaatttttaataaataaatttttctgtataatttttttttatatatatatgtatatatatatatattttgttttaaatgtgatcactgatatggttggaaattaatgactgaaagttgacctgtaagccaacttgattggtatgcatctaatattgttgaccttcaaccctttgatcagcagcatatcatacgttatgaatttccatccacacaaatatggccaacattagatttacattatttatggccaacacctactctaaagtacgtagctaattagctatagttcactattgttacgaatttttctgtttattacgcaagtgtacgtatcaagtagtatctcacgcaagtnnggtcgaaccacagggaattggattgagtactactaaa

SEQ ID NO: 162068 - DNA, 3205 bp, Cannabis sativa
  modified_base (371)..(372): a, c, t, g, unknown or other
aactaagcggtctttacacatgggttatcatttttggagtgccatattagctgttcactagcaatagaaatatgatatgaataattagcaatttttcttcatgaattcttgacaccacatgatcatgctccttaaatatacgatttgttaaaaatttcttttgaacttttacatttatagaaatttagtcattctattaggttctgtcttattattcttcttaaatgctgacatgtctttgtaaattaacaactttgcctcctaaactttgacaactattaaatcgtacctctctaaataaaaataaaaaagattttacatcttttttttaataaatattaaaaaaatattttgaatgattaagaaaattnnaaaagaaatcaaaattttaaaactaatcaaacgatttaaaaaaaaaattgataaatcaatgaattgtattgcataaaacgatttttttacaacctatgcgcacccaaaaagggtcgggatctatttacaattgtataagctttctagacacaatttttgtataagatctacaatgcaaaaaaccatactctatcattgctcttaatctttttgggcaatactctttcaatccgagacttgagtgtccactttctttcttctattattcgatccgggttaattcttgatttttgccaaattacatcatttcgagctctccataggttgtacaccagacctatgtagcaacagtacgaacattcttcttaaactttgacagcttggatctcccaatgcacctgaggagctgctggagattactggtttgggcatgccaatccagccatttcttcacttccagcaaacactggccagcaactgagcattcaaaaaataagtgctgacatgtttccatctgcatattacacaagcagcaaacaccagtaagctgaacaccaaatcgcaacaatctgtcctgtgttttcagcctattaagcatggccaaccaagctataatattgtgtttgggggtgttgagtcttgaccaaacttccttgcaccaatgttttcgagttatgggggatagtagcaagtcataacctactgagatggtgtacttctgcttctgaaaaacagtaggatccatcgaacttctgagctgatctttgagagctaccatcttcttccaataccagctagagtgtattgaagaagagtagtcccaccaatctttatttttaatatatacattgtgaacccatctaagccataagctctcctacttatttgagatagcccaaatgtacttacatattgcagctttgttccagatttctaaattcttgattcccaaccctccagatgccttgggttgacatatgctattccaagcaacagagcctgcaccttgtaacatagcatgacctttccaaagaaaagccctacagatggcttcaatggatctcaagactttctttggaagaatcatcatttgactccaatagcctgtatagcaatcagaactgagttaattaaagtgattctcctagcaaaggagagattcctggagctccaacttctaattctagcagtcattctctcagctagaatttcacattcttttcctgaaatcctcttcccacatattggtattcctagataggtaaaaggcaactcctgctttatgaaccctaatatctgcataatatggttcacttctctaggcttcatgttactacaatatatggcagttttactggcatttggatacagtccagatgtaagagagaaagtttttagtgcctgcaacatgtatagaatactcatgaagtctccatgacaaaataaaaggacatcatctgcaaaagcaagatgattaagtttcaatgcagaacatctatcatgaaacttgaatccctctttttccccaactttcttcatcaatctagataagtactccatgcccagaataaaaagtaagggcgatatcagatcaccttgcctaattcccctcttggcttcgaagaaaccatgtagcgatccattgaacatcaaagagaattttggagttgtaatgcaattcataactaaatgaatgaatttctcagggaagttcaagccagatagcatctcttctagaaagctccattcaatcgtatcataagccttttggaggtccagtttgatcatgcaactaggcttgtttgcctttctaccatagtgtctcactaaatcttgacaaatcaagatattatgtcctataaatctccctttaatgaaaccaccttgagattgtgatattattgaagggaggatattattgattctagaactcaatagcttggttgcaatcctgtaaatcacattgcaataagcaattggtttgaaatctttgacagaattaggacacttaatcttaggcaccaaagtaattatggtagaattgatttccttcaatatgttacttgattccaagaatgatttcatagccccacatatctcatttctaataatctcccaattgtcttggtaaaagctgctggagaagccatctggacccggggatttgttcccaggaatactgaaaacaaccttttttatatcatcttcactgaactcctgcaataaccaatctgcctgatctgaagtaaccagaggacctttgttgagaatgctcctttcaaccttcttcctgtgagctttattagcacccagtaggcttttatagaagtcaagaaaagctgctgtgataagatttggatctgtaattctgctgccctcttgattttcaatggaaagtatgcgattttgcctcaatctatgcttaatgcaagcatgaaataaggcagaattcgtgtctccatcttgtatccaatccatcttggctttttattttaaaaaggaagtataatcctgctgtttttaaagcaatttctcacgggctgctttctactgctggtgtaaattggcctcaagaggctgctgctgcaactggttttgaaaagcttccaattcagctttggcaacagaaagttgcttctttaaatcacaaaatccttccttattaatcaccttcaatctatctttgaattgtttcagcttgtagacaacctgaaacattttgctactcgagattctcaagttccacacttctcttaatttgtcatcatacttaagatgagatttccacatcctaaagtatttaaaaggcttccccccccccccccaaaaaaaa

SEQ ID NO: 162069 - DNA, 1374 bp, Cannabis sativa
tgggtccgccactgtatggtgggatgttgtaaattgtttggtggatataatataatcttattcataaaaaaaacttagtcgatgacgtggtcatgtttgcttattagcaataatcttatggctaacattaagcattttattgagtccatctctttttgttacgcagattatgactcctgtttatttgcctcttccgaggatgttacaacccttgttggtcaagattgcaatgttaaagttgaaagggacactgtgtgcattgtggctattgccagggaccacaacgaatctgttttgtgggtggttacaaacaagctcaatttctctgattctctcattggagaagctgcggcttgtctgttagctatgaaaacggttgtctctttacagcatcctattgttttggtggagagcgattctaaaatagttatcaagattctgaggggcactcgttccaactgggagactgacaactatgtgcattattgtaaacacctctctactaaattattatgttgtaatttttcttttattcatagatattgtaatttcgcgacccataacgtggttacgtgggcttttgcaaacaatataacttgtatggtaaagctatcatctatactagacaatatcttttgtaacgatgatgaggtttaattttagttttaatttataaatgcctttaaaaaaaaaaacttaattagattgtcatgctcatgcatgtgcgtacgttcaaacttattataaaagtgatgttgatttattaatatataatagaacaacattttattaactttttcatgactctaggtgatgatcttattaatctcttcgtacacatatagaacaaattaatatttaagctctgttcagtttgacttagaaaataacataatatatataatactacttgaattctcatatgtaattaggtatgatttgacaaagtttatatatatacaatcttgattaattgtgttaggaatgtaataccaaacctctttaacatattgatgatttgagcgcctgtcccaatcagactgttattatgttattgtttctcattgttcatttcgactgaacatgagtacaaaatcttcatttttgttgtataataaatttagactgaagtcgttttataaccatatatacacacaacaaacattataaggatccataaatttaattatatatatatactgttaatatataatattaatggtcgttgattttgtcccatatataatataccgaaacttacaaaaatattgcatttttaccaaatgttttcaaaaatattgggacacggcaaactttatatttttactgtccaagcccatttttatttcttttatactgcccaggcccaatata

SEQ ID NO: 162070 - DNA, 2199 bp, Cannabis sativa
aacaaaccctgagtttactggctcggtaaaagatcagattggcactgccttttggttcactttctcctctctattctttgctcaaagtaagttattcactctaactcagctcaaatctcaccctttcatcatcacatgtagaaatgtagtgttaaatatatataaataattaatttgaaagcgccttggtgcctcatagcaatgttcaaaagtaaaagaaaagcattctagaaatttcttgttttaattgcttctaaatagagatgtttctcaaattgtttcaggggaaagagttcatagcaacattaccagagttgctgtcatgacgtggttttttgtggttttcatcctaactgcaagttatacggcaagtctttcatcaattctgactgtgaaaaatcttgaacaagatataaatattgagtggctaaaaaaaaccaaccagaaggttggttgttatggtgattcatttgtaagaaattacctggaaaatgtgcttcaattcactccagataacataaaaaatgttccagaggaagatgattactcagagtggtttgataaaaaattaatagctgctgcctttcttgaactcccgtaccagaaagtttttatcaacaagaactgcaaaaaatacaccacctcctctatcacgtacagatttggaggattaggctttgtaagtactaagataacatagtataacattattagaaatgtatacgtgaatgcaagtagtggttgtgctgtgctattttcaaattattaacatgtgttgggacacatttcaggtattccagaaggggtctccactaaccaaagatttttcaaatgccattctaaaactatcagaagatggaaaaataacagcactagagaaagaatgtcttacaccagatgagtgctcatcaacatctatagaaactgaacgattaagccttaaaagcttttggggtatctacctaacatctggagtcacttccaccatttgcttactcatatccttggttcgcctccagcggaactaccggctccatcagcaagcaaatggtggttgtcaaagtataaaaacaaacgcttttggattggcaaaatatttctataacgggcagcacatatatagtccaggaagagtttcccctactactactactactaatgtttctaatcatgacatgcctaatctgatggtagataattcttcaagctgggattttgtgaacacatctaatgagggtttagaccatcctgacacatcttcccctgctacagttgaaatcacaactgtttagattcattattttagaattttaggtgtgtataaatctcattaaagatgtaggagcataattttaagggaaatgtagatgtataaatatatacacggttgaagatacctatttttattacctcaaattttgctgaaaattacatgtaaatagaatagtaaataattcagtcattcttcatgacaaacaaacttgcaagctcattgactaaattttaagatgagatcgatcctttaaacctaagtacaagtaatgtcatcataacattaatttatcccaaaaatatgaagttgctgttgaataatttttttttacaacttgagatttttgcttcgaagctaattatcggattcaacaagttgttatattcctttaattgaaactgtcaacatttcagcatctgaaattctgaaaaattttgtggttgttaatatcagatcccttatgtaacctaaacttcggaagcaaaatccttcggtatgtactagatgacatatttaccctcaactcattacaacttacaacagaaaagaacacaatacataaagactattgaccttaaaaagtgatcaacgacagcagattgtatagatttgatgcttgccacgtgttacacaaataagaataaaaaataataaacacagagatttattatagaggttcggcccccttgtgatagcaggtaataacgtattccccttttggttgtattgatacctagaaataatactattcagatcgctataggtgggatctgatatagctatctataaggatacaaaatatgaatcagtaggcagatctctaatgagagagtgagattgccttagaggcgtgtgagagagatgaagagaggagagagagtcctattgggcgtgagcaagacacacacacacacacacacagagga

SEQ ID NO: 162071 - DNA, 2846 bp, Cannabis sativa
tcggtctaaagagtgttcatcacatttgggtctccttgaaggattggagggctctgtatccaaaatctctcgtacagtggttttgttctgttaccatccataagttgttctacaagaaaccctggaataaaagcaattggtaattgatatgaaggtatgtcaagagatctttgttgcctcaacctcttaatctcctcatctttctgttgaatccaggcttccattttcaatgaacatttgctccaaatgtggtggagcctgcaatgtattttcataaacacctccatcagttctttcttagcctccaactcagccttgggaataagagagatcccaatcattccaactgccaacagtctcgactacatcatcctaactccttatgtttaaccaggcatcaatctatggggaaagcttgtgaactcatgagtcgactcggttaggcaacgatcaaaattttaatctacttaccgcttacagtcaaacttaatatacactgattaagctatcaatctgttaatatgctccttatcatacttttcgaactatgcataataattaaaagtactaaaacacataaaggcttaccgaagcaagagtgaagcttatctctgatgacgattgtacatatcttgatgatcttccgagaataacctggaaactctaataccaaattataatgcccaactagtttaggcaaacaataatgttttcttaattgacgtgaacactttcattaattgaagggtttattgaaaattgtggttaatttaaactttaaaatcaacataaatttattgaataaacatactttacattactccaggatctccttaaaagtttacaattatgtttaaaatatgtttttttacaaacgatactgcctagcaacgaacaaaaagtgagcctagactattctgaagacccaaacactccaggtctaaccatcaagatattcacaatcttcatcaagttttagactcattctagtttaattatggctcttacctgcgtatacacgtaataagttcgagtcgacaaacttagtaagaatagcataaataggaagatataagcagatcataactaggtgcccatacacctaattgcaatccatcctccatctaatgtttaatacgtctggaacatttgtacaatatgacctagcatgtatccataaatattcaatgaaactctatgtatatcgataccactcttactgttatgtcaaactaatggctttaaaattttactaaaatatatcagacaatattcattgtagctttatgtacaccaatactgctcatactgatatcctatctaatagacaattataaaacatgtacaataaacatgtaaacatgcatatcattacactactcttaccttgattccaaatgcaagtatgttggtaactgtgagtggaaactgctccttgaccattgaaggccctaagttacaatttacataaaattggtaagtgacccactaaattacttttggggacttaaacttaaaactaagagttttcctatcgatgaatagcatggcaataccctaagtatcgataaaacaacaaaaccaagattttggaaatataccttagaaaacagcagaccatttttttttgaggttttgaatgctaaaattggtagattgtttctggaaaaatggtctactatttagttttcctaaaaatctcatttttaactcaaaagtaccccaaattgaacacaaagctccaaaacacctatttgagacataatgaacataacccaagtgaaaaatgcaacacccatattttgtaataaatttaccatttttgagctaagtttgagctttaaaactcaaaactagctcaaactcaactataatcacaaaaccagctaaaaataacttaaactaactaaattcaacttaacaaagtatttcttaaccatcccaatctcatacagaaataattcctcaaaataacatgcataaacctagcttctttaacaaaaattcaaagagaaagaaacaagagcttaccttaacctttctcttcactttctatattgaattcccactgaaaattcaaagaaaataaaattttcaagtctttatctctttcgtcctagtcatccataagaggaccaaacgaaaactagaattttcctcctttttcataccaaattcagggagggttagctaggaaattcataggcttgaaggattttagctcaaggtaagattctccttcattgtcactatgaattttctaaataaagattaggttttcatgcaatttttggcgttaggttttgtattaattggggttgttttttgggttattttaaagttaattatgttattacatgctagttttcatggctattgttgagaaagatcaaggtttgagcttttaagctcaaacttatgctttagtgctggatttgaattcaaagggttatagctgatgtttcttgttggaatatgttatgtatgtcttgattaggtgttgtagaaagtttagttgaatttggggtagatttgagcaagtttcaaagtttgatgttttttgtagggcaaaatggtctgaaccgatttttctagcaagacctttgataacggattactgtttggggttttgattcaccagattttatagattctagatcttagtttttctcattttatcaatatctatggtatttccacactatctatcaatagagaaatttttagctttgagtctaagtccccaaaaagttatttagagggtcacttatcagtttatgcaaaattgtgacttagggtccttaaaatcgtcgagcagtaatttccactcaggttgacctgcatac

SEQ ID NO: 162072 - DNA, 1729 bp, Cannabis sativa
aacaaaaagaataccaaacaagtcattaactttgtactaaaataccaacaacaaagattaaatatttatgaataccaacattccatttggaatattaataattatatttctttatgtaatcaactcacaaggtctaattttcttacttactaaacgctttattttccaaaaaaaaaaaaaaaagattaaatatttatgaattgccactaagtgggtttttttcttttcgaaatggaccactaagtaggttttggatgatagagatgccagtataaaaaacaatgattaattaaatcgattattattattattattattgtagattagttaaatggatttttatacatttcaacatgaggatcgcatttgacgttttgaaaaattatgataaaatgataatgatattaagatcttactttgtttggcaaattgacaatattgtctaagaaaaggtttagacgaaaattgcctagcaagtggcacacaaaacaatcttactaacttactaggaaatagacttaaaagagataagatcattcattaatacttattataaattaaaagaaattttatttgcacacttttttccctcttaggaatagttacatctttctaaaataccaaaacaaattagaatattttatgtgtcaaaacaaattttatttgcacacttttttcacaaattagaatatttttgacacctttttaatttttttctattaaacttgttgttgtctcactatatttttagttacattatttattgtgattaaaactaaattaataacaatttatatttaaatattatattttagtcactagtactattttttgttgtgactaaaagtcacacttagtcacaaaaaattatattgtgactaaaatattatcactaaaaatatcaattttttgtaatatatgttttgattgttttctctaatttttagattatatgttgtagtttctatgttcatatttatagttttgatagcttaattttacaatttttatgtgttataattgtgttaaaaagaaaagtagattttattgtttaaattataaaatgatacttatattaatttataagattgaaatattactaagggacaacttaatacaacataatatgattagtgtaatttaaaattaaaattagattgtgtaaaatgtgttgcaccaacaacattatattatatgtgttggacaccttgttttatataaaaatacacataattaaatttataattaataaattaaattctcaactaatgaaacaaagtcaaagagtagatcaataatctaatttgtgattatctttaaactacaagcttaaatcaatcgcactcattggacttaaaaccattcaaagaagttaccttaaaacttctccattggtccaaaaaaagaacctttgaaaaaaagtaaagatgtcatatcattactctagggtgctcactaaagtgactaattatatgatgtcacataacatgaccttataattaatggagcctttcaatgttaaaagtttgtatgagtcatcccatttacatattaatgagaacttaaccgaacctaattagcattgatgaaaaaaaaaagctaattaataatttttttcagtcaaagttactaaattatgccccctgaatttttttgaccgttagaaattcccctcgaactattgagattgttaaatttatggacttttgcctaatttcatctaatttta

SEQ ID NO: 162073 - DNA, 2189 bp, Cannabis sativa
taaacacacgcgaatttgtttcctagttacttaaagaaacgtaattaagtatcctcttatatacattagtctcaacaatatgatacaatgatacaagtatgtatctgaaagcctagactgtcgttcatctctaaccgtaggatctgcatttccataccgtttcatattacaatgaaatgtaagcctcccacttggacatcagtgttattcttttttgtaatttatatgatagtcttgttctactatactcattcagtattcactctccttacactgaacggcgacagtcagccttaccgaacccaactttgcgcctcaccagatcgaattccacccatagattttgctgatgaaagttgccgattatattgcttgcagctcccaacatgttagaccgtccgatagcaaggcaatggatcccaccccctacatccgccaggattcgctcctttggcgccacgatttcgacccctttatcgaactcgaaaaccatatcccccactagccgtccgatttcggtagtgtctgcgccctgaaaacacatgtcagtcactcctgcgtacacgtaccctctcttcatcttgagtcccactcgtctcacaatttcctcttttaacgcgttatacgcttcgtccaccaggaatgtgaagtcggagcccgaatcaatcatagtttggcccgatccgcttggatcgggtcggaacactgccggtggaatatttagcttttgggtgcctagtcgaatcccctgcatcgggagtgtaaaagccaatggatccaagttcggcgcccgttgaccttttggaaaagtcaacaagtcgacgtatttgaaccaacgagagtttgggttattgcccaggtagaacgaccccgtcggtagagaaccgggtttcgtttgtcgagtcggaacgcagtacgagaacttattaatttttgcttgagatgcaaaagagagacgacccagattcattcccaaaatgccgttggtgtcgctcgggtccttggcgcatccaagaataaaaggaggtgtagttacagaacgagagaatgtgaacttttctcttactagattgccctcggcgaaggttccgtcagcgtaaaagtaagagtagtggcagaagcgattctggtcacatgtggtcgggagggtaaaatcaggaactcgaggcttgcaaatagggtgtgtgcaaggcaaaacagagaaggtggaagatctagacggatcaaacggcgccgttggagggaatttcttgagagccttcatgtggcatttaatccatgaaagctggctccctgtatccaaaaccatttcctgggtctgcggcggagttccaacagggagagaaacgattaaagccatcgaatactgaaacgacagcttgtagttatacgatgccgttttaggcctcgtgtttttcctgtatttagaaacaagagaatctcgaaaagtggtggaagcatttcgggaagaaccaagacgaaccgttttgagtgggaagaaaagggagaagggttcgttttgcttttcctgggtggagagggaaaagaggaaggaggaaaagcagaggcagagaaacaaagtgttgctctgtaaaagagacatgatcaatggcaaaagaaagatcaaagagaaaaaaagtgacaggaagtgtgtagaaagaagagtagtagcaaagtttgaaagaagttaggagtatttatatgaggagaagatagggtggaatgaacgaggcagagaaaacaaaggacagtaatgccaaaagagagagagacgcgttttcttaattgatttgttagatgacattgatggttcttaggtcattaatcttattgtttgttgattattccagttaagagtgtaggatctaaaactaactcacccgaatttgaccaatgttttatatcataatggaactttgtcgtcttctttttcttccctgtagcccattatggagtgggatgttcacttttttaatataaaaatatttttatataatttgttttcaatttctgtctgtagaatatgtttgaagtttggactattcggttcggttcctttcctcttactgagtctgtgacagacaggatgtattttagaccatgcccaatggaataagtaaattttgtgatagatttaggtcgcctttgctaacaattctttaatcaattttttgttttcaaaataaaaa

SEQ ID NO: 162074 - DNA, 4459 bp, Cannabis sativa
gtcgacccgcgcacctagttttcaaggtcaaggatgacctgcgtgcccgaacaacgtgttgttcacgtctcttgagggtccctttctttttgtaaaacgacacatcattttacaaaaacaatatgtcattttctcgaccagaaaaaaaattaggggctagtgagggcgcgttaggtcctttttggaccatttttttcctagttttcactcaaatttttctactctatcatttctatactattatgcacaagattaacatatgaattttacttttaatggtatttatatttaatcttttgtgcataaatctaattatctattaacaacaattattgctttttttcttttttttttattgtggtaagaataagcatgtaaattgtttagtaatgagaaacatttaattattaatttatgagtaaatagcgacataagtacccaaagttttgagtttataaacggcataaatttaatatttatttttagcaacataagtacctaataatattttgtaaaattataattttcttccaatttcgtgacgttcaacctctgttttgtatttgttaaaagaacatttggaagtaactgatactacatatttaattctagacccaatgatctagaatctgggttttatatgtccactgtttaagacaataacagaatctgtactgataaatttagagacaaagtaaagttttacaaatattgggtacttatgccactaaaaataaatattggtttatgcctccaccttcccaatgaggtgtccttcgtggaatttttatgggcttcgtagacgtgtggcggaaagaacccttcggggtttaattcatgagacaaatgtgggtttttcatttctcttagaaagaaaagtgggtagtgatgtgacgattgaggtgctgaatcgtctgggatttattaattcttgttgtatcacagagaatggtattgctagaggtttcttcttggcatggcgaacaagagttcagattgatgttgaagagattttttatttcaatttttgtgtgaaggtttctcaaagtctaagaagcgctcaatggttgttgttttacatttatgggactccttaaaaacctcaaaagaactttttttaggaatggatgacttctaaagttctttcttgtgctgaccctgggttttcatgggtgttatccatgtttatgtaaggcctaatgcgtggcatttaatgaagaagacaaaattaatcctcctttaattgaagttctttaagactactctatcacagaaaggcttcctcgaacagagaatcatccagaatgaaagggcacgtggaagcctactctcgcctaccttgacttccctgatgcggaaggcgaagcgtctctctcaaactcagaaggatctaacggggaagctcgcttggtttatattcggataggcaatggaaagacctaaagcagatattgaccctcataaagcgtcgcggacgtcgacctttcacacatgctagatcactaaaatgacaattatgctttctctgtaaaagatcaaatcttgtcacctacatccgagcatggtagtgcacgtacaactagcaccttcttactagacggacattacagagttctgtttctaaaggagaaagcttggtacgaaacgtggcccccacttttaaaggttaaacctttgcatgacacgtgttcgaatagtacaaaatggtccctattatccaactgttgcacgcactggcataatgctacccacgggatcatctagttagctctaacattgcatgtgatttaccccaatagtgggatttaagcagaaatcatatgtgggtgatgggcctgtccatacccaccaattagcctataaatacctatttgttctcatgcaaaaggggcaagaaaaaacacacagctataactatgttgagattacccttgatattcttcttcttcttcaaaaataaactatgggtaaggagttagggtttcctggaagaatattgtaaacacatcaatatcgcccttaaagtcaaatagactgacttgtgaaataaggtttattaacacctaaatcacataaaacatcttcatctctttatttttgtaagttattatttctttacttcctaaatatttactttccaaaatctcagtaaatattttgatgcattcattgagagctaaaggaagacgtaaaccactactaccgtcccaatttttgcccacgtgacatggcatgtccacatgggcaaaattgatgccgcatggagtacagcctgttaataaaaggaccaagtcatcatgcacaacctaccaattgatgaagagtctaaatactcaagcagaacaatgagacaacaaaatggtcaactagggggtttggtcggaccacccctgcccggccatagtccagcataggccggaaagcttcttttttggcaaacacttttggtgtctctactgctttcaacttgggtagacactctcaactacgaattgaccttaacaacccataaaaaataggggttcaactttatatatttacctatttttaaggaataattaataggttattttcttatatatttaatatgtaacaaataggttagatctcctaattttaagggatgtcaacctactttggcttagatcttttgtaagctctctcctatataaagagcactaggttaaaccaaaaagttataagttctcatttctaagctcttgagttcaagcactcgaaaccttagcatatctctcctatgcgccgtttgttgtgtatgagagactaagtcttcctaatctcatttacctgagatgtacctcacattctcactattgtaattgaaagagagccactctagaattcacaacacttataatatgagtggtattatctctcatatcaatacaactaaaaggggagtacatcattactcactaagagggcaaactactataaaattgttgtgtccatttatttacttattccgattgcttacgtggtgattctgataacaaataacactccgctgttagttgattaaatcgaaggttaacattttggtgctttcattgagagcgttgtctatttatccgatcaatcaccatggctgtaacaaagagaaatctggctaaaacttctgcttcatgaggtcttcctcaagaccccatgactattgatcttgatgtttgttttctagccacaactggtgtttccatgaatctgatggatgtagcccatcctaccaaccctgccaacccagaaggcccaataaacatgaccaacacaacatgtccggtcgaccctcctaacctgtctaatcctaatgaacatcctctactaccaagggtggatctgccattggcacctcatacagagggtttcgccaatgtggagcagcccccacgcacaacgactgactctgttccccagtactatgagggggaaatagggccaggaattggcgaattagtaattggtgagcctcatgtggacttgggagaagtctttgaattttccagagttagagaggttgtaagccaagtcagtgaaactgaagaaccacgaactgttggttgtaatatgtttgcctaacagagacatgagttcctgagatagatggatgaccaggagtacataatctgagctcatcaggcggagctagaccacctaataaggaagctaatgacctgataaggcggtgcaataagagaactatcgggagaggacatgatctcattagagatcctctctgaggaagacttatcgagaaatcgcgtagagcctcgagtatttcttcacacagaaagatttaaatatgaggcagaggcggtggttgaaattagtcaaagattatgactgtgagattttatatcatcctgggaaagctaatgtagtggcggatgctttgagtagaaaaggtctcgggcaggtttttaataccataatggtagcacctcaggttgcttcagatatggttaaggctggaagtgagttcgtagttgggaaactacataacttgacacttcaatcagatttattagaaagaatcagaaagacacaattgaaagatgctaagttatttaaaatttaggatgaggtattggtaggtcagcctaaggacttcttgatctcgcataatggaatgtttctttacaaggctcaagtttgtgtaccgagcagtgatgagctcaagaaagagatacttgatgaaacccataccacaccttattcattacacccgggtaacaccaaaatgtaccaagacttgaaaccctattattggtggtgtagaatgaagaaagatgtagtggaatacatgtctaaatgcttaacatgttagcaaatcaacgtagaacatcaaaaaccagtagggttactgttggaaattattttactaggatcttagaactacttacaagtatgttgattaacgccctaaatatgaacttctaaaacg

SEQ ID NO: 162075 - DNA, 2811 bp, Cannabis sativa
cccctacaatatgtcaatatttatcaaaaatttgcaccctaatatctaacttcacaagtacataaacaaaaaggggatgagttaaccttctcctgtgaagacaaagcagatccacataaaaccaacttattcaccgtatcaatatcacctcctggtaaaacaactttatttgctagctgacagctcctgtaaatataaatcatacagaaagttgagaaagaatataattcattattcacaccagtagaatagacttcaacatctataccaaagcttagaatacttaaattttaaaattatagtgtcgtaagtatagaagagtgaagttttacactatagcaggcagcgggtgatcttcagggagagctttcttaagcttagattttgacctttcattagggaacttaatatgagagtgtgacggacagagcattaggtagttctcctacaagaaatcaaaaaacgaaccattgcccaagttagagaacaatacactacttagaaacagagctagtaaatattagatacagggacactttctatacatgattccaacgacattttaagattttcattgcacaaggaacatgataactcctgcgacaggatttcacgtagcatcccaatgctgccccttttttcccacatgcagagcacttgagttttgcaccccttgccacttcctctttcaaattcttagctgtatcatcttcatagaaaacttgtggagccctgcatcaccaaattctacaatataaatctctactgtcaagaaaattgaaccaccaggtattatcaaattcctccaaagtaattgaaccacacaagcacatgaaaatgaatttgaaagcaaagtaaaagaacttctcaagcatactaaagatccaaaaacaacataccaatcgatgcacactttgtgaacatgtatgacattagaaagtgttgcctcgtgacctcttaccaacttctctttataataatgtaacattgaccctgtttcctggtagattcattttaccaaaaagtaagggaaagtcgtgagaaaggcagatacgagtttatatgtcttagatatttatattattttacagcaaatgggataattaaaattaacacaactcagtggaaatatacctctgtaattttagaggaatggcagaacacacaagcaaatttattatcatccaaaatatttggttcctgtggttcaggctttgcatgagaaattggttggacgcaatcaacactgtcagtgtctaatggtactagctcacaattcgactgcttaagtctcttaacatccctggcatcattgtcgtttccaaaggacgaactgtaattcctaagcttgcctactatagcaccatcactttcctgagtttgtcttttcagcatggaattgtctgagctctgaaataaagaaacataacacagatttcaataaaaacagaaatgagctaacaataaaattgattagagtgaaaaatgatgcattgatcaaaaaatacaatcacagtaaaattaacaattgctttattttattcttctttttttaaactggactccttacctagcctacagtaattaaggaacaacaattatagcaattgttatgcaagcattaaaaagggacttgaattccaaaagctatagaaacatacaccacaaaaagcaagaaatgttgctttcttacatgctcgctaccgtgaaaatagctatcattatctgaaaatttggcatcaccaaatgaaggagggctgtctggagctggttgcatcacagcatttgcatctaaatcctgagatcgaggtgctgagttgggaatcacagcactgcaaaatccaatccctctaccactcatatctttgttattctttttcagttctactcgcgtgttaatagactgtccactatgcgacttgttctctttaccattctcagttactcctttactagttttacagtcaaacatgatattagttgaagtaggattttgaaatgaaactcccccaccttctgtagtaccaaccaatacaatttatacacaaattagcttacaataaaaagaagtgaataacagaaagacaaacaatcagcaattcatttcaaaagaaattagtctaaccagatttaacaggctgaaacaaattggtagaaaacgtggcgtccaagcatctatagattgttgccaggttctctatcaatggcaaatgcctcggatctataagtaaacataatcagaaatcattaaaaacacaaaccaaaaaaaaaaaacaactcgtgaaagatatgtgaaccagccaacaccgctaaataaaacttttccatctgaaaaaatgtgtaaaagctttctttttttcatcaaaaacaagcaaagccctaataaccccattaaaattctgagccaaaagttccattttttaatcacataataataaatgcacaacatttttacaccaaaaaggataaaactaagcacacccaaaaaatcaaactgctttacaatggaaggggaaacaagagtgaataccttgatcggaaaaatgggcctgacatataggacacccaccgccaaactgagtcgaaccaggtatacacgatctagaataaatccaaaaaccaaaatcaaccaaagaaaataaattacaccaaataagtagaaaccctcaaaaaaaaaaaacgcactggcagaaaacgtggttgcatggaagtaacatgggtcgattaagcaagttcaagctgcaaaaataaaaaggaaaaccataatcaacatcataaactcaaaaagagaaatcgtccatttatatataa

SEQ ID NO: 162076 - DNA, 2961 bp, Cannabis sativa
ctttcctgctttcactctctacaacctccagccaaacgctaccttaaggtaaaatggtttttgaactgctactctaggagcaggggaagtataattgtattagataggtatgaatcatatgattatctttatctacgtaggaacggataaggcgtatgcaaaatgtgttcaatagagagaggaataaatacaaaaggggatacgatagttggagggaaaaagattatagttcttatcatcaacatttccagcgagatgattggtattggaagtctgatacatctttcagagacagaagggctaactatagggaagctcctagagaaaatgttagctactccttatctcatcactacacggtgttgggtcttgataggtgagtattgtctgtggcctttcttttatttagcatagttgccccaaatacttctgtttataaactctttgaaatattgcgcttaatttgttgtttattgacagtattaagtagcaaaatgatttgtgtcccaagtttgtgtaacaagttacttcagtagacatgtttgtattcgtagcatattgtatttgtgcaataggtaaaacaatggcacaaatattagcaatagtggtagttgatttcttttttctttttaatagcattatcacattatatgaatgacaatgacatatttattttttcatattcttgatccatacaggttccgaacaaaaccctacacagaagctgagattaaggtattacatactcaatatttatctttcgcttacctatagtgattatgtctctgttttctgttcctttcaaagggatctctattaatatggaaaaaaacactcaaacgaatttcttagctcataacaaccaaaacgtttcattttaatttaagggacctgttatctgataaaaaagttatttctttcaagatgaaaattttcttgttgaacttcataaatttattataggaatgagaaagctaaaggatgtggtgttctccagttaaggtgtattcggagtcctgttccctgtcacagagacctacaatacatgtactaactcagcatttaaaaacacttttttccttccccaccttattttatgtcatttatatgtttcttaattcatctgtgaactataaaatgagagggtcatgtctcgaagtcacctattttggtgaaatgtgtattttggctgggagtactggagtgcctggtttttgggattacaggggcttaattgtggtgcgacaagatatgattaatgagatccctctgttattgttatgatatcatttgttttccatatatttcacattatcatatctgcataatgaaactattttattttctattttctacttccagacagcatttaggagcaaggcgaaggaatttcaccctgatcagaaccaagacaatataggtggggattttctggtcgtgttactatatagctattgcaattgctttgctaggatctttttaaagttaggttgcgtttttgctggaattatttcagaggttgctgaagccaagtttaaggaggtaatgacttcctatgaagccataaagaacgagagaaaggccgcatagttttgtaaattcatggctgccactctctctccaagtcctacaaggctacaactggagattttgttattaatttttttgtcctactaaattttgaagcatctgcatgctattgctacatttcaactctttcgaagagtactggcagatcgcagagtgtcttacaacgtataaagattgatttcacctgaaagatttggcgatattgtgctacgcagaaggagcctcatgtacagtacacacaaaataaaaagtattctcttgagagaacatgccatcaaatcatacctaaaaacagccaaagccaatgtaataatatcttgtgttcatattatttttcgtaaccaactatgtaaattttcttctgaaagcctcttttatttcacagcattgctatggatactaaggtgtttagcaccactatgaggtatgaggtaggtgttcttctataattggttagtagtttttttttataatatttatcaaaataaaatatggagatttgatattgaatgacaccaataccgatattatattttataaaggtgttaagcaccatatgtgtattttagcatttctctttatttcaccactctcgatttcaaataatttaaaaggaatggacaaatgttgtaactctcagtttacattttttttttcaaaaaacaatgaataaatttttattgaaaaaaaatcagcgtttattatatcatgaagaaaagaaggaaaatttagtatctaaactagctcaccatttactgtgtaaacaattaattcacaagcaattttattagtagaacaacatacatgaataaagtatgtaaagaaaaattagataataaactagaaataacatttaaaagagagctttaatcaaataagatttcttagtaaaggcagaggttaagactagcaagtagtaatagtgatttgtcttttagtatatttttcccgttatttggatttaaaaaaaaaaatttgacaagttaactataagtatttaaatcaattaaacaataagtttcatatgaaaaaaaagataattaataaagacaaacatgtaataaaacaaaaataattggatatcataaatattttaagttgatatatatttaatctaaaaaataaatatacaagttaactatcatgatatttaattcaatcatcaattcaaatatcttatatatcaagtaacaatattctatatattaattattattaatttataaaataacttaaatatgtagagttttaaataatagttatccatcattaaaattttctattatattttaagtaacttactctagtagtagaggtgttcattggatcacatccaatagatttggacccatccgatccaatccaattatt

SEQ ID NO: 162077 - DNA, 3957 bp, Cannabis sativa
tattttcaaaatttagaaaatatgctttttccaaaagtgtttcatcaaaatgttcttcttcttccaaaatatgtattctttagcgtggatggtgagctaatttagatggaggatcttccatctttttcttatgatatactcaacgctaatatttttctcaataaaattttattcattgttcaaaataaaaaaaaaaaagaattgcccactcaagtaaaacaccatataaatatgaacacgacataaaaatattgaacttacaggtcttgtcggacttatcctttaaaaatattgtcacgacacaatacggtttatatttttctgtagcacgacatgacacgatccgttttttaaaaaacaccgataaatgagtctagccaacacgacacgtacaaacttaccacactaatcaaaatactatatctttattacaaacatataaactaattctacaaattaatttgtcaaaaaaattacaaattaattttgtaaattttagttacaatttttttttttattttattttaagttacagaaacatttatttgtttttgttaaacattacttacaaaaaagtgtctttgtaattgatcttttgatagacaataagaaaaatgaagcaactctcataacactaatgtactaacttattatctcatttttagctgttaatataaaataataatagtttaaaatgaatctagatctactaagcagaatgagaatttatttcactgaagaatggaaccataattctgatggcaattacaaaccaaaaaacattggcctgacaaattatttttaatcatgggtgtcaagcatgaacattattatatgatacttgcttgacaaagtttatgtaaatctaataattataatattctaggcaataagaaacttaacctaagactttctaggaggccaaaaagaagttacattaaataggttatgatggggatttgaattgaattacttacaatggactagtgtttttcctttctatctttctttctctatgataatagagctgcccagcaaatgggcatgtgtttcgagccactattttcggagcacagatgaaaaactcagcattcgagattgtctttcactagctagctagtaacactatcttgtaggcggccaggctgagagaggggtggcaatgcctttaatgaaaaatcgaaggattgatcatagaactcatttagcataccggtcatctttctccgccctcctcttcttgatcctcgagttgagcttcctctttgttgtttaactctccggctccactgccttcttggttttcactgtcctggtcgaaaaacagtccagatgatatggaatcatcttcgtcgaaatcatcttcattttccttctctcttgaatgcaatgtagattcgctgtccatccatacggggcatctatgaacaacaccgagtgcagccagggcttgtgaggtggagataggacttgaagcttgagttgttgttttttcagcagattcatgcctcaagcaagaacactctggaactggatgagagatgaaagatttcgactttgatgctcgtgatgcttctagtaatccatcaattagtgtttttcgcaaatgcttacgcactgaggtcaaccaagtatgatttgcatgatacaaatgctcccgaatttcatctaaaaaattagcaacttttttcctgcaaaatcaaccaccaaaatgtatcaaagcatttaaaagggcaatgtgggttatgcctaagtttaaaaacaaaattaaattacttcaagaacatccatctatgtttttaagcaaacattacctgtctggtcgatatgttttcgatgcagctgattgataaagccggtgacccatcactaagcttgcgaaattgggatggcccttaccatcacgatcgaatcctgggatgaatacatccgcttcaacgcatacagcataatcaatggcttcccatagtaatttatgagcgttggtccttaattctataaccgtactgtcaggctcattgtcactctcagccacccagccccaccaaccttcaacgttataggattttggacgtgctggaggtgggggaagcggtcgaggacgtgggcctgcagttttccatgcttcaactttcatctcttcttccatggaagggggagttttacgaaaactatcttcaagattggcctcccgaccataaatcctactgatttcccaaggggtgctaagagaagtcctgtcgacgacattctcaaacatgccacgaaaaggaattaatgtcctttgtcccccgaagatctcccccccagaaacgtatataatagtgtcccatgagtatccatacgcacggagaagaatgccaacctgcaggcattcaaaacatgttaagttctctatcaagaaatatcttctttataggcatagttaatacctcaaagacaatattgttggataaagtaaactctacagattacattgttgtaatcataactgtcattgttctatcgtattatgttaaatgatcatatcacacataactcttacatgttttcctacaaaccgttttttaagtaaaatcctaaatcattttaaaggcaaaagtttaagaagtatagaattagacaggcaacagaagccaccaataacaccgaatcttggtgtaacttatgcttacctcttcaggcattagtgggcaagaaccgttaagacgtttgttagctgaattcactctaagattgcctttaacaattccacgtttaagcatccaagctcttttgtgctgaatgagctcagtgtgtacatcctgagaaagcaattcaaaaaacgagaaggaaatcagctacaaaggtgtactgaagagttcatcaaacgtcactctgggtttgaaccacatgcctggaaaagttcagcacagccataatatgctagagcatctctagtcatccccggatcaaatgcaataaacggcagtccaggagcccgtaaccttaagtaaataaaaaatcagaataagtgaaatttacgagtacaacaaaaagtgagagtttgtgatgaatagtcaaatgacctgtttaatattttggttgcaagttcctggacttcctgccgaaattgcagggcatgaaaagcaaccctgcatctcagcctctgatattcttcaagttcaggcggaaggatagcctgcagcagatccaggaaaaatataaaacactagaaaaagaactatttatgaatataattacacattgtaaatgaatcatctcaatcagaaggaaaccaaccaatgtaggcagcaagatagttgtcattacctgcaagcatccaccttcagacaccactagttcaactacttggtgcttctttagcatagggagaacatggtgctgataataatatggcgaagcagcgaaaggcactttaaaaactggaattttcttttttctcctttcccctttaagatgtttaggaagtgtcttgacaactacgacatcttttgctaatgcagccatgaattggtcctcattgtaaaggtaggcaaaacttttgaactgagaacttcataaaacacgggatttgataaattgacgaagaacatcactaaaataaacttaattttgtattgattgttgtccaaagaataacaacctgattcctttactacttgtggctgatagaatctccggaattactaaagtcacgttaagaaatcgagcaacaacaaccacatcagatatctgtcagaagcaacacaagaaaaaaaaggtatgacactatcattaaatccattaaggcagcagcgaccactgactatacaagtcgtattcaatttaaaccatgacagtcttacttacagcatttcggatttcatggaaacccccttgtatcctgacaaagataaatctatttgtatgtgaagttggatctgttacacatacccgaaaaaaaaaaaaaaaaaa

SEQ ID NO: 162078 - DNA, 3581 bp, Cannabis sativa
tgtggagttcaacaggtctctagtgtatttgttttgactgagatataagttcttgccatctcgaactacctcaaagcctaggaaatagctgacaggtcctagaactttgagagcaaatgtggattgaagtgttgaaataacttgttggacttgagtggcatcctgtccagtaattaatatatcgtcaacatatactaaccataagtagcttgtcatttttcttgttgaaaaataaactggaatcaaccctgctgttgaagaattcccaatatagtaatgaggttttgagtttatcaaaccatgctctaggagcctgcttcaaaccataaattgccttgtttaatttgcacacaaggttggaaaattgaggatcaacaaagccttgaggttggtacatgtatactgcttctttcaactctctatttaggaaggcattgttgatgtcaagttgctgaatttcccagccataggtgacaacaatagtaaacataagtctgatggtgaaaggcttgacaacaggactatatgtttcaaagaaatccactccagggacctgttggaaacctttggcaaccaagcgagctttaaacctctacaaagatccattagcatttaattttatcctgtaaacacacttgttgtgaacaatggtcatttcagaggagggagggacaactgcccaagtcttgtttttctttaaggcatagatttcattattcatggccttattccatttggggttggccaaggcttctttgacacttttaggttcagtgtcattaaaaatagttgcaaggtacattttttgtttgaaaattccatgtttggatctggtgagcatgaggtgagtgttttgagtaagaggtggatgttgaacatccaagttggattgaatagaggtactgtgttggggtgaatggtcttgttgtactgaatcaaaactagattgagaggtggagatggagatgggagtggctgggaaatgagacatcataggtggagctactgactggtttgaagcagtcaaactgaaagtagaagtggttggggtattggcttgatgtgtgggagcttgagtaggtacctgaaaagctgtggggtctatgattctaggtgcaagttgtgtactgtttgtgatagctttagggaacagttcttggaatgggaattcagttttgttgaatgtgacacttcttgccacatagactcttccactaaggtgaaggcatctatagcctttggaggaaatgcaataacctatgaacagacatttagtggatcaaaaagagactttgtgatgttcatatgcccttaacaaggggtaacatgagcatccaatgacctttacaagattataatcaggtttttgagaaaataattttcatagggtgacgtatgatttagagtaggaatgggaagtctgttgattaaataggttgctgaggtgaaagcttcccaccagtagtgcaagggaatgttagcctgagcaagaagtgtgagccccatgtcaacaacatgtttgtattttctttcaacacgaccttgttgttaatgtgtgtggggacaagaatttctttgaacaattcccatgattttaaacatgctttatagaggctcatactctttcccaaattagattgaacactcttgattttgagttgaaaaaacctctcaacataggcattgaactgagtaaaaatagatttgacttcagatttgcatttcatgggaaataaccaagtgtactatgtgaaatcatcaacaaaactaacatgatatttgtaaccatcattagcagtgtaaaaagagggtccctaaacatcagttaaaactaattcaaaaggcatggtagttttattgagtattctttcgaaactaaattggtgtagcttgccaatttgacaggcattacaaaagttaccaatattacatttgatatttggactaatagtagaaaaaactttattgaggatggagtgagaggggtggccaagtcgatgatgccacactgtagcagccttggacttgtcaagaactggattcctggtagtagtatgatttagggcagtaggtgaaggctggaagacagaattcttgaaaaagctttaaggggaaatttgaagtttttacaagccatcacagagattaccctgaagaagagcttgcatggttttcttgtcttttataacacaacaagaatcatcaaacaagaataacatgattatctttagtgaattgagatatgcttaatagattcttggttaagctaggcacatgtaatatatcttgtaaaactaaagagtgtgcaggtaacttagtttggacagaactactacctatatgatgaataggtaaagagaaaccattacctacagccactttagctttccctttgtaatcggtagaagtggtgagattttatgagtcatttgtcatgtgatgggtggctccactgtcaagataccaggcattggatagatcaggagtatagttggtctcagttaggttagcttgaggggtagaatcattggtttgagactgggaggggttggggttttgttgagaaccagtaaagttgatgttaaatctatgaaaatatttcatcacagtatggccacttcttccacatagttggcagataggtctattcccacttctacctcctctgtttgaacctcttcctcctcgtgatgccccacgataacctctgttggattgaaagcctcttcctccattgttgaaatttgcattggataagtttgcttgaacatttgttaaatattcagttgtgagttgctgtaatcttatttctttactttgtagcatgaattgaacattttgtagggagagagactcagatcgagaggtgaggttgattacaacggattcatactcagatcctagtcctccaagtatatagagaacccgatcttcatcggacatgacttgtccaacagtattaaggctgtcagcatactgtttcatctttagtatatattcttcaattgacagagatcctttcttggtagattggagcaatcctctcagttgcagaagtctggccttcgatttagtgacgatgcaaaagtgctccaaattttaagatgttcgaccatggatgatatgtccaagcatgtcgtcagaaacagagttcataagccaatgcatcaagaactgatcaaatctcatccattgttgataatctggattaggattgttacctacaagtaaaatcagtggagctggacgtaatccaagtatatatccatcaagatcgtaggcacgaatgacagcaagcaccagagatctccaaatagtttaattagttctatcaagccgaagattaagtgtaagtagattgttgttggggaggattattcttgcttgatcattttgacaatgttgtgcttgttcttgatcatgtgcatcaacgcgtacctgattgttctgttgttgctgcatctattctggctccggcggatcaattctttgatctgacatggctctgataccatgtgaaagctctgttaagacagagtttggatgatgaaaaacttgagagaaaggagagagagagagag

SEQ ID NO: 162079 - DNA, 1620 bp, Cannabis sativa
tttttttttttgaaaaaaaatgctaaattggtttttaatgtaaaaaaaaaaaaagggaaaatttatcccaatgaactagcagtaagattcaaaacattttgtatttttttgcatataaaataatgtgttgtttttgtctttaataattaaacatatttatttacaacaatagataatataagggagggtacccataaagacaataactctagaaaaacaagataaaataccaatagcctagaataatatttgtaaaagaagataacatagatgcgggttcattgattgccatggagatcaaggtacatcactttccacctcagtgattgacaactgtaattgagaagtccaaagtggattgtgaaagagagccatagcttccatttcatgagccttaaaacaccatgcaagaggcttagagagagcaacaattatttgatcatactcactctgaacaatagcacctactcgtgtaactggaccagtatcattggcggctacatcaaaatttcatttcagttcagaagaagtaggaggcgtccatggttcctggcaagggttagggacatcaacaggggagacaaaaatcaggcccgtgagggcacaaatagctctatattgcagcaaaaaaattccagtgtaggaagcaagcgcaacaataggcctagctcaacgaccatgtattaccgcattcctctcagtctaaatcgaccacatgatacaaagaatcgattccgttttatctttaaaaaagagagatgaaaaatgaaccaaatagtctccttgaactataaaattagctttttggtagtcaaaagaatagctcgaatgcctccaaataactctcacatatttacaacaaaacaaagcgtgtccgatggattttcaaatgtgtgaacaaaggaaacaagtagcttctacgacgatctttcgctgaactaacttagtggccacatgcaaggcattgtgcataaccttacaagcaaagattttgattttgggtggcaaatgcaaagagctttccaccaagattcatgatttcttgaggaagatgagtgatctaatttatccaaagaggcagccaaatggtagcctattttgacattgaaaatacttgagtcataataattctagattagttgattagattgtctaaagaaagtcaatgaaatagagaaaattgacattaatcgttaagaaatattgtagtagaagtatattccattccctttgtttcattatgtatgtcgaaactatagttgttggcgggccacaaaacaagatagactggaaagaagtatgatcaggaatccaaggctcaaaaagacacaaaactcggttaccggtgccaattttccatctctaacctttatcaacaaatctcgcccacaaaagatgcttctccaggtcattgaaggattatgtccgattttagcatccaagagagatgattccaagaggtacctagacttaagtaagtgactgaggagagaattaggcatataaaaaaaaattctctaaggttgtttagccaagagggattgattgtaatgaatgaatgaacaaaaccccattcctccaacagttttgcaacgccctaatgctaaggcacgctacagt

SEQ ID NO: 162080 - DNA, 2452 bp, Cannabis sativa
tttccagacagagtattcgaataaatttaatatctagcgttttaagaatatatacctcaagaagccaaccacttatggtgagagtttgaacatccttaagcaaattcaagagtgaaagaacatcctcacactcgaattcgccatcacccactactccacctccctcgaattcaagagtggcttcaaccaaatcgatagggtttacaagttgcatgattcggggaagaaaaagtccacaaaacttgaaacttttgagatatggagcacaaactacaacacttacaatgtcattacaatccaacacttccaaattatggagagaattggtcatatccacatgaagttcctccaacccgacacatttctcaactctcaaactttgaagaagatgaaaccctttaaacaattcactaaccaagtttataactttactattaacataacaaagatgaagagttctaagagaagagaaggcaaaattagcattgtttgaggtattttttgtatgtagctttaaatgaaaaggagaagtggaattagtaataatagattggtcaaagaagtttagatgaagctcattttcaacccctttagtggctaagacaactttaccaatacacaaaagttgaggagaattgtaagagctcaaaaacccaccaaacacttcttcaatctctttgaaactaacttcttcttcttcttcttcattaaagctctttaatttgacattaatgggagccaaaacttggctccaaagagtggaaaggctcatactttgtacagcttctttgagtggaagaaatgaaattatgtgtcttagaatatcaagtggaagattactaatcaaatcaacactacttttttgatcatccattataattaattgaaattttttaattataataaagatcaaatatttggtagatgaacactaccacaatcttggcacacacatatatatatataaatatgtgagatggtgaggaagagaaaaaagagaaatctttggacggtggaatctaatgatttttgtctctataaatataaacatatttataaactttcacaaagatttgtcaactttatagatttcaactttagtgtgaaacttttgaaaaataaaataaactataggtagataaatgtatgtgaaattattgagctttatcaattaagttgcgcatattttagtcaatgatgttttgattaataaagctagtgccatgtgagtagagattgttcccctttgtgcgagtcaagctattcggcgagatttgccttatctattgtaatgcttttgattaaatgagttctgttttttttttaaaaaaagaaaaagaaagaaagaaattattgagctttagttatttgagattttatttattttttaaccaaatacaataagaaaaagggtttacgtctttgtttttagcatagttagtcttcggttaaaaaaaatttaaataaccgaagactataaaggcaaagacgtaagtgtcgaaatggtaataatagatgaaaaaagaaaaacgacgtgttacatcttaaaaaaaaaaaaaagaaaaaaagtgtaagtattattagattttttttcataaaatttgaaccaataataatttaatgtgtctaatttttttttatagatttatatgcttttgttttgatcattgattgtcctccaaaaagctagttagtggggtttggtgtatttatcccattccactttcttccaactttaattttttattattttttttctaatttaaaaaaatcaattttgtgtttaatattaatactattctaattgctttctaatttttcaaaattctctaagatcggatcaaatcaactaccctaatcaaatttcaaaaagtgagttctctatatcgttatcacaagtatattttcactcttttaatatttatttaataaattttgtcatttatccatttaaaataattttatttcttttttaaaatcgtggacaaactattttataacttcatagagttgtgaaactattttaaattctacgagcaaccattttttttgttactagataaaacatgcacgtgacaagtcacgtgtagaattctttccaaaatttattatgtgttgtgtgacaaattagattcaatcactaaaaaaaatattttttctttaatttttaccataatttcaaacttcaccatcttgcaaaaattaccaatacatataattagttttttttttttttttttttttaaataacacattttattctttgtcccaattcaaaataacttatattttgagagattgtttttggataacttattatattaaaattagtacttataatcatacttttacaataattgtttttcaattatatatttaatataattataggcagccgattttgtgcccatatatgcaaaacacggattggaatccgttgtacggcaggggg

SEQ ID NO: 162081 - DNA, 8255 bp, Cannabis sativa
  modified_base (90)..(125): a, c, t, g, unknown or other
  modified_base (221)..(226): a, c, t, g, unknown or other
cccttaaagttaatgtcatcactatatatcacttgtaattatcataaatatccttcataatactcaattttatattattattattattannnnnnnnnnnnnnnnnnnnnnnnnnnnnnnnnnnnttattattattattatataaactaaccaattttaaaattattttccccataattttggtggttaaattaagtacttaatttattattattattatnnnnnntattattattattattgatattttatttgatattaattattaagttaaaaatattgataatataaaaaattaaaaattaaaaaactcaataaatagagtagttttaaaatattttagagtgccacatttaaaaaaaaaaaaatgtattcacaattttagtttttttaatctattttttctattaatttttaatttaaaatatctatatattataatattttgttttttatggactgtatcccattatcataaattattttttaaaaaaagtaaaattttatttacattttttactatatattgtaaaaatatatataattcaaattcaaattttagtttgatttatgatatattttttatttaaatcatatataacttaaaataattaattttttttaaaaataataaaatatctcccaagaaagcacatgtcctttgataaaaattaatatctttaagttatacgtaagataaaaattagattttttttttaaaaaaagaaaaaagaagtcatacgtgtacacatgtagattttttgtaatgttttgttaattaataggaaggaccgttaattggaaagaatcagagaagatctatcaaacgacttcgcattggatcagtttctcctcaacaaataagtgcttggatcagtttcgcattagaaacagatgttcaatagattcatcctctgtcccacaaagggggcatttaacatccgcaataggacatattttatagatcttagagcgaactaggattgccttggacaataagcaccaccaaaggatcttcagcctttctgagattttactatttcatggcttattccaaagtgaaggagcgacctcacaatgaggcgtcctatcaaaagcttgggcaagataagccaatttgctcgtgaactaaccattactttccaaagtccaaatctatctatcactgccctggccagacggagtacccctttcaagattgtagatacagtctcctagttaaacagactatttaacttaggaatattccaaccactattatcagatagaagctcggcagctttgttcccccaaaagtggaagaacccttagaacgagggacaaaatcttttctatgggcaatgcaagggtcttcctaaataaaattatcctttccatcccactaatttacaggcccctttcgttaagatagattttgttttaaccacatttttccaaaaccacgaatttgaatctttagaggtacagttaaggaaaggccttcctttaaggtatttggcttccaagatccagcagcaaagggattggttgccaattaaaagattacacccccatatcgccagaaaagcttaattcatttctataatttttcgaaagtcaaggccccctaaagatttagggaggcagagcttatcccaagctttgagatgcaggccatggttccctttttggatccccactaaaagtcacaaaccattccatcaatcttagcagcaatgcgattggaaagtttaattgtctacagagcatacataggtaaagataaacccacagactttataagagtggcacgacctactttggacaacatcttagctttccagccctgaagtttagatgtgaggttatccaaaataaaattgaagtgggcatccttttgattggatctgaaaaggggtaacccaaatatttgatattaccatcaggggatccaattcccagagtagatttgattcctcttttcataccactagaagaatttttactaaagaaaatagagattttgagtttattaacttgctgtccagaccaggcggaaaacctctcaaggcattgctagtagcctttgacttcctccatattcacttttccaactaagattaggtcatccgcaaagaagatatgagaaataatagggcctccctactgagcctacctttgataatgcccttacactgagcatcaaccaggagtatagataaaatttccacagccaaaatgaagaggtaaggcaacagggggttgccttggagaagaccacaagagggcgtaatcttcccaaattgtcctccattaagaaaaatattgagggaggtggttgaaatacactaagaaatccaactttgaaacttctgaggcgccccaaaacaagatagcgcatggtcaataaatctccaactcagtttgtcataagccttcataaggacaattttaatggcaaaataaccatctttgccttttctctgattgaaagagtggataatttcttggataatcacattgttctcttgaatattcctaccaaggacaaaagcagcttgggtagggcaaataagggagggtaaaatgggcttgattctattggcaataattttttaaatgatcttgtacatgacattgcacagagagataggtctagagtggttggttcttttcgaattatggaccttggggataagaacaatgttcctagcattaactcccttgtgcataacgccgtccgaaaaagtacaacacatcttcacaaaaatactctcccacagtcctccaatagtgcgtgaagaaaagtacagacatcccatccagcctcgaggctttgttgttactcatggaaaatagggtcttacggatctcctcacgggtaggacctttaacaagctcagcctgatcaacttcaaatatcctatcctgaatgagatggtggcagttaagaatgtgaccattatccgcacacgataaaattcctttgaagaagtcaatgaatttgttaccaattaagtttcatctagacttttatatattatcttatttatgatactttcaatagtatttcttcttcctctaatagcagccgagaggaagaagaacttagagcatttatccccttccttgagccaagaaacccaggccctttatttccaaaataactcttttctttcgcagaccttattgagagatcgatgggtatcacattcagcagtccaatctctatcccccactggtagattttgaatgaggttgagtttcctttcaaaatctttaattaacgtgtcaattttcccaatttgtattctatttcagtgcctaagagcgacccgagttgccctaattttcttgaagaccctggcaggagcccaagagtgaacaaccgaattccaagtagattgaaccactaacttaatcaaacgattacaaccaaagaaaagaaatatatattcggcatgaacacgactaaccgaatattttaaatgcaaaaataatttaatggaagatcaatactaccataaattctcaagaattaatttagagattctcttgatactacatgttataatactataaatttgaatttaaccctaattaattcatgagaatgaaacaataagttagagattagcagaagcgtaccagtgtctatagaatcgatttttagatgatatgatctttgaatttttgcatcgaaaattctctaaaaccttaatctcttgatgatgggaattgaggagagaatgatacgatataaagcgatgcaaaaaatgagaactaatgcctatttattaataattgaaaaaacagtaattaatcctttgaccatttccaatttagcccataatcaaattaaaaattgtctttatagtattcacatattaaaataaagataatcatacttttataagttataaattatattttaaaatagactacataaatttgacttatttatttgatgacccaacacacattttatatttaaaattacgagtctaataaatttctaacaccccgtgcccctgtttggtgtctccctccctcattggttttctctctccgtgcatagctgtgtagtggccaaagccccatcgttcccatcgatagtatcacaaatggatgctgccattatcttcgccggtcatgaaaagccaaaatctccaccaagtccctcgatttgccatggtgaagtgcaagaagtgctttgtggtagcatattctttttgtaaaaaaaaaaactatttacagtataaatttaataatttgtgacccaatatttatgtacgtcatccaaaaataattctaaaatactagcattaaatgtaccaaacaataaataaggaatgtgaatggaagattaaagaattaaaagagaattaaaaggaatcagagtaataaattttattaatttaatttttaattatttaaatgaattttaaatagaggttcatgagcaggtgagcctttcaaaagtttgaaaagtcaaaaaataaactaagcctagtcaacaattttcaactattagattatgatgatgggttaaaaatgaaaactctatcaatgggtatattttatgaggtctatcttaaccgaactcatatatatataagatataataactctatgtatacgaataataaatcaacacaaataattgtcaaaaataagcacttgtgaattatcaattatcactaacaattattaatcaaatagcatagataggattaacttcagtctcagaatccgagtgatgatgatgacaatggtgtgatcctccaatccttttctccttcttcctcactttacgaaaacgcttagacttaacaacgtaatatgtcatggtgccaagcacacccaccatcgtcacagccccaatcacagttacgagaatcgcagcccatctattgcatctaccaaccactatatacgccgaagaaatgaaggccactgaggtgcacaccgaggccaaccacatcaacttgtttatcacttcaataactcttctctcggccttggtctcccctctaaccagcgttatttgtactaacacaacagccaatgaggtgaacaatgcaattgcattgaatataaagaaaatcttaaacgatgtggtgttcaccatcaccgccattccggagtcatcgtcgcctccagggacagtgaaaatagcggcaaaagccaccgttgcaaagaggacagccacaactgtcactgagtttgtggcgttgttgattcctgccctatgcagtttgcgaagctctttggcgattccggtcacgttttggtttgtttttcgggtttgttctagttggatgtgtacatcctttttgatctgtgtcactgtttttcttagctcgtctcgtggctggttgagctcattggcttttactccgccatatcgagctagggtctcttttattagtgatgtttcttcgcataatgtaaggccttcggctatgtcgaaggcagttttgtgctctcttgttagggcgtttacgtttgtatctggaagggataacaactcactcactatctgcaaagccatatatatagattgaattattattaattgattagctgatataaatatcaaaatcaatatttatactcttaggataggaactatttggaaatgtgacacactaatgtcaatatttatattatatttatttgaaagaggaatagttataataatatactcctactatacttgaacacttaaaagtaattattattccctttttaaacatatatgcatgttaatcttttttttttatggaactaaaagttcatatgcatgttcaattaattacacatacttatcgaaaactatcttaattgaaagtcataacgtacctcagttcttctttttctggtggcaacatgtaatgctgtattgccaaacttatcagggagcataacaatagctgcatctgcatcgagaagtgacttgaccacttcacaactaactcctttcactgccatatgcaatgcagtttgtccctttttatctgtccttcgagctaattgtgggtcgttcttaagcaacattctaacaatgtctacatgcccttgtcttgaagctagatgtaatgcattctttccatttgatctagatatttctgttatgcttgaatcttttgaaagcagttctcttaccacagagacatgccctttggatgctgctgatataagtggtgttgtattggactgccctatggttttgcttaattttggatcatagtccaataacacctcaacaatttctgccaaaagagaaagaatacattactaaactcatttgattttgacacccgtcggtgtttttaattattctttaaagtcacactagaacttcatacccgatgcttaattaattaatttaatgaaaaaaaaatacaaaagattatacctttatgaccttgactggcagcaatatgcaagggatcaaagcctgaacgattcttgatggaaatgccctctttagtaacatgttgcatgagctctttcaccacctcaagatgacctttctcggcagcaatgaacagagccgtctcacccagctcattcttctcattcaaaattgaggaccttatatcggccacctcctcatcaaactctgacccactcaacgtagtttccgccatctgcgcctcgatatcaccaaaaatttgcctcactccggccaagtcaccccgctgtgccgccaggtggagctccgtgtcgttatgcattcccgtcacttgcttcacgtatttctttatccccgggccttggtccatcttctttcctgaatttgataccaaaagagccttccccgaattcgatagaacaagggtccttggtgtggtcggagtcggagaagacggccatgttgattctccggttagagtggttgctttggtcctcacgtaaagacccttttctagatccctctcaccttgacaatcaaatagaatgagaaagctaataaatttaagactatttatacgtgcatgtgatcaattgagagatcgattataattattattattattacctaaatctgtgcctgaggccatatcttggtggaaagaagatgaaatagaatgatattgagaagaaacaaccgattatctacgccatttttaaatttttggaataacttttgagtttctagcatatgggtgatggagttgttaacgccatcgagtctagcatgggacggagctgaaggcattggcggtggcttatctgatgaacggtggcaatggaggtggtttactcttatgattggttcttctcatgttccgggagaagagttgttagagaaaatatttggctttttactatttttgattatgtattaatagactatataaaattatatattatatatatatatattttttttttttgagaataatataaacaatatcaatcaatatatataagatggttttgaaggaggatatgtggcatatataagagctatttttcttattctttatttttttctattttcttatttattaatttatttaaatgaattatcaaattattcattaacaggatattaatataatgtctttttattttttataactcacatcctaaataactacctataaataaaaaaaatatgatcaaatcatcaatattaatatatcaatcaatcaatgtatataatgtctttttattttttaatttttctttccaaaatatttaatgttgtaagttatgattttaactaatattagagtttaggtttagtaattgattgtagtttctcaatgtgtctcttcatgtgaaaattatgtcacatataaagtgcattgagaattaattcaaaattagttataatctttaattatgtggagaaaaatcaaaagacaaatagtgggcatatatacatagtgtatagttttttttttttacctataattgcgcatatctaacacattctttccaccttcactctttgcaatctcaattttatttttagcatttaaagtaaaactcaaattaacttttcctctttatctctttcagttctcaatctctctctctcaaccaagttatgcatagtcaccacaagcacaaagaaagggagtgtctcttattctctccctcacaaatagcatgttattgctaaaaaggtaactatgttattcataaatttgtttattaatcagggaaacttacaaaaatactggattttgatccaattcttacaaaaatactgtcacacggtaaaaataacttttatactgttttgggactttttt

SEQ ID NO: 162082 - DNA, 3730 bp, Cannabis sativa
gtgccaccaaaatataggatattcttaaacacattatcatacagtcgttcatttgtcaaaaagtaccattttcttagatgctattctgataaactggctcagcttgttatttccttttctgcctaagtgaaattttccctgttaaatcactcatgtaaccaattttaaaatccttgttggattatgcttaggttaggtatacatgtaatattctattttctcagaaaatagaggcaagaaaagtataagaataggcaaagggaatatgatacttattacagctcaggtaagaatcttagccaaactcttttatatatttatcactagctgatatttccttcctcccatttacagcaaacagataaacatcaactccttatctttgtttcattttgagacagaaagagaagttttttgttaagtttctcacattttcttttcctttcagtgtgtcaatggaaaagggtcataatctctcaaactccccaagttcttgtgaaaaagtctttagctgtatcgtttgttgtaagtgtcaaacaaataatgatacagaccacatgccaactcatcataatcatgctgggaatgctagtgatatgggccatgaaagccaaaaagctgaagctgcaaagaacaggtctgagaaaccatcaaaaactgctcattttgctgtgaacagaactgagccagatgttaaacatgaagggaagagatcttctggtctgagaaagaatgataccttttcgaactatattcatcgcgcaaagatgaagttcagagcagggtcgaaccttgggaatgaaaagaaagcctctgaagcctccggtgaatatcatatccatggcgatcatgctaagaaagacaacagtgctaaagatggattttctgagtatattaatcgtgtcaaattaaagatcaggaagaccacaacaagtgttcgaagcaggaagagttaaactgcctcaaatataaaattgctgtgaaaaaagtctctactattatgaaagaggtactattgaggaataacaaaggtggtggttctcatactggatgcataagctattaacttatgctatatatatatacatagactattaaatgttcatttgtgttttgtgtgtattctattctatatggtattttagtatatgaactcacatgcaaagtaatcaaaacaagagcttatgaaaaacaatttgattcaagttgtgtttgtattgtactaaactatctttttatgtatggactttagttcccataggtgatcacacctgagcttgaatagaaataataacaaactagcaaatttttgaataatataaaaatatattggtcttgttgcgaaatagactcgtccacttggttaaaaccaccaagtattatgagtgaactatgttcaattgaaaattctcaagctaaaaaagggacaaggaaaaagaccataagtaactgtactatgtataagttaataaacagaaacatgggaaggcacttcctagaagttggatactaaaatcttgttttccttcttaagattgacttattggcatgaacattcacatatgatagcatataatgatcacacttgacataattgtctaacaaatataatattaacttaacattctgactaagaaaaagtaaataaataatcacaaagcaagattcttcagagaagagatttagactaatcaaaagcagaaacctaattgtggcaagagtcaatttatatgggagccgcacatgttgttctgaagtgtcctgtctgattgcagcgactgcaatgcactactcgcttcacgcggccacggtcttctgctcgtactcgtttctttcttggccgtccaggaggcctaagtgacttgggtgggttaattaaaacctcaatagctttgttagaattggggtctccatcagtcaactccttccagagggatttatctggaatggggtgtattgtctgtgaatacgtctttcgataagttgccactgtaaaacagctctctgtgaatcggtgaacattttgcctacaggacagaagtgctgccacagcatgtgcacaaggcaaaccatacagctgccagccccggcaaagacagcatcgattcctaatgtcaacaatatttgttccttcatgagatatgacttcaaattcagcttcattagcacgaagcacctgatatgtacgtgcacgctcaagtgcctctgcaacacgcctctctgcagatggtacaagtattgatgtccactgcatactagtctctcgccgttcattaaaccaagtcattagttgtcttctaatgcattccatcatctggattataggaagcccagatgcctccaaaatccaggtattcaaagactcgactatattagctgtcaaatgcccgaatcgagtcccctcaaaataagctgtagcccataagcgaggtggaattcgtctaatccaatatgcagcatcttgtgatatttcttcaatctctaaaatttttgcttcaaattcaatgacggtgagagcgtgagcagcttcccataaaaggttaacaagaattgtattgttaaactccttgcgaaagctgtcactcaagtggcgcatgcaaaatccatggaatgcagtaggaaaatttgcttccacaccatctacaatgcacttcatcctgtctgacaggattgtaagcctaggcatgttttccgtattgatctcaagcaaattccgaagttcagacagaaaccacatccaattttcatcattttcctcatcaacaacaccgaatgctagagggaacagcgagccatcaccatcaaaaccagtagcaagaagcaacgtacccagatatttacttttcaaatatgtcctatcaagccctaggagtggtcggcaagcatttagaaaaccataaattgatgcctgaaatgatatgaatagacgctggaagcagctatcaactggattcccgtaaacagatgcaatactccctgggtttgtccttttgacctgttcacaatattgaggaagtaaccggtacccttcttcgaaagatccacgcatagctgccattattcgttccttgcctcgccaggcttgcttataggataaggtaataccatggacccgatgaatctcctctagtatctcctttggcttgtaattaggattctccttgagtcgttgctccacagagtttgcaacccactgaactgaggcttgctgatgcccaagatgagcaatgccaccacatgaatgagactcatggatggttctgatagtgaatgttggaactcctgggagctttgcagcgtgaatgcgccagggacacccctcactggcacacttggcagtaaatcgtgtcttgtcagattttattgtctgcatctcaaagtgcaaagcaattgctgtgtctctcaaagccctgcgacagctcttgacatctgggaattcctgtccaactgatagctcataagtaggatttgcaacaatcatacgggcctgaatcacaggagttgtaggaactagttgggagtcctccattgacatatcatgaggctcaatagccatttcttgactctgatccacagctaattctaggttgtcattaagttcttggttttctgacacagccaactcattgttatctgataaagacaattcatgattctgagcagaaagggccaactcatgattctgagcagaaagggctagctcatgattctgagcagaaagggccaactc

SEQ ID NO: 162083 - DNA, 6871 bp, Cannabis sativa
tgacttaccattttgttttgatacatttgaggcatgggagtctgagcaatctggatgttgtttcgaaaccaaacaattagatccattgatacaaaacaatactaaagaaaccaatttcattagctgtaacagaattgattacctcttgatcaagtttttcccacacgtgtgtcatgtcgcaatatgattttgagcataccgggcacgagtacctaaagaatgtactcaaagttagaatatttatagttcctaaacaccttgaaaagattgtacagccaaacacttactggaaatgctgttccatctctttcacacattccaaatgtatagtatgtccacatggcaagacagtaatgtccttcattgtctcaaacaggaactgcagtcatagcaatttcaattcagcaaataatgaactaacattcataatattctacttgatcgcctcgtgctactctaaacgtttacctcaaagcaaacaggacaattgtgatgcatagctttttccacacaactatgtgaatccttcaacatagtcgaataacaacaacctggaacgaaataataacttctcataagcgtaagtgtcataagcaaatggaactccaaagccaagcatatagaatttagaattttgaaaacttaccacatttattacaatgaaaaaagttctccttgcctccaactctgtatttcccagcacaagtatgttgttttattaaactatttccatggatgttaggcgataatggaatcggaaaaaaagaacaaagataagtatctaacctgcatatcccacattcattgcaatggtattgattctttgaaacctgcttctccccaaaaaagggcttgttaatgcaaattgaacaaagcaatataagaaactttaaaggactttgaaacatacgagacttacatcatcgtcaaagaatttacatatggagcaaaagtaatttcccatacaaattccacaatggatgcaatgctgctgaacctggaaggtaataagtaaactcattagttacaaaacagttattttgcttttattatcaaaatattgatagttattgctattatgatcactaaaatttataaaaaagggaacctacatcttgttctgtatcacacaatgaacatattacctgaaaaaatcagaaataatttggagtaagcaatgaggccttgaaaatatatgcaaatataaatataaatattacaatttccaagcctgattttgttctatacatgaccacgagaagaagaaaagaaaaacaaacccttttcaaatcatgtcgaggaatgtcatgacgatcaagaggatcaacttccagtgagttctgatattagaaaagtaaataagcaaaacattgattttaggtttaaatataaatcgcaagataaaacaaaatgagataatcacagtacaaaaaagagaaaacccaaccttggattcattatgacaatgtctgcaatcaaatatttcatcacaacaaggtgctctaatcttacacctcctcctgtaatgtgagcacctacatttttttttttttttgaattataataataagtctcaaaattagcacaaaaaccgaaagaaaactcaattttcgcataaattctaaaaaagatactaagaaaaagtagaaaaaaaaatgtagatgatgaaaaatcaatacatacccaaaattttcagattcaagctccattaaagactggtcttttacatgagaactctcaatggccatttggttcttcaaatcactctctattttttttttgttacaaagcctttggtattctacaaaatttcaaagacaacctgaaatcccataaagattaacaatcaaatcaaacccataatcctaacctgaacaggagaaatgattttaaaattatcccacaagaaaagggaaggagagacgtagtactctattaatagaaaatttaaccacccaaattctaagaaagttataataaaggctggacctttgttttcttcaggatgaaaaaggaggacaactctttaatagcataactctaaaccaatttttttaattagaaaaaataaaaataaaaggcttccaaaaaagggctttttatatatttttttttaagaaaaatatatatataattttgaatatataaaaaagataatgacgatgacgaggcgaaacgccagcaatacttatggccgaccaagcaataattacaaatggatagaaaaaagattgatggtatggtttaattaatttatgagtgatactgacaaggaacccctagattcgcattctaggattacaatgatacatagattagatattatccaaatactgttctgatcaaaacgacatcgttaaaggccttcaagaacttggagtagattttttttttttgtttttgataaccaacttggagtagaaacttaaaatgaaattaattttttgtaaaaaaaaaaaataataagagggtaacgtggagaaaggaggaaaggaagtaaggaaggagggagttgttctttacgtaccatatggaaaattctgtggtttttggaagctgaagcgaagcctgaaggtgggttcgtttcttaaagggaagaaaaggcccaagatactgtgaattaatctgcaactgggttcttttcctgtgaggttcaatagtttcggaaatggtcaatattgtgggctaggactcctccttattatgtattataatacatatacataaaggaagcaactcatattgatcggggtgtcacttttatccaatctgattgggagtctgaaaaatttatgatctccatttcaaaaaaaataaataaataaattacaattattcacagttttgaattgtccatttgcctatggtctggccacatcgaataagctcttcatgattccgtgttggtttaagaagttggtgaagtgataactgtcaaattgattttcgctatctgagacaatcttatgtggaagtccaaagcagcacacaatgtttttgatgacaaagtccaaggccttcttgaaggtgactgtattcatgggttccgcttctacccatttggtgaagtagttatcgcgtacttcacccctctttttccagtgagaagggatcctactaagtcaatttcccaaatagcaaaaggccatgggctcctcatgagtgtgatttctattggtggtgctcgtggaaccttgacgtatctttaacactgttcgcacttctagacatactctgtacaatcctttttcattgtgggccaggagtaaccatgtcgaaggatctttttggataggcttggtctggaagtatgatctccatgaaaacctcaatgaacctcatgtatatgatggtacttattttggtctcggctacgcaccttaagtatggcacaaataacctcctacggtaaagtttcccatctagtatcacatattggggagcctgatattaaaccttgtgagaagaagttttgtccgtcagaagctctcctgagtttaggaactagtagatgggccatatctaagagttgaaatgatcagcgatggcatttaccccctgtgtttcaatacttgaagcttctaagtgggccacaggcaccactccgtgttggatgactctgagtttgtgacgagttttgctagcatattcgtgaatgaattttggtctaggggacctagcgaatattatagcctttaaccccttgcaacagttcctaggacatcatcacataggcaaccatcctttcacctttggtctgttattccccaaatatttgatttaccaccaatttagagtcgctatggactttgttatgttgggctccgacttccttagccaatcatagtccctttagtatggcatcgtgcttagcttcattattggaagcaagaaattgaaaatagagagtgctttggagctgatgtccttgcagagatattaatataattcctgctccatctccatttgcattcgatgctccatcatcatagactttctaggtagaggtgacttcaggactagctcatctgggaggtcacttaatccagaacactcaaccacaaagtcagctaaggtttgacctttgattgacacatgtggttgatactagatgtcaaattggctaagttccattgcccattttagtaacccgtcggatgcctctgggttttgaagcacttggcggagaggataattagtcagtaccttgatggcgtgggcttgaaagtagggtctgatatttctagaggcaattagtaagtaaaaggtcaatttttctatcaagggatatttggattctacacccagtaatcttttggtgacatattacaccggtagttggaccattccttcatcttgcactaatgcgacacttatggcttgtttagacactgccaaatataggtacaactcacccaccaccggctttgataagataggagctttggtcaaatgctcctttagtttctagaaggcctcttcacattcctcggtctattcaaacttcttgtttcctcacaacatgttaaagaatgggatgcacttgtctgtggattttaagatgaacctactgagggtcgcgattcttctagtaacactttgcacatctttgtgctttttaggatatggcatgtcaacaaaggccttatcttctctgggttttctttaattccctaggagctgacgataaaacctaggaaattcccggaggagaaaccaaatgtacattgcttgggattgagcttcattccgtaccttgggagagccgagaaggcttccttaaggtctgtattgtgctctgtagatgtcttagatttcaccagcatgtcatcgacataaacctccatatttcttccaactagttcttaaacatcttgttgaccattctctagtaggttgctccagtattctttaggccaaatggcattatcttgtagcagtacacacctttatccatctggaagctagtgtgttcttcatcagctatgtgaattttaatctaattatatctggaataagaatccatgaagctgagcaactggtacctagagttggcatccaccatttgatctatttgcggaagagggaagtagtctttggaacaggccttgttgaggcccgtgaagtcaatgcacattctccatgtgtcattgggcttagggaccgaaaccaaattgggcagccaaatgggatacaatgcttcttggaggaagtcattcgttgttagcttgtccacttccgctttcactacttctgctcttaccagatctattggtctttgcttttagtgaactcgtctcgcgtcttcattgatgttcaaagcatggaaaatagtgtttcgatcaatccttctcatattagaatggctccatgccaacgcatcctaattcttcttgacagtgttcatgattctatcaccattggaggcaaatttctccccaccttgatggtcttggtagggtctacatcgcagatactagcctcttctacatccttcattagttcagtccttcttttagtccccacacgggggcctaattcgtcttcaaagtcctcccagatggcttcaacttctgcttgagtctccattctaggagaaataggtgcctcttcccgcaccacacgcatagtccagacatagacgttataacaactcctcacgctctactggtcacccttaaccactctaatgcatccattgtcacatggaaattttatacatagatgccttatggaagttgctgctccaaagtctaccaggactggacgtcctagtatttcgttgtactccatgggacaatccaccacagcaaaagttcaatgtttgaagacacaaatattgttttctcctttaaggtgacagggagttggatcttcccctttagcatcaaagtgttcccattgaagccttacagctaaataggacaaggtgaaaagtctacctttgtgagcccaattgcctgaaatgcaaacttgaacaaaatgttcattgagcttccattatccaccagaaccctagaaactcacttgttggctatttgggctttaatcaccaaggggtcattttgggaaagggcatgtgtcgggcgtcatccactgtgaaagtaataggtagattcgttgtttgaggacgctgggctggtgattgcccaacgacacatgttttgttagggtgtatgccctaaaaagcctataatgatattttctgattattaaataaagagttgaatatttaatatatgtatgaatattaagttattaatattattattgaataatttatattaaatatcaaaaaaattattattcatatatgaggtcgtggattgtagctgtactgtacagagaactaagaccatttacctatgaataaaataattagtaacatattaaagttatagaatctttaataaatggttgctagtacagttcactgatgctcgttcttcgatgcaagtaatctagattcagattacggatgtagtatgacatcgaagtgaaggtgatgtatataataaagattatatatgacaaggatcgatatgaataaagatgtctttattaacatgtcgtttatcataaaaaccaaattcattcatatcataacaatgatcagtagtagattgacctaaatcttgagttatcatgaactcctgttcatgttattagttttttttttattcactcgttaaagtttctcaaagaagatgattcttacgacttctattttgggaatctaataatgtggatggatgggaacatgatttataattatagaatcctgactttcctaacggatcgaatgtttgttacctttaagtgttaattttataactgaaatgttgtgcacaaatttagatgggatctaaat

SEQ ID NO: 162084 - DNA, 1138 bp, Cannabis sativa
ccaacatgctccaaaacacacccgtcagccgccaatctggggccctacccgcctgcaaaccttgcaccagcagctggcaatccgagacaatcaccacctgcctccagctccgggtttggcaccacctaatcgcatgaaacaaggcccaagattcagcttccagcggttgatttgcatcaaagttcacagccatcgcctccaaaacgctaccctccgattcaaacactataatcccagcagtggcacgcaaatctttgaaggttgcatccacaaataaaaccagtttgccaaagtaaatctccctatgaacatgctgcaacacaaccgaattagcctgagtatcccaagcagtcaagagacaagaggcggccttctgaactcttgccaaaacaccccttcaagacgggttgacgtgatcatgaaaagctcgattccgagctgtccacagttcatcaatcaaacagatatcgaatatgttaaactcccctatatctcctgcatcagcaccactcaaaaaattaggagttaaaagccactcaaccatcgttctcggggagtcaaaatggaggttctcgcttctaatggaccagcggctagcaaaccacaccgccttagctagtggacatctccaaaatagatattgagctgaatcatccgcttcaccacagataacgcaactaatattattgccaaagatcctccggaggcgacaaccaaaagggaggataatctttgcagagtttccagaggaacaattttagtctctctatgatcttgagcttccaaattcgagtccagaacaagtccagctcacccagcgacacttaataatggacttataagcaacgctcggagagaacaaaccattagttgcgtctttctacaccaacaaacacttgtgatatctttgtactgttttaacatcaatacatcttgaatctactcaaacctaaaaatacatcaaaacaaacataaatttgtataaaatagacctagataaactaaaacttaacttaaattaacgccttagagtgagtctaaaattcacttagggtgcgtttggaaagccacgatgtaattgaatttgtgtgtaattggaggtaattacacaatttgacatgtttgtctaaccatgtaa

SEQ ID NO: 162085 - DNA, 3720 bp, Cannabis sativa
atcatatatgaattttggattgagtcttagtatgagcatctcccagaattttatttttaatgtggatgtcttggccatccttttgagaagtgttttgcctttatggaaagaatggataatgataatgacgatgatatattgtacgggccatggatgaaaggtgctaagttaccatttactggacatgataaatatcgcactcatttctcaaagggtaatgcttggcctatcttgagacgaattgcttgaaactcccttgtttcatcgattccacaattgagcatcagatctcagcctcaaccaaacgtcctcttcgaaggggagtcctttattgatgcaccaaactagggttctttgatgaacaacatgaatgatatatcatctcctcaatagaaccaatcattatctttgattaactaactaatatgaacatacctattaatccccaccaacacgcttccaccacttctactgctccatctaatttattctataaacaacctccattgttagatacaccctttactacacacaccattaccaatcttgaatctcatggaattatttctatgccccaaaacacttcacccgtcatcaaccttaccaacatttatactcctgatattgctactgctactcacccaattattccagtcgccacctatcccccaattgttatgcctatttttaaaccaattagcctatctttgacactctctttttccacagattcctcacttctggccactttacaaccaattactttcactaccttcacaaaataagatgctgacaaagaaaattcttcccccaacagggtgtttaaaagacacaatgatgctccatcaatgagataaattctcaaatgatgtcgcaactgcactaccaatatcttgcctcctttctcgtcataaggagattgctcaaacaaaaaagtttcctctaataataagcgttattcaaatggttcttcagacggctctacagagattgctttgcgatcccgcaaaggattatgaaaattttcagttagaacacactgggattggagaactcgagagcatttagacatctttaattgcttgttcagcagcaatcaccccatgttctctattttatggacacttaactctttaataattcaattactcacttttgacagcatttagacttttccaatagtctcgaagcacgaagaataagacttagtggaagtcttatgttgttgtggaaggacaatgtagatgtcacccttaatactttaggtacaactttttttggttgcttcatggctgtaaatggtggtctaagtttccattttacaactttctatggagaacctgatgcacaaaatagagctaacttatggactcgtctacttaggctagtagatgtggctcctctacaaccatgccttttcattggagactttaatgagattctttcaaaccagaataagttaggtgggccactgtgaagtgaagcacagatgaattcttttcgcactattcttgatcaatgttaccgtatagaccctccttttgagggtgactgtttcacttgggctaaaaataggattgttgttaccactttaaagaagcatctttattggtgttttgtgaatgattaatgggactctttttttgttttacctcaagtgaatcacctgaattattatcatcgggatcatcaagctatttttggaattttctcccctattttggctgctcctcaacaacataaaagacatagcagatatcagtttgagaaattatagttaactgatctagagagtaaatacatcatctctacttgttggtccattaacaacacaactgatctaattatgaatgttcttcataatttggattcttgtgctaaatccctctaacattgacatattaaagaatgcaggcttatgaaaaagaatatatttgaggcacaatccaaagtggcctccctcaacaatgctcaattgctccccagtgatacagctgctactctaaaattcaatgaattaattattgctgacttgttggaacaggaagagatatattggcaacaatgttctaaagttaattggatgcaactaggggaccgaaacacaaaatactttcactcaaaagcttttgccaaaaaattgaacaacaaaattacttttctcaagacagatgcagagcctaaggtgacgtctaaacaagacatggctgaagagatacaagaatattttgccaacatttttcaagctgctctttattgatcacatagctcttactgccagtttggcagccatcccagctactatcacgatagatttgaatgatgaactactcaaacctttcacaaagacagaagtggaacttgccttacaatctatggtaccagaaaaaagtccaagttttgatggtatgtccgctatattttaccaaagcaattgggaagttgttggaaacatggtcacttcaacagtcttgagcgtcctaaatgaaagtgttgaccccactcttcttaacgcaactataatcaccctcattccaaaaataaagaagtcacaataaatgatggattttagaccaatcagccctaatgcaatgtcattctccaaacttataaccaaagtgctagtggctcggtttaaacatgttctcccccatgtgatatcaaaaactcaaagtgcttttctaccaaataggcttattacagaaaatatctcggttgctttcgagttaatatatggcattaaacacaaaacttcaagtcataaaggtgtgactgctatgaaactagacatgagtaaggcatttaactgtgttgaatggacctttattcaggttgttatggagcagatgggctttgcaaatggttggacatctctcattaagaattgtttgactacgaatcacttcacttaccgtttgaattgtttgaccttacttattcttattttgttctgaaggtctttcaagactcccacaacatgaagaaattatgggacaactttatggttattctctcacaaagtgagctcttcccatttctcaatttctttttggagacgacaacttactcttttgcaatgccaataagagttcatgccttgctatcaagcgtgctttggatatttaccaccatgccttaggatagttcctaaacccagataaattagtattgtcttcttcaccaaacattactttggcagcccgagttttcttccatagacgtacaactatctatgcccatctgtaaattccatgagaaatatcttggtctgccatcattttcagatcgagataagcaaatgttcagtgatgttaaagagaaaatttggagactcatgcgcacttggaatgataaaatcttctcgataggtggaaaagaaatccttctgaaagttgttgtgcaatcaatacctacatacacgatgagttgttttcggttaccaattacggtttgcaaccagctagagactatgatgtcaaacttttggtagggatctaatgaaacatgatctaaaattcattggcacaattggaagcttttatgcaaaacaaagtctgatgctgatatgagtttccactacttcatgcatttcaatcaagttttgctagcaaaacagtcttggcgtctatttgataacccatcatctcatctaagccgattgttaaagagtagagctgtacaaaaaaatttgtaaatcgcccaaactgaataacccaccca

SEQ ID NO: 162086 - DNA, 4104 bp, Cannabis sativa
tttgtttttgtatttgatacatatcttaccttatatctgtttgtttttgtatttgatacatatatatatatatatatatatataaggtttttattctgatttggttattgttattgtattattatatttaaggttcaccaatagaaattgcaaaagagaagatagaaattgttgatgatgaagagagaatatatggatttagtagcataggtggagatttactaaagtactacaaaagtttcaaggcaagtgttcaagtgtttgctaataaggatgatgaaggaagtttgttgaaatggaattgtgagtatgagaagttgagtgaggatgttcctgatccaacactcgtcaaacaatttgctatccagggcttcaaacacctcgatcaatacagtttgaccacctaatcatatccaaccactaagcatatacatatatatatgtatggttctttgaataaattattgtattccctttatgcttttgctctttcctgtctgaatctcagaggagctaataatttctgctaaagattttattatcttggtaaatgttttggtttggtgatataatttaattgatctgcaagattagattatatgaactgaaatggtatttggctttgttatcttttgggaggtttgtttgtttctcaagtttattaataaaagattcttaaatttttcaaaaaaaaaaaaagattcttaaaaatggaaaaaaaaaaaaaaaaaacaacagagagattaagagcatgtttggtattgttttctgtaatttgttttcgatttttttttttagaaataagaacaaaaaatagtttttgaagtttttaaaacacaaatcacgtttggttagtgtttttaaaagtaatattgaacaaaattcttgttttttgtaactttatttttttaaaattatttttaaaaaacaagaccaaacaagtcaaattatttttaaaaaaacaattttttgtttttaaaaagaaaaaacagttttttaattatgatgtcaaacatgctctaaagctcatgtttttcgtttatattacaggtaatatgttaacaagtttatcacttttcactttaaatcatatgaacatatgaatagaacactcgacctgttcttcgaacccaaaactagacctcggactcagatccgacctggagtcagtgttggggtcgagtgttaatatcaaatataatattgtattaaataatataaatacaatacaatacaattcaacacaatacaatataattagtcatagtatgtataattaatttcacattatttttggttgtttgtgatttatttattatatacatatataacactttgttttgatagcaaggaaaccagaatatgctaaaagattattaataaaaaaaaaacattttttcttagaataaaaaatatttctttcattatattaatattcaaaatgtgcacctctgttctgcctttagttatttctgatattctttaggtctcatatctgtcactaatgtcatcacactcacccaaaaatcgatacatggttaaacaatcatttggctaagattacaaaagattcaacatgtgaaaactaagatgcaaccaaattaatttaatcccattttcttattaaacaagtaaataaagaaagaaagaaagtgccagctttttcaggtctttgtgagccataaagtcaaagtcaaccactcaccaagactaagatatatttgtgatcatcaccccaattcctgaaaagatcatttcttcattaaacttttggttttgagtataacaaaatggagaatggggagcgattaatggacgatcaagtcgagttagaagccattgatgtgttgaaaaaagctttcaaaattttagccaagaattccaacttcatcatcctaaccattctcacatcacttcctttctggtcttttttggtttattacgaaactacccttcaggatttcataacacaaacctctgatatcctcgaacaaagacccgaatacacctttagggagtggcctataccatttgacatagtagatttactagacaagaatttctggtatgaactaatcaaactctgttttctatacttagtaccactccatctcttagaactcatcactgtgattgtgatcgttgacttttcatcaaagatttacactaaagacacacaatcattgactctaaagaacatggtacaacaacccttttgtggagcaaagctaaaagggagtttagtcactttaatctatgttgtcttcttctcaacatgtaatttgctcggtctgatttggttagtaacaatttactattgtaccatgttgggaaatcctttatatgatgttctttctggtttagtgtttgggacagtttttgttttgttactaggaaagtacttggaatggaatgctatgtggtctatgagtgttgtgatttcgatattggaggagttttatggtgttgaagctatagctttatctgtttatttcagcaaaggaaatgagcgtcgtgggtttgttttgatgcttgttttctttgtgttgggacagtgtttaaggttgtcttggttcttgttctatgattcatatggaattgaacagtctgaactttccattgttccacagatttgcttggttttcttttgccttgggaatgttcttaaatgggtttcttgtgttgtttattactttgattgtaaaaataggatcttggtgaagaaagtttatgaaccacctttgatctgtagtgagttgaatcttgtgttgtaacccaattttgacactaaaaagctcatgtcttgtatgcttaaacagtttggtttttggttttgttaatgaagtttaataaaagattcttaggaaaaaaaaaataaagctcaaagaatctgtcaaagtctatgccaagaacatcaacttcatcatcttaaccattgtaatctccattccttcatcatacttctcagtttactatgtaacttttctacttcaaacctttgaaatcttcttgtggtagtttacttgtcattaaagtctaaagatatagaaagaaacttcatcaacggcttttaaagaaaaaagtttgaaaggcaacttaagcacacttatttatgttgtcttcaactcttcttgtagtcttatcggattgatttggctaatagtaatatacctattgcttttaaaaaagtatgagtctaaaattttgtatttgttacatgttttggtagtactaaaaagttacttgaaattgacttctaggtggaacatgagtcttgtaatttcgatattggaaggaatatatggattcaggacttgttttagtgttgattttcttcatttggtgtcaaaatttgaggttgatttcattctattttggaacattacttggattgtgttgcagattagtttgttcttctttgggaatgtgcttaaatggattgcaactttgcaagcaccatctatttttatgaccgtaaaacccaaatttcagagaagaaagaagatattgaagtaggtgagatggataagctgaattttactcaaataggcttcactcatgtgtaaaagaaaatacttgagtagattttagttttgtcacttttataatgataccatactatgaacttctcttttgacccacacttccgaaatagggtcttgttaataatgcaaattgtaatgaagtgttatgccaaagtagaggaacaaaatgtgttttgatatgatttttgaatcaaatgatcaccccataataataggatcaatatctctcttggagggctgtgtaaactaaagatcacagcaaagtttctgaacttgaactcttaataccaatgagaaacccaaaaaaaaaaatacaaacattatctaaattcatcaaaattactaggttactatttctaatgctaactaacaaatgcagacatcaatttgaatctcaacttattatttcttggttcactgccaagaaaaccacttcacctcaatagaaatgagcagcatgtgtcaaaagctttttccccttatttttcggactcgatcaccctcttcgcaaaagacggtaaacagaaagcagccgtgtgaatctgaagacaggaacaaa

SEQ ID NO: 162087 - DNA, 4350 bp, Cannabis sativa
aagttagttagggtgttacagatcccatggttataatggcccaaaagttccaactaactaaaaacagactatctcggcaaatcagttcaatgagatactactcgaaaagatgacaagaatagagactgtgatgacagccctaaccaaaggaatccctaatgtgcaaacacctccaacaactgatgatcccagaagagtggatccaaatgatcctagaacctcaaacccttacaagaataaagggaaagaaataatgggtgacacttcgcagaagactcccacgactaagcaacaaaagaagtctaaaactgttgaccaacctcaacaaaaaatgaaagggaaccatgctctagggtagggtgactagattaattctagaggcagagtcgtacaaaaagataaggttgatgccagagtcaagaagtttgcttccaggaaggacaagcatcatccaaacaactctacaagtcaaagcaaggatgttgatgaggtgtatccgtctcagacgacaacagtggaagtctctccacgattgatctttgaagaatactaaacaagaaaaaagagaaagcaagaatggaaaaggccagaccccgcatggacgatttgagaaaccacatcaatgatcctgtccatggaagagaatcttcgagtgacaaaactccacgcttagagaaagagaaaaaggtcaaagagttgatgaagctacagagaagatctccagaaaacaaaatactgtatcaaattttgaggaagaagacatagagccatgtgtgaaaagaatcatagatgcaccactatcggagcgctccagaatgccacaaatgaaattatatggaggtaggacagattccagagaccaattgtccaagtataattgcatgatgcaagtctccaaggctattgataatgcaaaatacctttgctttcattaaatttaagctaatccgcggaagactcgtggtagagattatctccgagatcaatccacaactagaaggatctacaagcaatgttcagaaaatagtttgtagcgaatgactttaatctggaagccagttctctgactagtgtcaaatagcaaccagaggaaagtttgaagaaataaattcaatgcatgatggatgtttttgctaaaagtaaggttactaatgatatgaaaatggtggctttgacatcaggattaaccataggatccttgctatggggagatctccaacgcaaaatggcatatactttaactgatttcttgacgagagctcaaggattcataaacttagaagaagcttatgctgaagcttatggagtacttccaacaccttccactaacatagcagtagcccaaactttacagatgactactccatcaatttttcttccagcaactgcctttaacactcctaccgtttacagactaagtgcttctacgcagccagcttcacaggctagtttttccagatttggagtagtacaagctggattcagtgccgctcccagacaaatgaaccaaaaagtggaaactctagagtccaatgtaagccagtcacagagcaagaggatttccaaggctccaagtcaaaacgattctgcgaagaaaagaaagactcaagagtatagatattttgggtatacatgccttgtagatactcgagagaatgtttataagacaacttgtaatatggtctattgcaagaaagctccgccgatgtacaagggtgaaagacaaaagagagattcaaacaagaggtgcgactaccacattgatatagggcacaccaccagtgagtgtgactatctgaaggatgaaatcgaaggattggtacgaaataggcatttgtctaattggataagaattccagtcatttatcctaggtaggaggttgcacatgaacaactttttatttctggacaacatggagccattaatcctcctcagggagtagtccatccacaggctcctggaattcaagctcctaatgcacaaacccttcaagggacacaaaatgctccaacagagagaattgatgtagctcctagtctcagaaacccaatcttccttgagcagcctagcctgcattacatggtcaagtggcaaccatttttggtggaccacacattgccagaagcatctaaaatgcacagaagaggtacttgaatgagttggatcaagatgagacttgcaatttggtacaatcacctactcaacatcctcaaatgatgaatttaccaatgacttttatagaagatgatgccaagcatgtgcattttccctataatgaccattggtgatagaagctcacatagcgaataaaagagtttccaagattcttgtagatgatgcaagctctatcaatattaaacctaggacgaagtctctctgtcatctctgatctatttatgatgttaggaaaaggctcgtcccacttatcgtaattagcaaactcggcactacgcttggtagaaatattgatggccaactttctcatctcatcatactcgctgccacgccttttcagataaaattgctcaatggcctccatgtgcgcccttgcttcttctaacagtgacataggcctgattggaaggttgaagtgcggaggaggtaatggaggcaaggtcgtcttttccctaaacagttgtgtggtagtggcaggaatgcgtttgggtgttaggggtggtagaggcgcatcttgattgtccttggttgtgcgagtgctccttctgattggctttctgccctcggagacatcagatccctttcagaagtgagatttagtagcttgtctccttgtggcagccaactgttggactttttctttagtctccacccttgcctttttattggcccctccatctgtagtactggactacttcttgagaaccaagacttgtccatcacaattcgagctgtcttccttaatgttccctataggcacttgttgcaatgctgccatattaagaacaacttttatcaggtcaatgacagaagtagacaagtctttcgaggctaaagcctttggagtagcctcctggctcgatgccggaggtattggcttatgagatccactcccagaggtttgtctcttcttgtctttacttttgccttccttggtcacctcacagacttcatcagatctagagttgatagcatctaggatgttgttgagcagactcatttggaatatagcaggttactctgtaaggaacaaataaaaatacacatcatgttaaattatatcaaatataattacaactacaagctattagataatattccagatagatccaaaccgtttatcttagtataattgactttccctctaccaaaaagggcatatcctctcggtctaagttagtcttgtgctggaagaatcctaggaagtaaattttactaaattcgcccaccctaacgtgatgatgcactggtggaacgaaatggttgagactccttataatgcaatctactttatttatgaaatcattgcaagaatatctattttgatcaaaatttaaaaaatataggtcaaagcccccttggtcagttttatctaagtttgttaaggaaggagccctaattatatgaaagggtgtctcaccactaccggaattacttgctcccggtgcaccctcatttgggactacgtccgtgaagcgaatagtgagctcttcaacctcgcttaaatcttttaaaaatatttactcctccagtcagctagctagtattcatcatccttcgcagcttttaaggcctcttcagcagtaatgactgcaacaacctccttcaccacctttggatcccctttgaggactcctaaacggtttccttcaccaaaatgtggttaaatttttgatgaggcgcaataagtcccaccttctagagattctcagtagtcacaagctagcccacttgtaattcctcaggtagtaaagacttgtaaaaagatatttttcctccaattccaaagtcaagggcaattggggaaggaaatctagaagaaacagaacaatcattaaaaaataaaaataaaaggaagaaaacaggaggtgaaattaaggaaaagaaaaaacacttaatggttgtgttaaagtccaggctgagtgtagggactctcttcagtgggaagccagaggtatagaactagtagtcccagcaattagggttgtacataaatttttgtaaactgtccaacctaaatatcttgcctaaaccaaaccgagataacccactaaacaatacaaatcgaaaaacctaaccaaaatataacccacccaatctttatattgggcgggttgaaaataataccaactagcctaatcaacccgaactaacccgaccaacttgattaagaa

SEQ ID NO: 162088 - DNA, 3483 bp, Cannabis sativa
  modified_base (255)..(257): a, c, t, g, unknown or other
cacacacacacatacagacacacacacactttgtttacctaccagagttgctaatagattaatttctttcttaaacactcaaaacacaaacaacactgctcccagacgcaaaagaatgaaacatggactcttcatgcacccaaatcaaattcttgtgacccaacttctttagatgcaaaaatgtgaatttagaaatataggaatccaaggagtaacattcatgtttccagtataaagagagagagagagagagannnagagagagagagagagagctaaagctagaagaaatctgctaaatgttgccatttcattaacagctatagctaatatgtttctgcttgggagcagttagttcattgtaatagaaaatgcacaagaataggggttccattaatacatctcagtctctaaccttcaaaaattatgtgaaacttatgtgtctcacaaatcatatctcacgttccattttccattaccatcagcattgaatgtccaattgttttcccttatctggaaatatggaagctgaaaataaaagaaacaaaaaaattattatcctaaaatccacaaaaaaaaagtaataaagtatatcatggtttttaatatctcttccagaaagatgaaatgaaaaggtaaaaaaaaacaaatcttccatcccaagagattaatggcagaataatttttttcgggtgccaggatcaaacatactcaacaatttcagattctcaatgatctaaagctggagcgccatatgaaagtctacaacaaatacaagttagataaacagtacatacctgctcaagcacttcataaccaaatttgatcctaacatcttgctccttctgaaagttcaaaatggcccaagacaattcagcagctcctgttgacctcttctgccagaatattagtaccaattggaataagaacaaactatgttatccactgtcgttgtgtcttataaagtatgtaaccaaattcaaagctcagagctcatacaaacctctttgaattctttgtcaaagtcacagcgtcccttaacattaaacctaacttcgccattagttgtcacagggaatgacttcttaccacgaacaacataccgtactttctcgcgcttatcgtatttcattcctcctccaaaacttgctgagaactaaaattgaaaacctttacttagtactacatatctcagatagataatgaaaatgacaattagataaacaatgctcagcaaccaaaattgagagcatacatctggatagaagcgtctcaacaacgcactgaaatggctcagaactccaagtcgggtatcaagctctccatgaaactaaaacagaatgaggaagaaaataaggggttaaacaggtctgtgccagttgaaaaatcaaatgtacttcaacagccatattcacatagatgaagttattactatgctaagaagctagggcaggtttactaatccctaaagaaaatatcgattcctcattctcaattgtctcaaatgagtaacacataagtgaatgaatatgagagaagcgaaagggatacacacctcattttctatttcccttttaggacttgtttagtacaccatattagttcatattgtattgtattatattaaattatattgtacatcatcatatttttacataatattatgttaaattttaatttatataaaaatattatataattatgtcgataaaaattaataccacattacataaaaataagatataaaatacaattcaatataatactatgtaatattttgtaccaaacgaacccttaagatccaaaatagtcaaaacataacaacaacaaccctaaaggattggccaggagccatgggtaaactagccaaagtgttagtgttacaggattataaacaaagcatgcgtacaccagattacaggtagatgagttccaaaactgatttcctaatctctaataaaaataacggactcccttattcggaattttagctaattgagcgaattccaaagtttgtgtctcaatttcaaaatggtatgggtgtatacaaaagtaaatgaataaggggacagaaataaattagtaaaaacacaacgaaatctatacatgattagtcatgtgtaaaatactgaagctttggtgtaacagggttatcatcaaatcatactgaacagtccatccaagcttaggcaagagtagcaagaagagaaatagtagtgtacctgtagatgggttttggggtcgatgagaaacttctgcttagcatggattctcaaagctggtttggaatctgcagcatatctaagagaggtctccatttgggggataggtgaaatctgatactcgcaaaccctagccggaattagaggagaccgtcactcactagtttactactctctctcttgtctctactcaaagtcaagactcaaaagtaccaaactgttatccagccatacttggattaccgaaggaagaaaaatcacgggtcgtttcttctcatacgacaagtcgttttaggcatcaacgatatacgttaaaaaccctttcttttatcatcagctgccagcttgcttgcgtatatttgcacaaatggcccatgataatgacataattgctaaaagggactattggtgtctaatacatttcttggtgttatacggctataagtttaattaagtattagatctcatatcgctaaccaatcgtgcgtaccactggtgctcaatagtagtgctcgaagctttaatctatcttatttatctatataaatataaggaggtgttattgggataaattttctcttccctgcaagaaatgtgtatactgaaaagaaatagcggtatcaaaaaggatttcgtaataatagataaagaaatttcacagtattaaaaaaggcatttcgcatatttagtaaaattgcgttgtgaaccagaaatgtgtgaatacgcattaattgacgtaaatacaacgatcaagcattcaaaatgcaactattgccctattattattagggcaatagttatagaaaatgttacatgtattttgtaactatagcaattattattattattaggcctattattatttgtaaggtttcacctattgccctataaataggtgaaccctccctcccccctattcaaagggagcggggctagtttaaataaagaaataaaataatggtacattttttaagctcccgaactattataattttgtcttttttattatattattacatactcacatctcatttatattatattctttgagtactcacatatttattattgggtattcaaacgacttttgagtacttgcacaatttggcgttgtctaaatttgtccaacaccccatagtcactaaaattttgtaggttttagggtcttagtaagggataataatcctaggatgatgatgaagtaaaatacaagagttaagttgatactagccaaagagttcccccctttggctagttatag

SEQ ID NO: 162089 - DNA, 4775 bp, Cannabis sativa
  modified_base (3830)..(3844): a, c, t, g, unknown or other
ggggcaggtggttggtgggacggtcaccggagctttggtggcgtctgggcctgtgattgtcattggtgcaacctttatgaatgctacatttgagcggttgccactcgagcaggaggaggaggccccagccgctgcaggcggtggggaagggacacaactagtggaacaacagcagcagcagcagcaagctggagtaaatcctggaagtagcagcagtaatcctagtactactcaggctatgggtggtcatgatcatcatcagcagcagcagcaacatccttcggttccaatgttcaatttgccaccaaatttgatgcctaataatggtcaggtgccccatgacatgttctggggtcccccttctcggccacctcctccttattgatccctcgtatgagaattagataatattatataagttagagaagagttttatgccgactttttttcctttttttggtcattttgaaaaatgttatggttgatcgttttgatcttgtaagcagtagtagctatagctaggtagagcttgttttgatcattttaagtctttttcatttttcccctcgtgaatgttattttattttctaatttaggttttaaactgcatgtgtttaataatgtatcatcattcatcaacttgtgagttttttttttttttatttgttttttctttctgtctctttaagtaacctgttgtaggagagaagctagctagctacatattgaagaatggatcagtcatggtcatggagctttctgctatcgatttaaaagcatggtaagtgagcttaattcgtgttatacctttatctaccttgtggattttctatattttatgtaacaaattaagattcagaagatgaataattaatgttggtttttaatgaatttatatatattatttcaagaaaaagtgtttgctaaatccaatgataatatcataaaagctggttgtaaacctattttacctgtggaaactgtgacggtccatctagggcttagtgtttagtcatatgagacctagggccatgttactcttctagtgaattggcatttcgtaattatgatttagtttaaattaaatgtactcactggtaggatagtgtaggatggtctaatattttcgtttcattttattattaattaaaatagggagatgtgtgaaactagctagacttttgtaggtgttcttaatttagtcagtgccttgttgacctacctatatagttgtactatatttggataagtattgagagattttagttgcactatattttttaattgggttgaaaaaaattcattgccagtgtcgttttattattaggtaagggtgggttggtggtgggtattaattaagatcgatcatcatctgattattagaaaaagaaagctagctaaatgtttaacatactgacaattgacatggtcaaattcatgaaatttagtcagaaactggctataaattattacgtgagcggcaatttagttagctgcatggttttatatgtatatatatgtgtggaaaattaggatttgacttgtataacacttataaattaagttttttttttttctttttccaatttgtattgttaggtttggttttcctgatttaggaaaatatagattggtgttagttgtataaattgtatcttcagttgacgtttgtatctggtaatcataaatgtggtgcggtctttgttataaacccacgagagtacttttgccaaaagttgaatgtataaatctgtgttcaatttggaagttgaagaagtctttttctgtatgcttagatggaattgatacagtcataattagttaacaaataaatagaagatatgattgagacactaatttgtagtatcaacggtttacaaaaagagtgtaatttgagtgtgactcttaacattattcaataaataagtataacatgatattgttctatggggggattttgcaagcggtttatacactgataatggttttatgagaatggaattgatcaatacattatattttagtttgtctgcatactaatgatatatattatgtgtatgaagcttacctttttctacaattctttataataatgcaagtcctaattgtctgcttgtacggaaatgcttggatgactgttttgttctttctttgtttgaatcgaattgtggatcattgttgcaatattcaaatttcaaacatatgctatattcaaacttatgtatttactttataacatgtatgactcattctacatacatgttaaaatatttttcttttacagatggggtgagagcttcttctttcttttattcgatatatatgcatggtgtgtaatactatattattgtgatcttaagccttttatatatagctgtgattataagctatgatttagctaccgctatatatataagaaatagaaaagtatacaacatagttctcgttccaagtgtatgttttagcttaaaggctttccatctgttcactaatatgtagtgatgcaaaattatagtctttgtctaatcaggagttatgaaaaacatgaaattaaagcacacaagttttttttttttttttcgaaagaaagtcttgtgaattacaaggaccaaaaccacaagactagaaggaaggcaaaaagccattccaaacgaattcactatcaagcccaatacctcatttagcaacattaagagccaaggtattataattcctgctaatatgaactactttgaggtttgggcaaggaaataacaagttcttaatacaagctactaaatcatctaaaatattgcaaccccgattacaagaatacaatttatctacaatagatttgcaatctgtttttaaaatgtccacaagcaagagaatagaggaggcccactgtagagcatggacgatagctttacccttagccaccagtgtatcaacacagcctgtaaacgggttagccaaaccagccacgacctggttagagtgattcaagacaacagtcccaacactatatttttttctcaggatatcaatggctgcatcagtgaaaatctgaaaaactcctcaagaggaatatgctgcaaaactgtctgatccggattggaaacagtgggaggaacaggaacctgctgagcattcaaaaacttgaagaaaaaagtaacactccaatcatacaagttagccaaaaattctagtatataagccacaacatattgtaatatatgtgtaaagtgtaatgctaattagggtaataggggtataagtattcaaagttttatgtttgtaagcggcataaacttaatgtttatttttagcggcataaatactcaatgtttgttaaattgtaatttttctccagttttgtcagtacaaactctgttttgaatttattaatagaacatttggaagtaactgatactacataattattagaaaaaaaattatagttttacaaatattgggtacttatgtcgctaaaaataaatattaaatttatcctgcttacaaacataaaactttagttacttattccgctatttactctactaattatgattcatgagtaagcctaaaaatgctaattaatcttattttagagatagcttttgctttaatataatttttatgattaaatatttatcacttttcatctttttttgggctaaaagttagtcataatgtaaaactaattagggaaattttatttatactttaaaaatttttaagtctattttattaatttttattttatataaaattcatatttttaattgtattaagttttttttttttaatttttttcttccaattcaattcttaaaaaatatacctatcannnnnnnnnnnnnnntattttaaatattatgataaagaattaaaataaaaaattatataaacttttcataagagaaaatataaaaaaaatatatgagttagaaaaaattatgaaaatgaaattaaaatgaggattgaaattaacataaaataatgtggtaaaatttttttaaaaaaatattaaaagtaatttttaaaaattatttaaatttatatatttttttaataataaagtgtatttgtattataataatatagatattgtaaatatatgggcatgaagctattttcttagtaattaattttaaaatacattttttttgggagtaaagagaaaaaattgaataaatttttattgcatgcatattatatattcacttattcacaatcacatgtactcttttggttatgtttaaaatggtgaactaatttttttaggaaagcgtgatttgaaaaagaaggatagtactattccaataatgagaaaattgaaacataattctacccaagattatcattcggtgacttacttttgaaaaaaataatctgctgtcccagttttctattctcaccctgtgtcactaataatatcaagccatttcaagtagttaagagattcattagctcttttttaaggttaacattcatccattaataattattcaattctctctccaactaattaatatcattctatctctccaataaaaataataataaattaataactaaactattattatctctccaactatttaactttatatttcttttaataaacttttgggaaattctacaatgcacccccttaaaatggatacattgatatatccttgtctgattaagtatgcgaaataattttttagtcaaattttttctcatgttcatgtgcgttatagttatttaagacatcctgcaaaattttaaaaaatttggaaaagtttaac

SEQ ID NO: 162090 - DNA, 3239 bp, Cannabis sativa
cgccaagccgaagccgcgattagaggtcggctatgccagccgagagtcaagcaaccttccttctcctccacacagtaaccttcagcagagaaaagcgtgagaagcatgctggcttgcttgaacgcattggagccgagatgaagaggctggaatccagcttgaacaagtcgattcgtccacttagcaagaggctcgtggcgttcaactcgagccgagccttcgcagcataccacgttacaaatctctctctgtaagtacatctcggctaaagctttatccggctggagagagcaagcctcgagcgagtcgaacatggtggagtaatagtacagagcctccgtgaaacgatccaaaaaccctacttggttgtgatcagcctcttgctcaaccaccgtcatgattttcgggttcaggtttcggatccactcaaggaccatatcgataccagaattccagctatgatccgacccgagtagcctatggagttgcatgattgaattcacagccacggcttcctttgagctgacctgaagcatccacggcttcacgtcctctagacgctcagccgccacgccgcgaaaggcgaatcgaacgttgacggacttggccagatcagccagcctcaacccaatttctcgaagcgagtcgcggccgtccggtgaaggagggccaatgcccgttaatcggagcaaaggcggtcctccgggacggagagctagtgcttgtatcaacgcaggccattgtaaaccgtgcattaggttgaaatcgatgacgtggacgcaatcgtgaccgttgaaggcctctagtatggcttgattagcagtgaaatgcgcaaattttaaataaggacaagcctcgtagtaatgatagtacagaacctcgtcctcaaacggtccggcgccaatgcttcccctaggcgagaaaatacggcgactaagcgcgtcgatgaagtacccggccacttttccgattccgcagttgatgttgacgcgtttcagcaacggttgcatagtctcgattaaggaacgagcaaatgggaggtcgccacgttggacggattcggcgcacgtgagaagcatatggactagtcttatcccggagtcctcctccatcgccgtaacgaccgtgagtggttgctgattcaactgaggggtaggaggaatgttctgctgcggctgaggcacaccgtgttcggccgcccatacatcgttcctctccgtcggattattgatcacgagatcggggaaatctggtagatcggcggagagagggaatgggtggttcaactcagagagaagcgagtcgacccaggaggaaatatccgaagggttatagtgtacggtgtcggaggcgatgtggttaatttgtgaagcaggcgagttgaccataacggtttcaagctgctcaagccgctgagcgacgtgctgtaggtcggaggatcggaccttgtagccggcaccggcgaggaggccatctatgtcgttgggttttttaaaggaagtggaagaagaggaagagcttccgctgctgctgctgctgccggccgagttggcagagtcgtacggccccatgagttgagagagtagtgtgagaagaaggtgtttcttggttttgagatgagaatgttataatttaggttctgactataagatttgaaaaaagagtatgataattgatattggttttgatgtttgttcccaaatttgatgggtttgcctagtgtcgagaggctatttgatagagtagagtaaataagtaataagtgagtggaaaataaggagagaaaataaattaaaagggttttgagttaaaaatagagggccagggtgttgctttggttgggtttgggattgggaccgtagacgtaagctgctggtccttatgagggattggctctcagccatgctaatgggaaaaaattagagtaagaaatttgtagccacccaattccaaactaatttagtatttgaataatattctaccccagttttacttatgtggagtactaataagttaagaaataaccatattgtctatcttatatacacacattgacacatatattttttgttttgaaaataatttcttaaaattattataaatagtttataaaattaatgtgacaaataagagaataacatagtgcaaattaaagcaagaaagttggaaatcgttatgtcatattcaactcattagtctattataaagcaatttttatcactattttaatatactttcacaatccaacttattagaccaattttttttacttttcactactttatagaagttaatctatttaacatacttttcaaaaaaaaaaaaaaaaaatctattaacatatttagtaaatattgttgcaaagaaatatattataatttaattttgttatgtttgaatttttaattatatttgtatattaaatttactatatatataatatccttcagaaagattgtttgttttaggacacccatgtataaatcaaaacaagagagtttttttattagttcagtttaattcttttggtgtatagtaaataccttataatataagttaataaaagatacatgtaaatatcggtgacacaagttgaattgtcgttaatttaaagggacctttcaccctattggttgggagatatgttttttttttttcctttttttactcaatttatttatttaaagaagaaaaaaacagttaaatctacaacctgacactgggcattggaaaactgcctttaaactccttttcaattatattgttgtagcttgtaaattttaggtgtatagagataagtgtatcttgtatgtagtgtggatgtggaggattgtaattggtgtaggtgcacatggatgggagaattgggagggagtaatatataattatatattgccattagtagtttttatgacaattatagctaaactccttatttagtttcaattgttatagtgagtaaaagatttgaccataaagctcttatttattgctgctgactacttatataaaattttgatggcaaattacacaagcaataaattttattacaatcaactatctatttaaagtattttacttgatttcaaaataataataataataataaagtattttaattctaaaaaatttcatagtattaataaatgacaattttatttagtaattaattatagttattaaataaataaataaatagttttgacatttataaagttgaattgaaaaatatagtatta

SEQ ID NO: 162091 - DNA, 1845 bp, Cannabis sativa
tacagttaagtgttcattgcttattaattatgctgttcctgttggcagtgcggactgccttagttgcactgattgcatttatgcccacaagcccaaatggtgcattgggctcactagactacaagaaggaagagaggcgtgctctggctgttaaatctcgggatacaccacccaaattcggtacccctgaacgtcaaaaattaattgatgaggcaagttagactgttacacttgcatgatttagctcaaaatttctagttttcattcatattctctgactcttaatagtgctataactaacacaatgtttatcagattcatgaatatatgcaaagtaaggcacctcctgttcctcaacccagcccatcgcaggcacctgaagaacaaccttctaaagaggatgatgctcaggcgagttctcagaatgttgtgagtagcgtgcctgttgcagaggggctacccgatgcatcagaagaggagacggccattgaagaacgccaggaagtacatgcagatgccaatgccggacctgtacctgtacctgcagagatgagaacatcatttgtggctccacccaatgacacaagtaatcaggtgatgcataggcgagaaacaaccagggtcccgaaaccagccgatgatcgaatgttcacatgggctgctgttggacttaccattgcaattgtggctcttttgttgaagaagttcatgaaagctagtggacatggtgcctttttcatgaacgattcttaagatcatagggatgatttttgttacaagcgtggaaagcttaaattctgaactgatactatatagttaaaagaaagacatctattataacctttttttttatataatttgtaacatattataattattatcttaaaatacacattgtaataataataatatattattcaactgttcatatgacatgggcgatgttacctctgttttggtttgagtaatgaaaaaagcaaaggaatattaggtattaaaatagtattttcttctccacaattttactcaaatttgttcacagattgttatgaaatcatcaaaatactctttaattaaattatatattgatttatacatgacatctagcaaaaagattcttgttctaatagtttctttttctagctttatttttcttttcccccaccaaacaatcttgctctaacttcacttgagaggatgaaattgccttgcagagtaagaaatcaaattttgcaatttatatctacattatttccagataatagatctaaaaaaaaatcagtaaaatatggcagtacgatacaaaccaaatcctactaatcatgttagagttgtgtcaggatttacaaattttcaaggggtgagatgagcattgtacaaaaaaaatgcttagcagagttaatatgggaacaattagagaaccaaatgatcatcagcaggtaacaagagcctgcaatttcttatgcaatgccctgtaacattggagactgcagagaggaagattagatttcgaatctcggtacttgtatgtatttgtacaatttggccctgcacatctttcccttggaggaggataactgaaaattatgtccagtaaataaatcatcacataagcataacaggttttatttaaactagttctaacataaagctagaactacttgttgtcagttgaaaagtaaaaccttgtttacctgcactgaactggattaaataaacttggtaagccaatatcatcggagaatgtaacgatggatccactcggattattaacccatctaacagtatttgatgaaagtgtgagggcattggcagcttttccctgcaggaagcaacagacagact

SEQ ID NO: 162092 - DNA, 10170 bp, Cannabis sativa
atggaaccgaattggaactccgactaggacccgaataaggaccaagacactgatcgaaacccaaaccaagactttcgaccaaaacacaacctcgaacccgaacttagatctggtcccaaacttaggaccaaaacgtggataggggacctaaacttggacccagaacttagactgggacccacgaatggaccccagtcttggtcttggacataggcttgggacatggaccaggaaccgagactgggatcaaaatatcgacttcggacccgaggcttggacccaacccttagtcgatgtttagatttgggaatcaaaccacaaccctgaacccgagatttgtgacctaggaactggaccaaaacttggacccaaaccagaacctggacccagacacggaccagactcagacccaaacctgaacctgagacccagaccaaaactcgaacccagactgggactggcagcgggtttgggtctaagtctaggtctgaggctgagtttgggtctacgtttgggtttaggtgatggggaccaggattgggacccaaattcagaactggattaggacctaatctggaccaagacttgagactcaaaactcaaaccctagacctgagaacaagacagggacctagacctggactaggccaggactcggacccaaacaagaatcgggactcgaactcggaccgacactggaacacagacctgagcccaagaattgggaccaggacatgaccttagaccctgaccaagatctatgacccagactgggactcaggacccaaactagaatcagatcgggacttgagatcgagatctggatctggatgcaagacatgggacctggggcttggatgtgacacttattcgaaatctgaatcttggacttggacccgaactacgactcagacctagaccaagaccaggacccgaacttggatcggacccagacccggatcgcgacttggacctggatccaaacccaagctgggactcaggccccaaacttcaacctgaacttagacccagaactctaaaacctaaacaataatcttaaaatcctaaaaccctaaaccctaaaccttggaccataaaccctaaacactaagccctaaacccctaaaccctaatacctaattcctcaaccctaaaccctaattccttatcccttaaccttaaacccgaaacccaaaacccagacacgaaactagaagtggacccagacctagatcgaggatggactgggacctagatctagacacggatctagacccataccgagacccggacccagacccaaacccagacccagaccaagacccataaacagacctaagacctggacctgaactttgacccgcacccaaactcagacctgaacctagacccaaacttggacccaaaacaagactcagacttaggcctagacccagactcaaacccaaacccaaacatgggacccaaaataggaactagaactagaactagactaggaccaaaacaaggacctggacccaaaaccaaaactagacccaaactcagactacaaccaggactcggacttggatccaacttgggacccaaaattggacaaggacctagacccaaacctggactagaacccaaacacagacccaggcctggtcctgcacctgaacacgaacccttacccaaaccaagacctagacctagacctggacttgaacccagatcagaccgagtcccatatcgcacccaaacccgaactcgaacctgaacttgaactgggacctagatcccaaacctagcacccgaactgaaactgcactgggacccaagacaaggatctaaatgaggatttgacctaggactagggacccgagacttggacccaccccgtagtgtatgtctagttctgggacccgaacccaaacttggacctagactaggacccagacttagacccgatctgttcctaagtcccagtcccagttttgggtctcgaatcctagtcagtgtctgagtttgggttcaggacccgagtcccagtctaagttttgatttgggtccagcaacccaatcctggtctaggtttgggtctaggtcttccaaattcaaacaccaactataggtcgggaccaggccccaagtcctgggtccagatccaaatctcaatctggttccgttgtcaaggtttgggtctagggtcgagtcttgagtcctaggtctgggtttgagttttagatttgagtctgggtttgtgtttgggtctgtgtttaggttccagtccgggtcctgggtcacaggtcttgggttttgagtttcggatcccaagtccaggttcaagttcaggtccgagttcgagttttggtttgggtctcgatcccagcctgggcctaggtttgggccgaggttccaatctcggtttgcgtcttggcctaggtcctgttttgagtttgggttctactcttggtcccgatccttttctagggtcatagttcgaattccggttctggttccaattttaggtgctgggtttgggtcaaggtacgggtcttggtccaggtcttggtccgagtttaggtcctagtctgatacgcaaatttagacaccgactatgcgttaggtccaagccccgtttcttaggtcttgagttgagattcgaatcccagtctggatccaatttgagtcccgagtcagggtctgggtccccaatctagatttgggtcatgggtccaagtgtaggtctaggtttgggttcctgtcttgagtcccagttcgggtttggatctgggttggggtcatagttaaggtcctcatcaagttcttattccaaatttaggtccaggttctattctgagtcccgttcgcgggtcctggtcttctttcaattctagttttgggagatggggtacaggtctgggtctgagtctgggtccttgtctaggtctaggtcctgtttatggtccgagtttgggtcccagatcctgacactaactacgagttagttcctagcctcaagtctagatcgcagggtcctaggtcccagtcctagtccaggtgctggtctgggttcgggtctgggtttaggtcccggcctgactcccattccagtttcggtttctgttcaagtttctatcacagagtacgggttcaggcccaggtttgggttcgagtttgttgttggtccgactttgggtccaagtgcgggttcaggttcaagtctggctctagatcctaaatcaagacactgactttgggtcaggtccaagccccaggtcttgatttagatcttgatctcaggtcccgaaacccaatctaggtcctaggtttgggtctaggtctgggttcgggtcccaagtctcactcccaatttcggggcccaagtcactatccttgttcaggggcctgggtcctccatccaggtccaggacctaagtcctagtatgggtccaagtttgggtgcgggttcaaattaaggtctcaggtcctagtccgagaccatgtttccgtccgagttcagcgtcaggtctgtgtcctaataccgatccaggtttgagtcacgatctctggtcctaggtcccaatttgagtccaggtccgagttccaattccaagtttgagtttaggtcctagtccaggtcccagtcccagtcagattctcaagtctctggtctaaagtcctggtcttggtttgggttcagatcctggtttggatctagctcccaatttggttctaggtctaagtctgagtttgggtcccagttcctaggtcacagtaagggtcgaggtccttgtacgagttccattctgggtttgggtttcggtttgggttttgtttcggttttagtcccaagtctgggtcctagtcctggtcccggtcctattccgatttcgggtatgggttcggctctggctctttgttggggtttgagtttgggtttgagtttgggtttgggctcaggtcccgggtttgggtccaggttttggtttaggttcaggtccgggtttgggtctaggtctaagtttgggtccaggtcctgggttttgatccaggtctaggtcttggtccgggttcgggtctaggttcgggtctaggtctttgtttggttccggttcctcgtccaagtccggattcaaattcttgtttgtgtttgggtctggggccgagtttgggtttcggtttgggttcgtgtttgagtttggctctcgggtttgggcccaaatctaggtctaggttggggtccctggttctaatcccagtctcggtttgggtctgggttcgggttcaagactgggtccaagtctcggtctcgttctcaattcttgttcgggtttagggtcaggttttggcttgcttttggttccacatccgtgtccgggtcgaggtccgagtcagtgtctaggtattggtcctgagttctaatcctggtttgggttcggggacgggtttgggttcgattctagttctaaattccggatttaggattttttttaggttttagggtttatttatttaggttaagtatttagggatttaaaatttaggttttagggtttagggtgtagcatttagtgtttagtgtttatggtttagggattagggtttagggtttatgatttatgacttaggctataaggattagggattagggtttacggtttaaagttttgggtttagcgtttacagttttgggtttaggtttgggtccggttcgatcccaagtctcagatctaagtcttggtcccgatcctagactagttcttgttccgattctgattatgggtgcaggttcaggtcgagttcgaatctttgatcgagtttgggtctgagttcgtgtctagatcctagtctaggtctaggtctgggttcagttcctaggttcgggtttaggtcttgaacttggttcaggtctcggtatgggtccgggttcgggtttaggtgtgagtcctatgatccaatctccgtctgtgtctaggtctgagtccaggtctgggtgtgggttcgactctgggttcagattcgggtcgtggttctggtctgggtttgaatccccatctaggtgcgggtcggggtttgggtatggatccaagtccatgtccaggtctcgtgttccaatcttgctctgtgtttgggggaagggtttcggtctttgtccgagtcctggtccaagtcgtagtcaatattcacgtctaggggaggtttggagtcggttctggttccagttccaagtctaggtccgagtttgagtctgggtcaaggttcgagtccgagttgtgctcttggtccagaattctgaatctgatttgggtctgggtccgagtctgggcctggccacgatccctattcgggataagggtcgtgtctaggtttgattctgcttctgggtctaggtccgagtttgggtttagatttagggtttatgattagggttacgaacaagacctagtatggtacgagtaactaaagggctgacagatacacaagacgccctaatgaaagaacaactactaactgctaggatgaaagagaccatggagaaggtacaaaatatgtttaacggtttgactggatcagacggggaaccatctataaaagaggtagctgaagggcaagcccagatgcaaactaatgttggagctcagaaccctcgtacggacaaggctaaagttacgtgggagaaccctcatgcataaccgttcctaaacctcatcagaaacatgctccacttgtcgaacaaccctcgaggacgtagaagaccatcggtgcctttgggcttggacacccatctggccctcgaaatacgactgtgcagaaaggatcggcggcgatgtcctcaggcctagaagatgaatggatctcccaagcgattccgtcaatcatgatgtaaggaccactgccaatcacaaagaggatagttggtctacgatggatctgcaatggtaattagatgcaaagtacgagaggtacaagagcgagagggtgaggacacatgggggtaggggtgtacatcggtcagttttgtcgggttatagtgtatttttaccaacccaatataaatgtcggcttgtaaatatctaattgtaacccgtccaatgaaaaaatagaaaatgtgtaacccatcctatgatttttgtcgatttggtcgggttaatccgtttaaactgatctttattttttattttttttcattgtggttagtttttggcgttcaaataattgatttgaaaaaataaatgtatagcatatgccttttaagattaaaatacttataatttaaattaattttaaaaaagtaaatataaattgaataaacattaaaatattaaacaatattttttaagaaatagaacaaaaatgtatactcatatgtaaattttaaatttcaacttcaatattcaaatacaattaaaattatcaactacaaattctaaattttaaattaaacactataaaatataaactttaaatgtaaaatagtttaactattaaacgtaatttatatattatgttataaataattttagtgaaaaatatgtaaatcgatttatttgggtgggttagaataatattcaacccgcccaatatgttcattgggcggtttgaatttttcggaaagttattcaggttatattttttatcggtttattcggtttagtttgggcagtttattcgggttggggggtttgtaaatttttttgagcaaccctacgtgggggtgacctaaggaataatatgtgtgacaaactaagggggtgtgacctcctgaaaagtgacgccaagaggatggaagaaaaaattgttgccctgatgaagttggtaaaaaaccaaagtagggcattgtcgcattccaaggatgaagacccaaaaccctgcgtaaaaaggatcacagaaatccctcttcccaaaaacttcaagatgccacgcatcaagttgtacaaaggaagaactgatccgcgaacgcacttagctaaatattaacaagacgatgcaatttcctcgagttagtgacgatgttaaatgtttgtgtttctccctgactttgaccaagtctgccgaagattgatggaaacgactggccttaggatcgattgacagttggaaggatctataatctgccttccagggcaattcatcgctgcccgtgagaaagacctggaggttgggtctttgacaaatgtcaaacaacaacacaatgagagcttaaaagctttcatttagaggatgtcgggggcagtcgccaaaccaatgtcagcgatgatctgaaactaatggctctccagtcaggattggctatgggttccttattgtggggggagatgcaaagaaaaagcgctgaaacactaagtgagtttatgtccaaagcacaaggcataattaaccttaaagatgcctacatccaagcattagaagtccttctagcaccaatgggtatgaaagccgctccaagttttgcctctcagactgtcgccccatccttatcgcttcccggatctcaattttccccaactgtttacggacttactacatttggccttatcgcaacgcatacccatttctctgggtataggacagcacagactgggtgcagtgtggtttctagatagtctaaatttgaggtcccggactctagcgcagggcagtcatggagaaagaggggaggaaagagccacagtcggaatgattcagtgaagaaaccaaggaagacccaaagtacatcgagtataggagtctaatagacactcgggaaaatgtctacaaagcaacatgcaacatgatccattactggaaacccccgtgtatgtcaaatggcaaaaggaacaagcaagattaaagcaagcaatgtgaatatcacacggaaaagggtcacactacaaatatgtgtgagtacttgaaaggcgagatcaagatgttggtccgagtcgggcatttgggacaatgggtctgtattccaatcatttatcccagatagggggtattcaagggaaacattatgcttcatggatagcagggcgttgtaaatcccccacaggggcttgcatgccttcaagctccaagaacgtctttatatgctcttgtagtccagccagctcgagctggggtggcattgctagctctcgaaccaagaaccccatatcctctcagaattgttccaccacctgtggacgagcacgtggccacaatatccggtggaccccatcccgccagaagtacccataatgtataaaaaacatacataaaggaagtggaagacggggaagtctatgcaatggtacaatctcccacagagtgttcgagaatgatgaatctctcgataaccttcaccaaagaagacactaagaatgtacgcttcccccacaacgatcctttggtaatcaatgcacagattgacaacagtacttccgttaatatcttgtttaagtttgtgttccaagcaaatagagtcacttaagcagatctaactccatgccctgtccaattacaaggctttaatggcgacactttgatgcccatgtgaaaaatcaatctaccaatcaccctcaagggtgaaaacaagacaagtgcatataaacactcaaccttcgttgtagttgactgtcccacagcttacaacgccatattgggccgaccgactctggtggacttttgtgtcgtgacctccatccgatacctatgtctgacggtcccatgtgatgatgcatgcatcgtacattaaagtaaactagcagagcgtaagaaattgctataatgtttcaacccgagtcgtgtacatggttaaggaagaagcgctcggggaacttgggttggaggacctgatggatacggaggctataccaaaggcatatgaagatgagttagattcaagaatcaaacttgagcaaaatttagaactaatgggggagattgaggaagtgagcatctgcaaggaagaccccactaaaacaatttgtgtgggaaagcaccttcctccaaccatgaaagaaaacgtaattaacacggtgaaggaaaatcaagacgtactggcctggagtcattctaacatgactagaattgatcgaaataccatttgccatgctttgaacatcgacaaagatgcaactctattccgtcaaaaaagaaggcctctagatcctatgagggctaatgtagtaaaaacagaagttgacaagttgactgccaatgacttcctctagaagtcattatctccagcctggcttgcaaacccagttctagtcccaaagcccaacggtacgttgagaatgtgtatagacttcacagacctaaataaggcctacccaaaatattatttcccaccaccacgaattgatcagacggtagttgccacatcaagatttaaattgcttacttccatggatgcatactttgggtataaccaaattaaaatgcacatttctgacgagaccacaccaacttttagactaacaaaggcatttattactacaagatgatgccatttgcactcaaaaatgcgagagcgacgtaccaaagaatggtgaactggatgttcaaggacaagttgggctgaaacatagaagtatatgtggatgacatgctggtaaagtccaaatattttaatgggcatgactgagacctggaagaagtcttttcggtcataaggaagtatgggatgaagttgaatcccaaaaagtgaacctttagggtctcttctagaaagttcttgggatatatcgtaagttctcgggggaatcgaggcatatccagagaaaatgaaggccttcatcgatatgccctctccctagaagcataaagatgtccagagtgttacagggcttgttgctgctcttagtcagttcatttcaaaatctaccaacaaacgtatcccattttttaatgtgttgcgaggcaaaaaaaaaattcgtgtggactaaagagtgcgtagtcactttttagaagttaaaggaccatctcacaaagtctcctatcttatctaaacctgtggaaggagaagattttttctgtccttggcagtgtcagatcatgctgttagtgccgcacttgtgcgagaggaagacaaggtccagtattggtgtattacgtgagcaaaagattactaagcgcacagttaaaataccctatgattgaaaagctaactgttgctccagaattcgcccaaaatacgtggaccagtcgagaggggacacgtgg

SEQ ID NO: 162093 - DNA, 883 bp, Cannabis sativa
ccaacaaacatttacgagtgctagtttgcaacaaagggtgaagcttaacacctctcaacttctccacatcccttccgaaattcgccaaaagatcagaatgccaccgatgctgcatcgagaatcgcttcatgaaatccctacagttttgagtaatcaccttatagtactgatccaaattcccagttgcaatttccaatgccctctcttgaaccttaagctctctcagaagcctctcacaagtcccatactttgctagagtcctatcgaaaatcgcattgcccctatgacagtggtacctaaactgcctctcataagatggcaaagccttaagagcagggtccaaagcatcatccaaaggatgagaatcccgcgaagaaggcggcgattggggttccaaattatcaaaaacctcaacttgttcaggtggtggtgtaggagaattatgatgcagccttgacttgttgtatatgaacacttccctatcagttgccggaagcttataagccgaaagaggcctttgtggctcaagtttcatatccaaacagagcacaagttggtcaccaaaactaatcccagaaacagattcaatcgacctcataaccttttctacaagtgtggactcatcacactcaagcactaatgaacgtccattttcagctatgtgaataagaagcttaccttgatggatcaaaccttcaccggtgactgtcgaactcatcttatccccaaagatttcgaattcccacaacaaatttccccaatcaacactaaaatttaggctccaagtggtgaaaaattagcttagttcaacctggaaaggcaaacccagatggggtattcggcgtgtttatactttcaagcctcgataaaacctcgggaaatc

SEQ ID NO: 162094 - DNA, 4987 bp, Cannabis sativa
gagagagagagagagagagtggccaaaatcgtaattcgtacagaaatggatgctccctcgtcatgatcttgtggacgtggcgatatgggagtacgttcaaaatgacagcctggtggcccactccgccattggtcctctcctcttcttgcttttcaatatttaccattttatccttccttttctctcaattttactaataccacactaaactttctattttgtaataatccaatattaatttatttaaagaaataaataaaacaaatctgctatttctgactttctacttgaatattaaaaaaatggttttttattttaatagaaaggatttttgtatagggtataggacaatttggagtaggtcacgtccacatctctcgttttaattaaactaaagaccaacttactattgttgtgtataaggaaggtatttattggcattgaccaaaattattaaaatattatatatttcatatttctttagtattatttaaatttcagttatcgaatacgaaatgtccatatcacattcagataaaagaagtatataagtatactaatatgattttaaaaaaataaaaaagtatacataaataagatcaattgattatataagttatatgaataaaataaattgattgtgtatccttgtaaagaagtagtaaaaaatgaacaggggagaacattagatgaaagaaacacatttaatacattgtcattggaatatctggaaataaattacactttatagtaatacttttattattttcccgccgcaaacacataaaaattgatttctttctttagattttttaggaatagataatgataattatacaacattttatttacaaaatgaaatcttaaaaatgccccttcctagtgtcttaattttctactcttgttaccttttgattccttattagtctctctctctctctctctctctctctcttaccctaaaagagagggcctctctcatttcctaccttcataaatccctctccagcggcagtcttttcagcacactttgagagagggagagaaatagagggagagggtctctgcttctgcttcatttcactgccatactctataccattgcacaagaactttattttcttttcttcctttcttgtagttttacaattctctggttaggttcttcatcttgataagcacacacaaaacaagtaaaaaaaaaatcattgtcaaactcaagtttcaaagttttccaaaaaaaaaaaaagcttttatcttcttgttatattttgtttttaagaagttcttcaatggcacctagttttgattgtctggtttccagcctcctttgttcagaagatatcatcagttttgatgataacgaatatggggctgtggtggatgagtctccagatgttggtactgaatggtaccatcgaaaccatgaccaagaaaagtgctttgagggttgggatgggttgccattgcagagtgatgagtgtttggctacaatggttgagaaggaatgccaacacatgcctagtattgattacctgcaaaggctgaggagtggaggtttggacctcagggcaagaaaggacgctcttgattggattgggaaggtgggttcgttcgtatgagtgttattttttttgggtcctagtttgtgtgtctatggattctttcccttttttttttgggctccaagtttgtgtgtctggattctttccttttttttttcctaccatttttgtttctctttgtgtttcaaggattttggaggataatgatgctgctgttcagctaatgaatcagcatttttatcccttcccttactattatgaactattttacaatggaagtgtttgcttccctcttttgtaatcaaagtctctgtatcataaatcaatttttgggtttggggtcttgatataaatgctaagataaaagggttttgggtccagtgctaagaaggattctttgaatcttttggtcccttctcttttatctatttcaagctgtatatatgatatgacaccaagaccaaagagaaaaaagttgtaacgtaaatagtatttcttgtctttcctctactttcttccagcagtttcacactttcactgttattatctcctattaataacagtgaaatgacgacactacatatatctatatatctatataaatacacacacatatatatatatatatgtattttctttttggtcctgattttatgtttagtgcttggcagctatttttttttcctgttctttttggtcctggttttgtcctttgttggtaattaataccaccttctttttttcatcaggctaatgctcatttcagcttcggacctctgtgttcgtatctgtcaatgaactacttggatcgtttcctgtcagcctatgaattgccagtaagtttaggaggaacaagtcaaacaaatcttactactacaaatccgttaatacatctttacatctttgcctgttaacatcatgctctgttgcataagcagaggaacgcttggtctgctcaattgttggctgtggcatgcttatctattgctgccaaaatggatgagactgaagttccacttgctcaagatttacaggttgaaaaaaccaatccaacccaatcatatcccatttccattatctgttgctaaagtgatctgctaatgatttgagtgttttttttatttacagatgtgtgactccaagttcgtgtttgaacctgtaaccatacaaagaatggagcttcttgtgttgagcacattgaaatggaggatgcaagctgttacacctttctccttcttagactatttcattcggaagatcaataacgatgaagccccacttaagacctctgtgcaacgatccatccaacttattttgagcacagtcaacggtgactatctcctcattattttctcttttacactttcatatgttttttttttctttttctttttcattttgtctatgattttactatggactgtatgagaaatatgatagagatttaagagagaatttgacgtttatggtgggtggtaattcaatgcaggaattgacttcttggaatttaagccttcagaggttgcagcagcagtggtaatatctgtgttggcagaaacccaaacagtggacactgaggtagccgtctctgtgcttattcaacatgtcgaaaaggtataaaatccccttacttatttttagtagtggtccatgaaatcataaagtgaaacatacatgatgccctttccatttacttttttttcttatgattttggctttgattacaattactaaccaagaaatgggattctctttgttttttcttcttgtaggagagagtgctgaggtgtattgaaatgattcaaagctcgtcactggataatgggtctactactggtttgggccagtccgtaccacagagtccaattggggtcttggacgctgcatgcttgagctataatgccgctggcacaacagttgggtcacgtcctaattcttcccacggtaactcggacagcaacaaaagaagaaaactaagccaactttatgaggtggtggagctctaatttagtaggactatggggaccaaaaatacgagcaaggatatcacttcttaccaagaaaataccaacgtgttcttctgttacacacgaacttttggtgtgttttggccgaaagaaaaaaaaaattaaaaaaaaataataaaaagaagggtacggttggaagaaaaaaaaaagagaagttaaaataacttaagaaggtattggagaaaagatggccaatgggggaatacatacatacatcccatcttatttccagccatgaggaagaaatgtcacagctgttaaatatttgacctcttaacagcctagaccggtttaggtttaactttaaagaagaaaaaaaatgaaaaaaaaaaaagaaggaaagaaagaaagagagaaagaaagagaaaagtttattttagtttgtctgttaggtatagtttgccttagggtttaaatcgaccatagaagaaaaagaaaaacgagaagaatgaagaagtagaagaaagaaatagtgtcgttgttggcaggaacttatttaaatattagtattagtgttattagcattaatattttaatcttattgggttttatttgtttaaattttgatattatagtaatttagattttactctatccagaatcctgtcagcagtcattgctttgactgattgtctagcttggactcaggagcagctttacttagaaacatatcaatgactcagtgagccatcaaatgaaaaccttattttattatattgcaatgacggttttatatactcccacttacactaccaaatttctatcaaaacgtaaataccaaattaatcacttaattttaatctgatggaatcgatatttatcttgcgtctgaaaaataaaaattagaagagagaagtggatggacgagtaagagaatagtgaggagaaaatttgaagttgtaataagaaaaaagaaaaaatacagtgaaaaaatattgatggaatccactaaaaacaatttttttttattacccactaacaacaattcaatggagggaatttgtttcatataacttttttttcaaatgtaaagtaatttccattgataaagctttaaaatccaggttacaatcacattaatcaacttagaaagacaccattccaaatgaactctttatctaagcttaatgatttcctaatgaagttatgagctaatataatgtgatttctaagtttctcttttttctcttgaaaaatcgagtttttacaaatgtcaacaatatatacgaaaatataaaactgtaaacgtctgtagaagtagaatgtaattctaatactgcagagaccaattttgcaacgacaaaacagaacagacataatataaaaataattgcagaaaattgaatcacttgacacaagagatttgtacggggtatcagtattctttcgaacact

SEQ ID NO: 162095 - DNA, 3331 bp, Cannabis sativa
  modified_base (2915)..(2915): a, c, t, g, unknown or other
gggggggggggggggggggttgtatagaatattgaggaaaatgcattctgcattctttgatgcaccagtaattcaggctctaatgccatttcgccaactagcctttcagatactaacaagtatatatagcacattcaaaaaaaataaagagtcataaaccagtaaaaagaaaaactggttatggctttgtaacaaaatcatctatgaaaatggtggttttgcaactatcataagcaaagtattctatagaaatattggttaacaacttaatacatcacaaaaatacagggaaagatgtcctctgaaactaaactacaaaggacagtagtactgacttctaacaacgttaatcacaaaatcaccttggttagaagcatgtgtacctgtactcctattttttataaaaaaataaaaataaaatagtagacaccgaacgaacttaacaaattttgattcctctttaattacttctctatgatttctcaatgctatgtacacataacaatgaaagctatgtaagttctgaagtcaccaacacacgaatagataaataattcatcaaccgagaaggcaatttattcaatcattaaggctaaagagaaaaacatttatattagttaatagttatggtgctctgaaaagcattgccaaagaacattcaagtggataacatgacgaaaacaatacttttagaaactgtaattaagtgactagaataagctaaacaaaccaaccttttgtagctaaagatgggtggccttccaaagaaattgagaaaacatgtctgaatatgaggactagacagccatggcgtagctaaatatctgagcaaagtaattacttagaccattatttattacaccgttcaaattaacataaaaaaaaacgacaaaaaagaaatacaatgaaatcattaaacattatcgggaagcaatcagaaaaatcaaaagaaatttaagaatctagcaactcaataatttgatttgatttgattcaccgacctgccatggagaatccggcacttggaaacgacgccattatagatatgagcggatgagttgtaggtcaaagtaatgggagagcctcgaaaggcggttaaagcgtcttcgaagaggtgaaattcgaggaaattgtagagaaaaaccagcgaggcgacgagagaggcgagcaagtagtgggaaagagggataaaagagagagcgcgaagcagaagggcgtagccattggtggaggaagatattgagtcgctttcaacaatggcggaccagttcatggtgacgacggtgttggtgagcaaagacggagaatccgagagcttgaatagcagtaaaggtccctataggctggagtctggacgatgacatgaaatagtattagaagagactttggcctgtgaataaattatgaattatcaattatctgtggccgcataagtcaaaagtggtccttcaatatatttttgttttgccaattactataatttccaaattgtttaacaaaataaaaattaaaataaaattagatgaaaaagatggtaatattgtaattaatttaaaaatacatatattcagaagacacattgtagtaggttcattcaatctcgtagctttaatacttaactattgcgtaaggtacgtaattacatactagcaatcccttcggccgcaaagaacttattatttttaaccattaacaacgatttgatggcgagtcatcaaagaataaagaatcaacaacgaaacaaaaccatatcacacaaacaacactaaaagactcaatatcatgtcacacagacaagacaaaaacgctcaaaactatatcacagagacaaaactaaaacacaaaaattatgtcaaagagacaagactaatcgcggtagcaaaaatcaaattgcagtagtaaaatacaagtcacacctaagtcggtcggcgggcctgaccagagaaaaaaacaacctcttatagctatagatttaggaacgaaaaaccctaactttttcccctattatcaacccttgatgttagaaattaggtctaaaatatatatggatcttaaactcatgtgagactatcaagattactctttgaatcaataagatgaaagacatacctgattccatgatattgaatatgagatgagattgtgggtatatggtcttccacaaactaatcttccctctatgggttctcactcaattgatgggaatggaggagaagagtagttgagattagtctaggggaccaaaccctaatgttctttatatagcaaactaataagagccccataaatcctagttaggtttactattgggtattacacattacaaagctcataccaaataagatattttttaggctcatttaattagatcacttatttagcccaatttataatattagctcaaataaattgtcttaatttgtaagcccatatattagattattaaaaataacccaacaatctccaacttgagctacaaattaattctaatgacaattacatttgaaaaccttatctgcgcaaaaacttgctaattattcttaaaacatcttctatagacaatttggtccatctcttataccaatatgagaccaaagtggcccttcgttacatttatcgtgatggacccatcaatgatcactgaaatttcgtttttatatttaccaagtgaacttataaaacaattcaaataatgcgaaactgtaataaaattatttgaatagaatttatctctgttctatcagacacagaatctgatagaacagaattatacaacaaaaagtaaaattacaaaagataaaatggcacacaacattttatacgtggtatcggcaaccctttcgaattgctcctagaccatgggaccatgccaagagaatgaaatttattagatgaatctcaagtgattacaaaanctaattgacttatacaaataaagactcctccctctttgaatttgctacaactgttgtaatctattcttctaatcaaatttctgaagtgtcgagaccttgaactcccttcaaatcgtagcacttgcacacatcatcctaaagagtgactcacttgcaatcttcctcccaaaaagtatctaacttgtaatcttcctcctgaagagtgactcacttgcaatctttctctcgaagagtggctaacttgcacttttcctcccgaaaagtgactcacaaacaagacttctctcgaagcttgatgaacaatatccaaggtgttcaacctgcacaattttaacaagaaacaattcataataacacttctcctgaagagtgactcacttgcaatcttcctcccaaagagtgactcacttgcaatc

SEQ ID NO: 162096 - DNA, 2387 bp, Cannabis sativa
ccattcgcagaacgcgaaatggcgcagcaaggaccaccactagctgcagccatcaaaatagagacatcattaacaatagcactaaacataacattagtaattgtactattaatccatgagaccacaactgaagaatcacactccacccgtagcccagcaaaccccaactgcaatgccctttgtaaacccaatcgcacagccaagagtgccgccaatatggtaacaactttacagttgcataaattttggggagttgggaaacataaattatatttattgtaattataataatattatccatgaaattatgaaaagtaattttttattatatacttaaaaaaacaaagagacataacatacaacttatttcctataatggaaggtttgtaacatctttttttttaataactatttaaagtaagaattttccattttgtttatttttatatttttatttcaaattttgaaataaacgaattaaacaaataaacgtggtgtaaatggacggcaaaaagtaggttgactactggatgaggatgaatattatcaattcaacgacacaagattttcacatatgtggtacacactacatttcatttacttgccttttttttttttttaatattattattaaaaatagttttatttgatttttctgcggtcttttttaaattaagaaacacaacccatttattaatccataatataagactttcaaatattagagactataaggctccataaaatcacatcaacagaaaaaaaaaccaaattttatgtctcccaattgtttatttttctttgtttctgaaatcaggttaggtaataaaaattgccaaacttgaaatgaaggttatttaaggagctaagacccatacataaaatatatatttatatatattaattatagaaattattgagaattcttggaatccaacatagatttcgatacgtagtgttagtgcctcagttggcagtcacaagatttgttttcatcaaggccccaccccaataaatgggggaaagattttgatgattataattaaatatatataattttctttccaatgtcatccattaattttctgttaatcaaattcaaattcgcaccttatttataatatataatttatttatatttagccaaattatatatgtaattcttcagcgtacttttttggtttacatgttggatttatttatagatatatatctttttatatatagtagcttattgttaacttgcatgtagtttgtatttacacacaaaatttggtataatatccattttcttattttttttaattacattttttcatagttagtattattatttattacttatcaaatgagaagtaagataataagaggaggcgaaaacatacaatatattataaaaagatattggcagtgacacttaactacataaattaattttttttgatagtaaaatttttctaaatctcacttttgttagctatttacccttttcgttcaaaatactctattaagtgccatagtggatatgccacagtgtacacaaatgtacatgtagcaaatttttagtggtagatatcggcggcaaaattacctgaactctatgattagtaacacttcaccacataaactgattttttagttgtaaaaccctccaaacctcactcctgctagctatttaccacttccattcaaaaaattctattaagtgctctacgaatggaaccattagatctccccttcccccagaccacgacgaagctagggacgaaccaccgaacccctccaactgcagtgctatatcgacgaagagttgcgggagagggagaattagatctggtgagcttgagatgagaaagagaaaatttaaagaagggatgggtcttggggcgtagagggaggctaaatggttgggtttgtaaggccgggacgtcagttttggggtttgtttgagttggaaggtggccgtaggtgacttcagagatgtgcgagaaggagaacggaagagagaggaagtgcaagtggaaattaggtttatagggagaaaaatggaaataaaaaaagagaagaagaggaaaaaataataaaaaaaatatttttaattatttttaatcaattaaaattatgtggatcactaaaaaatttactatgtgtacacttgtgtacactgtagtatgtcaaccacagcacttaacagagtcttttggacaaaataggtaaataattaatcgaagtgaagtttgtaaggtattactaccgaaaattggttttttaagtgaaaccaaaaaatcaatttatgtgtgttgaccgaggttttcggcaactagtaaaatatgaatgtaatgatgagctgtaagaaagcgagatgaagactttttacgtggttgggg

SEQ ID NO: 162097 - DNA, 1836 bp, Cannabis sativa
tatttgagatagaagaattataagaaatctaataattaagagaatcgtaaagaaaacttctatagtcaaaaccacaaaattcggcaatcaataattttcgtttctaaaccggaaaagatgaagaactggttttgtgtgtacaattcaaacaagaaacaaattaattaatgttgaaaacattcaaagctgaaaaattcttctatacacccacatgagtttataaccaagattagtaaaaactactactagctcctacataagtttcttatatttagttttagctacataataatgcctatacaaacccttaccaaaacaagaagcaaataaattaagaaaaaaaattgttcatatcttatatcatgagcagtgagacctacaattttttatctgtgagaacttaattattataaaagtatttatatttttttacattaaaattataattattttgtaaaagctttttactactttgttatataattatttaactaaatactggagcctatagcccccgacactatcattattagtgtgtccgtcctgattatgagtagacaattcacagaggagagaaaccctttcgtgtttagtttttcacacttatttatttatttgataatacctcctcaaggacctcatcaactttatatataattaccctattatatatatatatataattatagggatatgattttatctggtgatgtactagtctcagggtacattaattgagtgtcagattacgtttctactttttaaccctaactacccctagatcaatctcagccgtcagattaaataactccctcatctaacggctgacgtacatcacggattacaattcgtgaaagtacaataacgggacaaaatcatatccctataattatatatagagagtattagctagctataaggtttgatggtagataatccatttgtttccttttaaagttttggtatactagattgtttattgtggtggatcgatatcttataatatatgaaagaaaatatacctattattattattattattattattttgacaaaaaatatacctattatttatatataatatataaggatattgctaaaagaagaaaaataattgttgaaaaaaaaaattaaaaaaaatatagaaatttcaaaaacctgtatggattaattagaactatatcctccatcgatagtctgatctgaactgttattttttatgagccaaacaactttttcaaatccattcacgacatctttcacttttttttttttttttggaatcaatcaaagccaaaatgaaacgttgttttatatatttatatataataatatattacaagaaaaaaaaataaagaaaacttacatagccaatcacccaagtgaaaggtctgttgagaagaccaatgggagaagttgatgttgggagcccaattactctttcctcctccaacgtaatgtaattcagcttttccgcacccaaatttagttattaataatatcatcaccatcatcaaaatcatcacccttttattctccattactattctatgttctatatatcacagtttatatatagacagaaaaggaatctatatatatatatatataaaaacagataaagggtatatgaatggagatttgagagagtcgtaattaagttttgggaagaaaagttggcaccacttcacaacttaatgcatgtttatatatgtgtatgttctactcgctcaccgttacttttgcttcttcttccacgtgtctagatgggtcccactacgtttgtctttcttcttattattattattattattaccaataaaggaaggttgtttt

SEQ ID NO: 162098 - DNA, 1847 bp, Cannabis sativa
aaaaaatgatttgatcatcaaataagtgttatacaaaccagaatttgaactttatattcttcgataagaactcgggcatattgttggggcgcataatcacgacttgtactttgaacatcaggcaggaagtagttggtaaggtaatcactaccacccattccaacaaaatatatgcacttgtttaagtgagcttccccttcatttattccaagcatgcttttgatttttgccactgtcattaggtgatggtttacttgtgcttctagatttaaaagagtaccctatttattaaaaacaaacacaaaattatgaccacactttaacttgtgtaaatttctcttatgagcgcttgcttggtcaatttatatatacaagaactaaattaaattttagaaggctaaaaagaaatagttgtgtaaaattgaattttttgtgtttgtaatttcagtacgtacgtaccacaatttttccagtgtcattacgaatacctgatccaccagatccatagtttacacctctagtaataagtgcagcatttccattaagaacagaggcaaatggtggtatgaatgttttaaagcctagagcttcacctgtaaaagagagcaacgcaaaatgcttcaaataaaccactcttttcgttggaacctctaataaaatctataacaaaaagcaaagtaataaattaaaatgttataatttaggcataataaaccaccctttttgttgtgtaacctataattattagcttgacttatcttgtttttcaataaatatagacactactatatatttattatgattaatagcgtgcaaattgttgatggaataaaataaaagatacatgttatcatttaaaagaaattattttgattcatcccatttatttatagaatgccctacatatgcataataataatgtgaataattttgtataaagataagagtggttaaacacacatatatatatctatctatttatgtacataccaattatatcaaccacatttcgaccattagaaaatcttcctgttgcaataccaccaggaaaatcaattccatatggcttgttattcactttaattattgtttcgagttgattgttatttccattgtcaaccaaagagtcaccaaatatgaagaagcatggaacttgtggatgttcttcatctcctttggcctcatgcaacattatcatcatgattaatactgtaattgacataataaatattatgccctcttctcttatatttttcttcaaaacagccatgattaattaattgcagagcttcagagattaatgatataatttataaacactaaataattgtatgatgaaaataagtttaatattgtattgaagacagagaaatgttagcttagtaataacccccttcatcaattaagttgtctatttatatagaattacaatagtaaatcaaacagaacatatatatgcttttgacaactaggctaagaatttgtcaaataacgtcaacaaatttatttattaatgatcgtcgatctcaacatgtctcaatattaatcaactttttgataattgttttgagtatatttttgcaatgtaacaaactatgtttagttttattaaagggatagaattcgttatattggtataacttgtaaacaagtttctaataataaatagaatatcccaagacacctcacacgaaacaatatttaataattatgaatttgatattagaatatttttatttaaatatgtttaatattggtactgttataaaataatataaagtagatgagaggaaagaagaagaagatgaagagagaaagagaaagtgaatgagaatttctgagttgtt

SEQ ID NO: 162099 - DNA, 2438 bp, Cannabis sativa
attagacttagttaataggtaaatttgtatgtttattagtgactatgatcttcaattttttttcttttttatatataaatataattatttctagaaaaatatttgatgatatatctttcaaagttaagaatgtaatttacaatctctaatccatattacaaactgcaaattacattcctttacagaaaataaaagtgaaaaataccctaaagttaaattccttggttatgcacaagattctcttatgcaattgctgaaattccttcaacaacttctctatccaaactccttttcaaaaaaaaaacttctctatccaaactcctctcaaatattttattttgtttaaaatttgactcctaattatgtgtaaaattttattagtgttcatttaactctaatagttaatttgttatcttaattaaagtcctttcaaaagaaaaaaaaataaaatttgttggtattgtgcaattttgcaaaatcaccatattaattgcatttgttccaaagaaatatctcactaaatagtacatgggatgtcacattaaaaaagaaataaaaaaaaaatgataagtacaagtatttacatttagaccccaagtgttggattgggatgatggacaggacatccttaaccttatcttaccaaaaccaaaagtttcaacttcttctcacaacaacaaatagtcattttttttgtatgttattcttattcaaatttcaaaccccattaacttaattatgttaactcatttgggaaattggatttcaagtccaacaacaacccctttgttagtgccctgtgttttttcaggtagagccatagccatagccagtggcactagtagtattaatacaaagtttagagaagtaataaatagtactaagctttatgcttctgccagaagaagagtacagagatttaatgaagatgatgatgatgatgaagaagaagaagaatatggttatcatgaagaaattgcaatgttggaattgtatagtcaaaatgttagagatgaagcacttcttctacaaattttgctcgatggccaagaaatccaaatccttatctttaaggtcacttgtactactttttctttcatactatatttatttatatttatattactcttctctctattctctttccactaaactaaatatcatctttgcatgtatcactttaattgtcattttttcaaaattcaaaaattttaatttttaaacatataattagaattcatgtttctaaaaattgattcttttcaaaattcaaagctgttattctcattttgtatatcttgaaacaattcatgactcttttttaaaaagttttttttttaattttgaaaattgtcacaattgtagacatattttgaaacaagtcgatgtaaataattaaatttaattcttaaataaatataagtttaatttttaactgtaataatacttaagttataatactgaaatttctataagtaaatgaccgttaaatgttcagtcattatatacgtatcatttttttattagtatattttaattaatttttaaataaaaataaaaaatttaatgatttaaaccaatcaaaaactggtacgtggttattaatttatacttgtgaaagttctggaaataagttaagtatttttacctttcaaaaattaaatttaaatatttatgtacaagcaagagttaaattaacatatttataccgtaaattattttttaaagaattatatatattcataacttttgatattatttaagaaattattttgcatatcaaatacacttattttgcatatcatatacacttcttccagaacaaagaatcaatttttagaaacatgaattgtaattattctacaaacctattttattaacttttacttcaaccatttttacatagtttttttttttttttttttgtaataataattagagtaaatgaaatttgacagggattctcttcctgcttaagccacagtacatcagcagacccatcaaagagcatagttccagccagagctgtgataaagtccatagacagaattaaaggtccttttgacccatctaatattcactacattcaaaaagccctatcatggcaacaatttaagaccactctcctatccaaatatgataatacctaactctacaaaattactctttttattcatttatttaatatcacttcactcctacattcttactctcccaccaaattctattattgccttgtgttgtgcccattatgaggaaatattcaaagaagaagaaaaaatgttataaaatttgtggaaagagtagaatgttaggttacttaggttaattagtgacccaactctatgtattgtgattgctaggtaagagactaataatatactactcctagtaaattaggaccttgaaactattaagctattaaatgattgtaaaat

SEQ ID NO: 162100 - DNA, 2389 bp, Cannabis sativa
  modified_base (2349)..(2352): a, c, t, g, unknown or other
tttatttcaaagcctatataatggctttttccttctcattttattttcttattttctcttctcttaagaaaatatttttagagataaaaaacttcaagaaaacccaaaaaaaaaaattaaacacttcacaaacaccattcttttgctattctcgtggagttcttcgccgtgtggaccaaaattagagagcctcggcttactttccaaacattattcagtgggtaagtctttcaaagctctactttttaagaacttttttcatttttctatcattgttggagttagaaacctccaagttgaggttttaggaacacttactttctacgaattgtacgatttccttatagtagacgaatgtagggtttttcattgaaaaggctaaaccctttctctattttttttacactttcaaaattttgagtttgaagaacacgaagaactcggattccatggcttctctacggtagaataggttattttaatccatttattaccttgcctgagttgtattagttgttttaccttgcccgattagttatatgttgtccacgtatttttaggttgtctggatattcacctccctcttgccttttacatagatgaacatgcacgactactgaggaggtgaacactagatcgatgtgaatcttcttagtctaatttacaaagatcagcttgcactctaagcaaatatttcttcatctggtgattttccaaatagttctttgagcttttttgaccttgaagtcagtagtggttctataaaaccagagacataacatcaccaccactccaagcggatcgaaggggagatctacagtcggttcatttgggaactgaactgtggttggaggagattttttccaacctcctgaacaaacattgtctaggaaggattctaggacacgttgccccaggggagtgttctttatttggccaagagtcctttgcaggctgagacagtcattattattgcccgatactccgtccaaagacagaacctggcttggataaaaaaaaacataccgcgtagctctgtccagtgatcttcatattgtcaagttaatggaaataggttgggttgcacaggctggtcaggttgagaggcatgttgagcctacaaagagggagcagcttgttgggaggccattaaagactctgatgttatcacaggcaattccttagggggatacaatgagtccatggagcctctcgatgaggatggagagccttcccgtgtagggattggtcatggacaggaagagttggcgcctctagaggccttgcctcaaagaggggagttggatgctacttgggagtctcctccatcaacgcttacccttgcgaggttcaagaacctcgagactaaaaggctagttgggggtcttccaatcgaccaacccgacaaagaacaccttgcccatgcccctcctgagaattggatggcgtggtttggaccccacgtagagactcacaactaagatgcaccacaacgtctcttagagatttaggccacatcatgtgcaagcagcatactagcgagccaatggaaatgtacctgctaacctctggcatcattcttagacacactaccgagtcgacccgacaatgtccatgagtattctaactcatggagacatatgagtcccctcgtggtcctcatatgcctgtcttactagtcctactaactagtagtagctcacttagcatcaaggtgcaaaggggtggtggagagttgacaccaggtacttcccccttaaggagcattctaagctcctagccttctaccataaacataaatgatttttgctctgtagacatatggtcatcaccatataccaaattacagagtttcttaaatccgattacaccattgtattcatataaatggcaaatacgaagtctcgtcgcgatctggataatattgaagatatttacaaaaatgccactgtcgtacaaattaagcatcaacatgccaccagcatgcacaccaacatgctccactacttggccaccttgtgggcatcacatagcttagcttgtaacgtgctatcttagcttgcacgttacattaagaccctcacggttcactcagcagactaggtattcattacaagcatcaagatgagtatcacgtagttgaattgttattcaggatgtaaagccaagaagactcgggagtgccagttatctagggtgaaagttagtaggactcaggtactaagataacaccatgataatgttggcctaaggtaaaagtcaacaagactaagttactaaggcaacatagaaatatcgaggggcgaagagttagtatgactgaggcattagttcaacatcttcatcaannnnacatttggaatggagggaccgtatgcgagtatgcggt

SEQ ID NO: 162101 - DNA, 2341 bp, Cannabis sativa
aagaagtagaatccatgtttaaagaaagagcaaaatacattggttttggtagtttgggtgggagattaggcagtgaagcttcaaaattgagaatgttcaccacttgtttgatagaaggcctgaaagaaggatcaggatgacaacaccataacccagctaccatcaagctctccatctgcctctcattgaattccatgcttaatctcttgtcagcagcttcaagaacttgaccttttccatacaactcccacacccattcaacgagactcactttgcttggctctgtgtttcgttcaactggtcttcttccacaacatatttcaagtgcaaccaccccaaagctatagacatcagattctttactagctttcccagtagtgatacactctggagccatatagcccatggtgcctgccacaacagttgtttgtaaacccaattcgtggtctgcaagccgggccagaccgaaatctcctagcttggtgttgaagtttgaatcaagcattacattgcttgacttgatatctctatgtaccacacactgttcccattcttcatgaagatacagcagagaagatgccaatccaagggctattctatatcttattatccatgttagtgttggtttccctccaaagagatggtgatcaaggcttccatttggcagaaattcatacacaagaaggaactcaccttgtgtgtgacaccaaccaatgagttgaaccaaattcctatgcctcaaacgactgatgatttttacctcggaaacatactcctttttcccttgctgtgatcctttggatactctcttaactgccacttctgtattggattcacttaacaaacctttatatacacctccaaatcctccctgcccaagctttccttcctctgaaaagttgtttgttgcaaggcttagttcgcggtatgtatacctttttggcccagtttctccaaattcaccatcaatagactcatcatatatctccacttctatttccccagctgcccttctcctccgaatgatgaaccaaagtagaagtaagccacaacccaatacagagaaacctaccactaaaccaattatgagtccagctctgtttccttctttctcatctgtagcctccaaagtagagttaaaagaccaagagtgaacattatgtaattcaacccattggccagtggctgcagagaagccaactctaactttttcaggcaagattttggtgaaatccactataaaggaaagactagagtttccactgaagatgggattattagcatatgtaagaaagacactcaaattgtgagaagctgagtcataactcacccaagcatttgctcgtcttccatctttgatactgctactccatgtgacatttgcatctgaaacaatggaattgacattgattccaacatgatcagagctgggatcccattcatctcgaaaactatcaaactcaaccgcaacaatactgttggcagacttgttgaaagctgtttgaggactgaaaagcgcgaggcgtccaccagacgagttgttggggatttcagaatcgaaaggtgctatgaagaaggacatgccatctccatacaatgattcgttgagtgcttggattgtgaaggagaaatgggtggtgaagtctgtgagccttccagttttggcatcccaaagctggactggctggccatatgaggctcggccaacactgctattaagagaagcaatagcatcgttccttgtgagctgtaaaacaccatttgcgaatgcttcaccttggaatgatatttgaggcatgtttggctgaaaagagctgaagttgaagacaactgagttgccttttgttataagtagcaaaaagaagaagccagttttgatgagaaaagccttgaaattttgtgctgggagaaggtatgaactttggttgaagagagccattattgatgttattttgttggggaagcctatgatacaaggttgatgacaaatcaattaacttgtttccatggagtaatatagccatattcaacggatgcttttctgaaactttcttggtcaatattacatgcaatgtatgaacaactaaaattttgattttaagtaataaaaaattattagaaaggtgaccgagagaagccaatttggattatagaaataatggagtgtgggtgaatttttcttatattttatcttatttcttgaatgacttggttaatggtggcttagttaatgggtgtgatcttttactttttttagaaccatattttcataggttgaaagaaaactattattcatgtatttttgtttaaatgatataacaaaaaaataacatacatataa

SEQ ID NO: 162102 - DNA, 1983 bp, Cannabis sativa
  modified_base (1912)..(1949): a, c, t, g, unknown or other
ctaaggacctattgctggctggggcagtacgttttataggtacaggttctaatgtttccattttgcaggatccatggctccctgattgcaacccttttgttacttctaatcacccaacattatacaacaaagatgttagctgcctatttaagatgaatcgagaacttgggacgaagagattattactaatctaatgtctgagatcaaaatctcagcttctctacacagttgagtgattcagcatgggtcgatcattggccttggaagtttgagacagatagtaggtacactgttagcagtgcatatcgtcatttgcaagtgatcaagggggcctggtttgattctaaaaccactgacttctggcgtaaattatggaatttaaaaattccacctaaggtctacaacttccttcggagggctgcttcggggtcccttcctacttgtgctcaactggttaaaaggcatgttgccgtgagtgtcatctgccctttatgccaggcaacagatgaaataatttttcatgcttcgattggttgttcttatgctcgagcctgctcgagtaggaccatggtggacattggcaacatcctggatggcaatttttatagttggcttctggtgttggctggcagaggaaaaacaggggagcttgaagagctagccatggtagcttgggcaatttggaaagccaaaaacgatttcttctggcaaaataaaactcgtattgctgcaaatattgttgcttctgcaagatcgccttgatcaatttaaatatgctcaagaaagaagaggttattctctttctcacctattggatggtgaaaaaaggactgagcattggattgtaccattgataaattacattaaggttaatgtagatggagcattgtttgagcaagagggtcggtttggtgtttgactgtgtggcttgaaatagccaaggcagggtgttagagaattacactttgggcaaactaggacgagtccaacctgaagttgcagaaatagttggcattaaagaggccttgagctggattgcaagacatccttggcgacaggttatcctggaaactgatagtctaatgtgtgttcaagctattaaaggtagcatctctttgtcatctcaatttggtctcttagtcgaggatgttcgtgactttttattattttatcaacgtgttgatttatgtttagtaaaacgatttgcaaatagagtagctcatagtcttgctaggagctcctgtttctcaccaggtcgtgtgcttcagttggagaattgttcagcttaagtgtgttctattatttttggaagattttacttgttaataagaatcaaaggtctaacaattagggactctcagaattaaataagtaagtgagagaagagtgagtcacgagggggtaataatataaatttaatgggtaatgaaataataataattaattaaactaacacctttgttaaatctctgttaaagttaacggtaatgatattaaaatacggttaaactaacaaaaaaactgttaaatagccacttttaatatataaagatattatatttatattatataatttattaagaacaatataatcgtctatttaattaagaaaggatgtaataggtaataggtatatacttagatctaaggtgatctgaattaggttttgagtgagatttattctcagccactcaacacaatttatcgtattattttaattaaataaatgattaatcaaaacctaagaaaatgtatatataaagaaagacaggaatatagaaaaacctaatgtctcatctttctcttttttttatttttgtaaattttgaatacaacactaatgtgtaactcaaaattttcatctctcattcctcaatgatattattgttgcgttttatgccctaaataaaannnnnnnnnnnnnnnnnnnnnnnnnnnnnnnnnnnnnntcagaaataacatttaatgttccacggttcacat

SEQ ID NO: 162103 - DNA, 7043 bp, Cannabis sativa
tttttttttttttttttttgcgctagggtatgtatctttattatgtgttatgatataaaaaatagatttttttatttatacttttataattgactttttattcatttataaaaatagaaacactataatctcgaaatgaaaataatataacattgaaatagaaataacttttataaaatgaagacaacataatctcaaaatagaaacaacattacctcaaaatagaaacaatttttacaaaaataaaaattaaatagaaaataccgtatacatgacaattctcctattaataaatagagtaatatattatttttatttgttacggtatatcattaaggaaagagaaaaaaaacttgtggaagtttatttaagtttttttatatatatactatttttctaaggtatagtatttgtatattatattatatatcatgatagaaagaaataaaaataaattaaaagaattgaataatagcttagtgttcgatatagttattttgcattatggtatattatttttatgtgtaataatatactaagaaaaaaatacttgaaggaaaatattagtttaatatttatgtatattattttaatgtgctatagtatataatgaacgaaattagcaaaaaacataaaatattaatctaagtatgagatatagttatatttgaatgatgtatattatttttatgtttattggcgtttcatgaagaaaagaacaagtaaaaaaacttgtggaatattaaaggactgagatgcagatcatgaccttaaatttagaaattaagtgagtaaatatttttttttattaatatttagcaaaatggcctatcagttgaaattttgataataaaattataattataaccttagaaaatttaccctaactttctacctcttctctgtctctcgcgtcagggccaaaagtctttcttcgttttctttcagcatcggcaagtccaactatgttgctttctcacctcttagattttgtactatagtatatctttattatgtgctatgatatattatgaaataaaaaaaaaaaactttaaagagtggtatattatttctaatttatggtgtaatatttttaagtgtttgatatagttattttacattggtatatcatttttatgtgtaatagtatattaaaaaaactgaaaggtagtatattaatttaagattgtagtttattgttttaatgtgctatggatttaatgaggaaaaaaacatgaattattagtttaagtttgatgtatagttatatttcactagaaaatattgtttctatgttcattgttatcatgaaggaaagaaaaagaaaaaaaaaaacttgtggaatattaagttaaatttttggtatatataaataaatatgtataagttgtgagtttagagaatttgagttaaggtagagattgttagagtttgactcaaattatttatttatccatttatttatatttgttaagttgcaattttttttgggcaattattaattgtgggaaaaggaaagctttggtggtcaagttttgaaaagtcttcttaaaaaagtcttggaatgtcttggttcctaaattaccttagtgcctaagttttgaaaaaagaagagaagagggccagagtcttcaattctccatcccgagatgaataaaaaaaccatcgcttgtggcagaggaaaattgtagttacaaagtaaagctaaactcaaaaacttgtaacaactctaggcaccctaaaaacaaaccactgcccccataaattttattaaaacaatgaatcccctaagatgcacataaaaagtcagatccctcacaatggaagacaacacgaggcggctgcaaaaatcttacagcaatgctctccattctctaattaagtctaaaaatgaaacattttcaaaatgcttagtcttgtacaaccaagaagctgtccaaaatttaattttatcccataggacctctacaagcactcaaccttcaaagattctattatttctttttaactaaaccacccataggattgtcaggactgccgttctccataaacatgtacttcgtttactgtcccccacttcactcactatcatttgagtaaccgaacaaggcataacccaatgagtctcgaatttgtttaaaagttttatccaaagaggacgcaaaaggcaacaacttaaaaacatatgtgccacgtcttccccacttgacttgcaacaagcacaccaacccggtgacatgtataagaatggacgcttttttgcaatctggtatgtacattcaatttatctagagccaccaaccacccgaacactttaactttagaaggtcctctgctttttcatagggtctttgtccaaaacaactcaccagaattcttagaagaagtaaaccagtataacgctgatttagaaataaagatcccacaagaaactggtatccataaaaggctattctcaaggatgttaagaactctaacctgttctagcttttataacaattgtgtcaagctcgggatttccctgtccataatttttcttctgaattcgaaatcccaactcgccacacagtttcccaccttgcccctatcagaaattatctcctatataattacattcttagccttagacatcactgctaagtccaggaattgatttttcaatgaggatcccccaatccacatatcctcccaaaaacgtatattttccccatttcctactttgaacttcaacaacttgtcatatttttcgtaaaaatctgaaatatccttccatggccctattgaagacaaactaaccctcctttttgtatcccaaaaatcatctactttgccatagcgacttttgatcactttgtgccacagagagttaggttctaaagggtatctccatagccatttcataagtaaccctttgttcctcaactctagttttccaactgctaaaccaccctcatttcttggtttgcatacctcttcccaagccactaaatgatcaccacatgctaagtcaccaccttcccaacagaaatctctcatcattttttctattgcctttaagaccatctttggagctttaaagagagaaacatagtagataggaagggaagataggacagactgaatgagagtaagcctacccccatagataggtaagagcatttccacccatctaatcttttcgcgcatttgtccaagataggctcccaaaaagactttttcctcgcggagccaccaagtggcattcccaaatatgacataggccatctgcctacctcacagtcaatttgctccgccttttgggctaccacttcctcttttaggcatattcccagcaattgactcttattcaagtttactttcaggccagaattgccacagaaagcttcaacgatctcaaccagcttacagagagatgactcatcattaacaaagaatagagtgtcgtctgcaagctgtaaatgactaatttaaatattgtcttttccaacttggaacccaaaaaatgaatctgtttctgctgccttatccaccatcctcctaagcacatcagctaccaacgtaaaggggaatgacgataggggatctcgttgttaaagaccccaagagcctttgaatttacctcttactcttccattaatgagtatagagaatgatgtagatgaaacacattctttaatccatttcctccatacctccccaaaacctttttccctcaaaaccagatctaagaatcctcaatcaacatgatcgtatgcttctcaaagtcaatcttgaacacgaatccttttttgccacgactcctgtaatctttcacctcctcattttccataagagacgagtctaggatcttttgtccttcaacgaaaaggcgattgactttcaaagatagtctctcccaaaacaccacccaatctagtagcaagtgtcttggccatgattttgtacacacttgtgaaaaggctaattggtctaaagtcttttaccttgcaggtgtttaatcttttaggaattagacagataaaagtttcattgatgttgccttcaattctcccctctttctcaaaggctcgaaacactcccatcagatcatccttgatagtctcccaattattttgaaaaactgccaagctaaaaccatctagaccaggcattttacttccttcacagctaaaaacaactcttttgacctattcttcttcaaaagggctttcaagttgacttgttgaagtgttcacaattcattaccactcaatgccctcaatccctttcctccatcttatctcagaggtgtaaagtttcaagaaaaaaaactattagctcctcaacaatttccttctccttatcaataatcgactcatcatctctttcaattcttgaaatagtgttcctggccttcctagcgtttaatagattatggactattactttccattttccagcaaccacttggatgacatgacaagctgatacttcataatcatctctgatacaaataggtctttctattggctcttaactttgcttattgggatttttcttcttttggttatgctctagaacctctcgctcaggggtgggatcattggctagatgttcattgtctagttcctctttgaatggataaagtctgtactcaagaaagtttgtagtagtagctaggagagagatgttctgagaagattcttaaagtttaagaatttcatgagccattgctctcaacccccaagtaatagagggatggcagtaacttagagccaactagaatgaaagatggtcagcatccatgtctttcacgatatagtagtcttggatgaatccgaaaatctttgagatgtccttgtacattatgtcgctcagccactagtacttgttctatgaaaagtaaaagtaacctaactggcgttgatttgtgctagacttcaagtcaaaatgccagtttgtattgagagctaaaggctggccccagccttgtttggcatacaacacgaacagtgaggccaaatacttaatgtttttcaaagtgaactagatagggcagattttatagtaatttgcgacctttttgaagtatggataggcaagattgtgccttgtttagcgtggggtttggaccacgcacagagcccctccccagggttagtggccaactagccagggttaggtagaaaggcttccactctacccataatacctttgtcatagagattcttaagtctcttgtacataaggatggacggaggggaggcccattgaggagcttttttctccttagttcttaggggacgggcttcctcgtattccaccttgacataatcctggtccagaactaagacatccctagactcagaaataggcttttcagcctcattatacccactgaacggaagagcacgaggagcttcttcctcttcttccctcgatatttcatctccatcaccattaggagaagtagtcgcacgaaccttgccctagtcctcgacttcctaaacctcgacgtccctaaaaatcactttaatatcctccctagaatgttcagctattctatatcggccatcgaaaaaggtcgggcaaaatgtgggaccttatccgaagcctttttgtaggtttacttggttttagtcatcaacttacgtctggacaaaggatttggtttggtcgtatgcttcgctacagtaataatgatttccgctaatgcagagtttttcttcaaaggccatggtagaccttctaggaatgtgtctgggacatcagtccggactttgtatgtccaagtagcaggaagataatgcctccaacccttgttcaattcccaaatgaactggttgtactcttctccactaatatgaccattgtaatggtgatgatgtaccacgggcttcgtggactccaatgagtcactcgtaacctcccattcgtcaaagctcaaagtagatgaagttgcacgtagtcaaggctagtgctcgtaaaggaggtggtaaacatcactatctatccagtactagtcacctccagagcattctccagggttcatctacaaaagaaggaagacaaaatggtaaggatcagacaaaattatgaagtttttgaatgggaaaaaatatgtctaatatgcttaccagaccaatttaaaaggaaaaagaaagaaatttcattccaacaataaaattcccaattcaaaggttcaatgaatgataaagaaccagaaaaattttcaaaaaccttgaataaataattttaaatagtttcatttcaacaatgaaattcccaattcaaaggctcaatgaatgacaaagaaccaggaaaagtctagaaatttgaggacttaagatgccttgggcgtattaatgtcgagaatcaaaaatcctaaatctacataatctcaatcgtcgaagaacattttcaagaatctagagttcacagagtagtttaaaaatagcaacacatgcatttaaagaaaacaaaaagaagaaagaagacttactcgcaactttaaagctttcgaatgtgcttggacaacccctacaaatcaagcttcgaggaatggagtttttataagatttcagaaagaaaatgattttatgctgtgatgtcattgagaggaaaaatggctaaaagagtatataagaattttttaccctttatataagcgatcagaaaggtgattaagtaactaaagctcaaattttggttttccccccaaaaggtgtaatcatcacatggtggggtgcttacaaaagcacgcagtactcaattaccatcaatgttccaattgaggttcaaatttcaagacaattgagttaaagaagaagttggaatatccaaacaaggtatgttacaccatttgatcaaaattcacctcgcagtcagctcgcatgcatcgattaaagtaaaagtggctagaacatcttcagagatattccccttaaatgttcaagcaatcacatccctaattttgtgggatagatatgcactgacaaaataaaagagaaaatctcctagttttctttttatttctcttgaattaggaaagtacttgagtttcc

SEQ ID NO: 162104 - DNA, 1813 bp, Cannabis sativa
gtaccactgagtgatgcaagtgattttccctagagatttacgcaactttgtaaaacaaaaatcaataaagaaatttgaaaacggaatcgaaccctaattccccgttacccgttacaaccatggtaggcgcataacctaccatcgacagttgataaggcagttgcttgagggatacatcgtcggctcagaggccatacgatttgctcagttattcagagtcatcacaagaaatgcaaccgaagttgctaagatccccactgctagtccttagacagcgaccgaaatcactgaacagggttctaggtgaataagaatcattggtcttgtactaataaatgcgatccttccgtcagcaagctgaggttggaacacttgttcatgtattagctctagaattaccacagttatccatgtaaaaaagaatatccgaggaaccgtaactgatttaatgagccattcgcggtttcactttataaacagtatgtacttagacatgcatggcttaatctttgagacaagcatatgactactggcaggatcaaccaggtaacttgatgttttagcaaagtaaaatgctaaacaagttgtttttgcagctataaatacgatatcctcagctaacaaccagcaagtggatgttaactttaacgaggtatcgagatttatgtcgtgcattaagatgattctgcagaaaactctttagaatccatcttcttccactaaaatgtgcaagcacatctagcaggagtaaccattgctgggtacgtttgcaagtcaactaaacagcatagtattataaccgcttgataccaatttcttggatcaatctgcggtctgctttgcacaagcagagctcaatactaatactgctcactctgttgagtgactagtttgaacatatatgcaagatatgaagtctgatagcattaaagcccaactctcatagatattgtcagtcgtaccaaggaagaccttaggtcttgcaggtactctacctttgtataatagtgtgtggtgataagatgattgacgatccaaacccattcaggcccgtctcttcaaccaccaaacatcaacagaataacaggaatagatgcgtgaacagctacagtctggaccataccactgcttgatgcattgacttatccataaccgtagacaatcacttacctccccatcaactactgatggttgcttctctcaattcagcaactacactcaccacatataacacaataaatctggttgtgatctaaaacctctttttctgaaaattagactaagtccgtgtctatttttgacacccaataacttttgaaccataaggtcaatcgcgatcatgtttttcggggtaatatcccagtagtgccgactatcgcatgcgcttattaatgacctaaattactaaacgcaagtggcctaaaatcgcgccaattcgaacattctcattgcttttatgggctcaaccattaaaggcgatttcctctggtaccaacagcacgaactcgatcaaaattacgcaatcattagttgacctaatgctgataatgtccaaaagatttggtaccgtgaatcgacctcgttcttccgttataatgagtcatcatcgaaaatccaggggtatgcaaaaaatttaacatgtaagtcaatggaaaaagttaaagttcggttttttccaggggtatgcaaaaatttttcagttttaaatcacaacaaggttaactagctaaaacctcgctaaaatcatccaaacagcacttttttccattttacaccatttaacatgtaattcaatggaaaaagttaaagttcg

SEQ ID NO: 162105 - DNA, 3079 bp, Cannabis sativa
cacacacacaccttttcataacaagaagaggggcttgaggcttgactcaccttttttttctctctttcaacttcaattgcccaaaactttatgccaaaccttcccatcaaacaaaaaacatcacttcacttcaatatctatctattttttatgatttgatttataaaccaattttcattcttttattatatgaatgtttcatttaccatatctctataattaatggatattttttcctttatatataaaaagacattttgtagtttgagtcacatgttcatcattatatcatgttctacatgcacatttccataattaagatggggtctctaatgaaaccaaacttatcttaattaattaaaatctttagtggaagagtcaagggtcatagattccatgtcattcttagaacaaagagaagtaataagatgatcttattttaattgtattatgtctttatggagctgtctatattatatagacatatattaaattttatgcttccacttgaaatgtttctcactttattttctatttctcaaaataagttatttacttttgtttggttcattatgcaaatataataaggcatgataatgaccagtgacaaagattacaagattttgaaaaatgctaaaagaccataatagaagttgacccatttgcttatcattagtttatgtcattcccaatgccattttggctcattaagtttcatcaaagggtatgcaaatttattagattaaaaaattaaaccccaaaaaaaaccctactacaagtgctaatatacatggattattgtcccactttatagcttttgtttggtcattttaacaaccctcctttacaagtaccatttatttttattcatttatattaatatttatataaatatatattaattttttttttaaaaaaaaaaaaggcttttgatcaccttttgaccttgcctttccttggtactttttaagataaaacacaatgaccaattcttaatgcttcaaagtatttttcttgaggtagttttgaagatagtaaataaatagattaatttatatatatatatttaaaaaaaaacacttttttttaatactccattctctctgttaaataataacaacaaaatagtttctaaaagagcaccgaattaattaaaaataataacctgcaatcactcaatcatttggtctatgtagcatatatataaataaataagtacataaaatattaaatttattttggaccatttgaaatgatttcattttttccatgtgaaacccacttgaatagtgggtgtgacaaatatatagataaatattcatatagactaaggtcaagtaagtatcctagagtccaattattaacacctaaattaaataaaagaaaaataaaataataaacaagtattagactactttgacttatgagtccctcatggagatgggactttcgtttttaagtacacaatttgtagagtttgtttccatgttgcatgacatgagaattcaattttatataattttttttacttgttttggttttatttttacacatatatattatatatagacagtcacaaatttttttagacctgaaatcaagatcatccatgtagtaactatatataccatgcaacggtttagatgtttgatatcttatttttatctttctctttttgtccaaaactttacaaaagttaatgttcttttataaaaattataactttattatagctatacaatgattcatcaattgtattaaaatttaaaatttgattgattaaattactatgattgtcactctttaaaaaaaaattactataatcgaaaattataatgagtggtataatttaattaataattcaaagaaaaaatcttttataggaaaattatattacacacttgaagaatgaaaaattacatatattatattagtcataaacataacttaatgatactgaaataaataatacttgattttttttaaccacactaataatggtaattaaaattggtcaactagagttgagttttaactatagcaatctaacaaactttaataaattattaatttatttactttatttgaataaaatcttctcattgatatgagttattatcattaattcttgttaatgttggtgttattaactcaattagatcttatattcatttaattttgttgtgagtctactcttcattaataaaagtgtttttaagtatatatcgtttttacatatatatagccgttgttggctgtgtcctttgtgtaatatgtatcttggtcccaacttttgtcttttattggacttatatatatagctggtccttattttgttagttttttttttcttctagcttttaattcaatttcaaattaaggataagtaacattcctaaaataaatatatatacaagtttgtagacatctaaaaaagaatattcatagttatcaaaaaaaaaaaggatattcattatttaacatgtatttcctagcattaaggtttatgggagaaatacttgaaatgacaacctattagaaaatactaatatttagatccactaaaacaacatgagatttaacaaaataaataaataaaacaaaaaacaagaacgagtgaatagcttaaaaaaattagttgtcactatttactgttgattaatatagataattatatatatatatatatcaattttatcaaaaaaaaaaaaagggttaaattagggtttttcaaatatgttttgtcaatttgaagcggtttgattagctttatttggatcatgtgggagatcatatagatttgttccaacttataacttttgaataatttttattttccctcaaatatatcaatacatcacattatttaatattagccaatttgatgtgttgatatatttaaagagaaataatttcagaatgaaaatttcttaaaccagcaaaattaaataaaagtaatcataaatttattgacagttttaatctcgatccattaaaatttgagggtcccacttacacttaaataacaaccacactaaccataataacatccaaaagtgctttaattggtgtatcacta

SEQ ID NO: 162106 - DNA, 3243 bp, Cannabis sativa
  modified_base (3117)..(3124): a, c, t, g, unknown or other
cccaaatctcgctcccaaatgactctgcttatttcccaaaagcacccaactattacttattaacaaaaatggagaatattcctgaaagaattcttatgaactgctgtcgagaatggcctaggttgacaaagtgtcaacctgggcgcttggcccaacatctaggtcaacctaggcgctgtcccagttttggcctctaggtctatctgttttttttttatcctgaaagcacttgattccttattatgatggagacgaataaaaagcttgggttatttcttcaatattgtggttggaagtaccctaggttgactatatgtcaacatgggctctatgtgcactagtggcccagggcgattggtgcatcaggtgctcaaaatggaaagtgtcttgattatgattatgatgcctcaaatatgtttgtgataggtcttattcatgtcaaagtaaaaaatttgagccatttgtactaagacggacttgaaaactgaaaccctattggaatgtcaacctaggcgttgggtgaaaaccctaggcacccgggttgacttccgattttttgtttcatctcttttaaaattccaagccttggattcttcttgtcttcttggttcagaataatgaaatatggtgagttagaaaacatttggaaggatccaaatttccattccgaagttcccagagtcaacatacgcatatggctagggcccctcccaagttgagtgctatgactcgagactactcaactttgagatgttttatttcttgccacatgtcaaacattgatgtccaagttaccagggtcaaattctgggtaagcatttgccgccaagtttacttaacacttgtgtgaggctgacttgatgatgtgaactaagtttgtttctctcgaaactaccaagtaggcatcaattttgataatctctgcaattcttctctattcttcaatgattcctagtgtgactaggaattttgaatcctattccctttcgaattaatgaatttgaaaattaaagataaaaagaaacgaagagaagagagaaaagataacaaatttttgtctctcttacctatctttttaaatttaaatttaaatctagtccttgtcagcttaagaataaaggagatcagttgatataaatagataactcctttgtcccttttcccacttacttcaaatgcccataaaggagaattgagagcctgagaatttttcttccatcagttcttcaagttttcttcaagtgttcttcaaattcaagtaaatttcaaaattttcaattgtttttgaattttttatttcttctcctcttgtaaatctcagtttaaggattctagatcttgttagaaatccttaaactccattagtaagccctccaaaaataaaaataaaaataaaagtaagatttttatgtgagttgtttgagctaaaattatccattcatgcaaggtgcagtttgtctaaatttgcttgaaaaaaatctattttaatttgaattaagttgatattctattaatcaaatttgaagagaacttagctgaaagaaaatgagcctcgcatgagaagaactagcaaaaaacttgaggaatataactaacacacgacccaattcattcgtgcaaagctcacagtaccaaagtctaagaagctagacaaggcccgtggagggcaggttatggaaattgagttagtcactgctgctattgaaagtaaggaccaaagagatcacgactttgaactaagacctcttgtatttagttccgtcactcagccccaaataaaattgattcgagatgagttctctctacctgaaactattgtcaggaaacctagatttgggtgtcgcaatagttctcaaaatccttattgtagtgcttgttgaagatttcacatgaacgcaagtgcattcttgcgtctacacccgtgattcgtatcaattgccaattacttcggggtatgcccttatcaaataaatctgaatggttactagattttgtcaacattctttttcttctatcgtctgcagaattggcctattttgactcctcgtgagatcaattttctgtgtgatctaaaaaagttccacccacaaagagaaagtcttctactatttctatcagtttagtgtgtacatggacagtatcactaaaagtaaccgtggacttttccataaagagtatttctataccctcactatttcttcaagaaatctcacctttaaaaaggttggccctttcaaaaggcctgctccattgatcgacatgaagtagagagcagatgccatgttaactaatatcgacttatgggaacgagagtgaaagatattgttcatcgatgacaacctccatcacgtaggtctcataccaacttgccagtgagtgtatgttgatgcttgctttgttgatcactctttcacaatgcctcttgaggatgaagagagtgggcaaagtgtcactatcattgggttcaaagtgatgttggtagatattagagttggctctggtgataaggccaaaactaaaccttcagggcacaatgaagcttgtgtgcctgagggagtttatgaatcagtaggttgttgatgcgccatagtcatccctaaccttattttttgttttttcgtatttttcttacgtactaaccacttttcttttgtttcccagataagatgtgtttccttgctgctatggcttcttgctcctagaggaagaaatcagcaaccgagactgatgaacctcctattcgagaggttgtgcaagtcattcctacgacttctttaactcctctgaagaagtctagaaaaaggacaatgctatcgtgacttacaattcctctttagtgagggattcatgcaagaaaaaagagaaggtcatagatattgaagagaggccttctacttctcctatggttatttcttggggagaagtggatttggctgagttgagttcccacaaatcggagcttgtgacctacctccgtgcacaagacaacatgttgttggcatctggggaagcttttgtcacttccaaggctaaaagtaagcccttgggaagtagggttgtacatcgatcaatttgggtggtttatcctataaattttttaacccaatctaaagttcnnnnnnnnaaaatttaagtgcaactcgcccaatttaaaaaaaaaaattgtaaaccgaccaacagtttgggcgggttaacccaaaccgaccaaactttttttttttagtttcaaagtcaaaatcaata

SEQ ID NO: 162107 - DNA, 1648 bp, Cannabis sativa
taatttccttacctcgaatgtggaaaaatttgcttgattgcgagagtgatcctttagccaataattgtctttcgtaaaccctaaattttatattgattaattagaacattctattgtgatttatatatatatatgaaacttaaccttggatctataaaccaatgctacggttatgcatgaccttaccttagcatccaaggagaatcctatttgtgactatggagtacctttcaccccaagcctaatttgaaaactcatctagtggttcaaccatgagtaagacaataaagtcattaaagtttgatcaaataattaacggagtaaaagactatagttttgggttcgaatcttaccaacaacttgacatgatcttgaaatgaataaaaataagatgaggatgacgataatgatgatgatttagagcttgtagaaataatacttatgtgtggttttgaactgtgggagatagagaaagataatggtggcttgagttgttggtataggaggttattataccaaagttagcacaagaactagagtctttgttctttaagagcatgtatgaaaaggaaggataatggaagacatatatgaaatgaactttagctatactttgcttttgtgggtgtgaaataaagtgaatagaatggacagtatttataagcttagaactaaccctacccatgtctcctctcacccaaccactaaccatgattaacatttataaacaataaataattctattaatattctacacaataacacataacattttctagattcttcttagctaccacgccgttgaagatataatccaagcagagaacttttctccttggttttctcttgaatggtgaagaggaataaaactatggcttgatacctcactatcatgggctgacttcactattttcttgctagctactcacacgttctagtataccactattactactatttcttttactctttaattaatcctacaattcttaattcagttaaatgaaacaaactcctctatcaaaataaaattatgttggtctacccaatattctaactacatcaacgatgatactaatccttagttgcatatctttacaatattttaatgagactctctttcactgctatatttaactacttgaccagataaagattctactataaattctccaaccaattctagctgcaactagttttaccaaccgctataagtccattttttttagtgttagacgttcccaatattcaaatttcaaaatttgaattgtcttcataacatatatacttataaaacttactttaagggtgctttgcatatatactaacatgcacacttctatataactaaatattattcctcatataatatatcatttcaaatattgagaccaacccaactccatatatatatatatatatatatcactatacgaccttagtactactactattactactctcttataatgttacatcctaattctataagtccaacacctaatgggactaagcctaaaagcccatagtaatctataaaagtctagcttattaaaatgacaaaaatttcataacttaaagatataatatttaaggaccaaataacatattctaagcaagcaattatttccacatcgagttaactaac

SEQ ID NO: 162108 - DNA, 2363 bp, Cannabis sativa
cttggattggacttcagggggtgaatttttttaacaaatcgaatttgtagaacgtgtagaagaaacaactcaaattatgatccaaaaggtagttcaaaatatctagtaaaaaataagcagttcaaaatgattaattagtgagagagtatgagttaatactatacatagtaaaggtgtcaaaccaggattcttttttcggcattaaaacagaaaaaagtgtttgttgatttcaaagctaattctgtgagaagattcaaatataaaaagaaggatacaaataaaagaaggaaaaaaaagtagggtgtgctagaaaaatagtcaacgtcaaaattagtttgtatttattagtgatgaacatcaaaaaagtttgcatttattagtgatgatatttattgtttttttttttttttattagcacatattgttggggcattactctgccttgatacatattatttattcctgtcagggtttatggtttgagaaaaattcttctttatggatgctgccatgtatgaatgttgaacttgcggattccttaagcacaagaggagtttccagtttgccacaactattgaatttctcaaaggcaaccttgcagaccatgataggaaatgttcctgcttcaaaattatttcaggtttggagtcctgtttctaatgaatatatgcatacatattaccatacatctgcacatttgcattcacttgaagtgcacattttcttccgtcttccaagagatagtttacatactccttgcctcctgcacacttttttcttttccttctcattccctttttattactttgttattaactctagtcatatacctttttcccttttagtttttcatttttggaaactcatggaggtggtcatagatgattatgtaacacatgttcatattttaaaagagaagattctgggtcactgtttcagacctaggagagagcaagcctcttcacttttgttattttagttggcttaattatgatatttaattaaaatggtcgcatactcgcatggcttaattagttggtctctcctagatgaaatcaattgaccttagcaagctataatgtttgccttgaatatgtcatttgttccacaccagaaaaaaaaaagagagaagtaaaataggaaaagaactatgttcaagtcattggcttaaactaaaattgttaatacaactagtggcaactcattttgtttaagagtcggttgcttcccgatctgggtcggtggtaattatgactgcagaatatatttttatacttttcttttgtaggatctgcaatatttccccaatctccaagtaaaattaagaattcagcagaggaaaactggcagtgcaagctccccatctttgaacatcagattggagaagagaaattccagacgaaagggatcaagagcttttgctcctcgatttcccaaggtaaaaaagatttatcatgttctaagttcctaactatattcagaatagaaactaaccttgatgtttgaggtattgtttgcaggtaaaagatgaagcctggtggttaattcttggtaacacctctagctctgagttgcatgctctcaagagagtgtctttctctgatcacttggttacccatatggagttgccatcagatccaactgctgttcaggtcagctgagtcccctaattatcatacactggttttttgagaattaagggtagaaaatgtctgcttctcaggtccatgaactcaggtcatgagtataatccaataattatttttcttttattagaatcaaatgttctatattttgcactataaaatatccttttcgattgaactatgtgacataattttgatgaacaaaatctatatatccatttgtataaaatgcaaaagggaaaacgtaaatgtttccaaatgtactcactatgtctaactaacgtggttccatttctgatatataatacttgagtcacggtggttgactcgtttattgttttgttattttagggaatgaagctgattctagtttcagattgttaccttggttacgaacaagagcactcccttcctgaacttcaaaccgccaggaactaagttggtcacttgctattattttggattcgagatcttttttattttatcttttaaatggattgcagctcttttttcagtcaccaaatctatagcttacttcatcatatatgtagcaaatatatttattttatataaagtgtgtctatataacaataatttcttggtttatgagaaattcatgtgattttttattgatattaaaaataaaatggtttatgagaaatttatgagtcactttttatttatatataataaaataaataaaataaatagcttaat

SEQ ID NO: 162109 - DNA, 3064 bp, Cannabis sativa
ttcgcacccagaacggcggctcgcagccattgagagcgtttggagtagtcaaaatctttggtttcgagatctagttgaggtgtttgttgctcaagatcaccaccactaaattttgatgattggttggaggccatgggagagagatgttgagattgagagactaaaaataaaataaggaagaagatgtgtgtgggaaagaagttagttttttttattttggtgaagaatataagtgtgttggacacactcctcttgggaaggatagggtatttaaggagaaagacgtttactgtggaaggacacatgtagggtatgatcatcactaaccaaattaattattaagacaaatatatataaataaataaaaagaaagtgagatttgtaatataatgttcatctctacttttgtagaaaatatataatatatattatataattggacaattaagattgtgcaaaattgagacattaatatatacatttttgtacgtggcatgtgtgtggtgtgtgtgatcatcaatatatattatatgatactccatgaaatatagatagtcatattttttattttaatatcgttttagtttgtttggtatgtaatattacatcgtattaaacagtacgaatatatttatgtaaatttatatatggtattgactgcatatttataatatttagtatatataaattaaaatttaatataatattatataaaaatatgatatatataatttaaattataatatattacaatacaataccacatagctaatacaatatatcaacgggccaataattatattattttcaactcttacttgttatactatatatttgaaaatatacacgtagatttctgcgtacattttttataaatatatattttatatattcattcatggggctgctggtttttggagattatttaaggcatggaatattcctttcaaacaatccataagtggaacaattatttaattaactaataataattcacgtgtacatgaagagaaaaaaaaataggaatattttgctgactctttgtccacctatatatagctttgagatgaataatgaattaaaaatctaatttagctaaaataataaataaatacttatacctagacgtacctaataaatgttgttctatatatatatatatatagtataatgagactcaaattcctcgttatatattgtagtaataatatttaagcaaaattatatttatatatttatattttttatattttaaaaaattataatttaatataggcttaggtggcatttcttttataaatatatatatatatatatatttatatgtatatggctttatttatgaatttgcgagtccatgaattttagggacgtaggtattaatttttggttttaaagaaagaagaaaatatttaaaataaatgaaattaaaggaggaagaaagacgtacaaatttgctttatggaagttagaataatagtatataagagagattggaattattaattagtttcacgagaatagagtgatcatcaaaaccagacaaattgttaaataatatatatccaatcattttacttttttattattaatgcatgcaaattatatatatatatatataacggtggattttcacagttatatatatacgttaccatacacatatatttttgttttgtacgtatactatatattatatatagcaaaacaactcacaccaaaattatttttttacgtgtggcttaaaaagactaaaaaagcatggtagaaagccctaaataaagagcaaatgcattcaaataattatatagttgaaaatgaaatatattatagcatacgtgcatatacatataacacctatatatatatacgttccgcgcgcccaatgatgattaaaaggaataagtgtggtgatacatataattaatgcatatattattgtccacgcttctttctcgaccaaataattaatattcataaattaaggttgacaacaatttatagtatatataaacagggacggtgcttatatgggggttatagtttccactaacaaaaatattgttttttaaaaaattaaatgtaatttttattaatttgataattgtagactataaaatagtagaaaaacccccacaaaattaaataaatctagtaagagtgattataatataagtataaatattttttaataataaaaaagccccacaaaataaaaattctgggtcggttaatataaatggatcagtagcgcatgtatctattctatagtgttattatgtgtcatatgtgatcaacccatgcacgtatatatatatatagtatatgttacacgtacataaatgtacgtacgtatataaattaatatataaatgtcactctttgtgtgtatatatattcattaaaataaatataaatttgttgaaatatagtgttaaatccataagctaaaccaaaaccatttgcgtgtatatatgggcggatccacattaacggtcccaccagaatgtatatatattttagttagtcacaatatatatttataataaaaaataatatttatagacaaaatagtaggtttagtgtaataattaaactaaattacgtatatgttaaatgtcaaaagatcaaatttcactaacaatactttattttttaaatttacttttgcccctgctttacgggaaaaaaaaaattacgctcctctcactttaaattctaagtccgccattatatatgtggatgagatttgtatattaataacaagtactatatattttatagagttttttacggttaaatcctcttaactatcattttatttgcacttaattttttaagctcaaattttgacagtaaaattcttcaaatcctaaacaaatagcaaatttaaaatgttatctatttttcatagttaactgctaatatagattgtttatgtgtacacttttatatatgtgtcatatttatattacaactaatattattattttaaaaatataaaaattatttcaaattttataatattttttatttattttttaaaatattttattttttattt

SEQ ID NO: 162110 - DNA, 3023 bp, Cannabis sativa
tttttttcttttaattttttatttcttttctcatttgcttttaacaaaagtggacaacaaaaatcgaactgatctaacatatggtgtgggctttaaaagtgggccatttcagcccaatgtcaatggccttccgattctcaggtccatatgggagagattcaataacataagtgaagtgacaacagttgagttagagttgccgctgggggtgaggtttatcagacaagagaggatagaatgaagattccaacgatgatgtttgcacaaaccctagactcttaatcattctcgccgctgctccgctctcatgtaatcttcaatttcttcttctgtgagtttaatagattctattataaccaattattcactctttctctctcatttgttacccttgtcattttgcttctttctttctcataaattaaagaagaagaaaaaaaaaagtgaagtggtagttgtggaaattcgcgctctttttttatttagggagagtttttcaaagtttgggagctctttacttagtgcagacaaaatgttatgttttccagtttgattgaaagagtaatgtttggcagaatgaatcatatgagttgtttgttaaaagtccacttagtgtttgtaatatgggactaacatacatcctaatcgtttgatttatttatatcattctatatccttagaaaaggtccatctgggtatattactgtttttatcaacaaaaaaatatgtgattgtaattatatttgctaaatgcctatattgcattatgaaatgggactaacagacatctatatatttataacattccgatatcctttgaaaaggtccatctgggttttgctgtttgtatcaacaattaattgttcagcctattcttgggattgttcatttgtaatggaaacattaatgggaaaagaattcttcttgccatttaaatatttggacaggtttatcaaatgttttaagtgttaaacggtataaacacaggttaaacagtccgggctgatactaaaacatgacctgattataaaacgtgctgtgtcctttggtcatgtcgggggtttacacttagaaacgaattttgaatttttagtgtttattattgtattgtagtccttaagcatttgtgttttactgtttcattcccagtgtccacttcgagaggaacatattcgcatggcttgcattgtttactttttaatgtgggttatatttcatgttaaatcctaaatggatgttttatactcaagaatttggctttctttatcaggtgcccgaccatggttctaaacggatgcgctttgcccactgggtgtttctctataaatctcagaacaaacaagacattgatacatggatccggtacttcatgcgttcctcatttgcaaagtaaaggttctttttccagaatcagctcatggatgccaccccttcatctctctgctgtatcatctccactactaagtggggatcaaggtagcctgttgcgtgccatccccatgttaccaaagcgttgcaggcaaggtacttctattagggcagctaaggatgtcccaactagttttaggttcccaccaatgactaagaagcctagatggtggtggagaatgctggcatgtcttccttatctaatgcccctccatgaaacctggatgtatgctgagacagcttatcatctacacccttttcttgaagacttggaattcgcaacatacccttttcttaccgccattggaagtttgccgagctggttcttgatggcatacttctttgttgcatatcttggaattgtgagaagaaaggaatggcctcacttcttcaggtttcatgtagtgatggggatgttactcgaaatcgcactgcaagtgataggaactgtcagccgttggatgcctcttgctctgtactggggcaaagtcgggatgcatttctggacaggggttgcttttgcttacctttttacagttttggaatgcttgcgctgttctcttgctggtatgtatgccgacatccctttcgtttgtgatgctgcttatattcaaatcccatatgattaagatggaaaatgacatcttggtcttcgttttctgttgagactgttgtatatcttgtaacttgaccggctttgtttctgctgaaatgggattagaaattttaatggcattttcttgtgatcttgtatttcttttcggatattggttatggtaagttgtacttcacatgaagtaaggagtaatacgatacgtctaaaagagaaaaggacatgaagttatgagtggggatagttgcctcttatgaaacttcaatgaagttggcttatttttttctttttttatcaagaataagattactgatttactccataaacactcattatcccatacaatcttgtgaagtttcaaacgaagggagtgcatacatactaataattatattgaattctttcaaaataaatctcatatttcgaaatgaatgcactgaagatttctattctagcctaaattactcaagaagtggaagtgtctggtgcactaagttatataaatttatgtttttgctttcgaactttcaaaattttaattcttgtatttaaaaatgaaaaagtgaaattaattttataaaacatattttaagaaaaaaacttttgcttttttaattaaaaaaagagaaaattggtgtacatagacataatttagtagtaaattaattataaatactgtttgaattcttaataatataatttttataaatatattgcacataaattaattataaattggattaatatgtactagaaaacattaaaaatgaaaattggcagtcgaaaaaaaaaaaaaaagagaaatttacgcaaaacaataatttttcagtaaattttttgtatttatatgtttagatatatatattatttatatttttacagtattttagaaaaataattaaaaaattatataaaagtgataaaaaataatatctgaacaacataaaaataataaaaaataaaaattaaaacagcaccaaaa

SEQ ID NO: 162111 - DNA, 3650 bp, Cannabis sativa
aaaaaactagacaaaatggttctacaacgaaacaagaaggtttcctttttggttgttgttctagcaatttcagtagcaaccattaattgccaaacctttgatgtgaccaaatatggagcaaaacctaatggtcaaattgatcaggtaattaattatattaatcaacttatctctctttgcataataataaattaattcatatttatacatatgtaaatatcaattaagcttaaaagaaaatatgggtgtttgtctaatgtgtacgtaggccttagcggacgcttggaaagaagcatgtgcagcaccatctaaggcgacaatagtagttcctaaagggacatacaatttaaacaaagcattttttctgggaccatgcaagtctcctgttgtgtttcagatggacggtatactaatggccccgagcgctgccaaaggctttaaagatggagaaggttgggtcacttttgaaaagctccaacacctaactatcactggtacaggaactttcgatggtaatggtggacaaagttggggaaagaaatgcaagagaacagattattgtgaacaactcccaattgtaagcttacttattatacattattatattactattatttactttatttacaaacttaataataatgtgtgcttctcttgttatatttcaacacaacaaacagaacattaggttaaattttataactgactctgtgatcgagggtatcacaacaaaagacagcaaacaatttcacttcacagttttagaaggagagaacttgttattcacaaatcttaagataatagctccagaagaaagttggactacggatggaatccatcttggtcgttcgaccaacatcactatcactgacaccaccattgcaactggggacgattgcatctctattggagacggaaccaaacagttgaagatcaccaaggtaacatgtgggccgggccatggaatcagtgttggcagtcttggaaagtatcagaatgaacttccagtagaagacatcactgtcactgactgcacattcaaaggaacctcaaatggagtcaggatcaagacatggcaagggtctactgatggtgttgctaagggcatgcactttgagaaactcaccatggataatgttgaaacgccaataattattgatcagaaatattgtccatggggcgcatgcacacaatttgaaggggttcgtatttatatatatatgttagattattgtattatattgaatacatatatttatatatatatatatattgttttgtgtgttaaattcacatgttatgtgtttgtgtgtgtatatatacgtatacagaagccatctaagatcaaggttagcgatgtggtgttcaaagacattaagggaacttcttcaactcctaaagttttgtatcttgtttgtggggcatatccgtgcgaaggtatacaacttaataatattgatctcaaaactactggtagtaagattaaagggccagccaaatccgtttgcacgaatgttaaacccgagatgtccggcactgtgaacctaccgccttgcactactgatgactctgcataatcttcaacaacaattaatcattcattccttattataatgagttattcatcatgacttataataaatgaattaaatggggtacaattcttaattagtgtctcctatctccattttgtttcttttagattggtcattattttgaccttcacagtattgtattaatttatgtggttttattacaactttacacagttgcatgactttaatcttaatgatgtccttaatatgttcacaccaagtttgttattagggtttatgctataaaaataagtatttaatgaataaaatattacagaatatatgaaatataaatatattataaatgaataagttaattatagaagtattattcattaatatcagaaaattcatatagtgtatgatcttgtaagagtataaaagaattaatatcataccatatgaataaaataagtcgataatgtattaaaagtatgtaatctttactataaaattaacaactatggtttactaaccactagcaatgtaacgccccaccttttgtaattagacaagacagtgaaagcttgtgtaacaagtaattgattagtaatataataaaattaagaatttttatatctatttgtttttggtaaatcagaatcatgtattgctcaaaaaccaaccatttacacctatacatcaccttgatttaaggtgaaaacaaaaaaccaatttttatccttgtgttaactcttcaaggaattacatttctaattctgtgtttaatctcattttgaattcttttgacagtcacctttagcgttgggactctttgattccaataagcttcattcttgctctgccacacttggtatactatagcggccacagttgctgcttatacatgctttttaaactttgacactcaagcctttgagattcacttcagcactgtaatatttgaggtcgaagtcctccaatttcgtcaatcattaacttattgctagcaagaccaactaagatgacactcaaagaataaatggtctccatattctttacaagcacaacaaatcaaacactccttattgatcttgcttttagccaacgataatgagtcaattaaagtgaatagaaaaaattaataataataaattagcaaatagaacatagagatttttgtagacatttggctctgtgatagtggtaatagcctactccatttttcttgtattgacttgtgagaagagagcaaggtgtccttgatcttctttgaaagctcttaccatggttttagcagcttaagtgctctctcgaatgaataatattttggatctctaaatagtgatatgactcaactatttatagggaataattacattgtttggtttcctaaaagaaatatataagagataaataaggaaacttaattactttcctaaatcaagagaaagaaaaagggaaactaggtgggtttccttctttctcttgttggtgcgaatctatctcacaaaatcagagatttaatcgagatttgcattgtttgaacatttaggacctatttagtatgcaggattggactggattagacatgctaatttgtctattccagtgtttcggcatgttggaagtctggacaactaatccagctaatcacatttgtctggaattatttatcccatccagcaaggtgaaattaataattccatgcacgtgagatttttttattattttttttgattttgatttagttaatatattttaaatttaataagaatttaaataaaagaattattacaaatttatttatattttttttatcaaaaatttattcattaaattattaaaaatgtataattttaaattatcatagataagctttcaaattttaaaatgatattaattaaacaatagttacttaaattaattttaagagaaacaatatgataataaaattatatattctttttaaattactagaaaattttatattaataattgtattaaattagtgttagcataaatagttttatattattcaagtatttttattttactattttaattatttattaaatgaaatatgataaattattttattatatatttatgata

SEQ ID NO: 162112 - DNA, 1233 bp, Cannabis sativa
ccgtccctgattacggaggatttgggcggcggaaggcgggatctgagagagattaggggagaagaacaaggcgcggtggttagggcaagagacgccattgagggaggctttcttagcaaaagaggagtgtgaactatgaagtagtagactttggagcaatcggcagaaaaaaaaatgatgaactgtctgattatgatcaaacggttgagatatgatttgaatcttttcaatcagattcagaaagctttatcaaaaaaaaataaaaaaaataagctttctttgtaatgccgtcgttcgtgttagaaatctccgccaaaagcactgagaagatcccccttctagccacagtgccaggttggacttaataggggttttttttttgaaataagacttaataggggttagtttaacagaacctccgctacagtctactcttacaaggtgaagcccattacacgtgtcaacaatgtagtagtttcctgctgacgtgtgataagttggaaaacaaaatgaaccaataaaattgggtttagttccacgtggcttaattggattggtgaggaatgataggccctcttacatttgggagatgactcagatgaggtcagaaacgaagatctgattgttgtggactagtcagggccaggagttgaggaggagtgaaacgacggatatacccttggtggatgaacaggccacacaaatgttcacgtgggtaaaaaagtatttctattccaatttcaacttatatgaatttgtccattaaaaaatgaaaaaaacttatacgaatttgatttaactgggtttggttcaattcaagcccattcattatgtggtccataaacatttagaaattttctttttactattttaatttttttttttttgtttcataattatcttttggatggttctactatgctagtttgtttatctacatttgaaaaacttttgacagtaccaagagtcgggccattttttgtaatcccaaaagtcgtatagtctgtttttttctaaaaaaaaaatctttattgtcaatttaaggttagtaattaatggtgttcctaaaataataaattcaatttaatctgcacaatctaattcaatctaatctgtaaagtacagatgtccgcacactatgcgagaaaattcaaaatttgcacttatgcagattggatgttgattgacatgtaaaagtttctgatgcaatccaattcacacatatttataaaa

SEQ ID NO: 162113 - DNA, 2995 bp, Cannabis sativa
taatttattaatattaatatattttacagtgccaaaaccaaaccaggcactgatgacgaaccacacaacatactttgccaaacactctggcacttacagttacccgactgtgatgatgatgaggaagatgatgaagatggggatgtaatattattatcctccacgtcagcattaccaaggcgggtgacggtgagggaagtgttgtagtactctctcacttgagtaattacgccatcagagccgagtgtccaagcgtgaacccaagacacgatgtctgagcagtagtgttgttggccttcggctattacggttgattcaaaggcaacgattgagaagggaatgaagggaaacgacaagtcgtttggggatgaattacctgtgagtagcctcttcaaatgttggtgagatggtggaccgtgaaaccaccactccaggtatggtgcgaagatgaggttgggatcaataatagtggtgtcgtttttggatttgttattaaaagcttcatagagtgatttcaccactcttttgttgcgttcctctaattggttattattattattagttgataataataatattgcttgtgagttcgccagtttctcttaaacttaatagctagctctatagctagctcttcgatctatatatatgtatataatatatataaggttattaaatattaaaaacccaagatagagaatgatctcagaaggttaatcacttggttgttgctgttgttgttgggatttgacagttgggattttgggaatgtctcggctgacttttatagcttcccaggatctattatggccactattttaatatatatatttagcactctgaattactagctatattgtttagtctattattgattctgttatatattaaaatattataagtatggggaatttgagatgatatttatatatattactatattatttaattactctattatttctgttatatattaaaatagtattgggatgatattgtttataggagacacaatattactagtttttaataataatgccgaccactttaaaaataatgttggatgtgtgcttactatgctgtgtgcgtacgtacgtagtaattagaattgatccttaaaatttaattttaaaaactgatgaaaatactagagaactgcacatcctcatgtaaaatttgtaacaaatgtatgacaaatatgtatattgtatgtatatatgtttgaaatcaatccaccaccaattgatgtcctggggacaaaattatatcttcttgtgaagatagtgaaagattatggattgagtaaattattaatccataaatattggtgtgttttgtttaatattgttgtatttttgtgcctaatctaaattatctatgtcatatttttttatgaatcaagaaagtttgtattgctcaaatttaatttttacaagcaaatagcacacataagggcctagaaaacagtatgatctatacagttttgtacaatgcttaagtctcttacatacaaatcatatgtagacagttacaagctttgaaaccacctgatatatcctctgcactaacttttttaggccaacatatgctaattctttgtatcacattctgctttaaactattgattaacacatccgggtcagttcttgtattctcctaaaagttggtattttgagctctccataatgtataaactaggcaagagagagcagctgcaaacacatgctttctaaatttgctaagttttggtctgccaatccacctggtgagattgggcaaattggtagctgttgcatgccattgtaaccaatttttagtaacctagagacaagctgttgcaacagggcattcgaagaagaggtgtgaagctgtttctttatgcaggtagcatagtacacaatggtcatcaactactatccctattttcagtaatctgtctctagtcgtgagcctctgctgaattgccaaccaggtgacaaagttgtgttttggagtgttcaacctcccccaaacctattggcaccggtgcaccttggcttgatttggacatagcagggtgtaactcttggatacatagtaatcctgcataaaaagttgatttcctgctgtcaattccttctatgtcacttttatatattattattttgctttaatgtgtaggtacattgactatggatgaccccaatgactataatgatgattttgccttttggaaacaatctattgttggggaacatgaatctgatccagttgcactagaaccggaacttgaacttgattcacaaccaaggaagaaaaaatatagggggaatataagggtttgaagcatataaagaataaaaatgaaggaatactcctcgaagtcgagtacaaccaatgtggcaagtgaattggggacactgcaaatgatctggctagagagattgacttgtatgcaagacgaaatcttccactggcatacaatgattggagaaaagttccaaaagaatttaaaaatccattatgggagtacatcaaggtaacgctaatagccaaaattaatttagcatatgaagttgaatatttaatgtcattctaactattattgctaattcttgcagtcaatgttcaagttaggcccaaaagataagcattctaccttaaaaattgctggacaaagatggaaagactggaaatcgttcctaacaaagaacctaattttcaaatacaaagataaagttccaacaatgctcaatcgtcctctagatgcttatgccacatgttacacgcttgaagactggaaagcatttgctgccaaaagatgtagtcctggatgggcaaaaaagagaaagaaaatacaagatatcaagagcaaaaatacatacaaccaccatgcagggcgaggtgtgttaagaaagttgaagaaaagttggagaaagagttgggccaccagctcactatatatgacagggcagacttgtggattagaatacacacgaacaaaaacggcgagctc

SEQ ID NO: 162114 - DNA, 6179 bp, Cannabis sativa
aaaaaaaaaaaaaactattcctcaattatcctcataaattttggctactattagtatttttagtaattgagaaattgcccgcacttatgtgtgatatccccacactgaagaaaatcaactattcaaaatttcaacaattcaaattcagtacttgacaatactatagtaactatactacagaaaagattcaaaaataagaatactgaaaagaaagagtcattattgtcattattctactgcgttaccaagagatcctaaacttaatgtattactttcaagttttagaaaaacatgttccaaatagactggtaattaggttaattattgaaatacattttgataaataaaatcctcataaaacttttccacccatttatttcacctaattttcgaagtatggtagatttataatctatatataggataggctaacatgataacaaattggtgttgatattggatattatttttactattataaaagaacaaataaatactatgtaataatatatattacagtacgtagtggaatattacaagttacaacggaggtgtagtgtagcccatgaaacctatacaaacaagctatgttgtacaaaacaaaactaaaaataaagagcataaactaaactcgtacccaagtcaagtaaacagcctagaatagccaatgcttctttcttggagctctggttggaacatctgttaattgatagaatcagaaccaaagcttatttctcttgaaagttaacagcatggagaccaaatgaataaaaagaaagcatatgaaaatgcaagtaatcctagttgagctaaatatatgtataagcattacctccagttgcatatagggaattgtagtgtacttcgctccaaaaactcagccaaacttctgaaaagacgcaaaactagaaatccataatccaatccaaacatgaacaagaaaaccccattttcattttgagcatttcgatatgtgggaaatggctgatgaaacactgaggtttcatgtaccaaaccagtaagtgatgtactatgttgatggattttcttgataatgccattacagattcacagcctatgcatttataagaaaaacccaacaactgaattttggcatcaccagctctgactgggtttaaagagtatggtgcaacatatcactgtagctataaatcagttaaatatatgaacttggtccaaaagagaaaatatattttacagttgcgttaactgaagagttagttatattgggttaaataacaatttttgtgaggctagatggcagagcttattcaaaccacacatacctcgggtaggattcttgtctttgggaaggatctcaatgtagcaagtgtctcgaaatgaggtgattaaacatatttttgtttcaaactgcagaaaatgatatagaagcttagaaagaaattaatttccaaagtattgaaaacacaataaagcaaacaaacaagaaaatacatagaataacatttagaagttacttaaattataacaagatataagcacatatcaaattatagaaacagaccacaggtaaaagaatacaacatattagaattgttgatttccttgacaaatatctagttgctaggattcttcgtcagagttcaaaagaaccaaagaagtaaactaactttccttttgttttttaaagtatacaataagaaactaaacattttcccgagtgatgttagagagaagataggtgtgggtgtgaacttactcggtcagctgctgcctgtaatgtaaggtgatctccccactcgccagctctagtagtgaaccataattaggacaatatcgaatttagaaacatgaagaaaattttcttgaattacttagaaataaataaatcaacagaacaagacagatgttttactttttcattttcctcaggtagcttctgtacttcattggaacataaccttcatataattttcgatggtgcttaagctgaaaagaaaaaagtttaaggcaaacagcaactcatacagtgagaagaatataaaattagaattattccgaatctctttggagatatataaaaaaaaaaatacatgcacaaattgcatatccactctacggtaatgaccagtatatattacatcaaaatagatcggctgcagtcacagacgttcattatctaaacaatactactcaaccaaactaacaacattgtttctacaaaaagaaacaggatgtaaattgaaactagaatagcattgggaaaaataaaacaggtatgacgaagcccaaaaaaataaaataaataatgaagttgttggctgttataaaataagaatgcactcaaaataacttctattccagcaattcattatcatccctggcatcaatactcataatgtggtcataagcatcccaagaaattcgtcagtgacatacctgctttacaacttgctttctaacatgcttatggtaatctggactacgaaacagttgatctgctaatgctcgaaactgcaacaagtcaaacaaataatttaaaactaaaccagcagaaaatgaaagagaaattgcaattggcctatcccatgggtaaaagtaaacaaaggcatgttttttttttttgctagacataaacaaaggcatgcagttaatgtatctgggaaacaagaaagtataaactacaaagtgttattcctaagccaaacctggcaattcccatcaccctccatttgcagttcagctaaatcgtaggtggccaatctgcaagaaaggactactattattacttgaaaaaaaaatagaaatgaattattcttgggtttggtagaagttccaaatttgaatacattcacactggcttagggggattctcctctcaaactaattataagtgacataattttgctcatatctaaagtggattgtaatatttttttaaccaagtcagtgaatcttctagcattggcccccctcagaacatcaaatacaaatgcatgaacaaacaaaacatcgtggatatctcagtttttattttattttaataaaaatatttagtcagagttacatgtttcctccttcaaaagaatcctatgagcaacttggtcagataagtcccaataaaagatagtcactgctttgtaaatgatcgcattacatagacaacactcagcatggaaagcttcatgtaaaatgtgcaaatagatcaaataatataactgtcaaatgatagtaacctttctgatagccgctcatggtctaaggaagcatcattaacatcaggtatgtccccatttatccgaggagtatgctgcaagcacagtgatggatgagaacttaggtagctaatctacacaacttactcaatagtagaagaaatatagaaacgatttccccaagcatcttagatattgttaaatacagtagccagccaacagccaagtaagtaggaaattcatcctaatcgtcattgtaataaagtatgatcaacagacaagaaattataggatatactagataattcagattttaacaaacatatgtttggcatgtcactcggatttaagtgtggtgactttatcacggacaagagcataggcatgataattgtaaatgtcaaatcatccactttggtatcttattgaataaaatatggtgatattgttcctccattgatcaagaattttgatttttgaaaagtatcatgatcatccaataaatagaaccaggtaaaactgaatcctggttggtctaacaaatgcctggagatgtaacatcttaataacaaatattacgtcaaattttataatgcagatgccatttgaaggggtcaactgtcgaaagccatatactatgagggacaatatttctcatagagcatgctttgatagtggatacaaacactagtagcattttaacagcagtttgtaccacaatataacacatacatttatgtaatatcagcagattggcataaacataccaatcgaattcatccctggctgtttaaattgtgttctctaagttaccaaaaatagttccctaatggtttaactaggtgaaatgaagaaagagttaagttataactcttaattcttaaagcctctgattcttaacaaaactctctcccatgcagaattctcagttctgttcttgccaaacctttttcattatctttcatagaactcaagataacatatatggagcattttccaacaaactagatttaattgacttgttcaatatctttcacaataatcaatattgaattttaaaaattattgtcaatctttagacattccaaagaattggcctacatagatatcacaatttaacagtgatttatagttctcatcatgtttccctagtagtaaaactttattaatatttaattttatacaacaaaaatcatgcacatatcatatactgacttcattcaaataagtaaaacaaaattacggatataggaagggacatactggaatagaatctaaatgagaaagcctcttcccgagcctccgattatttttgagttgttcctcctccgctaagatacttgcaatggtttgatcatcctctgtatcgtgggaactgctatttaaactcgaggtggagctagcacttacattgctatagctttcactcatgctaactgatcaaagttatttgggtaaactacaaatataatctataaattctctttaaatccctgcaaaacaagttaaattgctatcacaaaacaaaatagccagcataacccaaaaatcacatcaataaaatcggaacaaacccatctaaaaagtggacgctaagcaggttttgatgaataaactaccatacccattatatttggaacaaattaaaaatacccatacgataaaatccatcaaaacattcagaaagaacgctgaattctagcacttgttcttttttttcttcttctagtaattctgtttggttcctaaactagcacatgtccctgaattcctaacagatttgatttacaaatttccttcccattttctcaccagccaaacagaaacatttagaataaaaacagaattgcatgataaagaagatatagaagaataatatacctcaacgtcaggaccaagcgctaaatcgatgagagagaaacagtgaaagagcgatatctgtgaggttgatcaaattatgaatatgaatatgggtttggtttgtttgttgtttaagaatgaaggaagggtagttgttttgctaaatattttgagacaaatgaatgaatgaatgaataaacaaaatgagggaagggataattctcattctcaacagccgtttaattaaatctttattaatttaagagatgcaatttaattaataataaaaccactaaaaacaaaaaagtaattactttgaaatttggaagtttacctactcagatcttatctcaactgtaagcaagcttaaaaatcagcagtcagcagctttacataaatatctcttcttttgttttgtttttgtcttatatatataacccaaattcataaaccttaataatcttagaattattttgaaaaatttagttatatcaaatataatatttatttaattataaaagatttttagaaaaaaattgaatgttgtgatgtgttttttacagggttaaattaaatgagtttgaaacggaataaaattatgttttttaatttatttatttgctcaaatttgtaaacagtaagtaatttaaaaaattttactgttaaaatttaaatttaaaagattaaatataaataaaataatagttgagaaaatttaatctaaaaaaactcataaattaaatggtggtggtggactggatatgggatgggacaagaaagtgggcttgaagcttccaggagaggaaaatctagagacagattaattattgttgtcttacacgaaaccaaaatattggaattttgaagaaacctcaacattttttttttatttgtttaaaataataaaaataatttaaatttagataaacttcattttggtcctcttctttcgtggtgcatttcacttgtaaaaaaatatttatatatatgtaattattattagtaggaaaaaaacacgtgtgttgtatttttatttgttatctaacgtaatttgtttatttatttttttgataaatttatttatttatttatttcttttttgaaagagtttttttttttttt

SEQ ID NO: 162115 - DNA, 2012 bp, Cannabis sativa
agccacttacgatgcctccgcctcagccaatggaaggcctccacgatgtgggtcctccaccatttctgaccaagacatatgacatggtggatgacccatcgaccaatcggatagtgtcttggagcaaagatggtaccagctttgtcgtttgggatcctcatgccttcgctctgaatctccttcccagatactttaagcacaataatttctcaagttttgttagacagctcaatacttatgtaagttgttttcttttcttttctcactaaaatttttgtttttgaaacataccccagatcgtacaatacaaacttttaaagcagaaaagtcattaactaagaactttgctttgttttggaaattgcatataacaagttctatttattaccggattcttctctttctaccctaagtttcgtcgaaattttaatttttagtgatacccagatcggaaaaaatttgatatttccaacattaaaagaaatgagaaagaaaaaatatcaattttttttttgatattattactcaattcatctctttctgcgttttgaagttggatctaaatatcaaattttcagagatacccagatcgatacactttaagtgatcatcatgcagaaataaccatgttgttattttcttctattcgttcgttgaaatttgattaaagaacagtttctttaaggcatttgattgttttcttctttaattaaaaatggaaacttaaatttgctccactcaaaaaggaaaagtcaaaacctagggttgttttcgtatgggttctgaaatttgctccactctaggtgcgtgaaaatgaattgatagcattaattggttgattgtagaatattcatggagaggactgttttttgctttgtctttttctttccattattttctgggctcactccaatttgccagtatttttgtcttttccctcttccgtgtttacagttgcagtgaattgttttttctggtaaccttggttctgtaattttatgcgaaattaaaggaaatttaatgtttgatagaatctcacccatcaattatacaatcaccgtaaatgtctctatcagttactttatgaaaaacagagattttctattaagtttatggtttgggtaaaaaaaaaaaaacttgatacaaattgtaaaacaaaatttatttcttcttttctttctttcaggggtttagaaaaatcgatgcagatagatgggaatttgcgaatgaagggtttatcagagaccaaaaacatcttttgaagagcatcaggaggagaagagcctcttctcagccttttcctcatgaacaacaggcattaggtccatgcgttgaagtgggccgttttgggctcgatgctgaaattgaccgtttgaggcgagacaagcaagttttgatgatggagttggtcaagctgagacaacaacagcagaacactagagcttatcttcaagctatggagcaaaggttacaaggtacagaaatgaagcagcagcaaatgatggctttcttagctagagcaatgaaaaacccagcttttcttcagcagttacttcaacagaaagagaggagaaaagtcattgaggaagccatgactaagaaaagaagaaggcctattgatcaagggcctagcagtaggtccagtgggattgaaacaagtcatggctcaatcaaagttgagcctcttgagagtagtgattatggttttgaagtttcagagctggaagctttggcatttgagatgcaaggttttgggaaactgcgaatggagcaggaggaaggagatgaagaacttgagccaccagagagtggggacagagaacttgatgatgggttttgggaagagttgtttagtgaggatgctaaaggggttgaagatgaagatgttaatgtgttaactgatcattttggttgcttgggttcaagtcctaggtacaaaagctagtggggtttagatcccttccaaaaaaaaaaaaaaaactttaccactgttttttaaaaaaaaaaaaaaa

SEQ ID NO: 162116 - DNA, 1731 bp, Cannabis sativa
aacaagagatttttttatccataagcacttgactaaaataattcatatatgcttgataattctacagattttttttttcataaatttgagtctcttactttatgttaaaaaagtagaaaaaaaaaaatagaaaataataaataataaattcttatatttagcatggaaagacaaattgtatagaaatatttgattcaataaaatttttcatatgaaaattgatttttttttcatatattttcctcactaaaatttaatttttaaatatagccttagattttgttaagttgtagaaaatgaaatgaaatagaaaaattaattttatttcttaacggtaaattttattcttttgtttgattatattttaaaatattaaattatattttattattctactagaatgtttgtttcatctataagtagagagtgttattttaatataagtattattttttgaataattagcgacgaaaaattatacattaaacaaacataattactcatttctatatattttcttagaagattattaaaagaaaaaacaggaaaatttaaaattaacacgaaaaaataaaataaaattaaaggatgtaaactaaacaaccaaataaataaaagtaaacaaaactaaaattatttaataacagagacttaattttgttaacaaataaaatttgaaaactaatttatcagaaaataaatttagtgaaatgtattagatgaggggaaaagataaaataatagggttagtatcattttttattaatttattttatgtttgtttttttttttggaaaaaggaatttattttacgttttattatttaaattgtacctagctatttttattatattacaaaattagatttcaattgatttgtaaattttatgttgtgtactaataaaaaattaacacgtgtgtgctagctatgcggtttacattgagttaatagtagaggtgaactcatatagaagtaaataaaaattatataaacaaataataatataagttttggtaataccttaattaacataagatataataataatatagttattttacacctatagttaaatttttttattcaacctctactaataaaattgcatttaatactttaattattgaacaatctttgtagtgttaatttttttacttgaaactatatttaatattataaaaatataagtttgtatcaatttctaacatgttatgtaaaaaaaggtacatcccctcacttacaaaaaaaaatatgtccctttcaatttaaattttgcgtctaccactagttaatggtatgagactaaagtatgtccaatgaagtgctaaaataatggtgtagtgctatatttttgtactttcaaaaaattagctctctaatagtgtgttaaatcttgtgataaatttgacgcttactaaaagttatactaatataacataagatataatactatgtcaaatttagtacataataaatacagatttttaattaaagttttatcattaatgataaattttaatacaaaaaatttattacaatattatcattaaatttaaaccatggcatttgttaattttttgtactaattttagcacaatattcaaactttacatttgagatggtctaacagtgtaacaaaatattgacataaggatctcctgccaaacatacaaaaaaaaaatatctttatatattaaaagtgtctatctaacggcatttcttggtttaac

SEQ ID NO: 162117 - DNA, 7651 bp, Cannabis sativa
  modified_base (3613)..(3619): a, c, t, g, unknown or other
ttggggggggggggggtactggttggctccttaattgtgaggtttctgggtcagatgttggtggtatcaatatcaggggaggaatgggtatgaggcatagcaatgcccttacccttgtcaatatgagttatcacggaagtgaccataatggaggttggaatatttgtttggcaaggtttgggtggttcagtttgcaggtggggaatatcagatgaaggtgtggggttgttgctgcataaaataggggcagagaaatcgagttccaagttcaaaaattgatcaactgccagttaaaggccctaatcagagttgttggcacgatagatgtattcttcaatgggggtggagtttgaaagttcaacaggattattcttcaaagtgcttctggcaggagcacgaaggtgatccttgtatcccaactcaagggaaactaggaagttatcacacctcagaaggtattttccacacttattataagtgtggtccaagagcccacataaatagcagaagttttgaagcccttcgaatttaaaactaatccatttggttcttgccagagtacggaatcgtatattcatacccctccttaatgattttgtaacatccataaggactctaaggcgcaaatacagaccaaaactttcaaggagggaaagagggtggatttcgatcaaatcacccaatttatcagtaatgagctgagccaactggagacttttacgcccaaaagggatattattatgaggttgcacccagaaggggacaaaacaaaaattatcaggagtgatggtatcgagatcttcaggattcgcgaagatcgtatgaaatttgtcaaaatgccatggcttatcctcaagaacctgacgacggtccccttcacactagaaagtggtgaggaacaaaccagagagataatcggagatttccactggaaatcgaagggtccaagccttgcgcataactttttccatctaagcaggctttagagatttgggtgttaaaacctttaagactagacaatgagagctagcattgtcagcagtgttgacagaaatgtggtcgaactcatggattaggttttcttcgtcagtaagagaaaggggggattggtgggtttgagaagaggaagccatttcagaagaaaagaactgatgagaaacggggttggaaagtgagaggaccttgggaaggatttggcatcttaaataaagggcagaaaaatacagaagatagaaggtagaaggtatacttggagatgaagagccttcttggaggttgagaagatagcatcatcatcctttctctgagctagcatgtaggggtctggaaaagaaatgattaagctatggtatctgaagtggtggtcatggtggttaaatttctatgaagaacatggaggaaggatctcagatcaaacaaactctgggtttttaataaatgtgatattacatgcgccgtcaatattaaatgcaattagaaaagagacagtgtattaaatagcacctgagtatatggagaattcgggtggtaatcatttagttttgggatgacatcagagtaataaatgagaaatggttgggataataaatggaaaagacggttgaagttggaaggtagaagatcgaagaggaagatggaaggcatacacctagaatgacgtagaagcaatttggaggaaagttcaggaagaagactcgtgttcatttttctctagctttcttgtaatcttgatataatacttttatttatattttgagtattttgattgtaatttttctattctcttttgtaatgagaattttaccagcaataattataataaaaatataattattaagtagtcacccacatatttatatatttatatcatgttggacttgattttgcgtgtaaaaactgtagtctgtattgatgacactaattgtaagtcaccactacccactacccagcctatgtaattccaagttttcaaaagccatgcattcagcatttagaatttttactgttatatattgcggtgggacatagtactatagccttattttagtttatacatttttttattcaaaattattaaaggctcaaattaagggaatatattccacgatatttaatttcacgttagcgatggtggggactggggacatatgccatcaccaatatttgtaatcttgctatttgcttgtgtcactacaactttgagagtgacgcaagcattaatattcataattaagtgattagtatatacttaattaaggccacactagataatgggttgatccctttcggatttgtgtatgtatacattatcatttgtcttttccgggcccttatgtctcaatcttctcatgatgatctaggcaactacaatgtgattgtgaagcacgatctagctaccatacaagagattgtgtgttgcttcaaggaaaaaaaattatggtaaaacaaagggcacacctttcaagaatatttttttttgtcaacaaaagaaaatcatgataacttaacaagtattacttgagtaaaacaaagctggtattaggccaattatatgtacgaataagtaacgactaattagaacgttagctcatgtggtcataggtagggtgtgtgttggaagtcttgagttcgagtctcaattaaaatatgattgtaatatataaacgtttaaataataataaaaaaaaagtaacgactaattagagttcgatatttatattattttagctttaattattataaaaaaaatattttgttcctacttaaaataaaaattataattattctgaataaatttatttgactttataacaaaatatttgtgagatttttttttattattttcacgtataattaatcaatctacatatctaaatatatttatggggctatcacaataggtattgagtattttacttattattagagataataattattatacccgaaattcagccacacttcaaagagtgacaagtatcaattagtggaatatgaaccacttagtataataacgttatatcatgtgcacaaaaaaaaaaaaaaactcattaaatatagaattaaaagagtatattcataacttgctgactgcatgatcttaaatgagacaagaatacaaaactattgatacctgtattgacgagacaccaaccagcctcgaaatatacaaattcaaatagaagatttatttattttgaaggaataagtgatgaaataactcaaagcaacttcagactacatatagcgaggtattcacctcgctattcataaaaaatattgacgaggtgaatcatttgttaaacacttaatgtatttttcacattacaataactaagtgtaacaacttagaaatatacaaagacacgattgtccagcctgcgaagccttatgatcaaagaacagttcttaagtttgctcagtacactggtaattatgccattgctggagttaagcgagctactattgtctaaatcagcatttactatctttgaggataaaaataataagcagttatgcggttatcaattattatccacacgtgatttaaatgaaacgtgatcaattcccacatttcatgaaacaattatgtattttgaatttaaatgtaaannnnnnncaacctatattcctataaatagaggcagatctcacagaaaaatgataagaagaatctttgagaaaaagattatcaattgtatattgtattaaaatacttagaaatatcttgaataagatagactcgtagagtatgcagatttaactgtaaaaccacgtaaaatatctggtgttattattaatacttattatactttattaatttcttataatttttctgttaaatttattacgaaaaatgtttattattggttaacaaaaatttgcgttaacagtttggtactttcattgagagcctacgtgataaaaactcagaaaaatccctccttacaaataaaatctatccatggctgatcataatcaaaacgatgatagtcgtcctaaggaaactacacatcgtcctgggaaagagccaatgggttctcagagaccacccacttctagaacaacacgttcaagaagaaaccatagtggtaataatcaaaacccagaaggaaggaatgaagaaaccaataatactacggggtatgtacccagaagtgaggatgcttataatcccactaggtatgtaccattagtggaattagaaaatcgacaactccagcaatgcttagccgactttaaccaaagaaatactgagttagaaagagaggctgcagcggccagggcgactcaaggaaataataccctgaatcaatttggtcctggagtaagaaggccacgaggtacacctcggggttcaaggaccatgaggcaagaagcaaatcaaggaaatccccaaaacacccaggaggagcaaccttggagaactagggatgttccagtagatgaacaacatcgtagagaagtacctcggagaccccaaggatttacgaatcaggggaatgaacataatgacatgccaaaggcttctcgtagaaatgagaatataaggcaaccccaaactagggaacaggaaatcccttgtaataacgagagaaattctgggactcaacctagaacaagtgggttaccaccgagacacccccagcgtccttctcgatctgagagggaggaggcacatatgcatacctaaacagagggcgtgtatctaaccttttcagaaggagaaggcctatgcaagatgaggcaagttctagctcgggacactcgaggtctcggggacaaactcgattaggaaggaaaacatgaggagtaagaagacctcagcgttatgctgatcaagaaagtatgagcaatacgaggagttatcaatctgagagttactcatatatgagatctaatagtaattatgaacgaagacaacctgatcttcatgagcatttgaatcgaagacaacctgatctttgcaagaaattaaatcagaatgcacccgacttacaccatcaacttaatgcaaatcaacaacaagtggatcccgtccagttgcgaatcattgagttggaggataagtttagaaaataccaggatggggaatacaggcaattacctggctatgactcaaatgaggaggttgaagctttccatcctgatacttattccttttagtggctgagggtctctctgctgcgatgtataaaagagctcagcaatgattattctggtatttgaatttgcagaggagcccatactatttcctatcttctttttgctaatgatagtattcttttcaccccttttaacaagtgatctagcatggctattattgataccctccacacttatcataaggctactagtcaacttgttgacctagccaaatcttctgtcatgttctccccaaacactcaaaatgaggctcaaaatcacttttgaacatctttggggctaaacattgaggggttcataatcaaatatctgggggttccccactgtgtgggaagaatgcataattcagtctttcactacctcatccaaaatgtttcttctaagatgaatgtttgaaatggttaattcttctgtgaggctagcaaggaaactctcattaaagttgtgatttaagttgtcccatcttacgccatgtcctgttttaagcttcccaaagtaacttatcattccctccaacgaatgatatccaaattctggtgggggtctgcctcaaatgacaaaaaaattcattggaagaagtggtctaccctttttgttttcaaattctttggtggtctgggattctttggtggaggatttggaccaatccctattcccttcttcattccatccttagagctagatattttaaaaataatgatttctttactgctcccaagggacataactcttctattacctggagaagtatcctatggggaagagatttactgaaaaagggtcttatctagaaagtgggcaaaggtagctccatccctctactagctcttaactggtttccttccctgcactcacttacattcttacatggctttaacacctttggtcacactgtttcttttttcataaaccctgataacacttgaaataagaataaacttttgcattatttgcctgattaccaagccagtgccatcctccagacccccattgacccctctctggaagatagccttatttggggacatcaccattctgatatcctaactgttaattcagcctatcatcttcctaacattgttagtagcattacttcaccctcaacctcaaacactgacagcttaaagcattagtggaagtctgtttggaaccttcaaatccccccaaaaattaaacacttcacctggaaagcctttcacaacatcctcccctgtggccttaatcttttccataaaaaatccctcaataatccctcctgtcatttttgtaagagcaaggttgaaactgtctcccatgctctactagaatgtcccaaggctaagactgtttgtaagcactcctaactcaaaatgttttatgccaataatcaaaattgcgacatcaatgttttttaccttcagggcttagatcaccttaacaaaagtttcaccttgcttatcagtattctctggaagatttggaataaaaggaacaatgctccttttagtgatcattatactaataaaattgatgtggaggattttgttattagcttattgcaggattagaaggaagatcaataattaaatgcagatcccagaacgcaggacacaagaaattagcatggatcccccaaaaacactgccctcacccctgcccttaattacccctgccagttttagcttaagcatggatgctgccttggattgtaaagcttttaaaataggtatgggagaaactattaaaaaatggcacaaccaaatgattgcaggctttttgatcctaaaaataggtgctttaacacccctctttgccaaagctcaagcccttctagagggccagaatcggtgtgctacaatcaatcttcaaccaagtctcattgtctcttattgttctcaattggtaaccaaagttagaagtgaatgggaagataactctactctttctagtctaatggagttgatttgtgagtacctatcatatttccccaatgcctccctgtagcatacccccataactgataacagagaagctcaccaaaatgctcaggaagcacttttgcgtgataaggacttcatctagggagtttgatttctctcttttttctttgtagctgcaaccaatattttaattctcttctttcgtcttattgtagtacattaaaaaaaaatcattccaaaggaatgaataataaactcattcagcgtcaataaccatagtgagtaataaatcaattagatcaatcaaagaaacagaattgatcaacataatgaaaaaccaaaattgatccaaataaaaaaaataataacgacattaaaaattcatatctataatcttgaatatttatttgggtatgaaaaactgagtttgtgcaaatgccaataattaatacagagatatattttatataaaaatgtatacgcctgcagcagcagaaagtaattctgatactgcagaaacgaattttacagagacaaaacagaactggcagaatataaaaataatt

SEQ ID NO: 162118 - DNA, 7557 bp, Cannabis sativa
  modified_base (99)..(100): a, c, t, g, unknown or other
  modified_base (310)..(312): a, c, t, g, unknown or other
tttgtcactgtttctgttaattcggtctattatattcattatatcaattgaaatttattattaataattattattaataataaatttattaatcacttnnttttaaaaataaataaatgaataaaggatattaattcttatcttatgaggagtccaatagcacattatttttatttgaagtgtattattatttcatttttatatattaaagtaattttttttattattttttacgaaaattcatatagcaactcatatagcaattaatggagcaatctacatcacataataataataatataataataannntaataataataataatatatcttttttataaaaaaaataacatatacatatttattatagccacataattattagtttgaagatggatatttcaaatgtaataaatgaaagactatcatttctttttaaagaatgacctcaactcatcttgctgatatatgattatcactacaagaaatgtcacttttaccagtgcatttcgcaaactgcgctggtaaagagattaaagttttaccagcgtacatttacagtggctaaaatctaacttttaccagcacatttatgcgctgggaaaagtcttttttgccagagcttttcattttatgctggcaaaagttttaataccaacattgatttgccaacccccttttgccaacacatcataggtaaattctattttaccggcgcaataccaacttttgccagcaccaaaatgtactggcaaaagtgacatttcttgtagtgtatagtaaatatattatagtaagaacattactattagggactttatgatacattagccgcttaaaaccgtcaccacatatggactcttttggaaaggttaaaggatgttgcacctttgtcaccatggttgttgattagagattttttagagcgataccatccccatggagtgaagtgatgatatttctagaacgataccatttccatggagcgaagtgatggtgtacgggcgcttggattgggaggagactgcagactcagatcacataatcctagtcgacgacttgggagagtagttttcttgggtagttcatggcttgaaaaaattagcgttttgaatggtttaatttatattttaggggtttaatgtgtattttataaaactaacgttagagttaaagtgcacttaaatttaatagaataaaaagagaatatactgttaaaccaagaattgctattagatagccacttttaatatataaagatatatatcaaattttctaataaaattaaaaaataaacaatagatatatataaaaaaaaaaaaaaaaaaagcattaattaattatgttgttttaggtttaaatatttaagtttttttaatagtaaatagaaaaaaaaaattgaaaaaataaataaatagattttaagagatttataaactaaataaaaaattaaaaaatgagagaattaaggagagagcaaatatgactatttagagggattttagagttttatgtcaccgcctcatacttctcatttatatatatatatatagataaattgatatattgatacactacgctacaataaaaataatacttttttaacaaaataaaattcaataaaataataatttattttacaagtactttgtatttgatttattcatcagactaatcagaaagttattaaagtcctctaagaaaatagtgttataaggcacaagtaatatttagtatcatttaaaggtaacgtcttgcgataattaacaatattttataaaaaatattatattaaattatatgagatgtaatatttaattataccaataataatattacatgttctagaatattaggacttttagcttttcttaagagaatactagtttttacgaagataaaaagtagttgaaatgataagtaacacaattaaaaaaccatacatttttagccaatattacaaatgaagtattggtcttgttctaaccaaaacaagacaatatcatattaatttctttaatgagtactaacaatttttctacttcatattttaacaagtaattggcaggaaagtttttgtttttttgttctcaacctcatattcgattcacaaatcccaagtttctgacaatactaagtactaacattttagataagatccaaaacattttagataagatccaactgataagctattctccttaaattatttatataaaaattgtaaaagttttataaaagttctccttttttttttttgcaatgtaaataagtaatgaaaagttaaaatataaactcatttaacgaaaaatgtactttaatgatgtactaaaaaataatgtaaatttagcgcatagtaaaatttatgttaattttagcacaacatttgctatgatataaaatttacatcacaataaatactattttttatttacatttatatcatttgtattattttattagtataattaactataacattaaattataattttttttttattattatcttacatattataataaggctaattaagatttttatcccctacactttaacatgtaccaaatcatgccatttgttatatttaaagacttttgtttaatttcattcaattaaactatttcagtgattgtttatctactaaattatgatcccagactttaatatctaccaaatcatgcccctcgagcgacatatactaaatcatgccccttgaactttcattcatattaaacttttttttactaaaattagaaaaaagttcaaaaatctaacaatctcaatcacgtggcataatttgttacatgtcaaaattcggaagtaaaaatcctaattagtcttaaaataataataaaattgataataaaaagttattagttttattttttttaataaaaacattaattagatattaaattttacaccaaagttttacaattatacattgaaacacaatactaaaatttgatataagtctactacaaatctattttttataccaaatataacacaatttttacagcgaaattcatattttgaaagacgagttggtgcacatttacagagttagtgttgctcctatattggcagtattgaaataaatgttgaaagggttttgataattggatatgtggtaatttggtgtgtgattaaatgtataaaacaaaaaagaataaaataaatgttgttcaattgttacctaagttaatttagtagatacagattgtaaatactacatattttgcctttatgtctcatgttaaagtcattgtttttaatacacaaagaaaaaaaggaagaatatttacacatgctttgttttattctcatctcaacaaaacaaaacaacatactaactgctttgtctaatctcccaaatatttcttgatggaactctcctcatatttgtacctgtattaataaacaaaaatagaccaacataaataatgaaatgaaatgagtcaaaatgaaacaataataacaaaacttgctatgaaatacttcaatgaaaacataaatatgagcattcaacagaaccacaatcattatgagctatggaaacctaatccaaataagcttgtgaatgtttactaatgtaatgataaatttcttcatccatagaatgaatgttatatcatagaaaatgaaagaaaatatgaagctgatgatatacttccgtgaattgtgttgtactaatgaagaaacttcacaattatcctcccacatctatcctaactaaaaaatcgttaaagcaaagaagaaaattgaaaattacattaacacattattgagcaagcagcagctattactatgggcttgtttggagaatgtttttttgaaaagctctttcctaaaaagctacccgaagtagcttcatcccaatgagctttcttaattgaaaaactaaattatgaagacacctacccaatactgtggagttttttagcttttaaaagccgaaaactacttgtaaaagccgtagtatgtaattcctaacaatctatcctatcctatcctgtatctcagctaccatatgcgatatcagcaactacacaataatccatgttgcccttttataacacgggtctggcatgcttattaagggcatattaaattgataatctagaacaaattaatagactgtttgttgtgtattcaaagatagttaagaatgtccagcaatagcttaccagtgttccaaggggagtgtgtaatattttccggtacttggttccactgcaattaggctttgaagtcgagtcactgttaagctatccatatctagtttgttactgtcgagttcctattgatttgttatgcacagcaaggaaacactttaactttcaacaatcaacctcttctgcagtctcttctcttgattagaaaggtccttgtacaaattgcttagatgcttagctaacctgtattcatcacttcctgaatggacaaccttcaattcatctctacttccattgttccttttcctttcctgagataaaagtgagaggcttagtattgaagctcgaagagaatcattcactttcattgtttcggtcattacccatggcctcccacttaaagacacaataatatgatctggattactcagaaagttacataacttctcaaagtgactttgggtatccaacataatacagactcgagtacaaacatctgatgacaaactaggaaaaagaaacgcttgagatgcgaccgacaccttttcctttatgaactccatgatttcgatatgggtcaagtctttgtcaatgttatcaacaaaaatcaaatagtttttgactcctccaatgtcaatgtcttgcccactcttttcacaaggacgaccaatagcccatttggataacaaggtatcactcaaaatccactcggtgaactttgtttcctgctttaaatggtgagaaaaactaagattgtgtgaaattttcatcattgggggttccccatgattattgtgagtgacacctctggtgacttgatgattagatctgcaagaaccagttttgagtttcgccttcaccttacttaaaaaagaagctacaaccgaatctatttcgtccctatgatgaactctgcaaatttgttcaagtctttcagcagtaatgtatccagccaatggaccatgtagccaggatagaataaaagagcacaaacactcttcttctccatttgcaaaagaatgttcacaatgatccacctcttcaacaattgcgtcgtagaagcgaatgtcatcagtcttgaagtgatgtgaagcggacacaagcaaaccccgggcaaccaaggagcactcagagtcttgaagctgagaagatacgggtctaaacctagaagcgaagtctttaaaatgatcttggtccttgaactcagctgttcggaaaatgctgtccccatcatcagggaaattgcagtacttgattcttagaacgtcactgtaatccccttccaccagaacccgaacagtgtaccatgcatcatccgggtacgaccggaactccaaccgggcatcttcaacgtcagccattcttccattattgtcgagtttcttgtctggagtttcatttattgcgtccttcaactgtttttccccagtaaatccaatgcattatgatttgcaacaccaccataagtgtgaaaaaaaattccaaaaactttattattgaaaaagcatttacctctgtcagcttcctctttcttttatcaccacttctcattgaatctgaagtggatgccatcctccctattcaacaacaaattgaataaccaatttcaaccttatgactggtatgaatgtaaatttttttaagcaacattaactagtcaccaaattcttaaatatagattcgttgaaattagtatttatctacaatcgagcatacaaattcccctgcccccactacttagtgcttaacataaaattaccctcaatttttttagggcattaggcatttagttttacatcaaatttcatttaaattctcaaaaagggtataagtctaccaactcataatgatatatttatataagcatcctccatatgtggtgtttcccttactaaatattacccccatcccctccataaaacctagtaactagttatatcaacatacatttctttgacaacaaatcaagtaacgaagatcttcatgtagaatttccgttgttaattatatacataataatgaaacttataaaaattaccttcttccattagtagagcactttcttacaatccaccacgatccaaaattcttagccagccaaaaaaaaaaaaaaccagaacacaaatgagatgattaaataaagcaaagcgagagaagagtagtagttaataatgagaaaaccgaaacagaagacaaatatttttatatgaatttgagaaagagccctccctttgagagagattaaaacaagaaagacaaagaaagaagtggaaccaaccctaaatagagattggtatttttgaattagctgcggagcgaggcaggtgtgagcttttcgaacatcattcttgcttgttttgtttgagttttgttggattaggatattttttggtatcttgcttatgtgaggaaaggattctttgttgcttttgtttgttacgctatgtattgcctcctatttctcaatatatttatttgtgcgttgtgtaagattagtatttggagaccacctatgtttgtttacttatgctctttgttgtacatcgatcggtttggtcggattataatgtatttttattaactcaatatgaatatcggattgcaaatatttaattgtaacccgtccaataaaaaaataaaaaaaatacaacttgtccaatgattttgatcggattaacccgtttaaattgatttttattattttttttcattattattagtttttagtgttcaaataattgatttggaaaaataaatgtataatatacaccttttaagattaaaatagttatagtttaaattaatgttaaaaaataaatataaattgaataaacattgaagtatttaacaatatttttcaaaaaatagaattaaaaaaatagattcatatgtaaattctaagtttcaacttcaatattcatacaccatcaaaattatcaactataaattttaaatttcaaattaagtattataaaatacaaactttaaatgtaaaatggtttaattattagacgtaattcatatattatattatagataattttagtaaaaaaaatgtaaatcgatttattcggtttattcaggttatttgggtgggttagaataatattcaacctgcccaattttttcattgggcgatttgaattttttgtaaagttatttgagttgtgttttttatcggtttattcaatttgatttgagcagtttatttaggttggacggtttgtaaatttttttttaacaaccctatacttgtgacagtcagtagtcccgtgatccgtaaggagaaataccgggtaagctgtgcaatcccacaccgccaggggaaggtctagtggatgattctaagactatgtaggcatgagactacaca

SEQ ID NO: 162119 - DNA, 6674 bp, Cannabis sativa
  modified_base (5755)..(5755): a, c, t, g, unknown or other
tttttttttttttttgtaaaggggtagttttcctttggaagccatattttcgaaagaaaaaaactttgcaaaagtaaaattgtttaaaaccccatatgataatataaatgttataatttagcagtatttccctataagagaaacaatcccttcaatacgaattatacactaagacttaactacaggcacatatttgccaaccatgccaatctgataggcctcctagagtcttattcgttataataataatctcactatctatcactcacctgctgagctgaatgtaccctcgaccatttgaatcagctactgcaatatatttatatatatgtatacaatacgaattatacaatgaaatgaaaaagaacacaaaatatccctaaaaaaattacattttaaaaatggtaagataagcactcatgtatatcttctaccaaacttacacacatacaaaatggacacaaggatgctttccatccatccatccatattctaatgtcagctagaagtagccgtatcgttgaatggtaaagatcgctgaatttgaacatgaaccagatatatctgtagttaagccaacttaatccttcaattttccctgtaatgactatttttactatgacatgtacgctgcacaataataacacgagcgatgtgctaaatgtgatcgctcaactactatccagatctcctgacatcattctcaaaagaacaatcatcaccttctaatcaaagttagtcgggatgtctatgtccgtatctgaaggattaggaagctcgtccagaggctcctgcagatcccaaaacctcaacattaaggagctgttttatcattcaaattgctctacgcaatactgaatgcgggtcttgctgtgatgactccactttttcgagtatattgatcagcctatctatctattacttcaggaagagtgtaatcaaagagagaggaagagagaaaacacaaaccagcagcacttttttaataaatcgaagtcgaacttataagagtatttgctatgacagcttatacaacatacatttcttaaacctcactaccaacagcagatatatacctgatcatcatcgttgaccgaagaatgcatgattccaatgggcaaggtatttgcaaaatcttcagtggctccatgtaaatcctgtacacagcaaattaatatttatttaacaaaataaaacccaaaaaaaacactacaataattttctgctagctcaaatttaataattttctaagttacttaatactacagcagtaattcatactctatcgcagagcaccgcaaaatactatgtaagtgatgaatgactaggaaaccaattagagcgtgtgtattgctatcaaaataagataagataaaaatatatgagcttcactcaagaaatcaatgcttcatagggaaaaaaacaaacaccagcaaaaaccagattacataagataggtgaaggtaaaaggaaagttcaaacatacttcctcggcagggttgacagaacggtcattgtaaccttcagtaactatcttagaaggatcttcagcagaagttccctgcatgtgccataaatcacattagaaaaataacaccagcatttcaatgggaggtataaactagctgctatacatgctcatcctggttgcctgaaaattctccttccacaaccaaaggcttgacatcaagtagtgtttcctacaatatgaaatgaaatatataaaataaataatatttatttgaagatgaaatgtgtcacataagatttgcattggtcgaaaactaatacattagtaattactacaaccaaactgattcttgtcactttcttcaattctcaatccaagctgaacaaaataagaaacaaaattaattcactattattacctacatttgattcattgcttttaatagattgcaacttattcagcttctagacaaactcaaagataatatattaaaaagtcatttttatcttctaacccctaaatctttttattttttaaagcaaaacaccgctacccagtaatattaataataatacaagtaacagggtgtacaaagactaaaaaacccacactacaaagaaacctaaaaagtcaacaaaagttcctaattaaacacaaacaggaactatacaaaagcattacaagaaaacctgcctctaaatatctcagagaaaggcacatttctaaactcgttcacattaaacagccaaatagctacccagtatctcactttatctcaaataactactgcactatcttcttcgttcttccccttcaaaaaatcttatatttctttgcaacctctataatagctttttagtttcatttcctgacacaaattgaatatttaattcattgcatcttatatggcatgcaccactggttgttgaaggagttcaagaacctagaccgtatgtaatcattgtaaatgcacaatgtaagaaaatgtgggaagaatcttccccactatttttaagtaaaacacaccatccaaggtaaagtgtaacataaggccgttgaaagagcatcatgaacaattagtgatctaaacaccaggaaactataacaattgctatgtgggtatgcagaagggactcaaacctcagatcttgtgggcaaaccacatgtctgaccaagctacccctcttgagtttattcggttttttcaccaaaaaaaaaaaaagaaagaaagaaaaatctggatacaaaccttagactgacatgaaattcagcttttgtgagaagccacatcaacaatctccaatgaaaaacaacagctccaacttattgataacatatatgcaaaaaaataggaaaatattaatgtcatagttatacttacagattctacaagatcagtacaaaggtttctcccccccttactgagatctctcagtgttccctgtataatcaatgaactggtgaaaaaaatgaataatcatttaatgaagtgggctggaaaatatgatcttgtggaaatagcaagaagagtaagcgcatggttgtcagtcttaaaaatacacaaaccttatttgcccacattagaccacacgcattacataacgttctaggaccagctggtccacgacgcattgcaggtgtattatgctcactaacaccacagtgttgacatctccgcaaactgaaaagtattgcagcaaaataagggaaacccaaaatcaaagatttgacatcaagaaaaactcaataagatgataaatcaaatagaactctattgaactcagaactcacacagtttctggacgaatagtgccatcttgagggccagtttgtgacgagtcccagccagaagttccagaattttcttttaaagatgcaaattgcccattcttccggtgcatcctgggaggaccaataataaaataatgagatctcttataacagattaccaaggagtcagtgaataatttatttggattttggcattgcaacttctatatctagaacatttcaactaaatcataaccaacaaatcacgagaaatttcacttccattggatctaaagaagtttggagagagggagagggaggaagaagaaattatcaaagaatatcaatgtctagaaacagataaagcatcccaattatacaaatccaaatctgtacaattacaaacagaaaatcacgaaaaataaatgtacattgctatatcacatttactgcagcttactcagattacttctacagtatggactatgaaactaactactatttcatcaaaagttcgggttcagggaaataattgtgggtgaaaattaagtatctactcaaacctagaaggtgtatcctcaaaataataataataataatgacacttattttaaaatgtggaagttgaactaaacaacaagaccagagaaccaaaacctaataggtaagttcaggtatcgaaatgctattaagtaagataaatgctaaagggcacaaatggtggcagcaccaccatgcggtgttaatcttatatattttaatttaataattattataaaaactattaatcattttcaaggcgccacctcggtgttgggctcattaaagtaaagaaaaagaaaacactcatttccatatttgattcaaagtaaaaattggtactacattacctctgtgcaacctctttacgtacagtgtacctaattttcttctcaaaacatctctccttcctcttctcacggaaccgaacaagggaggctattcttcgcgaaagattcgagcgctttggagcgtcgacaacagctacaccctaaagaaaagaagaatgtggcacaaaacacatagatgtaggtacaaaaaaaataataatcattgttactttcaataatggtctgaataatcattcatagcatctgaattacccagttattttgattgtaaggcacttccactgtaggtataccagttggtacatcacgtcccccaagtagcaagagcacggcttgcacctattgtgaaaatatccccaaaaataaaatgagaaaggcaaagtatttcctccaattctggagtccactcctagaaaaattcttatacgtgctttatttttagcttgaaattaaatagtttcagtactcctaatctttagggaacgtgaaagtcataatcatctaccagtctagaggggagttgaccattgaagcaaaccatcgaaaccaaattactctatgaagagagacagagagaagtacaattgaatatacagagagaaagtgacatactttttcaggcgtaacagcaggaaaaacatacacctccccttcgaaagaaagagtgagctcactagtcctggaagccataaccacacctccatggctggccacaacgttgaccgaattcatatgggtctcttccaagtcgtccatggcatcatcgatatcattactacgaccatcttcatactcatcttcgtcatcgtcttcgtctacaggtataggaccccgcatgtggtcctcaaatggtcgggcttgcagaggttgtggattggcagccgccatgtagagaagaaaaaaaaaaccactgcagctgtccttgaaaccctaagaaagctctcttagaattaacagaaaccaaaaccctaataattagcaagtgtttccagcaacctgttccataggagggaaatcatgaagagagagagaaattgaccaagtgaagtgaaaagaagctagcatgaagaagaagaagaagaaggtggttggaacaatgattggattggatagggaggaaagacaaaactacccaaaattagcactcggatttggatttgcatttgcaaggcgaggcgtgactcaattttttttatttgtgaagtgaaacttttcattttataaaattaaaatacagttttttttttttggaaatttaattaaatatacttaaaaatggtgtatggtgttttaatatatggaaattttatttgtaccctaaaaattgtaaacacatcctattttaataatttttattttatataaaatttatatgtactaagtgtttttaatttttttcttctaattcatattcttaaaaaaaaatatatctattaaacaaaaataaattatattttaaatattgtgacaaaaaaattagaataaaaaattatatgaatttttttaaaaaaaatatatatatatatacgtgagttagaaaaaaaatatgaaaataaaatcaaaataagtattgaaattaatataaaataatgtgagaaaaaaaattaaaaaaaaatattaagantaatttttaaaaattatttaaatattttttttttaataatggggtgtatttatcattttatggggtgcaaattacattaaaaatataggaatataatactccaaaaaatcttaaacccaaaaataccctttccatttgaaaagtctctctctttctattttccctctctctcacctaactctccctctctctctctaaatctcacagacaagactcacccacaaccaccagcagcaccactcccatcccaccagatgtaacccagttgaaagctagccacaccgacgagacccacgaccagagatcaccacgtcacacaacgaaattgcgaaacccaacaaaatcgagaaacaacaaaattaccaagaagaaggtatatttctaatcttctacttgattttaaatgggttttgggtcttaaatgattgattgttaggaattagattcattttttttcgggttgagtttccatgtttacgatgatctgcaatttcgcctattatcgacatctcacgactatgttcgcgacattttgtcgatttctttcccaaggacttcaaaatataggcaattgttgtttttgtgatgtttcacgacatcttgcgatgtcatgatgtgacatgttttgtactgtgtttcacgacatcttgcctaagttgctgcatttttttagctgtggaaaacaataaattctaataagagaggaggccccaaggatacttaaggaagttctctacatttctactaacttcagcatatctgtcatttatacacaccctcgaatcgtggcaaaaaaatgccttcaacaaatgcacataatgtaatgaccgctctagaatgtggattagtaaaggcaattagcactaaattatattattttattattatttatgaatttatttaattgtggaccccaata

SEQ ID NO: 162120 - DNA, 2743 bp, Cannabis sativa
gctggtcaacgtgctgcttatccccatcaacagttgaaatctagctcttcctttgcgatgtcctcaaatcaactcctccaggcctcatcacctcaaattttgcaacattcttctccacaagtggagcagcagaacctgctgccacctcttaccaaaactggaacaccattacaatctgctagctcaccttttgttgatccatctccatcaactcctttggttccatccccaatgcccagcgattctgaaaaaccccttccaggtgtttcctcacttgtaaatgctgggaatgttggacaacaacaaactagtgttgttactccagctcaatcccttgccatcggcaccccgggaatatcagcctctcctttgcttgcagagtttagtggtcctgatggcactcacggaaacacttcggtatctgtttctggcaaatcaagcattacagagcagccactagatcgtttaattaaagcggttagcaatgatgatatcttccatgttgattttagtgttagatgccttctcctttcacttgaaaacactattgaacgttttccatattcatttttggtagttctctcatattagtgaatgatatgtaatactgatatgtggtttccaggtaaagtcgatgtcacctaaggcattgagtgcttctgtcagtgacattgggtctgttgtcagtatgattgataggattgcaggatcagctccaggcaatggatctagagctgcagttggtgaggatttagttgctatgacaaactgtcgtttacaagtaaggaatttcatgggccacgacggaactaatgggactaggaaaatgaagcgttacacaagtgccatgcccttaaatgttgtatcatcagccagtagcattaatgatagttttaaacagcttattagtttagaaacttctgaactagagtcaactgcaacatctggtatcaagaggcctaagatagaggtatttgtctttactggaatgtatatctgtatgagtacaaaagttattttaaacatggtctgaacttctgagaaccctgttttatgttcagctcaaacttggatcattagtttgttgaggtattggagagattctagcgatacacataaagataagcttatgagtgtgctatgctgtgagggtgtatttggttagggtaatgaaatggaattgaaatgaatcaatttttattctatttctgtttatgcatatttatttaattattttcattctattcctgttcttatgtttttcatttctcccaactatggatcctgagcacattttatcattcattttgagagttgtccctttgaaatgactggtgttcttcttgcaggttaatcatgctcttatacaagaaattagggaaataaatcagcgacttattgacacagttgttgatattagcaatgaagatgttgatccaagtgcagcagctgctactgttgaagggggtaaagggactattgtcaagtgttctttcagtgctgtagcactcagcgcgaacttgaaatcacaatatgcttcggcacggatggtgagttctcaagaattatgaagggatctattatcctatgcagcattcttattaattattttgataatgttttgcagtctccaatacagccattgaggttgcttgttcccacaaattatcctaactgttcccctatactgttggacaaaattccagtggaagtcaggtgagggaaaaattctacttctctcaagtacacactacaagtttcctgctgatgttgtgatgatatttgattatgtccaatatcttcctgccttgaaaagattttttgttcagaataatgtctaaaagaaaaattatttgtgacatgaactttcaagctaatttatctaaacagaagtgaaatttttgaagctcaactctatgcaagataatgtcacgtaactttttttaaaagcaacattagttttcacttaattattttaaatgcatcattagtcaaatgtgaatcccccttgctttgccatctaaagtggatcaaattaagcgtcagtgttaatattttttgagtcattctatctaaatttcatgagactttgatatgcacaaaaaggccctggggttgtacccgtgctcattatatttgttacttttatgttctgaagtagtatttgtctggaatgagctattaatacttgaaagtcattgtttcatcatctacttttatagcaaggaatatgaagatctttcagtaaaagccaagtcaaggtttagcatatctcttagaagtctctcgcaacctatgtctcttggggaaattgctaggacgtgggatgtctgtgcccgtgccgttatttctgagcatgctcagcaaagtggcggtggcagcttcagctccaaatatgggggttgggagaactgtttgagtgccgcttaattgttgatgctgtgatctaatgcaaagcattagttgaagcaggctctgtatatggccccacagttgcggcaggaagataagtagtgtatagctaatatttcagtgacgaagttcctctaaggcgagattgattttctgtatattctgacttggtaagctcttcacgtttgttattagaattcgtatagctttgtatatgtgtaagaacgcatgaatttaggcatatgattttactagtatatattttcttttgggcattttacaaaaatactgcatttggggtaattgttttcaattttactgccacacggca

SEQ ID NO: 162121 - DNA, 7996 bp, Cannabis sativa
cttcttcttcttcttcttcttgtcgacttcaagaggatgattagagtaatacaactattgaatacttagtgtattttagtacatatataggttgcgataggccaatcgcaacgtcttaggttttttatttctcaaatgtgatgccatactgttgttgttatatttttcgttgaagaattcttttcttttcttgcatgcaatttcttgccagagtcgagggtgattctggtgcactgggtatttcttgatttccttcacagttaagggtgtatttagcacttgaccacttgagtatgagatttccttgattggggcattcagagggggcttctctccaagcaattaggagaccccatccctattttttatttcattctttggtgtggggactaactgcttagggtttctcttctctcaaatgtgtgaagaactttgggaaattcacgcacaaggattttatgctttcgactcggacatcctttctttccatcgcaataatccccaaataggttttttgggaatcaagaaaaatgccaaagaggttgaagaggtctcagagcccacgctagtcccactggctgatgttctcacaaatccagtgcctgtccgagactatgttcaaagaagcgaccatatgggaggaagatgagatgaactcatctatgaagtgtcaccatctggctaatatagtggacaccaatggagttgtcccttgcctggaaagcatttataactgattattggctaagaatgatgagacctccaaccacaactacaatagtttcagagcttggagccacgctcacatgatgtcagaggcaacctacctctctccaggactactttataaacttttttctttttgtgggcctcacacattttcaattgagtcccaaggtctatcatttgacggatgaataaatttttattctttactcatttaggggttgggatatccctacccttgcaaaaaaattatatttttacgaactggtatgtcctcccaataaggaggataaaggttaagatgacttttactttctttaagttcatctagacaataatggtttggttctcttcaactttcaaaagaatgtcaaagattgtaggaagcaatttttcttttccactgctttcaggctttcgatcacccgtacctgtctactgagtggaccaggattggtaagtaaatatttgcttgcctcaccttgtcttttttgtttatttttgagtgagccttattgtgaatgtttcatgaccattttcattccatatgacgactcatactcaactctttaaggagcatgaagatgttttttggacgttaagcaaagaagaactcaatgtaggttatctgatcactatggctaattggcaaacagatctaattgaaggttgatcatagtaaattttggctcgagcttctctgaggcagctcaatgaggaagtaacccaatcttttgggtgaacctcataaaattattgtgtttgttcttctcttctctcatcttctcattatttgcttgatctgtgtgtacatgttttctctggctttgtgttcaaacaagaatggtcattattgactctaaaaattgacacatgtgtgtgagttgtgtagggttatttttggcataaaattttctacaccaaccacctcgttagtcgtcacattaaatattcattctatgggaaagcaactatggcatccacaactcaactttcaaaattccaggtaaataccattttagattttgtgttttgtaaaagttattgattgaactttatcgtttgttaaatgacaaattgaactctatatttttcaaaatagtatagaaaagtaatttgagctaatttttttatcaaaataaaatttaacaataattcgatcataatgtgttatgacaggagtagatacattctctgcatctgtccatacgagaaattgtcacttctcatctgcttggtctctgcaatattgttaagaggttgtggtttttgtcaaaattgaatttgagaattgattattattacttaacttctggacatgatgtgcttagttgggtgatacaggcccctttcttagaccatcttaatgacaatcaactaaaggaggaattccttatatatgcagctagcttacatatagaatttggcacttttggaaccaagcttttcatcagaataccttgttgccagtggcagaaatgactaagattataaatagagacattcattgccatcagaagtttgctactaaacagagtgttgaatgcttgtcgcgtacagtccctatgttggagatgccttctatccaagagggattttgagtttatgttgatgccactctgtccataattccccagctacagtagggtttgtggtgaaggatgtggttataaccaaactctagtgctctacccgtgtaaggaacctcttgtcggggagttacaagctctttttcatggagtgagggccattcgagagcttggtattggtcaatgtgttattttttcgaattgtcaattactcactcaagctattgctgctaaagtctcaaacttgtctatagggtcttcttttgctaagttgttagatggaattgattgtaatgttctttgacattctagggagtttaatgatagcgcccatgcatgctcatgcaattaattggggtctttttaattgttgtaatgggtttctttaacttttggaagatgaatctacatgaagaaatgctaaagggcaccagtggtgcctagcaccttcttatgtgtcaatatcgctattggtccaactaagtatcgagtcccatatactttaatataatagcttttagggagtatcgctagctaatcgcaacgcgacatgtcgcaaaggtgctagacaccactggtgcctaatagcaatgctcatcttcatgtcatcaccattatcttttctagttaatgaaagtttttgaggttttttaagcaaaaaaaataaattcttcaagttagttatattaagaaaaaattaaaaaattgaactcatgacacttttaaaaaatgcaagatctaatttgtcatttaacaaaataaaaaatttattaggtaacttttgcaaaatacaaaatctaaaataatattaactcataatttaagaggtttttacactacatactgaaattttaattttttttacttttttactgtaggatggattttttttttcaaaaatattgtgcaagttttatactgtgcactgttaacttttcacagttgtttcacggttgtcttttagttgtttcactattgttttaattgttctgttttgttgttttacgattgttttataaaaagacagtattttttaaaaaaaaaaattatgtgacagtgaaattataaacttttgtcaaaaattcaatatttttattaaaaaaaaaaaaaactctaatttaatttctgcatcaaaagtggtacatttacggaagacatgagccaaactcaataaataaagatatcaattattatggtgtttaattaacaaaaacatagactaattatgcaaagcagatttatttattattatatgcatatacattacaaatacaggtgtataatgcacagagagaggtaggtcgattctttttttaaaaggaaaaaaaaaaaaaaaaacttttctaacatctatttttataaatgctaaaaaattgtatgagaataagagaaactcctgatcaactttgcattttacttacaaaaattaatgtttagtttccttctaaccaaaagaaatttttgtatcttgaattgaatacaaacagaacaagaaactggattgccatttggtgtattttctcatgttgatcttcaaaagtagacaaagtggcacccatcatagcctaattataaaaattaaacaaaaaccacaaataagtaatctcataccaaagatatagaaatccataaaaatctaatataatatatatatttttttagggaatattatatagtacttcatggaaaagaaagttacaatatttgatagcctacgtaaatgtgtaaacaaaacatatcttaaatgaaaatgacattagctaagttagttagtgtttacttttcttttcttgcaaatcgttaaaagtggacaagaataagataccaccttatatataaatatgaaacaaatcttttagatgattaaataaataaagaaaacccaataataaaaaagaaaaaaattaaccataagttatattctattataaatgcatgctatttttggttgtgtatatagagatatgttaaacggtaccaatgttatctagcacattcttacgtgttaatatcgtgcaattaagtatcgggttatatatagtttaatataataatttatggagaaaattatggtaataagtttagaaagtgctaagaagtactggtgtctaatagcaatattaatatgatatatatatggtgttattacttacttggatcaacagtgattaacatgccagtgcctccaaagtcgcaggtgccaccagcagctttggatctttgccaataactattgaaagcataggaagcatgggcaatcaatgaatcgggttgaaagcatgagccacttggctgaatggaatcgcaatcagctcctgagccacaagcatagttcattgcttcttgaatgattgggtcaggcacagaaggcttagccacgcaccataaggctacacttggggctgtgttcctaggtggtcgaccaattggtggagggtacacaataggaggcagaaacactggtgggcctggagaaaacccaaatggagatgggactgtagttgaaggtgggtttgggtttggagtagcaaaccctggtgggctgggctccacatatggtgggctcagaattggttcatttgggcttggtagaatttgtggtggagttaagcttactgggctagggacatcaccacctattgggctgggctcaacatatggtggacttagaatgggttcatttgggcttggtaggatttgtggtggagttaagcccaatgggctaggcacttcacctattgggcttgggttttctcctcctcctcctcctcctcctgctggtggtgctggtgggaaataaaaaggtggagatggtgaagtgggtgtggagccaattggagtattgggaggatttacacaaaatggaggagaattttcaggtaaagaaactggtggtaatgaatcataaggtggtaaagtgaagggtgaactcacaccgtaggatcctgagttggtgggatctgacggtgaatcattgtttaagtattttactaaatttagttttgctgcagtcattaggaacaaactcttttgatgtgtaattggaactttattcgttattagttttctcactactgatttcctaccttctgctgtttaaaataacaatacaaaaattaaacaaacataaatatatatgataatattaaggcaaaaagaaaatgtgtatagaaacaaataagcattagagaagaaggccttaccacaatgagagaaggaaatggctaccactatgaaatagagaaatagaatattacaagtccttagacactgataattgtttcttctcatcatgatgatttccttacaagtcccaacaatgccaaaactccaattaagtaatttggagaactctttcaaaacccacaaatgaaatgatcacttaatgaaattagaaccaacactaaggaagagtacctttctatacaaatatttatatatttatatatgtatacaaataagggtatatatgtatgttgtttgaaagactaagtttagagacaagtgggtggtatcgaccataaagattgattctttgggagtgaaactttgctatacagtcactttgcttggataagtgcatttgaaggaatacataaaagagacagaaaggacaagtgtagagagtgtattttataataacaagttgttcaattaacgccttctcaatcatgcattcttttttttttaaggaaattaataattaagacatattaatgcaaatgaggcatatatgcttgcttcgtatttgggaaaaaaaaaacaaaataagtaaatgaaaagtgtggttttttctataagctctctcttgtgttgcttgctttctactcaaacccctttctttcactactttctctatttaatctaattatatatatcttttacagaggttgaaggttaatttgtttcacatatatatctaattaatttgtcagaaactaatgacaatcttgtttgttgaatatgtcataccaatgaatttgactataaaggcaaatgatatgctttgttataccataatatgtaagccttcgtgccttaccacgtgctatactaccgcatcaaaggaagtcggtttcttcaaaatatatacgctagaatatctcaaaatacacaacctatgtctatatatttaataaaaaattgataattgcacacataattaaattataagtgttttattttttaaattatacaagagtttcatcttttgtttcatctttatactaatctatttcatataaagagtgactatgtaacgaaatttttagcttagcggaattttttaattttctatattaatttaatagaatattctttattaactatctaacgttaaacgttaaaaacataaataaaaataaataaatattaaaaattacgattaatattccttccaaccctctccattcttcattgttgggtagttttttactttgtctctgtaatgtggctctgttgttgagctctccctcggtagcagaactggtaacgtgctccgacaaagtaccaataagataccgaaatgataagatttcgattgcaaactttaggggtgttggtgatggacgaagtgaatacaaaaagcatttagtgaggcaatatacactaattttcaacaacattcaataaactaattattgagaaaagagagaaagagttttattatcaatgaatggaaaatacagtacatacaaaatgaagagaaagagagccttaaatagtaatggttcagcttaggacggttacaaccaaaaaagaaagaaaggaccaatggtttctaacaaccttcctattcttggaaagaattccaagaaactaactaactagataaaagaagaaaagaatacaatgacactggctaagtacaaagaaatacaaagtggttgtggtatgtgaaaatcatgtagaagatattgtagccatgtaatttcactagtggttacagccaaggcacaatattcagcttcggctgagcttttggagatggtaggctgcttcttcgtgagccaagaaatgagacaatctcctagaatgatgcataaaccagtggtagattgccttgtaatggggcatgatgcccagtccgaatcagagaacccgcagaagtgtaatgttgatgacttcgaatagaggagtccttgtccagggctgcctttgaggtagcgaagtagatggtgcacaacttgtagatgtgtgatgcgaggattagccatgaattgaatgagggaattcacgacaaaggtaatgttaggtcttaacaaagttaggtacaaaagtttcccaacaagttgtgcaatagtgagaggggtccttaggtgtccaagtcagtataaggatattttcgttcagacgaaatggaggctaaagcactttttcatagtgttgcaattaccattacaaattactcatattgacacagatgctttaagagtctctacaacttttaactctccatctaggaatttatctagtcttaatgatttaattttggatgttagttgtcttttatcatttttcttaagagtcactgtttctcatgttaactaagcagcgcatgatttaattaaatatggtcttgagttggatgaagatgtttgttagatgggtgaaatctcaagtcttattttcccgtaaacgattatcatttataataacattgaaatttctcaaaaaaaaaa

SEQ ID NO: 162122 - DNA, 3026 bp, Cannabis sativa
  modified_base (2957)..(2980): a, c, t, g, unknown or other
ttcagtgtcatctagccacaactaatcctagttcagaaacaccatccatttctcaatattcttgtaaatttgtagctgctaatttagcttcaatcaatcgaaatgaattgtcactaaataaaataatattttctacatctacatcttttatttcccctgaagttttcaatgtttaggcattaaatgttaatttgtggcatgccaaacctgggcatcctgctccccaaaatcctagccaaaattttatctcaacttaatattccaagtaatttaaaaggactaaaattttgtgaggcatgcaaacaaggtaaaaatcacaaattttcacattttatagttgagcctagagcagctcaactacttgaattagtccatatagatttatggggaccgtctcataccccatctaaggaaggatacatatattatattcattttaaagattatttttgtagggagtgggggtccttggacctaaccatgggaaggccatacgaaatacagcacaagatatgtgacagaacatacaacctctaaaaactgaacgggttagaaattccacgagcatggaacgcggaccacctgcgctgatattataattaactggggtggtcggatccttttattgtttgtcttatttccatgtacacctcaggataggaattaattgcctagaaccatttgctttgaggatgaacacggttattaaggaagaaatcagactagcaaaaataatagtgagttattaaggaaaagaagaactcaacaccagcagaggctgctgcagacaatgtcactgctattgatgacttcaaacatgtgactaaaggctggaaaccaaaagccaaacccccagcagctagtacggagactgaaaattcttttcatgtctttaatgattagcaagcgacatatgctactatggtgattacagaaggagatcaggaaaatgttattacacaaacagtgaagagtggaggagggggagggcttcctctacaaaacggataggctactaatttggaatgtccgaggagtcaacaaccaacaaaagcaaaatatggttaagcaattgatctactcacaaaatgttggtttggttggcctcctcgagacaagagtcaaggcatccaaacttggaaccttgtactcaaatatgtttacaggatggtgctccaggatggtgcttcactagtaatttagcttggcacaaaggagggagaattatagtagcttggaatcctaattccttttccattaacatactcaaatgtacaagtcaactttccaccttgaagtctcttcttcagatggtaagaagttctttgctacatttttttatggctttaatgatgcagaaggtaggaaaatactttggaaagatttaatgggaattgctatccttgacccttggactgtgatgggggattttaatgatatacttgcaaaagatgaaagggttggatctaaagttagacacaacactacatcagagttctcaaactgtgtggcttactgtcaactagaggatattaaatacacggggaactttttcacatggtgcaacaaacaacaagatacaactataatctattcaaaaatagaccgagtgcttgctaactctaattggattgatacctttcctggagttgaggctattttcttaaacgaaggtatctttgaccactcaccagcactacttacttttcaccataattttcaaatggggaagaaacctttcaggtacttcagaatgtggtcttcacacccaagctattctgagtaagtaagaagaatttggcaactgaattacgatggcactaatatgttccatgtggtgtcaaaacttaaggctctaaagaccatcttcaaagagataaaccagtagggcttttctaatattcaagctgcagtgatcaaagctaaagaagccttagtttactgccaaaatctgatgcaccaggaccctttcaattctgttttgcaagaaaatgaaagggaatcgagacaagcttacaaagaggcccataactactatctttctttcctctatcagaaggccaagcttgtttggattcgcaatggagatgacaatacaactgcctttcattcgagcatcaagaccaaaaggaaccaaaataaaatcctttcaattgaggattcacagggggtaagcgttgatgatccgaggaaaacaactgacattttcttatcatactatcagaccctgcttggttccaacaaaattgatagaacaaagctccaggtccgaatgggaactcaagctattccgggaaccaaagctttaggtccgaatgggaactcaagctattgttttcaagataattgggaattaattaaggaggacatttgtgatgcagtcagatatttccttcacttaggacacatcctaaaggagatcaactgcactacacttacaattattctcaaagtcagatgccccaactctccaagtgacttcagacccatagcctgctgcaatataatgtacaaggcaactataaaaatcctttgctcgagacttaaacacatcttgctagaactcatagcccaaaaccaaggtggctttgtgcaaggaaggttcatctgatacaacataatgatctgtcaagatttggttctgcactatggaaggaaatcaaacaaggccaattgtatggtcaaacttgatttacaaaaagcctacaacacaattaaaatgggagtttatagaggaggtctcaggggcttactttttcctgacaatttcatctctttggtgatgaactgtgtcaaaacaccaaagttctccctttttttcaatggaactttacatggtttctttaattctaaaagaggattgcgacaaggagaccccctatccccacttttgtttgtcattggaatggaataactatcccgaataatgaaggaagtgttggaaatattttaccagnnnnnnnnnnnnnnnnnnnnnnnntttcattaacatcctaatatgaacttttaaaacaatgaaataaaca

SEQ ID NO: 162123 - DNA, 4555 bp, Cannabis sativa
  modified_base (1072)..(1072): a, c, t, g, unknown or other
ttccacgtgacacaattgtattggttaatatatgggctatacatagagatcctgagttatgggaagatcccgagagctttaagccagagagatttgagaacgagaacaacatgaatttgcttatgccattcgggttaggaagaagatcttgtccaggaaatggtatggcccaacgcgtaattggattgacattagggtctttgattcaatgttttgagttgcaaaaagtgagtgaagaagaagtggatatgacagaaggaaatagtatgactatgcctaaagctgtgcctttgcaagttatttgcaaatcacgtcctattatgaactcaattctctctaaatgattttatgggataacaatttaatatatactatgataatgttttactaattatttgtgtggttatacaacattttgtattgtataaattattatttgtttagactctattttataattttcctatgttagttgttgtttatcttttataattttttttttcttttcatgaatgattcgaactttttttagaagaagtatattaattatttattttggagtactatatattttagaattaatattattttagattttgtattttataaaagttagcgattggagattcggcctctattttattaatgataactttttaaaatagtataaataagacattgaattcaatttttaattttttttataaaatataaccaacttgaagataatttctaactcgaaaagatttaagaaacgtaactaattttatcattaaacctttatatcatattcataaaaaaattagcttattagggtcctatttagtattattttaaaaaatacaaaatatattttaacatttaataaaacagaaagttcaattagtaacttttataaaatacaagattcaaaataataatattaaccctatattttatcaaagctcaaaaaatacaagttttgtaaaaaaagtttgaaatgataatttattgttccaaataaaatgtggttgcttaagagcatgtaattttattataaacttttatatatacatatctattctatataaantgtggctatataacagaattcttgttttatcaaaattattgggtgacttttttttaaataaaaaaaaataacaaattattaggtgttgccacgtaaagggtcagcatccatatagttagttaaacctaaatataagctcttcaaagtgctgaacactcgtgtctgcagaattattcagggatgtaattttttcttgagaaagtttgattcttctaggcagatcaccaaatttgttgcaatgccactgctgaagattagtggcacaagaggtcagattttgttgtaattgagacataggatcagagttagaattttgccaagcttgagagataatttggaggcagttgtcttcattcaaccacagtttctcaaatttgaacctagacttaaacttaggaggggaatgtggtgagttcaagtgcgaaatggaaacttgtaatgctctttgatccaagccgaagaagtccaaatgagtgacagttggaatgttaaaagttgactcccaaggttgattaataaaaccataatccaatcattcttttacattagcactatgtctgttcttgttatgccgagtaaatctctctcccaaataattcaactcatgtaaaccacagtaatcaatggtgtttcgaaaggcatctatttgagtttctaggcgcaatgggccacccagtttgtcattatgaaaaaaaatctcattaaaatctcccaaaacaatcatcgggagcggaggagcagtgtctcttagttttttcaatagctaccatgtaacatgtctttgagaagcattaggggcaccatagaagccagagaagtgagttgtagggccatcggcaagagacaagtaacaatcaacaaagtttattccataattaaggatagttacatttacattagttttccacattaataaaagaccccaactaagacctaccctaggaacttcaagaccattaggaaaattaaaagcattgcgaaatctagtaatagagcctatactaagtttagattccattataaatattacattgggattatgagaagagatgagcagacgaagttgacagaatgctcatgggttgctcaagccccgagcattccaactaacaatattcatggtgattggcaaggctgaacatcagccttcgccaaagaagcatcccttctatcatccattcgagaatgttcatcctttttagcaaatgggtcgggaagttgatgcagcaagttgttagtgaagtcagataaaggagaacccctagttcgacatcgtttgagtacatttcggacattacctcccgttgtaagagaggacattctgttctcattagtaacctcggcaatattatgaacaatgttagaacagctagaagatgcaggggaatgtgcaacaatatccacactagaaactacagaagatactactatggcagcagccattttaacattgaattatggggcatgtgaacataagcagggggagttgcaattggcaaagcaaccgaatgcagcatagaagcaggagcagatgtactcgatgatggagaatcaatcaccactttgttagaagggcacacctctttgtatgaaccagtcggttgatcagcatgaaggtcttgacagatgaaagattaatggattttgttatggtggaatccatggtgaggtgtttatccatatctgaattgcttgatgaagatccaagttgataaaaatgcttaacggtggagccaagtttggtagcaggattcttatcattgggaacttccaaaacttctttacccttctcagaatttgtgatcagtgaaggtaatgcaggaaattggttcggatgttgaattattagggcaatagacttacgagcaagtctagtgatgaatggccaagggcctgctttggaaaaatcttgcctatagctatcataggaagatctcggcagtgaagatccttccatccacgggccataagggagttcatggctctatcccttcatcttatttttccaaaagttgaggacatctatcaaagacattccaattatgccgcactcatagcagaagtctggtaacctctcgtaacgatagtcaagccacagttcgtctttcatccatggaaaagtaacaaactgaccccaaagaagaggcttagaaacatcaatgccgactctcattcgaaggaagggaccccatccttcgttgagtgaatcttcatgaacttcaatgaaagtaccaataagattatcaagaagcttagtaagagcctctgatttgctaagaaacgggagacggtaaacttgaatccaaaatggtgtaatagtgtaagagtcaattggattattttgtagaacatttgggagacaaaggatcatgtgttgattatggaagtgccatggctctttggagagaacacgtcttaagtctccttcacatccaaaggttatagtgaaggaatcagtagccggatcatagtcggaaataatgacagcaaacctaccaacccattgagtagtgatgaagttcttgaaattttttggattgaagcctttttttgaataaattctgcaaaaaaccttatttacgacaggggggaggtggtgggatattaatgttggtaatatttatgacttctctttcgcttatagaaagggcattagagatgctaggaatgaagttatccataagaagatcaaagaaagagaggaggagatgaagatggaaggcggagcagggaggaagagaggaggcgggaacaataatattttaaaaaagaagaaaaaacgatagaacaaaggggaggttaagatcaaggaacagttaaaaagagaaaagggaaaacaaactgccacagagcaatgtgaagggcagacaaagctcagaacaacgtgagttaatatattttacatcaaattaaacatttttttaaatatataatttttttttcttcttttgaatttattattttttgctttatttgttttaattttttgttgaaaacatgaaacaacaataatatattgtattttgttgttagttatgtgaagaaaaaaatatattttttaataaaatttaaataattattattaaaaagtaaccaatttaaaatttgtgaagtagatttgatttattatacgaatttaattggatccaaaatataaaatcttcatttagtgcgaatcaaatacattatgagtaaaatagtacggattaaattggatgaacattttaaaaaattatactgagacgatcttttatactacaaattttttaaaattgtataagttagatatttctggtataaattcttaaccacttaggagttatctaattcaaatatgatagtaaaactcttattagttattacaatgctaaaaagcaataatgaatgggaaatttgaaaaaatatgcataaaataccttaaaattttctccctaatctaatacattttaaaatttaaaaaatatgaccactttacaataaacc

SEQ ID NO: 162124 - DNA, 2978 bp, Cannabis sativa
tgtgctctgcacatcttgtaaagttaattaattccaatcaatcgaatctttctctttcttttcaatttgactctccgcaataagtgtaatatagaattacccaaaattacatatttacaacttttatctttaaaaaataataataagtatatatgtacttgacatatttttttgttaatcaacaaaaagaaaatcacatggtccagatcctttctctacctattcggtcatattgacaatcctaggatcatgtgtcaattataggagtatgatatctcattttgtcttaattgagtcattggtaattatttcaaggattctcattaaataaatgacactacctacagctaagctaactttcagaataacaaaacttttaatccctttcaagaaagcttgtaataagtttcaaactcttgactcaaataagaaaaatatcagtaaaaataattcctactattacaccacacatcaacatgtggtaaggtatggacttggtagatttatgcacgtgcatctacaactatttggtcaacaaaataacaagtgcagtgactagtgagaggagtgaaataaatagtggaaattaaggaagttagtgaagaaaaacaaaacattaaaaatgtggttgtttatgggagttggagacacgtgtcagttaaacactggttagggcggcagtggtcggtcgtcccagattagcaaactactacagccgcctatgatatattgtatggctgaaatgggcctcgaccaacacacaattgaaaaaactactctctaaaatggcatgggacccattattattgtttatgaaaatcatgattataaacataataattcttatacaccaattaactttttaatttagaatttggttatccactatcataatgtataattatatgctaattaatattttgtattagtttcatatataatattaaattttgtcatcgggatcgttaaattgttaatatttgcttaacgtactttgtgtacattaatctataatttcaaagcacagattcctgaaaatttaaaatgtattatcctgacaacaataaagttggctctttagtaacttattattatgattataatgagtacattccattttgtgctatgattatttgataataaaatatgagagtaggtctatttatctaccttattattgtttattatcaatatcattaacaagaaattttttatggaacattaacaagaaacctattaggcaaataattgagtatttctaatattggaaactccataattacactacatgttgttctataaacacatctaaacaaaccatatattcgtgttttaattatggttaatattattttagacttttttataaaaaattattaattattttttattttgttaaataataaaatagatctcgtatttttcaaaatgatatataaataaagatattaagtttaatttttaataatttttctttttaatataactaacttgaatacaattcttaatacaaaaagatcatgcagaaaatataatcagttttatcataagacctctataatcgggttattattaaattttattttgataaaaatcaatttagaatattatttagtactattttaaaaaaaatacaagatctaatgtataccattcaacaagatagataatcgaatcaataaatttataatgtagatagttcaaaatagtatttacacttattatttgataaaatttttaatttattagtaaattaattttttattagtaaaacaaaatgtttggatggccgcaaaaaataatcaaacactatactattggaacataaaacgactatatatattgttaaattaaatattgattcttggtatatttcttatttatataggtgtccattggataactatagaattagacaccacaaaataatgtggaaatcctacaatacgtgtcactacctcgggaataataagaaaacaattttgttacgaccgtcaaccatttttataatataaatatacaaaggtgtattgtattttttgtgcaattttatatagagtaaatacatattacaacaaaggttacttttagttactgtaaaagttatttttatcagtatatttcgcaaattgataaaaaagttaaagttttacagacgtatatttatagtggttaaaatttaacttttaccacgacattaatgggttgaaaaatatcatttttgccagcgcttttcattttgtgctaaaattttttttaataccaacgtgatttaccaactcttttgccaacacatcagaactaaattctattttaccagtccaatgctaaatttttgccagcatattttaatgacataacttcttttagccaattttcaatactttcttgctctttttatttctaattttgtatcaaagctcatggcatcaaatgggtaccaatccaattcgtttgtgagtcagacacgaagagaacaagcagctcgacatggtcttgatgcacctattccccttcaagctcccccagttgtagatggtccaattgcaccaatcgtccttgttccacaggttgtagctgcacctctgctttccccaatcatgatttgcctaaatagggaggacttacacttactagagatcctaggttctgataaacgcttaaatcaaaaaaaaaaaagagagatcctaggttctgtcgattgttcgtgcgcacgactacaacgaattcctatttggcactaggccttgccctcctcaattcctcgatgtacctattgattttaatcctattttactaaggcaggtaaaccctgatcaatacaccttgtgcatctgaacgaatcaaaccgtttattttacatgcgtacatatataaaaaaaaagtcacgcgtgcaacagactccttgaaccctattttcaatagagcttttttcataaatgtacaacaaaaacaacataattacaaaaaatgtgcaa

SEQ ID NO: 162125 - DNA, 918 bp, Cannabis sativa
aaaaaaaaaaaatatattcatacagttagagaaaaataatcaattaaataatatgttagatatattatatttatatatggagctgaatttatctttatcattttatatatgagtactattcaatcattagaattttttagaaacattattcttcctcgaataaaaagaaatactattctaacacaatgatatttagggcacgatttaaaccgtcgggaagttcacattagcaacggtttttagttgtcgtctattttgctcattttgcgacggtcgtatatgcgacgaatatagaaactgacagaaatactttaaacgactatttaaaaacatcaagaaaaattatttttgtagtagtgtaacttcgtctccctcaacatcagtattgatcatgtccaccagggtaaaagtatcatccatttgaggacatgcaaaagtgaatagaacttagtgagtatcaaatggaaaagtagcacaatattcacagtggaattagtcaagtttaatagaggatacaagacagaacttgtcctacccaggtgcccaaattcctctttaacaaactgatatatcaaattattagagtcatcatcctctagatagctatttgatgaaaggaaccaactggaggtgatgtaagaagaatggtctagcagaatgggagcgggaggacctgaccccatctgagacctacctagaaaatctccaataaatgaaaagtacatgttcttatccctatcaccccaccgagaatgaagcatccttaacctataaagtcttaacctacatattctcgaaaaggagagaattcttttgtacactacaaaaattcttacttttagtcagaacaaaacttgtgactaaaaaagaaaaagttgagactaattataaattattgttcttatgttgtgactaaaa

SEQ ID NO: 162126 - DNA, 2352 bp, Cannabis sativa
gaaagctttagtttggaaaagtctatgtatgcatgacggtatctaatctttcctttgagcttctcagttgctttgtcaaaaagctctactgcttttctgaattgcctttctccaattatccgagtactctcgaactcatcagggtatctgcaaaatgaagatgaaatatggtttctaagccatttataaatagtatactaacaaataacatgcttggaaaagtttctagaaaccagaaaagaatgtatgtaccctggaccacgtccgtagcatagttcatttttgccattgcaggtactgtgatcaaaatcacatggcaatccagtatcgttgcaaaatgcaccaagaacattggggcttacatcaccacaattcgattggcaaaatgcagatacaaattgaggcctgtcaggcttccttaaagcactccttaccctcttagaagaactcaaaagccttgtcacaggttgtccttgggaagactgaaatgaatcagcaagtttcattaattcattacctgtattgaaagaatatatacttgttatgaaggagacaccattttccattgtcaatagaaataaaggcatgttaagtccatacattccataaaattgactggaatagagcacttactatctatgttggaatcctgaaataaacttgagacccttcttgggacactatcaattcctgactcattgaagttcagatttttagaagttctctgttcaaaccaatcctccataaatcgagctgcagctcctttattatcgccgcttattaacgagtttgtacggctcatggaagttccatgagttgcaaaccagttaaagctacctactgggccccaataactatcaacaaactttatcaaagtcatctctttatctacatcatacttgtatctacttcgctcagctgcaggattgtttagataagaactaggacttcggctcacaccagcatctaagagctctcctgttatacaatacaagaaaacattaaaaatgcctttcaatgtcaaatctaaactatctatccacagatgaaatgcaccttcacaaattattagaatttgaggaataagatgtatgaggttcggactaactcttaatacaccctcctcacgtttgggcctggaaagtgtgagtataacgaacgacactttggctcacaatggatcacaaacggcttttttttagacgatcacaagttgctctgatactatgttagaatttggaatataaggtgaatggggttccatctcaaaaccaattggcaatgggaggagtagcccattcctcttatatattctattatctttccacacattagcaatttgggactaactcttaatacaaatcacagattcataacctatgtaattattataattcattggccaatgtttgtatcattattcctattacttacctttgttcacaaatattgatcctgatcgaagattctcatgagcttgtacaatacttttctcaattccatcaacaataacatcaaacgactgacgaacaaacccaagagatgttacaatgtacacaacatattggagatagcctccagggccagcatgagtgtgaataccactaatggcaacattttgttctgtataaagatccccatatctgaaacaaagattataacaccactcatcaagaaagaaacaaaaggtaatgatccccatattatatgatcaaatttcttttaccttgcttttaatctctcaagtactttgatagtaacaatttgggaagccatacaagcatcgagattaacaaaaactacacgatttccctttggctctgcaacaatgaatgttcgagcacgcaatctgaagtgaaccccagatgcaatttgctctagattagcatatcccatcatattcacatctgcagctggccctgttatgtcatagcttccaagaccaatcatataggaggaaggtgaagaacccccttcagaaatgggtagtgaaaatgccagaataactgtgatgaaccaaacaactctagatgcaaaattcttcatcttcatttcctgggaaaaaaacacaaaatttcttttcaattcacttaatggatataaaaaaagatttgaactttaagataaatcagatatcccaaaaacaagaaatacaagaccaatgtgatactactaacttttcagcaaaaaaaaaaaaataattgttgtgatcctacttgggaaaataaacaaaatttaacattccatatatgagttttattaaaataaaaaataaaaaaaaaaaacgaaaaacagggtatactcaaaattgaatcaacattaattagaagcaaccagtatttcacatcctca

SEQ ID NO: 162127 - DNA, 1950 bp, Cannabis sativa
aatatattatatttttaattaaattttgaaactgtcatctaataaccaattcaattaatcacatctaatacaattatacaattgtatttagaataaattggagacaagagcacagcctaatagtacactatgtctgttaagtatatatgattatatctaaaataggtgaaattagatgattaaatatggcatttactgaaatttctaatggctaatggggcacactttgacattagattataatgtaacaagaataactgaagatggggactctgatttaaggtatggatggggcagcccatgacaaagttaaccaatggttttaatttgattgattttactttcaaagtttcaatcattgtcattggtcaccaaattgagctggcttggctccactgcttactgttgattgagcatatgtttgtgtattgttttgtgccattttcttcttcttttatgttataaattagattggacccacacccagctagatttatgcatatacagattgggaatttgttgctgtttcacaactataatgtgttttttggatgttctttattagcttggcaaaaacttcaactttaagacaactaatgtcggttttaatcaatatcatcaatatttatatataggaatattttcctttattggtatggaagtcattgttgaaagtgagattactgtgaatagtggagtattggatttggatgtgtccattataacagtttttattggtcatgactcatgaatgaggctgggattaataaagggagagctctatctttctcaatctaagtaaattgctttacaatacatacccattatctaaaatttacattataatattaatgacactattatggatagcaatttgattatacttttgttaaagtagatgctatattgagtgtttcactaatttaactcattatattacacacaaaattttgtggtataacataactaaagcaaaagagaaaatagttatgatggtgtttgtaatggtgactacaaaggtatttttaaggttaagtactaaacctttatatcctaaaatattaattaatataataaggagtttctttcaattgggtgcactcgtagttttgatatttgaatagttgtaattttaatctttttttatatgatagtatatattgtagtcatttaagacatgctacaaagatttgaaaattttgaaataatttataatagagattgtagggtttgagtttattttactctcgtataaaataaaagaaacacttgtaattgtttgaatattattttcgacacgttaaattattttgaatctctcaaaaaaattgtagaattctctaaatatttataatgtacactgtcatatcaaaaagttaatattataactatttagatgtggaaaacacaaatgggtgcattagtacacttaaaagtaaataatagaattttccaatagaacaaaattctaagcaaagcatcgtttattaaaactagtctacaaaactatagtctacggtgttaagtaaaatttctcatgatttttacatcttggtttaattttagaatccaaagaagccagcctcactagctctctccttctctaatgtctcgaaatattggtagatagttgtcacggcgagcaagatccccgttccagagcctattgctcccattaaatcagccaacactgtcaaaccaccgatgcacatgccaccgaacgctgcagcagtaggaatgtaacggttaagctcctttcgcaagttcgattcgcggtgtctaggcattatcatttgttgttcctacaattaaagccaacaaaaaaaaaatgataggtaaaactcgcattttataacactattgtaatatctgctttctcagaaggttaatttcataattttcaccgatgagggtatttttgtcattttaccttgagttgtttggcaacat

SEQ ID NO: 162128 - DNA, 3828 bp, Cannabis sativa
tttcctccggattgagccgacatctgttacagtcgtcattcgattcaatgaatctccatttcggaaccgtgcaatgaaaatcttaagttgggatgtcgaaggaattgggaacccttagacattacatgctttacaatgccatctttgggaattcgacctgagcattattttcttagctaaaagtaaacttacccgataccaagctgaatgtcttgctactatattacagtttggagataggatatggactgttgatcgtgtgggtctatgtggaggtctactattgttgtggaaggaagagttgcacttaggaaccaattctagttctccaggacatattgttgcggaagttgcttgaaaagattttctaccatggactatcacttgtttctatgggcccccagatgctagtcaacgaaagttctcgtgggagttgttatgaaagatgaaagggaagagttaagagccatggctatgtataggagactttaatgaaattgtaagcttggcaaaaaagacaggtggcgtgccagagcttcgaaggaaatggaagagttttgagaggttgttgatgattgtcaacttattgattttagctctattaaaattgtgttaactttgtgtgataggcataaatcaaatagtgttatggagagcatagatagagggctacgtaatgaggcttagttacaacaatttgtgggcgcaaatattcaattgcttgattggtgggaaacagattattgagcttttgttgtggatgcaccggtgtggatagaaagggatagatgtgggcagattaaaagaaggggaatgtttcactttgaggaagcctggtgtgaagaagaaggttgtaaagagctagtggaacaacattgggatgggcatgaggtttgtggttcagtaagaaagtttaaagccaaaacattgcgtgtggggaaggctcttcagatttggaataaaaacaaaaagaagaatcttaatggggagattgataaactcaaaaaaaaaacacttaatgaattatctagtctgcagcagccaggtgtgtggacagagatacaaatggcagagaaaaagctcaatgtgttgttggataaagatgagacgtattgaaaacaacaaagtagagttatgtggcttaaatggggtgctcaaaaccccaaggattttcaccgtaaagcttctgcgaggaggaaaaagaatgatattaaaggatttgtagactcaaggggagtttggcaagatgataaaataattgttcaaaaaattgtggaagaatatttcaggaatttatttacagcttctgagaagcatcttcgattattgatgaggttcttgatgctattcaaccacgaatcacggcttagataaatgagcaattgtcacaagattttgtggaggaggacattcaccatgctgtcaaggaaatgaatgccaccaaagcccccggggatgatggattgccagctcttttttaccaaaaattttggggccaactcaagaagaatgtggtgaaggtatgtttaagcattttgaataataataattctgatctaagttgcttaaattgtaccattgtggcattgatttgaaaagttgagcgaccaaaaaagattgaagaattttgtagcttatgtaatgtaatatataagattgtctcaaaatgtatggaaaataggatgagaacaactctaggggaggttatgtcagtgtctcaaagtgtgtttgtcaaaggtagagttatgcatgacaatgctatcattggttacaaaagtctccattgtatgagaaagaattgatttcagaacgagaaaaaatttcccttaaaattagacatggcaaagacttatgatcgggcggagtggtatttcctatagaaagtgatgctaagactcagatatggagaggcttgggttgagaaaattatgaggtgtgtgtcatcggttcaattctcctttcttattaatggggagctacaaggctccataataccacaacgaggattacatcaaggggatcctctttccccttttttgtttcttttttgtgctaaagccttttcgaggtcactttaacaagcagaaaggaatggccacattaagggtataaagtttgatagaaatggcctaacaatctctcatctcttctttacagatcataatttaggctctttcaatgcatcacgggaagcttgtaaaagaagaattgattgagttaataggtatgaaaattgtagataattacggtaaatacttggggctgccttcctttgttggcagaaataaaaaataactgtttgatgtgatcaaaaacagggtctggaacaaatttcagggatggaaagggtccatgttctctatggctgcgaaggaggtactcaataaagcaattgttcaggccagtccaacttacacaatgatctgtttctaattgaccaagagtaatatcaataatatccacagaatggccgcgggattttggtggggctcctctaaaaaaaaatcagtgcatccattggtgtaaaatggcatattctttgcaagccaaaagaacatgggggtttgggattatgtgacctcgagccattcaatcaagcactcctcgctaagcaagtatggagatgtattcgatttccctcttcattatgtagtaaagttcttaaggccagctactttccaaatggaagtattttgcacgcaaagtgtggatctgatgcatcgtttgtttggagaagtttacattgggaaaagtttattttgggaggctacgaatggcgtattggtatggaaatggggtgcgcattgtagaagaactgtggctgccaaggcctatccattttaaaatatatgacaagtcgagcatacttagggggttgcatgtaatagatttgaagaatggtgatggattatgggatgagaatttattagaaacatttttaatgaggaggatgcagaaatcatattctagctcccaagtatggaatgagatttagaagacaaaattctttggcactactaaagatggagaatacgctgtcaaaagtggctgtagtatggcagatgcactaagaaaagttgtgaaccaatcagattatagtagtatggaagtgtggtggaagtacttgtggagattacagcttccacccaaagttaaacattttgtgtggaaattggcccattcttggcttcaaattcattcagcattagctagcaaaggcttgtaaattgaccccactgtaaacattattctactggtgaaaaggaaaatattttccatgccttatggaactataagactacatgggcagtgtggaaaagtgctgggttacaccaacaaataaaatgaattggtcatgaagacgtgttagcattgctgatgtggttgtcacaaaacatggctcaagatatgttcgagttgttcctaatattgtcgtggaagttatggttcctccgtaataggtctaaccattgttgtattaggccaaaacatgctgaggttttggactggtacggtcattttcttgaagaatttcacgggcatcatgataaaggaaagaaaggacaaaaaaggcaagaggctaactgggaggcatcggctgttggtatgtataacattaatgttgatgttggtgtgaaggggggtgcaggatgttcgggagctggttgtgtgatgcgggaccatcatgaaaaagttgtttttgcttcatcaactgttcttaaccatgaatactcacctgtccatgctaaactgatggccattcatactggtctcattgtaatatcttaagattaagaaaacggattagcaaaccctaactaattaaat

SEQ ID NO: 162129 - DNA, 2384 bp, Cannabis sativa
gtttgaacattggacatgtctttctgtgtagctttgcctttagcatttgtccagttaccttgccctgaagcattggtttctttctttttcttaggaggttggttggaagactttgttttctttcgttggttagtgggagcagttttgtttgaggtttctcctacttttcccgactttgttttctttcgttggttagtgggagcagttttgtttgaggtttctcctactttttccttccttttatccttacaaggatcataagtttcagaattttttggatcaatcctctctgcgtttgtggaatagtatcatcaagattttatcactaggagccatatttattgttgcaagtaacgcctccagtcttgcaaattctcatatattagaagagagaaatctttcttgggccgctaactttagttcagttaatcttaacattctgaccatgatgatcacaagatctggcttatcgtgctccttttccttatcaacattctcatttttaggatccgtaggattgacatcttcagtcttgtcttcagcttctccttcatcgatgggatcatcatgaagatcttgcttatcatattgatctttttacttttgatgattgattgccttgtgggatctttattgagccttattttggcgttaagatcaacgttgtccatcagagtgttgtgatagtgaatactaggtttagttcaggtgagtaccataattacattatgtaatcgttgatggtatcattgctttcttcaactctcaatgaaagtaccaaaatatttattgagattttcagaaactaataatttaaatataagaaccaaagaatagtaattcagaaaaaaaaaataagaacagcaaaggtttttacgtgattggcgcattaactaaccttagtctataagtcaatattattaagagagactagaaaagccttagggattacagaaaatatgaacactctatttttgcttgagtcagtgagccatgaatttccaaccctttgcatgcagggtttgtatggtatttatagagtataaaggttatactagttaccttatttccctttaatgaggagtttataaatataatattgacttcgggttggtaaagcccaacctatggggagctgatgtggagaccacatcatgatgttagttgtcaaaactgtatactatgttcgtaaggaattaatgacacattaattgtttgattttcaattacttgtttccttatttgagatatgatcttccatctaagattataggaaggtaatccctcatcttgtgcgatttggtaaaaaacaagaaactacgccagagcttctggaccacgatgaacgcttcttccagctatgcgattgcatgccttcctaatgctaatcatgctggatggattctcgtctgaacgagttgtttgccatttactcagaaggactaatggtttatagattcggcccaatgatgtcaattgggctcgttattaggtctgaagtattttagacgttgtatttattatttgggttccacttgtctcttgccaaaaacatggataacaatcaccttcatatcaatccatattgctgaatcagattcattataaaatatactaaaagatatttctttggatatagaattcaagaaccaataaatgacaatcttgttatttctaatccaaacattataaagaacataatatgtggaagagagtttaagatttgaaccatcaagaaatcaaaatttaatgatagaaatggttaattgcatcgccctactccataagacataattgtcatgtctagttaaaagttgtgagaacaaaatattacctggattatcttcatgatgcagatagtaagggttgatagaatcttcaagaggagttttagagcacgctacctatagacctggaacgattgaattatgtggctctaccgcaatttgaacagattcaccattattggtctgagtaccttgagaggtttaatcatcaataaatattgtttttcttggaagaaaaagaatagaaacactgcgtttgagagacgaagagaaagatataagggaccatttagttcattaaatgataaatctaattctgaattttctaaaatgtaacaaaaattgtaccctgaaatcaattttgtcatttttttttaacataaccaatttgaagccagtttctaacacaagtaaaaaaatataatcagtctaattataatacccttaaatcatattattattaaatattattttataaaattaaacttattgtattattttatacttcaaattaagggtgtgtttggaagtaactgtataattactaggtagggtaattactaggatggtaattatatagtttagtaattacactat

SEQ ID NO: 162130 - DNA, 1289 bp, Cannabis sativa
tttcttctaaaataagggaaactattgcaactactgctttcttcatgctcttctgattcattagaagacacttgagtcactccactagaaccagaagatgaagatgttggggctagattcaagtcagcccttttcttctcctttgtcatgaaatcataaaatacaggcttagtagtagatttaacttttcgaacaactatatggtccacaccagtttgcaagttctcatcttcatttttatttcctcttttcttcaaaaatatccggcaaagaacccaactttccattggtgctactaccacaggactctacaacatcaacaaaaaagaaagaaaaaaaatcaatatacatgtaagaaaaagcagaatgttgaaactgggttgagatattctattatggtttgctcacctggtgcaagctcttctctggtgttgctttggtttgaggattattagtagtattagcaaggcgatactcatgcataatccagtcagttctagtgccttgtggaggttttcctctgtaaaaaactagagtcttcttcatccccacaacatggttacctctagaagttaaaatttgcttgtcaatcccagttgccttccaataaccagaacctgttgccctgtttgatctgttcccattagggtacttggcttctcttgtgctgaagaagtacctctcttgctccaaatcacctaagccccaccaaaattcttaaccattattagacactcaaaacttaatacattatcaaaatttgatctttttcttttaaaagagaagaaagaaaagaagaaaacaaaagaaccaacctggtaaatcccaggggtcggacttgcaaacatcaacttcagggatgattgaagcaggtaaagggtaagagaagacctttctctttaagtactgaacaacaagctcttcatcagttgggtggaaccgaaagccaggaggtaatcttagcacaccatttttaacaaagttaagcttctccatataaattatgttatatgatatgtctgtgtgtttgtttgtttttttgtactgagagagagagagagaggcctaaataagaaaactgagacctatatgacccaaagctgaactcaacccaattgagctaccgttgaaccaaactcattgggtgcttttatagtccattgaaaagtatatgggaatatgacaaagctgattaacaagaacaagagagggaacaagaacaagaaggaaataaagtaattgattagataataaataaaaagggtgtgtttaagagagagagagagaga

SEQ ID NO: 162131 - DNA, 4591 bp, Cannabis sativa
taggcattgacccactaaactatttattattgaggaattcaagatatctctcctttctttctttgacttaatgattaacatatggaccattagtcaagaaaagtgactgaagcagagaaacagaaaccatcaccttttcttctcctcgtataaaagcaataaatcagtaaaagaatcccagaaacacctccaatggcagctacaactataagtgttactcgcaactttcgttcagatttacctatttgacaaagaaaagcatataatatgaatatgtagttaattattatacatagttaaataaacaaatgccaaaaagcggctcatatacctagctctgaatatggcattctgatataaatgtcttgtccaccagagggaaattgtcgtatatctatcaaatcaccaaaccaaatgacacagccactgccatcacctctaatatcagaatttgtataagccatacaagaacagttatttaaacatatagccctgcaatcctttagattcatctttttgttcaaccaagtatttgtagtatcaggcagtttcacccctgaaaatttcaaaaacccatctttatatctatcaacgcagctcaatggcacatttctcacacaaccatgagaccaatccatgttattccacttctcctgaaacttgggcttgaacccttttaaacactgacagattgggttatctcctataatacaattaccattgcccccacaaacaccatagaaatcacagtcatctcttggtaccgatgaatagcgccgccaagtttgttctgcttcaatccatgtaagacgctccctaatacttgtggtttgattcataacaattcttgatatcactgacttattcttgaggccatacacgtaataaacttcatcatcattgagaacaaagttaaaatcataaagtgggttaggccttaactctggtgacccacttagacgaaggccattccaaggtccagtacggtagaatttagcagtaccctttcgaatataagcttcgggaaaactgtgaagctttggattaaactcaatcccataagtgaaatctccaggacaaggatcatcactgcttctccaagccgagaggcgtcttttaacaccagtcctcaagtcccatcccattttcatgtcaggtaacaatgtatcagaagggtaatcaaagcttctccataaaatggtattagagttttcatctctcagtacaagatctccactttctaggagttgaagcttagtctttaaaggttgtttcaacaagctcgtggaccaaaccacactcttgttctgacccaaaagcataacatttccattactgttgtttatcttcaacaagccagaagaatcattaattgggctgcaacgatttgcaacccaaacaacagtcctaactggtacgttcttgtaccaaattcccaagtaacgattcttggagttgcctggactgaagaaacccagctcaaagcttgctccttcagaaaccaaattggcaccgtcgttgatagcgtgaaacccattgatagtatcaattactgcaaaagaagctgcggtaaagtgacttaaaactaatataatagtgaaagcccacatttttttttattgctggcacttggtttgtacttgattttttaaaacgtacaggcaatagagacccttgtagttgtaaagtttgattgtgaaattattgagccgtgacgactgagaagttgcttgtaggacacggtgttgactacgactaacaagttaagttcagattgagatcactatgaatatgattgtcatcaaagatggattatttggttatttgaacatcataataattaatgaatagaagaagcaacaagttcatatttccagctcatataaaaacaataaaggaaactagtggtgtagaaagaagcaataagtaaactttggtgttcaaccaattttatttttcaattatagccagcactaagggttcaagaaataaatgaagcaattcaattcaggatattagcatatgctcgaattggattgaacttgtgcggatgttgtttcacctcaaaaggaaaaagaaattataaaaaaataatgtataattatggggacttatttaatccctcacctctaattgaggattggggtccctctaatgggacagaaattataattgtatataggtgggaacataaaaagcgctaaaccgtgagagccgcccaacccattagaattcgcctgcatgaaaaccgccattaaaaactcgcaaaaattgggttgggttgggttgggttgagttttaatagcctaaaaggggcgggtccaacccgtacccgctaattatatttatataaagtttagttcttaaagtttttgtttttattttatttattttgatcttgtttgttacaatttttgtgtatgaagtttattttatcatagtctaaaattaatttaattatgaacttgtatgcctttttaaggatcttttttagattgttatggagtatggactttataagaattgttatgaaattttcatagactattattattatgtcttgttatggagtttataaagattgatatgaaatttttaagaacttttatgcattgttattagcaagtaaaaattttttgttgaataattttttttccttgtgacaatatactttggaagttttgattttaagcaacctaaaccgctcaaaaaaccgcataaaatcgcccaacccaaacttttattgggcaggtatgagttgtgattttaaaaaattaccaaataaaaaaaccgctcaacccaacccatatccagctctaattgtatacactaattgaggtgatctcattgtaaacggggcggttgggtcgaccctcttccgctatcgactccccccatcatctgtttgccttgccacacttcataccattaatctttatgaatcaacatgcgtcagcctcgactcgcctaagtcgggccgggtcagacccaactcaaattttttttttctagctaatattttttttaaaaaaaaaaaaataaacttttatatctatatatataaaaaattttacataaaaaaaaaagacaacttgttcactaaaatacttacgcactccttgttatctcaattttttcacagtatgatgtggcactaaaaagtttaacacgtgtcgaatatgtacatagttagacgagatatactcactcaagactctgttcaaggtacttcagagtcaagccgagaaaggtccataccttgtgcttttccaagcaaattcaacatgtcaagttgagttccctgctacgtaaaaagagacgtggtattagtatatcgttaaagatattttccttaaatatccctacaactctatttagagaaattcttatttttatgtgatttattttactgagagaatcatgagactcattgtttagttttttgaattcttctcatattttttcgatacattgcactaaaataattataaactttctcgagaatattaggaaactcatccggccgaaccttgtgatgttctttattctctaagtaatacaactaaaggggagtacactattaccataatctttgagctgaacttctataaattcttatattcttatttctcattattacaattttactagtaattgatcattcaatttcctcgctttaaaaactcagtgtcgttggctaaaagcgaggtcaacattcgtgctttaattgagagcaatcgctaatacgaaaagggatattcgcgacagttataaaaaatactatttttggataacattcgctaaaaaaattaaacgagcgtttaaaaccgtcaagaaaaatagggtattcacaatagttttaaagtgttgggaggtataggctacgatttttaaacgtaccttaaaaaatctcgtgtatttgtaaaagggaattaccaacggtttaaaactgttggcagttcccatgcctttcagatcaaaaatttatttccaacatcttaaatttaaaatttttatttttcccatcttaaattttagttccctccttttaagatatcaaccccccaaaaaaatcatatctcattttttcaaaattatatgtaaattttatttcatttcacggctctctctcctccgcgaacacgagccacgccgtcgctcttctccaccctctctcgctatgtccctctcctgcgctctctcatggcagcacaaaggtaagcacaacattctcttatatgttgtttaaatttctattagccatgatttggtttgttgatcttgatctgtgtgtgttcaaaataaatttgaagcttgcaaattgaagaaagtttcgaggattgtcaagtgaaaaacaatccaaaacttgtaaaagaaaattttaaggaggatgaagacgaggacaacgacgatggaggaggataaaacttgtaaaggttttggagtggttgtgacatatgcgagaagtggtttcgaaaaggatgaagacgataatttttcttggggcaatcccctatagcgatgatttaaaaccgtcggctatactataggccacagtttaaaactatcgtctatagtatagaagacgatt

SEQ ID NO: 162132 - DNA, 994 bp, Cannabis sativa
aaaaattataaacaagtacatttgttgctttgataagtatagtcttacaataaaacatacatgtcattgtcattgcttaataccatattcttttttcttaacttcttaattaaagaagagaaaccttcatgagataagataaacacataaggtgaaaatagatccctttatctaatccatctactatgagagtaggatccataactttattatctttgtaaattactatttagagtcctataaattttacaatgttggtactccaatatcaatttatttattgtttttaatgtgcaaacaatcttaataacaagctagatttatcagataagttaggcttaataactttcttatagagaagtaaatacttttgctcatgtatgtcttagctaagaatacttagagttaattgggttctgtaaagaaaatgaaaacgacatatcatgtgaaaaacgacaggaaaattttaatgaaaaacaaacattttaaacgacatgtcgtattttattactgaaaacgacatgattaattggcagttaaataataacgacatgtcaatcaaacaattaatccgacggatatgacgacagataaaattaatcgtagccgttgataacattacaaagccttataagaagtgagacctagcaaatagggtttcactttcttccttatagcactgaaattgagaggagtcgccgcagtgatcttcctccttctatccaaattttttatactctttgggtttattttcattcgattccgaggtagaagcttttgattttctatttcaattttttaatcaagtttcactatttttataattattgctaactgaatcatgcttttcattttcaattatgttatttcaatttcaattgttgttaattgctagctgtgtaatttcctgattaaagttttgatttttagatagagattatgaattgtgaatgcttttgattttcaattatgttatttcaatttcaattgttgt

SEQ ID NO: 162133 - DNA, 3157 bp, Cannabis sativa
  modified_base (2913)..(2916): a, c, t, g, unknown or other
  modified_base (3110)..(3110): a, c, t, g, unknown or other
aacttgctctgaatatcaagtgcatacacatccaaatagttagttccaatagttttcttccattaccacaaactggtagtagtgtcgtgataatatgatattaccttcatcgattttgaactcgtatggcttctcatcatcatggccctttcgagtaaacacagttccatcatgtaatttcccaataagtttcactggcaaaagacaaaagtgagtgagttcggtattaacaccataggtttataaacccgaaaagcatcaacctttttgtcatttcatcttaccttgaacaacagtcccatcattagggcactcatatccctcgccctccttcaaagtctttttcaagactctgctgtttttgcagatatcagtaacagtcttccaagagaccaactcaagagttatgagaagagtggcattaggaggtacagctccttccccattaacagcaggttcgcccacctcaccaaatccatctgtagattcaaataacattaatacaggggaagcccacatataaaaagactaactttagcaaatctcaagtgtcaaaaaaaatcatttatattcaatacatgtatgcaatggataggaatcttactcacattttggtttcactgtcaacatgaccttttctcccttcttcattgttttcacagctttggccaaggcagggcagaagtagcctgtaagattaaaaaaagataagataccatgttaaaaatctttggtagcatacaattatatcagataatatttggagattcagaaattaaagctttattgattagtttttcggtacatctcttcctcatattcttacacggattagcttagtatgcttttaggatcaaaatgtaaaatgagacttaccatccccaacagtaaactccactccatcggattttgaaattaaagtcccatcttcaagtcgaacttcgtaattaactgcatcaaaacatagtcatttgagtaaccccatatgatccaattgaatacataatagaagacaattgttagataacattaccaaatacttcatccaagtcatttggattttcccatttctctccttcaactaatactttcttgaaaatcccaccatctttgcatatatccttgacactggtccaagaaagcaactccacatcaaattgaagagtagcattaggtggaatggtgggaggggaaccagactctccataagccagctcaggaggtatggtgaatacagcattttcacccttcttcatggtttcaattccttcatcccatcccttgatcacttgtcctgaacataattttagtacaaaaatatatgatgagccaacaaagaaactagaattacttcactcaataatccttatgcaatcatctaaagacaatgcaagtgtcatgactagtctttcaatcaactacaatgacactctttaactatagatttccctagatagaaatgggctgttttatcctaaagacgacatggtgttagaatgccttgctcaatctgggcaatgccacgaaacgtcttaaagaaagcatagtccgtgattgaagttcattcggtcatggcactatctaactgtcaaaacatgtggtgctaatctttaatttagtactcagaaattaatgacattgtttacctaatgtgaaaagaaaaacacaatgaacaaccatagattgcttcattatacattgtttcattttggatataaaatttacagcatcagaaccactcaacacacattaccaaacaatggaaaacacagatataaaattatcagagaaaagcaatgaaaacaaagaagttaattaacaattgctaattaccttggccaagcttaaacttgaatggagtccctctatcacgactggaatcgaacttggtcccatcaagcaaagtcccagtgtaatgaactaacatacaacatcagataccaatcaacatcacacaaaatttaaactcacatacaaacaaaccaacatatatatatatacatataaattattcaaaaatctccataaacagagagaatataccttcaacttcatcgccagagctaggagtttcccaaccatgaccttccttaacaagcttcttcttcaaacctttactcccaatctctttctcttcaccaaccttgagaattgggctgattgcgtcgtcttcctcattgacatccatttccatatcctcattcacatttccagcagctgagaaatcaaagtcatctgccatgttcgcttacaaaactgatgaaatcaatcaaaatgagaatcgaaagaaagatgaaatggtttgtagaaagagagagatcaaatgggttgtattgtatttgtatgacaagttaggaaagattgaagctttagtgtatttatagcgagaaagagagtctggagagttcgaaaatggaagatggttccagaaatctctaccattttcgtagctttggatttttgacacattctctctctctctcttctctctctccttatatattttttatttatttaattaaggtaaagttctataacatttttatttttaattttttatgggtttttatcagttttaactaaaaaaaataacaatattataaaaatactttcagctcgccaaataaataaatatacagcttaaataaaaaaaaaattacacaaataccatttacacaccttcaacccagcatatatgcttcttgggcaactatcccgcaaccacgcagcaacccaacgaaaccgaaacaaaaattcaaccagaaagagaactaccataaattttggcgacttcacctgagaaaacgaccagaatcaattaaaatagggactgtttcgaattcacgaaaaaaaatgtagaaaaactattacgaaactaaaattcaactggaaatccagtttaatttgcataannnnaatgtcctgacttcaattttcagattcatgaaaggaagatctcaaaaagttaaactagagttcccaaacaatcaaactcaagtataatccaaaaaaaattacattaatactatagtaaaatatttatctggtgtattttcgttgtattccaaatttttaatggtgaatttgttcatattaaatcataaagaganatgtagatagagttacgtacgtggaaacaatgttatgatttttaatg

SEQ ID NO: 162134 - DNA, 2286 bp, Cannabis sativa
  modified_base (2042)..(2047): a, c, t, g, unknown or other
atatatatatatatatatcaatgagacacatgtaagcaacacatgtataaatacatggtgtatttactaatatttttttaatcaagtttttattttatttttaattaggaaaataaaagtattttctaaaaatacgttttataaaactattttctcttttaaaattttcaattaaaattaaaattttaaaaaatttgaaaaaaaaaaaaatctctttcaaaatttttttagacagtttttttttttcttcatagtcaatattttaaactctaatcccaacctcgaccttgggatccggactccagcccctgcctcaatcccagactcataccatgaccctgactctagatttgaattttaacccgacttaaataaaataaacaaataaaaaataaaaatgaaagttattgaatacatttttattttttattttttaagttcaaaaataaaaataattataaaatacatttgctttttaaaaataaaatttcaaaaacacaaattttatttttatttttatgattagaaattaaaaacaaaataagtgctactaaaagctccacaataaatttaaattaaaagcctacaaaattggaaaccaaatggaagaatatacacaatattggctgaattatatattctcgatcgtgttcaaaatcaaaatatgcatattcaaattacaaacatgacataagaatacgaaagggaaaaatatatataagaacataattaaagttatcaaatacatttaatcagaaaatgatccgctttccgctcactgtaattaatgtactttcacaaaatcaataaaagttaggaaaaaggacacaacaaattttataaaacattttgaaaaataaaaacaataaaaggaggctaggaaataaaaacaatcttccaaataagcatgacgaatatattggagaacaatatatgtaatatatcgctgtatatattcatcaacacctcttcatggcattaaataaactaattagtctttattaataaaataaggtattactgatttttactctggtcttcttcatcattatgatcattcatgcacgtacgtatctcaaccagtgtatctagcgcaatgagtaatggcactgcaaccacgcttataagggttagccctctgcctcttctggcaatcatagtaggactggccacggcggccacaaggcaccgagttggccttgagagccccgtagccaatgtacgagcgtcccctggccaacgctcgccggcttgcctcggagtccaacaaattctcattgtcatcaccaatgtaatccccaactcggcttgcgcttgacacggcatgatctaaatggttcaggccccagctgggctcggagaatgagtaggcctcggctgctatggcagctgccaagagaaggaaaactaggcacagcttcacctccatatagctcaatcggtctctatgcccttcctattgaaggaggggtggaagatcgagaaggatataggattaaaatttgggataaaaaaagagggtggagagagtttttggaatttgaattgaggccttttgtggctgtgtttctgttttttctttaattattttaatgctaattatgggttttgttggggttgcttgtgcccgtttgtttctctcctttgtctatttgtttgtggtatggcgattaaatagatcgaattgaggttgttcttgcataaatattctattttgggtattttgtgatgattttttttttcttacaacagacaagtgatcatgcaattattagcatagctagcttcccacgatgaaattttatctctcttttatttctattatacattatctaagtgattaaactgttttcaagtgtgtagaatttgtcggacatagtatacatatcaatggaagttaactaacaaattacctttttttttttgcattaataatatatacaaggaagaaatcacaaaacacttatacaaagaagaatctaagaaattgattaaataaatattacaatacttatataatcatcaataaatatatatatatnnnnnnatatatataaataaaggaaagcactaaataatttaagtgacatcctttacattttttattctattttttaagagcttaaaacatttattcaataaaaattaaataaaagcatatgaatgcattaaatatgtaatagtaaaaatttatttatttatattcacattaatttatagcattttaaaactattggcattccttataaaaaataaatatatttaatttttatttattaaacacaa

SEQ ID NO: 162135 - DNA, 1586 bp, Cannabis sativa
  modified_base (1551)..(1558): a, c, t, g, unknown or other
ggtaaaatatattccaacaacctccaccctacagtgaatttacagctccttgttttctaggaatgacgagttgaccatgcgttataccctgtccagggtagattatcagaatccatacccactaacctagatgtcctactcaggccaaagtttttatcttgtctttcaaatggtcacatttgttggtggtataaccaacatctctatgatactcacatcacttgctctaatccctttctttcttccctccttgttacattttaggataattcttgtaatgaaccatattgcaagttgccttgtatactttttcttgagtatcgatcaagttggtatactcagtttacttctggtcatacctgtttcttcctttctttagaacctcactccggttctgaatctttctacttctcttgttctgtgattgacttacatttgatttttggaacttttgtctttgcttgtttaggagtggcactacatatgatttgtactgctccgtacccagaaaagttattctgagtaggtttgtattcaaaggtagctggtccatagattgtgggaatcgtaaactacaataagctaggggagctttccttttatagggaaggaggtccaattaaattacaataaaataatagaaaagtcgcatgaaattcgccaaaaaattctacactaactcgtgagttgattttgaggcccaaaactccaaaatcatggcaacagtgtgagacacacctagatccacctttaaaagcgctttaatatgccatttgaactgcaacatttagataaacaatgagtgaattatggatattttactgagtggtgtgcattattgaaaaattagcaaactaacttaacagcgaccaagttaccgcaaatatcatcttgggtgcctagaacttgcgctttttggggtttctgtatatttttatatgctaaatgatgtgaagctattgttagttcattctttgattttggtgaagttatcttggcaattttactcgatgcaagcatggagatcaccgattgtggctgggtgacgaccgggtgatcactagtgcgtgtaggtatcggtggacttgtgcgtgacacgtgtaaatgagataatgatttgagcaatcatccaaatcttattttagaagaaaaataagattgattcctagacaagaactattttttgatggacaaaacactatgctctaggttgaacgtcaacctgggcgcccattatggtgcctggtggtgcctgtggactaagccaccactcagaagatattttcatcgaatcccaagtctcatatcttgttttgggaaaaaaacaacaataatgctcgagacaaaattgcaatcgaatcgatggaattacatgttcatgtagaacatgtcaacttaggcacccagtgtcaagggagttgagctggcgactcataggcagtggcttggttaacggaaccatttggagcatagcaaaagcgagtcttcataggaaaattgtcactgcttatggacccaaacttgggtgatcttgttggaatttattttacnnnnnnnntagatatactcacaagtatgttgtttaa

SEQ ID NO: 162136 - DNA, 1713 bp, Cannabis sativa
taattattaatgtgtattattttgtattagtttaattggatcagatcaataatagcatcattttattcttgattgaattgacttcttgaaataacagtatattttattaatgtaaggagtttaattcgattgaaattcatattaatagctttgtagataagatagagacatttggattcgacaaattagttacaaaattaacgacatcattgtttttcattttttcttaattttaaatttttttttctctttcaatttatctaataatgttaataataatttttgaaaaagaaataaaaagttttacataaaaattaaaaaaaaatgaaaaaaataatattaatatatagaataattttatgataagtatacacttatttatatatatagcatacattatttaatatatatttgtgtgcagcaaattaaaaaaaaaaattagacagttgaaccttgttgaataaaatttaaaggttttatatataaaaaaaataaataaaataattagactgttcactaacccattacaatataaacattgatgaaagaaaaggagttggtactctatattattaaaatttaatcacttcttccattattcttttgtttcttttattttttggtaagatactttttcttgttaaaagtatacgagacttctcacgagtctcaaaattggactccacatgtaatctattaattttcttacaaatgttatggttaggtgcagtgacatgcagacccgaaatttaaagtaagaagaggtataatttatttttttgtaaaactagggcaaaagtaagttaaaaaaaaaaaatatatttttagtgggatttgaacccttaacctatatcatatatacaatttagtttgactattacaccaaagctactattatgtctataagtatcatattatattacaaatatatatcgttgttgttatccatgttttcacgcataagacatgtggtatgattaagggacaaagtgtattaacgaaaaggattaatcgaaatagctcgtaaggtatcccagggacaatcctggaagtgtgcattagacacctgttggaacgagccatttgcagacaagtaacatctcttaaaccagggagtacttgaggtaggcagctcccgaatggaaatccctcgggtgatggccccggggcgtgatagcagtctcatgggcaatgaccacgtcagcgtcatataaaagtcgctctatgggtggttacacatttttttgacacaagatcagatcttatcccccatgccaggccatggtagtgcgcgtacgcacctctggacatgctttttgcccaacgacctggttagagagtattttgcaaaggagagaccttcgcacgacacgtgtcctgatttgtacaaaatcccccattgtagctatacgccacacgatgaagaaagttcttatcaaccaatggttagatcgtcctatggcaatatcagtcttggcagtgggtagagtacgaaaaggtgtgggtaaagggtatgcccttaacacgtgtgtgcatataaatactcctatatttttatgagcaaggaagatactctgtctacatactcattcatcaaagtctctgagcactctgacatttattcaatagtaatttaattaaattaaaaattggcttttagttaatacttaatttatttataaattaaattgagttaagtaagtaaaaaaaaaa

SEQ ID NO: 162137 - DNA, 5772 bp, Cannabis sativa
accagccgcagcggcggatccagcggacacagactgctggtaatcttggagagagtatatttgatagtgaggttgtgccgtcttcgcttgttgagattgctccgattcttcgtgttgctaatgaggttgagtcgagtaatccgagggtcgcttatctctgtaagtttattatttggtttataattttctttgaatgcgtcgtttttgttgcctggtttcgtatatggtattaaaattatgatcttgtttctacttttgtctaactcggttgataatggtttttagctcaaatggtaagtgcatatagcgagaaactatggtacatttctgaaaatgtagatttaatttaagtgttttttttatattttttggtcatgtacacaacaaatcatcttggcaaatggtttagtatggaaatgccagttaatgtatcatgagtttaggcttagtttgtaaatgcatcttctttcgctctgtgcctgcttaaggcctttaagtatctcctttcagcgtacttctatattgtcttccttgtttctattttatgctggtgtagtggatgtttcgctagaattgttttcccttctatatgtatgcattactgatgtgaaattttgtttgcattctgtcgtaggtcggttttatgccttcgagaaagctcatagattggatcccacatcgagtggtcgtggtgttcggcaatttaaaactgctctccttcagcgtcttgaaagggtaatttttttgagtcttggtggctgttataaaccagatttaatagtgtttttaagatttcttgcttgttttcttttgagtcctaagctatattgactctgattttcaggaaaatgatccaacattaatgggaagggttaaaaagagtgatgcacgtgaaatgcaaagtttttatcagcattactacaaaaaatatatccaagctttgcaaaatgctgcagataaagctgaccggtgggttatattttatgtctgggacgatcactttggtttttgcattagttgacaatcaatcttttgctgttttatagtgcgcagcttaccaaggcataccagactgctaatgtactctttgaagttttaaaagcagttaatatgacgcaatccatggaagtcgatcgagaggttatacacatttacctgttatccttcgtgctgtcttagtttcctgtatcactctttgttgaatgtttttcctattttgctttttcgtgagctctagtttggacctttatttttgttcctcatggttgatgaacccagattctggaggcacaagataaagttttagagaagactcagattctagttccatataatattcttccactagatcctgatagtgcaaatcaggcaattatgagatatcccgaggtatgtttgtaacattcaggctttacaatcacattgcctaccaacattcctaaattagactggtacatttaacttttataattgcattgcctttatgttttattctaatttttattgtaattttcagatccaagctgctgttgttgccctccgtaacactaggggtcttccttggcccaaggaccataacaagagaaaagatgaagacattttggactggcttcagtcgatgtttgggtttcaggttgtgcatttggcaaaaaattcaactgttcttttacagtgcactaaagttttgcatagcgagccatagtccttcacatgttgatgcccaattgacatcctttacatgtttaatcaattttacagaaggatagtgtggcaaatcaaagagagcacctaattttattgcttgctaatgtgcacattcgacaatttccaaagcctgatcagcagcccaaggttgtaaattataattgtttgcttttcttttttttaatatgaaaattacattgatgtgactaccttctgtgtgagattattatcataatattttctgttgttaggagtcttttaccagccatattcaatctattgtttcctaattatgagtatgtagaacttttagactactgacattgctgacaaggtcattgtcttaagcaagatagaaggtgccacatttcctattttgtgtagtcaacggccaagtagtcaaattgtagagcctatatgattgaacttctggtatttaagtgttatgacttatgatgttatctagaaaattgtagaaaaaagaacatagagtttgtcaatagtttataatttaacttttataaatggtttctgactagtgcatttattttgttagttggatgattgtgctctgacagaagtgatgaagaagctcttcaagaactacaaaaaatggtgcaagtacttgggtcgtaaaagtagcctttggtgagtgctttttgtgctgagctatttgtcattagattttgaatgactttgtatttggttcattgtgaatgcctctaatttgtaatttcttgtaatctagttaatgagaataggaggttacagccttgggggttttgttaactttgtgcattatttaatttctcaatgaactcaattctttgtggatttaactgcaggttaccaaccatacagcaagaagttcagcagcgcaaacttctatacatgggactgtatcttttaatatggggggaggctgcaaatttaagatttatgcccgaatgcctttgttatatatatcatcatgtatgcatctttgtatatatatacatatctctctaaatcataaatatagcagcagctccagtgaaagtgttttaatggttaaactaaaatatgttgtagttatattatgaagtatagtgagtaatattcaattttattttttctttcccttgaaagaacataaattctttcaggagtttcgactaaagataagaaataaagataaggaattagacaacttctctctagattgacaaagaaagtttcctataaaatagaaactaaatgctatatttctacgaaccggtgctaaatttaaaagcgttcttctatcaaatgcacaatggatttatatttattgtacttttttttcttctgtttctgttcttagatggcctttgaattgtatggtatgctagctgggaatgtcagtcccatgacaggtgagaatgtgaagccggcctatggaggtgaagaagaggctttcttaagaaaagttgttactcccatctatgaagtgattgccgaggtagattatgaatttttttttctagtatattctttttgttgtttagaatatttgaatggaagacactaactttgtgctttctttaattttcatcttatgattctgttttgggtggcaggaagctgaaaggagtaaacgaggaagatcaaagcattcacaatggaggaactatgacgatttgaatgaatacttttggtagtgcattagtctgtttataattttcctcattttatactagtcatcaaattattcacagcaatacattacaggtccgttgattgcttccggttaggttggccaatgcgggcggatgctgatttcttttgtatgcctcttgaacaacgccgccttgacagaaatggggtaagcacttgctttattttgcactaatactttgtactctagagtgaagtcagttcggattcctggggatcagattttatcataatatttttacattctctaccaccccttcatgcatttgatgggatgctcttatgaacttgttatgaaatcatcatatatcagtcagaattttgctatattacggaacctgttagtcatattactaagatgtgcacacaatatttgtcttccatttgctttttaatttcctgtttccttgagagttgggcacattattggttttgatacaaagaagaattgaacccgtgtctcttcccccacaaactcacacacccagccacctgaattataggctcaagtagttgtgtacatccttgtttatagaaggaaaataataaataaaaaaggtgtgtgattggagtcagattattttgtggatggtgcacaggaaaacagcaggccaattagcagtgatcggtgggttggaaaagttaattttgttgagatacggtcgttttggcatgttttcagaagcttcgaccgtatgtggagtttttttattctttgcttacaggtattaactttgtcaattttcatcacgtttctttcttattcttaatattgtgacatgatgcgaaaaatgggtattttctacaaggctatgattattatcgcgtggaatggtactggacaacctggtgcgatctttagtggtgatgttttcaagaaagtgttaagtatctttataactgctgcaataatgaagcttggccaaggcaagtaaagtgtgcttttctctttccttacctatttatgaaataggcctaatgacatgcttattctctatttacttcccctgtgaagtataatagatgtgtatgacaaatggattttgaagacgtagctaagagtttgttggacttgagatttctcattgttttgactggcgacattgataatttatgaaatagctgtgatgtagtttttccattgagcctgatggtaataaaaaaagattgaggtatcctactaacttaaaatttaccatacgttaaatccattatttacaaatacatattttgctcaaaaggattcaaatgaataaatatctttaaaattttagcaattaagaagccaaaattttactctactacactgtaaactgatatcccattaaccacatggctggtattgcacacgaagaagttggtagagaagaaaggctaaggaacttagcaactaaggaacttagcctttcttgtttcttcatttatctggcattgctgtaaactgatatcccattaaccatcggaccccactctgctgaagtcgaaagaaccctattcttgtttcttcattaatctggcattgctgtatgaaaaatggatttatgaatttttaatttgttcattgtgtaattagttgtattgccatgtgcagcttttcttgatgtaatacttaattggaaagcacaacggagtatgtcatttcatgtcaagttacggtatatattgaaggttgtttcagctgctgcttgggtgatagttctaccagttacttatgcttatacttgggagaaccctcctggatttgctcaaacaataaaaaattggtttggaaacaattcaagttcgccttccttgtttattttggctgttgtgatctacttgtctccaaatatgctggctggattattgtttctatttcctttcatccgtcgtttccttgagagatcaaactatagaattgtgatgctaatgatgtggtggtcccaggtaagcaatattatgatattttgacatatttcagctttttaagatggagtctaaccttttgattttttttttttttgtatttgtagccacgcctctacgttggcaggggaatgcatgagagtacattttcactttttaagtatgaatcagtgttcttattaccggaatcggtttatttagtatgatccctatgctcaatatgatatctggttaatctgttttaatttttcaggtataccatgttttgggttctccttataatcacaaagttggcattcagttactatatagaggtttctttctactctctattcacattcaaagtgttgtactttgatctactagtttaatttttggaaacgagttgaaatattgttctttaattgccaatgtcatggtacatctttttttttttttttttttactttttggatgcatagcctcaaa

SEQ ID NO: 162138 - DNA, 3722 bp, Cannabis sativa
  modified_base (2948)..(2958): a, c, t, g, unknown or other
  modified_base (3605)..(3629): a, c, t, g, unknown or other
ctttatatagaatagatattgtatgaattcttatattttcattattttcaacactttcaaccaaaaaggttctattgcaaaactaatagtaacttaatacgttactatgtactataacattcaaaaacaaagaacaattaaaaataggattaatttggtgaccaaattaccttttcgaaaattgtaaacctaaatgataaaaaattcaaattattaagttaggacttaactgtgatacaatttcaaaaaaattggactcaatcgaattatttgaccaaattgttataaagtggggtctcaagactctgatcttgaatagaaaaaaaaaaactttatttattattgttattattattatataacatcaacatcatatagcaagttgtagcaaaatacaaaattaaaaaaagaaatatatatttataaatgaatctcgtgatcaattcagtaagcattacaatttacaagttgttgtgttatatcttattaaggcccctcttatattatgggatattattgttataaataaaacaagctacaccacatgatattatcaatgtattattattgttattttttataaataaagctataagtacttaaaagtttaaatttataagtaacataaattttatgtttattttttaacgttataagtatttaatatttatataattataatttttttttcaatttcgttagtacaaatttgttttaaatttattaaaataataatgggaagtaactgatactacatatttttatccagattcaatagtctagaatttgtgccttatatatgcattatttaagataataacagaatcgacgaaaagagaaaaatttcaattttacaaacattgaatacttattctgttaaaaatagacattaaatttatgtcacttacaaacttaaatctttagtacctttgctgctatttatccttatttttataaatatttgggtatatgacaaacatatggttttatttatttattttttattaaaaaattaaattttattaccatcaatatcaactaccaaattagataacaattcagttaaaatagacttcaatttcagttatagtaacatggtatactatgtgttttatttaaatacaaacttttttttttattatttttaataatattaatcaaattgataaatattggaggtcttttagtatttctttaataagctattttagaactcattaaccaattcgagatttgtaggttctttttcgttaagcgtagttgtaagtattagagtcactagtactactcattaattaatgaactttattgttcttcctaaaaaaaagaattatagaaaacaaaagatgttaaattatttatgaatttttataaaacacaatacattaccatgttttctttccttaattttgggcacatgcttaattaaaggaattaatgttattattattattattcttattttagactgtgtgtccaaattcggtaagtgattatagattaattatttgctgtaatgtgatttaaaaagtggcgacaaaaataatttataatagattagagaagtgcttcaagatattatttctgaaagttaaagtggctttataaaaagcaaataatacacaacgttatagtttgccaagacaaaggctataaaaaaagagaaatgtgaaattctatacataaccctaatattatttccctaaacctaaatgttataccataggtcatatatgactacatttcttttatccccataatacccctcacatttgaaccaaaccaatctaaagcttctctctctcttgcccaaacgcacggctcacctccacgactcacctccaccacctccgacgaccaccaaggaccacccaccacctcctacgaaggacccaacccccctctctcttcctctctctcaactcgtgagcctcaacccactgaaaacctaaacaaaaaaaacaacgggtccgatggtcggactgtcatggggtccgatagtccgagtgtcataggaatacgtgggtccgataggtgccaaaagggggtgttgtttgggtctgatggctaccaattgtgttactactctttgcttctgtttatagtgaatgagtctttacatgcttgtcttcgtcttcagggatcttagataaagaatttaatgtcacctattctgtttgtaatagacaaagaaagaaactcaatacaataccaaatatgtaaaacttatagatcgatcaatatcataaaatttattatgattaaaaaaatattcaaaattcatcatcaccaaaatattgaaaattaaaccttttaattattacccgaaatttgctctacaacttttgacacaagaaaattgtttaaagaaaagaaatttcctctactcaaatatatattttcatttaatttttgtttctttgttcttgttgttatgaaaaagcatctatcttgattttgttttgacttgaaaaggtttcaattatatattcaattataactttttaagtatatatatccaaacaccgaatacataaaataacatcatcacatgcatgaattgcataaaccacgttccaatctctattatatataataaaatattaatttaaaaatttaatacaaataataaaaaattaattttttaaacataatttaactacttaattaaaaataaaaaaaaaaacatatttttttacactatatcaaaaatatatttatatgtaaaatatttaaaacaaattcaagttttattttgtcgaaaaaaaaaacttttttccttataattttcttttttaaccgatgtaacaacctcagttcatataatgtaaaaataagcgatttttttaattaaataaacaaattaaacataaaaatttaaattttcttaatacccatttatagataatactggttaaaaataaactcataaatatatatatatatannnnnnnnnnnatatatatttatatataattttatatatagctagctagccattgttgatcggaattgtttttctttgacttactacagatacccttttgtactctttatcctaaaactctcttatatataactatatataaaagctctcatcacaattaacatattatcgaaagccaaacacttaaaccctaacatatatactactatatattatgtatataaggatgaggaaaatgatgatgacgattatgatgataatggttatgatatcatctccttgttgtgtttttggtcagctaagtaataatttctatagagtgagttgccctaatgctgagcagattataaaacaagttgtcaatgaagaatttgcaaaagatcctactattactgctggcttacttcgtatgcactttcacgattgctttgttaaggtaatatttataaatatatgcaaattatataattatagagaattgctaattaaaaagtactatgcacgcaaattatatatgcatataatttattacgtgtatatattaaaattatatatataaaatatattaaaatttgaaaaacaatatatcaaattgagtaatcatgtatttaaaaaaaagtgatgtgtgagtatatatagggttcgtttggaacgccgnnnnnnnnnnnnnnnnnnnnnnnnntattatattgaattgtattttatgtaatataatttttatgtaaaactatatgtgatattaatttttatggacacttaaatatataatatttta

SEQ ID NO: 162139 - DNA, 2411 bp, Cannabis sativa
taaataaattacatacccattattctttttgaaggatgagttagtagggagtttgggttgctcctacatacttggttgtcaagctaagactccggcaaggatactccggtaaaagtgtgtatgtaactttgtagagaaaaagatgagaataaaaaaaaataaatagaatttagtttattattagaagaataaatttagtactaaaaaaaataaaatattttatttaatattcaataagaacaccatcaatataatgcattaatagtcaaattttccaaactaaatatgtctccatgttctttttcacaaaagattggaaggtcggtgatgttggttccctttataaaaatccgtgttcccaatcatgaaaattcattcctcaaaaacctagctcactcgtccacgtggattctcattctatggtgtcatctataattggtagaacacattgacaatcgtacgccagttaacagagaatcagttcttagataaagacaaagagccaaaggggtagcaagagacaaaaacaaatgtaattacgaaattggcctttccttcagtctgggtctgaaaaatcgagcggaaatccaacaccagatttgcaaggcatagagtctcccaagtcttggcattgactctcctcaactccctccttctttcttctttcttttcgcattttcccgcactttctcggaaagtttccttgaaaattcccgatcaggtaagcttaccccacattctcttgtttctttttcgtgttctgtgttgccagtttcggcagaaatggcacccgagattcttcggtttatttattttgacggtaagttatcccagagattctaatctgaaaatattgtagcttagtgttcttttatcgttttttcactattttttctatttctcaaactgatatttagaaagtcaggataaatataagctgaagtgaagaagaaagaactgaaattgaaggtttaatattgtatatctggttatatatgtttttgtgcctaagatatgattttgataatcctgaaggaaacttcgtaagttccataatcagaggaaattacgaatattggattcattgatcatcatttcaattggtgacgatttcattttggtttcaggtaatggtgagtaaggaaaaaaagcgtttctatgacaacttttcaagaaaagagctccaaaacatgtgcaagcagtatggtttgcctgccaataaatcacactcagatttggaaaaatcgttgattacctacctagaggtacctttgatacattaacattacaataaaaaacaaattgtatggacaaaacatagttcatatagtaaaaggaatataaataagggaggcggttgtttttcattttcattcacttgtgtaattatctgtttgaattttccttcacataattagtgatgttgacaaggactcatttaatttctgatcttgttactgtgcccttgagaaaagtttcctgtttgaagtaaattacatcatatatgagaaaataaagaggtgatgtttttggtattatttttaattttttatataaaagaattacttctgtaatgaatggataaattagggacttgttcttgtttgccaatcagtcatatcattacttactcacctagtatatgtcttgtaatgagtgaaaacaacacaaatgagatgtcatctttgagaagtttttcttgtcatatcattcatgaggagaaaaggagaagatatgtaaacccaaatgcataggaggatactttggaacatatttttctttccttgggttatgtcttcttgaaatgtatgaattcattagacttaccgtggtgagtatttagtgagttttctaactttttcagatgaatgaagatgttattgtcattgtatacttatataatagagggaaattcaggcatgagtgaggacttttgcagttttgctgtaatatatgacaaaaattcttccaagctaaccaataaactgtcgatgatagaaaatttctatattacttactagttgcctaatagattgtacttcagcttttttatgtaaacatatcatcatctcttttaggttagattctaagttctcaagaaaaggatgtatcaaagcttgagagatggtagggtcatatactattgtccatctggtgtcctagaggaagataaccaagaaaatcctcaaaattgtttaaaccagtgaaccaggttgtctcccgtaaaagaaattttatgataaggtttgctttcctgccttgtaaatgtatttagcacagtaacatacttgtaagagtaaaacttttatcttccaaaaaaaaaaaaaaaatcaaatacataaaaaaattattaaaatttttcttatcttatattggaatgatcattccttttattttaaattgcaaaaatg

SEQ ID NO: 162140 - DNA, 2242 bp, Cannabis sativa
caaggtgttgttggctagacgtgctagtgcattgtttgttgcactcccttctctggggacttaccttatagtatagcctttgagctgacttagtaagtcttgaatcttgctcaaataggctatcattttttgcctcggctgtattttcacctaggatatgattaacgaccaactgggagtcgttgtatatgtccaggtaatctgcccgcacttcgtgtgctaacttgaggccagcagttagagcttcatattcagcttcattttttggaggctttgaaattaaactatttttccctgtgcagctattgccccatatgtaatgagggcaatgcctcaaaagacaagtggtcaatacagcttccgtcaacatgtaacttctaggctgaattttcttgctcttgctttttctcttgctctcgctttttctctagctcttgcttttctcctgattcttgtgagattttaggagatatgcatgtgcatttggccacaaagttagtattagcttggctttttatagccactcttggctagaatgtgatctcgtcttggctaagttcaatggcccacttgaatagtcaaccatatgcttcaggtttttgtaacacctgtcacaatggctagctggttggtgtatattgtttcaagagtttttgtaggagaatgaagcatgtgtacttctcctcattcttgaatttcccttttttgatattattttgactagagtcattgttattgcgtttgctttcattattcttattggttgagggttggtcggtatttcgtatgctggctggtatgttggacataaattgggcctatgacaccctgagcctgtccaacactagcatatcttcctgtctgggcctgccggacagcttcttccaactttatgaagccattagctcactcaaggaactctttcatgttgttcgttgagatccttttgatatctttccgaaattcacttaacggcaagatacctccaagtatgttcatatatcgaccttcttctaataggcatttgaccttagtggcctcagccatgaatctttgaatgtagtctttcaagggttcgccttgcctttgttttatttcgacaatgtcctctagttgtgaaggtatttgcttacaaagatgacatggtccacattttcccgcaaattccttacccaatttgggtaatcctcgaacaattcctacatttgataattttttctaatttttgtaatgaatgtgtccaagtttttcacgccataaattagtggatttatcaatagcagaatgacaagtaacataggtattgaaaatgtaacaattatcattaaatctaaaaccttgcaaaataattttggcattgatgttaagaacataacaatgattactatcaaagttaacactgtgacccttttcacaaacatgactaatgctaagaagattagcctttagtccttcaacctatatcacattttaagcttgggaagactttcaaaattaagagatcccacccctatgacttttatagctagaccattgccaaaagtaactttaccacattgcattggtctaatgtggttgagataatctttttcacctgtcatatgactagaataaccactgtcaaaatactatatttgagaagcaatagattgaaaataagaagaatcaaccaacatttatttttgacggcccatttatttttttagtaacatattcatttccaaactatttagaatcatacatctttttcatggtaacatatctaggtcaaatgtgacatttattctacaaaaatagcataaaggaatgaaccgattcctttttcctttggagtttccaaaattaccaaactgcttcttttttgtaacaacaatgcactttgctacaacaatataaccttgcaaagtggagtcagaaattccataaaccaaactttcagattttacaaatctagagttttaacaaaatctaatccaacatgacttatttgcccagatttctggacttctttaaaatgttaaatcctggatttagcattttaacattcctttaaaactttcaagttccttagttaatgatacaattttagaagttctcgaattcaactcaaaatcacaacatttatttttctcttcatggtctttgatgtcgtgtaataatgttggatatattttaccaggatttagatttactaacaagtatgtttcattaacatgctaatatgaactctaaaacaatgaaa

SEQ ID NO: 162141 - DNA, 1033 bp, Cannabis sativa
tatgaacttattatataccatataaaatgcatatgaacttattatataccatatactatataaaatgcgtattcaaacaaatcaacgatttgcatggatttgtttgacttgtcaaaagtcatttatattgattcctcagttctatcatatattattaattctatgatccaaaattgtattttgttttcgtatttaaattatttaaatttttctatagttatgggtaaattaaataactctaatctcttttcgtaaaaaaataataataaaaaaaaatataatctctttcatatttatttaatttcattatatatatattcacaaccgaaaagaaaaaaaaatagttggcatactgctttcaagctttttttcttcttcttaaatttatgttaattttattgtcttacttcaactacatcatcatcattatgatcactatcattattgtctatatatataacttaataaattcatcaaccttcttcagagtctaataagtatactcttatagagaagaaataaataaatacttgttaattgtctatttttcaatttcatatataaatgtcgtgaaaaatgaaatacatcttcttcaagtctactatgtattaattaaaaaaaaaaaagtctactatgtactccatttcaaaatatatactatctactattttttttagtgataattcaatctaattatttgatacaaatacacttaacaacatttaatagatactaattaaagtatgcttttaattctctctaactcaaaactggaagtcgtaaggaacgataccgaaatctaatgggatctaatcctaccaaaatctggatttgtgtttcaacaaattaatttcatcaaatcaactttatgtttgtggctgatattgagaaatagtaaaagaaattcgtgtcttattaaatgtagaatctgaaaattatcgaagatattaccgaaggagaagattattgtattgatcttcttgattgatgccaaaatttttcttttgtgaggggttcaatagcagtcgtctga

SEQ ID NO: 162142 - DNA, 2385 bp, Cannabis sativa
ttcgaagtcaacgatattttataacatttttgcattaattatgattttttaatgcaataagattgcttatagctttaagatttgaatccaatatagttatagaaattagtatttattttggtagaatctggtaacacttttatttttaaattttgtaatcacaaaaataaaagtaaaaccatgtttttattttagtttttatttgttgattttatttaagtcaggtctgaaatcgggtctaaactcaggaccgagggcgggttcaagtccagggttggggttgggttcggttttcaaggtctaaattgagattagagtctaaaaaattgtttaaaaaaatattgaaagtgttttttttttgtttttaaaatctagattcttaattaaaaaattaaaaagtaaaaacagttttatttaacatgattttaattaaaaaatatttttacttttttaattttaaaaataaaaaattaattaaaaaagtgttaccaacgcacccttatttttcctttttttattaataattgatttttatattaattaattacaataataattatatatgattttattaaagtatatggtaactgatttgttattttgtttgaggtgtgttattatattagttttattttgtttggtgactataaatagatataaaagatttgtataccacatttttacattaagtaagttttttatttttaatttttaaaatattattttgtgaatatttctttaatatatgttaatatttagtctactaattcaaaattatttattttgtaaggaaactcactgctcaagatagctatgatgatagcattggattggtctcttatgcttagctttcgactttcgttttcatttttcgagactaaccaaatttcctttgcgttctctatgagagtcatttatttgtagtaaatgtagtgttagtttactttccaattatcatgagtcattcctaatatccatgttcatagttatgaattagcagtacatgcacttatggtagacagtaaactattttagatgggattcccatcctttcttcttggtgtatttcactcttattattttcaatagaatttattgattgttcaaaaataatatagaaaactatatttttttctagatcaatacatacatggtctaatttatacacttattatatattccaattagatcaaagaaaattgttattagttagtataattattttttacgtatgattaatgttgacctcaaatttggttaactgacagcaaagtcgtttactgatgtttgacatgtgttacacaataaaaatagaaaagtaaataagacacgagattttataaacgttcgacccccttaattaccgagtaatgaccgttgtattaataccagaaataatactactcagatcataagtgttgtgaaatagctctcttaagattacaatatgagaatagagttggtaaatcccaagtgatggagggactatgcctgtggtgtgtgggagagagagaagagagatgagcttcagacttagagtttgagagttagaactgagaccttaagacttaaggaattaatgtttaactaatgacatttaaatactagagcttacatccataatatcccttaaaaataggtaaataaagttgtatttacataattaaataataaactttaaatgactaaatcatctctcaaaaatagggaagtttatgatattttcccctatttttgtggcctgtcaagccccaattccctgtttaacttgttgtccacggatgaaggttgtgcaccaaaggcttgttaggcgaagctggtcggccatgcacttgcatgggcctgggatccctggccagctcttggctgggtcatggaatcctgaccagccctctcttagcttgggaaccttcgccagcctaggcctaggtttcaagcgggcggctaagtttttgtcttcttttgagctaggtaagagttttgttaaggccttataggcatgtacaaccgtagattcctaaatggtttctttaaaaactatatatgaaacttaatagtgagtttattatagtcgaatgcacaacttaagactcaccatttgtctaagttgttatacttgagatggtatttccatgatacctagcaatgtacgatgcaattatttatttggaaagtaccttgggcatgcttggccacaattatgtctgtaccttgtcacttttctaggttgctcacctccacttgtctcttctatgcagatgatctcgagtatcgcttgggggaagtgacaactatgtcgtcataggttcaataagtcttcctttcatggactagtatccattttgttaagtagtatcagaataactaaagttaagaccactttat

SEQ ID NO: 162143 - DNA, 3769 bp, Cannabis sativa
  modified_base (3333)..(3350): a, c, t, g, unknown or other
  modified_base (3491)..(3492): a, c, t, g, unknown or other
acaccctataactttttcttccattgaggagagattttttacaccaaattactttcattattatgtacgttgttcggaatcatctataaagttttagaaaaatctaaattgtttataatactaaaaataaggttaaaaaattttattgtatgcgtgactattttttcttatacgcgtggtaagtaattttgtgaactttatttttagcattataaactatttagaattttttgaaaatttacaagtggtctgtgaaaattgtaatgtacacgataatgaaaaaatgttagactgaaaagctttcctagttgccgaaattgataggaaaatcttgaaatgattttttagtgaagggatgaaaaaacaaatttaatagttgggcccctagtaattaagttctagctccgcccctaactccaggcacattgtgcgcccatcattgattttctttaagtgctccaattttcctatccaagtttaggctttgaaaagtgattataaacactacataatcgtgttaaaactgacgtttgcatattgaaacatgaaactatgaaactaacattccttcaaccgcttaaaaatcaacttttaaagagagtggcgcggtcacacccaacttcaatgccatcgcgctacctctccaaaaatgtctgtggttgctcgctctatttcaaaacattattaagaaaagtgatcaaatgacaaaacaaagagcaaagatagaaagtgagatgatgatgggagagaactaaggtgattgtgaaaatatgcttaaaagcattaaatgaaaatgaatcaaaatttgaacacaagtaagattttctttttttttttaaaaaaaaataaaaaaaaaaatgttgcacttgaaaatattatataattcaaataagtttacaattaaatgttaaaaaagaaaataatcacaccaattataaatcgacatagatgaaaatgatagatattacataagagaaataaaatgctataatcatggacatatttctatcatgtaaaaaaactgtctcttgagtcaaattccaaacttaaaactaaaaatatgtattgaaatcaaacagaaattaattaattagaaagtttcaagaactgaatcagaaaagaaaaagatgttaacaatttgtttgttataataataataataataataataataataataatcctgagacaaatagtcaaatttagtgaagataactaataataattatatctaattaattcaaaaattatatagaaagaatagaatgatatagttatgtttgtttattttatattcataataataattattattataattataattaggcaaataataactggctgccactaataatgtgggattaaaaaactcaaaggcagagcagatgattaggaagagattaattagtttcagttgttttttatctcttaataatttttctcttattctttttttaataatttttaccaaaacaataataacaaaaatcattaacaaactttctctcttagagggaaaaaaatgagattgtttcaatctctttttccctctaacacaccataattcatatttattgctgttcttgaccaatattttatttatattttgggtttttatatatatttttttcttgttcatataaatatatagataaagtaattttgtgtgatttgggaaattgattatgacaaggggtgttatagagaagaaagaagaaattgttgcagtggctattgataaggataaaagtagccaatatgctcttaaatggactgtggatcatctcatcaccaaaggccaaaccattactttgcttcatgttaaacacaaagcttcttctgttccaaatccatgtaattatacacatatatatatatacataatataatataaccttatatttatacatatttatgtatatataggtagcttcttaaatgggacatttcttatgtgacgttatatattgtagttacaataggtattctgattattttcaagaaattctgaatacttaacagtgtcaatatactcgtgtaaaatcaaacaagcacgaacactgtaaattatttaaaattttctgaaaattcaattgccttagggtatagctataaggtacatcatcatatcaaaaaaataccaataacaagaaatttacttatgataagaactgatgctctcaccgaaatatatatatttatatagatgtataagtagtagtaaccttgtctatgttgtttggtatgtgaagttgggcacttcatctcagttcatgaggtttctgaagatgtagcaagaaattacaaacaacaattggagaatcaagccaaggacttgttccttccatttcgttgcttttgcactagaaaagatgtatgtactatgttcaactcttgttcttcttttcttttctatgaaaatctaaataaacttattgtaatcattattgtcatgacaaaaacagatcaaatgcaatgaagtaatattggaagaatcagacatatcaaaggcaatactcaactatgttgcaactcattctattgagactttagtacttggtgcagcttcaagaaacagcattgtcaagtaataataataataatctctttctttcttttttctgtcaagtaataataataacatcatttatgctaagtgattgtattaagtggtatcaaaaccatgcaccctcaagtgtgaccgacatcacgtaaggagcggcctgtggattagccctaagtgggccatcgtgaatgtcggttacaaagagggatgtattgttaggatctcacattgattaagtatggaattggttaatagtatataactacttgttcacccttctgtcttaggctagcttttgggggtgagttcctagtatcagagcagggccggccctaaaacaaagtgggccttagggaaagaaaatttttttgggcccttatgttagaaaaaatatggtatttttcaaaatcggtaaaaaaaatgtataattttaaaagagaaaaaaaaatatttgggcccctgggctggatgggccctaggcacaggcctagcccgcctatgcccagggccaggcctggttggatgcctcataacacgcaacaaattctgctgccatggtggataaagctatgagtgtttgttttgcactcctccatgatatagctccaccatctaacatatatatgtagctcgaagtggatctcctactatcttggcatccagcaaagtcggagtcagaatatccaatgatctcaaagtgttatgacctcctatatgtgagcatgtaatctcttgttctcttcaaatatctcataacatttttnnnnnnnnnnnnnnnnnnaattcctggattgcttaagtatctgcctaacactccaacaatgtatgttatatccagacgcgtacaaacttgagcatacattagtctcctaacagccgaagcgtggtaatcttttacatttcttgaatttcaaggcttccnnagggcattgtttaagataaaatttgtctcctttaacgacaggggtatcacctagtctacaatcttgcatgccaaaccgtttgagtactttatcgatatagctctttagtgataatccaagaatacctcgagaacggtctcgatatatttgaattcctaaaacaaaataggcgtcactaaaatctttcatctcaaaatgcttagatagaaatctcttagttttgtgtaataagcctataccattagtggcaagcaatatgtcatcgacatatagaacc

SEQ ID NO: 162144 - DNA, 2882 bp, Cannabis sativa
tttattctcggttgccattctaacttttctatgtctgtctgcagatcaaacatccccaatggacagcctaagtggcttctctgcttgatcccggaataccctatgctcaacttcatgctcgtaactgccatttatattttggtaacaagataattaacccttcttttacaagcacgaaaacagtctttgctcggagaaatatttgcactaatgtcatcactttgccaatttttttttcaggtatcacaccggctttttgagttgaccaatacacttaaaacggtcttcataccgacaaaagacaatcaaaagctattgcataattgtatagccggattcgtagttttcctcgctatttactgtttctcagtcattcttcttctgatccctcattaactgggtaagtatgactcgctaatcttcttagccgtgtcgttgcttttccacctaatactgaataataaacgcgtttaatttcttacaggcttgacaattcaagacccctaaggagaattaaattaggtttttctgttggatttgcaaatatatatatacagaataagaggataaaaatcgaaattcttggataatgttcgctttcaagtctaccttcatgaagctagtaaaattccaacagttttcaaggataaagcgcccccacacaacaccagggcgaaaaaagccgaggaagacaaagacaatagatcggggaaggaattcgatatattttttttttcgtttcggatggtaatattgcgcattgcaagttatccctttctttattttatcttcttttagccattttgattcaatcatcaaagaaaaatgtagtagttaactgtgacatagattttgtctaccgcgatcaatcttcgatatcggtaactattctgtaatctgtttttcccacgaaatcgattcgaaaagtgaagcataaacaaaaacccttgtatattcatttgaaaattttcattcatgtcattattaatctttcaaaaaaaataagtgttgggacaatattttgagtttgtttagctatcttttttatttaatttttttcacgaatatatggtgtgaaaaatgagttaagagaactaagaattctcctacaaaagattacatgctttatgagaagttcttctctctttgcgtgttaggtaattgataatatctacatgcaaattgcatgtaaatttaaagaaaagaaaatcaagaaagaaaagaaataaaagattttgctaatattatttgagtctttctctttctcattctcaatctacttttctggttccttcaaatttggacatggaagaagaagaagaccaaaagcttaaccttaatgtcattggtaagtaactactttttcatacctttacttcatatattatcaatgcaatgatttgtgtattatctttggttttgttaacagttcaggaagctaatgaagccaattcatcaaatttctcaaaccaaactcaaaccagagaccataattggtggattagagtctctgtctactcggttttcgtcctctgtggcgaatcggttgcaacattattgggaagactttactatgacagaggtggtaatagcaaatggatggctgcactagtccaaattgtaggcttcccaatactccttccatactatgcaattacattaccaaaaaacaacactaaaaccccatcaaaaaacaacaatattgtgttttcgaaatcacccttgactgttttatcaatttacatttctcttggacttttgaatggagctgtatgtcttttccactccattggccttttccatcttcctgtctcaacttactctctaatttgtgcaactcaattgtcctttagtgctttattttcattttttctcaactcacaaaaattcactccttacataatcaactctcttgtacttttgacaatctcttctgtccttttactattccaagccgatttttcagaccaatcatcgaaagtttcggggaggaaatatccactcgggttcatctttaccatcttggcgtctgcagggtacggtttagtactttcgttgacacaattttcactcgaaaaagtcttgaaaagggaaacattttcagccataatggacatgacagtttaccaatcacttgtggcaacattagctactttgttgggacttttcattagtggtgattggaaggttttgagtaaagagattgaagagtttggattagggagaatttcatatgtaatgacattaacatgggcagctatttcatggcaacttttcaatattggagcaattggattaattcttgaagtgtcttcactcttctcaaatgttataagtgtgttgagtttgcctgtggtgcctgttttagctgtcatatttttccatgacaaaattgatggtgttaaagtcatagcacttgttttggccatatggggtttgatgtcttatgtttatcaacactatcttgagagtaagaaatcaaagaatgagaaaaatattgatgatgatggaaaaacaacaactacttcaatggaagagatgagtagtaatagtgatcatggtgatggattagatggggtctctttggttcaatttgagactagtttcttaaaacaagtgtgatttttatcactaaaggtcaatgtgtaatgactttgatattgctcttagaattttgtgtacctcataaaaggagtttcatttttgatactctcaacataactagtacatattatggtaccttgcctttgttttgatcatataattatttcactctctttggtataaagaaaataaaataaaagagagagaaaattgggagagaatgaaaaatatttctttctaagttgtttaaggtatgatgaagaaagaaaattaattca

SEQ ID NO: 162145 - DNA, 2707 bp, Cannabis sativa
tctaccttggaagtaattttctaacttctcaagggtattttcgtcatagaatctattaatttcctctctgtccaccttcacatttaacaagcttttctgtccttgtattcttgggttcccaacttctgtcaaccgcgtagcccatttatttatttattttaaataaaaatataatgattttgattactatttttattttctctcaatatatattatagattttattccactaaaaaaggacagcaaaatatgtaataaccattctttctaactgtgtctaatcgccgtattttcttgaaaaacattcttctcttacgaaagggaaaaatataaaaaacactatatatgaactacaacaattgattttctcgaaagatagttgggaaatcttgcgtataattttctcgagaaaatcgtaaggacttgaaatgaagcttttctattctcttctgtaaagttattatctttatgagtaaataatacttgggtttattttattttaataattttattagtttctttcactctttacagatgaaggagaagggagtaaactggtcttcatccctaacaaacccatgttttcctcggccgagtccattgctccattggcgatttgggcttctgacaagtcttgttcttgtcggcatggttgtggtttggagcatcgacggttgcacagtaaggacttttcttgaagcttggaagtccaaccaagatttcctcactatgaaggtcagtaccaccaatgggctagatagtaatctcactcatatcaatggcggtttgcgtttgaactcttcttccaccattgtggttaaccagaccaactcgacccggttgagtactcatttcaatttcgatgacccacttcttaatctaactcattacgagccattgttgagtcagaactcgtctattatatctagtgagtcggaccagaatctaactcgtcctgtagtagttccagttccaaccccggtgagtttgagttgggttgaagctgagttagagccaaacgtgacgtctaatcttctggcccggtggttaagccctggaggattgccttgcagggattctaagacggttgagattgctattcctggtttggacggtcaggatttgatcgagttaccagccggtgaaatccatgaatttgggtttcaagctttggatgaggttaagaatcctcgttgtttaggtggggattactttgagactgatctttctggggattcatggaaatctaggcctgtagttaaagattttggtaatgggtcttactctctttcacttcaagtacacccagatttcgtgggtacatacaatcttactataatacttctgtttaggcactttgagggtcttaagttttcaccttctagattttcatatgatagagaggttcgtaagattcaaatcaggttctataatagcagcagctctgctcagctgccaaagattcaattttgtaaggaatctgattttggtagagacatttggtctggaaggtggactaggcatggcaaaaatgatgcttgtgaaatcggaaatgatgggcggtaccgatgcctggctgcaaattttccatgccagaatccatggtgtgatggctcattggggtctttggagagtaatggttgggtttactcaacacactgttcatttagattgttttcagctgattctgcttggaattgcttgagtaacagatggattttcttttggggagactctaatcatgttgacacaattaggaacattctcaattttgtgttggatctacctgagatacagtctgtacctagacgattcgatatgaatttctctaatcctaagaacccttctcaaacagttagaatcacaagcatattcaatggtcattggaacgaaacacagaactatcaaggcttgaattctttgaaagatgaagggtttaggaacttggtaaagaagtacttctcagaagacacagttccagacactgtaattatgaattctggtttacatgatggaatcttttggtctaccattagagcattctccaaaggggcaacttatgcagcttcattttgggctgaagttttggattctgtcaggcaaaggggactgaaagccccgaaagttttttaccgtaccacaatagccacgggtggctatgctagatcgttggccttcaaccccagcaagatggaggctttcaattgggtagttttggagaagttgagagaagctggggttgtatctggtgtgattgataactttgacatgacttttccatggcattttgataaccgttgcaacgacggggttcactatggccgtggtccagcgaagatgagatggcgcgatggccaaattgggcaccagtattttgtagacctcatgttggctcatgttctcttaaatgctctatgtgtaagatagtaagttatgcaaatctgcagtgttttggaatccatttccagtcttttggacgaaagagaattggctttgtggcgctacaaagtgaaaatcgagttgagggcatcgccttaaatgcgcggtaagagagtagaaggagttctagaacagctttgttactcggagaggaagtaaatctgaggtatagtatagtgtgttccatatataaatgattcattttgagaaagaaatggtagcattcttaattttttggtgtaagtattgatttttatcatatgtatgg

SEQ ID NO: 162146 - DNA, 2213 bp, Cannabis sativa
tataattacttccaattatacaataactttctaaatacgtcctaaatttaaatttgagcttagttatgttattatgtacataaaattaaaattcaaatttatgcaaagatcaagatttgtatatccttcaaaaaaaacatacagagaatgactgaatgaggtaattaagataatttagattaatgattggattaaggactaattaagatatatgtgtgtgggtgggtgtacctgttgttcaattccttgatttgaggccacaattcttcctctctcaacttatttattgcaatggatatcctatcaactatttgaaacgcaatcttcaatttagtggatagatctcttagtaaggctttagtggaattagctttcaccgatttaccaccttctctatccaaaattttcagctgctggtactttttctgatatattgttcgtagtttttcctcagcctacacaacattttgtcatccacataattaaaaactaaattaaataaataataactttaaaaaagaaaaatcatttaccttaacttcaaaataaagtttcttctcccatagtaagagcttctttagagtcgaagataaatttggtgaactgattatccccatatcttcctcaaacaccaatcgaaatgaatctgattgaccaaattgaccagctttaatatataatatatatagtcgataaataatattttacactattaattttacaaaagttaatttattttctgttttgtaaaataacaaaatagattatatattttttaaaatataaaaaataggactttaaatttaattttggacaatctttttaatttaactaatttaaagataattggtagtacatacaaaaaaaaaaaaaagtaactaattagtcataatccctctaaatttgactattattaagttttgttttgataaaaaattatttcaagtttaatagagtacattatacaattaaacaaaatagaaggtggaattattaactttaataagaaaatggcattttaagaattattcaaagaaaaaaagttgtattaaataattgagagaatttaccttgattaagaggcacccttaagcgatggcagagtagcttggaaacctcactgccagactccgaagcttgaacaaactgaagcttaatctcattcatggcttttgggacaccaagtactactactgtactgcttggagttttcgaagtaaccgagccgtttgctttctcagagctatccttcttcgtttctaaaactcgaacctcatacgtcgtcgtttcaccattctctttctctttctccggatgcgaagtgtacaaccgctcgtacttgtcgaaattttcgaacaagttcaagaaatcccaagccgagccgagcgaagccggtggaggagatggaggcggcttcgaattcaagtaattaaagttgtgagagattaagccttgggattcctcttcgttgaggcaattatgcccgagtttattatgattatcactatcctcgtcctcagaagaatcggaagggaatcgaaggtgcgagtctgctgagtttgatttatgcagcggggaagaagaagcaacggccgccggagataaagaagaagacttttttaaagtttcgttgttgactggtacttttttactgaagaaacgatcaaaagcgggacccaatgccttgagggagtcgaggtaagcggcgtgagcttcagcgaagtcttggctatggcggagagcttcgtctaggtatttacatcggtcccggcacaaggccaccgccggaagatcgttgagcttcgagttggcgcagcccataataatggagagacttagactgttactgacccaacccaattcaaaacgctgtcgttttcactcgtctttctcacttgattttgaatatcaatatcagtgaagagtgagtgagtgactgagtttttcagttttctttttaatatatatatatatatataaatatatataaatatttaaatgcttctgttggggaatagtaaaggaccacctccttttctttttgaattaattcattttgtttgggaaaattatcattggtgggtcaaaaactctggcggcacatccttctaatctagtgaatagtgactagtgtaatactgtatacattatcatgcacatttagttctggtttggttaaattttaatttatactaaaatattatatatttagg

SEQ ID NO: 162147 - DNA, 2024 bp, Cannabis sativa
  modified_base (1685)..(1687): a, c, t, g, unknown or other
atatcatttatatatttactcatgataaaagaaacaaaccgaaacgcgagaagtattatcaaactctgtcacatcatattctctagtttctcatagatagccattagccattctcagtatggagcggaagcaaaaaagaagttgcttcctttcatgaaatttcttggtttccttataaatttttaaaatgttataaaattattatgaataatataaaatatataagaaaagaagaagataaagatcaagagtgaaaacgtaaatgaaaattttttaactcttttattctaatagggtgaatttttatttatacaaaaataagactaaaaaaatgagaaactgaatcaatataaaaaaaaaatcaagtatttatggtgataattaattttgtaatttagacatctattaatgttaatttcgaacattagcattgttaactctcgagatcagccaactgctagtcgggagatcaacagggacatgtctagaatgtcgctccgaaggcttagttgtatttgctcctccgaatgcactgaagtaatttggcatgctcatggtggaaattcacccagcatgcacatgacggaaactcactcggcatgcacacattggagagagtcactcggcatgcacacattggagagagtcactcggcatgcacaaagtaaagtcacttagcatgcacaaagtgaagtcactcgccatgcacaaagcgaagtcactcggcatgcacatcatgaagtcactcgaccatgcacgtgcatgcacaatcagttagcatgctcgagagtcactcgacatacacactcggctagcatgctcgagagacaatcgacatgcacactcagctagcatgctcaagaatcactcggcatgcacacttgactagcatgctcaagagacaccaggcatgcgcagtcgaatagcatgcttgagagtaactcggcttgcatgcttgagagacacttggctagcattctcgagagccacccaacatgcacactcagcaagcatgctcgagagtcactcagcatgcacactcaacatgccctcccacaatagcatagctacacttagtaaaattttcccaagtgttaagaagaatgaaacaagggtactattgattgtggatttagccaaccgacacagagtctaactaggattagattttgcttatgattgtcacatgtggaataataataaatgtggatttccactgatatgataatcatcaatgtagtttacttacaccttggataagggttatctcatttccagggcattggcgaagtaagcttagattggatgtattgttatacatcggagtggaccgatgtttaacttggataagatatcataaacttactgtaatatctatctaagtcaatatcactcagttgatcttagtttaatgatctcaatcttgaaatggttaggttctagttcaattgtattatttgtgttctttgatttgttcgttaaagttgaccaattggattttctcgatacttacatattgagaacatggtagttcaattgagtgagagcgctaatcatagatacaaaatctatagcttctatacatgcatagaagtgaaatgatgatttccttcaacttgacttaatagagataaatggtggagtactcattttagtaatcatattagtttactgaaatatcattnnnaggtagctaagtgttttaaagataaaatacattaaaaggtagaatggtaaatttgtccatactcgatgtagatcatctatagaggatcattgacaatttggattgaaataatagataattaatagcgtatctatatcttggaacatatagagtgttctataataattaagagtgcaattcccaatctataatggagtcaggaggaattaataagatagagaattttcttaataaattctagaactagttattggaagcttgattatatagccccatagtccccgcactagttgagataataccggcttgtagactcagttaattggctttaattaat

SEQ ID NO: 162148 - DNA, 4996 bp, Cannabis sativa
  modified_base (1096)..(1102): a, c, t, g, unknown or other
  modified_base (1161)..(1171): a, c, t, g, unknown or other
  modified_base (4433)..(4442): a, c, t, g, unknown or other
tctttcttttctttttaatttttttattttttcgtttctttagtcttttagagcatacattcttcatctttctcattctctaatcttatatgtttttttttaatgttttttcttttgttgtttaaaatatcataatgagcataacaatgacatcaatagacaacatcaagatctcaattttctattgggtatatattttctttgcatattttattatacatttttatagaactctctttttatgaattcattacaaagttctcaatttttattaatcattatactatatctctttttcttttgtagatataacattatatagtgattagtttctttttcttttatgaatttcatcagatccaacattccatggtaagttttctatagatttctctttccatgagtttctttacaatttttttaaattttagtatttttcattcttattttgtaggttaccccatgataatctcatagaaatatctaatttttattatttttaacctatgatgacaagattttagaaatttgataaatattatgtttggtgtgattttgtgtaaaaaaataataacattgtatatatgataatgtaatgtggtagcaacaatgaataaaggttttatgattaagttttcaaattaagtttaaacaaaaatatctatattaataattaatatattataaaattcaaatataaatgttaaatgtcatatatacaataaattaatctattgaatatatatttatgtgaatagaataatagtacgatactaattaattgattttattagttcttctatttctttggtatacaattttattttattttattgaaaaaagctaaatcaataatcaataataatatataattagataaattgattttgtactaaaaaaaaaatcttatttcaaaattttataaattaaaattattatttttaagataatttgtattaataaaactttcttctcttttttattatattaaagttttattttttatttaattcgccgcacgaaaggcggctaattagttatctagtaaaaccataaatgaggatttatgttactatttttcgaatttcggtatttnnnnnnnacaaatttaatattttaagtatttatctcacaaattttttaatagtaaagttaaaattnnnnnnnnnnnttattaagtaattattattaattacaatacacaatttatattttatatatccgtcgcgtgagatacttactaagttttatatataaaaaagataattaactaattattataattattcgccctatttcaaaattcttattattatttttttaaatcatcaaaatccttattatagtatatagtgagttcattaataagagttatatatatatatatataaaaaaaaaagaataattaatgagagtgacaaattattctttctagagaattcggagcgtggttcgcatcgcgtagtggtgtggtgtaacgtattaactttgccaattatacaagattgtagaggccagaccaagccaagaaaaggacatggaaaggcataaagaaaaatgcaataaataaattaattaaaagagagttaggagttccatcaaaaaaaaaaaaatgaatgcaaggatataaatgtaatttacactccctcattttttaaggttcatatctctcactctgccctaactgaaaacgactgcaagcaacctgtgggtctacctgtgtatatatccgaaatgaatatacaataatataataaaaattataataataaattatttcaataaaataagataaatttggaatttgtacaccgactcaaaccattactctttatatttaagtctgcctctccctattttccctttcctcctccctagctaactctagtcacctctctcctctttctcttagtttctttgtgttatttcatgagtagaatagatatttataccagtataagttgttaaataaaactttttgaaggagatttaggggattcttttatcggtcagcaatggtggatatacagacggtatgctgcatgtgcggtgatgtgggtttccctgacaagcttttccgctgcaacaaatgccgccaccgcttccaacactcgtatggatttcttcatcctcatcatcatcatcatatgtagacatgcgcacacaaattcataaagcacttttaatatgtatgagtactacaagtatgtacatatatatgtatacatgtataatttatgtatgcatatacaaaacgtatcatcatctccatcgatagttacatttaactgatctatcatataatgaaaactaaatcgctctgaagcaaacaaccaaccaacctatataatattggcacatacccaacacacacggcatcattatatcaagcgtatacgtgagtcatcaacacatattatcaagctaattgatattttatctaattttttacttcgacccacatggtaattaaatcatatatattatctaaacaattttttaggataataatactttttttcattaactaataatgaattatttatttatatataggtactgcagtaactactacagcgaatacgctgaggcgacggaagtgtgcgattggtgccaaagtgaagcgaaaagcacaagatatggtggttcttctaaaaagtcgacggtggctacggccacagcggcaaacgaatcgagagtttcaagcaggtccgagtacaacggggataaaatcaagcaacacgaccgcgatgatagcgccggaaggagcaccagtggcgctccgtcaccaagaccagccactcgcaggtacaagcttctcaaggatgttatgtgttaaaagattatatttagttgtaggtagaaatattattaatctaattatatagtaggagtttccttaattctatatttgagtgcttaatatttttccttcttttgttctcgtttctttttatgggtctctaatgtctatccatctacctaatggaatttcacttttctcagtaaattgtttacaaataatgtaatttacgcgtgttttgtttacccagattataaatagcaggataatgatcaggctctatatatattgatcccccttttttcgcaacaattaaatataagagaaaagtattattatttatgtatggtgtcatcaatcattattatttagaatgaaacacgaatagtctggatttttcatcaattcaagaaataaaagcttaaaattaccaacatatactttaaactgttttatggtactaaagatgcatatataaataactcataatttagtggtttaaacattagttttttttttgtccggtgatgtatttgggccctgagggcttgttggtaggtaaacgtggttgtgatcgagtgctttagagaagttatctgttggattctggagtcacagtatataacttagttgagtgtcttaattaagaagatcgaattgaatgcatttggtcttcggccaaacaattcaaaggactaaagcctgctaacttttgcagattcattgaaaggcctttaatagctaggtcccctattcgtcgttccccatgggaaaaaactaatagttcacattaagcaacgataacataaatccgaataaacttagaatacatgtatatgaaaaagatgctgatgtagtactggactggtgtattgtaacattaatataatgctatttctaaattgttttaacattagaggaaattagtaaattacttgagaataaaaaggaatgaccacaataagagtggaactacaacttcaaaaaagaaagagtggaactacacccgtaaatgacataaaaacggaccaatatatggacactaaatatgcatatttctatatattaaaagtttctatctaacaactcttggtttaataaattatcagttttaacagaaatttctttattgaacatagtattatcagtttgaatttatgtaaattactttttaaataaataaacaacacatctaagtatcttatttataacttttgatagtcttattttcataaataagaaacacaatatgatgtgattaaaaataataaagtgattcaataaataatcatataatttaatttattattataatctaattaattgtttttttaataaagtgatttattcaagaaaaatttattttattattgggtgtagtaatttttatgtatattaattaggtacatttggaaatttaataaaaaaaaattcataaaacttttagtaaaatattttttttttcatattcgttatatcaagatgtcaaacacatatcatagcctatatatttattaaaaaaaatagtaaattttttaacttgaagatataatatttacaaattaaaattaaggttttatttgtaccccataaaatcataaatacaccccattattaaaaaaatataaannnnnnnnnnttttaaaaattactcttaatatattttttaaaatttctttatcacattattttatgttaataattttaatacttattttgatttcatttctataattttttctaactcttgtatatatatttttatttttttctaagaaaattcatataattttttattttaagttttttgtcataatatttaaaatatagtttattttttttataggtatatttttttagaatattaattagaagaaaaaagttaaaaaaatttactacaattaaacatataaattttatataaaataagaattattaaaatgaggtgtgtttagaaatttttgaggtgtaaataaatttttttaaaatttaatttaaattataattttttatttacatataatatttttatatttacatttattaacttaattatatgtatatttgtaaaaaaaaaccttaatctataaatatttatatataattcttaatggcatgttaattcagctttgttgatcattatatatatttatatatatatatactaggtgattgttacgtgccaagccacgt

SEQ ID NO: 162149 - DNA, 2934 bp, Cannabis sativa
tattgctgcaacagtttaagcacaaattattttctacatgtacaccattttacctcttgcagtaatacatacaaataaagctattagaccaaaactgttagagagagaggaagagaaccaattagccttgagatttacaatgagttctcgttaatattgttatctgaatctccttccttttgagtttgctacctcaatgccattttccatgtacccatcttctctatcttcaatatttttctatataaaactccaatcctcgaccccattttgtacaggtaaaaacaggaaattatgcagttgcaactgtatactacactgaatgcccttacaatggttgtaggcaaataatgagttgttgtctgagtttaagtgttctctaatcacaagccttgaatcaactcgtgaagggccttttatgaaaattgcttcttgctgacgagcatgtgtgaagtcaaaaggattttcgactttgattacctgagcatgtctcccgaatgtaattgtggcccgcttaatgagggggatatgctgaaagtgttaccgttgccatagaacgaaggatgcccgagtggcattggtctgtctggaagttgaggaacttcgatatctccttccaacattttcagtgcatccataatggtaggccttaatgccaccatcacatgagcacacaaaatgccaaccagtacaaatctctccataatgctcttaggatttgaatttacagaatcctcattttttaacaatgaagcatccagagccttttctacttttccagcttttactaatgaccacacccaatcggtgatcaaaaaagctcgcggtgatcctgaagaagacaaatcaagagctttcctcccacacataatctccaaaacaacaaccccaaagctataaacatcgctcttctcagttagctgtccataaagagcatactcaggagctaagtagccatgagtccctgccactctggttgtcatatgtgactgtccttccctgctctgctttgcaagtccaaaatctgccactcttgctctcatatcaacatcaagtaatatattggtggccttaatatctctatgatatattgcaggcttcactccataatgcaaataagctaaccctttagccacatctaaaattatgctcttcctctgaggccatgtcaatcgtggtctctcaactccaccatggatatctgattgaagaaataaatgatcatccagattcccatttggcatgaactcgtaaacaagatacctttggctttcactctcattataattctcattctcacccccatcaaccacacaacaccctctaagaggcacaaggtttcggtgtttcaaattgctaatgatatcaacctcattgcaaaactcagcattcccttgaaaatcagactcgataattctcttcaccgcaacagaagttccatcagataaaacccctctgtaaaccaaaccaaacccacctcttcctatgaaattcttctgcgagaagttgttagtcgccttctcaagctcctcaatcttaaaccaaattgcaccagtattgggtctcactcgaggcctcgaccccggctcatccaaatcaaacccaccttccaaaccagtccctccttccaaacttttactcctccatctcttatcataccaaaaatacagacccaacaagctaaacatgactaaaatagcaaccccagcaccagttagcccaaaaacaagaggcgtacggctcttattcccagaacccacatgtgaatccactgacaacccaaagatacaggaaacggcacctttactttccggcccaaactcgttaactatgccggcagcatacagtatagcaaagtaccaacagtcattagcgtgagaagtgttaccgtcacgagaggtcaactccgcctggactttgaaaccggcagctacacaaccatcgcagctggtgagatctgtcaggtccgggcggcacgccgtgtcgagcaccgaggtgtgtccgagatgacggacccagtcgtctgaggactgaatacgggcgcatagatttggagcgatcacgaactggacagggttaaagcagtacgaaacggcgtcgttcgacagggaaagaccattggagttggaaaacgacgagagcttggactgaaaatcttcgaggcaagaagcggaggtctggacattggggagctggaattgggaagtctccttgaggtgttgggccagaccgatgccgaagagggatagtaaggtttggcaacacggagttttggggtgatcagctgattggtttttcggtttcgccggaggtttgaaattccggcaactcgtcgtgttccaaccgattcgagacaagtaattcagatcaatcgggcatgctgtggaatttcccgccggcgccggagcagccgcgccccacgtagagagggatatgagtgagagaaaggcgaaccctaaggcgatctccattgttgtttttgtgattttggtgtactgaattctgaatttagagagagaaagcgttgaagaagtggaagaatgcagggagataacgagaaaggttgttggagtggcgatggctttggtcaaagctttctcttactctcttctggcggctgactttggagtcccaggggatctacgcgcctgcgtttggatgtgtatcacacgctcttctcgaagaaaagaaatgcaaaacagtagggctcttcaaaaaaaaattaataaacagccaaattcgaatgaaccgtctaaactcgaataactttacgaaaaatttaaactgtactataaatatattaagcgggttaaatattattctaatccattcaaataacgtaaataaactgatttacatattttttactaaaattatttaaaatatattatataaattacgtttaatagctaaaatattttacatttaaagttt

SEQ ID NO: 162150 - DNA, 754 bp, Cannabis sativa
ccaaagccgatggactggcccaatgggatgggagttaacttgatttaacataataggcccaccttccaaactctcatcagctggcccactaactttcacaatcggcccacacggagacagcccaccctccagtgaaaacaactcaacagccccaacatttgaatttaaacttaaatccgtaccttccacgcgtggtcttctcaaaggagaaactccaacatggacttttccctgcattcgaaccccaagatcaccactattacccgaagaagcaaaacggtccttgcctcctgcagccggttgcttaggatgccactccagtcgtttggtctccccaggcttagctgttgcacgatgggtcaccatcaaagagcgtctcggacgacgaaccaacccagcatcatccaacggttcaccagcagccggggccggagacgccattaaaggacagtacgcaccacctttcttcaccactgccatggaggagacagaactcgaaccaccgaatgatggaccatagaaaacatcgaggtacgcggaggacgttgaaagccacggaccatacatagggagaggaattccatcacatttagccaccgtcaccggcgacgacaacgaacagccccgtcgttgatgacccagacgaccgcagtggtaacaaaaaatcccaatcttttcaaatttaacttgcaaccattgtttcacaccagaatttgtatcaaaaaagcaccctgaacataatggcttatgaatg

SEQ ID NO: 162151 - DNA, 3459 bp, Cannabis sativa
  modified_base (3420)..(3421): a, c, t, g, unknown or other
agacagcaatattagacagaggatctgagtcctaattgtatttggttacgatgattttcttttggaaacaaaattatgcatgagaatttaattaattagattatattgttttggttattgttttgttgaatataggactttgataaagtgttgtaaaatgttatataaattatcaatacattaaatttattgtataaaattcaaaaatatgtttagaatctacctttttgaaagattttaagattactctcttatggaataattttatttcaataacaataattttttggacttaaaataaaaaaaaaaaaatcccataccaattatgggaatgtaaaaaattacaattctcatgaaaatattacatcataccaaacaattaagattagtcacttataaaaaaacttcgcaatagtcaggcttagtatttgagagttacaactttattattagaagttttggtatttttggctggacttttaaaagttaatttgagcttttaaagctccaaaaatactttttttattgtcgtttagataatcaatgagtttcaactttagatttaggaaattactttaacataagtcaacttcagtagttttttcaaaaaaactttttaaaaagtaaaaataagcaaaatctcaaccaaacaggacttatgaaactcaactcttcaaataagttaacattactctatataattgactgagacaaaaaataaacatctacctaaaattttaatccaaacaagacgaacgctacacattccctcacatccaatctttacccctactaaacatttttgtagggaattgttaaataacaccgatagtcctaacattatttaaaagtatcataacatagttagtataataatattaagtttcatacaattttttttttttttttttaatgttaaaatttcatatattttaatttaataattaatttaaccacttataacttataagatatcacaatttattaaggttggacactattgttaacttacaacaactcataaattaagaattcctattatgcatcatcaatccaatataatctaattctatataaataatcatatccaaatttatgcaccaaatcctctatcactagaaaatagagataaagagtttgttcatgcacataaactatttttttactaagaaaacaacaactcttaattctgctgtgaatgattattatacaagtttaatattaaaaaacaagccaaaagataaatgccactcaattaaaaacaataaataatgtaattgatgatgatattatactcttacaaataaaataaaaaatatgcaacttgcctagatgattggcttattattattatttattattgtgattcgttggatttgtcctatacattatgattaactctgtttctctactcaacattcccaatgtttcaccattaaactataatgaaaaaattcacttatttatctatttttatttttcttatggtaatttattaagaaatgctaaacagtactactagtgtttagtactctccagtctcctcagtgtcatattattattatttattagtataattaagtatcgatttttatataactttaaaaattagtttttaagaagtatcactaaccaattataggcaaggccgactctgaaatttagtaaatcatatgaagaaaaaaaaattagacccttatttagaacaaaatatgatattttttaaaatcagtaaaaaaatatataatttctaaaagaaaaaaaaataggcctctgagctaagtgggcctaagaaacaggcctagcgtgcctatgcacaaggttgggtctgatcgtaaggcaccaccaataaaaagtgttacgcactagtggtatctaataacaatactctaatttatcatataattatcttgttaattgactataaggccctttggttggtaggttggtcgacttgaattattagttgtgattaaattgagttgggtttgtaattatgttgatactatgagttgtattggtaggtatgtatttttttttttattcacataaatatattatatatacttttgaatttctaattaagaatatatttagagccgtttaaaaaaatatatatttaaaattaaataaattatattctaattgagatgctataacaataaaaaaaaatacttaataccatattacaataaaattatgtttgtgtaaatatagtatttgtatttgtattacaatttacaataaaattattaattttacataaataaatttataaacaatatatattattaaaatataattatttttatatagatatattgttataaatgtataactaattaaaatttttaaagttctttttagatgaaaccccaaatgaccctttcaagcaaaaagcttgaaaaaaaagtggagcagatactaattatattaaatcatctcataaaaaataagatcatagatacaaaaagagtaatcaaactaccatattttgctaagaagttctgacaatacatatttaaaaatgaccaacaacattaatagatctataataaaaaaaaggattagcataatgaaattcaacaaaaccatgtctaaaatctgcaaggactaaacccaaagaagaggctaaaagaaacctagttgttaaacttcattactacatttaaacaattagattcaaaaatacattttgaaaactcaatagacagaatttgatgacaacattttttaaaattaaagcttctatcatttcaggaaaaaaagtaccaaaaatatatcaaatagtagaaggcataatcttacatgtggagtcacgaaccaccatatccaaaccacatctatcattagaagcgtcaagagcagcatttgcattatttttcactgttcccctacccgacaacacccaattaggattggaaaaaccatttggagaggaaggcaagtttccaatctaatctagagtttattcttgaatagagtattaggactactcagaattctaacttcgagtttcttaacctaaaatcccaagcatccaaaccatagttgatttgtgtattggtaggtgtatatatttgtattattgaattaagttataattaaattaaattgttggttaatggttattattcaatttattttaataaatatgttatgtgttatggattgttttgtgaatggttttatactaatatgaaattgtaaatgtcaacataagcctaccttttttctttactaagaaaataatctcatttcaattgataatataatactataaataataactaaaattcctttaaaaaaatatttgaaatattatgtagagtcaacatataacaataaataaattcagaaaaaaaaatcccaaacctaaatttaattctagatataattttagatttttttttttttttnnttgacaaagtgattaaaatcactcttgaatttacgacg

SEQ ID NO: 162152 - DNA, 3965 bp, Cannabis sativa
  modified_base (3923)..(3939): a, c, t, g, unknown or other
catacacacatattagctggacacagaattcttaataatacccagttgcccattttgaccttactcttccatactaatcccattcagtcttgtcctgtcttcttttttttcttctgcccctaaacattatatacaaaagagtctaagcaaacaaacatatatatatatatatatatatatatcatcatcatcatcacctctctcattctgtacaaaactcccagagagattgatactttggcattatccttctaattaatacaccacagtaagttctttcagtcatcatcattaatttccttcattctttctttctttcctgcacatttctgcatatatcacattatatttactgttgaacttacattatatacaccatcgttgtttttagtttcttttttctaatatcagatgttgtgtctttgattctatgttttagctcaattggttttttcttttttcatttactattattattattatggtcttcgtattttgggacttcattattttgtgttttgttctcctctggtttgctaaagtatgtcttttttttagtaacatatgttgcaattgtagaactgagttacattgtctttttgttaaattttggaaaataactaagttcagtttattttgttgcaaaggcgtgtgctaagttaagaaagctattatagaaaaaaactacactcttgaacaaaaatgtttgctgtgaaacacattccagaatgtgctttttttcccttaaaagttatcagttacctattttaatatttgtttctcggttgatcttatggaccagtctttgttgatagttctaaagtttttgtttgattcatactcagaaaggtgatgcctggactagttatggaggcctctaatagggacaatttagcgtatgataccgataccaatgaggattacacagctcaaaaggaaagctatgcatatgaagggtcaccaagaagtccactgagtccccaaagtcctcaaagtgactccatggatttggccattgatggagttattgacacatcaattgagcagctttatcacaatgtttgtgagatgcagagctcagttgatcaatccccatcaagaggtagttttctatcatatggcgaggaatcaagaatcgattcagaattgcgccatcttgttggagatattgatgatgaagaggtaactaaagaggttgtggtggaaaagaatgaggagcataatggttttgactcaccaaacggtaaagatatacaatctcctgctaaaaagtcaacaaaaaagggcaagaaccaattggcaactcctaacaagcttaatgtgttgagagtggattatggggcatcagctaaatcaagccccaagatcaaatcttcccatggtagacctccattagataagaagtatgagaaaagtccaaggaaacctaatgtggtttcgccattgaacaagcaaagaagttcagctttacgcagggagaagcttcagaatgtggtggcagattctcaactggatgaaatggacaacccggaacttggtccatttttgcttaaacaagctaaagatatgatctcttctggtgaaaattctcagaaggttcttgaagtggctcttcaggcgttgaaattatttgagaagtattcaaatgagaaaccaagtttggaccaggtaatgtgtttacatgttttggctgcaatatactgcaacttaggccgatatgatgaggcaattccagttcttgaacgctcaatcgaaattccagttctagaagacggccaagaccatgccttggccaagtttgcagggtgtatgcaattaggtgacacttatgcaatgatgggacaaatagagaattcaatactgctttacacagcaggtttggaaatccaaaggcaagtcttgggagaaaaagaccctagacttggtgagacttgtagatatgtagctgaggctcaagtccaagcaatgcaatttgatgaggcagagaagctatgtcagatggctcttgacatccacagagaaaatggctctccttcttcccttgaagaagctgcagataggagactcatgggactcatatgtgactcaaaaggagaatatgaagctgctcttgaacattatgtattagcaagcatggccatggcttccaatggccaggaaattgatgtcgcgttaattgatcgcagcattggagatgcgtatctgtccttggctcgctatgacgaggcaattttcgcttatcagaaagctctcactgtgttcaagtcatctaaaggagacaaccatccaacagtggcttctgtttttgttcgtctagctgatttgtacaacaagataggaaagttcagggaatctaaatcacactgtgaaaatgcactcaagatttacacaaagccaaatcatggcatccctttagaggagattgccagcggtttaattgatgtatctgctatctaccagtcaatgaatgagttagagcaggctgtcaagttactgaagaaagcattgaaaatgtttggtgatgctccaggccaacaaaacacaatagcaggaattgaagctcaaatgggggtcatgtattacatgatggggaattactcagattcttatagcaccttcaaaagttctgtatccaagttccgtgccagtgcagagacaaaatctgccttgtttggaatagcattgaaccaaatgggtcttgcctgtgtccagcgttactccataaatgaggctgcagagcttttcgaagaggcaagaaacattttggaaaaggaatatggcccatttcaccctgaaacattaggagtctacagcaatttggctggcacctatgatgcaatgggcaggtaaattttgtttccaaaaacacatattatgttgctatatagttcaggttttcatttcaatcaagtactttgtttttattcatttttgttatcctacaactcttgcaggctgaatgatgctattgaattgctggagtatgttgttggaatgagagaggagaagcttggaacggcgaatccagatgtagacgacgagaagcgaagactggctgagttgttgaaagaagcaggcaggtctagaaacaggaaagtcagatctctggaaactctacttgataccaaaagtcaagttgttaaagatgacagtattgaagtaatgtaatgctgatgaaaatgtatatatgtttgtaatctatgtcttggtagattaggtgttttggtgctttggtatagattattgattgatttgcaaagttgagaaaataagagaataatatcaacggcaactaaaggaggagattcatatctcaattgtttaatatttatgttgtcaaagttttcatttttgtataatttgtttcagacatgcatatcttattgttctttgtattatgatctctcaaaataaagaaatggtatagcatcgttttcacttgttggtgcacccaaaatgcccattactaaacttgtcttagcttctagttgtattgtatgtttcttaaatagtaatttttcttaggactgcaatagctatcgttagattttcatttcgagagtcgtttgtttgtcaaaacgaggattaattaaagtataaacaaagtatatttgctgtctttatcattgaattagtacttttaaggttgacttataggacccaccctgtaaatttttccaacttactcaacctcacatgtacatatatatatttatacatatatatacacgataacaggttatgcttataaaatatgtatattatacaccgaagacatattttacacctaagacgataaaatggcacatttactagaattcagaaagattagctataaagagataatatttctatgcttttatttcacaaaatcataaaaacaacaaaaaaattacagaaatacggtttcacggaattttaannnnnnnnnnnnnnnnntttattttatttacaaaaaatacggt

SEQ ID NO: 162153 - DNA, 2678 bp, Cannabis sativa
gagattagataaatacctctttgattactgaatcccattacatctatcagatgttatggtataaaaaatatttggctgaacacttcatgcaatctctatagcattccatatgtgacaatacagtgactgcatcatgatggaagaacatccaaaggaatttcatacccatgcttgcacattaaccctataacttgttcggctttgtgcctttgaccataaagcaaatacgccttgtaaagaatccataatgttttcttggtaataaacagattattgttcttcatctctgaaataacactctccatctcgtccaaacgcttttctgaagcatacataaccatcttacagtgatacagggaccgacatattctccattctgcagcttctgcactcttaataaaatttactagtttgtccacagcattacatcggaagtaactactaataatggaccgcatcacacttaatgtatgtacagatgtgttatacttaaatgcctcatctattgatctctccattgcttctaaccaatcctcttcagcataaaccctaatcagcaggacattcaaccaaggtcgataatccttatctggaataagctttaataattcctcaatctttttcagtctttctttgtcagaactcttgcagtacgcacatatcatagttctaatcaatgggatttccttttcctttacataatgttttattaattcatacgtctcctccatcttttccaaattaccagaatgcgcataccctcgtagcagtagcatgtacgttcgagtattaggctcaatagaactctctttcatctgttcaaatgttatttccacactatcccacatccaagctgtgagatatccagctatcaaaaaattgtatgtttttacattaggagacatatttaattcctttatttccctaaaagttgcttccatgtgatcaagtagcatcaaccgaccgaaaattgagataagaatgttatatgttacaatattaggactgcagtttttttcgctcttcatgtcccgaaacagtgactggcacttgtcagcaaaaccattgaacatataagcactcatcaatgcattatagatagtcgttgtcctgatccgtttgtttatagcctcagaaaacaattcagcagcaagaccaacattttttactttaccagcaagtttaatacctttggtgtactcttctgctagcattggaactccagatttggacagatttcttttccaatcaaggacctgaaacatataaaagtttagagaaagcaacgaatgtaatatgaacattatgcttctctacaatctttatttacaatggccttccttctctatatgcatatcatattctttttcgcacatcaaactaatgaaactcgttaagaaaactctttcaaaccaaataaagttggttggcacttgtcactacgataaggttttactcatctaactagcaatctccaccaaaagcaaatagatcccaatgggccgaaactacactaacatgcctctataaacataattccacgcaactagaaccaaaacccaaagagcattgctattaggcgccaggttactagcactttcttgacatgtagctatacttcctaaaatttattatattaaactatatgggacgtgatccttagttgaagcaataaggatattgacacatactagggtcctaagcacgttgcactttagcatctctcaaacccaaatcataatataactaaaaacaaaattcgaattcccatcgttcaaacccagagccaattggacaagctaaatagtaataactaataagagccaaaatataaacccctaaaaatgcaaaagaaatttaaaagatttaaaaatataaaacctttaatgctaaccgaggccgcgaatccaactgcttcagcagttcaacgactgggtaaccaacagcacagttcccaattagcgaatcgcccttctcttccagtaacctaatagcactgtcagagtcatcgtcgttcatcaaaagctcatccctgagctgggtcaccttcctggtgagatcctcccagtgcgtcgagtcctggtgcgactgattcaatgaaaacaatccaataacctccggcggaaagccggaagaaggaggagggtgggtatcggcattgaagtcacgaatgaagccgtaattagggaattcgttaacagggaaagcaaagggagttggagttttgcgcttagccgctgaggagaagcatccatggtggcagagtagttgcgattgggccaagtgagagatcttccagacccgcttcattgcctggtgataacgaaaggtttcatcctctgagggtttttgaagggttttgagtttgggcgaattgaagaggaagaagactggagaacgtagggagcagtcgggtgaaagcggcggtgcaacgtggaccacaccagatccataactaggcttacttatctttctctctctctcgaattggcccattatatcctcgacccattaaggattcactgtcgcaaaacaaaacggcccaaacttgggtttgcccatctaccaactaaaagatcatggaaaattttactcacttttgccctttttttattaaaatattgtcggatggtattttttccttttttactgtggttttttataagtttcatactgca

SEQ ID NO: 162154 - DNA, 8088 bp, Cannabis sativa
gttttgagatggaaccccatgataaatcaatttatcgtactattttctaccattttaatttagaaaatttattatctattttgtcatttaaaaaaaaaaaaagagagttcaatggttaatttttgtaaaatacagaatttaaaatgttatttactttaaaaataataataatagtttaattaattaattaataataataataatataatgtgtcttggaaattgatattttgagttcctgaagtagctagaacatcggtttagtttagtggtggtggtggctttattaatattaggttagataatattaagaattgaattaagaaagattataagtaggtcacgagatattcctgatctaccacgattaattagtttcccaattatgggaataaaaataaacaaaatataatatatattgacttaaggctttaatttgtttcccaatttgtcatatacatataaatataagattataatcccttgtgtcaggctaagagaagaaaaaggtaacacattcaaacgtggccacacaacacatttacataatttaattagtttaaaaatgaaaaagactactagatgcttcatcaataatactcattaaaaaaaaaaaatgaacattgaatccaccccatcaaaattagaaatgttcattccaaatcaatatatgacacccgggcttatcaaagcttactttggaaaatcttgtataatattgtatatttatacatatagatctatatatttatatgagaggagtgagtagtgaggagaaaagaatattaaacttattatcataagtgagtgtaatcatattcgcattaatgcactaaatatcatcataatgatacaattaagaaaggagagtactattaaaagtgaagtttgaaggatagagaagaaaatagatgttaaaattagcatcctctatttatatcttctctactaaatagaattgcctttagtcctttttatggggtttacgttaaaatttaaaaaaggataaatactattttagactatgtattttacaaaagttattaattaaatttcctgttttgttaaatgacaaaataaaccctatattttttaaaacgataaaaataagaccctaaacttaattttcaacaattttatttttcaatataatcaactttgagacaatttctaatacaaacagatacataatatgtaaccagttttgtcataacatctccagatcaaattattattaaactttattttgacaaaaaattagttcagggtcatatttgtacaattttaaaaaaatacaggaatcattttatcatttaataaaatagagggtccaaatgataacttttgcaaaacacagagtctaaaatagtatttatccttcaaaaaatagatcttttattttataaataaattgaaatgcaaatacatttttaaactatttttctagcaaaaaaaaaatatattaaagaccttatagactgatcttaaacaaaaaactttaaaataaaaagaggttgggagacctcttggatatggcgttgagcaatagcctcgactaccataccctaaacacaaccctgctaccaaacatagtgtaaatatgtacttgggtgcgagtatactactaaaagaaaatctcttatattgtacttcataattatataaaattaattgcggtataatcctcaatattttcactttgctggcacttaactctcaaaactcaaattttagcagtaaaaccttcaaaactaggaaaccgttaacaatttactgtttccatctattttagatgttaaatgccatgttggactgtccatgtgtacatctacgtggacacaatatacacgtagtacaattttattagtcaacgtaaaaaattatttaaaaattgtaaaaaaaaatataattttcaaaaaaaaaaaaacttaaaaataaatttaatttgaagggtataaattataaatgataaaaccctaattagaaaacctaattccctttcttttcttcctcactcgacaccttctctctcttctctctgcatttatgcaacggccactggcacgacgggactgtcgtgctccgatcaaccacgccctaaaaggaccacatatcaccgtcctcagtcccaaaaaaccccaggggcacacggctcgggatcacggagttaaggcctccaagtgacggtgaagccattcatggcttccactttttctatggatggctgaagacacccttcggcattgggctgagctcgacacgacgggagagaaagggtccgagagcgagagagggatcagtgaacataagttcttggggttttgtggctcgtggaggtcagccatggcctccgtttagcccttcaccggacgagggtggccccaccaaaaaaatcgagagagacggatagaaagagagtttgagcgagggtgaaaacggcgagaaggggagagagaaagatatgggggtttccagttttttccaagggctgcaaggatggaggtgtggtctgtctggaccactggcaccggcaagggttggtttgtggtatggctgtcgcaagtagaagagaggagaaaaagatgagttaggttttcaaattagggttttctaatttttgttttatacaatttcttctcttttctattttattaagttaactttttgatgtaaagataaaacaaatattatttaatatcaatttagaataataaaataatttctctcattcaaaatatacttttggcaaaaataattatcaaaaaccatatatattttttaatttcaaattatttttttaattttttaattttttacgtggaccaataaaattatattatgtgtatatcatgtccacgtagatgtacatatgaacagtctaacatgacatttaacacctaaaatagatgaaaactgtaaattgctaatgatttcctagttttgagggttttaccgtcaaaatttaaattttaggagttaagtgcaaacaaagtaaaagtactagaggttatgccgcaattaacctatttatatattcgatctcataagagttccacagttaaacatgtttgaatgaaagtatactaaaatgttctaatattgtaaaataaaataaaaagataaaaaaaacttcacattgaaggagtgtagaatttgattccaaaatctatggaataaattaccatgcataattaggttagaaatttcacattcaaatatctaaagagctagggcaatataaatctcagtattaccctcactctaggagaataggcaggtaatcagcagcctagctagtaggtcaaaaaaaaaaaaaatcaataatttcacatagcataaaatacaaaaatttattaatcaaaaataaaaataaataatatagttaaggcttaatgaagaagagtcggcaaaggaaatttcaaaaagctttaatgtaggtagctaaaaatgttggggtcacttatgagaaaacactatactactgacctcaaatgtggaagagtggaggtaatagtcaaatagtacataagcataaaaataaaataataaaaaaagaacatatctatctactttgatgacactgtaccaataataagaaaaagtaataaattaatattccaaacagtgataattatgcacaatcaatgtaagcaaataagagagtatatagtttaaaaagtcaatatcattgaaattaattgtaattttctattaaatagactaattattaacataattatttacaaaatattttcgcaatttctcaagtagtcattctaaaaaaagagattttatactaaactgtgtactaataacaatattacagctcaaaataattttaaatattataattatttgatgtataatattataatttttatgtaattcattatttatatttctatttatttttaaataattatattttttttttgtaaattaattatatagaaaatatgcagaaatggaggtgagacgaacagtctattacgcctaatttccattcgtagttgcacttagtcaagaaaaaaaaaatcactcatgtaattatatacaatgtacgtagattagcataaaaattaagattctaactatctggaagccaaaaaaattaggataatccacaactaattgagaaatatttagaatatattataattatcacatttatttaatacttacaacaaacatgcatatataaacataaattagaaggagataatgatgttaattaagaacttacttaattactatatgttagaatgaagagaaaggcacaacactaaagataaagtcattttttgcagtagaatttggctcaggcgcacccaaaaaaaaaaaaactacccagccccctcgtactactgtagagagagaaaaagagactgaattagagaatctgacacaaaaacactaaaataaaataaaaaatggtgtggtgtggaccagcattctctactttagttccctcaccccacaaactctttctctttctcttattaatgttaattgagatttagagtcacactaattgggttttagtgtataataaaatattctttaattgatctgggaatttgaagttgcagcaagattccgagcaacgaaaattaagcaaccaaaccagagtaatgtcagttcacctacatacacatcatatggttctataataataataataacaataataataatagcaataataataatagaggagtgtttttacttaattttcacacttcaaattatatcttgagatatttttttaatagtaatattctttataattataatattattttttgtaaattttttaaaaataatatttatggtattccaatttaccaaatgtgtttaagaatttcaaacttattatcgaaattttttaaaaatttatatggtattataactatagtgaaaactgccatgacatttttttttttttttttaatttcaatatgtatttctggatatgaaaattgacagtaatagtcctggtaataatataagagaataataattatttttttagggttttgagaataattaagaagagtatggaccaggggtgcagggtgtgtgagaagactaacatgaggctgtcggttggttgttaattctagaaagaaagactcaaatatttaatatacttactcttaaattgtcttctactactacaatccattttaattacaccaaccaaactcttcctttcttttttttttcttcttattattattgctatggatttttatgcccttaatattggatggctgctgggaaacactaaaacaaaaactccaatattttctctcacctctctataatatatacaccccatttccatttccattcccataccccatctttttcatcctctctctctttatatttattatgatcatcaccaccctaaatcttaattagttaaaataactaataatattggtttacttgatatttgtggtgcaattacagctttgtctctcttcaaatctacatcttaacttatcaggtaattatttttttcagctttggtaggacccacaagctattctgtttgagtcatgtggaagtttttatttttattagaattaatttcgttatttattttatccaaatccaaacccatctgccaaaaattaaacactactactactattggctttagcttacgtatatattaacacaagaggtttgaattatataaaatcagtggagaaagttggtgggttagcacacaaaacgtcatatcaaaattacaaaatataaaaaaaggaataatattataataatcatcatcatcatcccgaccccctttggtaattagctagctagtcatatgttatatattattattatttataaatataggattagattgatttttctttctttattttatgttcatttctaattagggttaacaaaaacatccccctctctctctctctatatctctctctcctctccttcctacatagatatttttttcaaaagaagggcaaaagggaagagtaatattaaggtatgagatttattattaatggaagtaataagatcagatgatgatgatgatgaagaattagattataaagaaaaagggataatgctaaacactactactactactactcctactactacaactactactaattcaagtctggattataactcacccaattcttcttccccagtaggatcacaaaaattattattaacccataataatattaataataataataataataataataatagtttgatcaacccatcttctcctcatcatcaaaccctagctaatttccctaatcataataataaccaatataacatctcttatagaccaaaaccaaataaacccagaaataatatcattagtaaagatcatcatcatcaaaccgacccagatccaatcaacccaaacccagttgctactagcggatcaaatctcaacactactacagtgaacgcctccgcctccgtttccgcctccgccttggcagcagtttcttcttctccgattcgatacagagaatgtctaaagaaccacgcagccagctcgggccgccacgttctggacggctgcggagaattcatgccgagcggagaagaaggaacggttgatgccatgaaatgcgccgcctgcgattgtcacagaaattttcaccggaaagaaatcgacgacggcggcggcggcggcggaggaagcgagtctcgagatagaagaaactctttagttataataccaccagctcaacattatcaccgtcaccaatcccatcatcatcatcatccgtttacattacatggtctttcatcgcctccaccaccgcagatgacagctggcggagcgggattcgttccgccagttatgatggcatttggcggtggtggtggtggtttggcggcagagtcttctagcgaagatctgaacgtgttacaatcgaattacgtaggcggaggaatgagggggcagcatcatcagcatcatcatgatcagtactactcggggccggggccggagccgggcgggggtaattcttcgaagaagcggtttcggactaagtttagtgaagagcaaaaagagaagatgatggagtttgctgagaaattgggttggaaaattcaaaagcatgatgaggaagaggttcaagtgttttgctcggatgtgggagtaaaaagacaggttttcaaggtttggatgcataataataaacaagctatgatcaagaataagaaacaattgtaagccttatcattaattcttcttcttcttaattagaaaaatatatatattattattgttaatggtatattaattgttgattaattaattatgatcataaaaggaaacatttgtgattatatatgaagttatgttattagatgatcatcttgcaattaaaattaattattagccctaattcatgtgttaatagtaattagggctagttttgaaactagattattaattatatcatggaactttcctatatgtattatttttctgaatactagctacatatactaccttaaaacacttttatgtaacaaataaaggaaaaaggtaaagaaaatacattaatatatataaaggggaaaaactatatacattttttgaaacatctttttttggtctttttgtatgtgatgaacgtggaatgtcttatatactttgattgtgtttttgagaattgtaatgtctcatgttttttttaacatatggaatataataatgtcttatacatgtttgatgcaatatgactttgttaatctatatatttctttttccaaaattattttttataaatataaatgaagagaaaattgtgatggtacactactataggtagtatatataatacaaaaggagatattttgaatattattcagaataatattgatatttttttgtagctatatataagagtggttctatattcactataagaaatgtcatttttgccaatacggcaaaagttagtattgcgctggtaaaatagaattcaattgtgatgtgttggcaaatcaatgttggtattagaacttttgccaacataaaatgaaaagcgctggcaaa

SEQ ID NO: 162155 - DNA, 1001 bp, Cannabis sativa
ccaaaagactaaattagccatcccgatcgcaacacattcacaagtcacgatatgaacacatgcccctaagacgaaaacatgacctcaaattatattgaagagtagtgaagttcatgaattaaatataagtaatgtgtttttatgatgaatgaaataactagttacaaaactatattaaaattgacaagtcccaaagaaaatatatcctaaatttttggccttaaaaatatcaatatatgtgtccaaacatatatatagttgttatatgtctatgaagtaatatatgtatcgatctagctagccttttgtgtcttcctagaacataaattccatttaataaaacaaccaaaacactactacacaagtggcatgtacaaattgaaaagaaaagaataattaataaaatggtgtctttgaatctacacctaaatggtggaaaattatctatattgagatcattcttctagggagaagaaattataccaattaacaatctaccatatccacatcaaaatatacacatatctttattagtaatgttatattttactttttttagtgtctaataccatactgatgtgatatcttataattagttaacaattttttttatattaattgtgaaattaaaatatgtaaaattcaatattaaaatacgtcaacaatagtatattactttttgtgatgcttgaaatattaaaatagtccataacatttatctatatattatgggctataacataatcaaatgtaaattatagacaaggacaaatgcatgagaagcaaagggatatatctgtatgatatgatcatagaagaatatatctaagcactacttctaacaacgttcagtgttagttccaagaacttagtgccaatattattaggtgtaaaatggagcccatgcatcatgcatgtaattcccaacccctatcactcattcactagggtcaaatcatgcatatatatatatatatatatatatatatatgagaagagaa

SEQ ID NO: 162156 - DNA, 1502 bp, Cannabis sativa
aagtaacaaacaaaaataacacaaagttcaacacttccgggtaagaactagtacgatctgcttagtatgtttaaaaaaaattcaagttttagtggaaagaagaagaccatatttcgaaacagaactcactacatgaataaagaaagggcaagaagactaaccaggagatgagaaggggttcgtccaaggcattgaagacactaacaatcaggttgtcattggtaaccgactcaatctgaggccctggaaattgcccatttatcaagatgccctgaaattcaattaaaacattcaatctatcagtaatcgttcattatctcaacaataaaaccaatatatattacacacattgtatataaagatgaagaactgattaccctttgttttactccaagaggatagatatcaccataggtgacattccagtcatagaacctatacgggctttctccatgggtggagctaaaaagcagggccaagaatagtaaagaacaaatactcctatactcacccatttcttcctctctttcacactatctcctctgcactttcttgggagttttaagaaaaataaaagtgaataatgaatattattagtaccaaaatgattggagaggaaaaccttcctgcaaagaaagcaagtctgtaaagttccttatttgtcgtttgaaattttttatttccttctgtagtgggacatgtcggcgaagactgaaggatgagttgagattaaaggaactaaaaagaaagaaaaaggaagattcttatttcttaggtagggaagtgtactgtattgtattgtatctcctctcctttgtttcttttttctttatggaccgaagagtactaggagaagagtgtgtgaggtgtagagaatctaggctaaactctctcttctctctttctctatatcctagttacttagtttagtcttaacaaaatctcatttctctcaccgcgtttctcgattggagcgaccaaagttggccataaatctaggaatttctttttaagctttctggtatttccattcaaactttaatttaaatacttctaaaattatttgtattatgctgtcctcttagtcacgcgtaagtaagttactaattacacttgaattttctagtttcagtaaatacaaatatcttattaaaatctaattattattatttgttcacgattataaatttttctctcaataaattgtggtataatataaatattgaatattttgaatttgttatgattgaatacttttattttggtagcataaatacttattgttgacaaaagagtgcttctgttagtacttagtcgaactaaaaagtggtgttaatatatatttaatatatcaattaatttaatttacattaaatatattaattatttttttcactcaattagaagtttaattttttaaaaaaataaaaaattaattaacgtgtcaaacttaaattaatttaacataatatgagacgctactttttaataggggtgttcat

SEQ ID NO: 162157 - DNA, 10417 bp, Cannabis sativa
ggccgcggaagcagaagccacagccatgagaaattagggtttagggctgaggagaaagagagagagagaaggcggtggcgatggtggtggtggtagtggtttagagagagaaaggtcggttgagtttgttaagagtcacagttggcgttggcagtggtgtttggtgtgcgagtgccgagtggttgttgaaatgaaagaaactaatagaaagaagcgaaagacaaaagaaagaaagcctttttttcagtttacttactttatttgctttgcttgcttattaattagtcacgttgacattttttgacacgtgtcatgttctgtgtgtttcttctcacgactttattacacttcacactaatacaccacatacatatatgttttgcaaagtttaaatgagctgtatttggatagcgtgattggataaagacataccattttaattatttaatcgtcttattacaaaaccatatcctttatttctttttttttttttttcttttctttttttttcttttctttccaatttcttttctttccaaaaaatttctttccaaaaaaaaaaaaaatggaatttaaagattggcttggactgttgttcaaaaaaaggaaaaaaaaaaatgattttggatttaaaatatctttgtcaatatctctcttctttctcattctctatttatcttttctttttcctttttcattcaatatcatctcaccttcaaatcaactaaaaacttattttaaaattagcattgatagatttatctttaaagcatgacaatatacacacttttgagtagaaccattttatacttttgtgtcattcattcctataaaatggatgagatgttaatttcacaacggctatcgatgataataaactaactttgatgttctttattgattttaaatttgatagctttagtgatatgatttatgtggcattttatgattaaccttactttgcaaaataaataaattgaccgacttcaatgagttttttagataaacataaaatttacgatagaaacaaatttgattgatttcaataaattgtaagaactttgtaatttacaaagttttcgagcaaaagaagaagcagaagaagatgaagtgaagagagtgaagagtggaaaatgtaaatgaattgttgaatcttaaattgattggcattggttttattcatactcaatggttataggagaatagaaagtattgatattacacgcctataaaatagtagaacaagaaagcttacaaactcctaaccaactttctgttattaattacactagctgctaaaagctaactaattttatattttcacatttccttgacagtgttatatgtcatatgttaacttgtataccaactgttgagaagtattgacatatttaacattgagttgttgacccgtactttaacatacacaaaatgaaggttcatttcaacgtgtttagtacgtgcgtgaaacactgaattagatgtcaaagaacatgattgtaaattatcacaatatagaatagcgcattgaggacgaaacaatccgatttctgaaagtagagattgtatccaaatgagttcaactgtggctaaagcaagtgctttatactcggatttgatgttggacctggcaacatccttttgcttcttaaaatacctgttaactaggttgccttccaaaaagatacaacaaccagaggtagattttcaatcatcataacaacatgcccaactcgcatctatgaaactgtagattaagtctaaagctagggttgaaagttaaacctatatcgagtgttactgtaaagtacctcaaaattcttttgcaaacattctaatgttcagaggtgggaaattgttgaaattggctcaatctatatacaacaaagacaatgtgaggtggaagagatggtcaataaggtcagctctaaaagtaaagttggaagctatttgcatggacatgatgcgagcaaaggagtataactaaaacgaggttaagcctcttcatcaaaacatctcacatcacatgtgttgcaagtgttatgcttgacaaagcgtaaattaatcgaactgttactcattcggttttttcaaacatatttttcaagtacttgcattaagatgattgttcttttcttttaataaaggtctcgatgcatagaaattcagatttccattagtttatctcactcgctagtagataaggaccacaaagccaagaaaatgcaagggcttcttactcatatcaattttttggtaactttattatcattactggttactactactaaaatgacgtttgtgactttaatcaattactaccattctattcttatttccttttgttcttaaatggagaatcaagaggttaaattatgttccccagttcccccaaaaagcataagcaacttcatcgaatcaacatggcaactttgcaaagacatttgatctaattcaccacttcttattaagtacaatttttcttctatatcttagaacaacgcctaatttttgccagtagcatctgacgtggcaggaccagatccattaagatagatcaaattcagagatacataaatattcattgatgtgcgattgatgatggtgccataatagtcatattcataatagttgcaaatgctatgtacacacacacacttttcttacagaccttgtacaaacagtagcaaaggattctgactgttgaggtcgacgataactaaacataccagaacatgttaatataaatcagacacaaatggtgatgttaagattatttaagaccctagggttaagaaacaatggaccacatatagtctggagatgttggttatacaagcagaagaagtgagcactcgactaactgtcattttttaatctgtggatgagaagagaagtcagtcaaccttgctctttgtatggggtccaaatcagcttgctaacatcaacctcaagacccccacgacccgctgcttttagatgacgatccaaaacctttggatctgcacagattacatgctgcccctttctgtactggatcaattctaagccttgtagtgttgttaatatgtcatctgccttaatggctgtcatgtcactcagctcctgacaaaatttagaatcaaaattgtgaattgtgatgcttagccacacaataaacccaaaacttcagaatatatcatcatagtgaacgctcgtggaaaataaatggccaaaatgcgtaccttgatagaaatattggccttgtgttttttcaaaatgtctaaaagcaccctagtccagtatcctctgtagctcaaaagacctaaatcagagaggggtctttcaggtgtgccaactttaccttctttcttggaaagttcatatgctgcccaatgttagatgtatactattagtaaatagaatcacaagggagggaacaaacagcacttataccccaaaatatacaatatacattaataataaaaaaaaatacatagttcttggttagactttcagctctatatagaaaaaatcaaagacaaatatacatatatatatatatatatatgtaaattattatgagttggttcccacattcaataaacatacatacaaacatgtaagtaaatgagctaaagtatatagtattttttcaattctatgggagctcttcgttttgaccattttctgggtcccttaatctggagaaaaatacttcaaatatgtgggagagagcgtttatgattgcctacttggatttcttttaccaaagttcaggacttgtgctttgattcactatctactgtaattagaataatgtggtttaagttactgatttattttcttgtagcgaggtagaagatcccaagtcctccccatttcttaatttcttcttattgcccacatcttcaacctatttaaatttaagaggaatgatgactaaagtgctactaaggagcaacagtaacaaacatctatgaggcgtgaaggagaaccttttagatcttccaatatagaagcatatttcagaagcacccagtactatatgttgtgccaagattctaatagtgaacattttcaagatatggcaacagtaaaataaaaggctttaaaatggtaacttacagaaagcaatcaaaaactttccatagcctttcctttgataaggtggaagcgtaagaatgcatgccaaattataggactcctcagaatgcttttcctgcaccaacatgtacagcagcaaaatattaattactttaagtaaaaaataaaactagacaaacctgcagaagcatagacctgtgagtacatgtacaaatactccaaaacttgtttaaatattttgattagttcaatttgggttaacagggatacaaaaaaataagtaatacagtaattacagtgactatgtgaaaaaagaaagccttttaacagatagaatctttaacagataaaactctaacagataaaatttatgagcaaacactatagaacatttacatagaatctttaaactctaataaaaactgttcctttcttttttataagaaaacattacaaagtgggaaaaggtaaataacatcttaataagaaagataacaaattcatacaagtgtattatgattttttcctttcttcagaaacttaaaccccaaactaatcgaacacatttactcgcacaacaatttaagctagcctcaagtggcaagatcaatacaagtataagatgcataaaatagctctaagcttctggatagcaaccaagcagagttcacttaccttggaaaaatatccaaccatgtgacatccccgatcatcacattcacataaaacataaaagagaaagaggtcaacatcatagtaaagggtcttgtgatcaagaaacagttttgccaaataacaaaggttctgcccataaactttgttcttcttgccatcaacctgtttcagtataattacataacaatatcaactataaacttgtactagtggaaacagaacaagagatctttcaaagaaattgtatgagaacaataattaatataaaaacacactggcaatggtaaataaatcatgtcaagtttattagagtgaccaaacatttttggaggtagtttattattattataacattaacataaatattatgtaagagcagcttacctcaaacattgagagtgtaccacttcgataaatctcatcaccagggggatgcttgagatcacatttcctcttcatagtaaaaattttaagggggggacaaaaaactcaaaattaggcaatgtagtaaccaaaattgacatatatatatataacaatttaggacaaggacattaacatggattcaattcactacatgatcgttgcataaagtgctttattcacaagcaagaaagagagaataattgaacaaaagctcaccatatgcctttgaagctgctctttgcgcttcatgaaattgaggcaaaactcacaaaaatacaacttcaaacaatcattgtattctggtggaaaaggggagaagtaccatgtctcaatctcatatcttccaagttcaatagttgctatatttttcacttttgtgaattcttcatgttcacgtaagctggctgcatcaagctcctcatgtccaccctacataaacaaagggcagcatcgataatgctaatcttaaagttgcacaatgacaacagatagaacccgtaccgacatcacaaaattgaccacatagctgataggggatctcaaatcaaccaagtgtaagtatgagattagttggtgctctataaccacttggaacaccctacttaagtgattgtaacagctagtataagaggcaacaccctctggtggaccaacaacacaaaaagggtaacctaggtatagtcacctacatgttcacaaagtggaccaccattgttatcaactctattaaaaggaatattgttaagattccacatacacatatcagggcttagtttgttgttaataaacaaaaccctcatcccataaacataggctagtattttggtagggatttcaacataagtagttgtcacacacatcaagctatttacaacttgaataaaattccaaaatgttttgattgtgatcgcattcacacatgtatgcaactatatgattttatttataagggaagaaccttatatgtcaaaaacaatcatatcttgacatgataagttaacaatcatatctaagactgagcaaagagtgaagtggtacttaatttcaattcaagcccatagcacaaatgtgttggtacaaatccaattaagtaattaacactttccttcctctcctcttcccttttacctttattctcatacttcttttaatttgctcttcaatagtcctcatctcccatatcttatttgttttttaaatataaaattgagaaagaatatactcttcatctcaaacttgcctaacctatgaacatgatatcctagcaacaaatatgaaccattaaaaagaaatgatatcaagtatgaacgaaacacatatccagataacatacctttcataaaaactataacttgtacatactacatacctctatatgtgtctcgtcgatctttctcttttgatgacgtgtcattttcaagcttgtaaccttaaaacaaacaaacacaattaccaaaacaaaaaggccttaaagcacttacatctccagtctctcaattatttaaaaaagaaaaaaaatgcaaaacatgaatcccacaaaaaatgacatgaggggaagccttttttgctagagagcatattaccttgtcctctactttctcatctacaacagcctgtactgagtctagatctagttgttcaagcttcacccattcatcaagcctcctattaactaacaatgcaagcaataaagggttaagatacatataaaattaaacaagcatatgaatggctattacatgaaattatcataggaacaatacgaccttattaaaccatgataaaaataggcatattgagatatcactaactatcattggaattaaacgcttaaatcacaaaaaaaaaaaaaaaaaactatcattggaattttaacttcaatatagtttttgcccttcccagacagtggtaaaaatagtaggatgtaaacaagataataaacaaaaatgagatcaaccagcaaataaaccacactgatttagcgtgatttgggccagggtagcaatctatcttttctttcccagctttgttaaccaatttatcctacagtcaatcacgctacatagatctcctttaaaacaatagaataagtaagacatatcctaacaaatccatatcagctattattctcaatgaacattacaaattgtttaagctggtaattaaaagttccaaaaatcaatacactatggcaagtagaaactttgtcaatttcttcacacctaaagcaattacaagaactgttccacactgttatctcaaccaaaattttgagataataataggtaagttccttctacaatattcttctttatacacctttgaaccttcttcttcaattcaatgtataaccttcttgttggacactatcaataatataataaccatttaaaatggtccaaaatttaccagattgaccattacctcaatttcacatgtaaatgccaatgatttcttataataatctaaacaactttcttcatttccttataaccaagcttgtgcatcacttcaatgtcacaatcctgggttctacctaaactaaaacttatcatccagagcagagcactacagctaccccggccaaatgatttccaataatgagaaaattttcacaacacattcaagaggttgcaaaccaaattagtcgagtacaaattatacctaaaataactcttttattttaaaaataaaagcataagctcaaacttacattcagtgtaatggacgtaatactcataatcgttgggagccgtgtaaggaagcttccggcgttcaatgacctttacaggatggtacttattgtccctccaacggcacatgacgtttgtgccgacctccaggggaagcatgctggtcttgcgctttttcaaggagtcgtactccatcgtcatttccttatgaactggcggatcaccatcatcacctgtggatttgtggatggcgtccgacttaccggcggcattagagtaattgctctccgcttttggtggatctaaggaacccatcgtctgtttaaaaaataaattaaaggaatgtttgatttcaaatgagaaatttgcgtttctatgcttcatagtgaataccaaaacaaacaaatactcataagtgtaccacataacaaacagatgccattgtttaccacttttccaaaagtacccatatcatttgttttccccctcattctctctatcagtctttctccctatttctctcgtcctaaaccaatttgaccaccagctcaaatagtttggcggtagcataagaagatataatttataaaaagtacctcatctactttctcatgtttataaattgaattaagtttccatactacaaccagaagggcaaaaagaataagtagataaaagcttttgtagggattagatacgtaaaccacaagtaattgaaagattaaatgtagtgctcatatatgatatttcaaataataaaggcaaaaaaaaatggataaagtaaagttagtataatgtaatcagtcaatagaggctaattcaaggtcaccagaagtcagacaaatttctcattttgtgagaagtgttaagagatttaagataagtaaaacagaaaatacaaatagctttctttatttctcttattgaaaatgaaaaacttaaatctatcaagaaatttgaacctaacaaaccagcagtatagttcagtttgacaaacagatcggtaccactacaaatccattacaggggcctgaagttagagcaaaaccagaaacactagcattttaatcataaaagaagagcaattaaggagatgttttcacaaactaccatattagcaacaacaacaacaaattaaagttctttgacttccaatcaaaaaaattgcttaaaaacaaagagtaagaaaacagaataacgcaaatgagagatttgaagaacacaattatatacatatagccaaatcttaaagtagctttcttcatagttcatatcatgaccataaaactcatcaattctacaaaaaccctcatacagatggagaaaactaaggctaaccaagatgaaaacaagatagaaacaaaaaaaatatatatcatcttaaattaacaagatagaaacaaagaaaacatatatatcaaaactcataacattctcatattctcagattatcatagaaaacaaaacaatcttaaatgtacaatcaggttcatacatacataatatataaatatatatatatttataaacaaaaagaattcttactgtaatctaaattatcaaatgttgaacttgagtgttgagtgagcaatttctctctccgagggtctgaatctgatctgatgagtgatgagatgaacaaaaaatatgagaagagagacaaagagggtgaaaatagaactaagaaatacatagggaaaaaaactgaaaaatattcatatttcaatacagtttacgggttttgtgaaaatcgtgaccatataaaattctttctgagaacttaaatcattttcttctaacgaactatttggcaaagaaatcaactcattaagtttaacagagcaatcgaaaggttaattcaaacccttatattattgctataacatattattcaaacgttgcaaagaatgaaacaaataatagaaggagttggtggtaaaataattcgaaaccacctgatcaatggcccaatcgaacccgttagaatgtcgaatctctaagtttccagcaaactccgaactcacggctcacggatcttcttggcctctaaccgcctgggtcgtggtgtcgggcgagagaaaaacgcgaggaagaaggaagccgggtttcagattgtgttctgaacaaggattagtttggaccgtaaatggccggcggtggtgaacggagaagaagaagcggttgagaaggagataacgggcggaagagagagaaagaaatagggttatcttactttattttatttagtaagggaaatttaagatttcatactaaaatgtcacaaatggaacaaaaataaatgagttttttttttctgaaatttttacaccataaatacaaaatgcattctttattactgaaataccttcacacggttattgttacttttttactcatcaagtttattttaggacacttttaccactttgcacacacattttcatgcatcacacttgttgcttacacgtaaagggtctatgattgacttctatcaatcaatccatcatttcactctttttttttcttcttttcttttt

SEQ ID NO: 162158 - DNA, 2995 bp, Cannabis sativa
  modified_base (330)..(341): a, c, t, g, unknown or other
actagtactactactaactagctagctgctactgtctactacatttgaaagaggttaatttgtttttgccccttaaactttgacatgtatcaaatcataccccttgaacttttcaggtcgttaaaaatttctcccgaactattaagattgttggatttaagaactaatgtccaattttactaaagaaagtttgacgtggatgaaaatttaagagacacaatttggtacatgttaaagttcaaagggtatgctttagtagatattaaatttcaggaggcaatgatttagtacgtacatgaacaacaatcgccacattagtaaaattgaatnnnnnnnnnnnnaagtccttaaatctaacaatttcaatagtttaggaggaatttttaacagcttaaaaagttcaaagagcatgatttggtacatgtcaaagtttagggagcaaaaattctaattcacctttgaaagatggcaaaaaatgcactttgaccaagcattgcatgacttaagacttatcttttctagtactactacttctacttattaatatttaccagacaataaaagaagaatcaagtgaagcaatgaagaagtttatgaagaaaataaataaatgcagtcaagaaggatgagaataattacttgattaaagaaaagcactaaaatcagtacttccccgaggactattggcaaacattaaggattgaagagacttgaaccaccaatgttgatagagattagtatagatacactagtagcaactgcgagccagaacaaagccaatcctgcaatcgacaagttttctttactgtgaatcaagaagaaaccaatccaaacatgtcgatgattactgttagcggtgaatggaaattacctcgagaaacttctgaactgttagtaggaatttgagaaactgattcagtgtcacgaacgcctgatctagaggaagttgatcctgtacttggcgtgtcatccaatgttttcgtaattccagcttcagatgcaacaattcctcgaaactcttcactcacaattaaggcagctagaacatccataaatgactcttcagcttctctagcatcctctatttgaccttttacaaaagatgcattcaattcatcagactcagacaaatcatcatcagaatctgaagcatctatatcaattgtttttgactcagttctgtcatcctcttcatcctcaacatatgctttatacgttaatcgaagtaggatttctccagaagatccctttttaaacagtccccaaccaccttgtaatgccacaattctgtctgtcggtacagtatctttaagggatccaagatcaacctaaaagtgcaatttaggtgtaaacgattaatataaattaataatttgttaaaacaataattgcaacttccttttgactgctaattttccctgaaaacatttatgttcacacataagaccttaacaaaaagcttgaaacattattacacctgatattaaccatagtcttactagagaatgccataatcttaaatgcgatactggtcggaaagttttatctaagaaaaaactataattaagaaaaaatttacctacaaaaatgaaaataataaaaacaaatatagcaatagataactttcattaccatcaaagactgtaaaggacatatattacattacctctcctgtcccaattgtcaaatctgcaaatccgagagaatcctttacttgtatgaataacttttgctttctagggtttgtaacaagcatatgaaaatcctgcccacaacacaagcacataatacatattagaggtagaattttgcaccatataattatatcacatatagaaagcaaaagatttcacatgtatttttttttccatgtacaacttaatacatgaagcagtcaggctaagaagcttcacctggttccagattggctcaccaggtgggccgatgacggtagtttggctgttcttcttactacgtattacttgatccccaaggcttagagtaacataagggtctgttttacctggagagcaaattaaaaaataaaaagggaaagaagtgtaaatgatggctgatttgcattaagttggattgttgtttgtatataatatattaatagattcaggaatcagaataatatgatgctaagaatctaaccactagcaaagagtatgtcgagtacatgaagtggtagaataattatggtaagattatctataataagtacaattaaacgagtttattactagtgtaattgagaattaaaaattattaaattagtgttctcttcttgagaaatgtaggtagattagataagggtttgtgttcttaccatagagaacgaaaagcttcctggcatcgacaagagtcactgatagctctccaacaaaatccttgtttccttcttgctctcctggttttgttccttctatctctccagattttgaatcatttgcatctgggccaactgctttacctttttggaaatctaaaacaatcttctttggtcgtacaaatagtcgtggcaaatcctcagtgagaagttttttcagaaacctggagaaataaaaaaaattaagagatatctatgtgtccaaaggtataagctgtacacaaaggatggataaatatcaatgtaaaaatttgtagtttgtcaaaaaccgaaaattctgattttatcaattcacggcgagtagtaaaaagattgcattttcaatttagtaagttctcattgagcagtaaatagaaactccatgagatattggatagaaccagggggtgaatagagaaaagagtaacaaaagaaagaagagggggggaaaatggatattacataacaattctagaggaaaaaactgataagcacatttataggaattcaatgagacatattgtgtttgtaaagatgtcagagacaaagttcacttacattgaaagaacaggaatgtctgatgttccccatcgcattcataaaagaaaaagaaaagtaaataaa

SEQ ID NO: 162159 - DNA, 5327 bp, Cannabis sativa
ctctctctctctctctcaaagattgagaaatgcttttatggctatagtttcttttctgtctctttttgtctcattttgacacattgcaggtgccaatttgaatgcctttgatattattcttgtgcatgaaaacagaagcattccagcaatttccattgaattctttaagcaagtttgttttcttttgagaatatttctgttcatgaaatttacaaatcaaaatggagcccttcagctctattttgggacaatgaaatttgtttagtttgaatgaaaaaaaaaattattaagcctaaatcaaaatcgaaattttaaaaaaattggagaggaggcaactagggagatggtcaacgacaaggagaatatcgcgaagaagaaaacaaggtcggggatggtgtgggaagaggaggttgatatttctttcttcttttcgattgcaaagacaggtacaaaccgaacaaacgagaaaggataaacggttacaaactgaaatttgggagggttgcacaacatcagaatgggtattgtgttagctagagaaaattagttatatttcttttaggtttaggttgcctaaatttttaatatcatataccacatgtttaggttgcctgaattttcaatatcatataccacatgatgtggtgtgtaaagtgagtctcacgtaagtattaatcataagagtgagaatgatcgaaattaagagaatcttaaaatcaagtatttaaagaattaaggtggagtttgattagatgtaatgaaatagaaaggaaacaatttttattctattcctttgtttggttgcattttaaagtattgaaatgacattccaataaaatgctctttccaccaaatggactattctattttaaaatgaaaggaaagaccattccaatataatgagaaaaaatttaataatttttttatcaatttcttttatgcattttaaattttattccattctattcctattcattttctcatttccattcctattcctatagtttggttttacatttccattatcaaacatacaaagctcaataccaaacaccttgaaaagaataattaaaaatttatcaaacatttaaatgtaaatttttctaaattattttacaatttttttaaagtagaaagttaatttcattaccaaaatacaggagaaaacctatattgaaatttattccaaccccaacaactttatcatactttttcaatgtttggcatgtcaaagcaaagctactaacaaaaatgaacaaaatcaaatatttttagaaaccacaactaaaattctagcaattgtagattggtttccacctacaaaaccaaagaattagtatcccattgaagactattacaacctcttcatttcttaatcttggttgggttaattaaatgaaaagatacaaactaagctagaaagaaaataagaaacaaaaaaaaaatagacgaggcacaaaaattacaaggtcatactcattcccacattcgaaacaggctcttctactttgccttcttcagcagatttgcagttctgaattcagcatcatctcgaacgaaactccaccaaatgtaagttagggggacagtggtggcatgccagagcgcatgggcgtcaacaaatccttgatatggtgggaaatcatagatttcgagaagcattgctagacccccggccactaccactagccacaacttccagcgagatggatggcgagtcacaccaccgaaaatagcccaaatcagtatttgtgccacgcccatgaagacacaaactatcatgttccaccctgcaagttaaacatatgtataaagactcgggataattacaaacagtgttgatgatcatttcacactagtttttaatctgaaggcaaccgaagaataaaaataatcaggcttaaatcaaaaacaaagacacaaggagaagaatataataccgtagtctaatttgtaaaaattcagaaacattatatgggtggttacaaaggcaagcaatggggcggtaaccatgactctggcagcctcatccctcacgttaaaacttcttagcacagccagaataagggagtaaccaagtaatgccaccgccgatgagtagtctaacttttctgtcaggtcaacatctctgtagttcgataacaaaacgttaacctcacaaggaaaagaaagcaatagaacaaccgaaataaatgtttcagtttctgattgagaacatagataaagaaagccgtataacgaaagcttaccggcaatggaaaacagcactccagaaccaggaattcattgttaagagtccatagatatgccataaaccagcaaactcatagtatgccctcttgtcttccctcaaagggagcttatagtatataagaatgaaaaaggatagccaaccatgaaaatgcattgcaaggttcagtgcagagaatatgacagaagcaggttcctggatatgaaaactccatcaaatttcacaaaccttagaaactatgctaacacattcaactctaaatcaaaaacattatgattatcgatattactacataggttttgaaaattctacctggattccatatacacgtttgaagggccatttaccatgatatttgagaggagcagagccgggaagagattccctttctttctctctatcaatcatacaatggtagcgacaatcactttggcaatcccattgtttccacctcaaataaagaggctcttggatataccaaggaccatcaataggggcatcattggaagagaacttgcagtacggaaagcatctttgccctacacatcccgtttctttacactctttcacacaagccctattttcattaacaaaaatacactcctttacacatagcaaaaatagcaaaatcaaataacacaacataaacatttgtactcaacacactcattataaacaatgcattatttcactttctataaatcttttcttgggaccaggaggggccaagaaactatatcaattgttatataggtaggactcgaacctcagaccttgtaaaggcaaaccaccaaaacccttgtgctacccgaagtaacttttcaaagatgatacagtagttactaatcagatcaaatatttacactaaatctccaaatcaaaactctccccttttcatcattggttataataacaaaaagaatggagaaggataataaatgttattcagaattattcaggctaagatcgatagataaataaaggcatacctgtattttggatcggcatcaccagcactggcatctataacaccaagattccatgaaaccaccacaagtaaaatgatgatccaaaaatgttgtaacatcttactgttcaaacaattcaaagtgaagtgtatcattatgattctgttaagggtgaaaattagttatatgtttaggcagaaatattttccaagaaaattgaaaattgaaagtgaaagatggattagggaagaaaacaaagtaagatctgggaacttactggagaaccaaaccaatctgagaattcctttggtttcttcttcagagcaattaaacagctagattaactgtcgattattgcaatcaaaatcagatcataatctcagctaatttttacaagatatcattttaaccaaaaaaaaaaatcccttctttccactaaggttgatcaaactgatagaagcaaacatattcatttgaatatacaaactgattaacaatgtcactaatcaacttaattaccattctttcttatacagcttgaattgactcgctatataaattctctgagtcataaccttcaatacttgttaatctacaaatttttgattgattaataatgaaaacaaacatacaaatagaataagagagaagaacatacttctgatatttcatgtccaacattcctgatgtggatgactttagaaggctctgtcattgttaatcacacagtaacaccaactttaataacatgaaaaagtcaaactaatttactaagaaaaaccaggacacattccaaattcaaaaatattataattacacccattcataaccaaaaactaagtaattggttttgaatttaattttcaaatcaataaattgaagataataaacaaagcaatcttgtttcaaatccattaatgaacagtaaaaaatcccatccatttcaactggacaaaactacagaggacataagaaatcacaaccaaaaatttaaaaggggattcttttttttttttttccaatttctttttacaaagatactaagctaattaattaccatcaaataaatcatctccaagggaaaaacctaataacccatttcgattgaagacaaatcaagaacagggtaagaacccacgaggagtaaaggattcccaattaggaggaaaagggttataagtcgtaaagctattttctttgcaaccaaacagaccagaccaaacaacattcatccaaagaaagaagaaaagagatcaataatgagagagagaaagagagagcttgcctgatgagaggagagggttgaaaaggagagagattttaggattgtagatcaagtggttttggcaactgaaagccgtatattttgtttgccctatattaccaaataccatagtactaagttaattcattaatgttgaatttgtcaatttatgttcttctattctacttttgctacttcattttaatcgccatagtttagtcctaatttttaatgttaataataatgtgattgaattcatgttaaaagaagcaaataatagaagttataaatacaagtacaattattatttagataaatactaagagtagagttgtttattggatcacattcaatgaatttgaactcaagcgatccagttcaattatttattggatattgaattttgtctttcgatactattcaatcgaattgagtccttcgatctaatgtaatagatgtattgggttggatggatcgattccaactattggatgcattaattggttttctattagattggattagattcatccaatctattttagccccatttaagtttatttcattcagaagaaaaatatatataaaaagcatagtttaaaacctaataataaacatacatataaatattagtttagactaacctaattctcatgaccctttaataaaattactaaaaaataaaatttattcaatacacattgatatttttactagaaaaataagaattaataatttagatctaagattttttttttctttaatctcatgtgtaggtgcataataagaataaaatcaataatatattaaatatataaaattattaatattttttaaaatatat

SEQ ID NO: 162160 - DNA, 4105 bp, Cannabis sativa
  modified_base (4062)..(4068): a, c, t, g, unknown or other
tttttttttttttatgaattttgtatagccgcactcaatcaaatatagacaacctaatagcataataataataataaaaaataaaagtgtgtatgataatatttttttaattattttttttttgttattttaaaaaaaaaaattgaaaatatttttaaaaaacatattctataaaattgtttttactttttagttttaaaaataaaaataaaatttttgaaaaaaaaatcacttataaaatttatttaaacaattttttatttctttattttagtctatttgaattttcttttattaaagttttggactccgatcctgtgactgaccaagatctcaacctcgaatcccagaccccgacaccggatttagcctccgtcgcagcccctgaacccaaactcagaccctacccaaaccctagacctcgactctctaccaactttctctcacctcaattttcattccttacttaaatataaaaacaaaaaaaaaaaaaatgaaatttagtatttgtttttttttgggtaaatactattttagaccatgtgttttgcaaaagttactaattggatcctctattttgttaaataacaaaatggaccttatatttttcaaaaatagtaaaaataagaccctgagctcaatttttaacaacattattttttaatataactaactttaagacaatttttaacacgaataaatacagaaaatataatcagttttaaaaaggtgctacactgaaatacttaattttattttaacaatatacatatttaatatttcgcaacagtaagtttttatttattttgttattccaaccttgtatttatgtaattacgtaatcaaatttgaactaaaaattcttgcatatgagtattattaaaaaaaaattatatataatataaatctatttcaataaaaatgaatttcatccgagttcaaaattattccatcgaacgtatttttatttggactcagaaatagcgacatgaactaaatatactatttaagccaaggagcttacttccaatagtcttgaaaaatgatgattaagacgagattcaatatttttaaaccacgaaacactcgggattacaactcaacactttttgagattttaagaagagttgctctattttctcataattatctttaaatattttattccctcaacaaggattcctaattcacccatgatagaaaatatggaggatggaggcgaagtaaaaaataattttgattcacaagacagaagaatcatttttattcctgaactccggccttgatggaaaatatgcaaggttgaaggcgaagagaatatgcaatgtctaataataataactaattttgtttcactaatgatatttagttttatgattaatcttttgattggctagaagcctatagctagtattggaaatgatagttattttaagaataaatatgatttattctattgaattataacccttttaaagttttgttcttaaattttttctgttgcaaaaatttctcctaaattgtaaaaatcattacaaatatcctttgcagttgcattctggttatttatttaaacaatttgttgatataatactaacataatattaatctagtccaattcaagagttaagataaaaaatatatacataaacagtattttaatgataaattatgagagtatgtatatgcattcttagagctattatttgtgtgtttaatgttggattgtataataaacctattaaaaaaattcttattttctaaaataaaaaattatagataaaatttggcacttcattgcaaaatttaaattaaaataataaattgaagttttagaaatatatttaatgccaaagaattggattgtataataaacatatttaaaaaaattcattttctaaaaataaaaaaattataaataaaatttagcacagtacaaaatttaaatttaaaaataaattgaagttctaaaaatttgtattatattcaatgtcaattggattgtatcataaacctattaaaaaattattgttttctaaaataaaatattataaataaaatttaacacttcattgcaaaatttaaattaaaaaaagaaattgaagttttagaaattagtataagtgtgcaaaaacgtatatgaagcgaggcctcaacttttgtttttttttttgaaagaacgtctgagttcattaaactaggaaaagaaattaaaagtcacagggggattcctttcccttgaacaacactatcgttatggctagaacatctagcgaggcctcaactattgctattgatgtagacacatttagtttgaacctttcttttttctctttttaatacatcaaaagaaaattctacaatgcactcttaaaagaaatttaccgatgcactatttatctatttcagtatttaggagaattttttagttcaatttttttcatgctagtctcactagttatttaagacattgtacaaaattttgagaaatttagaaaaatttaagacgccgaaaataggattcaaacagtctatttcatgtcaaataaaagagtcgcgtgtaacagactgtttgaactctattttcgacgtgttaattttttttttttaatttctcaaaattttacaagatgtattaaacagctacaacatagacgaccacgaaaaaaattagattgaaactctcttaaatgccgaaataaataaagagtgcatccgtagaccttttaggggatgcattgtagaagccaaatcagggaggcatacgacattccttcagcctttatcagagtttatcttatggtccagccatacaattttactctttataaaatattactaaatgatgatcgtcataacttcttcaacctttgagttggaactaggattatcttacggtccaaccatgcaattttactcttttaaaaaatattactaaatgatgattgtgataatttcttcatcctttgagttcgaactaggattatcttatggtccagccatttaattttattctttagaaaatattactaaatgatgatcgtgatgacttcttcagcctttgagtcggaactaggaatatgttgttttttcaacaaaagttatatgttgtttgttattgtggtatagttcctctaaatgtaaagatctccaaaagttgttctcattatagaaagttagatgacatctaaaagggcattctcgaaagtctaacttatccacgtggaaggagtcttcaagaaagctagtcatcctccgaaaaggagttcccgatggctagctgttctctcctagaagggagtcctgtatagtcgactccatctgtctttattcctatatgggaaactcttcagcgtgtgcttcaattcatagtcccggaagtgtttgcttcatttgggaacactataacttaagctgacgtggagatttcgttacaaggagtttgttaagtttgttatgtcgtaacaaacttaacaacttagcacttgcagccatcgactttggaattcatatccctaatctataaataccactaacacttatcattttgaagggaggtgattaacaaaagagttttgagagaggtgatcttgagagagaaagattgagaagtatagagaaaagaaagagatttggtttgtgatttgtatgaaaaatattctgtagatgaaaaagattcttaggttagaatgtgagattaaacactctattgtaccctataggacgaaccaggtatgcattttgctattgatttcattgttttattgctttattatttatggttataagactttgttcatccctattataattttcgtttattgtgtgtgatttgttattcttgttattactaattgtttgttaattaaattttagttaatttgattctacactttagtcgtaattttctcacaatcaatattataaagtttttcttcttactcaaagcatctagaggtttatgtctcgcgagactagagaaaaatgcctcgataaacaatgctgtttttcaaataattttagtagcgtttggtaacatttttttaatcagttttttatttnnnnnnntagaaaagtgaaaatattttttaaaaatatgttctat

SEQ ID NO: 162161 - DNA, 2271 bp, Cannabis sativa
tctagaaggaatgccaaatcttgaccaagttcatgctctcattcagcattatgggcctacattgttcttccatcctgacgaggaatatttggcttcttcagttcaatggtttttcaaaaatggggcacttctctgcagagatggctctaataaggctgaacctatcaagtttggaggatcaaacttgcctgctggaggagtgaatgatggtaagttttggatagatttgcccggtgatgatgaggcaaaagaacatctaaagcgaggaaatatggaaagttcggagctttatgttcatgttaaaccagcactgggagggacttttactgatatagctatgtgggttttttgcccctttaatggaccagccacccttaaagttggtttgttgacatttgcaatgaacaagataggagaacatgtgggtgattgggagcactacacccttcgtgtgagcaacttcaccggagaactatggcaaatatacttctcggaacacagtggtggtagatgggtggatgcttctgagttggagttcatccaagggaacaaagcagtagtttatgcatcaaaacacggtcatgctagcttcccacatcccggtacatacattcaaggctcaacaaagcttggaataggggccagaaatgatgttgctcgtagcaagtttttcattgattcgagtacaaggtatcagatcattgcagctgagtatctcggtgagggagttgttacagaaccctgttggttgcagtatatgagggaatggggtccaaccatagtgtatgattcgcgatcagaactagacaaactacttgacattcttccattttattttcgattttcggttgagaacatctttgatttgtttccaactgagatttatggtgaggaaggaccaactggaccaaaggagaaggataattgggatggtgatgaaagatgctagctgtgccatgttaaatgccacttaaatcatattttgaagagcttggttcctaaatgcaagattgaaaattgtatataaaccattttggagatgatactcagttcatgctgcagcaaaaagcttttgacagcatagaagtgcatccaatcccaaagtagttttaggatataaaggacatgaatatatttagttacaaaaaaatgtcttctcatttaccaagtcttaaactgtgttgaagcttgaaaataacagctagccaggttgtgcttcaacagcagagaagaaaactggagttggtctttctgtgccaccatcgctttaagccccattcttagtaagattgcttggctttgcatctatacatgcagagccatagaaagacactgaacttctctagcctctctctctcaaaattaattgggtattgttagattggcttgttgtatgttatatacttactatttgtgtatcattccagataattgtggagttcattttaaaattcaatacgattgatttacactgtgagatcactttggagttttagaacatataatacaatagttcatgtgtgttttgtaaattacattaatacaccaacttttcacaccaaatgaggccggtaagtcatgttatccaatgctatgtcaactgatgtcaccatatcacattctataagtggaatttaatattaaattgcaccgatgttacatcttacaagggtgttaagcaccataaatgccttttagcaattcttagcactattggtgcttagcacctaagtgtcatatcactattgatgtcattaagtattgaatatcatataataatctttatagaaatattgttattaattgcaagacgctacctttaagtggtactaagtaccagtaaacaaatctcacatttttcttatctctttttgaacactacttcaacacgctgcctttttcattttctttaatattgtgtttcattatagtcttctatacttgctttaccttcatttaattttgtatagcacacaactatcacaatggtgattatttttcaagtataaatatgactttatttctttctagtttgcaatattgggttgagattctaactttcttatttattattattttttattaaaatgcgggaaggagtaactagaacttgagtccctttttgtaggaagaggtgtattactactatgttgtaggaaaattttccaaactaacaactagggactcattttgtaacgccctaaataattaggcacgctgcccaataaacttatgaaatcctaatcccctaatcgggattactagtaaaat

SEQ ID NO: 162162 - DNA, 1517 bp, Cannabis sativa
gtgtacttgtcattaagcctatccctacgctgcttctccctacaagccttggtgctagatccattccgcgattccgatctactcctgcatgaagaaaatgcaaaagggacaactaaatttaaggttattcagataacaacacaaaagcagataatccacacttttggacatcaaaaaactttatggatatctaataattgtcttaagaactctacaaattaatcaccccacatcctccatttggctcagagaaatggaataaataaatgaaaacccaaaattaatatggagaaactttccaagcaatcaagacaagaaaatacaattaaaattattaattttagtttaatgtaaaacagaaatcttaatgataaaaacatatgcttttttcatgctgtcataaatggttactgtatcacttatcagcctcacatgtaacctcactggccaaaagttcacataaattagggcctggctacaaacgaaaatttcccaccatgagcagctcagtcttgatgaatggacaagcttgacttggtatatgattcaattttaaacaaacatctataaactgtggagacaaattagcatcttctccataaagcagtacaaacttaaaagtgaaaggcaataaactaatcataaaggtgaagtataatcatttaaggcattaaaagatcataaagaacaacaggttttaattaatcggggaccatgctctttctttaatctataacaaacgtaaaaggcaaaatacacactgcacaaacctcttctttgatccagattctttaaggccctctgaatctcctaatgagccatcaatctccacactggaaacaaatatcatcattacaaaaatatattttgaacaacccaattattagcctaattaaaaaacttaatgaaaacaacatcaaaaatacacatctcatcactgtcaaagcatcatagaacaattataatacagtacaacctacaatttgactagcaaaacaaatggcagaatgatgagtattactcatagttaaaggaaaagaaaaagaaatactggctttcaaccttaaaaggtcacataatttgcttgtacatgcacataatcataatcccaaactaaatcagcaacaaaagtaaaatagaaaaactttcaactttgtatataatgagaacgtctatcaataaacttaaaatctctgaaaagtcccacgatgatttacaaaaaaaaaaaaaaaaaaattcatagtcgtttaagaaagttccaaaaactacagcatagataattattccaaacagggtaccgcataaagtatttatgtaaaactatatacacaactgcgtaatacttcagcccaccgatttgggttgctaaccatatcgagcaagcaaatccagaaaccccttttgaattatacttctaaacattacaaccccagtttttctatttcattttgcataccatcttcattaagtcaaaagccctatattaaaataataatgataataaaaaaaaaaaaaaa

SEQ ID NO: 162163 - DNA, 2122 bp, Cannabis sativa
ccgcaaatttctctatactgaattataatatgtgagttctgatattaaattataaaatgacacttatcaatatgtgtataagtaggattaggtttagggttagggccacacacactactgcatgcatgtaaaagcatagaaagaaagaaaattaaaaaagagagaccacttggagccccataacttggttggggccaccacaccacaccaccaatggcccaaatgattctctccattgtcacgaaccaaaagcaaatcctttcccaaacatcacatatgagctgcctctcatcataatgatttcacacctaatactactatactttccattccccccttctctctctcccttgatcattatatatacataattgaaattaaaagccatatacaaaggaagtaacttaacacacacacacaccccccatttccctaaactaaaaattaaattaaagctttttttttattattatggaaaagagtaggtcatttccggagtactcctcggcttattcgggtggcgaattcgggtttggagatcggtctaattcctataatttcaatggaccttgccaaaagggaagtggatttgtaacttctacagatccagagctccaaagaaagaagagaattgcctcatataatgtgtacaccacagaaggtaaggttaaatcaagtgtgagaaatagcttcaagtggattaagaacaagtttagtgacatacgctatggtggtggtgtatgagataatgttttaatttatatatttataggaaaatcttaattaattaagagtatctctagactctatatataggtgatgtttaaattaccttcttgatcttttagatccttttctttttgggggtgtttttttttttttttttttttttttggatattgacaatgttgttcaaaacaaaagagggacagatcaaaatccctaatggtattattggaaatatgtatcaaatttgggagaaaaaaaaataaaaactcacaaaacaatgtattaattagtatgataatgatagatgggggattgtgcttgcattgtaaccacatgcaatatatatttgggcatgaaatagatatttgaactgatttagtttgtatttattggtgatgatataaatatatataatttgacttttcttatctttcatttgtttttcattctcttaaattacacaccaaaattatgtaatttgcatgtggatcttttgtcgaaatagaatggtcttactttttcttttttcttttaaataagttgaaaaataaccgatccaaatcaacgacaatttcatcagctcgagtaaattttcaagcaagattgaatttttgttcgcgaaactatttaatattcacataatttatcatcgtatattaacaaggttcacttgatgagtaattaacaatttcactcatgtcatcataaattaattaattaataagatatttaataataatagagggcaagaaacaagattggtttctgaggaaacaaaatataagtaggtagggtatgagtgtatccaaatttagatcatatacacatgctaattaatgctaatacacaccctgttccacttccacttattattattggtttttctctacacaaaatctgatcatcatattcatatgtgattatgttccaatatctaatcatcataggtagattaactcaatatatgtaaatttaccttcccatattaaaataaatagtatatacatataatatagagtcttcacattaattaatggacattaattcttgactaaatttcaaaacgaacatcgtgattggaaaagtggtgatggtataaatatgatagttgctaaaaagtattattggtgtctagtatctttctcggtgtcatactgttatttggtgtaattaattattatattttatataaaataaaaaaaataatttttagagaatattgctaaccaatcgtgagatccacctataaaaaatgctagacactactagtactcaataacactaaaaaaaactgcaacttttagttacaactttttagtcacaacataatttttttgtgactaaacgtgacttttagtcacaacaaaatgtcacttgtgactaaaacatagta

SEQ ID NO: 162164 - DNA, 5935 bp, Cannabis sativa
  modified_base (5873)..(5875): a, c, t, g, unknown or other
atatgattggtctaggattcttgtcatgtaagatgtaattgtagcgtgtaattattttcttttctgtttaatatatcaaaataaaaaaaaaattagattataaaagtgcatgatatattgattggtattacataccttttctgttcaatttcaattttccagattttttgttcttcacaatttcttggttatcatctgtccttgtctattcttcttgatagatcttctctcttgttgatattagtgattgcagtgatgcattagcagttgctattttcgtgcaagctctaaggtctgaatttttttcatcaatggaggtttttgacggaggagttgctctgcgatcagtgggctcagtatcgcaaatagttgtatcgtgtttttttttttttgtttgattatgttctgatttgcaatcgttgctaattcgctgaatgtttaagctaagaagatctcatcaatggaggtcatcgataatggagttttctgcattatggcgatggagatttgcggctgtcggagaattttctaggtttttttttttgtttcgaatgagctttaaaatgaagattgaggaatttatatgtttcgtttgtagattaggaatcacgctcttgattcctgttttttaggataagccgttgttttctggttgaaggttaccgtggggaagatgatgacgtgtcacgtcattatgttttcatgatatatataacgttatttttgtaaaaaatttcctaatatagtatattcctaaaaaaatccctactttttatgggtgggattggatctcattgataatggaagatcaatgaaacaagtcaaagaaaatggttaaaaacttagcaacacttgtgatccaaagcccacaacttccctttggtcaaaccttaattagatgaagcacccataattaatcaacttgcatcacaactctatacatcacagaaaaagaactgatataaatatagaagacatgaaccagtgcttcccaatcagtttcagctcgtatcgaatagcattttaccctccatctcccaaattttggctacttgatcatagttttcgaatgcatcaaaatgtgatggtatacattggttggaaatgccatcaattcactttggctctattcatgatcatgaaccttcttctactactgccatcaacttgctcgcctagtttctccaagtgggacatccttcttttccatgactcagcgggacctaactgaatcggctttggtcccatgtcagttttgttactgtgagaggactcaagaattgaaggatttccaccatcctctgaaactagcataatctgcttcaatgtctccaccacttggctcatcttcggtcgttcttttgcgctcttcaatagacaactatcagctaacttggcaattcttctagccgcacttgaagaatattggctttcaagtctaggatccattatctgtccaaattttttgctttctggaggaaactgcttcacccattccaaaagtctctgttctattctgggacggtttctctccactgaccgcctgccagaaagaatctcgtacagcaccacaccgaaactccacacatcactctttgctgtgagatggcctgtttcaatgtaatctggtgcagcatatccatatgttcccattacctgatcaaatataaaaatcataactaatcagagtgatttctttgcatttgttacataagctcataaatcaaggctgccttaaatcacaaaatttggagaaagttataatgtttttagagcatgatcttaaaatatgcaatgaatcaagaacaactttaggaaatagtacttactgcagttgagacatgagtatggccagccgtcggcccttcccgagctagtccaaaatcagacaactttgcattgaaattatcatccaataacacatttgaggctttcaaatctcgaaagatcaccttcaccattaccaaaaagaaaaaaaaaatctagtgattaatgagcatacactgaagtcagatcatatgaaaaaagctttgcttacatttgtaaattttctggtacaaatgaataatccaggaaaaggccttaatttgagggttggtaataacaacaataccaaaggtggttttctaacaatatcagaatactccatcaaaccaaaagggcggtgataattggtaagtcattttgtattgggggtttcttaaggcatgaacagatgggacaatatcttagatctaaagaatgtatacaaaattttcaaaaatggacctttataaatgccgaaatgttttgaaaaacgatataataacattatattttagaccctcccaccccccaaatgagctgcattcattcattgagaaatgacagacttaacactaacagataccaacctgaacttccaatccttcatgcaagtatgccaatccttgagctgctccaaacacgatatccaatcgttttttccacggaagagttggataagccttattgaaaagatgatcctctaaacttctattttgcatatattcataaacaagtagcctttggatccctctttctccatccacagcacaatatcctataagtttgacaagattcgggtgatctacaacacccagaaattgaacctctgccagccattgcttatgaccctatatgagattaaaaaaggaagtttagagatcaaattagttaaaaaaaaaatggatctcaatagtggaatataaaatcaaactgaacagatcataatcaaccaagtgaaactaaacaaaggtataattctaaattctaatgagaagtcaagcattttaaattaaatattcatgaagaatactcaacaaactaggcctataataataaagtaatacataataccaagaatgaacagatcataacattgtccaaagagaagttcaagcattttataacttaaaagattcatgaagaaaaaaatggaatatattctttagaaactattattatacctgtgagccatctttgttgagcttctttatggcaacatcgatttggtctccattcccatcagcaggcttgattgagcccttaaaaacactcccaaaaccaccttcacctatcttaaaaagcctgctgaaatcatgtgtagcaattctgagctcagagaaggtaaacactctcaagttatgtgctttttcttcatatagttccggtatcccacgtggcgaattggcagagcaagaagacttcataatcctactatcacctcctgaatactcagatttggtctccactttcagctctggagctgacctttgtagcttgctcttggccttgtcctttaagtagtaaaaacaattcatttctgggggtttcaaatgttatatgtgtgtattatgaggatccttttactttccattgattgaactacccttcaaataggctgcaatgaaactttaacagacaattatgtaaaccaaaatgttagaagtccttaaaaaatttacaaaccaaccaaagaacaaaaaaaagtcagagaaagtagttatttaaaacgaagggcaaagggtaagagagaaaaggtaaaaatagttgaccattcaataaataaagaaaacaaaaaaattatgaaagattttcttggctaagacatgaaagctaaaaaaaaatgacaaaaaccagttgagacaaaagaaatgaaacctggcccagattggtagatccttcaagaagaatagataaacaaagaaacttgaagatcaagcaaaacccagataagaaaacataaaagacagagcaatcaaactgtaaagaagtaatttttcattttttgttgttaccttttctactatcctgtaattgtcagagtagttgggaagagggtttcaaagggtgtttctatctgtttttggttgtttgaaacaaatggaattaatgaagagtggttaggcgcgtattaactcactcaaaaaagcgattccgtgtagtatcagattttgggtaattgtaaattgagaaattcaacgagtgaagagaactgttcaaatcaatcttcatcatccgttgtttttagttgacagagagagaaagagacatgaatgttgttccattccagaagtacttctctctttaccttcttcttccctcgtatagacgacatttttaagtagtttgtttcttgaacaaagacttgagttacaattttgtcaaaactcatatttataaaatgttcttatgttatgggtcccttcgcctgaacgttgactgccttactaaataatcaaatggagcattacaggtttgactttattagcaatattccataaaaattaaaaactactaataaatataggactccatccttaatagtatcaatattattaggcattattatgctatttaacatttctcaatcaaatttgttactaaattttatgaatattcaaaaattcaaatttattaacaaaaattgattaagagcattcctatttatcatcttaacatgttcaacaatatattgatattatttactctaaattgattagtgatttatttttattttatttattaaattaaaatataccaaatctaatattaaaatgcattaataaaaatatgtcactttttatggtaaaataaggctgtgcataaattaatcaaatccaatgaatcgtcaaatattggatattcaattgtgatccgatcggatgttatttttgaatatccaattggatcggatcagatattatttttgaatatccaattggatcagatcggatgttggatgaggcgtctaaaaatccaatttatacaacatccaatcgaactaattagtattttcatttagtttggatgagaaattagattttatattattatacgtaaaatatatacttatatattaaaattttactcttttttcttagattggatggatccaattcaatctaatacatagtgaatctaaaatattggatagattcaatctgatccaaaaaatactaggtttaaaatattgaataaacctaaattaaactaataaatatatatgaaatacatccaacagatagaactgattcaatccaacatctaatggatgttggatcgattggatgattgaaattaattggatcagatcggatcggatggtaaaatttaacatccaatttataattggatcgaatctggataggcctaaaaatattgaatgtggtccaataaataccccataatgtctctttgcaattgtaagattattagggtgcttgactcattaaggcaccttttgttaataaattttgtttacgcaataaatttgtataattttaaatgaaataaaatataaagtatcatatttgtatttttaataaaatataaaattttaaataagtatttaattaatatattatcaacattgttatgaagtacttttttccaaattataataataataatttcgaagaggtagaacattaaaaggcattttttaattttaaccaaaaaagtaatatattacaaaaataattttagctgaccaaataaataaatatgcagtccaattaaaaaaaattcaaaaataccacttacacacaccttcaacccaggatccatgcttcgcaatcatcgcgcaacagcaacccaatgcaaccgaacaaaaattcaaccagaaagagaacaaccattaatttcggcgacttcatctaagaagacgaccagaatcaatcaaaataggagttgtttcgaatttataaaaaaagtgtagaaaaactactacaaaactaaaattcaaccggaaatccagtttaatttgcataaactaatgtcttgactttaattttcagatttatgaaatgaagatctcaaaagattaaactggagttcccaaacaatccaannnaagtataatccaaaaaaattacatcaatactatagtaaaatatttatactggtgtatttt

SEQ ID NO: 162165 - DNA, 7183 bp, Cannabis sativa
gagagagagagagagagatggatagatagatagagagacagagagagaatgaaggggtttgatttatcttatttctaatgatatgtttatcttaataatctattaaatattcagctaaaagaaagattcttttccactaaaagaaataattctattacagttagggcaaaagacaatattttcccttgcttaaccaagaagcaaattaattaccttaggtaaaatggtctaaataataatcctgaataatcttgacattctaaatgtctaattatttttccccactaattttaagatactcaaccgcatccatgtgaccctattggtcaaatcgtcgtattccatagttacctggcataaaacaagaaaattgtaaaatttaatatatagtatatatatatattacatctagaatttaaatatatcttcgtaattgagaaaatatttacctaaggcctatttttgactatatatcctaatttctactaagaagcacataatcacataataataattaaatctcttaattatttactaattccaatgattaaactatgcggtcatttaataaaaataatctcaagagaaataattaattccatgacattaaaatgaggaaagaactaatatagtgatatggcagggctacgaaagaaatgtactgtttcactaaaaaggaagcagagggaaagcttggagaaagaagagtagagcttggtgaaagaaagaacaatgcaccaaaagagctctataagcaggaaaaggaagagcacgaagaggagcaggtgagaattaatgcacgtggataaatcaaagtaggcgaaaaaagaaagctgacgacactttgcgcctataaattgtggactaccccattcgaaaaaaataaagataacgaattcttgctcacatcagactagtagaaactctatcagaatatacatcctcaaaagtacacttgagctcaagagttaacaaaattcataccaaatagaggaaaatcgtgtaaatcgatagagattgtgttttaattagaccaaacttagtgtaaagaattctaagtgataatacaattttgttgttgaaccaatttttggcatcaacatttaataatttgaagaaaaaaaattagacaaattataaaattatttgaaaaatacttttaataaattttcttaattaaaatataaaaaaataattgtataatgtaattccacttatactaagtatataattatttatccaatatttaaacctattgtgcataagaaagtattggatacttagataatcaaatcaaatccaatcctttccaattttatattatagttctatctaatataatccaatctaatcctttatacatcatcaacttcatctgtagtgcaattaaaacaatagtataatgacatatatataaatatttatttataatcaatgtaatgttatttatggatctacaagaattgtccgtgtcaaacacatcacaagggcatataataatgttacattttattttttttgatagatttaatcagtatcatttatctaattattaatatggtttggggttaagaagaatttggcatgagtgttggtggacggagcaaggtttttaactagccatttgacagcctcacaggccatcaaagaatgggtgcaaatggaaagggaccttaagcttagtggtttcactattgagtcagattgtgctcaagctatagcctatttccctcatttctttttctgctgagtcttattgtagagaataagatggatttttgtggagcattaagagcatcattccaagtcatggctttgctgggattaagtttgtgtatagagaagtcaattatgttgctcatcatttagccaagtttgatctagagtctatagttagtcctttgtggaatagaattctactctgttgcaaattccattcttaatgtaaatttgccaatttcagcgagcatctctaatggaagttgtttattagagtggtattccatttttaatttatatgaagtgttgttcaatttagataatggtaatattacattttttttttctttctttaattttttattaaaaaaaatattttttatttaaaaagtcattaatttaatgtgatttgggatcataataagcaattttaaaagttgtaaaccattgaagtattttttttaagagaagatgataaatttaatgtgaatgagagagaaaataaaaaaaaatatatattttaaaataatgtatgtatttttgtaactatatgtgttgcttttattagagatgctctaagttctcctctcttgtgtagattcacttacatgtgatgaatatggctgtcacaattttaaatgcaagtaaataaggtgagtaaatattacataataaatttatgagttttgatggtataataaattaatgttatcaaaggatactttgcgtgttgcatgtgtgtggtttttttatggtatatatctctaataaaggtgtaacattatcataaacaccaacagctaaaaagaacaaaacaaataataaatacaaaaattggacccccaaaagtctgtaaaaccttcacactttacagtttacactcaagtggcagtgggattttacacgccaaaaaactctacaacagtttaccactttttttataattgactaattaattataagattaatctattactaaaaacaattaccactgttagtagtgctgcataaactatattggttattttaagttaggggtgggaattatacttacgggtattcgcccttaatggaacaggggcaggggccgactttcaaggacaggacgattaaatgtttatactcgagtcgaaaatggggcgagagtaggagaatagataagcactctgaacccgcccccatatgatatatgttatatttaagttttaaatcataactactataattaatataactttatgttctatgttttttattgattatagtaatgaaacattttagttttcataaaaatatctacggtgatgcatattaataatcacatgtttttaaaaaataacacttactatttattttcaattattaattttgtatttattaactctatttattatacacactatttcacttatgtttattgttttactcagtttttataattgtttttttttaattttctttaagacattattttttttaaaatatatgtgtaataggtaccgtatagaaattcttccccgtcagataatttccgctctgctgtcgctttaatttatagtattaggacaggtatgagatgaatttaaaaaacggatatgggtaaaggagcaatgcccgttccccgccccgtttacatttctgttttaagctctctcttattttccctttcaaaactggtcagttactcatcaggtatggataaataaataaataaatagataaatataaaatgtgataaatttactgctgtggacacataaagaatcaggtctgttttcacaagtatgggcttgatgagagattggataaagctgggtggctggctgtgtaaatttcgtcaaccctttttcatttcgggtttgagccatttactgcccctctaagcaaccgactggtgtcggtgccaacccttttttccccatatgggaatttacaaatctgtgtgtgtactactatatttactgcacccctgcattgggtcatatctctcacatccaatcccaatctttgaagatttaccatttatcttttgattctttctgataccattaaaaagaaaaaaattaatttcatgtcctttttctttaaaaaaaaaaaaagaattcacaagataccaccctatacggtattacttactagtagtatttggctgtagtggtagtgggctcctttttaattttttcactctatttgtttttacctttgttcttcttgctgttgttgttggtgtggtgtggtggtgtatgtgggtctggattagtctgaaactgtggttaggtgagcatatgggtctatacccttgtagctttttcttcattctgcttctctctttctctctctccctctctctcttctctttttctttctctctctaccctctttttcccctgcctttctggcggataaaccggtgagtcttttacataatccaaatcgcaaaagcaactatctcccttgctttcggtgtatgtttattgtttactattctatttttggttatgtaatatccatttatcgatttttcccatttgtgttaagtagcagaaaataaaaaaagaatattatatttgtatagttttagtgacccttatttttgttctttcagtttctgagtttactccaagattgaaaatttaaaacgtaaattcattttctttgactgattttttcccagaaaccaatcgaagattttctaacatgcaataataacttgggacggagtaagttcaccttgttattatgaacttttgagttcttcatttttgctagatctgtaaaagatgcatcttgctaattaatgatttgttaagtctgttgtcatttcacaaattgcaaaatctcctctttatatttgcccttttgcagtttatgttttttgctttgttattatcgaagaaaaagagattaaagttttcttcttttttcatttttcttcattaatattctctgatgctcctccactgtctactgtgtctactgttttttttatcttttatatttttttctctttctttgtgttgcatattctttctttcaattttgttccttttttctaatatagatcttgtataccttatcttgccgacacaagagtaaagagtgtttagtaattatttcgattttcgtaatttcttaataccctttttatcatttcttgaatttcttgcaggcagaggagttagatggaaaagggtagtgattttagacagtgggacgagctaataccggacgctttgggactcattttcagcaacctccctctcaaagaggtactaacagttatcccaagagtatgcaaatcatggagcaaagctgtaatggggccttactgctggcaagagatagacattgaagaatggagtagtttgtctcagcctgacaacctcgatcgaatgcttcgaatgctcattgccagaagttctggatctctaagaaagctctcagtttctggcctcaacaacgacttgatcttctccttcattgcagaacagtaagcataaaaagaaataataatacaaatttactttcctaaattcttttgatatggagaatagattcataagcttttcataaccaaaccccacttgagttggtgaagtacttgtcttgctataattcttgttttgtcaattgggttttgtgttttgtgccttaatggaggttttggtaggttattatagtgttaaattaattggttgaaaatctatgtgatgtcccattttctttgtttttttatgaacttggttttgcaagtgctggttccctacagagcttacggctgccaagaagcgagatgaatgatttaatagtggaacagattgctggacggttttccaccatcactttcttggatgtgagttactgtgtcaaaattggggctcgggcactggaagccattggaaagaactgtaaaatgctggtggggctttgccggaacatgcatcccttggacacagcaggcaagcctccagaggacgatgagggtcttgccatagctgccacgatgccaaaactcaagcatctcgaaatggcctaccatctgattagcacggccagcattctccagatcctttcaagctgccctgatcttgagtttctggatttgagagggtgttggagtgtgatactagatgacaagcttaccaaagagaagaatccaaaccttaaagtcttggggcctcttgttgtggactattacgagaggaatgattgggacgactgctcggatttctctgatgcttcttctgagtacttagcctgggaattcatgactggtggagtggtagactactttgatgatgatgatgacagttttgatgggatgtgggatgatgaagcaagcttggaggagcttgaactgaggttctatgaaggagtaggtcaaaatgtaggagacaattatggttggcctccctctccttgagagaaaaaaaactaagcctaatgtttctctcttttcgaactgttgaactttgcttcttcgtttgcttttgtttctgagtactactactgagttacctgatgcttttagtttggaactcttccctaatatgtggtatgactgaatatgtatatgtttcaactggaatgaaagcttgttgttgttgttgttgtttttgtttaagattacatatatatttggtattttggaaagtttggaaaatgcacaacagatctacaaatttaaaatggaaaatgcaatattgttttttcaacattgttgttgagctaacaatgcatttttaacaagattagaaaagtattgatgacattttatgtgtgaattagtcataaagtttgtggttttgatcggtctccattttcaccaaggaataaggccatgccttttagtaatggcaaactggcctgttgaataggaagatgccctcattgattaccgtggctttctttgcaaagaaggaaatttttgaaattttttgagttacaaaaataaagttatagtatttcactttaccaagcttatttaaaaaatttcaaatattagtattataaattatttgaaatttcgcgtaaaaaaaaataaaaattatttgaaattttttaaaaatttacaaaaatgatgttgtgagtataacgaacaccattataaaaaaaatattctagtatgtgtttttgggtatagaagttgattaagaaattgtaataagaggtttacagtggcactcattttattatataattatatattggcaaattatttagtagcaaattttaaaggattatttcataaaatactcaaaattcaaaaataagttaatatttttacatctttatgattattatttttgataaaaatacggagtgttatttttcattaatttcaaaggggaaatttcattagttgcccttaataaaataccccatatcaaaatttataccctccactaatttgtacaaattaatttcattgattacatgaacttcccattttaccatttttttt

SEQ ID NO: 162166 - DNA, 514 bp, Cannabis sativa
cctattattatattattatttcccattatcattttggaaggcgagcttaggaagcagtcgattagtaaacatcactacaagctaaggaaaaggccaatctaagatctaagcataaggcttgatgatacatgatcagccattttgattggccatctatgtctcggcagcttggtgagacttcattcaacaacttcacagcagcaagacaatgacaatttgtttcaacacagaagctttgaagatgttgatttatacctgattgcagccccaaccgaatggcctggccaataactccgctggaaaataaatctcgcactagtagcagcccccacatctcccatcgccgtccctgtaagctgtaactaggggtgtcaaaacgggtttcgacacgtcacacgaacacggattaggctcaagaaaattagacgcgggttaaaaacgagtcgacataacttgacacgatccacttaacacaaatttgaccgacacgttttttttaaatataataaaataa

SEQ ID NO: 162167 - DNA, 3369 bp, Cannabis sativa
ccgccgataaaaacggctggagccgccgcgaatccatggtgtcctcctgcggaggcggcgttatcggaagaatcatcggagggcggaggcggtggtggtgagggtaagaaggggatctcatgatcgtctaattcgataaccgttggatggactcctatggtggctagaagcttcttcatgacgtggcacatgcaacaagagcttctggtgaagatgattacaggatgctctgatatgagccgttggattcgagtgtcgattgattcctcatcgtcgattgataaggaattagttgatgaggaagaggaagagaggactagatttgtggtggtggtggtgggacccaggtcgaggtgaacgacgtcgtttgagcaccgccgtaggccttgcatctcgggaagttagttatagagagagagaaagaaagagagtgtgagtttagagagagaaagtgtttgatgtcaacgcggggggtgtttttgggggaaaggaaagaggagtttatataaatgagaaaattaattttaatttttttaaaaaaaagagaaaaataaatagtaataatgataatgaggtttgagtagtagtgtgtggttgcttacatcacaaactactgttgtttacatttattatttatataataataataataatattaataggtgcttttggaatcgtaggtttgggaattggggacttcttttattactcaactccccacgcgcttattttttatttatttcatttttctcatttattgcatcatataagtgctacaaaaataactatctcaaaattaataaactattaaaaaaataacttgagatttttgttttttatttaaccgattatgtattacaatcatatttttatataagacttgaacccaaaatttccaacacacacctagctataaccacttgagctagcctcaaatggttaatatgagactctttaatatttactaagatggtagttatttttctcttaccataaacacattttttttatttattatactcaaatcacaaataattattttgctttactttttagattttcagtagttttttttacttactaattactatctttaaatcataagtgattcttctagttcaatttgttgaatcgttgctctatttttattacggtcgattttttgaaattttttttttattttaatttatgaaatatcaatataacaaatcgaaagatgtcacttttaaataatgctaagcattaataacgatgtcttatagcaatgttttacctatatatcgtttattataacaaactaaaaaataaaaaaaaaattgagaaggtaggatgcacataggactggaaattggtatgaattctcttccgttcatgtttctcttatgaattttttatctttattctcactctatctctgcatatttcttatcggtggtggatgctgatgtgtagctaaaaacaaattattattttttgtatataaattctcctgtaacaattaatttttcatattaatgaaattttctatttaaaatagtaataataattattattattagaataaatgtggtaccactattgcagaatgatagtatcttaattacaagtagttatggagtttttttaaatgatattagaacgtatggtactttttactatttttctttaacttttttgtatcaccttaattgagaggcagctcatctattcatgttgttaatattcaaaagataaaaaaaaaaaaaaaaaaaaattaatgtcttaattaatttcttaataatatgtttgtttatcaccatgataaaatttattaaatttatcttaagtctaataggtgactccatcgatttttatttattattatttttgaataataaaatgaaacactttattaattaagtatttgctaaatacaagttaaaaatttacacaaaactatctctgccactaaattcttgtcatatctataaaaatagccattttagcaagattacgcgaaattaaattcgattataaagaaaaaaaaaagaaatttaaagacattgatgagacgattaattataaaataaattaataaatatatatttcaaattccactaaataaagatcttaattattatcattcaaaaaataaacaaagatcttaattattaaggagctttataattttttttgacaataacctaactgaaaataaaattaactcgattgattgaaagattaaatttattgttttagagttcataatatttatatatatatatatattttaattatgtttcaaccgaataagacaaatttattgttataatacaaagtctaaaacactcaaagctatgtacaagtatttgaatgtgtgcatgagatatatactaataaaattagaatcatcatagtatatacttttgttaattttttatcactttaaacattaaaataactaagtgtacgtggaatccattcatttgtgctattatattattattattattattaatacataggacatgtctagtagtgtagaaattacttaaaattaataattatactgtaaaaaccaaagtttgatttggcttttaagaacatgtatatatatattattaaattcatcattggaattcatgaatttctttaacattaatagcataattattataattctaaatagttttcatcaattttgatttgattgagatgatataacagtagtgagtttgacaagtgataaaaattgttcaaattgtcaccacacctcagaaaaccagtacagaattttagaacgacatcaatcccatgcatttaggaaaataaattattacttttatcaataaaaaaagttaattaataaatagatttttttttgttatacattttatatttgttatggtgattaggatagcttttaagttaaaaaaaaagtaaatgttattttgaattatgtggtttgtaaaaattattgattttattattttattaaattttatattttttaaaataatacaaaaaattaatgataacgcaatctagaattgttaagataaaattaaatacattttttgtatttattcgtgttaaaaattatttttaagttagtaatatttaaaattgagttcaaaattcaatttgtcattatatataaaaaaaaaatatcaaattgttaacttttataaaatacaagatctaaaatatgattaacttccccttttataatcatgtaacctcttacaaatttaagataattgtgagaaagttttgaatggttaattatactaaaaataaaatttaaaaaggcacatttagcataaaatatggggtaaataccattttggaccctctgtcttgcaaaagttaccaattggaccctgtgtt

SEQ ID NO: 162168 - DNA, 1189 bp, Cannabis sativa
ctttgtttgggtctttgattgagctcagatctaggttttgccaattcaacaaatattacccttccgtccaaaaactggagaaaaaaaaagaaaaaagaaaagagtaaagagtttttacttgatttcagaaatgaatcaactaacacaaggagacaagagcatgacaacatgatttgccccaaaacacctcacatgatcggatgaggacagcatttctaaaagactattaagctgtttttatagcaccataaaaagtactcaataatacccaaaatcatatctaccaaaaatagtgacaccacacaagccttgatcttcatagaacatggcctgaaagcttgaacttcaatttcgagttggacatgtgagactaacccttctctcatgtttgaccatttgagtttctcctacttggatatatgtagctctaaattactatgtcaaaaataatgcacaatacatatggtgcatacttataaatagagattacaacaagattgagaataataattttaaaaaaaaaaaaaaaagtaaagagaggagacatgaagaagataataaaggaataaaaagatttgagatctgtaaacagacaaatatgaattaaagtatgagtgaccgacaataaaaaacagaaaagagtaatatgtttaattctaataataatacatgaataaggtcatctttagaacataagatcagattgtatatccaaaattttatcatgcactttcgttatgtaactagagaattatgtttactaataagtaataagattcaatgaaaaggtagttagttttttgtttacttattttattaaaattagggaagagagaattttattaaatatgggataaaagaaaataaatatttctcctactatttttataaagaatgtcactaagggtaatgatttttatttattttttaatattaaatacacaaggataattttgtcttttaaaatatgtcttacaaaataactgccatatattataatttaactataaatgaaaatttagtcaatttttacattccgattatgtttcctgataaagtaaataaaatatttcattataattccatttttaaacaatttcagcaaacaacatattacaaatattgattgcgattattttttatttattacgttaaatttctctattaatttattccgattatgaatact

SEQ ID NO: 162169 - DNA, 2134 bp, Cannabis sativa
gaccaacagcgagccaatatcttggccatcttgaacttccttagctgtaatttggcacccaccacatttatcattgtaaaaaaacgtggcattaaaatcaccaaggataatccaaggcttattcaaatgtcctatacctgtaagtttaaaccacaactctttcctttctgttaaagcatattattaccataaaccacagtaagatagaattcttgatttttcctaattatcttaagctaacagtgaatgaattgagcatcttcttgtaacacctctactttcacaagaccagcatgccaaatcaaaataatacgataggaaataacaatcctaattcaggaagttattatgtatcaactcttttaccttatcatggttaattttggtctcaaataaagcaccaaaatcaaccttattctctttacacaccttcaaaagtgatagtttcttttctcttttattcaaacctttaacatttcaccccatcaagtttaaactctccatgatcagaatgaatggagttagtaactagatcctcatcatccctgtcttgcaacacttcataaccatttctgacttgagcctttggaccagaacttactgttgacttggacctttttcttctcatagtgatccattttttagcataatcacaacctgctttagtaatctccttggattgttcttccttcctatgtcctggtagaatcttcttatatttgcctatatttttctcaactttcaattgctgctcttcaacagcaatattgttaactactactacaacaccatcaactagggcaggagcaactatattaggaacaaatttcatttatgcaaccttccctctcctttcatcttcaaattttctcttccacactaccccttgtctttgttacaatttaccagtatatgtcccaacatagtacatgtcgcatattttgaaggtagccattcatattcaagtaattgttccactagttgtttcctgtagactatattttttggtgaattatccaagatctccatatccaccaaaactctagcatacttgaccattgtcctcccaagagtaaccttatctaccataattagttttctaatagtactcactaaagcactcaaactattcttcccccgatattggagtccatgttaagcctaatccaaactggtactgatttcaccatttgaattgaatccatgtcagtggaccaaggtcatagcaccacaagctttttatcgaaatgaatcacccctatttttaaaattaagtttctagttgcctcatctctgaaactcaccaacttgaatccataatgcatttgaacaatcctatccactcccaattatcccaaattcttttgacaaaccctttaaagaccctgaaaagtggattcacacccaaaatgatacacacaaaggatgttttctagaaagaagcctcagtttcaatctcatccatgtccaatctagctactatttgatcaccaacttttagaggttcagtgaaatccaaacgagtagaaggtgttctaaccttattaggcttaaagtttctccatgtatctttagcagcagcttgaaaattcaatttctccatctcctctgcccagttcactgtctttggagtaaaattggtctgatcgattccttcagcttcgtgcgtttccgaatcaagaacaccacaaggatcatgataaatttaagtcagagctacttcctctccttcttcttggatcgaaaggaggtcacattgcgctttgccaccaccagaaactatcttcatcgacttcgacacatccacttcttctttgccatgggagagagcagacagcatcacacaccttacttccaaatgctatgtatcccttattttttttttcctttttgaaaatactatgggtgtgtttgataacactttttaatcagttttttccaaaattataaaaataaaaatatattctaaaatcatgttctataaaactgttctcattttcacttttttaattgagaatcaaaattttaaaaaatttaaaaataaaaaaaaaaagtcactctcaaaattattttaaactttattttccttaatcaatattttagtctccgatcccaacctagaccttggaaccca

SEQ ID NO: 162170 - DNA, 2145 bp, Cannabis sativa
  modified_base (2102)..(2120): a, c, t, g, unknown or other
aaacagacctgagaagttagcaaatcaattgcaaaatggtgttcaaacacaaagatgttagggtccttgtccacagcttccaacagagcccgctcaatctctcttccagtcatgtcagcagcatgaacgattctgtgatgagagtggcctccttcccttgctagatgcaagtttccatcctcaccatgatcaaaagatgctcccatggcaatcaattccctgattctttctggtccttctgtacaaacaacctgtacagcataaacaaacctgagaaatgaacaaaagtgtaacatctatccattgaaatattaagtgatttccagttcacatggactggtaacactcttcacagaaatgtctctttggggaactaagaactttgaaattaaccataatgccaagataaactactgcctatataacgtactctaacagtctcctcatcacagagatacgcccctgctacaatggtatcatgcatgtggctctccactgaatctgaagcacacagtacagcgctaacaccaccttgagcatagtttgtgttactctcatgaggctcagccttggtaatcacggcaacagatccttgttttgcaacttcaagcgcatacctaaggccggcaaccccactaccaataatagaaaaatcaaaatgctttgtggaatcatctctcaagcatgatgatgtaattgttctgatgattctccaattctcattgattggagagtgggaaatgttgtatcgctggagattcaagagcttagaaaacccacttgacctgaataatcatacaagaacatgtagttatatttacaattataatggaaaaaccaaaacaaatttaaataaaactcctaaaaatagggagaagagaaatacatacaatgaacactatgtcatactgttaaaagcactgagataaacagcattataatgtcatttacttaaaactgaaaacttgaagcaaattcttgtcaaataccatgaaaggtcattatgtaagcatcgtttaaatggcaggctggaaaccaaggaagctcttccacaacccaactgtcccttgtaattagtcgctctgcaatgaagtttgccacttccaacaggtatggtaattgtcatttgcaacctttctgtacagttgttaaaaaaaaattaagcaccgaggtaagggagagacaagaacccagctttcactttcagcaatacatgtaattcagaaatgtgacccgaacacaaatgtaccaaacaaaataacaaatcaacaatcttcattttagaaataattaaagtttagattcataatcctttttcaataattgactggaaaatcactgtgggtcagcattgataacattatgactgataaagaaagctgaattgaaaaaaagaaaagagaaaatacacatcaccattcaccatcacaaacccaaatatatgatattgaagaaaagtaaataaataaagtgaaaaactgaaattatcatggtaagaaatgaacaaaacccatacgaaacaagagtaagaaaacctcccattaaaagcatgaaattaaatcgaatggttaaaacttaaaaaccccaatacatacggagattttgtctggcgttgtatcagccacgacgggtcacagtcggactcagcagtctcctgcaacactttgttgagccaaagccttaaacaaatatttacataaaataccaagtaaattggaaagaaagaagattgtggaaatgaaatatattataagcgaaaacaaaggaagattggcgggcgtgaggggtcgaccaaggaagttgggaggaacaagcgatggggtggagaactgacgtttggtctacagattattgatttaacttcgcgccatgtgtgcctagtatcgacccataactttgctcacattatttccattttgtctttttctccttcttactaacggtattcatttgcttcacatcaaaatactgtattcattttctaaaaagaaacttacatatcttcaaataagagtgctacggtcaactaggcatgtacataatcaacaattacgaaataccaaaaatgcccttaatcttataaattagggtaaataccattnnnnnnnnnnnnnnnnnnnaaagttaccaattggaccctgtgtt

SEQ ID NO: 162171 - DNA, 6230 bp, Cannabis sativa
ttgtatgattccaaaaaaatacctctatagcccatttttctaaaagtgcaattaataattgaattggatcggatgagaagaaaattattagattcgatcggatgcccaatcctactcctacgtatctcaccaaacttaatcctaatctttagattagttgagcactttaatcctacgacgatagcacaattaggacaacaatctgtgtttttgtcataacgggaccaaatccagttcctatatacacatattgttaatatcccaaatgattataagctaattaatcactttgcaaagcaatctatatctcaaggcaactttaaaaagaacatgttcatcaaaaaaagaaaaacttttaaggcatcttttttttattatttcagaatggggactttatcagatggaattattcttcaaacgagctatcaatctataatagagctgtagagagatatagatatatggcatagctaggtagccagctaaggcatatacatatatagagagattgaaatcacaagtcacaacacgcccaactactatagataagacttgccacgtcttcttttatttttcctcctttctttcgttctttcttttcttgtatttgcacgcgtagtactctcaatcggcaacctgaaagaaaaaaaacaaaaacaaaaacaaaaacaaaactttattggttgtggttaataataataatgagtatgatgccaatcaaagcctatacatatagctggttgtgccaactaaagacatcttttcaagaagaataatataaagacttgtagctatgacatggtagagatcaaaagctaatattacacatcaaacctcaactcaagtctctcttttagttggctttgctaaactactgataaaaagcacgtacgtacgtgaagcgaaagctcctttaactatatatggaatacatgatttggcacactataataagttttacttgtgaatatcgtgtcatttactactggtgcgcatagatctaatcagcacatgcaggaaaattaaaagagctgagatgagcttcgaagtgagggctgccaaatcaaatatatatatatatatatacatatataactatatattaatactcttatattcttaactttattatgttgagtttgtttggttacgtttgtttcgaccttgcaagtcatgtgatttactctagatatcttcttttacctttctctctatttcctaacttttattactttactcatttttacccaataatggttttccatgaattaatatctatgatcaatgctagagaggtaccattggtacttagcattaagcatattctctactactatattattattacagtgcaattaagtattaaatctcataaaagttaattaaataatttttaaaatatagttaaccaattataaggtgtcatctctaagtcatgctagacacaattagtgcccattaacaatattctctctatatatttaattaaccctggaaattagcaaggctatattttgagattagtcaatccactacaagaaatgttacttttggcaaaagtttagtattgtgctggtaaaatagaatttacttctgatgtgttggcaaaaggggttggcaaatcaacgttggtattagaacttttgccagcacaaaatgaaaagcactggcaaaaatgacttttccaagcgcgtaaatgcactagtaaaagttagattttagtcactgcaaatgtgcgttggtaaaactttgacctttttgccaacgcagtttgcgcaatgtgctggtaaaagttatttttaccagtagtagcaaactgtgctggtaaaaatgatatttcatatagtgtgattgcatgaaggcaggtatctcgacaagcttggtagcaagaaatcatccagtaaagcacaaggatttttagatctctttcttaattttttgaaacatcttaaatcacccaattcagattaatattgagggagttatgctcaaaatacggaaggaaacgcaacaaccactacaacaaaaactatcatcaggagcggctttttttgttccagaaaatctctgaattcgttccagaagattatttggcgcgaatagtcattcttgatgttttattcctgataactcgtgattgaaaatcacatttattctattaaacaatatctttaaaaattaaatattttatgtataatactaaaagagttcatacattgttttcatatactaaaaaatattttaatatttaaaagagttgatactaaaagagttcataaatgttcatactaacaaaagtaataaattaaacatctaagatgtggactcattataatcaccaccattctcattccctcgagtctgttgcgaaggtgtaggttgtactcttggcatctgtggtggttgttgcatttatggcatcaacatcatttgtggcatatgtgacattgacatcatctgtggcatctattatatcggcatcatctgtgatgtctaagatacttgcaacattatatgtatcatatgcggtgaccgtgacatcatctgcatataaatgacacttttgtaaagagaaagctagcaaaaataccttgcaaaatgtatgtgtcttggagctgagctagctcccaacaaagatcaagtattgtctttacaacagaaaggtataagtcattcttgataatcatttaattattttcaaaataaaataaattttatccggaacgactttgataagtcgcgcctgatactatcactatcaggaaaaaattttattgttcctgatagtgtcgcgcctgaaacccttatttgttttagtgagcatgcaagcatctaggcatgcatgctcatgacagccactaaacatgcatggctcataagtcactcgacatgcatgctacacgagccactcgtcatgtatactctcaagggtcactcatcatgcatgctcatgatggccacttgacatgcatgccacgagaccactcgatgtacatgccttacgattaattattgcaacaaatcataacgtctctcaactagatgactaattgtgatttttagacaaagagccaaaaggatagtgcatgtaggtatgaccactccacctgtgaagtctgggcacagctagagcaaaagtagcggaggtgccacacctgcaagccctaacgtcccgacaaggagtacactacagccactactactgcccttgggaccacctgacaccagacaacggtacaaggcacaaaactacctcctacacctgtaacttgcagaattagaacgctatcatgtccattggataccattagtatatttcaggccattaaagcttataaatatcttttttattttattttatttgagaaggggttggaaaatcattgtaagcaagacacttagagagcaatacaaaaattttatttcatcttctacattacttctctgaaagttatttcatgttcttgagttcataaatactttagtctaatcttgtcaaaaacctttgattttacgaccatagcttggttgacgagttctcatcgtcaacagtttagcgccaattacgggaacgataaagtttaaagctatgttgattccttgttatttcaataacatttgaagatgccaagaccattgtgacgtctacatgacattgagatccccgtggacgacaaccagttggtcacttccaaaggagaccccccgcctctagccttctggcctcatctaggtagaaatagacaaagcatgaaagaccaaaccatgagatatcaagtttctcccaccaccggaagagaaagccaaatgaatgccaagaggaggcctccgacaccacatggaaccatgacgtcatctacggctagccccatcaatgaagctatccagccatctagacgaccattaccaatacgatgcacgtcgccacccactctgcaaggcttgggcctctcaatcaatagtctcaaaagagataagagaatgtacttggtgaggtcaagctcccaaattcatttctatgaaggggagataaacagcctctgttggaagaataagaggttggagaccaggtggctggtatgcaaaaggtgttgagtgacatactcgggggcaaaacccaagtatcactctccaagtgcgaaagcaaactattataggattgaagagaatccattacacatgttaatagagggaactccatgttgtctactaatgatctccctcaagatagtcgtagaaaagacagtcgctagacatacgtcccacaggtcaatgaagacaacccgagttaaccctctctcagaaggtcacactgaggccagggaacacctcacaaacttgagaagaaactttgtctaaaaagtttcctgctaggtgacacctcacctatggtctccttccaagagaaaagcaaacgtaaggtggtacccccaaagaaaataaagatgggtggaacgagagagatacctcacgcatctcccatgcagacaacaaagaggagaaagtttcacccactaacctccaaaggataatgagggaaaagatgaaagagctaaaagcgaaaaatgttatacctgtgccaaagaataacaatcgtctcgaaaggatgcttgaatgattatgatggagttgatgaagaatcccctttattaagggatattcatgtggaaccaatttcacccaacttcaaagaatcacaaatgacaccatatgatggtactactaacccgaagtaccatctcggtgcttttagtgaactaataaagatgaaaaaagtctctaacaaggccatatgccaatgtttcacgatcacgttaaaaggagttacgtacaagtgtttaaacagctagaaaagggaatgatcacatcctaaaagcaattcttagaagagttcttccaataacatcaggatgcatgtgattgcatcatgcccatcacagacatcaccagcatgaagcaaggcgaacaagaaagtttgagaagctacattcgatgcttcaacactgaagttgcaaaaatagagaagacatcaaaagatgaactcaagatttctatagccgtaagggtacgcccagaaacaaactatggggaaacatgctgaaatgcaagttgaacagtctcgatgacatctatgaaagagtagaaaagtatatttgtgtggaagaaggtaacagagacttaaaagattacatgggtgaggactcatcagagaacccatcaaagaactcatcaaaactctacagggtctgttaggttacatgccctggaactcactgattgatatacctatgagacaccttcatccctcgacccatggacatcaagcatccaagaaattccaagaagtggaactactacagttgccaaaaccaataaaaaaatattctctaggctgacctcctgaagtagtagcgagcctatcttatgtcttttagtgtgtctcattaaattaaagatggcacttaagttgatttctagtggtaatgagtgtgctcaggtacttacctgtgagtctatctttatcaataaaatattaaattttcatcttacatgcaaagtgcaatttttctaattttatatgatatcaataatttaggtacaaaaattaacaatctaaagaattataattattgtaaataaattgtgcgaagtgcaaattaattacttagtattaataataataaaagagagagaagaggaaagtgaaaatttatggaaattgtaatgaaatagcaaaggttttttaaggttcagtaatatgttaaaattcacatctcaaaatctagttatatgaagaaataattttaagggattttttcattaatgtacaacaaaaattaatatattacaaaaaatgtgcaaaaagccttaattataaaaattcatacattctaataacatatatactaatatttagatcattcaatataatatttactaaacttactataatatacataatattctttaaatgtgaattattgattaagaagcattaatttgtagtcattatagtatgtgacttttaattttattatttatgattattgatttgatacttataatagttactaatatatgtatggtataagtacatgatgaaaaattaaaacttaagaaaataaaaagtaattgtagtaatttaattaaaagaataaaattatataaatttattatactaataaaatattttatttataataatatcattgttaatgtttaaattatta

SEQ ID NO: 162172 - DNA, 2178 bp, Cannabis sativa
aaaaaagaaaagaaaaaagaacttgatattaagataaagattaagccctttattacatatatatgtattttcttttaaagcatgctttagaagaataatcagttcagtcctagctagttgcatgtaaatattaatgctgggtttattacaaaattcaataaaagggtttgacatgataaatcaacacatgtacgtttattaataagtacatactttttagtgggttttttgttttgtttttaatttagaagaaataaaccataattgtgagtgggatagtgcttatgatcagaagttgtaatcaagtgtatatatatatctcaataaagaagttattttgaattaattttgtaaaaaagtaagtagatagctagtttaattagtttggtttggagttggttgtagaggcagatgttggagaatgaagcaactatcatgtggatgatatcctaacaagaaacccaataatgaattagttgtttatgattatccaagcaccataatttgactacccattaacaatcaagtgggcatgattaacaaatgcctctttattatctttctctctctccacacactatattatatatatgtataataaaacacaaggggaaagattcatgttgggtgcaaaatcttgagattcctttcttctttttttccaccttttgaagtcacatgagtttcagcttggcatgatttaaggaaatggaaaggaaattaaagagaacatccaattatataaatatatatatatatatatatatatgtatatggcaattggcaagttaattaatttttttgataacaaatggcaagttaattaagtttttaatggtgtcttccttcaagggaaataagggatatttgtagtaaaagtaactaagttatattctatttgtagcatgttataaaaaaaaaaaacataataatagtatttaaacataataagtacttggtgttataaaaaaaatagtatttagtgttacaaacataataattgaaatatctcaccagaaaaaaaaaatagttacatacaaggctttcatacgataaagaatacttataagttgtagcaatgttctaaagggcgatggaatactgattcgaattttgggttctggcgacactactataaattaaagtcgtacataaatttttgtaaaccatccaatcccaataactcgctcaaatcaaactgagataacctggcaaaaaatacaaattaaaaatcccgacgaaaatataaagattgggcgggttaaaaataataccaatctgtccaatcaacccaaactaacccgaccaacctaattaatagatttacatatatatatatatatttatgatatatagtttacatataatataatttatatacacatatttatataaaaaaacgttcaaactactatattttttccatggtggttgatttgaattttgaatttaatttatatatttgtctcattatagtaattaactaaaatataacaattgaatgaaaaaaaataaacattagtgctcgatttaggtaggttaacctgaccaattcattgggcgggttgaaatttttttctttcgtaattgagtgggttgcacttcaatttttgtaacccgatctttatatgttgggttgaataaaatgtaacgtaaaccgaccgacgtatactcttactacacttttggtatcagttttaaactgacacttatacttatggtgtcggttcttccacaatgacaaaaaattaaagtttagtgtcaattataaaccgagactaataagtgttagtattgttttaaaactattacttaaagtgtgcatatatatagtgttggattataaccaagattaaaggcttttttagaaatttttagtaatgaatcaaatattatttagttcattttataaattaatcatcttctttagtaattattctaaaagtgccaaacttttaatttttataaaattttagcattataacaactgttaagtaaacgcttcccatttttaaaaacccaataaaaaacataaaaaatattccaacaattcagtataattttcacaatcatcggctgttgagtaaactgctagcaaaataaaagaggaacgatattaccgaatgaagaattctgggttgagtcgcggactaagtcgctctctttaagacgttcgcg

SEQ ID NO: 162173 - DNA, 749 bp, Cannabis sativa
aactagagagaggaaaacatattcgaagttgttgaattaatgtaataagtttgtattacaagtgtcaatctctaattagttaaatacttaattgaaacccaattttaaatggcagatttgagcctattttggacaacagatttgagtccttaaacattaatcattaatgatcaaatggaaaaattattattaaaaaagctgcacttattaagccttaaatttgaaccatgtcatattttgtattaaatttaacacaatttttaaataaattaaatttgacaccagatctaagatataatactacactactattttaactagctatcgttttatttttagctaaaacatatactattaatgggggccaatcccaaaaataaaaaaaattaaaagaactcagaaaatactagtaattttttgttctttaaaatatttgatgaatatgtatacctctgttgttgagcttgagtcgaactttgctcttgttgttcatccatcatgttgtctctctttctggatcttctcataaaaggtggtttgaaacaccctatatgatttttgtaagtagaattatgctcttcctttttctcattatgatcaatagaaattacacaatgcacgttccctccctctttcacattagtagtagaatgatgctcttgctgttcaccctcattatccccatctccctctttcatactaccacccatgttctctctatgatgaaaatatttgtatttttttttttt

SEQ ID NO: 162174 - DNA, 2111 bp, Cannabis sativa
agagatccagaacgtttatgctttgcatttctccaaaatctgataagaacacagtcgaatttaggcttgaaatttctgctttattttcttatataattttctctattttataaatcatctttttgtgagatttgacaaatttatacattccaagtgtcgaaacctgaaaataaagaaaacaagcataattctattccaaaaagtgataataaaaaagaaaattaactataaaattaacataaataataggctaaaattatcctaatagtacgtacctctaaaagttcactggcagtgatgagtaatacatcaatgatttgatcatgtctaacaaggttcagtttcttctccctgtaacaccgttcttctgaggtgtttcaggtgctgtgagttgggataagatcccttattccaataaatagaattttaatgcaaaatctaaatactcgtcatcacgatctgatcaaagtgtctttaataatttacctaattacttttcagccatagctttgaagtctttgaacattccaaaagtttcaaacttcttggtcattaggtaagtataactgtatctagaataatcgtcaatcaaagtgacaaagtattcataactacctcaagcttgattattattaggtctgcacacatccgtgtgaataatctaaagttgttatttttggctctattgccttttgcagaaaaaggccttttagccatcttgccttttagacaagattcacataccgaaagagttctaacttttagttctctcaatgtaccttcctttattaactggttaattctgtctaggccaatatgacctaaacgtagatgccatagatatgtttcatcatcatttaaaatcttttgcctcttattatgttgaggcaatgttactttaagcaattcattgtttaaaattaatagctcatttggtttgagcacataaagtccattactctattttgcagaataaattgacgttctaaatttggaaataataatctcattattattaaactcaatgttaaaagactactcatgcaaaataatattccttagtacatttaggaataaaagttcattatcaaaaacttatttttaaaatttaaatggactttgtcaacacacttggcagacacttgtgctccattacccactcttatagtcacctttttattagtcagttccctttacaaatgaagtatttatattagagaacaaatattattaatggctcatgaatcaacaatccatcaggattgatcatcttccaataaattagtttcaagaacaaataagttgaatttacttttcttaagctcaaagaggtaattgtcacaatttctctttagtgttacatcatgccacaatagaaacacttgcattttgcttttcttgtccttggacttagggttgtgtttgttcttcttggctttaggtgccttcttgcctttcgacttgagcttgctactaatgttgtccttaccgtcctatttccttttcttacctgaataagaaagagagttgagtgacttaagaataatgctcacttgagtcctcttatctacaatagatccatgtgtctctgcctcatgtattagtacaatcatgtgcaatgcatgagtttctataaaaatacttttcagtaaagatattattttaagctctaaatactctaaatatgaacttaattccattttaatactagtaatctactaaaacaatgatattactgcaaaaataacatcaaatttcatttaaaactaaaatttacataaatttactatgggtataaaatgcatgtgtggtttggtagtggctgacgactggttggtggttattcatcatcggcagtcgttgccaaaagtgggtgatgagaggaagttgccgacggtttaggtgtggatgtgggtgagaatgagagttactttttgttgaaaaaaataaagaataaaattagagcttatttatttatttagtagtttcatttaagggtagaaagggcagcgacaaaaattcataaaagaaagagatcatttaacttaggtggcgtttggtaacacttttttaatcagatttctacttttaaaattgaaaaagtgaaaata

SEQ ID NO: 162175 - DNA, 3405 bp, Cannabis sativa
  modified_base (585)..(588): a, c, t, g, unknown or other
aaaaaaagaagaagaagaaactaacgttgaaattcctgattttccataggcatcgtaagcttgtcgttgggaaggatcacttagtacttgataagcctccccaagaacctgaaacaaagaaaaatatttgtttctacatcttcttcttgaattcgagataaacttacaaaggttttaagttttacctgaaaattctgagcagcgagaggatcgtttgggttcttatctggatgaacttggcgagcctagaagaaagaaatggaataggtaggagtgagtatgatgtattgaatcaatggcggagagatctagataagaaagaaatggatcagaagattgtaccttgatgtaataagctttcttaatctccgactcggtggccgtcgggctcactccgaggacgtcgtagtattccgtttccttcaccatctcaattctcagttccgacgactacgacgaccaacacacaatccccgcgactttgtctaattcaacaaactgtttagtattttcccccttttctttttctttttcctttttattaaaatctactaatgcccattcaatattattattattattatnnnnattattattattattatattaattgcggccaaaccccttctactattttgattttatagactatgttttttttttttaaatgaattttatagactatgttgatatttagttagaggtaattaaatgtaatagaataaaaagaaaataatttttattttatttatttatttggttgtattttaaagtattaaaatataaataaattttccattattttagtagaagtagtattttattttgtaatggaataatagactattctaatgtaatgtgaaaaagatttaatgacttttttttttcatcaatttttatgcattttaaattttattttattttattcttattctcattcttattttatgttttcattacttctactcaaacgtcactctattttttttttttttttgtggtaaaagccttttatattttttcttttttgtaaatttgaagtgtcaactcgatattaccgttaaatactaattggattattattatattagcttctaaattttactttcacgtatacacaggtgtaaaaagtagtcatccaattgatatttaacgatgatatttaatttacgtctcaaatttgtaaagaaaaataaatttaaagggattaagtcacaaaaaaaaaataaaaaagttaagtgtataaaaaataaaacataaaacaggttaattactcttattattattaataagaggttaataccattttagattctaatgttttgtaaaaattacttatggaatcttttattttactaaatggtaaaatgaactttatattttgtaaaataatacaaataaaatcttaagcttaatttttaataatttttgtttttaatataattaaattgatgataatttctagcacgaataaataaaaaaaaatacaaatatttttgttataatacctttaaattaaattattattaaattttattttaataaaaaaaattaattaagaatactcttattttaaaaaatataatgtttaatttatcatcaaataaaacaaagaattcaactaataatttttatttaacaataataataattaatatataggaaaattggaaagattatctctccttcctttggtctttcagaaaaagaaagtcgcgtctttccacgcgtgtgtctcttattttgccgttcaacaaattaataaaagaaaataataatttataattttattaaagagagtcgggtctgtactctgtgtgagtgtgaggacgacttgggttgggcggctgctatcatgcgggcgtagtcaacaccaaagccaatcccaaacccaacgaaatattccaatatatgattcctctttttttaaaaaaaaaaataaaaacatatatattttaattaatttttatttttatactacaataaagaaaaatattaaagggtgctattagtactaatatgtatctgattttatataatttaagataataatttttaaaaaatatcattaatcaattataacacatcacttataaaagatattagacactattagcagtgttggacccaaaatttaaaaaaaaaatgctcttagtgaaatttaaactttgacttctatcatatatacaatctagtttaaccatcacacaaaatttaatatgatgtttataaatattatcttttattataaatatatgtcgtaactaactaaaatatatatacatttttttctttcaattttttattcttgtttttatgtgggtgtgcccttattattggtgcccaataacaatactttaaaataagtactcaatacatttagaacgagtgaaagtaaattaaaaataatttgtaaaatttcaaggaaataataataattttaattttttaaaaaatatttttacattggttttacaattttagtttagtatacaatattatttttatatatgtggtacatattgtttagttcaatatataaagatacgtttaggtatatgttttttttttcatgggcgtttaggtatgtggttgataacttgtgtatagtttggtttcatatctaaaaattagcgttgacaattcatgtcgtgtcattatatttgcgtcgcatgtatcgttacaaattaatgtatctactcaattaactttaacctatcttatatttcgtgtctagtaatatcaactttaatccgacttattatattcacatgtcaacttgttacaattacgcgtcgactagatccgttatacactgcataaaaatatataatattttaaataaataaattaaataattatcaaatagaaattatggtgtatttttaaaaaaataacattttctctaatttagattcattgtctatgaaaaatataaattatataatttcaatcatacattgaacttaggtcaattcgtgtcacacatttagtctaactcgatccaaaaaattatcgtatcaaatggatttgacccatttttaacccgcacctcaatcttccaacttttttaaccataaccctcaaaatgtgtctttttttcaggaaaaaaaaaaaaaatagagaaatcatgtgcttttttagtcatgttctcgtgtcaaaagtagttttccccatccctactaaacttatcttttttaaaagtcataatcttcttttaaaagctgattttttaaatttgatcaaaatattagctatttttgaaatattgctaagggcctgttcggaaaggattttttttttttttttttataaattttacttaacaaaatcttgtagttttttcatagtttttgattaattaatcaaaaaattgattttttaatggttcccgaacaactccta

SEQ ID NO: 162176 - DNA, 4551 bp, Cannabis sativa
taccgttgaccataattagtggtgatgaacttggaagataatataatgggatttgctacaatataataattgaccatgataaaaccactcatatatagttccacactgattttatataatatatatatgcatcacccatgtgaaacaactataattaaaatatcttcctttcccctttatttaattatatgtacatataaaacttaattattatatattagacatcttgtgtatctatattttagattaaatttggctcaaaatatattataaaattatatttggtttatttttatatttgtgctatatacaaaatgtaaattaattataaaagtaaatcattaatcctcaattgaaaatataaaaaataattaattttatttatattattttaataacttataaatataaaaacttttttttaattaatgcataatattaatgagtgacaattatgtaattaaaaaatatagtatttattatgaactaaaatttaacacatactattttttgtactaaattttatataatttttaacttgaatttagtacatattttatatcactacgaaaattaatttttaataaaatattctaaaaaataacaatgaaccgtatttatagctctccacgtatatatatatataaatatatatatatatattcttaattaatcaaacaagggcttacaaacagagccaatattacatcataattaaacaatagcaataaaaccatcgagtaatacagaatgtacggcacttaattaattataagtttatgagataattaagcaatgagcatgcatgttaaatcaattttattaattatacatactgaatttgttgttatcatcgtaatataatagatattaattaatttaaaaataaaattataataataataataatatttacagggatatacacttttactggtgcaagcccatcgaagtgaactaaggcccccaaaatgcgtagataatattaatcaccaatgcgtagaagcaaccacaggagaggcctcaatcctatacgtggggctctaccttgttgctctggggactggaggaatcaaagcagcactcccatcattgggtgctgaccagttcgatgagagggatccaaaggagtcgagtcaattgtcgagtttcttcaactggttcttgttcagcctcaccattggagcaatctttggtgtaacggtggtggtttggataagcaccaataagggatgggatcgtggctttgctgtttgccttgtagctgtcttctttgcccttctttctcttactttcggcaaatctttgtatcgccataacgttcccaaaggaagcccactcctccgttttataagagtaagtacccactacttagtatatgagcatttctattagttaaggccactaagtattgccttgagttgtcttcttgcaaatgaataacgatatttagttactaattgggagggattcgatatttaattataggctaaataggatttttgattcccgaactttgacatgtaccaaatcatcatgcctcttgaatttttctaatcgttaaaattttttcctgagttattaaaattgttgaatttaagaatttttgtttaattttattaaggaaagtctaacaaggatgaaagttcagggcatgatttgatagattttaaagtctaaggagtatgatttagtacataaacaatcactaaattagtaaaattgaatgaaattggacaaaagttcttaaattcgataatctcaatagctcaagggaaatttttaactgtcagaaaaatttaagggaataatttgatacatgtcaaaatttaaagggtaaaaatcctaattagccttaattatactagcaacaatataacattttaaacaagattgttttaaacattttgaagtccagttttaatttttaaaattaggcctttacaaaaaaaatataatttataaaaaatatttttaaatattattataccgttatatattttataaaacaccacaaaacttcaattaatattgattctaataaaaaaaaataaaataaaaaaattgaaaaaaataataaaaaacagtaattgatttttttttcttaaaaaataaaattgaaaatgtattttaagatttgagatagaagtgaccaatcatgacaatttataaaccttttaaaaagttgagttcattacaaaaaatctaaaaagcttaaaaaaatatatatatatatatattagacccttttttggccctgtgcaatagtcacaccatacaaattgaccctgactttaaatggtgtggtgcattattggtgtattttaacacttatagtttccttagtaattgctatttggcaccataactataaggtatcaaaaaatatatcaatattttaacagaacccaataacatgataggtggatgtgatgcttgatacaaagtgtgtcttaaccttgataaaaataatattcaaataggaatataataaaaagaataataatattatctgcaataaaatatttgaaaatttaatttttcaaactataaactgtttaaaaaaaatttaaaatttataagtagttcaacatatctatactatgaaaaaattgaaaatccttgaagtgctattagattatataaatcatttgtggaataatacaactttctaattaaaagaaaaaaaaaattgaaaatttgggtgccaaaatagttaaggatattggagagaaaaccattttgaaccattatatttaattattccattattataaataaagtaatatattaatttattttgttttaataatttgattgatattggtctcaggttttcgtggctagtattaaaaatcgtaagcttcctattccagagaattcagatgaactatatgagattggagaagacaaagaagctgcaatattaaataaccatcaagaattccttcaaagaacagaccaattcaagtactactactactactactagatcaatatcattatttaagattaattttataagcatattaattaattaattaatgcttgatttattataattaattaggtgcttggaccgagcagcagtgataaggacagatggtataacaggaaaatggagagtgtgcacagttactgaagttgaagaaacaaagatattagttagaatgcttcccattatactaagcacagtcttcatgaacacatgcttggcacaactccaaacattctcagttcaacaaggcaccacaatggacacaaccatcaatggctttgaagttccagcagcctcaatcccagtcatcccactcctcttcatgttcattctcatcccaatttatgacaagatcttcgtccccattgctcgaagaattactggcattcccacaggtattcgccaccttcagcgcataggagtaggcctagtcctctcagctatttctatgactgtagcgggaatagtagaaaagaagagaaagaatgttgccattgagcatggcatggtcgatagcctcgctcccttaccaataagtttgctctggctagggtttcaatatgcgatatttggagcagcggatatgtttactttggtgggtttgcttgaattcttctacgctgaaagctcggcaggaatgaagtctctgagcacagcaatctcttggtgctctttcgcctttgggtactacttgagcacggttgtggtggagattgtgaacaaggtgagtggtggatggttagccaataataatctcaacagggataagttggaatatttctactggctgttggctgggttgagtgtggtgaattttggagtttatgtgttgtgtgcatcttggtatagatacaaaaagttggaagtaccagtggtcgagaaaaatgatgtcttgaaggaaattaaaccttgatatgtaataaacataaataccatatggacttgtactgcaagtacttacaataacttttctgaacacaagattatataaaatttaattatgttttgagaagttacaacatgtgattaaaaatgttgcctttgcatgcatctaagtcagaaacttgaggaaagagaatcaagagatcatcaaagctctgatctgatataaatgatcaattcacagttgtggagattcactcactggagttgtgtgtttaaagaaaatgcactccatcctagtcaattacattatacatataactacacaatactctcaattcgaatttcagggtaacatatcaaaaccaatgaacttctaagttgtatccatccccctgttctagtgagacaaccaagtgctagaaattcgaatgatacactctttttttcaataattttatatgcaaaacatgtagataagagagataagcattattggacatgaccagcaatcacatcagcacaatttccctggaactcaaagaattcccattaattgggcctcttcatcaaacaattaattctacgtataagaaatgccacttaatgtgctggcaaaaatttagtattgcgttggtaaaatagagtttacttctgatgtgttggcaaaa

SEQ ID NO: 162177 - DNA, 5557 bp, Cannabis sativa
aaatgtttgaagaccattatataccaataaaataaatattcaaaaaaatgtataatatatatatatatatatatattgtgttttgaataataaagtatatcattttgttttgtgcatgattttataataaaactgacctggtatttttgtgaaactgagtaaagaagaggaggcaaggatcttgtgttcaattttgagaccattttccaaagtttgtttgagaatagaaatgagaagtgagaaggctgagatttgaagctcagaatttgagattgaagataatgaaaagcttagccatgtcacagtgattaggcacacccttactaataccaactcctccatgtcttttgatctaacaacacactttgaaatcccttctaaaaatgaccttcttccattaccaaccaatgatgtgcacatctttcttaaccattcttcattcttttcttcctcatcttcctatatatattatgataatacaatatatgtggcacatgttagttcagtgacggactcaaaaattttgatttaatagaagcgaaaattgaataaatatgtgtatcaataaggacataatattagattgtcctacatcgaataaatatgtcaattcttagataagatcacgagttactttgcttattgtcaattaaattttgagatgaatctcgggaatcctacctaactagtcactttatagttgtggtttttgagtagagatatcagctatgtttggtaggagagagacagaaggagatgacaagttgtcttgtctagaatttgacaaaagaaagggatagttgaacgaagagtaaattctttcaaatctccaatttagattcactttccatcatcatttatttgaaattacaaatataccctcataatatattttatatctttcatcaactctccattcttcgaattcgcctttcccctaccaaacatagtcttagtatgagattggtcaataatttataactaattggacaataccctctcataggcatcaaattttgcaatgttgaacactatattttgccatagcaatgattataggtatataatcaagatttttggagcaagtaaaaaagaattaagtgagatgaaaatgtaccacgcaatatgtatcatcaacaagtgaattatcttcatcattctctggttgattccctttgaaataccctgcttggtttaaaatccaagtctctgtcattaattttccagaggaagaaaattgaccccctaacataagaagtgctctgcaacaattttctcttattttctcatcagccaaactgtgatcaagtgcatttgttaatgcatcaactgcctcttctctatatatgctgtacttactagaaggctctacctgtcaaacacaactttggtcattcaatttcattttcattttcatttatgactaaagacaatgattttgcaaaatattacaaagagtctagacaagcaaagatgtttgacaaacatgattagttatgtaattgaaagaaaatcattttcatttagttcattcttttgttcggttacaatttaatacatattttttaacacgtattaatatttggagtttatactgttttagattttgtattttgacgaactatcagtttggagtcctacaatttttaaaatgaccaaaatactcttatgaaaaagaattatactatttttgaccttgtattattttaatgaccaaaatacccttcgttcgaattcccccttttaaagtgttttgctagaatggaattcaaaatgaaaaaagaaaaagattcgtttataggtggaaacataccaagagatccaagtataacaaaaccacagcaactaaaggtctttgaaaaggtggagaaatatgaaggtagagaagtataatatgcattgtatcttctaatcctccattttcattctccaatccacttaaaatttctataacatcctttttcctgcaataacaaagaaattcacttaaaaaaaactaaatatccaacaaaatttgaataacacaaaactatagtaaaaaaaggactcgagcctcagacgttgtgagagcaaaccacatgcctgaccatttaagcaacctcgctttaaaaacatacctcttgaggcaaatgagttcaatgatcaacaaaaccgcgctttctctcgccttaatatccttgcaatgaagtagctcaagaagacatttcttgctaatatctctagctatttgattcctacatcttgattctacttcaatacaacatgacaacagttttatcaaacatgtctttgtttcgagatttccatactcgagttgatgcataagaaactgcaaaccgccaattgagataaggcgtttagcattgttggttcgctcctcttcgccaaaattagtaaaaagttgctctaagatcaaaagggttgtttcaatttcttgttttgttcccgagttttcgattacttgagaagctaaagcgaagagatgcctacaatgttgggttttccagctttctattactcgctttagtattaagtttgttgaagggactacattgcattccaatacttttcctgttgttgggcatgttttgtttccttgatcaaaccaagctttgatggctttttgctcaaatgtatagccggtttctatactcgtgggattttcgaatattcgtctagttagagggcaaatgaagtcttcaggaatacttgggagagaagatgatgatttttcttcaacaacatccccatgaaattctatgaaaaaaataaatatattttgacttattttagtatcaaaattcaaagggaaaatactatatagaaatattaaggtgcgtttggttgagaggaatgaaaacacacgaaaagaaatgagaatggaaatagtcattttactgaaatggtaagaaaattattttattggaatgacattcctatacttaaaaaacgaccaaacaaaccaaacgcaaccgaaaagttaactaaccttcagaagcatgcttttcattgattatctgcacttagaaacaaattaagtcagtaattaaaaaaaaaagatgaaaaacagaaagtaaataatgaaaataaacagaattttaagtacatttgtaagaggaataatagtagcaaagtcaatggtattattgtctggttcaaaaacagattttgctagccttttaagtgtaataagctcattctcttctgatatttcatgacatgtttctgagttgacaaatttctcattttctgataaatctttctcttcaagaacactcaaattttcctttgatgttatcatgagtccattatcctgaaaagggtcataacaatatcaaaaactaacactaaattttccaagtaaaaaagcttaaggcaaatattagcattagtactattacttacttctgttaatgtatgtttaacaacaggagaatcatcagaattctctatctctaaatcttcagaaaccgccttacttgctcggcgaaacatagcattatagagtgtcttactaaccattggttgaggcgaaaaaggattagaattaggactacttgacatctctgaagaattaccttttcgactctcactaaccaaaactggggcaagaatggaagggactggtgtggtttcaactccttcagttagccaatccttgtagtaaattgcaaattggtaagtacccgaatccactaattcgttgtacattttgtcaagaagcttcaattttcttggcttttcttgtgtgtcaagtaaagaatttgcttcttgattgtaccaaattttcaaatgtgaaaggtgaggagagaataggtaatcccataattcgggcaagagctcggttcgggcatgactaggcgaatcgcagaaaacttgcaagacatgctttgcagccactctgtctttcttttgaaacttatatataacacttaggtagagatgagcacaagatgataacactttttttatgttatcatttgtgttcattcccacaagaacactaagttgcataacaactttcttcatatcttttgtgctcattgaagattcctctacagatttttctatggtatcaatggcttcctcaagtgttgatatgactctactctcagtctcacctctttttcgttcgagaaaatcaagaatagacaaacaactcccgcgaatcattactcgaaactccttttctttaagaaaccttttgatgtatccacttaagattgacaccattgcttgaatagcaacttcatcaagagcaaccttctcataactcaacttcttactttgaactttttcaaacactttttttcccttaacttcatccgaaaatatgtcattttcttcatcttcatcttcatcttgaacctcaacaatctcattatttgaatgtgaagtgattgattctcttgcaccaaatcttccaacaagattgtctcttgccctaacaccgtcgatttttggtgattcaacgcgcttattataactataccgagcaacatctgatcttgatctttgagttgttctaacaaaatctttcttgacttgttgttgaacatgataagttggcatacttggtgacttttctgatctaaatgaagttcttgaccttgagaaagattttcttcctttgaatccatcttctactagaagatcttccaatgaagctgccatttcttatttcaaaacctaccaaaatcaaactaatcaacatataaaccccaaaaaaattatagtttaatatgcaaaattagtgtcatataattacttaaaaaaagttgtaacttaccaatttatagccaaaaattctaaaccatatgaacttcttcaagtagagattttgagttgaataataactatatgtactaattagtattagaataaattttgaaccatatgaatgaatatattcaactaaaacaagtttttaaaatataaatagggagaaaattttgttctcttaaccttaacaattcgaagagtttttaattattattagttagagttgaaataatacttatatttagagcattgttattgggcaccagtgatttctagcacctctaaacatgttgttttagcatttctttatatatatattttttataactcatttctcttatatttaaattagaaataaagtaatttgagttgaaatattaagagggaatcttaggagaaacaaaagagagaatgatgaagatgctttgctaaacaaaaacaatgagttggagttgtctataaaggactgcaaattatctaaaaagacaaaataaattaagattaaaaaaataaataaaataattaagtgaaatggtaacattaggcaacaaacaatgctaacttagtttgttatctttggatttagatttaaaatgtgacaagtgaataaggacaaataaaacacataatggcttttgttgtaaagaatatgtgaataaaatttgggtatctacgactatttcaatgaggtgttattattagtaaagaaattttattggcacattataaaatgataaatacattttaatatttaaaaaaaaaattactttatata

SEQ ID NO: 162178 - DNA, 4405 bp, Cannabis sativa
aatttatacctgaaacaaagaatcgccaatttagtttttcatatcattaaaagatgcagaccaaggcaatacaacaaggggcactgctaccataattaaacaaaaaaaaaactactctataagaactcatatgaacagagaacagaaaaccaacggtagaatttctgtaaaatgatttgacttgaaaggttaaggttaacccaacaaaagaaccttcaaaccaccaataagggataaatatggcaactgagcacaaataaaacaatcttaattcgttaagatattctccatcagatcagtgaatgatagtaaaagggacatgcttcaattaaaaaataaatgcacaatctttgccacacctattccaattgtagtaataaattcatcactctagcatcaaccatatgaatcatttcacttaactatagcagcctaatatctgcaattcctttcagttatgcagagcaaacagtgtgcatggttgatgagtaaaacaacttgaaaacgcaatttaaaaatgttattcttggaacaatgaaataaattgcataggtaagaaaaaaagaaaaacaagaacagaaaaggaaatttcatacataaacaaaaagattaagaatggaaaaatcttacttgtccatgatggtaaggagttgtttcctgacatcctgtgctctcctcaaggatcgagactgaacaaaattctcaaaacaccacggcccagaaaagttcttagctttccaagcctcatagacagcaagtaaggtcaggtgatctccttctggttgaaaaaacttggccctcttctgatctgcttgggcttgtttttcacgaggcctgtaaaagatgtttcctgtctgaatcatggcaatgattgtcaaaatctcatcactacatccaaggtccacactggccaataacatcttagataatggtggctcaagaggaaactcagccattttccttcccaatttggtaagaagcccctcttcatccagtgctcctaaactgtataactgctccatggcagaaatgagagcttgaggtgcaggtggatccataaaatcaaaagataaaagatcatttatacccattgctttcatattaagtgtagttgatccaagatttatcctctgaatttcaggaattgaagtaggagacatctcattacggtatgcactttcagtgtaaaggcggtaacattttccagggcctgtacgaccagcacgaccagctcgctgcttggctgaggcttgtgaaattggtgttatgatcagtgaatccaacccttgctttggattgtacacattttgctttgcaaatccaggatcaataacatagtatataccatcaatggtcaatgaagcctcagcaatgttagtagcaacaaccactttcctcttccctggcggagcaggatcaaatatccttgattgcatttcacttggaagggcactatacacaggtagaataatcaattccggaacatttttacctaaacctttcattctctcataaagagactggcaagcaaagtcaatctcctcttgtccggtcaaaaacagaagaatatcaccttctggttccgtcaagtgaatttgtaacactgtgataagagaagcatctaggtaatcactctctggttgtttggtgtatagtatctctacaggaaaagttcgaccagggatggtgaagatgttacagttaaagaaatatcctgaaaatttctcagcatccagagtggcagaggtgacaatcagacgaaggtctggcctgcgctgcacaagttgctttagtaatccaaaaagaacatcagtatgaattgtcctctcgtgagcttcatcaagcatgatcactgagtactgagaaagattctcgtcaatcaaaatctcccttagaagcataccatcagtcatgtacttgatgacagtctctggtccagtacaatcttcgaaacgaattgcatacccaacttcctcacccaaccgacaaccaaactcttcagcaacccttttggccacagacattgcagccaccctacggggttgagtgcacccaattttacccctagttgtgtaaccagcttcagcaagatattgtgtaacctgggttgttttgccagagccagtctcaccaatcacaaccaaaacttgattatcatgaactgcttgaaccaattccttttttagcttgtagattggcaggctttgcctttgttcttgaatagagagcttcgatctctgcccaaaactgatggttttcccaaaagcatccttcttccactcaggcatatcatatgctgacaagccaacaccccgaagctcttgcgcaagatgcctttcaccagtctctggcattggatcttcccaaggacgattcaaatccttgggaatagaatctagcatagttcgttgctgctgctctcgtacttctcttcgctccttaatgagtgcagattgaagtgcagctgcacgactcagtgatccttcgggattcttaaaaattttcacaggtgacatatcaacagaatacctactttgtccttgcaaaaattctggttcatcctcattcagctcaatctctagctcttcctccccaccctcttcttgatacagcattccatctcctccttcttcatcgtacataggatactcattaacacccaaaacaccagaggctatcaattgcttagcttcccatttctccggagagctcattctcttcaagggtcgacgagttgttacaatttcattctcttccacaatcctaatcccagaaagaccagtcctagtcacaggcccctccttagaccctgacggatttgttctaaaagcatcatcctccaggctcttcttcaaggggagcaaatcattccctgtatcctgatcaacatccctcattgaaaggctcaacttctgacctgaaatcgaaatcaccttaacatatacctcttgatcccttttcacaacttccttggcattagcaattcgcctacttgcaatttgtgagacatgaaccaaaccctccttacccctcaagtcgctcaattgaacaaaaaacccagtttccatcactctcgacacccttcccttataaaccttataaagttcaggctcatcagattggaactgcctgttccttgaatccttactgcctcgcctatcatcaccaagctccctaaaatctgcattatcttcgtaaccgtctctcctgtgcttctcatgacgatccctatgccttcccctatcatcaccatcatcatcttccttgcccctaccccttccatccccattatatttatccctgcgtctgtctctgttgtctctgtccctatcccgatgatgttcgcgatctccatctctgcctctgtctctgtctctatctctatctctatcatgatctcgatctctgcctccgcctctgtctctatctctatctctatcataatctcgatctctgcctctgcctctgcctttatctctaccgctgcgtctatcttcctcttgctcctcaccgtgttctcctctatgcctctctcgggcttccatttcaatctccttctgaagctctttcactctatccctgtcatcagctatggccaaggcttgaaacttgcccttattaccatcagaaccattatcttcctttaaacccttatcagacgacttcggaggaagaattgcgtgaatgatagttaacaatgtacggacaaaataatctggcattatggcaccattttccttcaatttagcatcaaattcttcctcagtttcacaatttcggcccaactcagtaataaactcagcaagaactttgtccccaaaccctaagtgagtctcaagctccgagcagactttggagaccagggacaaatactcaagcttcttcagaccctcgtccaagatagccattgacgaagaacaatcaaaacagaaagattatcttgttttaatcacaaaaaaaaacaaaaatgaaggattgtggctaaccctaattctgcaactatttaagataccgaccaattctataatgttcgtaaggaatatatgaatgcaatccaaaaagatccaccgacttaatttatatagattaacctactagtccggcaacggcaaatatctccggcccttgcggcggcgaggggaagttcctatgcttccactgaaatgcttcgatttcaccttcggctgtcgtttatgttctacagtcttcgccttttatatttatatcatggagtaatttagagtaatttagggggtgtttgcacttttcattctagccgggtccgcatatatctggattatccatttattctttgataaaatgaatatggtagtgtcagacaaagcggcggtgttcctgcaaacagtaatgtattttcatgtaagatgattagacatggtgtgca

SEQ ID NO: 162179 - DNA, 2766 bp, Cannabis sativa
aaaaaagaaagaaaaagaagagaagcaccctggaaattatcgaatgctttcattattggatagtatatatcatgtttcttttgtccttactctctctcagcttaatattataatagacattataattcattctcagcagcctcttcttttatttatatataaatattatcatatttacaaaaacgtgagaaacgaccgaatatgtatacaattttttaaatctatacgcccacccactatcgagggccactctagctatattatttatattttatatatacccttgctaatatattattatatttaattaagctacttatgttaattggcccacaaaattaatttaatacatatactatttaaagtgtttcaattatttagagctactgtttttgaagtaattgaaagattatctagaatatatattcgaaaagtcgataacatttttggagaatcaatttataaatatgtattttcttttcaatatataattaatcttttcacaaagtcttctgatctctagagatatcgatatatagtttattttaatttattcgtttaacatagaacaacgtcattctgaaatcgtctaagctgattacttaaatgttaaatattattaattatatatatgtgtacgtaaatcacactagtcatgtttatttatttaacattaattcaataattagttagtgaatgaaatttacaagttggtttgatttgctggcatgatccagaataaaagttttattgttttattcgcatggagagtaaaatcttaaaaaaaaaaattaatcatgtcaaatatgataatagtagtttaaataaaattattaaattatagattaattatggatttacatacgtacccacaaattaaacaattatatatctctcgtgtgttgcgttacatagtaaaacatatattataatagaacctttccttttttttttcttatggagctgttagattaagttgagtagagtatatttagaagatagagctataattaaaatatatattaatactattattaagctacaaagttgtataaaaaaatactcattaattaaagattaccatggaggggcaatttgatatttattcattttattatcttttacatatgtatatatatatatatgtgtgtgtgtgtttttggtgtgtgtgtgtgtttttggtcaacttgtctgaagactctcaacatttaaagaaacacgtttatttactatatatatctagtcagcacataaccaaagacgaccaggcctaagtcaatggtaagaaaaacttaaaaggaccagaccaaatttgtgcctagctatacacatttatttcccaataaattagttataaattcttacaaaataatttatagcgtatgcatctgaataaatcaataaattatataatataatcaattaaacacaatattaaagtttatatatgaattgtgttctattctgatttattcaacacaattagtatatatatatatatatatatatttaaagtgatcccatcccaccaccatatatatataatataatgatttcaattgagaacttgtaataatgtttgggaatatataaatatatatatataattcaatatgcatctacctaacgcgtgaaaagtattcttattacttgtgtctagctagatcagactctaattaaacaacagtaataataataaataatagctttcattattaattattatactttcaaaagtggggtatatagttttccaactcatcttataatatattattactaaaccaaatggtcagatttatgactcggccaaccgttctcccacgacaagagctgtgtctataaatatagaaagtctctaaacctaagttttcatcaatatatcaatatattatttttacaaatcatagatatacatatatagatcagagagagagaatataagtatatataaagttaattagacatatatgggtgaaaccgtagtagggatggatatggagtgtaacaaagatttttcagctagctatatgctattgaaacctgaagaagtggggttttttgatttgatgcacatattattttcgagtgatatggagaaaaggaagttcgttgattcttccagtgccactgaggaaagttttgggcgccgttggatcatatttctctccattgttgcccaaaagactctcagctttgtgtccaagccactcgccactgttggatccgccattgaaatgggcttgaatctcttgtccagtaatggcaatttgtttaacctcatttataattctattcgaggttcgttatttatctctattcccttgctatttaatgactaaaaactgaaaaagaggtttaatcaccccttaaattttgatttattattagtttacagattaattaattatatataaagagtcttttatcttattatatgagttagatttttgctcttctgctttaatagatatattcttattacaatttttctattgatgttaaccacagtactagttttgttttattataagacttcagttattgttttgaaagaaatgtggaatattaattaattgagtacatatatatcttttcgaaaggtaaaagaaaaaggaaaagatggccaaactgaaatgtgtcttttaaactttaaggggtggttttttagtttgtactatgtcatattgtattgtattatattatatagggtaaatagtggcataagtactcaaagttttaagtttgtaagcggcataaacccaa

SEQ ID NO: 162180 - DNA, 723 bp, Cannabis sativa
atatctaatgggaatgaatttagaataatttcattagattgcaattcccataagataatttatcaaattcactttttcttttatgtcagcatttaatttagcattagcataaaaatagggaaaagtagagaatttcaaacaaggttactttctaatctttcttgatattgtatagtggtgaagatggccacactatcaatcttcaaagtagtatggaatattcaagtaaggaataagatcttatgtaagcatcatcatagtggaccaggttagaatttttatatttatctataaatatatataagtaattttatagttgttatttttatttgtgatacatctaaaaaagtttaagtcaattttttttttatataattattaatatttttttttttttttgcgaaaaatacaaaataaatttactctaaaacttactaaaggatattttcagcactgaaaattattcataatttattcaaaaactaatgaaatattctaataatattctttttcttttaattataatacccctaataataaagtcaacagaaacaccccaaccgtacaaatggtattttgaaattttaagtataagtgtctgctttttaatttctaatattggttttagcacataactactttgatgatgatatcatgcaccccaatatgtcatgctaatgaaagcccaataaaattgcctcatttgtttgatcaaagtattca

SEQ ID NO: 162181 - DNA, 3791 bp, Cannabis sativa
tttttttttttttttttatctttgcaataatggtggtaattattaaagaatgggtatatatatataaggctctacattaaattgtttaaaatttgctcaaaatattctttcttcttcatcttcttctacagtggcttggtaaatcttgttaagacaattgggatttatgtcaaacttcttattcggatatttcttccatcatgaaacaattcaagattgtacttggaaactgaatttctttctttattttgttttggcatgatgtcaagtaaccatagaattgcattgtattgttgcaaacaagacttgtcttttgttcttcataaaaaaaaaaaagaaaagaaaaagacttgtcttttgttccgaaagccatggtatctaattcttccatatgatagaaaaataggtcttggcttttcttttgaaatttttttccagagaaatcttgagatttcttctttttcatgttgttgatttttagaataaataggatttctctccctttagggagagttttgcttcttgaatttttgttggttgcaaaaatatttctcaaactgttaaaatcgttttaaatatctttaattatattctggtcttttttttaacaatttgtttgtgtggtcatgggtgacaaagagttacagtatcataatttatttaacaattttaaactacctgaaatattacttgtaattcatattattgacattaaatatacaaacatagctcttaaaatgcatatgtataatcttataacttaacttattattagactactatttatatttgtaacttaaggaagatatttgtaacgaattttatagttgatggagaatatttgcaacaaaaaagaagttaaaacttaaaaggtaaaattctactagaatcataattggggataaatcttatttatactaatttctatttttattcataggcgtttacaggttttttttttttcaaaaaaaaaaaaaagaactcaacaatcttcatacttttttaattgtatattttaacttttttccttcatgatatataaagagaaaattgccttggcagttaagttctttcactctcaaacccacttctttcttgttcttattcttctctctcctttttcctccagtctaccgatggcaaagcacgacacaccacctttcctctccttggtaccactcattttccattagtcctatccagtttttttcagaaagatttcttcatgtttttataatgtttgaacttttgtacaagatttttttggtcacaatttagaattattaattctatacgatgtctaggggataaaatcgtttcaagaacaaacaaatgtggctttttcttagattttgaaaatttgcgtatcttaaactaaaatcgatgtttaatgatgatctaataatagtttcataaaaattaattttttagacaaaaagcaatgtttgactaattttactaatgctttgacaatagtgtcatcaatttcatttttatacaagaggatgcttaacgatgctctaacaatggtgtcatgaaaattgtattacaaggtaaaaatgttttacgatacttaacgatagtggcgtgaaaatgttatttttaagtgtggtaaatcaatgcttgataatagttttaacgataattctataaaaacttgatttttaagggaagaatgatgctaagaacaatgcaaaacgatgatttcacaatgaaatttgatttaaacaaaaaccttaggtaagcataaccttttactcaaatgtttgtttaatgtatttttaatttaaattttagtgttttttttttttttttttgagatctacacgttaggaaagtgtataacttaaatttggggtgtagaaataataaaattcaatatctgtctatttgaggtcaaacgaagactcatagttaaatagtcaaattttgggttctacatacattaaatttaagggtttttttcaaggaaatttaaggttatactcatttgaaagtgtaataaaaacttacatcaacttggacatcctagtaaaaagttatctcacaaatcttgtttatattttttaatcaaattcaattgcaaagcattattttccattgggctagaaatttgtgacacaaaacgatgacacaactcaaaaacgatacaaaataaattagtttgggtgacacatttaacttccgtgtcaaatatgggttgacatgtttaacacgtttattaaatgtgccatttttggatcaacacgcttaactcaaaaataatacaattataacacgtgtaagcaattaagcatacataagtatttttcatttttatatcatgtaaaatgaaataaaagctctattaaaaaccctcataaaaacatgtttcttctcattttctttataaaataataataataaattaaaactatgaattttattagtaatatttatgtttatgttcataattatattaatcgtgtcaaatttgagtcatgtcataacatgtttaattgcatgttaaacaagttaatttcgggtttgtgtcatgacacgtttattaaacgtattatcgtatcgtataatatcgtacgacctgttaaaaaatcgtgtcatgtttgtatttattataaaaatttcgtgtcataaacatgtcgacacgaatacgatatccgataacaagaattgctagccctaattttccatatgcattaaattatattgagatttgatggtgtaattgtgaaagatatcatttgcgttaagtaatacgatttttgagaagcaacgataatttgactttccacgaaggtaagagtactaagagctagacaatactaatgttgcctgcttcaccccacatgataattttattaattttttaatcaaattagccaatcagaaaacagaaataaaaaaaaaaaaaaaaagttgagcaacattgttggtagtaggcaacgttttttttgtctgtttgctttaaaataatatttttccgctgaccccaccaatttgacgggcaacatggatagtaatatcattgttgatgctctatgaaaggaagcttattacaaattattatcattaagtctagttttttagttttatttttttttttgaatttttacaaaattaactaaataagcatttttattacaattatattgtaaggcaaacttaaatacctatttttttatatatattgggaagatttgttgtgccacaaatattagtcatagtgggtacattaaaaacattattcattacttatttcattattttgtttatttccaaaagaaattttttgatatactaagttatgggagcattgcagggcttatttgttgttattagattacatatcaaaattttttttagatcttagagtcttagtaagggatagtgatcctaagatgattatgaagtaaaatgaaatagtttagttgctagtagccaaagagttttcattttggctagttctagtaattttataggggggtctagttgtttaattttggtgtttgattgattttgatcagcttgataattttctaattataaattttttctagttttttgattttttttaggtggaatttcagtgatacaggccgaaactttagccctgttggttggacttaattgggctcatatgtgtagtcttccaattcatgtagtttattgagatttgttagttttggtgatgaccatcaacaacgaaaatatgtatttcaacgagttaggagcgttgtttgaagatgttatagctttattgtctaaatttctgggagcagttttgtcccatg

SEQ ID NO: 162182 - DNA, 4531 bp, Cannabis sativa
  modified_base (4505)..(4506): a, c, t, g, unknown or other
gagaaagctcacaaatcaaggactcctcaggatcgtattgtgacgtttgagtctgagttaattgagtccaaaatcagatctataggacctcatttttgggaagtcttaaggtcatgcgacatcaggaattaacagggattccactttaggtaagttcgtggcgggaattcagttgttatccacctgaacgtctagcttgagatgaaggttacagaaccaatgaactttctaagataggtgcttggagcctagagcatataagagttggggaaattctcccacttagggactatttcaaggacttctgctactacgtaggcattgctccattcaagttatctccaaactcatacaggatatcggcctgttgaaagtgtttatatcaccttctgaagtgggagagtccgacccaacttgaaattctttatttttattccgtaaagttctaccctataaggaagcaagcgtaggtcgtttctactacctcgggacatataccaataataacatgaatgttgtgaggcgtcccaacaaaaaggagttcaagaatgacttattttggaccgcgggtctttttcccatcaacaccataaaatttcaaatcatacgtaagtatagcttttctcaaaaacttggttttgagttttatttcaatgcacattgtctatactttactaattttatttttgttatgttaacagttattaccaggagacctgttacaactcctaagatcaagaaaagacacatgattcttcttggccttcctttttgattgcaagcagttgacttcatattgcagaggaacaacctgaaggcttgcactcttcttggaaaaggtcaatctactcatgaccttaaggtcccaaagtttttagattgtcaacaagtgcttgtaccagctgacgagtaggatagagattatgtgtctcgcagccactatcagaagaacacgacccctaaggaagctgaagatgatgcctcctgaggtaataactttggtatttgtggatggtccccaaccattcttagggctgaacaaactacactagtcaaattcaaggatagccaatgtaacttctatatctggaattgtgtagatcttatttcccttagatttgccaattggtatcccaagcatcactttgggattgccaatcaatatggcactaatttcgatagggctggtcatccagattgggagatatctcctcttaatcccttttatcttttatctcacaacattttttctgtttattttgcacaagtgttgatggttttcttattgtcttgtatatatggactttgaaaactttctatcaagctcttcaagctccgaaaaggcaagaaatgatctatcgcattgaagaccgcttctgggtcaaagccataatcgttgaagaggttgaaaagtcaccaaacaacaaaaagcatgcctcgactcagcttataatcaagcaagaggtgccccaagtccttccttctgtttcggcagctgcgagctctggcaaacaagcccttgtgtctattcaccaagtcaaattctctggatcccaaccaaagatggcattcttggagccctcttgccccttgcccgtttttgaaggtatcgagggctcgcaagtatgcttcctgcatgctaccaacgactgacatcacacaagacttttcaacaagaggactggaacttaattaacatgggtgattatcaaagtctgacggtgaggagttatgatctcatgcactcagttagttcttcttcattttttattcatgtataatattttttatgagtcctcctctaacctcactttttgtaggcttctcttctttcctttgtagctcaacaaaggggtcttcaaaacatcacccaattaatttcgagctttgaaaatcagatgaccaacatgaagccattgcaaagtaatggaatgagtccccatctaagatttctaggttaaaaaagaaagttgaagaacatgagaaaaagagaaatccctcaagactgaactcgaggctgtagaaaaatgagccaaggatcttattggggctaataaaaagacccaagaagcacttgaagaggctcataaaaagcttgaagaagctgagcacaatgccaaagctcgtttaaattagatcgccacatgatctatttatcgagtgtggatgagaaattcaaacatggactaaagctttctgatggagggagccgatgagatgcttgccttttgcaaacagacaaaaaaggatgaagccgaggatgccaaggacgttgaagaagaggaagaggaagaaatccccactaaatctcccacaatgtagatttagtttttattgttttgttttttgaacaatggccttttaggctgagacagcggttctcccccctgaaattttgtaatatttaaacttttctttgttggatggccaacattgctaaaatatatatttactgttatgttattttaccatgcttttctcgagctaataatgtttatttattacgtttttattcataacaaaacacttttctcaatttggctttggatattttagggttacacgcgcaccaatctagtcttatcctgttatttcatatgcgagcagttaacattttgatatgctttatgcgggtagttaataatctactgtgttttttgcgagcagttaatattcttctatgcgctccgcaagcagttaatattctactatattttccatgagtagttaatattttgctatgttaagagcaaaattcaaatatttgaacagttcttttaaaaacaaattttgaatattttttgattgctcgtataagtagttaatcctcttttcatactttaccttgtggattatcttcttaagacatgtttttatctcgttcataatacatgttacatcatgcgatccattatttattcagatcacacgtagctttttgttgtttaatgagaaaaaatctcacttacaactactttttgaattttcacttaaaggaaggttttaacaatcattctttcctttgtgaaaaaaattttaaatttttatttctagtttttaacagcctagatcttttttgcatatatctcaggtgaaatctaattattatgcacaggtatgcccccaagtaatattaaagaaaagaaactttataattacttgaaatgtttaaatctttattcaagataaggaacaactattacactacaacattacgagaaaaattactggtaatatggtcgtagatgctcgctgttccaatggtttttttattagtgagccattaagccatgcagacttataaactccagttccaaccatagtttcaatgatgtacgggccttcccaatttgggttaaacactctagctactagatctcgcatatttgcaaagacacgtcttctcaccaaatcccctactttaaagagcctcttttgaactcttttattaaagtatccagtgagacgatgttgataagtagcacgggctacttgtgactcggtgcatttttcttcaagcagatccaaggacttactttgaagttcattattttgttcttgattgtagaattcacgcctgtgggtcgcaatatttacttttacaggaaacattacttctgagccaaatgcaaatgaaaatggagtgtgtcccattgctattttctccatttttctatgggcccagagaacttgtggtagctcatcaacccatcttccagtgacagcttaaacttatttttgatagtagccttgaaggttttattaacaacttctacttgcccattcgcgtgaggcctcgatactgacgagaagctttaattattttattcctctcaccgagttcagtgaataactctccatcaaactaagtatcgttgtcagatactatcttagttataaaaccaaacctacaaatgatgttcttgataacaaaatcaagcaccttcttgcatgtaattgatactagtagttcagcttctgtccattttgtaaagaagtaaactggtacaatagcatacctcgcgcctccttgacgtgtgggtaaagaccaatcaagtcaatcccatatattgcaaatggatatgttgaggtcatcattcttagctcggtgggttgtactcgaggtatatgagagaactgttggcatttgtcgcatctcttaaaaacttctgtgtgtccttattgatagttggccagtaatacccttgacgaattatctttttcgaatagctttgccaacctgcatgatctccactaaagccttcatgaatttctttgattatttcattaacttatgtaggtaacagacattgtagtaaaggcatggagtaacctcttctgtataagtttccttcgaccatcatgtaatgaggaatcgaatataagagttttcatgcgttagttttattttttggaagttctccatgtaatagatacttgacgattggtgtgatttgttgggttttctgccgtaaataaaaccctttacaatctgattagttatnnatataagaaatttgaagtgatttat

SEQ ID NO: 162183 - DNA, 1582 bp, Cannabis sativa
tgagattagcatgctcacataataatctagtcatatttctggttgcccgagtgtttcaggttggaaagcatggtataatcattgaatttattgatcctgataatacaaggcgaagtgccacatatttgcctgagatagctgcccatgaaggtaactctttttccaccttttatgaactaaaattagcatgaacatcattctgtgtctgtgacagacagttagaggtgagagattggaagtgaaaataggatgttccactttcagaatgttattacaataggcatcttcaacgatatcagcatgtatggtaatcagttcttaacattggccttgagggatgaaatcttaatcgaaatttgttacaaaattcaagtttgccattccaagggagaagttttaatctcttttgttactgaggagcctgcaagtttgctttatagtgttctcaagttcaaattatagtaaaacaaagatatcatgacatgcccctatgtagtgatctgcttactctttttcttagaaatcatcctttgtttactcttttatttgaaaaataagctttctatggattgctctatgtgtttaggaaatttagaggttcattcttaagtccaagtgtatcagttaattccatgtgtttgcagaaatgttttatctaacttcttgtatttttgatctgtttgaaacggttttcaggctggacaaaattagaagccatcgactccttgatgcgaaaatcagggtacagcggcaccatctccgaaacccttcgaaagaagatcaagctgacccgttaccagagcacattatgtactatgcaatacagtgactatatatcctacgtcagggcaaccagaggtgcagctccatctattgttgggggcaagcctggcaaccattgatttccccaaactggttttctccaaagaccagaaaacgagtttggtctcaacaataaaaaaataaaacatttatttcaattattataacctgggttggaataaatttctcacttttttcagcccaggttgctgttttaaaatttatgcaacttgtttatatcattcttcaaattcatttgattttgaagaaagatactgaaatcactggctgatttctaaggtttagttgtctctcagctactaccacaaaacattcatgttcttgcagcttagcttctattggaaagctgtattatgtaaacttgattatgactcgtaattatcttgaacttatttgccaattcatgtttgataattattcaagttgcaaattactaatttataatctttgtctcatcaaggatctagctaggtgttttttcactaggaaaaaggagattgtagttaagggttgtattttttttcttgagatttggtcgaagccatggacggagccctaaaacccttgtcgagttctcatttctcatccctgctcagatcaaatatcgtttttttcttgttgttgatactggcaagacccagccagatgatgtctgctggttggtagtgagaggactcttagtacctgcatacccaaaagggggcgcttaaagtaagggttggaccaataagataggtca

SEQ ID NO: 162184 - DNA, 4411 bp, Cannabis sativa
tttttcctgtattagatataaggcttttgatgaaattgatggagtagaagtagcttggaaccaagtgagtattgaggatttaatgcaaacgccggaccagttggaaagattgtattctgaggttcatctgcttaagtcattgaaacatgagaatattatgaagttttgttactcttgggtggatgatactaacaagactattaatatgataactgagctgtttacatctggcagtttgagaaagtgagttttgtttcgataatattttgttcggttgtactttgccttcatcctgtatcatgttttatttattgttaattttaatataggtaccgaaagaagcataaaaacgttgatctgaaagctatcaagaactgggctagacagattcttcgaggattgcactatttgcactctcacaatccttgtattatccatagagatttgaagtgtgacaacatatttgttaatggaaatactggagaagtaaaaatcggtgatcttggactggcagtagtgatgcaacaacccactgctcgcagtgtcattggtaacattttttattttatttgtgtatgatattggataaattattcaactgaaagttttgttaattttcttttgtccaggcactcctgagtttatggctcccgagctttacgaagaagaatacaatgaacttgtggacatatattctttcggcttgtgtatattagaaatggttacatgtgaatacccttacaatgaatgcaaaaatccagctcagatttataagaaggttaccaatgtaagtagctgagtgcttgaatattgagtattcggttttaacatgattgatttgtaaatagtaattgtcgatttaacaacttcttttattctctttttgcagggaataaagccagcttcccttaaaaaagttaataatcccgaagtcaagcagttcatcgagaagtgtctggttcctgcatctatgagattgcctgctgttgagcttttgaaagatccatttcttgctaccgaaaatcttgtgaatctggaccaggaacctaatgggatacttgctattactcctaaactagttaactcgccacatgctccaatgaattctgaaccacaacgttctgaacatcgtccgatggatgtagattctatcagcaaaaagcattctactattggttcagttttgaaaagtgcaagtggcatgcctagtatttcaagtgcagaactatggaagcacactaagaataatgaattcaggctaatggggaagaaggatgatgataatacaatttcattaactctgcggattgctgattcttgtggtaagtatctttgatacaaaaggtttatttgtttgttgtagtttgttcttcattgaagtgttaaagtgttaattttgtttttggttttaacaacaggtcgggtaaggaatatccattttgcattctttcttgattctgacaccacagtctcaattgctggagagatggttgagcaacttgatctcacaaatgaagatattagtgtcatagccatgttgcttgacaacttgattgtgaagcttgtgcccagctggaaactcgcctctggaaacttgtcaaccggaacagatagctcaaccgatgattgttctatacttgtaaacgatgaaagttgttcttgggattcagtaccaggcacacctctttcacacgaaattgacagtcaacatattctcgaactgacacaattggaagattgtgcaaacaaagtttcagatatctcagctgagtatggtgagaatatgtcatacaaacttgatgaactcttcaagggatcagaaagatgtggtttcggttcagagtacaatcatgagcaggaagagaattttcatgaaggaaaacttgagacaaccggaaagagctctgtactctcatattatgattcttgttcgggtttatcgcaaaattttagcttggcaagtatgcaatccttgtctcttggagagaacaatgattatgaggagctaaagcaggagcttgatgcaattgacactcagtatcagcaatactgtcttgaactcatgagattgagggaacaagctatcgaaaattcgaaaaagagatggataatgaagaaaaaagtagctgctgcttgatttgttttttttcttttgggtggctttatatgtttgattcttgcttctttttttccttcacaatattttcctctgattacattgagggaatgattggttttcatcattctttttttattttcttccttaaaacaagatgaatttcattggtttttttagttttagaaaaactgagtcttcttcattcttttaattgttattgaattcattataatttattaatttgataattttactgtaattattgaatttccccattctctttcactgaactgaatgtttatttttcttttcaaacaactgaatctttatagataaaagcttaatgaactcaaaatctactaaaagtggaagaaactcaaaatcttcattaagcaaaatcttagaaaatgagagttctttcttcctttatggttttcccatgttcaaatttcatgattgagtggttatacttcaaattcagataatcaatttctaaacaaagatttcagtcacttgttcaatcaaaaccattaagccattcacagaattatacaatttcagatgagcacaacaaactttcactattatattcacattttattaacaaaagaaatcatccaatccaatacaaatatccacacaagaacaatgcacaaccataaccaatgatgatctgaggatattttcagttgctgagaatacacatatgagtaaacctttacacactcaccgatatgtccaacggaaaattcagaaaccttcttcattgttaactaccagttttcctttactattttcgatttctccagtatgaactttccttccttgtatttctgtgtttcttcataggctctttcatacttccaaccgagcacttctcgacaatcagagcagtagacatcagcaaccgtatgtaaaccggtcattagttgtctgtcctctttagctcccaccatgacattcatcgcgtgagagaacaaaaacgctcgcccattccttccctaaacatcatcatcatcaagattgtatttgttttccaatactagcagtaataacagaaccaaaactcaaatgatcaactacacatgtctttagttcacataagagaatttggcttgtgtttcattaaaaaattcgaaagaagttcacctagtagagtttggttaagcaattcaccactaaaatcatcaactcaaagtaacatcaacactaaattgttcacctgaaaagctttagaaatgacatcatcatgaagagcaacatgattcctacaattgcagcaactgtacaaccttggcccaaccaattctgccatcaaaacacaagaccagcttgcaaactaccccaataaaatgaagacccttttgagagcataacataacccaagcatagcaataatcaatattgagaagaaaagacaaaacaaaacataaaattcactaaattaaagagaccatagataagccataacctcaccttactcaacaacaaatgtgattactaataagattttcacaaccgactaaacttggggccaataatctgtaacacaattgagttagtttagattagaataataatgtcaaagccataaatgataaggaaagagatataaatggtaattgataaggacaccaacactgtcagaagtttaaacataatataataacaactacagtaaaagcaacccatttcaagaaacatagaagatcataaatagaaaatggttcaagatattaaattattatttttgaagatctgggtcttttaagttacacaaaaatgagtaaaacccctaaattcatttttcatttaataccaaaaaaaaccaatctttttttttttttttttttccataattatgaattatcatttgatctcgatgaagataaaaagaagagtttgatgttgttttatgtaccttgagaattttccatgttgggttcttctagctgatgagaatcgaaaattgagagaaagagaggagagagtgttgttagggttctctaaagctttctctaatttcagaaatggtaagaaaattgtgtttgtctgttttttcattttttttttcttttaatggaaaaagaagacaagattgatacgaagtgttgtttagaaaaacgacactgcgtttcattctaatgatatttcatcattaatgtcgtttgttgaaatttggtaaaagtcccttaaaaaaaaagagggaaatttacatggtatactaacttttgatatttttttacaaaaatattgccaggcggtattttttacttttttactttgtttttt

SEQ ID NO: 162185 - DNA, 2076 bp, Cannabis sativa
  modified_base (1736)..(1752): a, c, t, g, unknown or other
ttggcactcatattcaggcttttacgatggtctcgcctgcttctttcttgggtgatatgttatctatgaagaataaagtgcctttattcttgggaggtttaattctgacaatactatgattggggttgagtgtcttaatgatatcaaaagacataaaaagggtaagaaagggtttttggcgtacaaagtagatatggctaaggcttatggccgtgttgattgggattttcttcggggtatgatggagaagctgggatttcattcagggtggatttgtttgagtatgatgtgtgtttcaactgtgacctatgcaattaatgtaaatggtgatgtgattggcaatattgtcccttttaggaggcttaggcaaggggatcatttatctcccttcatgttccttatttgcttaggggttgacttccattatcaaacaagaaattgagtttcataatatttgggattatcttgtgggcggtgtggccctacaatctctcacttactatttgcttatgatagcttcttctttttggaagccaattcggaaagttgctctcgtttcgagctcattctccaaccgtatgaagcagcatcaggacaactagtgaatcttaataagtttgcagtttgcttctctccttgcatgcttgatgatctatgtgcatctttggctttgatcttagggttcctttggtccagtgagcacttcgttgatttctcctggtcatattgggagtgcagttcctgagttaattttgagagagtacaatctatttgttgatgctggaacttgctatgaaaggggacatattggtttaggggcaatggtgtctcgacaagatggtgacattttatgttcgactgctacccctatctcgggtttgcttgaacctcatgtggctgaggcttctgtccttctccatgggcttctcctttgtgtgagggtgggatatactcgtatcaatatattttctgattgtttgcaccttgtgaactctctttcaaacaagaggaatgattgcaatgagtatggtattgttcttacggatatccttcatgtttggaagtctttttctcatgtcttcatttttcattgtaaccgagctagtaatgttcttgtccattctcaagctaaatttactctttcattcgaaacttctcgagtttggtagtcaaatcttttgcctaacttattttaaatggtttatgcttgtattctcaggatctctttagtttcgtgctttttttaatagcattattattattttttttcaagaaaataaatttttagtaataaactaccaataaaataattatattgttatggacaaataaaataatgcctttgaagtggaataaaaacagtaataaaaatttatgataatatttagttattgttagaatgaatattgaaatgaaataagtgataaattaataaaattatcttcattttatttttatagtttatattttttaaaaaataatattcaagttattttcattttattttatttaatcattataatgcaatcttcattacacattttttttaactctaatgagattatatctattacaaaactcattcgaatagggaaatttaaaattatatgcatattagggactaaaattggtatcataatctaaaactatacataatttgtaaaatgggataacttttacttaaactcaattttaccccctcatttctaaactcacacactctctctctctctctnnnnnnnnnnnnnnnnntctctctctctctctctcaagctttcatctttattttaatcccaaacggcaagatcgaaggctttcatctcccacattcgtcccttctcctttgtccctctcatctccattttgatatatgcttagttataatcatcgcttgtctcgagatcaaaggctcctccgttctttccaaccggctcatgagccacctcaaaaggtccaatcttcgcccgcgtcgagatcaaaagctccccctcctctgttcgtcccagccgtgcaagccacctcaaagcttcgacagtgatagtaagttattttcttctctcactctttcgatctctc

SEQ ID NO: 162186 - DNA, 1055 bp, Cannabis sativa
attaaaattgaatggacaaaattaccttatatataatatataagaaggaagttataattattatataccttgattgagggaaaatttttggagagtgctcgaggtaaaatggtacaatttctttagcagaatacaaagggcgtttttgggaattgggggctgataacattgctgtaataagaccccctgtgctagtacctgatattacatcaaagtaatctgcaagacgtgcctctggaccatccagtgcctaaattaattacaattatattaatattacgtctttgtgcacatgatattaataatttaattaattatttaaacaaaaggtgcaagtatttatatatatattacttgaagttgagattcaaggtattcgagaagaacagcaggaatgattcctctaattcctcctccatcaagacttaggattgtgatgagtcttccatactttggtgcttcaatgcttgagtctgtggccatttttcagtaattaattttgtatatatatatatatagagagagggatttaacgttgcaaggagagaaactagcttttgagttgtgagatataccatatcaaatgttactcatatttataggtgcaagaagtactgtatatcttttattttctattgtattagtattaaaaaaatagaaaatatataggtcttcaaggtaattatgggagtgggttcagttttaaattttaattaagtcatttcggtgttattaatttctttctcttgtcaaatgtacacgtttggttgaattatatatttttatattctaggctgatcttatcccttacctccctccatatgttggtattatattttgtttttgttgtaattattaataactaattaaaaagacactaaaaaaatcattcaataaatttttattatcttatagttcccttcgtttcatttggcatgtaaacagctctagattatttttcgttattccttttaaatacttaatattgtaaatatgactttgtttcctaataataataaatttcacacatatctttatatattaaaagtgcatat

SEQ ID NO: 162187 - DNA, 3902 bp, Cannabis sativa
atagaagaaagaaggaaagaaattaaagagggaaagggatggtgagttttggttttctggtttggcgttaaaggacgtgttttgggtttagatgggttgggaagatggatctgagagagaggactgtgttaccaaaactggcgggttttaggggtgaaactgggaagttgggttttgattgttcgaaggaaaattacgtgggttttcttagattttcgccaaggaacactcttaacactcgttattcgactttcgagttcgacggccaaactatgagaaagccaaaaccaaggtcttttttttttttttttttaattatttccttgtgcgtcgaagcccgaaactccccactttgagttcgacaaattaaggatttttttttttaaaaaaaaaaaagaaaaattgaatttgacgattgacaaacatggatatagtgtgctccgttaaattactgttacgcacttacgcacacctgaaactctattttatttttctataataataaatgcaaaatctaatttcctttttcttttttagtatcttttaaattgtgactaggtgactaggtcagtttttttattttgctgaattgtgaataggtgagttgtatcccaattttatttccttctattttcaaaaaacattgtatcaaaattggaagaatttgtacgtatcaatagtatacgataaggattttattttagggaatttgatatggtggaaagaaatttgcctcgtaaacctatacaatcatcatcattatcaaaatgaaagctattttagtaacaatttcatatggtaaattttcaccacctcactattatagtattattgcaagctttttctttgaaaaaagaaaaaacaatcctggctgtttacatgtctatgatgaatataaagaaataaaattggtcatatatgagtcattggatgaacctattcattattgtgtaacaacataaccatatatgtaaaaggaatatgctttagtcatgtttagaaagtaagaataaacttcttcaaagaaaaaaaaaagtaagagtaaacttcataagagtagtaaaaaggtttatctaccggcataactaatcccatttagtaagaaataatttaatcttattacaaaatttagaataaattttcttatttttaattatcggttgatactattaaaaaaaacggatccaaatatttattcatagtaagtttaaaagattgtaacttcaaatttctcaatttaatttattcgtttaaattttgatttctaaacatgatgtttaagtatagattaataaatacttgttgttgacgataattaagaattattttattcttaatattagtatctttcttacgagtttcaattataaaattactaatttcagtacagttaaattaaaaattttactatatttttttattgacaaatggttaactgatttattatatataatttcttaagtaatttaatccaaataatttataaatagtataatatgtaaatataaattaataaattatgttgacgatgaatatttaattgagaaattattttactattaattattttgttacataaaatgtttattcatagtaaatataaaaaggtgttgttgagaaatgagatgcaatgcgaaggtgcactgagtcttagcagcagtgtgttgcaccagattgctctcttctcagattgtgccaggtgtaaaggggtccgcgtttatgggaatcaatgattagaaattttgttagaatattctctctatgtaatctttattgggatctgtattttaccacctgtaaaatgaatcgttgctcaccaaccttatattggccctaatactcttctatataaacaatactctggctcaatgattaaatgggcttagaaattattcatcaacatatttcgcttaattttacttggtatcagagctagcctctgccgtcttcaatggctgcgcctcaagaacaaaccaaaggtggtttagtaaccagcaccaacaaagatggtgcatccccatctcagctcctaaacacatatccacaacagctaacaactctcaatcaacctttctccctaaaacttgacaaaaacaattttaccctgtggaagacaatggtctccaccatagttcgtgatcatagactacacggctatcttaatggcattaaaatgtgtccacctgagttcataccagttactggtgaagccaaatatgaaggggaacttgaaaccaaccctaagtatgagcagtggatcattaatgatcaactcctcatgggatggttacacagctccatgacagaatgaatcaccactgaagttatgggatccacaacagctgctggactttggcgtgctttagaaagtctatatggagcatactctaagtcaaacatggatgaaaccagaaccctcattcaaatagtttaaaagggtaccacatccatggcagagtatcttcgacaaaagaaaaattggtcagatgttcttgctattgctggagatccatatccagaagcatacctggtggccaatgtgctgtctggattggatcctgaatatttatttattgtggttcagattgaggccaggccagccacaacttggcaagagctccaagacattttattgaatcttgacagtaaaatagagaggctgcaaactctcaacatcagcagcaaaccaacaaatcctacttctccttaagctaactttattgccaaaaataactcaagaggtaactcgactggtcgcggtcgtggctctcacaactcgaatcagtacactggcaatggtggacgtttctcaggaaacaaaggaagctcaggacgcttcagaggaaggggacgcactaacacattgagaccaacttgccaagtttgtggcaagtatggtcactctactacagtatgttataacagatttgatgagagctatatgggggcagatccaaacaatactaatgggggaaacaagactcctcaaaccaaccacaatgccttcatagccaatcctgaagtgcttgagagtgatgcttggtttgctgacagtggagccagcaaccacatcacttctgatgttgctgcattaagccagaaacaaccctacggtggtaaggaaaaagtcattgttggtgatggatctaaacttagtatttctcatgttggtagtggtaatttggatacaaatgatggtaaacaattgcttttgaaagatatgttacatgttcctcaaattgcaaaaaatttgattagtgtatccaaccttatgaatgataacaacatattgattgaatttcatcatgatgtgtgtttgattaaggacaagggaactcggaaggtggtgcttcatacttaaggatgggttgtacagactggaagtttccccacaacatacatcctctacctgtcatgatcagccacaatctacaaataaacaccagtccaatcttgcttgtgtgcctgcttgtttttctgttaagtctagtattaactagcctcgtgttgataagtgtcatgtatctagaattgatgtatggtataggcgtctaggccatccatcacctagaattttaaatcttgtgttagagtctgccaatgtgaggaaatctaagaatgaaatacaaaaagttttgtgatgcctgtcaatatggcaaatcacacgctcttccctatcaattgtcatcaagtcatgccaagttccttctcgaattaatgcacactgacctatggggagctgctcccattgcatctaatgcaaattttagatattatatacatttcttagatgattatagcagattcacatggctatatgtaggggtgttcatcaaactgcccaaaccgctcaaactgcccgcaccgcaccacaccgcaaaaaaaatgcagtttgaaattct

SEQ ID NO: 162188 - DNA, 2623 bp, Cannabis sativa
tacagtattacttttgctctagttaataattattagctttattaagaggtagcatcatatagataatttcgcaggtttatggtgcaagggacataactactacgactgcgacaacaagcgaaaacaacttcactattgtttcttacaatctggacatgaatggagagcagtcaaataatatcccagtccaccttcaattaagccagcccagtcaacatacttaatattaagtcatttcaaaactcaaacttaaaaggtatatatatagagagagacataatttactattattattatgctaatgatcacttacttacccctttgctgaaaataaatgttcttcaaatacactactacacctacctgtgttgttatgtgttatatatttgttatcccaattttatgttactctaataatttcttatttaatctcgtaattatgcaggtatatatataccatcttataatcaattttttcctgaaaagatcgaaatattaccaaagatatatatagttgatcttgatcaaattaacgcgcttgccgcttgctacactctctgtctccgtacgttatttcacaaatgaagaatcgaaaatgtataactttgtccaccacataaagattaactatatattagtgaattattaatggatgaagctacctatatatttgtaaagatctaatatatttgaagtaagaaaaataagagaatatataatgtactcaataattttagatatctcgaccatgtacttttatgttttatggattatctagctagctagctagctataccaacgatccgagttgtaattggtagcaataatattgtttaacactttctttttattattattattattatttatttaaggataaataagttttttttccttggaactttgttttgcacccttgattattattccctccaactttaaaaatactttgttaagattattgttaaagcagtttcccttatataccctaagcattaatagagtactattcattgggttcaaaataacaattttacccactacttacaactatagcttaaaacagaaacacaagatcaagatcaaagaataaataagtacaacaaattcagttacagtataagtcactagagttctgccctaaatcagtattttttcacagaacttagtctatttaaaggatacttttttttcctttcattaatttggtaacacatagagccattttgagagagtgcttcagttgagagagttcctcctagagagttttgcatagcttatttgtgtgttcatgtaaagaaaaacaaaagagaaatagttagtttcacaagaaagaaaaataagagagaaatcaaaagttgtaaatcaaaaaggttttaacatgttgttgatgaatggatccaagatctgaggtagcttgatggagaagtagccgataacattgggtgaactctgagatcaaattggtgtctccatctttatcatttctgtttgtatttctcatcttaatctttgtaatttttgatatttgtgtgtgtttgtgttcttgatttttttcgggtgagttgggttttggccgagagttaaagagagagactttctgggtttttcatgtttgattatcaggcagaaaaatttgtttttgggttattcttgtttctggtagaacaagagagaagaagcagcaaaagaaaataagaacacctttagaaccctagaactcatattcagcagaagaagagaagaagcattagtaaaaactaaactccatatagaaccttagtgtttcggctgtagcaagaagagaaaaagattagaagaaaccctacttgtgattgtaaagaaaagaggaagaagagaaaggaaaattttaggaaaccttagattttaggtgcgactattctgcgagagaaagaaaatttgaaaagttttgaatttgggataagtggttgtcgtaggtattgacttattaggtttagaagagataccttttatattttagggtttggtgatactagggtttgtattgttgagctttggattgttttttctttgggtcgaaccacttgagtgagtgaagagagtgttgactctcttgttaggcttggtcttgttggatttgtcattgttgttggacctgaaagaaaagattgcaaattgtgaggtttttaataataccaattttattgtggatgcacaataaaagtaaaatttgaaaaatatcacttttgcactattgtattaattttgtgtctttgaagttgtgttgggataaaagctgtagattttgttaaaattccaacagtggtatcagagaaaattaatttctgcaaataatgattcaaattaatacattcaagaagcaagtctggaagatatcaaaaatcaagaataggaggaattcgatcttcaagaacatgaagatggcaatcaagaggaggaattagatattggatatttagaggaccttccgttaaatgatccaatcgaaattttttaacctttaactaatttaattttttgcaaatacaatatgagtagtcttaaaactgatattgataagtttgatggattaggtgactacagaatatagaggaggaagataagatctctactggcacaa

SEQ ID NO: 162189 - DNA, 2925 bp, Cannabis sativa
tatgacttgctttcttatgtggttcatcttcagaatctgagtatttatcgtaatttgaactcttcctatgactattctttgtcttttcctcttcagacttggaggaggatgaatgccgatgctttgagctactatgtcgctgcttctttctatcttccttttcttcatgagactttttcttgtgctttccttcaacctaaagaaaaatgataagcaggagaaacagttacaaacttataatacagacaatttagtgaatacatcaaacaaatagtgacaatgtcaagtaaaaaatagtaacaactacttgcagcttctccattgtgttttcacattagaaatgttctaacaatttcaattgattattcatcaaggatgaagcatgcaaataaataaataagtataaagtagagttcattagagacagatgtttacttccagtcacactttcagtttctaaattatctagatgaagaggcacagacgaagccaacccaataagataaaagtagctcaaataatcaggcatgtagtttgctcctacaaagatttaaggtttgaaatgagacttttaaaatatggaaaagaaattaaaacaaataaatatagttttatgtagaactttgtttgacctaaagcattatgctcaatccacttactacaagctcaagaacagtaaaaattggaaacagtactcgttgtttgccatatactctaaacatggcgtatacaatttaaaaaatctaaataactcatttcaagactcagaatggtaaagaagaggaatcagtttctgccataaattctgctttcaaatattgaacttgatttaaagtcaccacaaatactacaaatactgggggggagaaaaaagagaacacacacacatacgtctcgttcctaagatctctctgaggctgtgaataaccaaaacatgacacatgttcaaattctgatacttaaggactcaattgcaaccaaaaactgttacgattcattcatttagtttcgtttgtgccacacgaaccaactccaaatcaacaaacaaaattttgaaccaccatttattagcacattacagttaacgcttctttagaatgatgaaaatcatatactgtagaaactcagttgccctcactgcctctttggaatgatgatcctcataaactaagaaaaactcaattgcccttaaacaactaaacactcatatttgataaaacttaattactcccaagctttcaactttcgtttatgtagcaaaactcttcaatacttatatgagtaggcttatgttttttcttttagtcggcggaaggaaatttcagataattatatgctaaagatgcagaaaattcctcctccaacaaaagaagaactatatgccaactccatggctacctaacgctaccagccgcacgcaactttcttcactactctcctatgcccaaattacaaggcctattccattcagtatgaactaacacatttacaggctacaaacaagtacaaattggcatcacaaaaataataataaaaaaaactgctgaaattttcatataaggcaagaaaagaaaaagcttactgatttgcgaatcatggccatctgaacagggttgttcttaattcgagccaaggcctcttgctcacgctgtcgaatcataagtaaaggatcggagtgtagctttctccaagcatcattagcagactgaggcttgtcttcgaacaaagctcccggcacagctgaagaagaatccgcttgctagttccatacccaaaaacatcaatctcagactcataaacttgaaactacagaagaattaaaaacataaaaatagaaaaagaaataccttagaggctgcagcagtagaagaagaaggtccatcgtcgggcttagggaaggcttcaagggctttaaaaccatcagaggcgctagctttccctacggctaaacccgaatcgtaaagaaactccaatctctcctgcttactgaaataaaattcatgaatgaagatgaacaagtcaaataaaacaaaattgagaaataaccctaataaattgtaatggagagaaagatgaaaacatacggaacgaggccggcctgttcctgaagttgtcgaaactcggatctctctctctcctcgtgaatctgtttgcgaagctcctccaacttcttctgctcggcgtcgtgcttctgctcagccttccagacgttctcaatgttcctgagactccccgtgtgccatcctttcttgttcaagaacttcaacgccattgtttttctggttagtcttcgtcttcgcccttaatttcactattaatctcttttgcaaaagaaacaattgaattcacttcctccacccccaatttcacaaataataaccccaaattggaattaatttacttttcttatattttaaacctttttttttttttttaacaatcctttcttctctttttcttccgtataaagtgcacttaaacgacaagccgttttgaaaatttacagtttatattgtcgtttcatattgagatactagggtaaacgacaaaataattaatctaatatttcactgattattttgttttaagttttaaatttaatcctctcaacatcatctaatattcccctttcaaaaaacaaataaaaaaatgaaataaaagtgtctacattatatttgcaccttaaaaaaaacagtaaataccattttagatctagtattttgcaaaagttactaatttagactctctattttcttaaatgacaaaataaatcatgtattttctaaaatggtaaaaaaaaaaaaaacttaatttttgacagattttttttaatataaccaacctcaagataaaacctaatacgaaaagatacaaaaaatagaagcaattttgtcataacatctttagatcgaattattattaaat

SEQ ID NO: 162190 - DNA, 3543 bp, Cannabis sativa
  modified_base (3505)..(3508): a, c, t, g, unknown or other
ctctctctctctctcctctctctgaatcctctttgagaaaaaggaaaaagaagctcttcacttcctcttgcatcccgacgccccaaggtcttcgtttctcgagatttttgctttgttttgacgatccaacattcccacaagcatcctcaatggacttcattagtgggtaagtctttaaatcttattttcttattattttcttgaatcttgcattgatgacctcaagctttttacattcttgattctcacgttagaacgtaatctttttacattgtagcttcagttctatgggaaacattgtatcatagcaataggctaatgcaaatggcctatgccctgtggtcgtcttcttggttgtatagtgtgaccagagtacttctaagagtaataaaggccaattatcttttgcctcttctagatgctttttcaaagtttccatcaaggtcttatttatagcttccatctgcccatttgttttaggatgagcaacatttgagaagctcttaatgatgttgtatctgttgtagaagtcaatgagcatgtcactatcaaattgtttcccattatttaacacaatcttctatggcagtccaaaccgacatatgatgttcttgacaacaaagttgaggagtttcttggaaattattgtcactagtagttcagcttctgtccacttggtgaagtagtcgactataactacgacatattatacacctcattttccattagggatttgaccgatgaggtctattccccatgcaacaaaggtccaaggagactgaatcagtgtgagctcaattggtggagctctcggcatcttttagaatctttagcacttgtcacatttttttacatagtccactgactcctcaatcatattaagaaaaatatacccttgtctgagtatttatttggataggctttgcccctaggcataattgttgcagaagccttcgtgcacttctatcaataactgctcggcttctctcttagtgacacaccttagaagcagcattgagaaacctcatctgtacattactctatctagtattaagaactaagcagctttcctcctcatacttttgccttttcttcggggaagactccattcttgaggtatgctgctatgggtgtcatccaggttggactgtcatccaagatgtcaacctcttctagaatagtaatgtttggttcttttaagaactatatcggcaccgaatttgccttgtcgtctgtgatgctgcattttagacaggcgagtgcatcatctattgcattccttctttagggacttgccttactgtataacctttgagctgacttttataagtcttgctttttgctcaaataggctatcattctttcacctcaagttgtatactcgcctaggacttgatttactattagttgagagtcattatatatatctatgtgatcatcccgtactttgtctgctagcttgagagctcatattcagcattattattggaaaccttaaaattgaacttgatttccccacacagttgttgcccccaggtgtaataagggtaatgccttcagcggataagtggtacgtgtagcttccattaacatgtaacttccaagctgaatctttgtgctcttccttcttttcttacttttgcttcttctctggcttttgcttttctcctgaatcttgagagattttaggaggtatgccagtacattcagccataaagttaattggcaagatcttggcctcttatggccattattttatagtatgcagtcttaaattggccgaggtcgatggcccacttgagtaattgacctaatgctctaggtttctataacacttgtcgcaatggctaattagtgtacactcttattgggtgatcttggaagtacgaacatagctttcttggttctaaaagcaagcagtatgtcaccttctccatgagtgagtatcgacttttagcattaataagcctttttctgatgtaatacactggatgctagataccatcttcttctctaatcaggattgcacgggtagcatattctgtgacgaccaagtatatgcctcgttcatcattgtttaaaggttttgagctaattgaatctttagctcttggaatgctctttcacactcttctatccattcaaattttttgtttcctctgagtatgttgatgaaagggacacacttttctagggagtttgatacgaattttcttgagcctactccgaacgagcacttaaggggattgagcttcatgttgtactctcaaaggatctcaaagcattcatttagattccccagcctttttggatatgaccaatatgtcatccacatacacctcattgttacggccaatgagatctttgaacattttattcaccagtatttgataggtgacccctgtatttttcagtcagaagggcatgactttatagtagtacaggactaggtctatcatgagacttgtatgttcttggtctgcgggtgcattttgattttgttgtaagctaaataggcatccatgaagctcaggatctcatgaccagctgtagcatctactagctgatcgaaccttagaagcaggaagcaatcctttggtcatgccttattcaagttagtgaaatctatgcacactcccatttaatgtttggtttgggtaccaacccgaggttagatacccaaagtgggtagaatgcttcactgatgaagtcattggcgcttagcctttcaacttcatccttcagagcttgtgagtgctccttatctagtaacctccttttttattgtattggtcagaaatttggatcgatgttcagtgcatgggtaattatagatgggtctattcctaccatgtcttcatgtgaccatgcaaaaaggtcaatgttttcccttagaaatgttaccaaagtttatcttatttctagtattaaaacatttcctaatctttagtttgctagttggaagagtggggtcaatctccacctcttccaattcttccataggtccaagcttcctgtaggatccccaaagcaaggatctatgtcttcctccccgctttgggcttgacttcattgccctttgccatgctcttggtcaaagctcttggcaggaatcttctctttcttaggtttagacaaagccatgttgtagcagtgtcgggcagactgttggtctccccttaaacatcccactccatgccttttaagaattttagccacatgtgatagattgatgttactgcctttcggtcgtacagggcaggtcgtcctatcattgcattgaacgctagtggaatgtcgattactaccaatagtgccattagtgttcttgttgtgggatattctccaactattagaggcattcgaatgtatcccagtggtgcaagaccttggccgaagaagtcatacattagttgagtgcagggttctaggtctattagttggagctccatctgtaacaccctaactaacataggcgtgttacgtgatttttaaacatgttgtnnnnctcgttgctaatcaacgagatttatggaaaaacgt

SEQ ID NO: 162191 - DNA, 1687 bp, Cannabis sativa
gttcttctaattatttgtggttatggatctgacccattccttaatgctttattaatatcttaggtatatatttgtatctttgttttgtttccttgtaacattttatttgtgcagaacttgacaacctaggttcgttaacaaagtttggttggaccgtaggttgattgttctcagtaacaagttagatttttttttcctttttaacaatatcttaggtttatttcctggtagcttttgatgtgttgagcattagaacacctagttgtgacttggtttggtctctctatatttttcttgtcttggtgattttgggtgatttagaatacattttaaaggtgaataggttggagtcatctaatatggtttacacaaatttttttattgccattgaatttcagcatgtggccttgggtatttattccaactttcgtgtttgtttaattttcttctgaataaactgcagagttgggcttggaacaacattgtaaatttgtgagcaaagtttggttggatcgatggttggttattctcagtttgaggttagaaatttgattttgatcaacatctttggtttatttcctgtaacttttgatgtgtgcagagcattacaactgctgattgtgtactactatttctcgatataaggtccgatattacaatatcttcaattattgatttacacttggaaagtttcatgtttctttgtatgcatttagtatattcgatttttatctgaataagtttttgttcatgtttttgatggtatcgtagctttggctcgaacggactggtttttaaggctgcaattgtcttagcttgggttattgttgacataagtaatttttgcttcccccgtttttagttgtttaaaagtattaatgttaataatggtattactgtaactttgttaaattagattgatatttatttatttaacgatagtaaacttaaaaagataaaatgaactaatttaaaaagaatgatgcaatgataaaatgttataaattgaagtgactttcatataattgtttatatgatagaatgtaagaacaatgttgcataatgctagccttcttatcatgtatgaaattgggtaattatttcagttatatatgcttaatgatacaacatacataaatcttatcatattctttatacacaagaaaagagttttattgggaaaaatttgagttggtcacaattgttttaaattttagaatggatcaatttttgtctgattgaaaaaaatatatgttgtttaaactaaaaatgaacctatgtaaattaatgcattatttcatgagatatatattcacatacatgtattggaaattattactaatattaattataacaaacattcaaaatttacttgtcattttttatactttttttttaattcaataatttgtatatatgtaaaacttatcaatttattttcataagtatttctcccataaaaacaaaaatcaatacaatttgtattgattgtcacataagtatagctatattcaaaggaaaatgctaaaaatataccatgataaatttgatacaagttattattgtttataccgaaattattttatattattatgaaatttcaatataattagttactaagtagtaatatcttttacagggagaaaccaaaagtatctataatattttattgttggaaattatttta

SEQ ID NO: 162192 - DNA, 1809 bp, Cannabis sativa
aatttaaaccacattatatactaccattgtttaacttttatgaatataagtattttctgcaatttttacaagagttctctgtaaatgtaatgtattaaatgaaatagtaggaaaaaaaatatataaatatatatttatatataatttttatatataattatacctggataagaaggggcatctttgatgacataaggcaagtcaaaattaatagccttaatttgagggtatgctgaagcaatcaagctaattgtgattccaagaccaccaccaacatctaccaatgtcccaacattctcaaaccctttgtaacactcaatgatcttcttggtaataatggttgtttcattgtacattgctgagttaaaaaccttaccaaatcttgggtctgaacttgcatactcaaacacattcattccatgatgagccctattgaatgcactactccctccttgatcaagaactgcatcttttagctcaagcctacaagtaataataaatacataaacattaatcctatatcaatataatcaagtactatatagaaattaataaacctaattagctatagctttgtcttataccaactttccaaggaaaccttgtcaagtgccaatttcatcaaggcatgagatgaagcaccatcttctttagccaaaaaatgctttgacactcgagataggctgtagagtttttgggtacaagggttttgaccagccatcaccgcgatgcagttgagcacagagtggctggccaagtgtgtaaggatgcggtccagcattactggcgcattagcattttttgttggcatgtggcttgcgatctccaatgctgagagcttagctccatcgccggcttttgctagtatttcaaaaacgccaagctcaattgcggcatgcaaggacatgggcagcgcaatagaagttcttagttgctctgcatagaatagactttcatcttcttgtacattatttctttggagtgaccccattggaattggattaaaattataatggaaacccttttggcttcttttgactgtagatagtgactaaatttaattgaagagtctcttatatttgagttgcacattaatgatgaatacaagtatataacatattctattttatagaggattttgagactttgatttttttttttttttattattattattatatgtaccacattttgtcaaataaaaaatataaaaagaatatatgcctgcagtgatattcctaatttttctattatttatatataatatgtgaacaaaaccaaaaaaaaaaaaaaaacgcacgccattattgactatactatacagagaaaatgttaatttaaaaatatattgaaattacatgaaaatatattgttcaataattatatcattactctatattaatgtacagagtggaacaatctatattgagaacattgcatatgtacagtacagtaatgatgtgaggtacgtatacacttatatatgtagttgggattaaactcgatcacttaatatctgtccaagtcagcagttctaactcatagttaattagaataatattggactctttttattttatttaagcgttttatatattacattgtataacttaggactcgaaccaagaacctccaacacacacacaccctcctatggccatttgagctagcctcaagtggtttttatacaactagacattactatcccttgtataatactcttagactacaccaaatcagatttctagacttgccttagtgcttgaaggtctgctgatgagatggtgattactcttggggtggactagt

SEQ ID NO: 162193 - DNA, 3751 bp, Cannabis sativa
  modified_base (3691)..(3707): a, c, t, g, unknown or other
agtcctagaagtcctaaccaagcataattaatttgtaattaggctaaagctcgaagcttttaaatacaaatcaaactaagtagattagcatctgaattataatcaaaacacccatttccgaatctcacgttcacttacaacagctattaataacacgaccatttgcacaacattacaaatcgacaattccaactgtgacttgtttataatataaactcaagaactgatgcaaatctctccgatgaatttgaacaataaattgatgaattaatcccatagacttaagtaatactgggtaatactctttaggtttattttctaaaaagcatgcaaaattagcttcagtttttttgagaaaatacatattttgatattcatgagaaaaaaaacaaggcacggaatgaagtcagatgatttcttctatctaatctaattagacactctccgtccaaattcataaatggaaaaaataactaaatcactcaaaccatattcaacacttgtacacagaagcctaacctaactaatctcatggggagattcattgacaagctgcctgctgaaaacttgatttaaagtgccaagaggggtcgtacacaagttgacaaaaaactcaaataagcttcaaagccagacaatacgataaacttcatattaatagaaggcggctgcatctcctatgttacttggataccttcaaaaaaaaaatctcaccattagccctctgcttctagctaatttccctgaatctctctctctctcactctaacacaaacagttaattgacaaacaaaagctacataacctaacactagaatacataaggggtaagagaggacaaagtaacattgatgtgtactattgagaaagtaatatcctaccccaattgaagttaacacagaccaatagtcagaacctggaagaaaatacaaagaagaaatgacaaagcaacatgaatggaatagaaacaccactgacattcaagccaactggtgatgtacaaggcccaagttgttgtcaccgaggaactgcaaagtctatcgaggccaataaagaatataagaagataatcagtagatgaagaaataaattctactgaaatgagtaaaattcgtgtgaagtagtcattcaaatgcagaagaaattctactgaaaattagagaaagtggtatgagtagtaattagcacaaaagcaattgagaaagaacatgcaatgtcgcaaagattaacatagcaagtgcaaagaggaaatgtaaaaatagtaaataaataaataacacagctaaacaaaacaaactccaacttattgcaggtcagggcctaaatataaacactcatatttatttattttacttattaggaatgaaaaaggaaacctcctatcattataattctcttgttttccacattttttcaagataagcttagtattaatgaaagtaactcttttctcaatcataaccgatttcagtaacctgtaaccgacgaaaaacctttttctcaatacaatcaattccagttctgtatctgctaacaggtactaaaatacagatatgaaaggacataaaaccttgtttcaggaagaaaaaaaaaacagggcataacacctactctaactgtaactgacagaggtaagtgtaattagtcctgagcgacaacagactcctctattattatcttaaagtttctgcaccaggaacctgtataaggatccatcaagtgacaaagtcctaactacggtgttttttctgtccttaccacatcaaaatatacattatttcttgaatgacttgtaattaagttattatatgataattacaatctttcttccttcaactccacacattgatacattttaagatgtcaccttcttctttcccttttctaaaatcatttctgccaagtgccaacttataaataaaaaccagttgtaaccatgatttagtcaactttataaatcccttgcatttaatgaaatgtgaaggaaaaataatactgatactaatttactaaacacagtagtcggtagcataaagaaagaatggcatatatcagcattagaatgctaaggctcatctttaaaaattacatccaccataaccatacactaagcacaaattagtatggaattcaaagcaaacgtacagaagaaaacaaaaataccaaagttcaatttagaatgtaattccttaaatagttcaaataaaatgtacgatacatagccccaaatttcagtaattgaagattcttttgcctttcacatagtgacatagaaggaaaaccctattcacttattgtctcatatagtcttcgggccttgtcacaagggtgatgcaagtcctataccatgaggtagaaaaacaagtcagaaatacacttacaattggtaaagcaaaagttagctgttcctatcttcaatattaatggggggcaaagggcctttcaaagaatatttatggctctatttggctaagattctacttagaagaagtataagataagtataaggtttgacttatttttaccgtttggataactattatataaagatctttctttaatgaaaaatacttttcaaagtgtttagacatcattagaaaaagatcttctgtgagtaaattaagaatcatgtaaattattttaattttaaaatatcttcttaaaagtccttttgaaagaagctacaaatctcagcttcttccaaaagaactttaaaattaataaaagatttatagaagctaagccaaacgggatgtactttaggttttctgtctctctctgcatattatcatatctgttaatagttatatatggcaggccctgagaagcacaaaatactcaagaggcacataataaatcaaacacagctctcacaaatcatctctaataggttcactacccatcaaaacataaaattgatcaaataaataaaagggctttgctgacaccaagaaacaattcaacccaaaacaaaaaaaagagggttgatagtcctaatagttgaaaaatataaatagttagtaacacatatattatgtctatatagacatagtaccttgagaaaggcagctccagaaggtggaatcaacagcgatgttagacttgagacgagcagaagcaatggcactatgaagtggcatcaatgaatcaacgcttcccaaagcagcaacaacccttaatattacagcacaaatcagaatcaatatacattatgtgtttggataaataagcaggtgaattgtacagagaggacagtgtaaaatatgtatatatataatgtataaaaatagaatcttgatatcattggtgagctggtaggaacggaaacaattatacctggaggctctgggaatggaaccggaggttgaagaaaatggagaggcaaagggggatgagtttagcgatttcggagtgacgactttagagcgagcaacgagggacctggaacccgccattagagcggatctgcagaaggaagccatttgaggttgaaagattggcgattgaaagaaacaggagaaggccaggagtgggtcgcttaaacccttagcggagtagcaaggctgttagggttcaaggaatctttgaaaacgttgtcgttttggaagtcacatccctaatttttttcgcccaactttaatatgcttaaattttttttttcgaattaaaataagtgcatgtttggcatcannnnnnnnnnnnnnnnntttgtttttaaaaacaaaaaattgttttttgaaaacaatttggc

SEQ ID NO: 162194 - DNA, 8419 bp, Cannabis sativa
  modified_base (6442)..(6456): a, c, t, g, unknown or other
cttcagtggacaaggtaaagttgtgcaattttattggctgtttcttggaacaccgtaagaaagctatgttttatatcagggaatctgtcgtaactagttttaacattaagattactagctatgattcaaccatggaccaccgcctagataaatggttagcttttgcagctgagaagaaagttaaggaagtaaatctttggttgggaatagagacctcttattacttacctatacgactagtcaacgcaacatatttgactgttttggagttgaagtcactttgtttgcattctcattactcttttagctttccctcattaaaatcattatcattgactaattctgtgtttaaagataaatatgtgctagaacagctcttgttgggttccccttctcttgaaaaattgtgcataaatgattgtggtttttacggccattctcgtccgtatgtggtgcgtagttcaaccctgaagttcttggtgattaagttctatcggacttactcggaggtaatgcaaattgaagccataaaccttgagtcattggaactacatggtgtttcctttgacaaattagatttctctgtatgcaaggcaattacaaatctctcatttacttgtgtttggaatatgaatgagtcttcttccttagaaaatctcattccaaatcttccactccttgagaatttgactttgggaaacatgaaagggggaaatttgaaggacattaaaatcttgagtcagaacatgaaaagtttcaatgtgaataatcgttatgatggcgaaatgactgttgttattgaatgggctccaaaattggcgtcatttagttatacaggtaatatcaacttttgtataacaatggagtcatccaattttttgaatggaacattcgaaattcttaagattgagaacaactttgaggatgattggtttatcagcatgatagagtttcttttgaatctcaattgttcctggaatatggtaacactacatgttgacaaagctgaggtatgttcattacttgtcttatttcattatgtggtgttatttcaatttgatattttattcattttcttaactctttacattcattgaagcctctcatcggtctaataaacttgaagatcatatctcctcttcctttggttaattgggagcatcttagagttcttactaaatgcaaaccagagaagaatcagaatagagatgctttgcggtggatttttccttctttgaagacaatatctatagcgaaaagggctacttaaacaatgattattgggggtagggaatctggatgcctctattctatggctgcttagattactgtacttatttcttttatgcattttattttatctgaacatggatctctcatcatgcctaaaaacttcagatggatatttcgttccttcactgcgtaggttgaagcttttcaaatctcatggttttgacaacttgagacatacattgttttggatctcccaatctctctattattaatatttactttttgtgcttttgcaatgttttggatgcttgctaagtttgcaaaaactaatgatcacacaaaactcattaaaacaattaggataaatttatgttctgattattatggggattagagaatatcttaactttttcctcctagatttcagttctgaaatgtaattaaatgatctggtttgttaatttgttggtaaaatttgtgctttgtgatttgagtggttcagctcaatgaattggaaatatggtgagaactgaggcatataccatacaagattgattagtatatcccattgtaacaagtcactgctggtttcaaggtgtgctgttgtgtactctttcttgttctagaaattcaggtgggtaaggttaaatatctcaaatctttcttatcgatctagtttgtacattgatagcactgtagtacattctataaactaatagagatgcagaatctaactatcaattacatcttatttcaaatatcaattttgcacattctttttattatgcattattgatttttctggagtagagattagagagagccaaggaatttgagcttgcattaaaagtggctaaacttggcaaaaaaaaaaaaaaaggctaaccagccatgagaacaatacactaaaaacactttttatttgatgatatagctttcaaaacaattgcaagaaaattccactgctaatgaaaatgaaaatgctaatgttattacattaacttcacaattgtgagttgtttataaaatagataatatgtaacatattctcttctatagttatgatagtttgatggaaatttttgcaaggagtaaaattattttttttttaaaaaagtcaattatattttattatttttaattttcttttacagcattgccatattaaatgattaaaccttttgtcataaaataataaaggtatttcaataataacacctcactaaaatcattgttctaataatataacacctaattgtttcggtatttataaaaaaaattagtttaaattagtatggtcagcctacacgttgacacagctgaggtatgcttatcacttgtcttatttcattatgtggtgtttttattttcaattttatattactagtctaattactgtgtattgtatttgatattttattcatttacttaacgctttacatgaaggctctcatctttccgaaaaacttgaagaggatgttcgaaaacttgaacagtgcatctcgttttccattggttaactgggagcatcttagagttgttactgaatgtaatttagagaaagaatcagaattgagagttgctttgttgtggatttttcattctttgaagacattatctatagcgaaaaggacttcttaaattatggctgcttagattactgtactgatctctcattatctatatttaatatttatcattacaatgaccactgtttgttcaactttaacaacttataattgtttgccccctatatttccagttctgtattgtaattaaatgagctggtttcttaatatgtttgtgaaatttgtgttgtgtgatttgagtggttcagcttaatcaattggaaatgtggtaagaactaaggcatatacaataataatgcactgctggtttcaagctgtgttgttctgtaatgtgtactctttcttgttatagcaatgtataactgaactgtatattatggttttaaagtaaaaaaaaaaacaactaccagttcaggtgagatttattgcctgagaaattcagctcctggtggagagtcagagacccttttagagtgaaagacttgatcggagcctttttcttcttggctgccttgttgagactcataaatttgactcaaataacaatcttataactctactgcatatatggtaaggaccccattggattttgctatgcttaatatttaattatagttttcagaaagtaaacaagtaagaattagaattaaaaggagaacaaactaatcaacaagtggctgctctgtacaaagttgcagtctttttctctcttcacacatgctagatttagattattattgacatgaaaattggtaaagaacaatcagttaggtttttattgacaggcaaaatatgttggtgaggtgtaatggattatgtagaatgtgatttctctttctcatgtatttgaggtaatggtttccatgaaatactccttggagtgtccccatttgccccccttcaggttgacagagatgaattgatgagctttgcagctagctggcctgtgtgagaccatctggttttccaggaataaatgcatttttgaatcaaaaaaagttgatctgaacgcgatcaccaggcaccaatgccgttgagcttgcaagagaatggtccaatgctgtttgaatgttttctctgactctcttcaggctctcatcaatgccatggaaactgagagcaatggtgatccgaaatgcttgcttttcgcaacaaggaagggtcagaagagagttcttgtgttctctgactgtaaagcgattgtggactatcttcaaggtctcaatcctttacctcattggaacatttcagccatttatattattagtctatttattgtgcatttgatattttattctttttcttaactctatacatgaaaagctctctcatcattccaaaaaacttgaagagggtatttgaaaagttgaagactgtatgccattttccgcattttggagtttttactgaaagtaaattagagcaagaattagacttgagagatgctatgctgttgatttctccttctttgaagacattatctatagcaaaaaggtcatcttttcaaaacttgtcaacaagcgacttataaaaattttcaacttcttaaaaagttattatgggtagggatgactcttttgttgtgttttcttactttgctaatggctacattagttatcttgagattatatttactttatggataggaactgttaaaaaggtttgtagttcacttcagcatgtaatggagtcacttaatttttttgtacgcctaaaatttcagaaaagtatttcattctttactgcttaggttgaagcttctcaaatctaaggttttgaaaacgtgagagatatcttgtgtcggatttccaagtctctctattattaggctatttatttattcgtttttacaatattctgggtgcttgctaagttcgcaaaaactgtcaatcggaacactaaaaagttcaaatataaatgaattaataaatttatggaatcttatgattctcaactgtatcattatccaaaagtagctcctatgcattccattgatgcagcctttcccttggatttgcagcaatactcaaccttaccataatttctaatgggtttgtatcgaaatagaatgccaactcacaaccctttctcattggattaattttagtgagcatggaggacatgacaaaggctataagcaatattgttcttagctgagctaatccaaaatcagatcacaattccactcaaatcctgtacacttagtagctacactaatggtctaaatttatacacaaaagatctgtcattagtaatctcaattaagccaaagcaatttattgttgaatcaaaactaaattactcctccctcactctcctctccataatgaatgaattgcataaatgtcaaaactcttctaaatctatgaatacatatcaagtacatctacacatagcattttcatccatctttattatagcaaaacaacaaggctaagcaaaatttagagaaaaagaaacaagataatgtcactctttaagcaaaaatcacaaaggaaccttagtatcaatatgaaaaacagtgtcctaaggatatttctagatcccctatttctcctcttactttaaacaatttttccatgtgaagaaaatgtaaagaaagaacttaaactacctatacagatcccaaacaaactgacttgacattaaaaccaagattcatagaagaactatttaaaaattcttcaattcattattactaataaatgagtaaacaaccagaccacaagtttatttcatgatctaataaactatcaacttgagaagacccaaatttcactttgcacaattagtttaaaaaaattgagcaaacttgattgatgcacacttagggttcgtaccaatttagacgctgtattagaccgtattatattatattatataaaattgaattatatatcatattttcatataatactatgttaaactttaatttattctaaaatataatatatttatgtgcatacacaagtcaataccatgtatagttttacataaaaatattacataaaatataatttaatataatatgaattctcataagaagttgattggtgaattaagaagaagggcttacggcacaaatcttgactcaaaaaagtccatttatattttattatttttaactttcttttaagacattcttctctccatattaaatgattaaaccttttgtcaaaaattaaaataaataaaactagcacgtgcaaggtgcgacacacgtgcctgccctcccctcctaactgtataactgtaactgtcatcttcttgttcttgttcttgttgagcttcaaactcaaaaccattctctgctctgctctgaatctctgatcataatcgtttctttccaaagaaacaccaacaatccaagtaagcaacgatgaaccaatccattctttcttttcttttatgccttacaaattgttttcttcaatccatttcatttttttttttttccaaattttaacatcattatcatttattacattaatggattattggggtttgtttttctttgctgttacagtcctcattcagaacttccatggctgaaaatgacagcagtctccgtctggcggagaagatacagaaaatgacattatcatcatcatcatcatcannnnnnnnnnnnnnntcatcatcatcatcatcatctgatgaggaggatcatgaggacagaatatctaaattacctgatgatctcattgtacacattctctcgtttcttccaactgtggatgccgtttcaacaagctttctttcacatcgttggatactcatttggtatttagtccccaacctctctttctccattactactgctaattacaaatcttcaaaagaccagcaaaaattctgcaattatatcacccgttgtttggaacaacgcgagagaggtatgttttttatcggcgattcactcgtaaatagtttaaagcttcaaatggattgctatgaaagaagcaaggatggtcacctagatgaatgggtagctttcgcgtttgagaataaagtgaaggaattaaacctttgcttgagcgaagaagaagtgggagatgacatttacctctactgcatacctataatagaggcaacacatttgactattttggagttgagtatggtgttgttggattctggtttttcatatagttttccatcattaaaatccttgtcattgactaatgttgactttatagatacatctgtggtagataagctcttgttgggttcccctttccttgaaaaattgtggttaattgattgtgatatttatattcatggggatcatccatataagcttgacattcgtagttcaagcctaaaattcttggtaataagactcgaaaagtttcatgttttggaggttaagcaaattgaagccataaatcttgagtcattggaactagttggtgttcccattgacaaattaaatctctctggatgcaaggcaattgcaaatctctcaataacttgtgattggaatattgaagagtcttcatccttagaatatctcatttcgagtcttcctctccttgagaattttactttgggcaactgcgaaaagaacaacttgggtcacattaaaatcttgagtcaacacatgaaaagtttcaatgtgaataatcataatgatgtaatgaatgttatgaataagtcgcctccacaattagcattattttcttatacaggtgatctccaatttagtataacaatggagtcatccaattctttgaatggaacattcaaaattgcgacgtgtgaggactacaatggagattggtttatatacatgatgaattttcttacgaatctcaattgttcttggaatatggtaacactacacgttgacaaagccaaggtatgtttattacttgtcttatttcgttatgtggtgttatttcttggaatagaaatatggtttatattttatttcgttatgtctttacatgaaggctctcatctttccaaaacacatgaagggaatattagaagactggaattgtattactatggttaattgggagcatcttagagtaattactgaatgtaatgaagaggaagaatcagaattgagagatactttgatgtggatttttccttgtttgaagaaattatctatagaaaaaaggacatcttattaaaactttgccataagcgacttataagtatgtttcaacttcttaaacagtgattacgggtttgtttactttgttaattgccaccttagttctcttgagattgtatttattttatggttggtttaagaatatgactttgcatgcctactctgcttaagaatggggctttgtttttattatatttgtttgtgaatgagtttatatgataagctttattatagcagatttatttcacaaatcatactgatagaactgttacaaaggtttgtagtttacttcagcatgtaatggagtcacctaatttgttcttaggtttctcttttgattttcctgtaagcctaaaacttttttttttttttttgaaaataaagtgatagattgatcggaaaactagacctcacggtcattacaaatgatagtctttggtatcgttggtatatacattttgtattatgg

SEQ ID NO: 162195 - DNA, 1039 bp, Cannabis sativa
ctttgcttatacatgagcaacagtattcacgaatctatacacatgagatatttacactccaaggaagttggacactaaaagagaaatatttgttaaaaaacaatgaaaatcagaaacatgagcttgagaagactagaatcctttaaccactacgagagaatcagtctcaatatagtgaactgataaataaagatccttaagacattgcagattgtacattaaagctattgcttccattactttcggtcgaaaacaaccactgaaaggcattgacattgctgcgatggtatcacccttgcaattacgtaatatggtgccaaaactagaagtatgtgtgacattgttaactgcagcatctgtattaaatttcagtttacctgaaggtgggttcagccaaggggtatctttagtggcacaatttgaatatgaagaatttgtagcagcagcaggcggtttgacaacttgagcagcatgatattcatcaagataggtgacagtaaaataaagaagaacatcatggggctttgattttgtttcatgcctctctttttatttctctcactccaaatactccataatattgtagcaaattgttccaattacaaattagtccaagtaaaagagacatggagcaacaactctttaaggctcatctgcctatatagaaagcaattcaccaagtgagaaggtggaagattttcaaacacgcttaggatgatggcaatagaacaaagcatgagtgagtatttctttatcacaatgacacaagaaacaaaagggagaatctgtaatatgtcgtgtatggagaatagtagccacaaggagacagtcatgaattgcacgccaacagacttttgacaaaaatgatagcgactaaatttttttccaccattgtagagtacgggttgcactgactgtaggttgttgatcctccaactgagtagccaaaaaataaccagttttgatagagtataatgttgggttctgtgccctaaataaaacccatttcaatataatcatatttacttattaataaaga

SEQ ID NO: 162196 - DNA, 842 bp, Cannabis sativa
aaagtaacaggaaacacgcttgcggggtgcgccagatgtcgctggctattagaaaacagacgtacctgcaaacatgtagaacaaatgataagcatgcaccacttgttttctattccccacaaacctcttgcatgcttgggtcttgatcctaagtacccctcgaagtgggggcgatggaggaatatggctgttcctcacacataggaggttcagcagccctagagcatggcggggtatcaagcgtgggaggaagggtgcccttaaggaaatccaaatgaacttgagattctataagagaaactttaagtcttgaaatgtatacactagggtcaacgaaaaggtcatgtctctctcctttcaaaactaagagattttttgcctgaatcctctcgatgcgctctcgacaggcaatgatgtgttcaaaatggttagccctcccagacattaatctagcatatctagagaacgggctatgtgaagatcttccaaattagtggacgagatgtcaatgattttggctgtaagggacattgctctaagtaactgacattggacgtgacccaagatgaaatggatcaaagaagacgtgctgccttgatagctccacctaagaggtaaaaccaaggtgttaagcttactaggatgcgcataccaaaaggaatgtaaacaatgaaacaagtaccacaagtttaacactcagattacgactactagaagcctaggctcatggaatgaaagtaacaaaattaaaaaaaaacataaggggaggcgatgtacctctatgggcaaggagagctgcggaggagagatgggtcgctgcaagataggaaagacgtctgcca

SEQ ID NO: 162197 - DNA, 3217 bp, Cannabis sativa
cagtatgaaacagatttactggtaacatacctcgatactgaacattgttgataaccattgttggcaagatggtaacatcaccacgagatcctcgcccaacctgaatgtaataagcattacgtaactgagagtgagatgaaaggtacttgatagtttaactcaattgaattacataaccaagggaaatctattggcacatctctacttttaaacatgttcacatttaaaatggtattaggatggcaggctatggttatgagttagaagaggtattgagatatgacctggactgcttgctcaattttaagcacatcattatcaacatcagcttcgggatcacccatacatttcttaatcttctcaataggtaaatctgcattaataagattaaaccaattactagttatatacaattaaaaagaaaagatagacaggaaccttgaaccttagcatttacctagagtttgcattacatcctcagcacattctttactgtatcttttctgtttcatggagcacctgatatgaaagtcagtaacgaaatcccaccaaacccaagaacggctgctttcattggcaactctatgcacacaaagttgccttaagttttcaatcaccacatccttcccttgatatccttcttcaaaatccttttctgggtctggtgcacaatatcttccatggtttatgcactgagacttgcattgactgctaagaatgaaggcctgagggcagaaccaagtaatgtaatgtggagtaaacattgtgtaacctcccctatccagaatttgagcatgacccttaaagttcttaacaaaatccatttgttcatcgcaacgagcaccacactcatcattgctgtttgtccaaaactcatactcaactctctcatcagggtggggcactgactctctccaatccaatttcaccacgacatcctcattgtttttcaaaccctctttcagcctatccccaaatgatttctctatcagagctgatggaatgttgatcttctcaatatacccatcagcatcggtgctctcctcgggtgaatccatagttattagaggctcttccctatcatcagccactaaaactgctgcagctcctgcctgttgagcattccatacctttaaagcaaagaagcaacctagcacgccaccaaaagaaaatcagaaaaatcctctaactggtaacatcattatgtcattttaaagacaacattcatgttccacttaatcatcattgaacaccaattaattaacgtattaacccatataagaactctaccacccacattgtagtccaacaaaatattcataaatagaaaatctgtgagtgttttaaataagataacttctaactcttaaggtattttagattttcagtcatttgaaacacatggaagacttgattggtgttgaccacatagtgtatcagactacaaagggcaaaatacaaaatatattgagttcggtattaatttaaacgaacattaattacgaggataaagtcaaaaaccaataacggaaagaagtagaccatcctcatttccaatatttgaacatgatttaacactccattaaatacaaaagcatgacagaaacagagcacccatatcttaatcaacaaatctataaaaggaagaaaagtttctaattttggaatgaaaaaaaaaaaaaacaactaattaactgttctgatcgtaattaaatcaaaatcttttcaaataagcaagaccacagaaaataatgttttgattgtatcattttcctaatcctaacattattgacaaagccaacacatgtcagcaaaaggcaatgaattttaaaatattaatcataaaatgcacatatacatattatattatatatatgcaattacctccacgatcaagaagaacaacggaggggcgtggagaacgagacttgaagggcttatcaccctcaaaggggtcacacccaaaagaccctttagggggataaacaacagaaccaacaatatagccaccatagtctggaacaccaaagtttccaattgctccatcgtgtttagaacgcatattcactggagacaagactttgatattctctgtctccaccacaaacctgccatgaacatagttttctgaaacgactgccactagtaaaaccaaggaaagaagaggcacgaggtttctgaaagaagccgccatgcaatcagcttcaatcatggtaatctctcaaaatgaatagaaaatgatgtaatctgattttccctgttcttttctgggcaatgggattttctttaatccggcaacgtgcctgtgaatagagttcggaacggtcaacaggtggagagacgagagagagggaagggttgagttggaagatgatttcgagatcattgttctgtcttatagagaggtttaagtttctctgtctaactgtgacgtaaaggaaacgacagatgtgagagagagagagaaagggagagagagagaaggagggagtagacttggacggagtcattggaactaactacttaatctgtttgttccacgatgaagacttattataagtgagatgagaaagagaggcaagcatcatcatggaattttcttaataattaaatttcgacgtaatattttatttctatattttattttctttaatagtgaacttcatttttaagcaaaagtgatgttttcgtttgttctgtattttttattttcacttttctaatatttccaaagttatccttattattattttttttttttgaaaagactattatattaatctgaaaaccaaattacataacagtcaaaagaggaggcgaaaattcctctaaccaaatataatctgaatccaccgtaagagcaaacttagccaacaagtgggcttcgttattagtagacctataaacataagagatctctgctcgtgggaagttggataacagaaaagtaacatcattaagtacagtataaaaagctgatagacctttagtttgagactttaatccattaacaaccattaatgaatcagtctcaatcaaatcaacattgagtttgagagacaccagaaatttgagactccaagccatagctaatgcttccatttcttctggtttaacacaccctttcattggtttagccattacagcaataacatcaccattagagttacgaagaagagcaccaagtccaaacacaccagaagaaacattgacagca

SEQ ID NO: 162198 - DNA, 1655 bp, Cannabis sativa
atgatgaagaaaattgttttgtacaaggtaacatgttactatagctagtaatttttcgggaattataaaacggtactagtaatgtttagcataatttgaaaatattatatataatttaaaattaagtcttacatagttatatttaataattaatatgaaaaatcgtcaacaatattggacactactaatatttaataacaatactcttagagtcttaattactagcataatgataatttcttacctcaaattataatgaaataactactcaatatgtagaagaggggacaataaaagtattttcatctgcaatgagtttagaagatgataataccgaagaaccatctttggcaagtagttcgagttctagtgatgaaggtatgaagactctattttattctatttctgtcttttttacgtaaaaactcttgaatggaaatgaaaaaaaaaaaaaaaaagacattactcgagttcctttgaaaatggtataagatcctaactgtttaattgttgtccatataattgcataaatctttggttgttggtagaacattagaacatcattttgaacataatcactatttcattcaaaagtaggatagaaaaaggccattttaaagaacaaataaagaattttattactcatattaaatttattatgaatatagagtaaataatagcataaatacctaatgttttaagtttataaacatcataaactcaatatttatttttagcgacataagtacctaatatttgtaaaattgtaattttccttcagttttgttagtaagattctattttaaatttattaaaaaaacttttgaaagtaactaatactgtatgtttctgtctaaaccacataatctataaatttggacattatatgtgccttatttaaagcaataatactgacgaaagtagagaaaaattacagttttacaaacattaagtactcataccgctaaaaataagcattagaattatgttacttacaaacttaaaactttaagtacttataacgctattaacctttaatttaatataattgtttgctaaatctctcttgtaggtggtctcacacaaagtgatgaaaatcctcagtttccacctaattatgataaaattgtattgtttttaaagcttgttatgaagtccttcttaatcatcctcggaattggtaagtaatacatagtaaattcaagaaaatactaaacttgaaatcatatgcatatatagtagtaaaactttcacttagtggggaaacttttatttgtcaactttctgtttattgataagttaattcctaataattaatttcagttatatactataggaaaagtttgtaatatagatattttggtaaattttcagagaattttatagtttaatatttattttttatggttgaatatattgtaattatttaaaattatcagtaaatttttaaaaaattctaaatataatttttaacgcaaaaaataaaatttaagtaattaagcaattacttatcacaaattttaaacaaaagtaattacacgcgcaacaaaaaatttgaacattattttttgcaatgtaaatcttaaaaaaaattaaaaatttacaagtaattttatataattacaacgtatgcgatcataataaaaaatagtact

SEQ ID NO: 162199 - DNA, 4782 bp, Cannabis sativa
acatcttatatatccacatgtcacattctaattgagtaaaaatttgttgtatgttccagtacggactacgcccaccgctactaccatgtaccctctctgttgatgaaattcacgaatacctcaactcctcctcctcaaaactccgtgaacgaagaatctgagtctccgattcgaaacacagcgacaaaagtaaaaggttgaagatgactgaggctatgattcggaacaagcctggcatggccagcgtcaaggacatgcctctcctccaagacgggccacctccgggtggttttgccccggtccgatacgctcgtcggatccccaataagggtccaagcgccatcgcaattttcctcactacctttggagcattctcttggggcatgtaccaggttggccagggaaacaagatccgaaggtcactctctttgttcttaaatttcatctctttatgtggggttttgggtcgtgtgtggaattgattaatcttgtgtttgatttgttctacgttagggtttctgtttatttatgatttttaatggtgatttagtttttgaaatgagctttgggaatgtggagtttatttttagggttaaatattgcttcgaattgaaaccctttgtaaatgtttgttctttgccattgttgtcctcttagaaatcattgggattggattatttttgaaaatgttgataaagattgattttttacgttcgagctatatgttattggttaggtagagtcaaattgtgaatgtggatgagtaatagtaacatctaggatgattgtaagagcacttggattcatagttataagttaaaaatgtactaaatccattgtgagcagtaggaggctaggaaataatttaagctttggaaaaatgaaaaggaaaacttttgaagaatttgagtaattttgaggcatagtattttaggaagaatgctcgaggaaaaagtttttgtacttctaatcaaagatagagagacatgtataattgtaactgaaatgatcatctctcattatgaaatacctctatcaatcaacaaagatcttaacaaggagtcgtattatgaaatacaagtgagtttcatttgtttagtttaagatgggaattcaaccattgaacatattatggaaataaaactcttttatgtggaaattataatgtggtgatatgtgttcggagttcattttatagaaatatcatagcaaacagcaatatctagttggtgtttattgcttaattttgctcacggtataggtgttaatcatctttccctcgaatagctgtttgtgtctagatttctaggaaggttttagaaatctttctatgaagcttcatcctaactctcctaggaaggtttacatgcgaaaacgtgtctaaagaaggtagtagaaaccaatcaagattagagactaatgacatttctttcactcttatctttagttaggttccaacacggggactagtaacgaaaacatagataagtcaaaatgtgtgtattgggtactgataggtgatagcacttggccattctcaaatctgtgatcacttgagctatcatgtattcatgaataagtagtgatcatgttctctatgaactttcaacttttctaatatgtgtcgtagaggaaagtctactaactaataggcaaacaagggtcatttcgtagctcgtagttgtacagttttttactattgttttcagtataatagtgggaaatataaccaataatatatggctcatgttttggacacaaatggtatgcttcattcttctatgactgagacatgtatttgtagaaaaggtttaaaaagggtattttttatgatgttctgcagggcgctcaaagaagaaaagtatgctgcccgctcggccattttgccagtgctgcaagctgaggaagatgaaaggtgaacgagttacaatcagtttttttcttcttccaattgtctctgtccccttactaagctgagcattattgtgattaaatgtactgattagtttccctttgaaacattccttagatttgtccatgagtggaagaagtatctcgaatacgaggctgacgtgatgaaggatgtgccgggttggaaagtcggcgagaatgtttacaactccgggagatggatgcccccagcaactggggagctccgtcccgaagtctggtaactgacacacatattgattgcaattgtttttgtcattgatgtttgataaaaggagtttgtatttcccttcaagcatgtttcagtgttgccatgtctctggctattatgttcttagaaataaaatgcagcaaaatacctttttttcacatgttttaaaatgtaaaacagtgcttatcttatttcaagtcctttgtcatgtttgattattcatcattctaaatccacaacggtttatggcagaaaaaaaaaaggtacttgtaagtaatgattaaagcttgatcatatcttttgttatgtttataaaagattccatatgttatatgttgatcatggtatttaataatatcaaatcaagaatgaaaaagactcatgataaagtgagaaaaaccccacactatcaaagtggagcactcattgaaactcaagtttataaaccgacaaaatttatcatctgattctgatctataatcataattacaagaaacagaaaattctacttctactcgtgactttggctcgcgattatagtcttgctctaactccttcgatttctcgttgcttttttcgttacaactatgagccaaaactgcatttcccacagttcactactgtaccaatggtgtttctaatcaaaccagggtagatcatgcaaagtttggcacaaggaaaagaaaaaagatcatcttggtatcgtaatttaaacaaccgaaaagaatggtccagttccaccttgtttatgagggtcaggaatgcttgagtagcaatagaggtgattggacatgttccaactccaatcttgctttctatacacattcattttaggccatctgtttattcttacatagtgttctctaatctgttcctcaccaatgaaactagtaacagtacaataacaactttcatgtcctccccatgttgggtcatcgggatctgctgtttggctcccatctagatggaagtatcgtcgaagaagaggtctaccgcctttccaataagtatcgagattacgccaatattctggtgctgcctgagatgaaaaagaaaaaacaaatcaaaataggctaagtacaaaactatttacacacaagtttgtatttgcatttgcttaccttgttgaaatgcaactcccaaacatggtcactcaaatcgtacttggtaattcgggtctgcagcgaaacacaagttaatcccaacaacaagttcatagtgtagaaaaagaaaaacaactcttctagtctcatcccaatcaaaagaaactcaaaactctgaaaattgacgtagttgcaaacgttgttaacacttcaaaacaaaaacaaaaacatcccaaaatgtcagcaataacaactaaattgaatagtgttttttttagtgttaacaactttaccaactattgagtcaagagttctttttttcttcttttctctcaatcaggagtagcagagttttttccgtacaagagtgaagattagggagaagagaatagtttactcgctttccatccatgaaagataaggagtaagcggccaacttcgttaatcccgggatttgagacaagcgaggtatgtgcactttctgaagccacaattcctcgcactaaaaaaaacacacatacacacaaacataacttattttcaatttagtcagtagtatcttcatcacttaataattcaagtgatgaagcaaaaacaaaagttgctaggaaataaaacaagataatttgaaaaagatttccatgaaataaacagctagacatgaataagaagattagacaatttagatttgatttaaggtacacaaaattggatttattatgcttggcaaaacattgtttcagtttatttcctttgcaatttttcaatacactctttgttaactcattttcttagtgtaattacatgtaaaactaaattatatttcaataatttgtactaaatcacatttcaattaaaccctaaattttaaggtagattttttcttcatacctttacatcaaattcatttttaaccatagcatatataaaaattaatactgtatataattttttttataaaattattacataaaatataattcaatataatattatacaatccgaaataccaaataaatgcaaagtgttttaaatgcccttttgttattttaatattttaatacataatttaagtgcatgtatcattaatttttgtaaatgcaaataagaatattataatataaaattatacaagatagtacaacctttgaaatggctaaaatagcaaagagaaaaataaaactattactaatgaacaatagaattcatgttatagcaggagcgtttggtacgagatgttcaaaataatttaattataagaaatattatgaaacagaatataattgtagaaaaatgtgtaaactatatttagttgtataaggtaatatatatcatattcccgttaattgaattatattgtttagttgtttggttgaatacaagaaatttatatattattttaaaatttaaataaaaatattttttattaaatatgtttaatgttaattatacataaaaataaaataactattcattaagaaaatatatttatttattagtaaatattaaattttattg

SEQ ID NO: 162200 - DNA, 2417 bp, Cannabis sativa
gagaggtttgggcatcaacgtcagagtgttgagatccatcaacgttggaggtctcattgacagtgccagctctggctcgcaccattaaagaaggagagaatcgaaaaagacttaggatttttttgtttctaagcgtgtgataccatattatgacaaaaaaggaaatcttttattaatgaattgtctaattaattaattaattatagtcaagccttactagacaattattttgggtataactaattataataatatacttaatacatgttgtacttttttttttggccgaatttttgttctgttaggttttttgacaaggtttttaatgagacagtgcttatggacatccaatgaggagcgttatgaaatattatatatatagatgtccaattcacccaaatgttttctatcaattaccattaattgtaattactattcctctccttaaatttcttaatctataactcgcatatttgtataaactagattgatgttacgtgcaatgcacatataattagttttttttttaattaggttcaattaggtgatgttaagtacaatacacgtatgtttattttttttttaataaggtaatgtatttttttttttaatttttgaaataaagtttgagattttgatctttaagaaaaaaaaattagctattgctacattagtgtgtcatttgaatgcgatgtgattatatatatatacgtatttttaaattttttaatttttttaatcaagtaacgtatttgataatgcataatatattgtaatttactttatccttaactaaattcacataaccaaatatttgagtgtgtttatatataagtgtgtgaattggtttaccataacttaatcaaaaaagaatcaattctttacttcaactatttcaatttaaaatataaaataaataataataaagttaggttaataaagtgctaaaaaaatctcttttttctctttctctatttatttatctattctatcttatgttaaaataattatttaattattattaaataaaagaataaattatttcatatatataaaataaatttttttaaacacactcgtaaaatgtggattatttactagtttattattatttctatattttttttcctggacatttaaattagaccatattatcatcacaatagttctacttcactaatttatttaaaaaaaataagcaaaatgtaatgataatgatatttacaaagatttttgtagtattggatataatttttttttcagaaaaaatctagttctttgagtccgccgataaaaatttggtttgcaatattttatttttgtactatacgaaacaacggaaaggataaatatcgttatcttactttggaaaatcaagctcagccatggcttctacttccactctccttcgacttcacttccacactgtccctcttcctcttcttccatcacccaacccatacacatctcactttcgtcccaaattctccatcaaatgcagttccactcctacccctgaacccctcgatccctcattccccattcccagttccaaaaccaccattcctcccgaatcattccccatcgaaaagcgaaggagatccgagattatccaagacccgaaatcgcgaaccgagctgacgataccggagcccccgagtttcgagatcggctggaagaggacgaaggagattaagctggaaaagccaaaaggatatgtgatagcggatttcttggaaaagttggagggcttgatggggaaggagttcgggtcgacggagcttttggcgaaggcgggagagattgtgacggagagggcgagagaggaggcggaggtgcttagagagaagggggaagtggaagagaggctaattacagagctgtttagggttttgaggttgattgagatggatatggcaatggtgaaagcggcggttaaggaagagactctgaatgagagacttgagcaagccaaggctaggtgtaggcaagctattcttgttgctttgtcgttttgaatgccattgcgtgcagtgaatagtataaaacaggttaggaattaaattaactgaatcaatcattttttgcttatgaaatcatataaatataaatatatatatttcttacctattatataaacggattgttgttgtgcttttgagagaatacacccaacaaaaatttaattttagaatttcacaacattattataattgcatcttttcacctcttttcttgtttaaacaattccatcttttccttgtaaaaaaaaggcacctccctctttccttgtaaaaaaaatggcaccttgggaaatttgattttttatgcttacatgtagttaaaaaattttttctaaacaaataataactaatatttgtaaaatatgacaatttttatgatatccctaaaatacc

SEQ ID NO: 162201 - DNA, 1209 bp, Cannabis sativa
  modified_base (1146)..(1160): a, c, t, g, unknown or other
atatatataaatatataatgaaaagaagaagaagatacggaaaaaagtgtctttaataaaaaatgggtatcgatagcgacaaacatattgattcagactatgagtggctcaatcagtctggcgagcgactaatcccaccacacgacagccacagaccctctcccttaaccacttcttgacacatccccaaatcgacagacccccctctctctttctcgtcttcgtctctcctcatcaccattgtgccacctaatagcccccactgttggtctcatcgcacagaaagctccaatccaagcttcgtcacttctaacttctctatcttttttctttctttctgtctgtgtgtctttcttttgtttgttctttttttagagatatttttggggttttttaatataaccctataatatatatacttatatatgatattagatattatataaaagccaaaattaaaacttgccaacctacccaacccacaactcgtgatccactgactcatcgattcgtccaacctagccattgaatgggcatgtatgggtgttatttttgttaacccaaaactgtgaacctgatacctagtgaaccggaccgatttttagccctagatgtgactcctacccagggtcatcatcaatgggatcctgtttctcttttcctcttccttattagtgaagagggtttgttctctatagttcataaagctagtatagagggccccctctaaggattaccttgtggatgacatggtcctgacacttgaaaactttttttttggatgatagctcgtttttcattgatgctactttggttgtggatgaaagctgtatgaagattttgaatgcttacggaaaagcctatgggcataaagttaacttctccaaatctgtacagtgttttagcttgaatgtcagtgtggttgataaagatagcttgactgattgtgttggtgtgcttgttgttacttgtcacgagaagtaccttgatcttccttgttttgtggggaaataaaataagagattgtatcatgggatctaagatcatgtgtggaagaaattatttaggagtcctatgcatatatcccactactaggtggtatctaacatcattgctaggagtccttgttggaaatattttaccagnnnnnnnnnnnnnnnacaagtatgttgattaacatcctacatatgaattctctaaaacaatgaa

SEQ ID NO: 162202 - DNA, 6623 bp, Cannabis sativa
  modified_base (5637)..(5637): a, c, t, g, unknown or other
cctccacattggtgcccaaaatccacatccaggccctttccccactggcccagtattgaaccggtagtatattaagtgctttaagtctttgcacattctaatttgtcgcatcaacctgtacttgtaccggtacataccagttaactgaccaacatgagaaaatgtgtactgcaggccatcagccaattggaaggcgtcaacgttacccaaccgaaactgaatattagcatcaactacaagcttcgtcaaccttagaatttcacgacaaagatggaaagcattgccaaatcgagacttcttacgttctttggttgtcagagttttgacaggctttagattgaaattataatcaagatgaagataattcaagtttttcctgtgtatcaaaagattcagcatgttatacccttgcttacaaacttgaagacctgcttcagcccagtcaagttcggtggtttggaaaaactttgtagcttgcagagaacggaacaaatgcttcttcttttgggccttgggtggtctatgatgcaactcattcaacacaaaacattttaacaacttttggtaactgacccgtactttaactggatatgagggagggctgaaatgcaaatacatttagagtaaatacgatcagactaactttagataaatgcatttaagcagcttgaaaaggaaaaaaatataataaagaaactcttcttaccaatgctctttataccactctgatacaagaggtatatcttctgcccgacgcgtcctaccagatctcatgttaaaaggtcgtggagcaaaaagaagggaaacgcctgcagctgtggtgtcagtataaagctgagtatctttcagtaagggctccaccccttctggcaaaataagatcatcttcatcctcatcatcgtacactttcttttctcgcttgttagtgctgggtattgggtgtatcaaaggatcatagtaaaatgcaggtaaatcaggatcctcagtttttatgtacataaccatgggagtgtgataaaccccaagctttaccttcctgggcctgttgttatataggtgagggaatgcaattctgtactctgtcctgagaggtgaccggataatgagtttgttaatgtcattgaactcattccagtcttcatcacctttttccatatcacggtacaagggctcaaattttgggccacctgaataagtgcaaaccaataatgttaaaaaactgccacaattatccagaatttccagggcctaaaccaaatatatttcaataataagaaaaatctgaacactaaccaggtatgcacatattcaatgctttggctgtgaagaaagactccatgtcaaacaagtagaaataattgcggtcaattagatctgaaagtagttgtcctgcaagccgatgaagagttgccatgattggaagagaaagatgccacttcctatagctaggaccatttatgagttttgttttaacaagaggcctatggtcgtaaaaccaagtatatacagcagaatcttcttcttcatctagttctagctgaattggctcaagaggatctacatccagtaaattatctgcataatccagaggaggctcctcatcatcaaatggtggaaaccgcattctcttgaaatgcctacggtctcttttctcccttctcatcatgatccacattgaaccccactgccaagaagtaaacaagacatgcattggtgattgattaacataaaaattaactcaaatagtgaagtagacggaatacccaacacgacataggaaaaacagaagaaaattaaaaagaaacaccaaacctgagccagatatatgggttcaacaacccatggaatttcattcacaaacgtgattgccccagttatatggtacaaaactttcacatctctgacctgtaatcacacaattcattaaaacaagccatgagcagactggcgtaaccaaaactttgaacgtacaacattaagttatacagaatgtatacctgctcccaaggcattggcatattttcaaggagcttataaactgcgtgaggaataaatttgagtgctccaagatatactcgcttatcatgacgatattttttggacgacatgtccccatgatctctgtgaattacacaagttcatctttaaatttgatatgacaaagatttcaaaacggaggaaccaaattctacagcaaacaacatagtttaaaaaaaaaaattaggctattccaatgaagttccgactacgatttcaccgagaaatcatcaaaaattcaaatttgaggaatataaaaaacccatcaaaatcctcaacttgacatttctacttcatttcgtaagctaattgaagtttaaacgaaacacacgaccagacagctcaccgacctaatgatttccctaaactaagtatttctacttcaattcttaacctaatcgaagttcaaaagagaaaagacacaagaccaaaagaagctcactcacctaatgatcttcctaacgtgctcgggaggcatatcctccttctgcgtctcaacgaatccaaacttcctcttatcgctatatcgtttagaattaagctgctgccatttcctggctttctcttcgagcttagcctcagcttctgccggagatggcaagaccgtataagagggttgggcagcgggaggcggcggaatggccgagcctcccgtgcccggcggcacaatctggccgctgttccacatggtgaaagatactacaagagactctctatgcagtgctttgcgaagagtggtttgtagcttctagggttttgggggtttctctcagtcagtgccgagagagagaaagagagagagagtagtgtggagatcagaaagacgagattgggttctgaggctttttggtttatatttgttagaaatgaaatggcggtggcacgtgatgtgatcacgtgatcaactccttgggctgtctgccccaaaggcccaatctataattataccgtctcttacaaagaaaatgatggaaatgacctttttatttataaataaagattattacacaaaatacctacaattatatttttttacattcttagggattagtttttatctttttacgaattcttttattatatttttacagatgctaagaaaattatcgtgtaaaaaacacacagaaaacgtgaaaacaacataattttagacttacaataattaaaatgtttcttaaaattgagcatagagtactattatataaaattttgtaaaatttaaatctaaattctcatttaataaaatttaatgaaatagagtggcgatctgtaatttttgcaaaaatagaatattgacattggtgagtcgactattgactgtaattttctttatcatatgaaaagatttttctttttacaaaaaaaaaaaaagaaaaaaaaaattataacacgactacttactgtttttatttatttacaaaattttagtgtactcattttatcttgctgtctaaaagtgagaaaaaggaaaaataagtggatcgacaatgatcttcactggcccattgcctaacaattatccaattgaataacaataacaaaagtattaggcatgagtatgtacccaattctaagtgattagttagttatattttttaaaatttattatataaaatttcatacttaattatattaatattagtaataatattaatactagagtattaggcatcattaatacttagtttctattattgtaattaaatatcagatctcgtataatttaaaaaaaataaattttaaaaaatattattaatcaatcgtactacctataaaaaagtgttatatatgatcggtatttaatagcaatactttaattataacaaagtgaagtgttggacacaactactgtgctatttagaaaattctcaattgaataattgtagtgagttcactgaaattgagagggtgagagcaatatccactaatctcatctgtgtcaaagattcaaagcagtggcaggcaatatccgagtcatatggccggagacgtcaaaaaaaatccaattaactcaattcacatccactccctaaaaccaagcacagttaatttttactgtatatgtcatcttcattatttttatcaggtgaataattcattttaaaaaaaaaaaaaagaagaaaagcataactgactatactgagcacgaacatggtctatgtaatataaggacccattttgaataggctttttatccaacttttaggctggaaaattgcctcaattaatagtgatagcataaaagagaagaataaaaagaaagatatagccattacccttataaagttgtgcacttgttataaataataggtgtgtgattttgcataaaaccatttaagattttgatatgtatattaatagagcgatgttggcaaggttcaatctgagcatgaatttatgcaaatacagggcattataagcatatccatatcagattgagccgtgccaatatcactttccaaaaattaattatgtatatttatactttattataatatattcatccccatatatatttatatatttgtattactaactatgtaaattataatatatatatgagtttctggttcaagcaaaggtttggctctttgcatggtttggagtttggagttacgtacgcaactttatgatatgataaaactccggttaagtaccgtttcttctttctactctctaatccatatttactttgtgtttttatatatacttaatagatgtttagcaaattataaaaagacaaaacttaaatagacatttatacatagctttggttagtagctcacgatcctttgattttgaaattttatatattattattattaattatgaaaatagtaattcaaattcaggccacaatattaaaaaaattggaaatttcaaaaatacattttatttataactttttgtttaatatttttatttacaaaaatatacttgaaaagtttaaaattacaaaaatacattttatttagcaaaaagtaaaaaaacaaaacaaattaaaatgaacgagaaatcaacatcacaacaactatgaatcaactatataaaacaactagaaaaacacaactgtattacaactacataaactataaaaaaaataatttaatatttttactaaagaaatatttttgtaaataaaaaaatttaaagtgtaaaaatgaattttttttggtgttgacgtatttttataattcttttcaaatttttaatctattgtgtaaaattttcttaagaaaaactcctaactagaattgcatattaataattataatttttatacatatacacaaaaaaattacaaattaaattttgacataatcaattctcataggcataggttttggctggacttttggaaaatacttgcgaaactcaaaaaatacttctagttctaaaaacctctttaaagagaagctatttttagtagttttttcgagataatagcttaatagttttaacactttttctcgcaaagaaaaagtcctaaagtctaaattctcttccctaaaccacttggggctagctcaagtgggtgtgtgagtgttggaagtcctgggttcgagtcccaggtaaaaacatgttgtaatatataaacgnttaaatcaaaaaaaaaaaaaatattctcttccctaatatcaaaacaatatatatcaattttttaattaattaacatctcttcaaatattagtaagcatagtcatattgttaaatattgcatggataaagaaatttttttatttatttatttatttatttgtatttatgttcgaaaattgaaacaaacttaaaaaatagtcaaatgaaactaatttttttttaatattgtcatttaaattaaagccagtaattacaataaaacaataagtagcttttgataacatctaatatatattttacaaaaagataaaaagatattaattagtattaataattggagtaatgatttgtgagagtaatttttaataagtaagatttattttaaataaaaataattagttgaaatcacattatgtgatttatgtatgtacatattattggtctaacaattaataaaattacatattctataaatattaacaaattataacctaaaacacaatttagataacttaatacactgacaaacataactatcaatactcgaatgagagcaagtttcctttgtagctttgataactatgtttgaatcactttctattattatgaattgacactatttagttgttgtagtttcaacaacaagcaagcagggtagtcgttacttatctaatgagaggattagaaaattgtaaccgcctactagctgctattaggggtgcacattgggtgggttttatcgaattttgggtgtatagaattagtaacccgaacccatccatttgtgtcattgggtttttggatttcgagtgcgagtgggttgtgtttgagttgaactaggttcgggtgggttttgactgggtttgggatgggctaaacttttttatttttgaaaaatgtcattttttatacattttttcataaaaaaaaaaaaaaaactgaaaaaataaaaagaaagaaaataaaagaagaagaagaaaataaaa

SEQ ID NO: 162203 - DNA, 6220 bp, Cannabis sativa
agagacaattgacttatctccctatgccttcgtaaaatttagaactttgagatttgacagtggacgacaattgactttttgaaatctttctttccttggtatggatttggtttcctaagttctacaatctaaaagatttctgatctggagatgtgttctaattttggaagatgaagatgaaaaaagggagaaaatgaaaaaaatagattaatgatgacaaaaacttagtttttattacttttttttttcaaatataaacttaatttatttaataattaatagaagcttgaacttttttttattttttattttggtgtcatatttttcttaaaaaaatagaaaatctaatatactacatacaattacatgataaagaatgttgactctcaaaaattatattaatgagtggttaaaaaagtgtatgtacatcatagaattattctatatttatataaatggtgaagtatattattttataatttcattttgtaaaaattgtattttatataattttttttaataaaataaccattatattcttttttttttgtaaggataaaataaccacttatggaatctaaataaggagtcaattatttttgtgtcaaaaatgtcaagactattattttataaaaaaaaataatatcaaaacaaaacaaaaaataatatctagaaaagcttgtattttttctagatttacctctattcctcactgacttactataaatcctagaaacttccctgatttgacgctaaaggtgcatttttttgggattgagcttcatcccatactttcttaccacctcaaaatactattttatatgctctaaatgaccctttcttatcttggattcgactaacatatcatcctcatagactttcatattccttcccagcaggtttttgaacatccggtttaccatacgctgatatgtggctcctacattctttaatccaaatggcatgactaggtagtagtataccccattgtcggttctgaagctagtacattcttggtctgccacatgcattttgagctggttatacccagagtatgagcccataaaagataacagcttgaaacaggaggtggcatccaccatttgggcaatcttcttctgtaagactactcttgttcctatgggaaaggtaagactccccataactttgtgttcggacaccccccaaagcacgttcaggtattgcaccttcgtggtagcaaactgctccacgagttattatgcaattttgggacgtccgactttggtggactttggagctattacctccatcaagcacctatgccttaagtttcccacacaagcaaaaggagtgggaactatcgataggaattaaggagaagcaaaaaaatgttatagtgtggttgtgcaacaagccatttcatggtcaaggggaccgacaatgtactcttgcccgagagtcaagatgaattagatcctcgcattggctccgaaactgtattagagcatatggaagagatcaagttagtaggaatttgtgatcaagatccaactaaagttatccgcttaggaaaaggcttaggccctgatgaaaggagcaaaatcataaccaccatcaaagagtcagcagatgtctttacatggtgccataaagatatgactagaataagcccgcatgtcatcactcatgttttgaacgttaacaaaggtatgcctccggtttaacaaaagaggcatcctttggattcggtgaagtcagatgccttagaaaaggaggtggataaaatgctatcgaacacatttatgtgtgattgtgttattccgtaaaggtgatgggttggtccataagttgtggtctttgtgccaagagctgattaacttcccatatttctccatcatggtctaagtctttggcgtagcgcttcaactcattcctcgtggttccttcgatgtgtggccctcctaagatcatggccatccttccatttggtcttgggggttgtctgggtgtcagatgatgtgggggaggatatggtcaaaaatgggtccactctaattgtatccaaagatgactctaggttacttaggatcctaataatctcatctaccctattaatatacgtcttcatgcggtacttaagagtatctagacttagaaaataattgtcaaaccccccttagtccctctgggatatttgatagagattgggggtacaaaacacacagaagggattactacctcttctggaggtgctagctcgaggagcatcttcatctgggtattcagtggcaaacctctctacaatcttctatttctctgtcatagggttgggatggtggtgtgcccaatcccccactaagcgttcatccttcttaacaacttttattattatcgcaacaatactaagggcaatctgttccttggcctctttagaagcttggctctagcccctaccacttacttacattgtcaatgctctagaacccaacaattagcccgtgttcgcgaagtagtttcgtggtgaccccacgctttcaactttcagctcctcgtcagagaaaaagctgtactgggccactttcttctttaattcttcattctctagagtttggggaatagttctgccagaaataaaacaaagaaactttggtcagtggccaaatcgaatagattgcaaaaggaggaagaaaagggaaaagagcgcatactcaggattttgaaatccaaaggaagatttggcccccacctcaccgagaaactgtggagaagaactagtattctcagaggtctagagaatgcaacgtatgagtggtaagataatgtacatctgcgtacttctccagcttttaaaatcctacctttcttgctgtttgtacacatgggtttgggttttacaccgtaaaagtataatatctcctctggattggaaacttcaaacttctagatcttgtaaaaaaacatgccctctagataaaagcttgtaggtcaaaggaattagttagaacaaagctattccaactttagcgtagatatttgtgttgtatgatctaagaggcaggtatgccctgctcacgatattggcctaactccaagcgttgaacttgtctgtgctctaggaggccgactcttccgccactaacaatctatgccacattagtccaggaatgttacggactcccaactcagtggcatacaattccatcctccaatagaacttgaaactattggccttctgatccatttcctagatggagtcattgtaaataacaggtgcggagggtgaagctttggctttccccctttgctttgttttttctgcctccccaattgggacggccttgggaactaggtcctattgaagctcttccgcggatgctgcagtctgtgcatccttaacatccaccgccttgagactgaactcgtcattcaaatcagtcactagaaaaggaaaagaaaggaaaaacgaaacaatgaaatacccaatatcctaaggaccgtatgggtattggggaaggcctcccctaaaatttcttggagaggtcaccaccagacccatcacacacaaagctcctgcagattgagaaattccccaaaaattaagtccattcagagtcttgacaactctaaatgggtaaatagaattaaaactagcccagaatccactaaatatctaccctacctagtttggattctaacacctattttcgagaaacatgcaaatacgtttatgactcgacatttgcaaccctaattgtttcactactacacaacatcttaaaatttttctctaagcagtcacatgcaagtgtttacagaacaaagcttaaaaaatgcaatttttatcctagcataaaatcaaaaaaatatcaacaagttttgaaacactgacttgtaacgtgattcgaagggaaaagatagttgttgggagtgattcaagagctgtgcgtccagttgatgattctctcaaagcttgattttgtgatgaattcttcatctaagtgggggtaggctgtattaaaagcgagggagcaaagcgtacgggaaaaactgtgttctgacttgcggcaaacaatttgtgagaatgtaggaggtctcatacattcacaagtggaagtttggggaagaaagttgaggtttttaggtttgggttttagaaagaaatggctctggtttaaatttcttgagaatgaggggaatttggaagtttgatctggtaaagagaagaaaatgacttgccttgggcttatttatagtcaaggggagtccatgttatttgatttgaacgatctagatcatccccttagaaacataagttgatctgatggctcgggagttgaaaaggtagcattcaatttccctcgtcaaaattaaggcctttatttttcatcatcacctacctcgggcccaatgtgcattacaagattttcatgttaataatcctgctgtcagttgggtttctcaggaaaaacaagccttttgtaggcgtgtgttgactacaagctcattaaagacacgacacacgtgcaataccagttgcaccctgcacaagactttttgacccttcaattgttgaaggccaaatgggaaggatgatttagtattcttgaaagtcacccacgtgtcacggatacactttgatgatctagaagaaggttgcaagcttctgcaacttaagaggtcccaaaagcttggagggtaaatgttattcgtgtttcaagatgagggacacgtggcataaaatgagaagcacaaccttaaatagtccctaattaagtccccataattaggtaaggtcacaaagaagctatacgagtctgaaagaagactaagctggagagctactcagagatttgacccacaacatacctacatccgagacccgaaggccctattgtctcttcgaaacctagaaaagactaagctcaatatttgtctaagagacacctagagggcactcaaagagtttaacacggacaccaatcgttcggagaaatctgaacgtctatcaagaagagagacccaatcgctccagcaacggttataccttttctaacacaagattagatcttgtctcatgtgtcagaccatggtagtgcgcacaccccacctctgaatatacctttttgcttgacagtttgtctaggtgtctccttttcaaggtgaacctttgggcgacacgtgtccaataccaacaatggtccccaatatccaactacctctccacacgtgcaagaaacttttgggggcctaacaattaattctttacttgtattttaccccaatagtgagctttttgtaaaaatcctaagagggtcatgggtatgtccatactcgcaatttagcctataaataccccttgattttcatacaaagaggggatcagaaaaaagagggttgaagctttgccaaaattattctaagctttcttcttcttcaagattaaccaagagagcagatttagagttttcttgtaacaacatacaagcctcataaggataataaaatgactcgtggactagggctcattaatgtctgaactacgtaaactctccgtctattttacatactgcatttattatttcttaagcactattttaattagttttcaaaaatctcgataaacagatagatatgagacggtgatatgatactctaaaatctctctaaatagtactatttgttctctcctaaaatatctataaagatttgtatgtactatactgttatgttcattctctctctgtaaagaccgcttagttttaatttggagattagtagataagataattaaggcttgattatgaaaattatttattagtattgaattaattatttagttgaattcagaatgcattttatatgtcttttatagaaatttcataattttacatgttttgtgtccggcaacattggaacgtggtgtatggctattagaatcacatcctagtatttttagtatagcgggacaataaagttagacattaggaatgacgggattggtcgggatttaagaatttcccaaaatacctcgtagtgatcttttatgccttttagtgaccattttggcccattagctctttgtcttttatgagttttattaaacttatttgaatcagatttttagttatgcataagctgatattacccttgattaactaaggtattatttcatttttataaaataaggaaaagtgagttgaaaaactagaaactctctctctttcaccctctctctctc

SEQ ID NO: 162204 - DNA, 2010 bp, Cannabis sativa
ttttttttaaaaaaaaaaatgtcacctcatcctatagccttggacactagtcaatagtcatgcctattgcctaataacatgctgatattttcatggtttctatttgtttgcatgataccaaattgtaccacactctagtactccatttttttcctctgaaaggaactgtatgagtacagtttaacccagctttttactcaataaaattgatgaaaccagaaatatattaatggcagtcacataaatgaggaccaggtcctcagacctcgataacaaatttattatctcattcaattaattctccgaacaacaccaaaaatttaaaaacccaattggcatttatacttagtatcatcaatgcagagagagagaggagagccaagccattaagggtcagagcttcacgttaaagaaaacactttttaatactgtaaaattatattccaacttcggccaattcgtctaccaataacaccttaaatttctctcatgaaaccacaatagcaaactctattagtcctgtgacttctcagagtttttctttccccaaaccctctctttcatgtgatctcttcttctctcacacccttctccatcatcacatactcttgcctgtgattctgttaataatatatattgattacatactgtacctcatgtatatttgagtgtatcagtatacgtggcactcttctcccctttatatatattctcctactttctccaacttcatcacaaccgatctcgccgtacaaataaatattctctttcgttggcttacactgggatttctttaatttgtacaataagtcaataacaaagagaaagaagggtttatagattatattataagccatgaagggcaacattatttgtgtggctgtagttttcatatttgtgctctcagtcccggcctccatgtccattaggaacatagcaggtatgccgatatatatacacttttttttcgttttccatttacattcatatatatatatataaattactaattaatttttggggttttgtaataaattaattaggtggaggagaggattataaaaatgaagaggtagtagtaatgaagcgagtaataccagagacagagattaaagtagcaggttcgagattgccagattgttctcatgcgtgtggatcatgctccccatgtagattggtaatggtcagcttcgtttgtgcttctctcgctgaggccgagacttgtcctatggcctacaaatgcatgtgtagaaacaagtcatacccagttccttaattttaaaactctctcacacactacgtacctactgtttacttttttcaatcctccccctaacatctaatatgtaaagtagctagcattagttttagtagttagtatttcgatctccattatgatagtgaattaattttgttttgtttctttagaaggaagttgttatggcattaatttgtaatcacagagtttatagttgttatcacagtttttggagggtttttattattatcgcagtctattattgctatatctgagatttgtatcaggaaattccaacacttaatatcgatcttcacttttattttcaaaatggaataaaataaattataacaagagaaaatgttttgattttatccttattatatactgatgatatatcatcttattaaactttattttcttgaaagaaaaaaaaaatatattaaaaataataaaactggaaaacaaacaaatgacaaatgacaaaggacgaacatactggcccataaaggagaaagaaataattacacgaccattgtccgtcttcaacggcggtgtcatcatcataaatgtccgattagagcatctctaaccacacactaaatttatagtttcagggcatttccaatgctaaatattaaatctgtattaaatcaacacaaaaataataaaattttaacactaattttttttttgttacaattacaacactaaaaattacactaaaattatattatttagggaaaaaaata

SEQ ID NO: 162205 - DNA, 3965 bp, Cannabis sativa
cctggtaaaataaatttctaacacgaacaacatatgtgagacaataggagcatttctagccacacggcaacccgttagccattgcttgcgtacaaataaattaacaagcgaagaaaaaccttcaacacaaattaagaacaagtagggagataaagggtctccctgacgaattcccctacttggaatgacaggtcccagaacatgacccccatgagtgatcttgtaggtcactgaagagatacactgcatgattaacgacacccatttgttagaaaaacccatccgaagcatcatctgctcaagaaaaatccactccactctatcgtaggctttactcatatctagctttagagccatagtacccatcttacccatggtcttcctcttcacgtaatgcatgatctcaaaagaaatcatgacattgtcagagatcaaccgcccttgaataaaagcactctgagtttcagagatcacacaaggtaaaactaccttcaatctattcgcaaggaccttggatataatcttgtagataacattacagagggaaatagggcgcaaatccatcatagtctcaggttgcttcttcttaagtatgagaacaatattagtttcattaagcaaagaagagaaataacatgtgtcaaaaaacattatgacttgcgaagtgatatcatttcccaccacggaccaacatttttaaaaaaaacccggtgtcatgccatccggtccaggagacttatcagggtgcatttgaaagagggctctacgcacttcatcatcactaattggttccaacaacaatcgattttgaccttcagttatgactcttggaatagtatctgtaacctcattgacatccaaagaagaggaagtgaaaagattgttaaaataatcaaccataaggttaggcaaattattttcccaatcaatccatattccacggtcatttttcagtctttgaattgaattattcctctttctagaaatggccatagcattaaaatatttggaattctgatccccttcctttaaccacagttgttttgatctttggcgccaaaacacttctttttgaatcaaaactacctgtagccgagcctcagccttcttataattctccacagaacttgcatcccttcctttcttccaacgcctcaaatcagccttgcaagcttggattcgatccttaaagtttcctgaataatcccttccccaaaccaaaagcttctccacacaataatgaattttgtccataacagaggaccccgaaagaacctcccaggagtccttcaccaactgtaagcaaccgggctcacgaagccaaagattttcgaaccaaaattgttttgttcccacagttctcttcaccatatcaaagactacctgaatcggacaatggtccgaagttgacacctccaaattaatgagcttagcaagtggaaaacactcaatccaactttgagaaactaacgctcgatcaattcgaacttcaacccaattactagtacccctacctctctcccaagtatagggataaccacacaactccatatcacacaaaccacactcatctaacattgtacaaaaaccatcaataagtcaattgggataaggattacctccttgtttatcggattgagacgcgacgttattgaggtcaccaacaacacaccagggcagagaacttctggtcttaagcgcacgaatctggtctcaggtattccgtcggagattacggtttggctcaccgtaaatgccagtaagccgccattgattaccattctccccagcgatagaaatgtcaataaatttcactccataacccagcagttgaacatcactactctgtctccacaacatagctacacctccacttttccccctggcatcaacagaaaaaacaccttcaaaacccaatgctacccgaactctctctaacgtatcagttcttgacaaagtttcacaaaggaacactattttgggctgcttttggataactaaatctttaatgaattgaaaagcccatggcaattccaagacaagatactcatgatgactggtgggcctgaacaccaaggcccacctgtaaaccattttttgaaatagcatccgaattgtccaccaagcccacattgctatcctccaactcagtagaatccttcaaaatttcatttcccatacgtcttcttttattgtctacaatcagcattgagtcatcattttgactttccaaatgtagctgtacatcatcattcttaccataattatcaatgatatcactcccctgattctctccaggaataacaccttgattagctcccattcgcatccctgaattgcctccatcagatcgcaccattacaggggaattaattaaatgatattaaatttatgatcaattttttttaattgagtaatgtattttttttttttttttgagaaatttatggctagatacctttatatattttaattgttaaatacttaagccttaaacattatttttggtggtaataccccttatttttatttttaagaaatttggcttatgctcttactaatggtaataaactcatgtattaaaaatatagattaacatgtaatagttataaggaaataagtacttgaaattaaaatctcatctctcattgcttccattaatgttagtgttaacacaattttttattaactaataaataaatcttaattgacaattatataatattgaaagataattgtaaataataaacaaaaattttacttagttttaaagttaaatcttcatagtacacgaatctatcttatttatgaattttttgtttagaatctttgtattctctccccaaacttcccccttgtccagtggtttctaccactatttataaggattcaggaatggtagttatttcatttattcttatcttgataaccgttcatgaaatgtagacaatccccacgttttattcaattgctaatatgtgtaactgctaataactgtttatttgaccttatccgatacacagttattttaccgagatacccacttgtaaggtgctgctcgtaaataaacttttatgtgaatttgccttcatccatcttgcagtatacatgctctttataatgactcatctcgtcttcacatatcttcgtatttcttattaggatgcatttatcctatattgccttgcgttgtacggtgagaggacatatgcgagatgcatgtttgaacattcttctcgcattgatcattcatgataaaattttggataattcttacataaacttttaagtaagctcttcaaatcgtagcatttatgattcttagttcgaactcctttatactctcttattcgaccaacaaaattctatcttatttttcctatactttgttgttcttgagatgattattattaatttcgttgatctactagtgagctattattttgatttatccttagtcacctaaggaaagacttaaatttataaccgtgactagtatttttcaaagcgatataaataacgtttttaatttttcaatatccaaactggttcattttccagctcttgtacacgtgttatgactatattactgctcgaaatttggacataacagtcagttataacaaatttttacagacaaaacatagcctaaataatttcacaagaaaaaatcaaattatatcctaaataatattatgcaatgcagtgcattagatgttaagtgatgttttaaaatttcaaaattacaaggtgaaatgtaatatccagtttatacacatatattgttatttggtatattaagtgtgatacaattatattattattattattatttttttattattggtgcgtgtgtgtaggtgggaaagaaaaaaaaatgatatatatattaaatagtgaggcattagattagttagtttaaaatttaaatttaaattatatcagcataattttatctgattagt

SEQ ID NO: 162206 - DNA, 8564 bp, Cannabis sativa
ttttttttttttttttggaagaggaagcatttttttgattttcggatttcaatctggtgctttaatgagttgttgaatttcgttattgcgaatgcgaaaacggtgaatgcttgtggatttttttttagtgatattgcagtttttttttgctgattttttaggatccgcttcgaaccctagatgtttgctgcaatttcgatgaagtgttggatcattttcgtttagctgtattgaatttttttgtttgggtttttttcggaagttgtttgggttaggatttgattcgatttggtaaatggagtctccggttgtgaaaaaaaggggacgaccgaggaaacggaggagagaggaggatgaaaaatcgggtattgaaacgaagaagctggctgttgaaacgaaacctattgcattgttgggtcgatatatgatgaaggagtttgaggataatggagtttttctcgggaaagttgtgtattatgctgatggtttgtatagagttcattacgaagatggggactgtgaagatttggaaagccgtgagattcgtgggagcattttggacgacaaggattttaccagtaaattgaacacccgaaagaagaaacttgatgagttgatattgaaaagtaaagtgaagcatggtatggatgtggaatcgaaaaacgatgtggataaggttgaagcatccaaaacaattgatttgcctgggggaacagttactggaaatgatgatggagaagttgatgctgatgctgattcatcaaatgattcttctgagtgtgccagggatagagacttgagcattgaagctgaggtaccagctgttcctccacctcaattgccaccttcttccggtaccatcggtgttccggagcagtatgtatcacaacttttctcagtttatggtttcttgcgatcatttagcatctgtttgttcttgagcccatttactttggatgattttgtgggatctcttaaatgtcgtgttccaaatacattgtcggatgcaatccatgtttctgttatgcgtgctctgaggcgtcatcttgatagaatctctgaagatggttcagagcttgcatcaaaatgcttgaggtacttatgcataaaatatatacttctgcgtgctctgtagattagataattttaatagcattttttcgaagaataattaaagaggcacagtaagaatcattgttcatgttagttatgtagctgtgaaagcaatgctttgaaagaatgtttccaattcaattgaaaagcttgaagtgcaaatgcaagtaccccaaatgacatcttttgaatttagaaccagaaagtttgctgcttgtttagcatcacattgaaagctacctataatatatattcaccaaattgacaccattatccttctctctcttttgttattattattattttttttaaaaaaactatgttatttagaagaattgtttttttatataataggttattaattttattatttgtacagtgggtttgctgttggctatcaatgcttagatgtgaattactaattccagtatttggattgccaacgtgtttttggttaagtgattatttattaacttcaccatcatgggttcctaaactttcttgtatcgatgacttgttttattgaactttaagattatttcgtaattgatcttcaggtgcatcgattggagcttgcttgatacattgacttggcctgtttttatggtccagtatttaacaattatgagatacacaaaaggacctgagtggaagggattttacgatgaggtgttgggaagggattattattctttatcagttggtaggaaactgcttattctgcaagtcctttgtgatgatgcccttgattctgcagaactaagggctgaaattgatttacgtgaggagtcggaagttggaatcgattacgatgcagaagaaatggatcctcctgaaatcaaaccgaaaagggttcatcccaggtattcaaaaacttctgcctgtaaggaaagagaatctattggggcttttaaagtgagccaaacgagtaaaaaaggtgaattggatgctgttgatatggatgtggatcgaaatagtgatgaatgtcggctttgtggcatggatggaaccttgctttgttgtgatgggtgcccatccgcatatcacaccaggtgtataggtgttatgaaattgtctataccagaaggttcttggtattgtccagagtgtacaattaacaagttggggccaactattacattcggaacgtcccttagaggagcagaaatacttggcattgattcatatgggcaaatcttcatgggtacttgcaactacttgttggtgtatgtttccttcatctttgttatatactcctttgtttcagtagttgcattatttattgaatctatgccgaacatccttatacgtgatggattatttttgcgatacaccatttttttgaactggtctttcaaaagtatatcctttattttcatttagagccttggactttgaccctttctgcatatttttggggtttgttattggtgctgcttaaactttttgtcttcgttgaacaatctgctgacatagttttttcaggctcaaggcttctgtcacggaagaaccatgccttcgatattacaatagggaggacattccaaaagtcctgcagatgctttgtacctctccacaacatgaatctttgtatttgggggtctgccatgcagttttgcaatattgggatattccctcaagtatcttacccctttcagagatgaccatcaaggatgcaaatttatcaaatctaaaagaagattccaactgtcctactgctagtatagatcaaagtagtgtagataatgggacatctattcacccagttcaagttgaccactgtcctggatctcagattagtggtgagaccaagcaattggagtaccctctcacaaatacgaagctgcatgaggggaatggatcgacaagtttagttagacagcatgctgattcatctgatattaccagtcaaaatttggttgagagatcacttattgcatactcttcagaaaacagcaattgcagctacattgagcatcctaatgggagtaattgtctggtgaatctatcttctcaaagaaaagatagcagaactgtagctttagggaaggatcaacacaattcaaataataattgtgtttttatggggcacctttataaacctcagtcctacttaaattactacatgcatggggactttgctgcatcagctgctgctaaattggctactcttttgccagagggaactcggaattctgaagcttatgcttcagactccaaaaaagcttcgtctgaaaactatttgcaagttaaagcattctcactaacagcctcacgtttcttctggccaacttctgataagaagcttgtagaggttccaagagagagatgtggttggtgcctttcatgtaaggcttctgtttcgagcaaaagagggtgcatgttaaatcatgctgccttgtctgccactaaaagtgctatgaagacccttgccagcatccgttccataaagagtgaagggattattgcaagcattgcaacatacatattgtatatggaggaaagtttatgtggtctattacatggcccctacatgaatgcaaattatcggagagaatggcgtaaacaggttgaacaagcatcaacgtgcagtgaattaaaacgcttcctgcttcaagtatgttttgttctttgatctattagcttttgcctttcaattttctgtactttgtattttgtggcctttcaagttgcatctttgtcccttatagatcaaaacttaagtttgatatctttctcttaagtataaattatttagatttttgaaggtctagttaagatttgcagtgtagaaatgtatacaatacagttaataagaaagtcatctagaatttgactttagtacttagttgatcataaacctagcatgcttttgtacttagttgatcatttactctgttattgacaagtttcccaccatttatgctaatgcacgttggacgaattacgaatatttttcaatttggtggatgccctttttttttaatgttctaaataataaaagcaatggttcctcgtcgaaattacaacctgttggacgcctgttttatctgcagcttgaggaaaatatccggatccttgcactttctagtgattgggttaagctcgttgatgattggttagttgaatattctgcaatgcaaaatgcaatgtccactgctggagtgacacaaaaacgtggtcctattggaaagcgtagcaagaagcaagctgtgatctctgaattgacaactgatggtagccataataaaagttttgtctggtggcaagggggaaagcaatcaaagcttgtattccagaaagcaattttgcccctttcgatggtcagaaaagcagctcgtcaaggtaactgctttaccttagtcttaacccttcccataaaaacaagtcattcaaccattcactgacatgaccatgatttaggtgaagacgtgcattttcttctcattagtgatacacaattaattggaaattaaatgtatgctttgtggatttctgtttataggaggttcgaaaaagatctctggattattttatactgatggtccagagattcctaaaagaaacagacagttggtttggagagctgctgttgaaatgagtacaaatgcttcccagcttgcacttcaggtttgttatatcagttgcattgcatttatactgtgttctttgccccctttctttttgtttattgttctctcatatttggaagcatttagaattataaagttcagaactgaacttttaatacttagattaaaattttgatcaggtcagatacttggatttgcatgtaagatggagtgaactcgttcatcctgagctaaatatcttggaggggaaaaatgttgatgccgaagcttctgcttttagaaatgcatttgtttgtagcaaaaaagttgtagaaagcaaggttacttacggagttgcttttggtagccaaaagcatcttccttcacgtgtaatgaagagcatcattgaaatagagaaaagtcaggatggaaaggacaagtattggtttcctgaaaatcgtattcctttacacttgattaaattgtatgaaatgactgtaagtgaaaggtctttgccatcggttcaggggcattttaatttgcttacaaagagaaaacagttgaagcctcttcacagagacatatttttctatcttacatgcaagagagataatctggagttatgcacctgtatttcatgccatcgagatgttgtagtccagtaatcattctcacctcaatctcttgttttcgttcttctctctcttccccagattcacctaagctcatgaattgcttttttgatattttcaggaatgttgtcaagtgtagcatatgcaaaggtatgttatattctcgctaggatatcaattttgtctttgtagatgtttatgagggacttggatatttggttattgttatatcagaaatataacccaaacattctcagaaatactaaaaagattcttttctctttttgtcaaagcgttcaaagttgcatatgtataaaatagaattccttatgaagtgcaagtttcagattaaaacaacttgttacctcgaacatagagatgcttgactactgagccaggaaaaatgaaagtaaaggaactaaataaacataatcatatgattctctcactacctccaggttactgttcccttggctatctatgtttttaatcaattagaagtgtaaaacatcctctaacttggatgctcttggtcttaaatgcaaggggaagcattgtttttgtgcatttgtgtttgaactcaagcttagctggattttttttccttcaaaaaggtcactgtagaaagggtcaaaattggtgtaaaaatatatacagttttggttttttgagttaagcttattttattttgcttctattgtaaaccattcagttctgggggagtattaaacgagctaaggttttatctgtatggagctacactttgttttgtataatgtttgttcctggcaagtgaaatttgtcactgataggctttatttttccgtggttatgtgagctttgtcattttgtattctactctactgatgacttatttgtgccatattttgcaggttcctgtcatggtgactgcacaattactacatcatttcctacgaatgaggacgttaccttcctcacaatgtgcaagcagtgccacggaaagaacgcaacttgcaatgaatctccaactagtccttttcagttggaagtggcagtgtatcaaaagttgatgactgccaataagggatccagggctcgggacactcgtccagaactcaaacaaattgcctccgaacctacttcaacagcgaaaaaagctccgaaatcatcttctgcagcgaaaaaagcttctttcaagtctacttccactgcaagaaaggattcttctagatctacttctgtggcaaaaagtcggccgaagtcaggttcttggggtattatatggaagaagggtaatttagagtcatgtgaggccagtgttaatttcaggcataataacattcttttaaagggtggttcaggtgtgcatagaaaggatcccttgtgcaatctctgttgtaagccatataggccagatttaacgtatttgtgctgtgaaacatgccagagtacgtatatattattactgccttattgttttcttttttatgtagtgaaagctcttccattctctgatttcacatttaacattgagaatgattgtgttctttttcagaatggtatcacgccgatgctcttgaattcgacgagacaagactctttgatatggtgggcttcaaatgttgcaagtgtaggaggataaaatcccctgtatgtccttatgcagatcctaaacctgggagcaaaaaaaaagaccgaaatattctttattctaaactaagtgaagctgctacacctgcacctcgagttccaaaaatacgcttcacgttgaagcagcgagagcgagaaagttctggagtgggctccaaccctgtaaccatttctaattctaaacaaagtgaacctattactccaatgtttccgtcggaactagtgtcccaacctaatgatcctcttcttcttcctctaacgactgatgctcagttaataacggagcctaatttagaaatggatacaggtaaggcagtgccacataaattaccagtcaggaggcaaatgaagcatgaaggagatgtcgacatttatccagatggtaatttttctgatgttgaagcctaccctccttatcaaatggaaaaccccatggaagccacagatgttatgtcgatccctccttcggaatggaatgcttctgtagaattggaaaatattgaagaggaaatattgtttgatgatttagattatgggaatctagatttcgaaccccaaacactattcactttctcagagttgctgggagttgatggttctgtggatgaaccaggtcagggaaaaactgttggcactaattcttccaactacgtctctgaacagtacggaacaaccacttcaaacgatgaatcaaagaccgtaccgcttgtaaaacctcctggaaaatgtaatgtttgtatgcaatcagaaccgtcccctgatctttcttgtcaaatttgcgggttttggacacataggcattgtttaactccaacagaggcatcatcttgggatggcggcgagaaactatgctactgtcaagagtggtcttagttacatttttatcgattcccaaatgcccacagagacaggttgtgatctttgtgtcgaagaatcttcaaacgacagataagataagccgacacaagctgaaaggcaagcttttactgtatcattttgaagtggttattcttttttcctattgcatacagaggcctgtttgatcatcatgtctttgttgataatgattttccttcttggcaaagctcattgtaggttacattgcgatttttccttccctccgggacagtttaggaaatcgaaaaaggttcactagtagttattaggattgtaaggaggccattgttgtttttaaagctacaaatcaaatattctctgtgatgttggaagataagcaaatttttttgatattgtgcttatctaactgaaaaaaattgcttgcaaatgaaaagatgttccatattttttctcctccttgactgaagatcagtttggagtgagagcattctacagagcaagcttcttatttattttctatattttaattgtagttgtgaatgtattctatatttttgattcaatgtggaactattttgtcttattttaaaggcaagatgatcttctattctcaatggattttttgttattataggttaattgattatcacaaaatgataattatagggttaaaaacgcatatgtagtaagatacatatcttagtcaaaaaaatgggataattccaaaataacataaaaatcgcaaaaaaaaaaaaaa

SEQ ID NO: 162207 - DNA, 1585 bp, Cannabis sativa
atatatataatgtcgacattatagttggacatatatacatcatttagtaattattgatgaatcgtacaagactataagaatatacgttgttattttgtgaatatagaatagttaccattaattcatgtttctttttaatatatagttaccattaattcatgtaaaaacttatttatctgtgtaaaataatcgactgacctacacatttgttttccctagacagaaaaattaaagtagataataaataataaacaagttattaataactaaagctaataattaacaacctgaatctttgatataatgtatgttttttacatatggatttttaattgctttcttatagtggttaatatttttatatttaatttgttttaattagtatcactactttcttttcctatatatggatccatgactcagaaagctccctaaatgtactttttctttctttttttctttttttgaatggcatgcatatatatatatatataaatataattggactttattattattactattataattttatcatcataaagacttattatagttctgaaattcgaatgtacattcatagattcatatcgagaaaaaaagcttaacctttgcaaagttgtagtcaactatgggatcggtatacttttcttcattgctaagatgtgctttattatttattcttcttctctttttaataatttttatttttccatgaaatgtagaccaaacaccctttctttctaaattctcactcgaagaaagtagtcctaattttcgtctttgcaaattacattgcttcaaaaaccagtaacaatgtttttttttttaatcattattattatattatggatctagaagactagctagactaaatcattaatgtatgtcttatgctgtttttacacatgggtatctcacaactcatttaaatttatatatatttatatatatagctcattattttttaatctattacaatcttttgaatcttaaaatcacctttatatgtcttagcttagctcttgggtataatgacacttagcaaagaaatgatataattaaatatttatgttattttatcatcaaaatttaaaggaacctattccttgtacgtagtgattaattaagaataaaatctttttctttttttgatatatacataacatatgctatatatctttcttttgttatggaatcgacaagagtcgagaactatgattgcacaacaaatttttaaggtctaattaattaaagcccatagttaattaattagattatttattgtgatcaatattgaagcatttgggtatcatgtgtgataatataaatatatatatatataaatgaaatttgtttgacattggcatataaatataaatatatatatatttgcccttgtgtcaaacttcaaagagaacctttttctttttcttgggaaaaaaagttaacattagcttaacgcataagaaagtttcgtcaatattgagttacgtagtactatagtcaccctagcttgcatatattaacacttaaatgaaaagataatttattccatatactatttctttttaatttttttttt

SEQ ID NO: 162208 - DNA, 3207 bp, Cannabis sativa
  modified_base (1893)..(1894): a, c, t, g, unknown or other
cagctaatagatgaagtgtaacactcacagggattccaccaacttttgttgtataatgatcagatggttcacaataatcatcagcccaaggtccaggcatacctagaaggatctcacccatccttcagttttaggcaactgtaaaccatataatattaaagaagagcattaaatctcataatatgcttgataaagaattaaaaagcaaagatgactttagatcttgtgcaagattggctataatagatactatgtctactattctcataagaatgcttccaacataaatcactattatgatagaagtccataactacacaaaatattcagctttttgctaaagaatgaaactcaaaaacacattcaacattgcaattttcaccatcaataattttaaaaaaaaatatcccaaatgatataattcatgttttttctactcactagacaggaaaaattaatcccaaatgatataatcttaaaagacataaaaaaatcaaaacttgcatgttcacttattctgggaaaaaatataccagcaacgcagaaaagagattttaatattcatatacatcattttaatagggcactaagttctgagcttatatactacttaagatggtgcttttcaatatgctttctcagacaagtaagggccttttaggcattattttcagttttcaaatatgaaaatagaatagagaacaccgttttcttagttttcaatattctttcatcataaccaaattcatatcattagttttccatctggcttcaactatagaaaacgatttagtggagagggatggctatttatttttaaatataacaaattactactcaaacaattgcatcaatttcatgtaaatgtcaaaataagaaattcttgtcaataaaagatgattacatcattaagaatcaaatcggtataacagtgagactcaaaagaccaactgagacaaaagtcgaaagaacttaccaatgcgaacaggaacaggaacaggacagctgagagagaggaaaggcgaggaggtagctccggcgaaccagtgaccaagagagagaggaaaggcgaggaggtgagccaaccacgcttcaatggatttcagtttcaggcttcagagaaagagagagagagagagagagttaattaggtttgggggaattttataaatatgggaattgagggagttaattaggtttttttattctatatttttgtaaaaaaaaaaatagaaatctcgtatttataaaataacaataaatttttactggaaaagttgccggaaaagtcgttagtatggaaaaatcgccggaaagttagtgttgttggaatagtcactggcaaaatcaatgtcggcagaaaagttatcgtcgtcgggaaagttactaaaaatgtcaccagaagtaaatgtctcagatttaactaaaaatataaccgatattccaaacaaacaagtagttagctattgttaataaagatatagatattgtaacattatcaaaatacagatatttgttcatcttgccttacaaggtagtaagatttgatcatcttcctatgaaattaaatcaggtatcttgcctgtaagtctaatatctaatgcccatctacacaagttatagaaaaaagaaaataagcaatataaagaaggaatctctccactaaccccacaattgttaataccactgtcaagtaagcaatacaaagaaaaaaattaagatttatctcaaatataatatattattatttttaataattataataaataatgtcacatataatatattaaaatgataaaaaataatgtcacatatagttaatttattattttatttaatttatttcgaaatataatatattattatttttaataattataataaataatgtcnnatatagtaaaaaaaatattattgtaaaagtatataattctttaccataattatatccgtatgtggtaagctcatgtaaagttttcataatattaccgaaaaaccattctcttgtctcgtaatggacattctatttcggtcctaaccccacaatgtgttcagtctcctaatttttagcataattggttatttttggatgttaaccgatgtgtatttttttttttaataaaataatgttatgttaacagaatgtgtgttttttttgaataaatttttgttaaaaaaataatataaattaattgggattattctgttaaagttaacggaggaaacaaaacaacattgttaaactaagaattgtcgttaaatagacacttttaatatataaagatataattaaattaaatttttttatataaaatatttaaatacatataataatattataaaattaataaagaataatacatataataatgattgagaaattgaaaggtagattttaattttaaatattaataatcaaaacaagaattatatcattttagttattatatcttgtcgatatggagagaacctttaaaagagtaatattcttcatgtataacccttttatctcttatatgatattatgccgaaataactgtaaaatgctccttaattttaagatcgaggtgcaacatcaacgaaatgttggacaaagaccaccacatgtatttcgcgatggatttcttaagatctaactgcatctgtagatacaataacctaacaacattctatataaaattaaaatatttgtacttatcaaaacaaaacataatacaatatctaaagtatgaatagtacaatatagaatgtattacatttgtgttttttttttttttttctttttcatatattacttgatttttaatgtttggcaaagatttcggataagtatatagtagtaagtgtgtttatagtagtacttcatttgtcaatgtggaatctagagttgtgcataattggtttctctacttgagtgagtattatatgtgctctttaaaatatatatatttatatatttagtatataattataaaaatctaaaatatataatttttatcaaataaattatataatttttgacaaaatatatagaatatgacatttgttttaaaagtattacacctttctaaaaaaacaatttttacaccatgattctgatagtcagtagtcccgtgatctgtaaggggaaataccgggtaagttgtacaatcccacaccgcctggggaaggtcaagtaggataattctgaggctgtgtaggtatggg

SEQ ID NO: 162209 - DNA, 7568 bp, Cannabis sativa
tgcttgaagccttgaacctgggaaaaagcttgttacgtagcttgcaaaagtatatatgacttattttttctcttccattttcttaatcttagtgaccacattgatatttttacatgttgttgtatctacgagaagcagacttaaatcatgtaaaagaaaatctattgtatgatattatcaacatgacatgacatgacatccttgatgagcaaaatggtgcttgctcatagttagatttgatcactgaaagctgaacttggtataacaactgcatcacttgttatgtcacatctagttatccaaacccttgtagagatagatagcttaatcggtagtcttatcttatcatggagatatatatataaattatatgtatatgatgatagtattatcatatgggagggaccccaataagaagggaccaaaaaaagataattaactaaagatagaatgacaagaccattatcctaaatgccccttttggcgaaaatgtggctcattgaggaagccatgctgaactagcacgtctctctctctctctctctctctctctctctccactactatgttgcctaacctaaccccatattctacataaagacatcattaatgttgaactttgatctaaaaagagattgatgtgatgcgtctgttcgttcgtgatgagtagtgtcttaaagattggatgattagttggtctctcaaaatttaaattaaatatttgaaaacatactagaagagtagaagtactacttatttgttgacaaaaatagagataatttatccaatagataagagtaataaccccacataattactaactgtttcaatgtgatattttgtacggctaattaagatttttgctcctgaattttgacatgtatcaaatcatgttccttaaatttttaaggtcgttaaaaatgtctcttgaactattgatattaatagatttaaggatttttatttaatttcattcaattttactattttagtgatggtttatgtactaaatcatgctctctagactttgatatctaccaaatcatgcctctcgaattttgacatgtactaaattatgccctctgaattttcatccatgttagacttttttaattaaaattggaaaaaaaattcttaaatctaacaatctcaataattcaaggggcatttttaacgaccttaaaagttcagggggcatgattatagagcttctctttctcttgttcactctccgacttgactggatgtatgacgtcaccctctgatttattggatcgagctaaattgtgatgttagagtgggaatgtataatatgtgcattgctgttgttgctaaagataatcagagtaaggtgtgttggatgattacgacaaaacttgatttctctgacgcactttgtggtgaggctgcgacctgttgcttagctttagaaacgacaaccgagaaggggtgcaattttattattgtagaaagtgattctaaagtagttatcaattctcttaatgtggtggactattgctggaagattgagaactactcgaatcattgtaaaagcacttcttatttttttgtgggttgtgttttctctaatttatgaaccgcaacagtaaaagtacaactaacatgagaaaaagagaaaggtgtctcaagaaagctagataatacaactttaatacctgagaatgaaaacacatgagcccatcttaatcctactaacaaagcaagaacttcgacttgaaaagttgatacctaaaccaaaaaatacgaattaaataaatttagtaatttcatgaatgttgaaataagtcatttaaaattatgacatataaatacaattttaagagaataataatataacttattattaaagttcttgtatcttagcatgattaagtgagtgaaataaaaatacacctatataagataaatatataaaatttaattaatacacaacttaatgataatattaaattaaaatgagaattgttatctatatgttgaaaaatattctaaaatattattttataaagaaaaaatttatcttgatacatgtggagcgaatcatttgtcactgataccatcaaatcatttttaagataaacctaaaatgaaccaccatataaattatcaaacaagccacattaggtacataaatatactaccaaaaattgtacaaaataagtcacaacttacacaaaaataaatcaataaaaacatgatacaacataatcttgggtatcataataaattaaaattgaataatgaaaaaaacttttttaatacatcaaaacttaataaaattaaacagtaatacattaatctaattaaataacaaatcaaaatacaaagaaacaaattgaagacaagactatccataaccaaccgactatatatataaaagtaaaaaacaaaacatactagtgtttttattgctatctttaatgtcaattgtcttgctagtattttattttatttatggaattttattatcgttattacaaaaattcaaaaattttatttaaccaaaaagaaattaaaagtgaattaccgagtaaataatcagtcgttgtggcagtggtgatggtcgtttggactaaaattttacaagtaaactaaatagagagaaaactttctctcccatgagtgagatgttgggttcccgactgtgatatttcgtatctctttcctatttttgtgtgtgttgtttttgtctttcgatgggtgataacatgagtggtgctagtatggaaaatggagtctttgaccaggtcggcgaaggtaatattgaagagttacctttgcagtttatcgaagaggcatctttggagcttgaagctgattttgagattaatatcgaggtcgcaaaaacaggggttcgtgctaagatatttggatcccgtcctttagctaaaggaagagtcaaacagattctcaccggggtttggtctttgaagggtaaatggagaatgaagagcagaggggtacatggggtttcttctttgacctgttggaggataaggaagaggttctcaagcgtcgcccttggatcatcgcaggacaacttctgaatattagggagtggcctctcgacggtgcctgacattgtattctgatgaataaagcggtgtttttggtagaaattcatgggcttcctattccctatctgacttttcagaactctagtgtgataagggctaaggtgggtgagtttttagagacggatggagtcgataactggaccatagctagacggagctttctgaagctcaaggtggatattctgattgatcaacggctcctggcagggttctacctgagtataactagaggaagaaaggaatagattcagttcaaatatcggaagctaccgaaaatctatttcaattgtgggtatctggcccatgatagtagtatttgttccagggaccgtgcctttgcctatcctccgattggcaatgcagttcctctatatggtccttggattaaagctactgttcctatacgcagttgttttgacacataaggccctcttcttctccaggatagggctgatcgggcggtgaatactcaaggaattccaaatattcaggtgaatagtactgtgtctcttgaggcgcaaggtacatagacgtgtgttgaggccactacctcgaatactgaagtcgtacatacggttggtacaaatgaaatggctcagggccagaatttcgaaatgctccattgtgtgtgagacagttggtgtgccacctgtcattcttaagttgagggccgaggagcatccgatgaatcggttgggtaagaatcctattgacgatggtgttattatttgtatgatggcccatgttggcccagatgtggcccatgttggcccaagttgttgagagaccacattatgaggtttgcaaatctcggaccccacaccatcatcctgagcctactatcatttctgggcatatagagttgatggaggagatcacaaaaaagttgaatgggcctatgctgattgagggagtgggtccaacagaaaatggtgagcactggtttcatgctaaggtgtcaccttcttctttgggttccaaagcaagaaaaaagaaaagtcactggaagtgtttctcccatcattactctggtgccagaacattctctttcttcatctgacccaaaggggctggccgcttctttgggcaagtgcgagattgctcccttcactctcgggaaggagtcccctaagaaggattcctctggttccaagaagttgagaggtagaaaactgactaatagcaagagtaagtcagttctcgagaaggctaaagtcgacgatggcaacacagaagcaggtaacaattccactacttctttttctgagggaatctacttttcaaagttaaagttgatcaaaattttcaaatgggcgaggatgcgacccttatcaagccccccagtcccaatgagagctctttcttggaattgtcgcggtcttgctagaccagcgacaatccaagctctcaaggcttgggtgaagaagttaaagttggactgcttatttttttatggaaactaaggttggggtaattcagatgagtaatatttgcaaaactttacactttgagtacaacaattacattccctctattgggctggcgggggtatgagctttttttggaacaaaggtgttgatatagtggttacggagactcttaattttggttttgtgtgtacggtgaaagaccatgctgtcatgaaaatgtggtatcttttggccatttatggaacaccttatgatgattgtaaaagtgctttttgggatcatttggcggatactatcaattctcttgatggtccttgcgctctcatgggagatcttaatgttcttttgtctaaggaggacaagttgggtggtcgtgtttttacgtatcggaacggctccactctttagaagtttcttctctccattaggggagtagacttgggatttagaggctgcaagtatacttggcataacaaacaaagtaatggccatttaattaaagagaggttggatcgggttattgtggacactaactggttggctgatttcccttcggggggtgttcgtaatttttcgattacttgctctgaccacggtcctatgttatttgattcttctgtgatcaagccaaaaggttttcgtccttttagattttttgaggcctggttcaatgacccatctagctgggatatcatcaaagaggcttggactagttgtatcttgactgaggaaccaagaagtttggggaaaaaattaacagaactcaacatgctcttcgttggtggagcaaaaatgtctatggggagtgtgataatcggataaaggagttagaacttgagctccaaactcttcgatcaaaagaagctcatgaggttgacttgttggctgaggccactgttttactaaagctgggtgaaatttggaaccgaaaggaatctatgtggaaacaacgttcgagggagttgtggctctcacatggtgacaggaattcttccttatttgacgcctttactatggtgcgaagggagaggaatcatatttggaatcttaagagttctaatggcactctttgctcgaatgagagagaaatcagagccatcctaaatgactatttcaaaaatttgttctcctccaacggtaatgtctcttttaagggtttggattctttgattaatacttctatttcctccactgagaatctgttgctcacggtcgtgcgtgacatggaagagattcaatctcatgtctttcaaatgcatcctcttaaagcaccgggtctagatggctttttggggtgtttttaccaaaagtgctggagtttggttggtgacgatgtggttcgatgcattcaacagttttttacaacgggagttttggagcatgggcttaatcattcgttcatctgcctcactcccaagggtgttaatctagacagtgttgatcgattccggcctattgctttgtgcaattttgtgtataaagttattgccagaattattgcctaaagattgagattggttcttgatcatatcattgcccccatataatcggtgttccttcctggaagatggattttagagtcatccattctcatttaagagattgtgaatgttattaagaagaagaagaaagggaaatgtggcttattggcaattaaaatggacatgaataaggcgtatgaccgtttagaatgggggttcctcaaggttgtgatggagcaattcgggttctgcccacattttgtcaagatgataatgaattgtgtttttactgtctcctactctatcctacttaatggaagacctgtgaagaaatttcagcctagtagaggtattcgtcaaggcgatcctatgtctccataactatttattctgtgcaatgaagtgttttctcgtttattattccatgaacaaagaaggggcctgtttcatggtattcgagtggctcggaatgtgcctgaaatttcccatctcatgttcacggatgacaccatcatattttctagagcgaatctcaaggatgtggaaactctgaataggtgtatcaaaaggtttgaagattggtctgccaagtttgtagtaagcaaaaatcatgaattttcttctctagtaactgttctactaatctgagggagtccattgaaagcaatttgaggattgggagtatttgtgatgcggagaaacatttgggtaatccgtttttatttgggcgtagcaagaggaatgactttaatttcctcaaaataaagctctgcgtaagattggagggttggagactcaaatccctttctaaggtcggaagaatggtttatattaactcggtggcccttgttatgccgacttactctatgtctactttcaaactccccctcttgtcttgtagagaacttgatgtggtggttaggaggttttggtggaatggatcaaccgagcctaagaagttttgggctgccataccgtggaatgccttgtgtcaaccaaagcagatgggtggcctgggttatcgacatttcgaagatataaatcatgccctcttatctaaacttgcttggcagcttgcgagtaaggtggataggccttggtgtaatgtcttcaaaggaaagtattttcctagagattctttctggagtattcaagagaagaacactgagagtttcatttggagaggcattttgagtgccagaaacactattactgttagggcttgtactattattgcatttggggaagatgtggatgtttggtggcagccttggataccctaactggattatgagcaatttcacgaactgatggaaagcattagacccaaagcccccagtttaagatgtgtgtctgacctgatgtttcggagaacaagatgctgaaacttgggttatctatgtttcctttttggtgctgaaatgggcaaacaaattgatgagattcagatcgttaagaatgttgattgtgatactctcatctggaaagagtccttagttggaaaattcagtgttaaaggtgttgggttttatgccctacttattaataaagatcagaaa

SEQ ID NO: 162210 - DNA, 875 bp, Cannabis sativa
cataaacaaatcagagttaattatttactttttatatgtgaattttctattataaattcattacttcggcattttaatgtattttggcataaacctgacaaaccttgatcataaaagattatgttatgacctactttttcattatctaaacaaaattaaattagatgacacgattaaaacataaatttaaaaatgtgataaaattgagtatagataaaattatgttttttttttttttgctagaaaaaagaaatcgtgtggtgtagatttcgtctccatccctttggccttaaggtaactccagagaccacgtgctagctataggagtcttatatatcatcctgcgttacttgggtcatcaatacttacatctcatgaggattcctatcccaaatatagcccatcacatagcaaagttagccttcaaaggccaagtataatccctcgtaattgaggggtcaggtaagagtcgaactcttgacccaaacaagggagtaggctaccactataccacacaacacatggttatagttaaatatgttctttgagtaaatttatatatagaactatcttaaatatatgatcactacactgaattgcgtaattttttttagaacaatgagttgtgtaaatggaagcttcatctagtaattaagtataaaaagaaaattgagtcatttgattgaatttgtcagattgagtcctttaattcgctcataattcactaagcactcaatgtattttatacgtacaaaaattttcttttaaattttttttaactagtaaacaactcgcgctttgcgtgcggttatatattgtttaatgatgattgagtcataaaaatatatcaaatttcaaattttgatattttttat

SEQ ID NO: 162211 - DNA, 900 bp, Cannabis sativa
aaaataaaaatttgaaactaataatgtaatggaccttttgattagcaattcccattacaattaattaaattcggtaaaaataatttgttgtacatcccgattattattattccattttccatctaaatttcttacaaatacaaagaattggcattgaaaagtatataaacatattattaatgctacaataactaactagtacgaaatttatttatatattgagcttttcttcgtctctttttcctttcaaactgtcaaacactgtataaattaaattaatcagtggactttatgagtcttaataataagcagtaagttagctgcaacccaatagtgagtgtttatgatatgatatacagcattaattacgaattgcttattgtaacggctacttttgtgttttttttttgaaagctagttttattatatattatatatttttttaaaaaaaaaaataagataaaatttgtgatagagcccagcttagttgaaaaaggtcataaataaaaacgcctgttatgcaaaagtagaacacaataagttgtggaattgaaggaataaagaaattgtgaggtactgaggtttggttttaggtaagtggatggggtaaagaggttgagagtgacagcccaacaaattaacattattagaagcacatgactgagtgatctcatttggatatataatatagccccagttatttgagatttgaaaccaaaactaaacctaaaatttccattgtataaaaaaagtaatttgtagcataaatattaagtttaatttacggttgcagataaatatttaagtttaatttttgacggtaatacttaagttatatttctgaaacttccgtacctagtcaatgtcgagttacatacgaaagtttcaaaaatataattt

SEQ ID NO: 162212 - DNA, 5511 bp, Cannabis sativa
aaagatctttgagtcagactttgatggataaaaagtttctacttgcgttggatgatgcatggaatgaggatcctttaaagtggcatgaatttgcagagttgttatttgtgggttctaagaaaagtaaaattatagtgacaacacgaagtagtaaagttgcttccatcgtgggtggaacaaaaccttatgaattggagggcctacctaagaaggattctttgtctcaatttttcaagtatgcatttcgaggtgaggaagaagcatcaaaatatcctgaactccaacaaattggtaaaaaaattgtgaaaaagtgtagaggggttcctttggcactgaatgccttggggagtctacttcggttgaagactgaagctcgtgagtggaaaattttcagagacagcaaaatttgggagttggaacgtaagcaaggtcatattttgcctgcattgtgattgagttacaatgcaaatgtctccatctttgaaacaatgttttgcttattgctcaactttcaaagaggatagtttgatgtcaagctttgatttgattagtattatgatggtacttggaatccttcattcacctaacaaaaaagttgagttggaagatattggtagatcatacttcctagagttgtggggcacgtctttctttcaagctaatgattttagtgatgatgattttgaaatcaaccaaaattttagagtgcatgatttaattcacaatcttgcatgctcaatcacccaaacccaaagagactgctctattgtaagttctaacattggagagatttctgatagtataagatatttaagaattgttatcaatgagaacaacttaacaaagttgagtaagttaaagaaattgaggagtattcatattgagtgtacaggagatgagaatgatgaagttgtgcagttattcctttctacatgcatctcaagattcaagaacttgcgggtgtttgatttggttggtttatcttttaaggtcctgcctagttcgattggagccatgaagcaattgagatatcttgacttgaccaataatgaaaagctgaagagactccccgattcaatttgtaagctgcaaagtttgcaaaatctgtctttctggatgtgaggagcttgaagaattaccaatggaaataggtaatttagaaagcctaaggattcttggattaaccacaaagcaaagctttttggcagatggtggaattggacacttaaagtctcttcgtttcttgggttttaagggatgtgaaaatttgaaagccttgccacatgacttgagaaattgtactacattacgtgttctattaatacttaattgtaaagaactcgagttggcaagtgaatttgttaatgaagatgttcagctgagccttcagacatttgcgattgatgagttaccaaagacaacggatctgccccaatggctgcaacaagctgctaagaccctacaatatctacatattgaagattgttccgaattagctacattgccggagtggctgccaaaactcatgtcacttgagaagcttgtgattagggattgcccaaaattattcactctaccagaggggatggaaggcctcacctccctcacacatttgctgattgaagattgtgatgcactacagaaaagatgcaaacaaggacaagggaaggattggcaaaagattgctcatattcctaacctttctattgatgattatgatggtgatgatgatgagaaggagaaggtacacttctagttttaattagtcacatttattactgatcacagtcacatgttaaatttttatataagaagactcataaaagtatatgaaataatttaggcaaaatatgtcatttcaataataacatttggcttaaaactatcacatggatcattttgtcaagtattcatgatgttgtattctaataaaataatggtactaatgtttgttgcaatcttaattttttaggaaaaatcattaaaaaagtttctatatttataatagagaggaaatattacttttgttatatgtttataaatgtagaatatgtacacatgtagaatatattttacaatgaatatacaaaaaacacattttattttatttcatttttctagagctaattaataggtatgtttgtgtgtgcattgtgcaaattttccctttgccccaggagtaaatttgttttgctgaagtctaccattaagtgtaagaaatttgttcaataaagacatattctgtgtattattttatttcgtttgggtttttaagtgatgtttaattttttttttcagttatttcagtttttttaatattaatttaccaaaattaaaaagaaaaaagaggatatttgtagcaaaactacttaagctacaatttctgctatgcttaaaatcacaattttttgaggcgaaatctttcaaactatagtttcattttggtatttactattctgatggtgaccagttaaagtttaaacttgcttgtgcatgatagcccatatctggctgatgatttacttgaaagagtttttgatgagtgctcagatatcaaaacactcaagaaactccattccaagatcttttgtgaccagcatcttcattagaatttatcactagctattaagcttatgagggcggcttatgcagccaatggggaaacaaggattacccaccacttattggatgaaatgcctgtgaataatgttgtcttctttaatgtcatgatcagaagcattgtaaacaattacctgtatgatgatggtcttcttgttttcaaaaactctatagtacatatacctttgtgtcctaaaggcatgttcagcattccattatttgtgggttgggttgcaaattcatgctgctgttgtgaaaattggacttgatagaaatttgtttgttgggaatggtctagttttcatgtatgggaaatgtgataatttataattgggaaaggttgtatgtagagtatgttttatgaaaggtaggttaatacttagctcctataaaaggaagactgatggaattcacaacacaattcagaagcacagaagagtctctctcgaaaactagctctcatttcatcattcttctctcttacacacaaccatctcatctcattacatctcttttatacacaaccatttcatttttaatagtctttttgattaaccacacccttaccattcaccaaactacctatttaacgagcttctataaaaactaggctgcttatttaacaagtttttataaacatcaaactgcctatttttataactctgtatgaaaatcatactgcctatttcataaccttctatgaaaattaggctgtctatttaataaccttctataaaaactaaagtgctcacaccaccttcaaacccgtcgacagtctatacagttcaccaagcttgttcatgaattataagttcatccatttacaatcctttttctttttacaaacataattataatgtctaatgcatcctatttatctactaaatactcacaaaaaaaaaaatctaaattaccaaaaagaaaaatactcacaaaaaaactaacctaatctaggttaccacacgtgcccaacattgatcatcttgtacaaaaatagatactatttgctcttgatctttgtaatcttttacattaatgaaaatgcggtactaactccttgctaccgtagacgtagaaaaataaaatttgatgaactacataaatttgtgtctcatctctttttaaagcaatgtatataaactacaaatatatatatataaaaaaaaaagatgagaggttcgttcatttatacatttcaaagtatttttttctatttatacggtaaaatttatataaactacaaatatacaatgttttatagtaaatgtcctaatcgcaacttacgcagcaacccaattcaattcgcaagctacatcgcaactcacacagtaaccctactcgatttgcagtttatacagcaatctaaatcgcaactaaaattcaacaaaaaaaaatgtgtaacttaccgaggtaatttcccaaaaagaaattaatgaaaattgtttgtcactcaataattaaaatatgacattttatctaatttccatacaacaattaaaattttaataattatctctcaaaaaaattaaatttaaataatttcaatttactatggaacacgacatttcatagcaatactttattttatttgtatattaaggagtgttaattacaacttcttgctacaatttcttagtcaatttttatgcccgatttcacatatcaaaatattttttaaaaattttttatagcgatattcattatagttataatatcatccttgtaaattttttaaaaattttaaatagtttatagtaccgaaaacagagaacctgatatttcaatctaccaggcacgtttaaaaaactttaaacctaattttagcactgtaaactattcgaaaattttcaaaaatgtatagaaatgatattataactataatagatactaccaaaaaaaattgaacacaaaagttaactaaaaaactataataagaggttgacggtaacacacatcctttgtttttgttttaaggaaaagtagaaagaaaaattcttttcttttactttagtttgtccaaattaaaacacacaaaaaaacaaatgttatgattaagggaatatagttagtgcggtcccagcttgtgaatgagaaagaccatcaagtccacaactgaaaaaacagacgaaattcaatagtctctactctctactgccttaacttctcatctttctactcttttgtttgataatggcagatttagcttacaccatagctggaaatgtcttggacaaactgggttcccttgcttatgaagatgttaccgtggcatggggaatcaagggaatgaaacaagatcttgacaagcttaagctaatcacattcgccctccaagatgtgcttttggatgctgaaactaagcaagaaaacaatccccagcttaaaaattggctctgtcaccttaaggatgtgttctattagagaacattgtcccacatggattaaatgtaaaagtattgagccatatataacataagctactccactcatcattaattggttatgagatggaatttcatgattctcaacatgttccaatcctcttgtttatcgttttagtgttgttcatcgagataagacaacaattagatgagattgctaaaaatatgacaatagggatatgtattaggctatttttagcctatgtttcgggtcacaattatatttgctttttgatgttttaggacagaattacgcttgttttctgtgttttcaagtttctcaaagctatggaagttccgggctacaaaagtgcagcaaaagagaagtggacccaaaaaaacgcaaaattaaggttcggtacacttctggccgcggcgaccctattcctggctgcggctaaatactctgggcagagagacagttttgagctaggtcagtagccgcggcgag

SEQ ID NO: 162213 - DNA, 3652 bp, Cannabis sativa
ccttaaattaaacataacatgttacatattttgaaatttcataaaatttgtaacaactgattttatgataaagtgttgtttggtatcatgtaatctatcaatggaatgttttcatgtttttcttcaagtcttagataattattactacaaaaaatgagattattatagtagaataataaaagtagaggtaaattttcttagactattcatatattttcttatatgatagaaaaaattgtatgtagtaagttactaacctggtgcaatgtagccataagaaccagcaacagtgttggaagaccttgcataatctccatcattaacaagcttagctagcccaaaatcagctatgtaaggttcaaattcaggaccaatgagaatgttgttggcctttatgtctctatgaactataggaggaacacaatcatggtgtagataagctaagccttgagctgcacccagtataattcgatatctaagctcccattccaagctgcaccctccagttctttcatgtagaacacttcctaagctcccattaggcatgtaatcatacattaacaatcttgtttttctgttccaacagcagcctaagaatctcacaatgttcttatggcgaattgaaccgagtgtcttcacctcagctgaaaatgaatctctaactcctccaactctgtcatattctgcagccattgtagttggccatagcttctttactgctatgacatctccattctctgtttcggctttgtaaacaatcccggaacacccttttccaatcacattctcttccactaaacactttagtacttgttcaactgtgaagttgagcttctgaaatggactgaattgccagggccacgattcgcaacccatctcagaatcgttttcctcactcatcatcatcatctttcttgctcgaaaaatagcaaaagcaccaaatgctgctagtgctactgtaagtgttatgagcaatgctatggctagtttcagtctgtgttggcttctgaaactgctgctgctgctgctgccacgcgcaccaattggcgcgccaatgctgatgaaacacgagtcttgacctttcgagcagagtccttcgtttccatctaagtctgttgttgataattgtctaaacagcttgctatcagggagatatcctgtgaagttgttgtatgatatgtttaaggaaacaagattttcgagccccgaaagcaccattacctctccttcaagcttgttgtgtgaaatgtctagtactgatagcttattgagagaggatatttgtggtgggatcatcccagatagagcattgaaactcaagtttagagcaatttcaagagattgtatttggaaaagctcaactgggattttgccagagaggttgttactactgaaatcaagcaattgaaggcttgaacagtgaccaagagagattgggattgaaccagacaatgagttttgactaagaataagcctattgagtgtgacaagttcaccataactatcaggaacttgtccaactaactcattaactgaaatatccaatacttgaagctttgtaagataagataaagagcttggcaaattaccttttatggtattgttgctgaggttaagcaactgaagattagtgcagttaccaatctcatcaggtactgatcccgaaaggcgattttcggacaagtcaagaaaactaaggttactcaagaacccaatttcacttgggatttcaccattgattctgttatcagaaagcctgagtctaataagagaactacacttaccaatctcaggtgggattgaaccagaaatgtgattagaaatgataagaagcttggtcaaattctgaagctcaaaaagaccaggtggtaagctaccagtgagatcattgtgtgacaagtcaacagcttcaaggtttgtacaatcagccaatgttgatggaatacttccttcaagtttgttctgccaagccaaaaacactataagctgagtcaaaaatccaagctcactaggaatggtccctgatatttgattagaatcaatctgtaactgcatgagattagtagcattggaaagtgaagatgggattgaaccagagatgttattactactaagcataagctcttcaagattagagagtttcccaaaagactgaggtatacttcctgagaaagaattcaatgaaagatcaattgaaatcaagcttctgcaattcccaatttcctcaggaatagtcccaccaaaactgttttgccataacaacattttctcaagcttttgaagctttcccaactcaggtggtaaagaaccagaaagatcattctcataaagaaacaagtcaatgagttctgaacagttaccaatatcaggtggaatttccccagacagcatagtagtgtaaactgataaagtttgaagctttattagttttcccaatgatttaggaatagagccagagattttagtatcagcaagacccaaaaccttcaaattctgacaatcaccaatctcttctgggatttccccttcaatgtctttattaccaccagctctaataacttccaacttcaacaattttcccaactcaacaggaagattcccactcaaaaagttatcaaaaacaagaagattcctcaagttaatacagtcacccaactcctttggaatctgcccagtgagttgattagagttaaaaatcaaatcttggagatttttaagcttgccaacaccagaaggaatataacccacaagactatttgaactaacatcaataacagtcacttcagaccaatactgaatatcagaggaaataatcccagtaaggttggaattactaacaatgaacttttcaagaaaatgaagtgaagaaaaattggtaggaaaaggtagagccaactcaatagactgaatattaatttgagtaacaaagttttgagaagaacagttgatataagaccaactacatggatttgtgtctgaagggttccaatcagaaaaagatgatgaaaatgaaggagaagaatgaagccatgaataaagtgtaagaacttcattatttgcagaaacaacattagtagtagtaatggtgattaagaagaggagatgagtgtaaatggtaaagggtttgattaacattgggttgaagagtttgttatggttatggatatggatgatcgaggtggtaagcatcggcattgtcaataatcacctcaaaaccttaaccagtttcacttggttttgcattgggtctctctctgtctcttttgattcttttcttaaactctactatactaattcttagtatatgacttatactaactatataacataatgcttaatgcttttgagtcaagcaacaaaagtaaagaaagaataataaataaactatacagattttcgagccacacctaagacctaatacaattatatattatatagagtaatttataatgaaaataattaagtttaatttttggttagagataaatagttaagtttaatttttaacgataataatacttaagttatatttttaaaacttctgtaaatattttgttaagtatcaagttattatggacaatgtcccacatagaataaatggtagagaattgagccatatataagaacatgggctactccactcatagccaat

SEQ ID NO: 162214 - DNA, 2175 bp, Cannabis sativa
ctacattttagcattataaatatacaattatttgtaaaatttccattggtttttttaatgctaaaattttatcaccgtctgaattagtttatatgtgcatgttttggttaaaaaaccatcagtctgagcgataagcctgtgtttttctccctcttggtctgggatttagtccagactggattacagtttttgcacaccccaaagaatttagggtacgtttggtgtggggttaataaaatggaaagaaattaattttttttccgttcctttgtttggttaaatcaatttttatttcatttttttgtttggttgcattttaaagcatagtaatgtgaatctaatcaaatgactattccatccaaaagtgggagtgaatttcattccaatgtacaaataaagaaagaaaacattttcttacttatattaaattttattccattctttttctcttcctcatttgtattcctccacttctattacaccaaaccaaacaaacccttacggttttgtgtggctactctaagaagattcagcgtgcgcgcacacacacacacaaatctttttaaagagcaacggtaacaagtgtattaagtcaaatagttaaaactttaccagccatcaatttcagttcttacctattctctaaaggaggattgatggcgtcatcataagaagagaagttcattatatgttaatttgtgtatctcttagttcatcctaaaggcttacaggctcaacatgcatgcaaatatatcccttctactgtcacctgacatcaatttctggcagttgtgcgaattgtatgataatgactgcatatttgataaatttgcttgctgcctcagtggggatggaatgcattatgcaactgggtcttacaggtttgtcttttttcttcgaagcttcagttgcattgcatccttaatttatgatgaacatggctagcaatcaacttttgatttgcccccaaaatgcagcttctctgacacaagtgtttctaattttaaattagcaatcatttacgcattttctcccatggtgctggaagtgatgaaggaatcacaatagaagctagcaagcatcctgtcaggtgggttttttggtttctttttctctactttttggtttccaagtagtagtttttaggttgattagttagctttccaagcttatgtttgataaatgtttatgccatccagttcagctgtttgtaaatgggaaaatggatttcaagtattaaccctttattcataaggatatttctcaaccagttgccaatatgtgcaataataaaaatgattttaatttgaaattttagttaaattgattcttagaaagttcttgattctagtttctgcatctatcatcactcactttgtaactgccaaaatgctcccacagcaattttacaaagtcaattttcatttgctttctaaacttgatagcagaaagccagttttgcatgctgctccaaggactagaaggtcttctttgagcaatctgacgcgtggattttaccgtcatggttagaacccttaaattcaatctcttctaacacccttgaattatatgataattaatttatgtactcttatattttcagggaatgataattcaagttcaggaaataatgacttctcgtgtaacttaaattccaagttattacatctagcatggcatccagaaaaaaacttgattgcttgtgctgctgggaatagcctgttcatgtatcatgcatagattcctttttgtacagttacaattctgaaagtgtttgtagagagggagagcattaaagttcactcagcttgagatgatgagagaaaggtttcttcttcttaaatatttaacaacagagaaaataaaaacataaaaaaaaaaaaaaaaaaaaagtctacttagaaggttctgtgttgtggaaattaataatgttaataaatcattgtcaaaaaaaaaaaagtgggtatgctcatttggtacccaagcactacaagataatattggttttgatcttatattttttttttttttatggttaattaggatttttacctcctgaatttggacatgtaccaaattataccctctggacttttaaaatcgttaaaaatgtttcctgaactattgaggttgttggatttaaagattttctttttcaattttagtaaaaaagtc

SEQ ID NO: 162215 - DNA, 896 bp, Cannabis sativa
aaaaaaaaaaaaaaaaaaaccgtctcaccatagtgtgcacagttcttctttactcttttttagtgtgaaaagaatttctccctcgttcttattcttctatacataaatacatatattcatcctcttattaaatactcaatcatatgtctaaaatgttattcttctattcagtcttttttttctaaaaccatgagaatgaggtggctctaatgttattatcaatgacttaaaactacaacttggctgaactgaactgagaatgagatccaggtatacctcctgcagatcgaatacagaattaaaaataaaatttttttttagaaaatttacactaagtacgtaaaattgtactttttttaaacttttttatggacttacgctttttaaaaaggaaaacaaaattgttttcatattgtcgcaatattatactatattaacgcaacataaaaacgtgtaaacatcttttaaagaacaacctaaaaacaacactctaaattttgattgtttttgggtatttcataaataatcttttttttttcttcaaatgtaataatttaattaggtgtttgccgttagatctttccaaaaaaaacattgaattaaatgttggtaattgaccagttataaccaaaccatccaaagaagaaatatattcacgctttttttgcatagaaagttttggaaaaatccatacaccacctatttgtctcaacatatatttctgagtgatttcagtgataaaactaatgttcaaacaatttatttttatcaaatataattatgtaataattaattagatgtttgtgggtatatcttttcaaaaaataataataataataataatcaaacggtatttgaccaattacaatcaaaatacacataatgatgtggcaaac

SEQ ID NO: 162216 - DNA, 6511 bp, Cannabis sativa
actaaagtgcaatttatcctaaaagaaaaaagatataaaatggcaaaattgcaaaagtagattgaaatcagagctttatctttaatggagttagtttatctgttgggatctctcatctccactctcttcacttccctcttactctctctcctcctccccttccgtcgccggagccactcacactcactctccttctacaaaggtaccgtgtttcacgagcgccgccgaccaatccaccattccttcacctactccgttcgttacgccctcattgacctcgactctgcctcctcctccgctaattcactcccaaatcacctctccgccgatgaagctcgccggattgctgccactaatggccctgtgtaataatcaactcttaaattgttaacccttttgtttgtatggatttatgattgttatgtgtttgtgtttgtgtttgggtgaaaacaggtttcttttgacaatacctgaaagtgttggatatgagcaaaatccgttgagtatatattattgctatgatttagaagaagggtctgcccagaatttgaggaattgcattgctgaggttgattttctatttgttgattacttgaatgagtttaagcagaactattttaggtttaattgcatcatttctaaactgttctttgttaatttaagagtacaattcacaaaattccattttgtagttgggttttaattgattctattaacttggtagttataattaattaagttaagaaactaacacaatactaggatggcccttttgagaaatccagcacacgacaccatgagataatattttgagtcatttaaggtataactaatggattgttagaactttacttttgaatgatctgttttactatttgttcccttgttgaagaaaacaaatgtttaaaatgtatttgtagtattttgcagcattttgggtactctcacattttcttttgctaaaatctagagcaaaaggaagagtagactatttcttatcggtgattcacaagttgtgcattttcagattaaatcgcttaaaattttagtttctttgtggatataagttagcatactctatcagtttgatgtttgattagttattggtagtgagttgctgaagactgtgacttcatttgctgacattgctgttggtttttggtttcaggtaactaatactccatggggtgagagggtgacatttgtttttaatccaaattctgatgtagtggcaaaaccgttgcatgtcagtccttttatggtatgttttagtagtaacttttctcttctatatcaacatcccgctcatacatagcattatgctaatgttcatagctcgttaccgtattttcatttcaaatatgcttactggaaatataactaattcacaaattctgtaaactcttttggtctatgttacatgcttagatgatttgcactgtggaattagtcattttctgtaagttgcatttgctctctagtaaattacaggaatacaaagaacccattcataattcttgatgagatctgtgaaagatgagaaattctctctattcttattgcatgatcttttgaaggaagaactatgtccatcttgagcattatactgctatttttctctgataagttttcatgtggttggtttctatctcatgtgggatatttctaagaattgaactgctttgtaagtttttccattaagaaaagaaaatactaggatctttggctatatagaagtaatataggatcttccagggacacagaatatgatgaggtacgaataggaagaaatttaagatttttgtagctgcttgcaactttaagacaaaggacttaagaccttttttttgtattcttagatggaccagaagttgatatcctactggcttttgtaaacctgtttcgatatggcgggatacttttctttctccaaccgaagagagaaaaccttttcgtgtgtactaaaacaatgtgtttattaaagacttttcaattgctgattcagataattcatgagatgtgcattaatgcaatgcagtgtgttgtctcgaatttgttcagtataaaagtgggtgtaaggttgttcttagtggccctggtccatgccaattatggtgaatgaccaaagttaactaatcaaaatctgtacatctgaagtggtagagaggcaataaattgtaactatattgtaattctacatggaaaaatctcaagtattcatgaaaataactgcaggatatgtttgggaattggaatatcaaagcaagtgttccgggggataatctatctgtggcgatttcagttcagcatccaactcttggcaactatttcactgctactttgagagccaagaaagttcccttatcgtccgtctctgacgaatcactttacttctggttgatgcctcataaagttgcagtatggatatattggcatgtaagtggtacttcaaaactcccatggcttttttcttgcacaatcaacaaaacttaaaacaactcaataactgagaatactttccatcgacggcatagctaatgaacttctgacatgattttgttttgtaccacatgttcttccaggccgtcaagctatggtggaaaaatgtttcatttattcaacatccaaagtattccaatccgacatacagggaagaagcgactcttcgcgatcaaaaacttcgatgctgtagtgtgccaggattgaatgatcatagtcagcatgtgcaagctgaaccgagtgaagattgtatcggtgacacaaactctggagctcgacgtttcacatggacagatgctaagtggccttggtcttaattcttatagatttgttctcccgaactatgacccttgtagagtttcgcaccctattttaatttttttttggttacaaaaatttgcctctgaactaaacaaatcattagaaatatctccttcagttccatttttcttatttctttaagctatttgtggatgtaatactaataaaatataacattaatttagttgcagttcataaataacagtaataattaatgagaatatgtatatacatttttagagttaatatttgtatgtttagttttaataaatttgacataaattagattgaatccaaatatgaaatccgtatttaatgcggattggatgttatttgtattttagtgtcaataaatttgacttcagttaaattagattaaattcaaatatgaaattcgtacttagtgcagattaaattgtacttagtgcaaattaaatgttatttaactaaaatagtgcaaaattgattaaatgaaaatggtaagaaaataactagaatgtaattgaaggtgatatttgtaataatttttatagtttaaaggaaatttttgcaataaaaaaaaagtttatgcggcaaaactctgcaaatgtcaaagatcttcagaatgttatttattataattcttaagaccaaacttaaaagccttgcaatttgtttgtgtaaagaggtttaatttcataagcccttccttacttaaatgtttggtcataagaattggaaggtcatattgccttactatttacataattaaagttttttgttagaaaaacaagtggaaagaaaatacctaacccaaaagtactcattatgaagtgcaatttttccttgtgttcttcatcaaagatcatcactttcaatttttacaaagcttaaaatacataactagtaatgatcaagacaagaggaattgtgtttaatattatagttttgtatttcttatgaactaaaagaatggacaaaatcttattgaatttgtgtactcttttggcagtgcataatttagttcctcaaaattaaaaatcccactttagaaaaatttacattgaaagttagaagatgccaattcaaggtaaagaaaaataataaatagaatttgaaacaaatgatcaaatacaaaagcaacacatcaaatgtaactacgaaaatcgtagttacaacaagaaatgaaacttcgtttaagactctttttacaatagaacttttttacaaaatcttgttcgtgacataaaactatccctcattttccgtatataattatctagtagtgtgtttatttacaagtaattaaaatgactaaagataagattcactacaaattgaattcatcctcaatcatattaataaattaaaatcaaaatgagttgttcacttgacttataggaatcaaaataagaatcaaattaaattacaaaaatactctttattaaaattttatttggattgtttttaaattttttaattgaaaaaaataattaaaaagggataaaaataacattttataatttcatgggacccatatatttcattcttattccttcacaaaattagaaaagtaaagaagaagatgatgatgattctctattccataacacaccttttaaactaataccaaaaacaaagtcgaaattccccttgaatataataaagaaagctaactactttaaatggtattataaaacttacaactctacaaaatatattttattaaaaaaaaaaagacttaatttagaaagaaaaaaaaatgacaactttatgttttgtttttttctcactattagtgaatcagcatgctcatcaataatatcatataatttttttgtttttgttgtcttgtgtacattatttttgacttttgaatttaaggtgttcaccaagtttagaagaaaagaaaagaaaagaaaagaaaagaaaaacatatgaatgttatttacgtattggccaagtacttttcttaaatgaaatataaagcatgggtgttattttctgtaccacatatcaaaaacacacatgtttatcttattttatatgtaactttattcttcttcctttttgtctcaacttgagtgtaggataagaaaaaattacactagtaaagactaatttcaattttaattttgttttgttactttttttttccaagagaaatttcaattttgtttacaaaaaaaagtatcatcaactgtctaacttagaaatggcaatagtatagattgaggacgatttttagattaccactctcattcagtcaattaattatataactatatattaatcagtaaattattagagaaaaattatgagtatttgtaacagtttacaatagctattatctaaaaattaattagtattttttttactctttgaactttcgacaatacttgatcatggttgttaaaaatttattttaaaatataacaattatataattatgtccattctattagattttgttattttaccattaaaaataagtatttttacccccctgaactttgatcaatataaaattttgctcttttttattaaaaatattaattttaaaaaatatattgttctattaattctaaagaaaaattaataaaaattataaaaacctatgaaaatattaaattaattaaaaaatattaaaaaaaaatcaaactacaattattaaaaattcaataaataatttaaataaactaagattttttgaaaaaaaaaaaaaaactaaacttgtttatatttataaactcatatgttaaaaagtaaaaaataataattaaaattcaataaaaatataaaattattttaaaaaatattacaaattaaactaaaaaataatattatgtttacttagaaaaatctagatttttgaagaaaaaaatactgtttttacaaatattaaattttaatatatatttttttatctaaatagtttgtttttaataaaaataaacaaattttcaaattgtttaattatttttaaaattttaataagttttttgcggctaaatcctttcaatgttttaactctctaaacttaaattttaatgtgtacattcttatacacgttaaacatttatattgaatcttctctattttacagttctccaccgtattaatgacatcattgtccccaaaatcgaaccttccacctttatgaacaaccgaagatccatttatttttcttgatttgtaagtacaaaattattgagagagagagagatggtgttacaaaattcaatattttttgtcaaaacttctttttttttcctctaattgattggttattcaggtcctatctcaagattaccctagtaaattattgatctttcatatttttgtaatttttttttgttatagaaagttgttcttccaattatgttgttttcgtgttcaagatggatcattacggttgggagttggccgtgcgacttgtttgtgcggaccatgcttgagaaacaagaaggagaaagatggagggaggtgcaaagagtaaatgctgtgaattttggtaaattttggattgaaggaagaagatgaggtgtgaagagaacgaagaagaatgattttttttttttatgatttaaaaataattattttaatttcgtttggttttaaattatttttaattaaaactatgttttggaccaataaaaaattgacatatgatattttatgggaaatttacatagtatactaacttttgtca

SEQ ID NO: 162217 - DNA, 1660 bp, Cannabis sativa
attattattatttgaaatttttggaaaaactttctaaaacatctactataactgcaatgagtacaaaccatgttcacaactacatataatctccccaaaaaagagaaataatatacttatattaattataaagaatctaaatttttaatattatttgtagtaggtaggcagtagcatatcccaaggctgcatgtgcgactgaggaaaggcttattagcatgcccaaaacaacaaacacaacaattttaatttccattattatagacgagtatatattaattaatgagatataccaaatatattttgttggtgacgatttttagaagtactgcatgccttcatcattttatagggaaggaataataataatgtgatgactttataagtcgattgattattgtgatttcaagacacatccattaacaatatttacagaaaaagaaaggataaatatttgtttctttacaaaaacccaacaaagttcaacccgtgtactcttatgaacaataccctctctctcaaggctatatgatatgcccttttcaatttatttttctttttctttccaaatttgtatatgtaatatatattttgaggtaaagacaatggactgttagtaactatattttagattgtagctgccaaatttgacatgtcaaaatcatatattgtattatatatgacagggtggtgtgggtcattttgctagaaaattctggtgagatggggttttatgtataatatatagatgagtaaatctgttgatgagattgtgttcatgtctacttcttggtatccattaatggccattgctgagtgagtttgaagccaaataagaaaagacaaggatccatcaataagtagatctctatctctttatcttaatgccagccaagataattttgtcccagaatgaatcccattaattattatgtagtaatgaaggttttgttgaagtttaatgtactataaatttaggttagtgtattttcactttgagaaatgccaaagggcaccagtggtgcctagcactttcctacgtgtcaatatcgctattggtccaactaagtatcgggttccatataatttaatataatagcttttagagagtatcgctaaccaattgcaactaagtcattccaccaacccaactatactgatctaatgattatagaggctaggtgaacacaatacagggtcgaccttgaattttattgggtattagaaaaataaatttttgaaattgtataaacttgtgaatctatgacattcagattactactatttgttttacctggataaaacaaacaaactatataccaagattcacattactattattcaatttaaattattttaacataataaaattattaaacgaaattaatcatgaatttttatatgtcaccttacatgtatagattgggcctacacatatgggccatagtccaagattaatttttcaattttatcataaataagatttattatttattacactaataaataataattgattaattttcattaatctcttatttcataaagattaaaatagatattattctctctaagataatatatttctctctttaatattatttaagaataatattatatttgactaattaatatagttttatccaataaaactaaatag
